(19) United States
(12) Patent Application Publication
(10) Pub. No.: US 2017/0335317 A1
(43) Pub. Date: Nov. 23, 2017

(54) Methods for Modulating ATRX-Dependent Gene Repression

(71) Applicant: The General Hospital Corporation, Boston, MA (US)

(72) Inventors: Jeannie T. Lee, Cambridge, MA (US); Kavitha Sarma, Waltham, MA (US)

(21) Appl. No.: 15/522,171

(22) PCT Filed: Oct. 30, 2015
(86) PCT No.: PCT/US15/58338

§ 371 Date: Apr. 26, 2017

Related U.S. Application Data
(60) Provisional application No. 62/072,962, filed on Oct. 30, 2014.

(51) Int. Cl. C12N 15/10; C12N 15/11; C12P 19/34; A61K 39/395; C40B 20/08; C40B 50/06; C12N 5/00

(52) U.S. Cl. CPC C12N 15/1093; C40B 20/08; C12N 15/11; C40B 50/06; C12P 19/34; A61K 39/395; C12N 5/00; C12N 2310/113; C12N 2310/1241; C12N 2320/11; C12N 2330/31; C12N 2310/531

(57) ABSTRACT

Methods and compositions for modulation of the activity of alpha thalassemia/mental retardation syndrome X-linked (ATRX), e.g., modulation of DNA-ATRX or RNA-ATRX interactions, and methods for identifying and using compounds that modulate DNA-ATRX or RNA-ATRX interactions, as well as the compounds themselves.

### CLAIM OF PRIORITY

[0001] This application claims the benefit of U.S. Provisional Patent Application Ser. No. 62/072,962, filed on Oct. 30, 2014. The entire contents of the foregoing are hereby incorporated by reference.

### FEDERALLY SPONSORED RESEARCH OR DEVELOPMENT

[0002] This invention was made with Government support under Grant No. RO1-GM090278 awarded by the National Institutes of Health. The Government has certain rights in the invention.

### TECHNICAL FIELD

[0003] This invention relates to methods for modulation of the activity of alpha thalassemia/mental retardation syndrome X-linked (ATRX), e.g., modulation of DNA-ATRX or RNA-ATRX interactions, and methods for identifying and using compounds that modulate DNA-ATRX or RNA-ATRX interactions, as well as the compounds themselves.

### BACKGROUND

[0004] Transcriptome analyses have suggested that, although only 1-2% of the mammalian genome is protein-coding, 70-90% is transcriptionally active (Carninci et al., Science 309, 1559-1563, 2005; Kapranov et al., Science 316, 1484-148, 2007; Mercer et al., Nat Rev Genet 10, 155-159, 2009). Ranging from 100 nt to >100 kb, these transcripts are largely unknown in function, may originate within or between genes, and may be conserved and developmentally regulated (Kapranov et al., 2007, supra; Guttman et al., 2009). Methods for targeting these transcripts allow for modulation of gene expression.

### SUMMARY

[0005] The present invention is based, at least in part, on the discovery that ATRX protein is a required specificity determinant for locus-specific PRC2 targeting and effects on gene expression. Thus, methods and compounds targeting the ATRX-RNA interaction can be used to modulate gene expression.

[0006] In one aspect, the invention provides methods for increasing expression of a selected gene listed in Tables 1 or 2 or 3 or 4 or 5, in a cell, the method comprising contacting the cell with a nucleic acid triplex-forming oligonucleotide (TFO) that binds specifically to an ATRX localization sequence or binding site associated with the selected gene. In some embodiments, the selected gene is DMD, and the TFO targets a sequence within SEQ ID NOs.7867-7900. In some embodiments, the selected gene is XIST, and the TFO targets a sequence within SEQ ID NOs.7957, 7959, 7961, or 7962.

[0007] In another aspect, the invention provides methods for treating a subject who has Duchenne muscular dystrophy. The methods include administering to the subject a therapeutically effective amount of a TFO that targets a sequence within SEQ ID NOs. 7867-7900.

[0008] In a further aspect, the invention provides methods for treating a subject who has Rett Syndrome. The methods include administering to the subject a therapeutically effective amount of a TFO that targets a sequence within SEQ ID NOs. 7957, 7959, 7961, or 7962.

[0009] In some embodiments of the methods described herein, the TFO comprises one or more of DNA, RNA, PNA, HNA, MNA, ANA, LNA, CAN, INA, CeNA, TNA, (2′-NH)-TNA, (3′-NH)-TNA, alpha-L-Ribo-LNA, alpha-L-Xylo-LNA, beta-D-Ribo-LNA, beta-D-Xylo-LNA, [3.2.1]-LNA, Bicyclo-DNA, 6-Amino-Bicyclo-DNA, 5-epi-Bicyclo-DNA, alpha-Bicyclo-DNA, Tricyclo-DNA, Bicyclo[4.3.0]-DNA, Bicyclo[3.2.1]-DNA, Bicyclo[4.3.0]amide-DNA, beta-D-Ribopyranosyl-NA, alpha-L-Lyxopyranosyl-NA, 2′-R-RNA, 2′-OR-RNA, 2′-AE-RNA, alpha-L-RNA, and beta-D-RNA.

[0010] In some embodiments of the methods described herein, the TFO includes one or more modifications described herein.

[0011] In another aspect, the invention provides methods for preparing a library of nuclear ribonucleic acids (nRNAs) that specifically bind ATRX. Preferably, the methods include (a) contacting a sample containing nRNAs, e.g. at least 10⁴, 10⁵, or 10⁶ different nRNAs, with (i) ATRX protein and (ii) a ATRX binding agent, under conditions sufficient to form complexes between the nRNA, ATRX protein and the ATRX binding agent, and

(b) isolating the complexes.

[0012] In some embodiments, the methods further include (c) synthesizing cDNA complementary to the nRNA, and (d) selecting cDNAs that (i) have RPKM above a desired threshold or (ii) are enriched compared to a control library, or both (i) and (ii).

[0013] In a further aspect, the invention provides methods for preparing a plurality of cDNAs complementary to a pool of nuclear ribonucleic acids (nRNAs). Preferably, the methods include providing a sample comprising nuclear ribonucleic acids, e.g., a sample comprising nuclear lysate, e.g., comprising nRNAs bound to nuclear proteins; contacting the sample with an agent, e.g., an antibody, that binds specifically to ATRX protein, under conditions sufficient to form complexes between the agent and ATRX proteins, e.g., such that the nRNAs remain bound to the ATRX proteins; isolating the complexes; synthesizing DNA complementary to the nRNAs to provide an initial population of cDNAs; optionally PCR-amplifying the cDNAs using strand-specific primers; purifying the initial population of cDNAs to obtain a purified population of cDNAs that are at least about 20 nucleotides (nt) in length, e.g., at least 25, 50, 100, 150 or 200 nt in length; sequencing at least part of substantially all of the purified population of cDNAs; comparing the high-confidence sequences to a reference genome, and selecting those sequences that have a high degree of identity to sequences in the reference genome, e.g., at least 95%, 98%, or 99% identity, or that have fewer than 10, 5, 2, or 1 mismatches; and selecting those cDNAs that have (i) reads per kilobase per million reads (RPKM) above a desired threshold, and (ii) are enriched as compared to a control library (e.g., a protein-null library or library made from an IgG pulldown done in parallel); thereby preparing the library of cDNAs. In some embodiments, the methods further include a step of crosslinking the nRNAs bound to nuclear proteins, e.g., using methods known in the art, including chemical or other crosslinkers, e.g., ultraviolet irradiation.

[0014] In some embodiments of the methods described herein, the agent is an antibody and isolating the complexes comprises immunoprecipitating the complexes.

[0015] In some embodiments of the methods described herein, the cDNAs are synthesized using strand-specific adaptors.

[0016] In some embodiments, the methods described herein include sequencing substantially all of the cDNAs.

[0017] In a further aspect, the invention provides libraries of cDNAs complementary to a pool of nuclear ribonucleic acids (nRNAs) prepared by a method described herein. In some embodiments, each of the cDNAs is linked to an individually addressable bead or area on a substrate.

[0018] In a further aspect, the invention provides methods for identifying compounds that disrupts binding of one or more nuclear RNAs (nRNAs), e.g., long non-coding RNAs (lncRNAs) or coding mRNAs, to ATRX protein. Preferably, the methods include providing a sample comprising an nRNA and ATRX, wherein the nRNA can bind to the ATRX and form nRNA-ATRX complexes; contacting the sample with a test compound; and detecting the formation of nRNA-ATRX complexes in the presence and the absence of the test compound, wherein a decrease in formation of nRNA-ATRX complexes in the presence of the test compound as compared to formation of nRNA-ATRX complexes in the absence of the test compound indicates that the test compound disrupts binding of the lncRNA to ATRX. In some embodiments, the interacting RNA is and lncRNA; in some embodiments, the nRNA is a coding origin (mRNA). Herein, nRNA includes nuclear lncRNA and mRNA.

[0019] In some embodiments of the methods described herein, the sample is a cell-free sample. In some embodiments, the sample comprises a cell expressing the nRNA and ATRX. In some embodiments, the sample is from a mammalian cell, e.g., a human cell or a non-human animal cell, e.g., a non-human primate, cow, pig, sheep, horse, cat, dog, or other domestic or agricultural animal.

[0020] In some embodiments of the methods described herein, the ATRX, the nRNA, or both, is labeled.

[0021] In some embodiments, the test compound is a nucleic acid, e.g., an antagomir, mixmer, or gapmer of LNA.

[0022] In some embodiments, the methods described herein further include isolating nRNA-ATRX complexes from the sample, and optionally isolating unbound ATRX from the sample, e.g., by contacting the sample with an anti-ATRX antibody, and isolating nRNA-ATRX-antibody complexes and unbound ATRX.

[0023] In some embodiments, the methods further include selecting a compound that disrupts binding of the nRNA to ATRX; contacting a tumor cell with the compound; measuring proliferation, survival, or invasiveness of the tumor cell in the presence and absence of the compound; and identifying as a candidate therapeutic compound a compound that inhibits proliferation, affects survival, e.g., induces or promotes cell death, or reduces or delays metastasis, of the tumor cell.

[0024] In some embodiments, the methods further include administering the candidate compound to an animal model of cancer, and detecting an effect of the compound on cancer in the animal model, e.g., an effect on tumor size or metastasis.

[0025] In a further aspect, the invention provides methods for identifying an RNA target for the treatment of cancer, the method comprising: (a) comparing (i) a library of nRNAs that specifically bind ATRX prepared from a normal cell with (ii) a library of nRNAs that specifically bind ATRX prepared from a cancerous cell, wherein the to normal cell and cancerous cell are of the same tissue type; and (b) identifying an nRNA that is differentially expressed between the libraries of (a)(i) and (a)(ii) as an RNA target for treatment of cancer.

[0026] In a further aspect, the invention provides methods for identifying a therapeutic target for the treatment of cancer, the method comprising: providing a population of nRNAs from a first cell type, by:
[0027] (1) providing a sample comprising nuclear ribonucleic acids, e.g., a sample comprising nuclear lysate, e.g., comprising nRNAs bound to nuclear proteins, from the first cell type;
   [0028] contacting the sample with an agent, e.g., an antibody, that binds specifically to ATRX protein, under conditions sufficient to form complexes between the agent and ATRX proteins, e.g., such that the nRNAs remain bound to the ATRX proteins;
   [0029] isolating the complexes; and
   [0030] thereby providing a population of nRNAs from the first cell type;
[0031] (b) providing a population of nRNAs from a second cell type, by:
[0032] (1) providing a sample comprising nuclear ribonucleic acids, e.g., a sample comprising nuclear lysate, e.g., comprising nRNAs bound to nuclear proteins, from the second cell type;
   [0033] contacting the sample with an agent, e.g., an antibody, that binds specifically to ATRX protein, under conditions sufficient to form complexes between the agent and ATRX proteins, e.g., such that the nRNAs remain bound to the ATRX proteins;
   [0034] isolating the complexes;
   [0035] synthesizing DNA complementary to the nRNAs to provide an initial population of cDNAs;
[0036] (2) thereby providing a population of cDNAs from the second cell type;
[0037] (c) wherein the first and second cell types are from the same type of tissue, and the first or second cell type is a tumor cell;
[0038] (d) contacting the population of nRNAs from the first cell type with the cDNAs from the second cell type, under conditions sufficient for the nRNAs to bind to complementary cDNAs; and
[0039] (e) identifying an nRNA that is differentially expressed in the first or second cell type as a therapeutic target for the treatment of cancer.

[0040] As used herein, “ATRX” refers to transcriptional repressor protein ATRX, the human homolog of which has an mRNA sequence as set forth in the GenBank database at Accession No. NM_000489.4, and a protein sequence as set forth at Accession No. NP_000480.3.

[0041] Unless otherwise defined, all technical and scientific terms used herein have the same meaning as commonly understood by one of ordinary skill in the art to which this invention belongs. Methods and materials are described herein for use in the present invention; other, suitable methods and materials known in the art can also be used. The materials, methods, and examples are illustrative only and not intended to be limiting. All publications, patent applications, patents, sequences, database entries, and other references mentioned herein are incorporated by reference in their entirety. In case of conflict, the present specification, including definitions, will control.

[0042] Other features and advantages of the invention will be apparent from the following detailed description and figures, and from the claims.

### DESCRIPTION OF DRAWINGS

[0043] FIGS. 1A-D. A proteomics screen identifies ATRX as a candidate XCI regulator.
[0044] (A) IP-MS: Colloidal blue staining of FLAG IP from control (293F) and FLAG-mH2A-expressing 293 run on a 4-20% (left) and a 6% (right) SDS gradient gel. FLAG IP was validated by Western blot.
[0045] (B) Left: Immunostaining of ATRX, EZH2, and H3K27me3 in WT and two independent stable ATRX-KD MEF lines (shATRX-1,-2). Sample size (n) and % EZH2 association with Xi are shown.

[0046] Middle: Western blot showing ATRX depletion but constant EZH2 levels in shATRX-1 and shATRTX-2 female MEFs.

[0047] Right: Patterns of H3K27me3 observed. n=100-150 per experiment.
[0048] (C) Left: Xist RNA FISH in indicated fibroblast lines. Right: qRT-PCR analyses of Xist RNA levels. Standard error (S.E.) bars from 3 independent experiments are shown with student t test P values.
[0049] (D) Left Immunostaining of ATRX and EZH2 in MEFs transiently transfected with scrambled shRNA (shScr) and two shATRX constructs (shATRX-1, shATRX-2).

[0050] Right: H3K27me3 staining and Xist RNA FISH show no change in the intensity or foci number after transient ATRX KD.

[0051] FIGS. 2A-K. ATRX is required for initiation of XCI during ES cell differentiation.
[0052] (A) Western blot of ATRX and EZH2 after stable ATRX KD.
[0053] (B) ATRX immunostaining after stable ATRX-KD.
[0054] (C) Representative phase contrast images of embryoid bodies during a differentiation time course.
[0055] (D) qRT-PCR analysis of Tsix and Xist RNA, normalized to tubulin RNA, during a differentiation time course. S.E. from 3 independent experiments shown.
[0056] (E) Immunostaining of EZH2 and ATRX at day 8 of differentiation. (n) and % with EZH2 Xi foci are indicated.
[0057] (F) Immunostaining of ATRX and H3K27me3 and Xist RNA FISH at day 10 of differentiation. (n) and % positive are shown.
[0058] (G) Left: Western blot of indicated histone marks in day 8 ESCs. Graphs: Time course of Xist upregulation and acquisition of H3K27me3 foci. n=80-120 per time point.
[0059] (H) Western blot for ATRX, EZH2, and CTCF (control) in transgene (X+P) cells and in the same cell line expressing shATRX (X+P shATRX).
[0060] (I) qRT-PCR of Xist RNA before and after doxycycline induction in transgenic cells. S.E. from 3 independent experiments shown.

[0061] (J,K) Immunostaining of ATRX, EZH2 (J), and H3K27me3 (K), and Xist RNA/DNA FISH in indicated cells lines after 24 h dox induction. % with shown pattern and sample size (n) are indicated.

[0062] FIGS. 3A-I: ATRX binds RNA and stimulates RNA binding to PRC2.

[0063] (A,B) RIP+UV crosslinking in X+P transgenic MEFs after dox-induction for 24 h (A) or WT MEF (B) Primers spanning Xist exons 1-3 and U1 snRNAs were used for qPCR. 1% input was processed in parallel. S.E. from 3 independent experiments. P values calculated using Student t-test.

[0064] (C) One possible structure of Repeat A (Maenner et al., 2010).

[0065] (D) Coomassie stain of purified full-length FLAG-ATRX-HA (left), C-terminal SNF2/helicase (middle), and N-terminal ADD (right) domains.

[0066] (E) RNA EMSA with ATRX at indicated concentrations and 0.2 nM of each probe. B, bound; U, unbound probe.

[0067] (F) Left: Binding Isotherms of ATRX for indicated RNAs. S.E. from 3 independent experiments shown. Right: Table summarizing K_{d}'s and R² values. >>200 nM indicates K_{d}'s out of the assay range. N/A, not applicable.

[0068] (G) EMSA of ATRX with different RNA, dsDNA, or ssDNA probes.

[0069] (H) Left: Binding Isotherms of ATRX for indicated DNAs. S.E. for 3 independent experiments shown for each point. Right: Table summarizing K_{d}'s and R² values. >>200 nM indicates K_{d}'s out of the assay range. N/A, not applicable.

[0070] (I) RNA and DNA EMSAs using ATRX truncation mutants, with summary of results.

[0071] FIGS. 4A-F: A ternary complex of ATRX, PRC2, and RNA, with stimulation of PRC2 binding in an ATP-dependent manner.

[0072] (A) FLAG-ATRX-HA binding to PRC2±ATP in the absence of RNA. HA-immunoprecipitated material was probed with α-EZH2 antibodies for Western.

[0073] (B) Tandem IP to detect ternary complex formation between ATRX, Repeat A RNA, and PRC2.

[0074] (C) Binding reaction to test for simultaneous association of ATRX with RNA and DNA. RNA and DNA can be discerned by their different electrophoretic mobilities.

[0075] (D) Top: Inverted image of RNA gel showing Repeat A RNA recovered after EZH2 IP±ATRX and ±ATP. Bottom: Western blot showing protein levels in input and recovered after IP. Representative results from 3 independent experiments shown.

[0076] (E) Photo crosslinking of PRC2 and Repeat A RNA in the presence of ATRX with ATP or AMP-PNP. Representative results from 5 biological replicates shown.

[0077] (F) Filter binding of ATRX binding to Repeat A RNA (left) or DNA (right)±ATP and +AMP-PNP. ATRX concentrations are indicated and S.E. from 3 independent experiments shown. *, p<0.05.

[0078] FIGS. 5A-L: An ATRX hotspot at the Xist locus requires function of Repeat A.
[0079] (A) Chromosome-wide profiles of ATRX coverage on Xi and Chr13 show input-normalized ATRX density over 10 Kb bins, gene (TSS) density, and the density of transcriptionally active genes based on previous data (Yang et al., 2010).
[0080] (B) Allele-specific analysis: Normalized densities (10-kb bins, smoothened) of Xist RNA, EZH2, H3K27me3 (Pinter et al., 2012; Simon et al., 2013), and ATRX in female MEFs along X.
[0081] (C) ATRX peak distribution in MEFs across promoter (TSS+/−3 kb), genic, and intergenic regions.
[0082] (D) ATRX densities at 50-kb resolution across 50 Mb of the Xic, centered on Xist.
[0083] (E) Allele-specific ATRX ChIP-seq tracks showing M. musculus (mus), M. castaneus (cas), and composite (comp) reads across the Xist locus in day 0 and 7 ESC and MEFs. Comp track includes all aligned reads, both allelic and non-allelic. Positions of peaks/enriched segments (grey bars) are shown under comp tracks. Representative autosomal tracks (Chr13) shown in FIG. 11C.
[0084] (F) ATRX genic densities for all genes in MEFs (y-axis) and ESC (x-axis).
[0085] (G) ATRX coverages on gene bodies of mus alleles for ChrX and Chr13 in female MEFs. KS test, P=1.
[0086] (H) Log 2 ATRX coverage densities for Xi genes classified as “expressed on Xa” (FPKM≧1) or “silent on Xa” (FPKM<1). KS test, P=0.80
[0087] (I) ATRX coverage on XCI escapees (purple) on mus or cas alleles. Grey, all other ChrX genes. P value was computed between mus and cas escapees using KS test.
[0088] (J) Map of Xist alleles in WT, Xa^{WT} X^{2lox} (III.8), and the conditional Xist deletion Xa′ Xi (III.20) MEF lines, with ChIP-qPCR amplicon positions and ChIP-qPCR results (graphs) for ATRX. Averages of 3 independent ATRX ChIP expressed as % of input, with S.E. shown. *, P<0.05. **, P<0.005 (Student t-test).
[0089] (K) RNA/DNA FISH for Xist RNA and transgenic DNA in the transgenic X+P and X-RA male MEF lines after 24 h dox-induction. Map of transgenes shown on top. Bottom graph: ChIP-pPCR of corresponding WT and transgenic MEF lines 24 h after dox-induction of Xist. Averages of 3 independent ChIP-qPCR experiments shown with S.E. *, P<0.05. **, P<0.005 (Student t-test).
[0090] (L) Model: RepA/Xist RNAs co-transcriptionally recruit ATRX. ATRX may be “poised” to bind RNA via Repeat A dsDNA. ATRX remodels Repeat A RNA motif and enhances binding of PRC2. The Xist locus becomes an ATRX hotspot. Spreading depends on the ATRX-RNA-PRC2 interactions.

[0091] FIGS. 6A-G: Global roles of ATRX in regulating PRC2 localization and function

[0092] (A) RefSeq genes (21,677) divided into equal quartiles (Q1-Q4) based on ATRX coverage. Average ATRX coverages and number of EZH2 target genes (peaks) in each quartile are shown.

[0093] (B) Dot plots showing Log 2 densities of EZH2 and H3K27me3 in ATRX+vs. ATRX KD MEFs for each quartile. ****, P<<0.0001, as calculated by the Student t test.

[0094] (C) Scatterplot of EZH2 and H3K27me3 densities in Log 2 scale over all genes (grey dots) and Q1 PRC2 target genes (purple dots) in ATRX+ or ATRX KD MEFs. The difference between ATRX+ and ATRX KD cells of Q1 PRC2 target genes is highly significant (P<2.2e-16, Student t test) for both epitopes.

[0095] (D) Probability density function for EZH2 and H3K27me3 based on coverages over the Q1-PRC2 target genes in the indicated MEF samples.

[0096] (E) Metagene profiles of EZH2 (top) and H3K27me3 (bottom) coverage. The metagenes are scaled 0 to 1 from genic start (TSS, x=0) to end (TTS, x=1).

[0097] (F) Distribution of EZH2 and H3K27me3 peaks in indicated MEF samples.

[0098] Peaks are categorized as TSS (+/−3 Kb), genic, or intergenic. Total number of peaks called for each dataset is indicated next to each chart.

[0099] (G) ChIP-seq tracks showing EZH2 and H3K27me3 densities in ATRX+ and ATRX-KD MEFs. Black bars, significantly enriched segments. H3K4me3 (pink) and RNA

[0100] Seq (blue) tracks are as published (Yang et al., 2010; Yildirim et al., 2012).

[0101] FIGS. 7A-E: Loss of EZH2 from target genes as a result of ATRX knockdown results in activation of these genes.

[0102] (A, B) Left panel: ChIP-seq tracks of the Hoxd cluster (A) or individual genes (B) showing EZH2 and H3K27me3 patterns in ATRX+ and ATRX-KD MEFs. Black bars, statistically significant enriched segments. Replicates are labeled Rep1 and Rep2. H3K4me3 (pink) and RNA Seq (blue) tracks were previously published (Yang et al., 2010; Yildirim et al., 2012).

[0103] (C) qRT-PCR analysis of expression levels before and after ATRX KD. Averages and S.E. of 3 independent experiments shown with Student t-test P values.

[0104] (D) EZH2 and H3K27me3 coverages over TSS before and after ATRX KD.

[0105] (E) Model: ATRX-dependent targeting of PRC2 on a genome-wide scale. ATRX mediates targeting either by directly binding DNA, or via regulatory RNAs such as those in the PRC2 interactome.

[0106] FIGS. 8A-B: FLAG-macroH2A pulldown and mass spectrometry of 293 cells identifiy interacting proteins. FIG. 8 relates to FIG. 1.

[0107] (A) Colloidal blue staining of FLAG immunoprecipitates from a control (293F) and 293F FLAG macroH2A expressing cell line run on a 4-20% SDS gradient gel (top). Samples are indicated on top of the panels. Peptides recovered and validated as high confidence hits for each protein are shown to the right. Histone peptides were too numerous to be labeled. Bands labeled with asterisks correspond to the following: Black asterisk, one ATRX peptide at a lower than expected molecular weight and red asterisk, macroH2A peptides.

[0108] (B) The validated spectra for ATRX is shown at the bottom.

[0109] FIGS. 9A-B: NANOG staining indicates proper ES cell differentiation. FIGS. 9A-B relate to FIG. 2.
[0110] (A) NANOG staining (red) in female shScr and shATRX-4 cells at day 0 and day 8 of differentiation.
[0111] (B) NANOG staining (red) in male shScr and shATRX-16 cells at day 0 and day 8 of differentiation.

[0112] FIGS. 10A-F: Biochemical analysis of ATRX-RNA and PRC2-RNA interactions. FIGS. 10A-F relates to FIG. 3.

[0113] (A) In vitro transcribed Repeat A and MBP RNAs were run on a polyacrylamide UREA gel and gel purified to obtain the full length RNA for gel shift assays.

[0114] (B) Left: RNA EMSA PRC2 at indicated concentrations and 0.2 nM probe of species indicated. Locations of bound (B) and unbound (U) RNA probe are marked. Right: Table summarizing K_{d}'s and R² values of PRC2 bound to different RNA species. >>1000 for PRC2 indicate K_{d}'s that were out of the assay range. N/D, not determined. N/A, not applicable.

[0115] (C) RNA EMSA with ATRX at indicated concentrations and 0.2 nM probe of species indicated. Locations of bound (B) and unbound (U) RNA probe are marked.

[0116] (D) Double filter binding assay using increasing concentrations of ATRX (0, 2.5, 5 and 10 nM) with either Repeat A RNA or MBP RNA. Upper panel represents RNA bound to ATRX and the lower panel free or unbound RNA. Experiment was done in triplicate to show reproducibility across wells.

[0117] (E) ATRX binding to ³²P-labeled Repeat A (I-IV) RNA in the presence of increasing concentrations of Repeat A DNA competitor.

[0118] (F) ATRX binding to ³²P-labeled Repeat A (I-IV) dsDNA in the presence of increasing concentrations of Repeat A (I-IV) RNA competitor.

[0119] FIGS. 11A-D: ATRX densities across the X chromosome and chromosome 13 in WT and ATRX KD MEFs. FIGS. 11A-D relate to FIG. 5.

[0120] (A) ATRX densities with 50-kb bin sizes across the entire X chromosome. The highest density of ATRX on the X chromosome is observed around the X inactivation center (Xic) that is marked in red.

[0121] (B) ATRX densities with 50-kb bin sizes across 50 kb of the Xic, centered on Xist. The genomic co-ordinates are indicated on the x axis.

[0122] (C) ATRX ChIP-seq tracks showing M. musculus (mus), M. castaneus (cas), and composite (comp; sum of both allelic and non-alleleically aligned reads) across a Chr13 locus in day 0 and 7 mESC and MEFs. Positions of peaks/enriched segments (grey) are shown under comp tracks.

[0123] (D) ChIP-seq tracks showing Mus musculus (MUS, red), Mus castaneus (CAS, red) and total allelic and non-allelically assigned (COMP, black) ATRX reads across the Xist locus in WT (top) and ATRX KD (bottom) MEFs. The ATRX-KD samples show significant depletion of signal along the Xist gene.

[0124] FIGS. 12A-B: Correlation between EZH2 and H3K27me3 coverages. FIGS. 12A-B relates to FIG. 6.

[0125] (A) In ATRX+ cells, correlation between two EZH2 ChIP-seq replicates and between EZH2 and H3K27me3 ChIP-seq profiles. Pearson's correlation coefficient (r) is shown.

[0126] (B) In ATRX-deficient cells, correlation between two EZH2 ChIP-seq replicates and between EZH2 and H3K27me3 ChIP-seq profiles. Pearson's correlation coefficient (r) is shown.

[0127] FIGS. 13A-D: EZH2 and H3K27me3 distributions in ChIP-seq replicate experiments and their effect on genic loci upon ATRX KD. FIGS. 13A-D relate to FIG. 7.

[0128] (A,B) ChIP-seq tracks of the Hoxd cluster (Replicate 2) or Hoxc cluster (replicates 1 and 2) showing EZH2 and H3K27me3 patterns in ATRX+ and ATRX-KD MEFs. Statistically significant enriched segments are shown below each track as black bars. Replicates are labeled Rep1 and Rep2. H3K4me3 (pink) and RNA-seq (blue) tracks were previously published (Yang et al., 2010; Yildirim et al., 2012).

[0129] (C) qRT-PCR analysis of expression levels before and after ATRX KD. Expression levels were consistently higher upon ATRX knockdown, though the differences were modest (˜2-fold) and bordered statistical significance for Hox genes, with P-values ranging from 0.01-0.1, possibly because Hox genes are tissue-specific and are repressed by multiple mechanisms (i.e., ATRX and PRC2 are not the only regulator). Averages and S.E. of 3 independent experiments with Student t-test P values are shown.

[0130] (D) EZH2 and K27me3 TSS coverage tables for individual genes in ChIP-seq Rep2.

[0131] FIG. 14: Behavior of Polycomb target genes without ATRX coverage (Q4 quartile). FIG. 14 relates to FIGS. 6 and 7.

[0132] ChIP-seq track of two Polycomb target genes, Onecut1 and Klh131, without ATRX coverage (Q4 quartile). ATRX-deficiency minimally affected EZH2 localization. Statistically significant enriched segments are shown below each track as black bars. H3K4me3 (pink) and RNA-seq (blue) tracks were previously published (Yang et al., 2010; Yildirim et al., 2012).

[0133] Table 1: ATRX binding sites (ChIP-Seq peaks) from mus musculus mouse embryonic fibroblasts. The columns correspond to c1: Chromosome number. c2: Read start position of ATRX binding site. c3: read end position of binding site. c4: coding strand of the nearest gene. c5: nearest gene name. ‘int’ signifies an intergenic binding site, or a binding site not located within any annotated gene. All coordinates in mm9

[0134] Table 2: Conserved human genomic regions that correspond to ATRX ChIP-Seq peaks from mus musculus embryonic fibroblasts. Coordinates of ATRX Chip seq peaks that are aligned to the mouse mm9 genome are converted or ‘lifted over’ to the human Hg19 genome. The columns correspond to c1: Chromosome number. c2: Read start position of ATRX binding site. c3: read end position of binding site. c4: coding strand of the nearest gene. c5: nearest gene name. ‘int’ signifies an intergenic binding site, or a binding site not located within any annotated gene.

[0135] Table 4: PRC2 target genes in the Q1 quartile.

[0136] Table 5: List of 100 genes with highest ATRX coverage in MEFs, with coverage values shown.

[0137] Table 6: Primer sequences and Antibodies used in Examples 1-6.

### DETAILED DESCRIPTION

[0138] Polycomb repressive complex 2 (PRC2) (Dupont and Gribnau, 2013; Lee, 2012; Lee and Bartolomei, 2013; Starmer and Magnuson, 2009; Wutz, 2011) is a histone methyltransferase complex that trimethylates histone H3 at lysine 27 (H3K27me3) and establishes repressive chromatin (Muller and Verrijzer, 2009; Simon and Kingston, 2013). Because PRC2 controls both normal development and the pathogenesis of disease, PRC2 has become a high-priority drug target (Helie and Dhanak, 2013). Apart from the Xi, PRC2 binds thousands of specific sites in the mammalian genome. Still not fully understood is how PRC2 is targeted when the core subunits are not sequence-specific DNA binding proteins. PRC2 preferentially occupies CpG-rich regions and is aided in recruitment by substoichiometric association with the Jumonji protein, JARID2, and the Zinc-finger protein, AEPB2 (Cifuentes-Rojas et al., 2014; da Rocha et al., 2014; Kaneko et al., 2014; Simon and Kingston, 2013). However, other specificity determinants must exist in vivo, given that JARID2 and AEPB2 are nonspecific DNA-binding proteins and cannot by themselves impart specificity to PRC2 localization.

[0139] The example of RepA/Xist RNA demonstrates that cis-regulatory RNAs can serve as locus-specific recruiting factors (Zhao et al., 2008). Because such transcripts are unique in the genome, their cis-action enables targeting of chromatin complexes to a singular location (Lee, 2012). During XCI, PRC2 is first targeted to the Xic by RepA via the Repeat A motif Xist RNA then co-transcriptionally binds PRC2 via Repeat A and loads in cis onto a nucleation center before spreading outwardly to envelop the Xi (Jeon and Lee, 2011). PRC2 is now known to have a large RNA interactome, with membership exceeding 9,000 transcripts (Kaneko et al., 2013; Kanhere et al., 2010; Khalil et al., 2009; Zhao et al., 2010). In vitro, PRC2 can bind RNA with a range of affinities (Cifuentes-Rojas et al., 2014; Davidovich et al., 2013). The large RNA interactome raises the question of how PRC2 discriminates between RNA species in the physiological context. Here, we investigate this question by carrying out an unbiased screen for novel specificity determinants. We identify the chromatin remodeler, ATRX.

[0140] Although in vitro analysis shows that PRC2 is intrinsically capable of distinguishing between cognate and nonspecific transcripts (Cifuentes-Rojas et al., 2014), the thousands of possible RNA partners in vivo (Zhao et al., 2010) argue that additional specificity determinants must exist in the physiological context in order for PRC2 to be targeted in a locus-specific manner. Our proteomics screen has identified ATRX as an essential discrimination factor for PRC2 localization and function on a global scale. During XCI, ATRX interacts with RepA/Xist RNA and promotes loading of PRC2 (FIG. 5L). ATRX is an avid but also specific RNA-binding protein, with an impressive K_{d} of ˜5 nM for Repeat A RNA. ATRX is also an avid DNA-binding protein (Kd ˜15 nM). ATRX's interaction with Repeat A DNA leaves it poised, enabling ATRX to bind RepA/Xist RNAs in a co-transcriptional manner. Augmentation of ATRX's effect on Repeat A-PRC2 interactions by ATP suggests a role, potentially as an RNA helicase, to remodel Repeat A RNA to a permissive structure. This activity may parallel that of the MLE helicase for the MSL-roX dosage compensation complex of the fruitfly (Ilik et al., 2013; Maenner et al., 2013). In the case of XCI, absence of ATRX action at both Repeat A RNA and DNA precludes PRC2 targeting and spread along the Xi in cis.

[0141] ATRX's specificity function extends beyond XCI. Without ATRX, PRC2 cannot discriminate true targets from nonspecific sequences. Loss of ATRX causes global shifts in PRC2 localization and function, with PRC2 redistributing en masse to ectopic sites in intergenic space and to non-canonical sites within coding genes. At ectopic loci, PRC2 seems to lack proper context and cofactors to carry out H3K27 methylation in a specific manner. While fewer enriched H3K27me3 peaks are observed, overall H3K27me3 levels are unchanged. Loss of ATRX-dependent PRC2 function results in upregulation of Polycomb target genes (FIG. 7, 13A-D). We do not know whether ATRX action at autosomal genes depends on noncoding transcripts, such as RepA/Xist in the case of XCI. Because ATRX can bind DNA directly (FIG. 3H), ATRX-dependent targeting of PRC2 at autosomal loci may be mediated by either RNA or DNA (FIG. 7E). The large RNA interactome of PRC2 may also play a role. Finally the presence of EZH2 peaks in Q3 and Q4 genes (FIG. 6A) suggests the presence of an ATRX-independent mechanism for PRC2 recruitment as well: For example, at the Q4 Polycomb targets, Onecut1 and Klh131, loss of ATRX did not affect EZH2 targeting (FIG. 14).

[0142] ATRX's role in PRC2 targeting and function may help elucidate the pathogenesis of the X-linked alpha-thalassemia mental retardation (ATR-X) syndrome (Gibbons et al., 2008), a disease associated with aberrant chromatin at telomeres and pericentric heterochromatin (Clynes et al., 2013). Mutations in ATRX and its interacting partner, DAXX, are also frequently mutated in tumors that rely on homologous recombination instead of telomerase activation to circumvent telomere shortening. Our present study suggests that, in addition to abnormalities in constitutive heterochromatin caused by abnormal H3K9 methylation, ATRX-associated diseases may also be ascribed to dysregulated PRC2 function in facultative heterochromatin. ATRX-mediated targeting of PRC2 thus provides a new framework for understanding Polycomb biology and human disease.

[0143] Methods of Producing ATRX-Binding Nuclear RNAs

[0144] Described herein are methods for producing libraries of nRNAs, e.g., nuclear IncRNAs and coding mRNAs, that bind to ATRX. In some embodiments, the methods include the of RIP-SEQ, e.g., as shown in FIG. 1A of WO2012/065143, with ATRX substituted for a-EZH2; one of skill in the art will appreciate that other techniques can be substituted for those shown, including the use of PAR-CLIP or HITS-CLIP, e.g., as described in Konig et al., Nature Reviews Genetics 13:77-83 (2012).

[0145] In some embodiments, the methods include providing a sample comprising nuclear ribonucleic acids (nRNAs) bound to ATRX; and contacting the sample with an agent, e.g., an antibody, that binds specifically to ATRX, under conditions and for a time sufficient to form complexes between the agent and the protein; isolating the complexes; synthesizing DNA complementary to the nRNAs to provide an initial population of cDNAs; PCR-amplifying, if necessary, using strand-specific primers; purifying the initial population of cDNAs to obtain a purified population of cDNAs that are at least 20 nucleotides (nt) in length; high-throughput sequencing the purified population of cDNAs. Homopolymer reads are filtered, and reads matching the mitochondrial genome and ribosomal RNAs are excluded from all subsequent analyses. Reads that align to a reference genome with ≦1 mismatch are retained, excluding homopolymers, reads that align to the mitochondrial genome, and ribosomal RNAs. High probability ATRX-interacting transcripts are then called based on two criteria: (1) that the candidate transcript has a minimum read density in RPKM terms (number of reads per kilobase per million reads); (2) that the candidate transcript is enriched in the wildtype library versus a suitable control library (such as a protein-null library, a library made from an IgG pulldown done in parallel, or a minus-crosslink (-UV) control library done in parallel).

[0146] In general, to construct native RIP-seq libraries, cell nuclei are prepared, treated with DNAse, and incubated with antibodies directed against a chromatin-associated factor of interest, along with a control IgG reaction in parallel. RNA-protein complexes are then immunoprecipitated with agarose beads, magnetic beads, or any other platform in solution or on a solid matrix (e.g., columns, microfluidic devices). RNAs are extracted using standard techniques. To capture all RNAs (not just polyA RNAs) and to preserve strand information, asymmetric primers are used to generate cDNA from the RNA template, in which the first adaptor (adaptor 1) to make the first strand cDNA contains a random multimer sequence (such as random hexamers) at the 3′ end. A reverse transcriptase is used to create the first strand. A distinct second adaptor (adaptor2) is used to create the second strand. One example is as follows: If Superscript II is used, it will add non-template CCC 3′ overhangs, which can then be used to hybridize to a second adaptor containing GGG at the 3′ end, which anneal to the non-template CCC overhangs. Other methods of creating second strands may be substituted. PCR using adaptor1- and adaptor2-specific primer pairs is then the performed to amplify the cDNAs and the products sequenced via standard methods of high throughput sequencing. Prior to sequencing, a size-selection step can be incorporated (if desired) in which RNAs or cDNAs of desired sizes are excised after separation by gel electrophoresis (e.g., on a Nu-Sieve agarose gel or in an acrylamide gel) or other methods of purification, such as in a microfluidic device or in standard biochemical columns.

[0147] To construct libraries from UV-crosslinked samples, a number of techniques are currently available, including CLIP, iCLIP, PAR-CLIP, and HITS-CLIP (e.g., as described in Konig et al., Nature Reviews Genetics 13:77-83 (2012)), with appropriate modifications made based on the epitope of interest. As one example of a crosslinking protocol, cells are trypsinized and resuspended in PBS. Cells for +UV experiments are crosslinked with 256 nm UV (or 365 nm for PAR-CLIP) in a 15-cm dish at 250 mJ/cm² using the Stratalinker 1800 (Stratagene). ±UV cell pellets are resuspended in 1-2 mL Buffer A (10 mM HEPES pH 7.9, 1.5 mM MgCl₂, 10 mM KCl, 0.5 mM PMSF) and incubated on ice for 30 min with frequent vortexing. Nuclei are pelleted at 2500×g for 15 min, washed in PBS, resuspended in 500 mL Buffer C (20 mM HEPES pH 7.5, 420 mM NaCl, 15% glycerol, 1.5 mM MgCl₂, 0.5 mM PMSF, protease and RNase inhibitors) and incubated at 4° C. for 30 min with rotation. Nuclear lysates are diluted with one volume of 20 mM HEPES pH 7.5 and treated with 40 U TURBO DNase at 37° C. for 30 min to liberate chromatin-associated CTCF-RNA complexes. After quenching the DNase with 10 mM EDTA, 5% is removed and saved for RNA-seq, while the remainder is added with sarkosyl to 0.5% and the RNA fragmented by sonication with Diagenode Bioruptor XL twice for 20 min each (with 30 s on, 30 s off cycles). Cell debris is pelleted at 16,000×g for 10 min, the lysate is diluted again with 1 volume of 20 mM HEPES and divided into three aliquots. 15 uL of Anti-FLAG M2 Magnetic Beads (Sigma-Aldrich A2220) is added to each aliquot and incubated at 4° C. overnight with rotation. Beads from all aliquots is recombined, washed 3× with high salt Wash Buffer I (20 mM HEPES pH 7.5, 250 mM NaCl, 0.1% SDS, 0.5% sodium deoxycholate, 0.5% Nonident-P40, protease and RNase inhibitors), once with 1× TURBO DNase buffer, then treated with 100 U/mL TURBO DNase at 37° C. for 30 min. Beads are further washed 2× with Wash Buffer I supplemented with 10 mM EDTA, then 2× with low salt Wash Buffer II (50 mM Tris-HCl pH 7.5, 1% NP40, 0.5% sodium deoxycholate, 50 mM NaCl, 10 mM EDTA), and 1× with PNK buffer (50 mM Tris-HCl pH 7.5, 10 mM MgCl₂, 0.5% NP40, 5 mM DTT). CLIP-tags on beads are radiolabelled with [γ-³²P]ATP using T4 polynucleotide kinase (New England Biolabs) for 20 min at 37° C., and washed 4× with PNK buffer. Beads are resuspended in SDS-PAGE loading buffer at heated for 5 min at 70° C., run on 8% Bis-Tris SDS-PAGE in MOPS buffer (50 mM MOPS, 50 mM Tris, 0.1% SDS, 1 mM EDTA) at 120 V, transferred to nitrocellulose membrane, and exposed to film for autoradiography or used for immunoblot with 1:3000 αFLAG antibodies (Sigma-Aldrich F1804).

[0148] Membrane fragments containing CLIP signal, as confirmed by immunoblot, and corresponding positions on control lanes are excised, and RNA is eluted by incubation in prewarmed proteinase K buffer (100 mM Tris-HCl pH 7.5, 50 mM NaCl, 10 mM EDTA, 0.5% SDS, 4 mg/mL proteinase K) for 20 min at 37° C., then incubation for an additional 20 min in proteinase K buffer supplemented with 7 M urea, followed by TRIzol extraction and ethanol precipitation. RNA size and quality are verified using RNA 6000 Pico chips on the Agilent Bioanalyzer. CLIP-seq library is then constructed from CLIP RNA using the NEBNext Small RNA Library Prep set (New England Biolabs E7330), size-selected and cleaned up of primer/adaptor-dimers using Agencourt AMPure XP beads (Beckman Coulter A63880), verified with DNA High Sensitivity chips on the Agilent Bioanalyzer, quantitated using KAPA Biosystems library quantification kit (KK4844), and sequenced with the Illumina HiSeq 2000 system with 50 cycles paired end reads.

[0149] ATRX-Binding nRNAs and nRNA Libraries

[0150] The present invention includes libraries of nRNAs produced by methods described herein. In some embodiments, the libraries are in solution, or are lyophilized. In some embodiments, the libraries are bound to a substrate, e.g., wherein each member of the library is bound to an individually addressable member, e.g., an individual area on an array (e.g., a microarray), or a bead.

[0151] nRNAs may be functionally conserved without being highly conserved at the level of overall nucleotide identity. For example, mouse Xist shows only 76% overall nucleotide identity with human XIST using sliding 21-bp windows, or an overall sequence identity of only 60%. However, within specific functional domains, such as Repeat A, the degree of conservation can be >70% between different mammalian species. The crucial motif in Repeat A is the secondary structures formed by the repeat. For ATRX-Xist interactions, the crucial motif appears to be Repeat A. Other nRNAs interacting with ATRX may therefore be similarly low in overall conservation but still have conservation in secondary structure within specific domains of the RNA, and thereby demonstrate functional conservation with respect to recruitment of ATRX.

[0152] Calculations of homology or sequence identity between sequences (the terms are used interchangeably herein) are performed as follows.

[0153] To determine the percent identity of two nucleic acid sequences, the sequences are aligned for optimal comparison purposes (e.g., gaps can be introduced in one or both of a first and a second amino acid or nucleic acid sequence for optimal alignment and non-homologous sequences can be disregarded for comparison purposes). The length of a reference sequence aligned for comparison purposes is at least 80% of the length of the reference sequence, and in some embodiments is at least 90% or 100%. The nucleotides at corresponding amino acid positions or nucleotide positions are then compared. When a position in the first sequence is occupied by the same nucleotide as the corresponding position in the second sequence, then the molecules are identical at that position (as used herein nucleic acid “identity” is equivalent to nucleic acid “homology”). The percent identity between the two sequences is a function of the number of identical positions shared by the sequences, taking into account the number of gaps, and the length of each gap, which need to be introduced for optimal alignment of the two sequences.

[0154] For purposes of the present invention, the comparison of sequences and determination of percent identity between two sequences can be accomplished using a Blossum 62 scoring matrix with a gap penalty of 12, a gap extend penalty of 4, and a frameshift gap penalty of 5.

[0155] There are several potential uses for the nRNAs described herein in the ATRX transcriptome: The RNAs themselves, or antagomirs and small molecules designed against them, can be utilized to modulate expression (either up or down) of ATRX target genes. In addition, the nRNAs can be used in methods of detecting or identifying cancerous cells, as described herein.

[0156] Modulating ATRX Binding to Genomic DNA

[0157] As described herein, ATRX localizes to genomic DNA in a sequence-specific manner. To inhibit this localization, and thus disrupt the ATRX-dependent loading of PRC2 and increase expression of nearby genes, oligonucleotides are used that bind to genomic DNA at or near (e.g., within 100, 50, or 25) nucleotides of an ATRX localization site, identified as an ATRX ChIP-Seq peak in Tables 1 and 2. Table 1 lists genes corresponding to the ATRX ChIP-Seq peaks from mus musculus mouse embryonic fibroblasts, and Table 2 provides the Human genomic regions determined by LiftOver analysis to correspond to the ATRX ChIP-Seq peaks from mus musculus mouse embryonic fibroblasts. Each table provides the SEQ ID NO: of the peak(s) (i.e., the ATRX localization site(s)) that correspond to each of the listed genes.

[0158] In some embodiments, the oligonucleotides are triplex-forming oligonucleotides (TFOs). TFOs are defined as triplex-forming oligonucleotides which bind as third strands to duplex DNA in a sequence specific manner. Triplex-forming oligonucleotides may be comprised of any possible combination of nucleotides and modified nucleotides. Modified nucleotides may contain chemical modifications of the heterocyclic base, sugar moiety or phosphate moiety. TFOs, and methods of making them, are known in the art; see, e.g., Frank-Kamenetskii and Mirkin, Annual Review of Biochemistry, 64:65-95 (1995); Vasquez and Glazer, Quarterly Reviews of Biophysics, 35(01):89-107 (2002); US PGPub Nos. 20070219122; US20110130557; and US20090216003.

[0159] In general, the TFO is a single-stranded nucleic acid molecule between 5 and 100 nucleotides in length, preferably between 7 and 40 nucleotides in length, e.g., 10 to 20 or 20 to 30 nucleotides in length. In some embodiments, the base composition is homopurine or homopyrimidine, polypurine or polypyrimidine. The oligonucleotides can be generated using known DNA synthesis procedures.

[0160] The nucleotide sequence of the oligonucleotides is selected based on a target sequence of an ATRX localization sequence as provided herein; in addition, the sequence can be determined based on physical constraints imposed by the need to achieve binding of the oligonucleotide within the major groove of the target region, and preferably have a low dissociation constant (Kd) for the oligonucleotide/target sequence. The oligonucleotides should have a base composition that is conducive to triple-helix formation and can be generated based on known structural motifs for third strand binding. The most stable complexes are formed on polypurine:polypyrimidine elements, which are relatively abundant in mammalian genomes. Triplex formation by TFOs can occur with the third strand oriented either parallel or anti-parallel to the purine strand of the duplex. In the anti-parallel, purine motif, the triplets are G.G:C and A.A:T, whereas in the parallel pyrimidine motif, the canonical triplets are C⁺.G:C and T.A:T. The triplex structures are stabilized by two Hoogsteen hydrogen bonds between the bases in the TFO strand and the purine strand in the duplex. See U.S. Pat. No. 5,422,251 for additional information on base compositions for third strand binding oligonucleotides.

[0161] The TFOs can include one or more modifications, e.g., backbone modifications such as incorporation of the flexible basestacking monomers (Bulge insertions of (R)-1-O-[4-(1-pyrenylethynyl)phenylmethyl]glycerol into the middle of homopyrimidine oligodeoxynucleotides (twisted intercalating nucleic acids, TINA)) as described in US PGPub No 20090216003; intercalating nucleic acid monomers as described in WO2006125447A2; intercalator (R)-1-O-[4-(1-pyrenylethynyl)benzyl]-glycerol (see, e.g., Filichev et al., J. Am. Chem. Soc. 127:14849 (2005); Filichev et al., Eur. J. Org. Chem. 17:3960-3968 (2006); Globisch et al., Helv. Chim. Acta, 91:805 (2008)); 2-phenyl or 2-naphth-1-yl-phenanthroimidazole intercalators as described in US20110130557.

[0162] In addition or in alternative, modifications can be made to the nucleobases (see, e.g., Roig and Asseline, J. Am. Chem. Soc. 2003, 125, 4416; Hildbrand et al., J. Am. Chem. Soc. 1997, 119, 5499; and Xodo et al., Nucleic Acids Res. 1991, 19, 5625); to the sugar (sugar moiety modifications include, but are not limited to, 2′-O-aminoetoxy, 2′-O-amonioethyl (2′-OAE), 2′-O-methoxy, 2′-O-methyl, 2-guanidoethyl (2′-OGE), 2′-O,4′-C-methylene (LNA), 2′-O-(methoxyethyl) (2′-OME) and 2′-O—(N-(methyl)acetamido) (2′-OMA). 2′-O-aminoethyl sugar moiety substitutions are especially preferred; see, e.g., Carlomagno et al., J. Am. Chem. Soc. 2001, 123, 7364; Cuenoud et al., Angew. Chem. Int. Ed. 1998, 37, 1288; Wengel, Acc. Chem. Res. 1999, 32, 301; Obika et al., Tetrahedron Let. 2000, 41, 8923; Sun et al., Biochemistry, 2004, 43, 4160; Basye et al., Nucleic Acids Res. 2001, 29, 4873); and/or to the phosphate backbone (see, e.g., Michel, et al., Chem Bio Chem. 2005, 6, 1254; Ehrenmann et al., Nucl. Nucl. Nucleic Acids. 2001, 20, 797; Michel et al., J. Biomol. Struct. Dyn. 2003, 21, 435; Tereshko et al., J. Am. Chem. Soc. 1998, 120, 269; Escude et al., Proc. Natl. Acad. Sci. U.S.A. 1996, 93, 4365; Gryaznov et al., Proc. Natl. Acad. Sci. U.S.A. 1995, 92, 5798; Gryaznov and Chen, J. Am. Chem. Soc. 1994, 116, 3143; and Chur et al., Nucleic Acids Res. 1993, 21, 5179). Chemical modifications of heterocyclic bases or heterocyclic base analogs can be used to increase the binding affinity of a nucleotide or its stability in a triplex. Chemically-modified heterocyclic bases include, but are not limited to, inosine, 5-(1-propynyl) uracil (pU), 5-(1-propynyl) cytosine (pC), 5-methylcytosine, 8-oxo-adenine, pseudocytosine, pseudoisocytosine, 5 and 2-amino-5-(2′-deoxy-beta-D-ribofuranosyl)pyridine (2-aminopyridine), and various pyrrolo- and pyrazolopyrimidine derivatives. Substitution of 5-methylcytosine or pseudoisocytosine for cytosine in triplex-forming molecules such as TFOs and PNAs helps to stabilize triplex formation at neutral and/or physiological pH, especially in triplex-forming molecules with isolated cytosines. See, e.g., US20110268810.

[0163] For example, each nucleotide monomer can be selected from the group consisting of DNA, RNA, HNA, MNA, ANA, LNA, CAN, INA, CeNA, TNA, (2′-NH)-TNA, (3′-NH)-TNA, alpha-L-Ribo-LNA, alpha-L-Xylo-LNA, beta-D-Ribo-LNA, beta-D-Xylo-LNA, [3.2.1]-LNA, Bicyclo-DNA, 6-Amino-Bicyclo-DNA, 5-epi-Bicyclo-DNA, alpha-Bicyclo-DNA, Tricyclo-DNA, Bicyclo[4.3.0]-DNA, Bicyclo[3.2.1]-DNA, Bicyclo[4.3.0]amide-DNA, beta-D-Ribopyranosyl-NA, alpha-L-Lyxopyranosyl-NA, 2′-R-RNA, 2′-OR-RNA, 2′-AE-RNA, alpha-L-RNA, and beta-D-RNA, and combinations and modifications thereof; in some embodiments, some or all of the TFO is a peptide nucleic acid (PNA), in which the phosphate backbone of oligonucleotides is replaced in part or in its entirety by repeating N-(2-aminoethyl)-glycine units, and the phosphodiester bonds are replaced by peptide bonds. In addition, the TFO can include one or more of the modifications described in WO2012/065143.

[0164] In some embodiments, the TFO includes a “tail” or “tail clamp” added to the Watson-Crick binding portion that binds to target strand outside the triple helix and reduces the requirement for a polypurine:polypyrimidine stretch, increasing the number of potential target sites. Tail clamps added to PNAs (referred to as tcPNAs) have been described by Kaihatsu, et al., Biochemistry, 42(47):13996-4003 (2003); Bentin, et al., Biochemistry, 42(47):13987-95 (2003) Rogers, et al., Proc. Natl. Acad. Sci. USA., 99(26):16695-700 (2002)), and are known to bind to DNA more efficiently due to low dissociation constants. The addition of the tail also increases binding specificity and binding stringency of the triplex-forming molecules to the target duplex.

[0165] In some embodiments, the TFOs are modified with, or administered with, amidoanthraquinones as described in Fox et al., Proc. Natl. Acad. Sci. USA 92:7887-7891 (1995).

[0166] Methods of Treatment

[0167] Oligos, e.g., TFOs that target the sequences of ATRX binding sites associated with disease-related genes can also be used to treat subjects. For example, the DMD gene is a causal factor in Duchenne muscular dystrophy; administration of an oligo, e.g., a TFO that targets an ATRX localization site associated with the DMD gene can be used to treat subjects who have Duchenne muscular dystrophy. In addition, administration of an oligo, e.g., a TFO, that targets an ATRX localization site associated with the XIST gene can be used to treat subjects who have Rett Syndrome. One of skill in the art would be able to identify other disease-related genes from among those listed in Tables 1, 2, 3, 4, or 5. In particular, an oligo, e.g., a TFO, that targets an ATRX localization site associated with a human disease-related gene as set forth in Table 2 or 3 can be used to treat a human having the disease to which the gene is related; in some embodiments, the oligos, e.g., TFOs, are used to reactivate a normal gene in a heterozygous individual, i.e., an individual with one normal copy and one affected copy of the gene. The oligo, e.g., TFO, can be administered in a pharmaceutical composition or formulation as known in the art, e.g., as described herein. Subjects having a genetic disease, e.g., a disease related to a gene listed in Table 2 or 3, can be identified using methods known in the art. Table 3 includes additional examples of diseases and the ATRX localization sites associated with the disease-related gene from Table 2. Disease identifications follow OMIM nomenclature.

TABLE 3

| | | ATRX localization |
|---|---|---|
| Disease | Gene | site SEQ ID NOs. |
| Duchenne Muscular Dystrophy | DMD | 7867-7900 |
| Rett Syndrome | XIST | 7957, 7959, 7961, |
| | | or 7962 |
| Dihyropyrimidine dehydrogenase | DPYD | 5310-5314 |
| deficiency | | |
| Phosphoglycerate dehydrogenase | PHGDH | 5343 |
| deficiency | | |
| Complement factor H deficiency | CFH | 5395-5400 |
| Schizophrenia/Schizoaffective | TSNAX- | 5457-5460 |
| Disorder | DISC1 | |
| Myoglobinuria | LPIN1 | 5513-5515 |
| Schizophrenia 17 | NRXN1 | 5531-5534 |
| Chromosome 2p16.1-P15 | VRK2 | 5546-5547 |
| Deletion syndrome | | |
| Amyotrophic lateral sclerosis 19 | ERBB4 | 5721-5722 |
| Three M syndrome 2 | OBSL1 | 5739-5740 |

[0168] Pharmaceutical Compositions

[0169] The methods described herein can include the administration of pharmaceutical compositions and formulations comprising oligonucleotides (e.g., TFOs) designed to target an ATRX localization site sequence.

[0170] In some embodiments, the compositions are formulated with a pharmaceutically acceptable carrier. The pharmaceutical compositions and formulations can be administered parenterally, topically, orally or by local administration, such as by aerosol or transdermally. The pharmaceutical compositions can be formulated in any way and can be administered in a variety of unit dosage forms depending upon the condition or disease and the degree of illness, the general medical condition of each patient, the resulting preferred method of administration and the like. Details on techniques for formulation and administration of pharmaceuticals are well described in the scientific and patent literature, see, e.g., Remington: The Science and Practice of Pharmacy, 21st ed., 2005.

[0171] The nucleic acids can be administered alone or as a component of a pharmaceutical formulation (composition). The compounds may be formulated for administration, in any convenient way for use in human or veterinary medicine. Wetting agents, emulsifiers and lubricants, such as sodium lauryl sulfate and magnesium stearate, as well as coloring agents, release agents, coating agents, sweetening, flavoring and perfuming agents, preservatives and antioxidants can also be present in the compositions.

[0172] Formulations of the compositions of the invention include those suitable for intradermal, inhalation, oral/nasal, topical, parenteral, rectal, and/or intravaginal administration. The formulations may conveniently be presented in unit dosage form and may be prepared by any methods well known in the art of pharmacy. The amount of active ingredient (e.g., nucleic acid sequences of this invention) which can be combined with a carrier material to produce a single dosage form will vary depending upon the host being treated, the particular mode of administration, e.g., intradermal or inhalation. The amount of active ingredient which can be combined with a carrier material to produce a single dosage form will generally be that amount of the compound which produces a therapeutic effect, e.g., an antigen specific T cell or humoral response.

[0173] Pharmaceutical formulations of this invention can be prepared according to any method known to the art for the manufacture of pharmaceuticals. Such drugs can contain sweetening agents, flavoring agents, coloring agents and preserving agents. A formulation can be admixtured with nontoxic pharmaceutically acceptable excipients which are suitable for manufacture. Formulations may comprise one or more diluents, emulsifiers, preservatives, buffers, excipients, etc. and may be provided in such forms as liquids, powders, emulsions, lyophilized powders, sprays, creams, lotions, controlled release formulations, tablets, pills, gels, on patches, in implants, etc.

[0174] Pharmaceutical formulations for oral administration can be formulated using pharmaceutically acceptable carriers well known in the art in appropriate and suitable dosages. Such carriers enable the pharmaceuticals to be formulated in unit dosage forms as tablets, pills, powder, dragees, capsules, liquids, lozenges, gels, syrups, slurries, suspensions, etc., suitable for ingestion by the patient. Pharmaceutical preparations for oral use can be formulated as a solid excipient, optionally grinding a resulting mixture, and processing the mixture of granules, after adding suitable additional compounds, if desired, to obtain tablets or dragee cores. Suitable solid excipients are carbohydrate or protein fillers include, e.g., sugars, including lactose, sucrose, mannitol, or sorbitol; starch from corn, wheat, rice, potato, or other plants; cellulose such as methyl cellulose, hydroxypropylmethyl-cellulose, or sodium carboxy-methylcellulose; and gums including arabic and tragacanth; and proteins, e.g., gelatin and collagen. Disintegrating or solubilizing agents may be added, such as the cross-linked polyvinyl pyrrolidone, agar, alginic acid, or a salt thereof, such as sodium alginate. Push-fit capsules can contain active agents mixed with a filler or binders such as lactose or starches, lubricants such as talc or magnesium stearate, and, optionally, stabilizers. In soft capsules, the active agents can be dissolved or suspended in suitable liquids, such as fatty oils, liquid paraffin, or liquid polyethylene glycol with or without stabilizers.

[0175] Aqueous suspensions can contain an active agent (e.g., nucleic acid sequences of the invention) in admixture with excipients suitable for the manufacture of aqueous suspensions, e.g., for aqueous intradermal injections. Such excipients include a suspending agent, such as sodium carboxymethylcellulose, methylcellulose, hydroxypropylmethylcellulose, sodium alginate, polyvinylpyrrolidone, gum tragacanth and gum acacia, and dispersing or wetting agents such as a naturally occurring phosphatide (e.g., lecithin), a condensation product of an alkylene oxide with a fatty acid (e.g., polyoxyethylene stearate), a condensation product of ethylene oxide with a long chain aliphatic alcohol (e.g., heptadecaethylene oxycetanol), a condensation product of ethylene oxide with a partial ester derived from a fatty acid and a hexitol (e.g., polyoxyethylene sorbitol mono-oleate), or a condensation product of ethylene oxide with a partial ester derived from fatty acid and a hexitol anhydride (e.g., polyoxyethylene sorbitan mono-oleate). The aqueous suspension can also contain one or more preservatives such as ethyl or n-propyl p-hydroxybenzoate, one or more coloring agents, one or more flavoring agents and one or more sweetening agents, such as sucrose, aspartame or saccharin. Formulations can be adjusted for osmolarity.

[0176] In some embodiments, oil-based pharmaceuticals are used for administration of nucleic acid sequences of the invention. Oil-based suspensions can be formulated by suspending an active agent in a vegetable oil, such as arachis oil, olive oil, sesame oil or coconut oil, or in a mineral oil such as liquid paraffin; or a mixture of these. See e.g., U.S. Pat. No. 5,716,928 describing using essential oils or essential oil components for increasing bioavailability and reducing inter- and intra-individual variability of orally administered hydrophobic pharmaceutical compounds (see also U.S. Pat. No. 5,858,401). The oil suspensions can contain a thickening agent, such as beeswax, hard paraffin or cetyl alcohol. Sweetening agents can be added to provide a palatable oral preparation, such as glycerol, sorbitol or sucrose. These formulations can be preserved by the addition of an antioxidant such as ascorbic acid. As an example of an injectable oil vehicle, see Minto (1997) J. Pharmacol. Exp. Ther. 281:93-102.

[0177] Pharmaceutical formulations can also be in the form of oil-in-water emulsions. The oily phase can be a vegetable oil or a mineral oil, described above, or a mixture of these. Suitable emulsifying agents include naturally-occurring gums, such as gum acacia and gum tragacanth, naturally occurring phosphatides, such as soybean lecithin, esters or partial esters derived from fatty acids and hexitol anhydrides, such as sorbitan mono-oleate, and condensation products of these partial esters with ethylene oxide, such as polyoxyethylene sorbitan mono-oleate. The emulsion can also contain sweetening agents and flavoring agents, as in the formulation of syrups and elixirs. Such formulations can also contain a demulcent, a preservative, or a coloring agent. In alternative embodiments, these injectable oil-in-water emulsions of the invention comprise a paraffin oil, a sorbitan monooleate, an ethoxylated sorbitan monooleate and/or an ethoxylated sorbitan trioleate.

[0178] The pharmaceutical compounds can also be administered by in intranasal, intraocular and intravaginal routes including suppositories, insufflation, powders and aerosol formulations (for examples of steroid inhalants, see e.g., Rohatagi (1995) J. Clin. Pharmacol. 35:1187-1193; Tjwa (1995) Ann. Allergy Asthma Immunol. 75:107-111). Suppositories formulations can be prepared by mixing the drug with a suitable non-irritating excipient which is solid at ordinary temperatures but liquid at body temperatures and will therefore melt in the body to release the drug. Such materials are cocoa butter and polyethylene glycols.

[0179] In some embodiments, the pharmaceutical compounds can be delivered transdermally, by a topical route, formulated as applicator sticks, solutions, suspensions, emulsions, gels, creams, ointments, pastes, jellies, paints, powders, and aerosols.

[0180] In some embodiments, the pharmaceutical compounds can also be delivered as microspheres for slow release in the body. For example, microspheres can be administered via intradermal injection of drug which slowly release subcutaneously; see Rao (1995) J. Biomater Sci. Polym. Ed. 7:623-645; as biodegradable and injectable gel formulations, see, e.g., Gao (1995) Pharm. Res. 12:857-863 (1995); or, as microspheres for oral administration, see, e.g., Eyles (1997) J. Pharm. Pharmacol. 49:669-674.

[0181] In some embodiments, the pharmaceutical compounds can be parenterally administered, such as by intravenous (IV) administration or administration into a body cavity or lumen of an organ. These formulations can comprise a solution of active agent dissolved in a pharmaceutically acceptable carrier. Acceptable vehicles and solvents that can be employed are water and Ringer's solution, an isotonic sodium chloride. In addition, sterile fixed oils can be employed as a solvent or suspending medium. For this purpose any bland fixed oil can be employed including synthetic mono- or diglycerides. In addition, fatty acids such as oleic acid can likewise be used in the preparation of injectables. These solutions are sterile and generally free of undesirable matter. These formulations may be sterilized by conventional, well known sterilization techniques. The formulations may contain pharmaceutically acceptable auxiliary substances as required to approximate physiological conditions such as pH adjusting and buffering agents, toxicity adjusting agents, e.g., sodium acetate, sodium chloride, potassium chloride, calcium chloride, sodium lactate and the like. The concentration of active agent in these formulations can vary widely, and will be selected primarily based on fluid volumes, viscosities, body weight, and the like, in accordance with the particular mode of administration selected and the patient's needs. For IV administration, the formulation can be a sterile injectable preparation, such as a sterile injectable aqueous or oleaginous suspension. This suspension can be formulated using those suitable dispersing or wetting agents and suspending agents. The sterile injectable preparation can also be a suspension in a nontoxic parenterally-acceptable diluent or solvent, such as a solution of 1,3-butanediol. The administration can be by bolus or continuous infusion (e.g., substantially uninterrupted introduction into a blood vessel for a specified period of time).

[0182] In some embodiments, the pharmaceutical compounds and formulations can be lyophilized. Stable lyophilized formulations comprising a nucleic acid can be made by lyophilizing a solution comprising a pharmaceutical of the invention and a bulking agent, e.g., mannitol, trehalose, raffinose, and sucrose or mixtures thereof. A process for preparing a stable lyophilized formulation can include lyophilizing a solution about 2.5 mg/mL protein, about 15 mg/mL sucrose, about 19 mg/mL NaCl, and a sodium citrate buffer having a pH greater than 5.5 but less than 6.5. See, e.g., U.S. 20040028670.

[0183] The compositions and formulations can be delivered by the use of liposomes. By using liposomes, particularly where the liposome surface carries ligands specific for target cells, or are otherwise preferentially directed to a specific organ, one can focus the delivery of the active agent into target cells in vivo. See, e.g., U.S. Pat. Nos. 6,063,400; 6,007,839; Al-Muhammed (1996) J. Microencapsul. 13:293-306; Chonn (1995) Curr. Opin. Biotechnol. 6:698-708; Ostro (1989) Am. J. Hosp. Pharm. 46:1576-1587. As used in the present invention, the term “liposome” means a vesicle composed of amphiphilic lipids arranged in a bilayer or bilayers. Liposomes are unilamellar or multilamellar vesicles that have a membrane formed from a lipophilic material and an aqueous interior that contains the composition to be delivered. Cationic liposomes are positively charged liposomes that are believed to interact with negatively charged DNA molecules to form a stable complex. Liposomes that are pH-sensitive or negatively-charged are believed to entrap DNA rather than complex with it. Both cationic and noncationic liposomes have been used to deliver DNA to cells.

[0184] Liposomes can also include “sterically stabilized” liposomes, i.e., liposomes comprising one or more specialized lipids. When incorporated into liposomes, these specialized lipids result in liposomes with enhanced circulation lifetimes relative to liposomes lacking such specialized lipids. Examples of sterically stabilized liposomes are those in which part of the vesicle-forming lipid portion of the liposome comprises one or more glycolipids or is derivatized with one or more hydrophilic polymers, such as a polyethylene glycol (PEG) moiety. Liposomes and their uses are further described in U.S. Pat. No. 6,287,860.

[0185] The formulations of the invention can be administered for prophylactic and/or therapeutic treatments. In some embodiments, for therapeutic applications, compositions are administered to a subject who is need of reduced triglyceride levels, or who is at risk of or has a disorder described herein, in an amount sufficient to cure, alleviate or partially arrest the clinical manifestations of the disorder or its complications; this can be called a therapeutically effective amount. For example, in some embodiments, pharmaceutical compositions of the invention are administered in an amount sufficient to decrease serum levels of triglycerides in the subject.

[0186] The amount of pharmaceutical composition adequate to accomplish this is a therapeutically effective dose. The dosage schedule and amounts effective for this use, i.e., the dosing regimen, will depend upon a variety of factors, including the stage of the disease or condition, the severity of the disease or condition, the general state of the patient's health, the patient's physical status, age and the like, and can be determined using methods known in the art. In calculating the dosage regimen for a patient, the mode of administration also is taken into consideration.

[0187] The dosage regimen also takes into consideration pharmacokinetics parameters well known in the art, i.e., the active agents' rate of absorption, bioavailability, metabolism, clearance, and the like (see, e.g., Hidalgo-Aragones (1996) J. Steroid Biochem. Mol. Biol. 58:611-617; Groning (1996) Pharmazie 51:337-341; Fotherby (1996) Contraception 54:59-69; Johnson (1995) J. Pharm. Sci. 84:1144-1146; Rohatagi (1995) Pharmazie 50:610-613; Brophy (1983) Eur. J. Clin. Pharmacol. 24:103-108; Remington: The Science and Practice of Pharmacy, 21st ed., 2005). The state of the art allows the clinician to determine the dosage regimen for each individual patient, active agent and disease or condition treated. Guidelines provided for similar compositions used as pharmaceuticals can be used as guidance to determine the dosage regiment, i.e., dose schedule and dosage levels, administered practicing the methods of the invention are correct and appropriate.

[0188] Single or multiple administrations of formulations can be given depending on for example: the dosage and frequency as required and tolerated by the patient, the degree and amount of therapeutic effect generated after each administration (e.g., effect on tumor size or growth), and the like. The formulations should provide a sufficient quantity of active agent to effectively treat, prevent or ameliorate conditions, diseases or symptoms.

[0189] In alternative embodiments, pharmaceutical formulations for oral administration are in a daily amount of between about 1 to 100 or more mg per kilogram of body weight per day. Lower dosages can be used, in contrast to administration orally, into the blood stream, into a body cavity or into a lumen of an organ. Substantially higher dosages can be used in topical or oral administration or administering by powders, spray or inhalation. Actual methods for preparing parenterally or non-parenterally administrable formulations will be known or apparent to those skilled in the art and are described in more detail in such publications as Remington: The Science and Practice of Pharmacy, 21st ed., 2005.

[0190] Various studies have reported successful mammalian dosing using complementary nucleic acid sequences. For example, Esau C., et al., (2006) Cell Metabolism, 3(2):87-98 reported dosing of normal mice with intraperitoneal doses of miR-122 antisense oligonucleotide ranging from 12.5 to 75 mg/kg twice weekly for 4 weeks. The mice appeared healthy and normal at the end of treatment, with no loss of body weight or reduced food intake. Plasma transaminase levels were in the normal range (AST 3/4 45, ALT 3/4 35) for all doses with the exception of the 75 mg/kg dose of miR-122 ASO, which showed a very mild increase in ALT and AST levels. They concluded that 50 mg/kg was an effective, non-toxic dose. Another study by Kriitzfeldt J., et al., (2005) Nature 438, 685-689, injected anatgomirs to silence miR-122 in mice using a total dose of 80, 160 or 240 mg per kg body weight. The highest dose resulted in a complete loss of miR-122 signal. In yet another study, locked nucleic acid molecules (“LNA molecules”) were successfully applied in primates to silence miR-122. Elmen J., et al., (2008) Nature 452, 896-899, report that efficient silencing of miR-122 was achieved in primates by three doses of 10 mg kg-1 LNA-antimiR, leading to a long-lasting and reversible decrease in total plasma cholesterol without any evidence for LNA-associated toxicities or histopathological changes in the study animals.

[0191] Methods of Screening

[0192] Included herein are methods for screening test compounds, e.g., polypeptides or peptides, polynucleotides or oligonucleotides, inorganic or organic large or small molecule test compounds, to identify agents useful in the treatment of cancer. As used herein, “small molecules” refers to small organic or inorganic molecules of molecular weight below about 3,000 Daltons. In general, small molecules useful for the invention have a molecular weight of less than 3,000 Daltons (Da). The small molecules can be, e.g., from at least about 100 Da to about 3,000 Da (e.g., between about 100 to about 3,000 Da, about 100 to about 2500 Da, about 100 to about 2,000 Da, about 100 to about 1,750 Da, about 100 to about 1,500 Da, about 100 to about 1,250 Da, about 100 to about 1,000 Da, about 100 to about 750 Da, about 100 to about 500 Da, about 200 to about 1500, about 500 to about 1000, about 300 to about 1000 Da, or about 100 to about 250 Da).

[0193] The test compounds can be, e.g., natural products or members of a combinatorial chemistry library. A set of diverse molecules should be used to cover a variety of functions such as charge, aromaticity, hydrogen bonding, flexibility, size, length of side chain, hydrophobicity, and rigidity. Combinatorial techniques suitable for synthesizing small molecules are known in the art, e.g., as exemplified by Obrecht and Villalgordo, Solid-Supported Combinatorial and Parallel Synthesis of Small-Molecular-Weight Compound Libraries, Pergamon-Elsevier Science Limited (1998), and include those such as the “split and pool” or “parallel” synthesis techniques, solid-phase and solution-phase techniques, and encoding techniques (see, for example, Czarnik, Curr. Opin. Chem. Bio. 1:60-6 (1997)). In addition, a number of small molecule libraries are commercially available. A number of suitable small molecule test compounds are listed in U.S. Pat. No. 6,503,713, incorporated herein by reference in its entirety.

[0194] In some embodiments, the test compounds are nucleic acids, e.g., one or more nucleic acids that have identity to all or a portion of the ATRX-binding RNA or DNA, or a set of randomly generated oligos. The oligos can be LNAs, and can be antagomirs, mixmers, or gapmers.

[0195] Libraries screened using the methods of the present invention can comprise a variety of types of test compounds. A given library can comprise a set of structurally related or unrelated test compounds. In some embodiments, the test compounds are peptide or peptidomimetic molecules. In some embodiments, the test compounds are nucleic acids.

[0196] In some embodiments, the test compounds and libraries thereof can be obtained by systematically altering the structure of a first test compound, e.g., a first test compound that is structurally similar to a known natural binding partner of the target polypeptide, or a first small molecule identified as capable of binding the target polypeptide, e.g., using methods known in the art or the methods described herein, and correlating that structure to a resulting biological activity, e.g., a structure-activity relationship study. As one of skill in the art will appreciate, there are a variety of standard methods for creating such a structure-activity relationship. Thus, in some instances, the work may be largely empirical, and in others, the three-dimensional structure of an endogenous polypeptide or portion thereof can be used as a starting point for the rational design of a small molecule compound or compounds. For example, in one embodiment, a general library of small molecules is screened, e.g., using the methods described herein.

[0197] In some embodiments, a test compound is applied to a test sample, e.g., a cancer cell, and one or more effects of the test compound is evaluated. In a cultured cancer cell for example, the ability of the test compound to inhibit proliferation or affect survival, e.g., to induce or promote cell death, is evaluated.

[0198] In some embodiments, the test sample is, or is derived from (e.g., a sample taken from) a tumor, e.g., a primary or cultured tumor cell.

[0199] Methods for evaluating each of these effects are known in the art. For example, assays of proliferation or cell survival/viability are well known in the art.

[0200] A test compound that has been screened by a method described herein and determined to inhibit proliferation or affect survival, e.g., induce or promote cell death, can be considered a candidate compound. A candidate compound that has been screened, e.g., in an in vivo model of a disorder, e.g., a xenograft model, and determined to have a desirable effect on the disorder, e.g., on growth or metastasis of a tumor, can be considered a candidate therapeutic agent. Candidate therapeutic agents, once screened in a clinical setting, are therapeutic agents. Candidate compounds, candidate therapeutic agents, and therapeutic agents can be optionally optimized and/or derivatized, and formulated with physiologically acceptable excipients to form pharmaceutical compositions.

[0201] Thus, test compounds identified as “hits” (e.g., test compounds that inhibit proliferation or affect survival, e.g., induce or promote cell death) in a first screen can be selected and systematically altered, e.g., using rational design, to optimize binding affinity, avidity, specificity, or other parameter. Such optimization can also be screened for using the methods described herein. Thus, in one embodiment, the invention includes screening a first library of compounds using a method known in the art and/or described herein, identifying one or more hits in that library, subjecting those hits to systematic structural alteration to create a second library of compounds structurally related to the hit, and screening the second library using the methods described herein.

[0202] Test compounds identified as hits can be considered candidate therapeutic compounds, useful in treating cancer. A variety of techniques useful for determining the structures of “hits” can be used in the methods described herein, e.g., NMR, mass spectrometry, gas chromatography equipped with electron capture detectors, fluorescence and absorption spectroscopy. Thus, the invention also includes compounds identified as “hits” by the methods described herein, and methods for their administration and use in the treatment, prevention, or delay of development or progression of a disorder described herein.

[0203] Test compounds identified as candidate therapeutic compounds can be further screened by administration to an animal model of a tumor, e.g., a xenograft model, as known in the art. The animal can be monitored for a change in the disorder, e.g., for an improvement in a parameter of the disorder, e.g., a parameter related to clinical outcome. In some embodiments, the parameter is tumor size, and an improvement would be a reduction or stabilization of tumor size, or a reduction in growth rate; in some embodiments, the parameter is invasiveness, and an improvement would be a reduction or delay in metastasis.

### EXAMPLES

[0204] The invention is further described in the following examples, which do not limit the scope of the invention described in the claims.

[0205] Experimental Procedures

[0206] The following materials and methods were used in Examples 1-6.

[0207] Cell Lines:

[0208] Clonal Xist knockout MEFs, Tsix^{TST}/+ ESC, and X+P and X-RA male MEF lines were described previously (Jeon and Lee, 2011; Ogawa et al., 2008; Zhang et al., 2007). Mouse embryonic fibroblasts (MEFs) were immortalized (SV40T) and selected for clonal cell lines with Xi of mus origin. The Tsix^{TST} allele ensures exclusive inactivation of the mus X-chromosome in ESC.

[0209] RNA FISH, DNA FISH and Immunostaining:

[0210] RNA FISH, DNA FISH or sequential RNA-DNA FISH and immunostaining were described previously (Zhang et al., 2007).

[0211] Immunoprecipitation and Mass Spectrometry:

[0212] Nuclear extract from 293F FLAG macroH2A cell lines was prepared and dialyzed into BC100 buffer (20 mM Tris Cl pH 7.6, 2 mM EDTA, 100 mM KCl, 10% glycerol and 0.2 mM PMSF), incubated with M2 agarose beads and washed 3× with BC300. Flag peptide eluted complexes were run SDS-PAGE gels and colloidal blue stained. MacroH2A IP specific bands were sent for mass spectrometry. Proteins were digested and extracted peptides (Wilker et al., 2007) loaded on a precolumn and separated by reverse phase HPLC (Agilent) over a 75 min gradient before nanoelectrospray using Orbitrap XL mass spectrometer (Thermo). Raw mass spectral data files were processed as described (Johnson et al., 2012). Mascot peptide identifications were verified manually with the assistance of CAMV (Curran et al., 2013).

[0213] qRT-PCR, ChIP, and UV-RNA IP:

[0214] RNA isolation and RT-PCR were performed according to manufacturer's protocols (Invitrogen). ChIP and UV crosslinked RNA immunoprecipitation were performed as described previously (Jeon and Lee, 2011). Primers and antibodies are listed in Table 6.

[0215] Protein Expression and Purification:

[0216] Full length ATRX containing an N term FLAG tag and C term HA tag was cloned into a pfastbac vector (invitrogen). Sf9 cells were infected with virus for 60 h and protein was purified using Flag M2 agarose. The helicase domain of ATRX with an N term FLAG was cloned into the pdest10 vector (invitrogen). The ADD domain of ATRX was cloned into pet101 vector and purified via a C term His tag using Ni-NTA resin (Qiagen) according to manufacturer's instructions.

[0217] RNA and DNA EMSA and Double Filter Binding Assays:

[0218] EMSAs and filter binding assays were performed as described previously (Cifuentes-Rojas et al., 2014).

[0219] In Vitro Protein-RNA Interaction Assays: 2 μl g ATRX, 2 μg PRC2 and 1 μg Repeat A RNA were combined in buffer containing 50 mM Tris-HCl pH 8.0, 100 mM NaCl, 1.5 mM MgCl₂, 10 μg/ml BSA, 0.05% NP40, 1 mM DTT, 20 U RNaseOUT (Invitrogen™), 50 ng/μl yeast tRNA (Ambion® Cat # AM7119) and 1 mM ATP in a 20 μl reaction and incubated at 37° C. for 30 min. Reactions were added to Protein G coupled a-EZH2 at 4° C. for 2 h and washed with 1× binding buffer. Beads were split in 2: for RNA and protein analyses. RNA was eluted with formamide-urea buffer, loaded on a 6% Urea-PAGE and SYBR Gold stained. Proteins were eluted by boiling beads in SDS loading buffer.

[0220] For ternary complex IPs, 3 μg ATRX, PRC2 and Repeat A RNA were incubated at 30° C. in an RNA-EMSA binding reaction (see above) and precipitated using α-HA beads. Beads were washed with 1× binding buffer and complexes eluted with 1 μg/μl HA peptide. HA eluate was incubated with a-EZH2-protein G dynabeads. After washing, beads were split into 2 parts: for RNA and protein western blot. RNA was eluted with 0.2M glycine pH 2.0, neutralized with Tris.Cl pH 8.0 and end labeled in a PNK reaction for visualization.

[0221] 200 ng of 5′ Biotin tagged Repeat A dsDNA was immobilized to Streptavidin Myone dynabeads. 25 nM ATRX and 35 nM RNA were combined in an EMSA reaction at 30° C. for 20 min, added to DNA and incubated for 20 min at 30° C. Beads were washed (as above) and nucleic acids were end labeled and resolved on an 18% Urea-PAGE gel.

[0222] Photocrosslinking:

[0223] In vitro transcription reactions were done as previously described (Hernandez et al., 2008) for 16 hrs at 37° C. with addition of 1 nM 4-Thio-UTP and ³²Pα-GTP and ³²Pα-CTP at 0.6 μM. Binding reactions were performed as described previously (Cifuentes-Rojas et al., 2014), irradiated for 12 min with 365-nm UV and digested with 0.1 ng RNase A, 1 U RNase T1 and 1 U RNase V1 for 20 min. SDS loading buffer was added and samples run on a 3-8% Tris-acetate SDS gradient gel.

[0224] ChIP-Seq Read Mapping:

[0225] ChIP-seq samples were sequenced using Illumina HiSeq2000 resulting in 25-50 million 50 bp paired-end reads per sample. Using ASAP tool (bioinformatics.babraham.ac.uk/projects/ASAP/), reads were aligned allele-specifically to CAST/EiJ and 129S1/SvJm genomes constructed using high quality polymorphisms to the C57/B16 reference genome (mm9). 25% of reads mapped uniquely and allele-specifically and 45% equally well to both genomes. Composite coverage tracks were generated using alignment against mm9 with ≦2 alternative mappings allowed. 80% of reads were aligned, with 10-15% of them discarded due to multiple alternate mappings. Input-normalized read densities were computed using SPP (Kharchenko et al., 2008) after PCR duplicate removal.

[0226] Peak Calling:

[0227] Regions of ATRX enrichment were determined based on tag counts in a 1 Kb window sliding with a 200 bp step. Statistical significance of enrichment of ChIP vs input was estimated using negative binomial distribution, with mean based on input tag count in input and size parameter (s) selected based on manual inspection of resulting peak calls. Regions of enrichment were defined by merging adjacent significantly enriched windows separated by ≦1 Kb.

[0228] Coverage Over Genomic Elements:

[0229] Coverage over TSS-proximal regions, gene bodies, or non-overlapping genome-wide 1 Kb bins was calculated from input-normalized SPP read densities. Actively expressed genes were identified using the cutoff of FPKM≧1.0 based on RNA-Seq data from (Yang et al., 2010). Input-normalized coverage over 1 Kb windows for Xist CHART and EZH2 ChIP-Seq was computed based on data from (Pinter et al., 2012; Simon et al., 2013). Significance of change in EZH2 and H3K27me3 densities produced by ATRX KD was assessed by t-test in separate quartiles of unique RefSeq genes ranked by WT ATRX density over gene body.

### Example 1. A Proteomics Screen Identifies ATRX as a Candidate XCI Regulator

[0230] Because the macroH2A (mH2A) histone variant is enriched within gene-dense bands of the Xi together with Xist RNA and PRC2 (Chadwick and Willard, 2004; Costanzi and Pehrson, 1998), we performed an unbiased proteomics screen using mH2A as bait in an affinity purification. We expressed FLAG-tagged mH2A in 293, a human fibroblast cell line, and carried out FLAG immunoprecipitation followed by mass spectrometry (IP-MS). We observed several known interactors of mH2A, including PARP1 and linker histone H1 (FIG. 1A, left and middle panels; FIG. 8A)(Nusinow et al., 2007), as well as MECP2 and HP1. In addition, IP-MS revealed the 280-kD ATRX protein (FIG. 1A, 8B). We validated all interacting proteins by Western blot after FLAG-mH2A IP (FIG. 1A, right panel, and data not shown).

[0231] ATRX caught our attention, as it was shown to be enriched on the Xi by immunofluorescence (Baumann and De La Fuente, 2009) and has an ATPase and helicase domain (Clynes et al., 2013; Ratnakumar and Bernstein, 2013). ATRX is known as an unusual SNF2-like member of the SWI/SNF family of chromatin remodelers, as it appears to have only weak remodeling activity and does not affect nucleosome phasing in vitro. It does, however, have ATPase activity that is mildly stimulated by naked DNA and mononucleosomes (Tang et al., 2004; Xue et al., 2003), and a translocase activity that displaces a third strand of a DNA triplex (Mitson et al., 2011; Xue et al., 2003). The atypical N-terminal PHD finger domain of ATRX (a.k.a., ATRX-Dnmt3-Dnmt3L [ADD] domain) binds to unmodified histone H3-lysine 4 and to di- or tri-methylated H3-lysine 9 (Dhayalan et al., 2011; Eustermann et al., 2011; Iwase et al., 2011), in keeping with ATRX's role in maintaining pericentric heterochromatin and telomeres (Goldberg et al., 2010; Lewis et al., 2010). Mutations in ATRX cause X-linked mental retardation and alpha-thalassemia in humans, with ˜80% of mutations mapping to the PHD finger and helicase domains (Gibbons et al., 2008). Although ATRX appears enriched on the Xi and plays a role in peri-implantation development (Garrick et al., 2006), whether ATRX plays a role in XCI is unknown.

[0232] To investigate, we generated clones of mouse embryonic fibroblasts (MEF) with stable ATRX knockdown (KD) (shATRX-1, -2) and >90% depletion of ATRX protein (FIG. 1B). We examined localization of EZH2, the PRC2 subunit that catalyzes the trimethylation of histone H3 at lysine-27 (H3K27me3). Interestingly, immunofluorescence showed that, while ≈=60% of WT cells showed prominent EZH2 foci on the Xi, only 16-20% of ATRX KD cells retained EZH2 (FIG. 1B). Moreover, H3K27me3 on the X-chromosome was either absent or markedly reduced in shATRX cells. At the same time, RNA fluorescent in situ hybridization (FISH) showed that Xist RNA localized poorly, with quantitative RT-PCR showing that total Xist RNA levels were reduced 40-60% (FIG. 1C). Transient ATRX KDs in MEFs (48 h) showed that EZH2 localization was similarly compromised (FIG. 1D). In transient knockdowns, there was no obvious disturbance to Xist localization or H3K27me3, consistent with the short-term stability of Xist RNA and H3K27me3. Similar results were obtained using two independent ATRX shRNAs, whereas scrambled shRNA controls (Scr) resulted in no changes to Xist, EZH2, or H3K27me3 localization. Xist levels and localization were affected only in the long term, consistent with the notion that H3K27me3 at the Xist promoter targeted by RepA facilitates Xist upregulation (Sun et al., 2006; Zhao et al., 2008) and that the H3K27me3 mark is depleted only after several rounds of DNA replication. These findings hinted at a role of ATRX in recruiting and spreading PRC2 to form a “cloud” on the Xi.

### Example 2. Xist-Mediated Recruitment of PRC2 Depends on ATRX

[0233] To examine whether there were sex-specific phenotypes of ATRX deficiency, we used a mouse embryonic stem cell (ESC) model to recapitulate random XCI during ex vivo cell differentiation. We generated male and female ESC clones with stable ATRX KD (FIG. 2A,B; representative clones shown) and compared their behavior to shScr control clones in time-course analyses from differentiation days 0-10. While no differences were evident from days 0-4, sex-specific differences emerged between days 4-8 (FIG. 2C,D). shATRX female cells showed defective embryoid body (EB) outgrowth, whereas shScr control and male shATRX clones grew robustly (FIG. 2C). Immunostaining showed appropriate downregulation of pluripotency markers, such as NANOG, between days 0-8 in all clones (FIG. 9A, B), indicating that the defect was not caused by failed entry into the differentiation pathway per se. The Xist regulator, Tsix, was also appropriately downregulated in shATRX and shScr female ESC between days 0-10 (FIG. 2D). These results indicated a developmental defect downstream of the differentiation signal. In spite of normal Tsix downregulation, however, Xist RNA was not appropriately upregulated in shATRX cells. Furthermore, EZH2 targeting was severely compromised, as only 9% of shATRX cells (n=184) showed EZH2 enrichment (FIG. 2E) and only 17% of cells showed H3K27me3 enrichment (FIG. 2F,G) on the Xi, even though H3K27me3 levels were unperturbed globally (FIG. 2G). Therefore, ATRX depletion resulted in female-specific outgrowth defects related to an inability to initiate XCI.

[0234] To probe further, we circumvented a dependency of Xist expression on ATRX and used an inducible transgenic system in which Xist RNA is upregulated by addition of doxycycline (dox)(Jeon and Lee, 2011). In this “X+P” system, Xist is carried on an autosomal transgene in male cells and is upregulated >20-fold upon induction, accompanied by recruitment of PRC2 along the autosome in cis. In stable shATRX X+P clones (FIG. 2H; representative clone #4 shown), ATRX KD did not affect total cellular EZH2 levels (FIG. 2H) and dox-induction led to an appropriate increase of Xist expression (FIG. 2I), indicating successful bypass of shATRX's effect on Xist expression. Immuno-RNA FISH showed that EZH2 and H3K27me3 enrichment were observed on the Xist-coated chromosome in 66% and 74% of ATRX+ transgenic cells, respectively, confirming the sufficiency of ectopic Xist expression to recruit and spread EZH2 in cis (FIG. 2J,K). However, on ATRX KD, EZH2 and H3K27me3 recruitment decreased to 34% and 42%, respectively. Thus, ATRX is required for Xist RNA-mediated recruitment of PRC2.

### Example 3. ATRX is a High-Affinity RNA-Binding Protein that Loads PRC2 onto Xist RNA

[0235] To ask if Xist and ATRX directly interact in vivo, we performed UV-crosslink RNA immunoprecipitation (UV-RIP; FIG. 3A). As expected, in ATRX+ transgenic system (X+P), EZH2 pulled down Xist RNA under UV crosslinking conditions, consistent with a direct interaction between EZH2 and Xist RNA (Zhao et al., 2008). Intriguingly, ATRX also pulled down Xist RNA. This association was detectable only when cells were subjected to UV-crosslinking, suggesting that Xist is directly bound to ATRX. Neither EZH2 nor ATRX pulled down the nonspecific RNA control, U1 RNA. Significantly, when ATRX was knocked down (X+P shATRX), the ability of EZH2 to interact with Xist RNA was compromised (P=0.02; FIG. 3A). Similarly, EZH2-Xist RNA interactions were disrupted in wildtype (WT) female MEF cells when ATRX was depleted (P=0.007; FIG. 3B). These data demonstrate that ATRX-Xist interaction facilitates binding of PRC2 to Xist RNA in vivo.

[0236] To understand mechanism, we characterized ATRX-RNA interactions in vitro. PRC2 binds RepA/Xist via Repeat A (Zhao et al., 2008), a 435-nt motif consisting of 8.5 repeats of a 28-nucleotide sequence, with the potential to form several structures, including two long stem-loop structures, I-II and III-IV (FIG. 3C) (Duszczyk et al., 2011; Maenner et al., 2010; Wutz et al., 2002; Zhao et al., 2008). To ask how ATRX facilitates PRC2 interaction with Repeat A, we first performed RNA electromobility shift assays (EMSA) using purified full-length ATRX (FIG. 3D, left panels, 10B). ATRX robustly shifted Repeat A in a concentration-dependent manner (FIG. 3E), with ˜100% probe binding at <100 nM ATRX protein (FIG. 10C). To determine which region of Repeat A is sufficient for ATRX binding, we split Repeat A into I-II versus III-IV (FIG. 10A) and found that binding still occurred, albeit at lower levels. We calculated dissociation constants (K_{d}) from binding isotherms plotted from densitometric analysis of double-filter binding assays (FIG. 10D). Binding curves were fitted using a nonlinear regression model, with high R² values showing excellent fit of data points to the curve (FIG. 3F). ATRX strongly bound Repeat A I-IV, with a K_{d} of 5.41±0.40 nM. Subfragments I-II and III-IV retained binding with K_{d}'s of 9.96±0.89 nM and 17.90±3.35 nM, respectively. To test the specificity of ATRX-RNA interactions, we used the first 300 nt of the Maltose Binding Protein (MBP) mRNA of Escherichia coli and the P4-P6 ribozyme of Tetrahymena, two non-cognate RNAs. Neither bound ATRX to an appreciable extent (K_{d}>>200 nM). We conclude that ATRX has high affinity and specificity for Repeat A RNA.

[0237] Interestingly, ATRX could also bind Repeat A double-stranded DNA (dsDNA; K_{d}=15.7)(FIG. 3G,H). However, it could not bind well to the single-stranded DNA (ssDNA), nor MBP and mouse Hotair dsDNAs (FIG. 3G,H; K_{d}>>200 nM). Therefore, ATRX has high affinity for both Repeat A RNA and dsDNA, and belongs to an emerging class of “bivalent” chromatin factors capable of binding both RNA and DNA [e.g., CTCF (Sun et al., 2013) and YY1 (Jeon and Lee, 2011)]. Competition analysis showed that 10-1000× molar excess of cold Repeat A dsDNA could not titrate away ATRX from Repeat A I-IV RNA probe (FIG. 10E) and, reciprocally, cold Repeat A I-IV RNA could not titrate ATRX away from the dsDNA probe (FIG. 10F), suggesting that ATRX interacts with RNA and dsDNA via distinct domains. To delineate binding domains, we generated subfragments of ATRX (FIG. 3D,I). The helicase domain could bind Repeat A RNA at 10-25 nM, but not so well as full-length ATRX. On the other hand, it bound dsDNA poorly, if at all (FIG. 3I). Gel shifts with the ADD domain showed binding to RNA at 100 nM, but not to DNA at the same concentration.

[0238] Because ATRX and PRC2 both bind Repeat A RNA, we asked whether ATRX and PRC2 could make direct contact to create an ATRX-RNA-PRC2 ternary complex. Using purified proteins, we observed that they do (FIG. 4A). This finding is consistent with a yeast two-hybrid screen in which EZH2 was identified as a directly interacting partner for ATRX (Cardoso et al., 1998), but which has not been verified by in vivo analyses. Notably, PRC2 components were not identified by our IP-MS analysis, though ATRX was a clear interacting partner (FIG. 1A). This apparent discrepancy may be due to substoichiometric ATRX-PRC2 associations in vivo and to mH2A being used as a bait in the proteomics screen. To confirm the ternary complex in vitro, we performed tandem IP, first pulling down ATRX via the HA tag, then immunoprecipitating PRC2 with an EZH2 antibody. Indeed, we observed end-labelled Repeat A RNA in the tandem IP (FIG. 4B), indicating that ATRX, PRC2, and Repeat A RNA formed a ternary complex.

[0239] Given pairwise interactions between ATRX-RNA and ATRX-DNA (FIG. 3E-I), we also explored the possibility of an ATRX-RNA-DNA ternary complex. We immobilized biotinylated Repeat A dsDNA on streptavidin beads and tested its ability to bind the ATRX-Repeat A RNA complex. We reasoned that, if the ATRX-RNA complex could engage dsDNA, RNA would be visualized after elution from the column. Under these conditions, RNA was minimally present, if at all, in the eluate (FIG. 4C). Thus, if an RNA:ATRX:dsDNA ternary complex could form, it may be too transient to detect in vitro. We conclude that ATRX, PRC2, and Repeat A RNA forms a stable ternary complex, but that ATRX likely does not form a stable ternary complex with RNA and dsDNA in vitro.

[0240] With ATRX possessing an ATPase domain, we examined how interaction dynamics might be changed by ATP. We assessed PRC2-RNA binding in the presence or absence of ATRX and/or ATP by immunoprecipitating EZH2 to quantitate the amount of RNA bound (FIG. 4D). Interestingly, ATRX's stimulatory effect was modestly increased (2-fold) in the presence of ATP, raising the possibility that ATRX may act by remodeling Repeat A to a configuration that promotes PRC2 binding. To test this idea, we carried out an RNAse protection assay with photocrosslinking. We incubated PRC2 with thiolated radiolabeled Repeat A RNA in the presence of ATRX and ATP or the non-hydrolysable analogue, AMP-PNP. The resulting complexes were subjected to UV crosslinking and treated with RNase A, T1, and V1. In principle, protein-bound radiolabeled RNA would be protected from digestion and detected in an SDS-PAGE autoradiograph. In five biological replicates, the presence of ATRX and ATP consistently resulted in greater protection of Repeat A RNA from RNAses, as visualized by the increased RNA signal bound to EZH2/SUZ12 (FIG. 4E), two known RNA-binding subunits of PRC2 (Cifuentes-Rojas et al., 2014). Together, these experiments show that ATRX stimulates binding of PRC2 to Repeat A RNA in a manner that is enhanced by ATP.

[0241] Intriguingly, ATRX bound RNA and DNA less well in the presence of ATP (FIG. 4F). However, when AMP-PNP was used, binding was not affected. This observation suggests that the nucleic acids are released by ATRX upon ATP hydrolysis. That is, ATRX may release RNA (and DNA) once the nucleic acid is reconfigured for PRC2 binding. The transient nature of the interactions may explain why a dsDNA-ATRX-RNA ternary complex was difficult to detect (FIG. 4C). The to ATRX:RNA:PRC2 ternary complex may be easier to detect (FIG. 4B) because it is held in place by both PRC2-RNA and PRC2-ATRX interactions. Combined, our data demonstrate that ATRX directly promotes binding of PRC2 to RepA/Xist RNA in vivo and in vitro.

### Example 4. A Hotspot of ATRX Localization at the Xic

[0242] We investigated genomic binding patterns for ATRX by performing chromatin immunoprecipitation with deep sequencing (ChIP-seq). To distinguish between Xa and Xi, we used genetically marked hybrid cell lines in which the Xi is invariably of Mus musculus (mus) origin and the Xa of Mus castaneus (cas) origin (Ogawa et al., 2008; Pinter et al., 2012). Analysis of two biological replicates revealed that, in MEFs and ESC, ATRX was broadly distributed along all chromosomes (Chr)—including ChrX and a representative autosome, Chr13—with preferential enrichment in gene-dense regions (FIG. 5A). Allele-specific analysis of ChIP-seq coverage density plots for ATRX, EZH2, and H3K27me3 (Pinter et al., 2012) and CHART-seq analysis of Xist RNA (Simon et al., 2013) revealed that the four epitopes were concentrated in the same regions of the Xi in female MEFs (FIG. 5B), supporting the idea that ATRX, PRC2, and Xist RNA are functionally linked. Strong ATRX binding occurred at ˜4987 sites, with 4% in promoter regions (transcription start site [TSS]±3 kb), 24% in coding gene bodies, and the rest in intergenic space (including enhancers, unannotated lncRNA transcription units)(FIG. 5C). This distribution is consistent with previous ChIP-seq analysis in male ESCs (Law et al., 2010).

[0243] Among thousands of ATRX sites on ChrX, one locus stood out (FIG. 5D-E, 11A-B). Xist was among the top genic hits in female MEFs (FIG. 5F) and was covered by ATRX along its entire length, contrasting with the restricted peaks characteristic of other loci (FIG. 11C). Allele-specific ChIP-seq of shATRX MEFs showed loss of enriched signals at Xist (FIG. 11D), confirming the specificity of the ATRX ChIP-seq analysis. ATRX enrichment at Xist was developmentally specific, being absent in pre-XCI ESC and present in post-XCI MEF. Furthermore, enrichment was observed only on the Xi (mus, FIG. 5E). However, ATRX coverage across Xi alleles was not enriched relative to the genomic average (FIG. 5G, representative Chr13 shown; KS test, P=1). Nor was ATRX coverage different on average between two classes of Xi genes—those expressed on Xa versus those that are silent (FIG. 5H; KS test, P=0.8031), indicating that ATRX was no more enriched on X-genes that are expressed in MEFs. Furthermore, ATRX coverage in genes that escape XCI was not significantly different between Xa and Xi (FIG. 5I, purple dots; KS test, P=0.75).

[0244] ChIP-qPCR confirmed that, in WT female MEFs, ATRX was significantly enriched (relative to IgG pulldowns) within the Xist gene regardless of what positions were queried (FIG. 5J). By contrast, Jarid1c—an X-linked gene that escapes XCI did not show significant ATRX enrichment. Enrichment at all Xist positions, including the nucleation center (uRF) was lost upon ATRX KD (FIG. 5J). ChIP-qPCR also verified the allele-specific nature of ATRX localization. The MEF line, Xa^{WT} Xi^{2lox} (clone 111.8), carried two loxP sites flanking a 16 kb Xist sequence on the Xi, whereas Xa^{WT} Xi^{ΔXist} (clone 111.20) carried a 16 kb conditional deletion of Xist on the Xi (Zhang et al., 2007). ATRX was significantly enriched at Xist only in the Xa^{WT} Xi^{2lox}, the cell line bearing an intact Xist gene on the Xi (FIG. 5J). Given that ATRX-RNA interactions are mediated by Repeat A RNA (FIG. 1-4), we asked whether the localization of ATRX to the chromatin hotspot depended on Repeat A DNA. In the Xist transgene model, ChIP-qPCR showed that, while deleting Repeat A (X-RA) did not affect spreading of Xist RNA along the chromosome as shown by RNA FISH (FIG. 5K, top panels)(Jeon and Lee, 2011), it abolished ATRX localization to the Xist locus (FIG. 5K, bottom graph). Repeat A is therefore essential for ATRX-Xist chromatin interactions in vivo.

[0245] We conclude that the Xi allele of Xist is a hotspot of ATRX binding. These data lead to a model in which ATRX binds the Repeat A motif and reconfigures the RepA/Xist transcript to promote PRC2 binding (FIG. 5L), with poising of ATRX at the Repeat A DNA potentially aiding ATRX-RNA interactions. Following nucleation at the Xist hotspot, the ATRX-RNA-PRC2 ternary complex spreads outwardly along the Xi.

### Example 5. ATRX-Dependent Recruitment of PRC2 on a Global Scale

[0246] We next investigated whether ATRX's effect on PRC2 localization extended beyond the Xi. We classified 21,677 annotated unique RefSeq genes into equal quartiles (Q1-Q4) based on ATRX coverage (FIG. 6A; Tables 4, 5), with Q1 having high positive ATRX coverage and Q2 moderate coverage. Interestingly, Q1 and Q2 harbored a large number of PRC2 target genes, together accounting for 63% of all autosomal PRC2 target genes. By contrast, Q3 and Q4 had near-zero or negative ATRX coverage and harbored fewer PRC2 target genes. To determine whether loss of ATRX affected PRC2 recruitment to genes marked by ATRX binding, we compared EZH2 and H3K27me3 coverages in ATRX+ versus ATRX-deficient cells (FIG. 6B). Indeed, ATRX KD affected PRC2 localization and function, with the 2- to 4-fold drop in EZH2 and H3K27me3 coverages being highly significant (FIG. 6B). Scatterplots showed an obvious shift in EZH2 and H3K27me3 coverage for Q1 PRC2 targets (FIG. 6C, purple dots; Table SI). We also examined probability density functions for EZH2 and H3K27me3 to determine the likelihood that a given gene in ATRX-deficient cells will have decreased EZH2 and H3K27me3 coverage based on the population behavior of ATRX-PRC2 target genes (FIG. 6D). The distribution for ATRX KD is left- and upwardly shifted, indicating that the probability of a target gene in ATRX KD having a low EZH2 (or H3K27me3) coverage is greater than that of the same gene in ATRX+. To examine how EZH2 and H3K27me3 patterns change within gene bodies, we performed metagene analysis (FIG. 6E). In ATRX+, EZH2 and H3K27me3 patterns showed characteristic gene-body enrichment. Upon ATRX KD, EZH2 and H3K27me3 densities dramatically decreased in Q1 and Q2 genes, with decrease occurring at TSS's and within gene bodies. Minimal changes were observed for Q3 and Q4 genes (FIG. 6E and data not shown). Analysis of biological replicates showed good reproducibility (FIG. 12A-B, data not shown). Collectively, these data demonstrate that ATRX is also required to target PRC2 to autosomal genes.

[0247] Given the loss of PRC2 from genic regions upon ATRX KD, we asked whether PRC2 became ectopically localized elsewhere. Examination of global EZH2 and H3K27me3 ChIP-seq patterns revealed an intriguing shift to intergenic space (FIG. 6F). In ATRX+, EZH2 was bound to 3178 sites, roughly distributed equally among gene bodies, promoters, and intergenic space. On the other hand, in ATRX KD, EZH2 shifted away from promoters and expanded into intergenic space. Thus, ATRX is required to specify PRC2 localization to genes in general.

[0248] Curiously, the distribution pattern for H3K27me3 peaks did not change in ATRX-depleted cells, as the percentages occurring in TSS, gene bodies, and intergenic space remained the same (FIG. 6F, purple pie charts). At the same time, bulk H3K27me3 levels also did not change on ATRX KD in MEFs and ES cells (FIG. 2G and data not shown). In spite of unchanged overall levels of H3K27me3 and genomic ChIP-seq density, there was an apparent loss of H3K27me3 peaks in many regions (FIG. 6F). Combined, these observations suggest a significant change in H3K27me3 patterns concurrent with mistargeting of PRC2. At the Polycomb target, Gpr26, loss of ATRX resulted in loss of EZH2 binding to the promoter and a relative reduction in H3K27me3 across the gene body (FIG. 6G). At Tmem200a, loss of EZH2 binding at the promoter was accompanied by a new EZH2-binding site ˜70 kb upstream in intergenic space. However, in spite of the newly acquired EZH2 site, H3K27me3 densities were not increased in the intergenic region. Altogether, these data demonstrate that loss of ATRX function causes improper PRC2 targeting, shifting bulk PRC2 to ectopic intergenic space where chaotic or unstable PRC2 accumulation results in decreased selectivity of H3K27 methylation. We conclude that ATRX is a specificity determinant for PRC2 localization and function.

[0249] To determine whether failure of PRC2 targeting results in gene expression changes, we tested specific Polycomb targets (FIG. 7A,B; 13A,B). Within the Hoxc and Hoxd clusters, EZH2 and H3K27me3 were highly enriched in ATRX+ MEFs. Upon ATRX KD, EZH2 and H3K27me3 levels were significantly reduced, as evidenced by both decreased peak numbers as well as overall coverages across the locus. Quantitative RT-PCR analysis revealed concomitant gene upregulation (FIG. 7C, 13C). At Parp12, Rnf19b, and Spock2, EZH2 bound the TSS region in ATRX+ cells (FIG. 7B). On ATRX KD, EZH2 and H3K27me3 were consistently lost at the promoters (FIG. 7B,D; biological replicate shown in FIG. 13D) and gene expression increased 2- to 5-fold at all loci (FIG. 7C). In contrast, expression of Zc3 h11a—a control that is not a Polycomb target—did not change significantly after ATRX KD. We conclude that ATRX plays a global role in gene regulation by controlling PRC2 localization.

### Example 7. Human ATRX Genomic Localization Sites

[0250] The ATRX peaks in the mm9 mouse assembly coordinates were converted to human coordinates using Galaxy Server's LiftOver utility (The liftOver utility effectively maps one genome to another, allowing rapid identification of regions of interest between successive assemblies of the same species or between two distinct species; available online at usegalaxy.org). This tool is based in the Liftover utility from the UC Santa Cruz Genome Browser. Mouse-to-human LiftOver of the mouse chromosome coordinates and strand of these mouse Peaks was performed in the Galaxy server to generate orthologous human chromosome coordinates. The parameters used were “0.1 minimum ratio of bases that must remap” from mm9 to Hg19 as is the default for the program when performing a Liftover between different species. This process and LiftOver chains are generally described in Kent et al., Proc. Nat'l Acad. Sci., 100(20) 11484-11489 (2003).

### REFERENCES

[0251] Baumann, C., and De La Fuente, R. (2009). ATRX marks the inactive X chromosome (Xi) in somatic cells and during imprinted X chromosome inactivation in trophoblast stem cells. Chromosoma 118, 209-222.
[0252] Brown, C. J., Hendrich, B. D., Rupert, J. L., Lafreniere, R. G., Xing, Y., Lawrence, J., and Willard, H. F. (1992). The human XIST gene: analysis of a 17 kb inactive X-specific RNA that contains conserved repeats and is highly localized within the nucleus. Cell 71, 527-542.
[0253] Cardoso, C., Timsit, S., Villard, L., Khrestchatisky, M., Fontes, M., and Colleaux, L. (1998). Specific interaction between the XNP/ATR-X gene product and the SET domain of the human EZH2 protein. Human molecular genetics 7, 679-684.
[0254] Chadwick, B. P., and Willard, H. F. (2004). Multiple spatially distinct types of facultative heterochromatin on the human inactive X chromosome. Proceedings of the National Academy of Sciences of the United States of America 101, 17450-17455. Cifuentes-Rojas, C., Hernandez, A. J., Sarma, K., and Lee, J. T. (2014). Regulatory Interactions between RNA and Polycomb Repressive Complex 2. Molecular cell.
[0255] Clemson, C. M., McNeil, J. A., Willard, H. F., and Lawrence, J. B. (1996). XIST RNA paints the inactive X chromosome at interphase: evidence for a novel RNA involved in nuclear/chromosome structure. The Journal of cell biology 132, 259-275.
[0256] Clynes, D., Higgs, D. R., and Gibbons, R. J. (2013). The chromatin remodeller ATRX: a repeat offender in human disease. Trends in biochemical sciences 38, 461-466.
[0257] Costanzi, C., and Pehrson, J. R. (1998). Histone macroH2A1 is concentrated in the inactive X chromosome of female mammals. Nature 393, 599-601.
[0258] Curran, T. G., Bryson, B. D., Reigelhaupt, M., Johnson, H., and White, F. M. (2013). Computer aided manual validation of mass spectrometry-based proteomic data. Methods 61, 219-226.
[0259] da Rocha, S. T., Boeva, V., Escamilla-Del-Arenal, M., Ancelin, K., Granier, C., Matias, N. R., Sanulli, S., Chow, J., Schulz, E., Picard, C., et al. (2014). Jarid2 Is Implicated in the Initial Xist-Induced Targeting of PRC2 to the Inactive X Chromosome. Molecular cell 53, 301-316.
[0260] Davidovich, C., Zheng, L., Goodrich, K. J., and Cech, T. R. (2013). Promiscuous RNA binding by Polycomb repressive complex 2. Nature structural & molecular biology 20, 1250-1257.
[0261] Dhayalan, A., Tamas, R., Bock, I., Tattermusch, A., Dimitrova, E., Kudithipudi, S., Ragozin, S., and Jeltsch, A. (2011). The ATRX-ADD domain binds to H3 tail peptides and reads the combined methylation state of K4 and K9. Human molecular genetics 20, 2195-2203.
[0262] Dupont, C., and Gribnau, J. (2013). Different flavors of X-chromosome inactivation in mammals. Current opinion in cell biology 25, 314-321.
[0263] Duszczyk, M. M., Wutz, A., Rybin, V., and Sattler, M. (2011). The Xist RNA A-repeat comprises a novel AUCG tetraloop fold and a platform for multimerization. RNA 17, 1973-1982.
[0264] Eustermann, S., Yang, J. C., Law, M. J., Amos, R., Chapman, L. M., Jelinska, C., Garrick, D., Clynes, D., Gibbons, R. J., Rhodes, D., et al. (2011). Combinatorial readout of histone H3 modifications specifies localization of ATRX to heterochromatin. Nature structural & molecular biology 18, 777-782.
[0265] Garrick, D., Sharpe, J. A., Arkell, R., Dobbie, L., Smith, A. J., Wood, W. G., Higgs, D. R., and Gibbons, R. J. (2006). Loss of Atrx affects trophoblast development and the pattern of X-inactivation in extraembryonic tissues. PLoS genetics 2, e58.
[0266] Gibbons, R. J., Wada, T., Fisher, C. A., Malik, N., Mitson, M. J., Steensma, D. P., Fryer, A., Goudie, D. R., Krantz, I. D., and Traeger-Synodinos, J. (2008). Mutations in the chromatin-associated protein ATRX. Human mutation 29, 796-802.
[0267] Goldberg, A. D., Banaszynski, L. A., Noh, K. M., Lewis, P. W., Elsaesser, S. J., Stadler, S., Dewell, S., Law, M., Guo, X., Li, X., et al. (2010). Distinct factors control histone variant H3.3 localization at specific genomic regions. Cell 140, 678-691.
[0268] Helin, K., and Dhanak, D. (2013). Chromatin proteins and modifications as drug targets. Nature 502, 480-488.
[0269] Hernandez, A., Panigrahi, A., Cifuentes-Rojas, C., Sacharidou, A., Stuart, K., and Cruz-Reyes, J. (2008). Determinants for association and guide RNA-directed endonuclease cleavage by purified RNA editing complexes from Trypanosoma brucei. Journal of molecular biology 381, 35-48.
[0270] Hoki, Y., Kimura, N., Kanbayashi, M., Amakawa, Y., Ohhata, T., Sasaki, H., and Sado, T. (2009). A proximal conserved repeat in the Xist gene is essential as a genomic element for X-inactivation in mouse. Development 136, 139-146.
[0271] Ilik, I. A., Quinn, J. J., Georgiev, P., Tavares-Cadete, F., Maticzka, D., Toscano, S., Wan, Y., Spitale, R. C., Luscombe, N., Backofen, R., et al. (2013). Tandem stem-loops in roX RNAs act together to mediate X chromosome dosage compensation in Drosophila. Molecular cell 51, 156-173.
[0272] Iwase, S., Xiang, B., Ghosh, S., Ren, T., Lewis, P. W., Cochrane, J. C., Allis, C. D., Picketts, D. J., Patel, D. J., Li, H., et al. (2011). ATRX ADD domain links an atypical histone methylation recognition mechanism to human mental-retardation syndrome. Nature structural & molecular biology 18, 769-776.
[0273] Jeon, Y., and Lee, J. T. (2011). YY1 tethers Xist RNA to the inactive X nucleation center. Cell 146, 119-133.
[0274] Johnson, H., Del Rosario, A. M., Bryson, B. D., Schroeder, M. A., Sarkaria, J. N., and White, F. M. (2012). Molecular characterization of EGFR and EGFRvIII signaling networks in human glioblastoma tumor xenografts. Molecular & cellular proteomics: MCP 11, 1724-1740.
[0275] Kaneko, S., Bonasio, R., Saldana-Meyer, R., Yoshida, T., Son, J., Nishino, K., Umezawa, A., and Reinberg, D. (2014). Interactions between JARID2 and noncoding RNAs regulate PRC2 recruitment to chromatin. Molecular cell 53, 290-300. Kaneko, S., Son, J., Shen, S. S., Reinberg, D., and Bonasio, R. (2013). PRC2 binds active promoters and contacts nascent RNAs in embryonic stem cells. Nature structural & molecular biology 20, 1258-1264.
[0276] Kanhere, A., Viiri, K., Araujo, C. C., Rasaiyaah, J., Bouwman, R. D., Whyte, W. A., Pereira, C. F., Brookes, E., Walker, K., Bell, G. W., et al. (2010). Short RNAs Are Transcribed from Repressed Polycomb Target Genes and Interact with Polycomb Repressive Complex-2. Molecular cell 38, 675-688.
[0277] Khalil, A. M., Guttman, M., Huarte, M., Garber, M., Raj, A., Rivea Morales, D., Thomas, K., Presser, A., Bernstein, B. E., van Oudenaarden, A., et al. (2009). Many human large intergenic noncoding RNAs associate with chromatin-modifying complexes and affect gene expression. Proceedings of the National Academy of Sciences of the United States of America.
[0278] Kharchenko, P. V., Tolstorukov, M. Y., and Park, P. J. (2008). Design and analysis of ChIP-seq experiments for DNA-binding proteins. Nature biotechnology 26, 1351-1359.
[0279] Law, M. J., Lower, K. M., Voon, H. P., Hughes, J. R., Garrick, D., Viprakasit, V., Mitson, M., De Gobbi, M., Marra, M., Morris, A., et al. (2010). ATR-X syndrome protein targets tandem repeats and influences allele-specific expression in a size-dependent manner. Cell 143, 367-378.
[0280] Lee, J. T. (2012). Epigenetic regulation by long noncoding RNAs. Science 338, 1435-1439.
[0281] Lee, J. T., and Bartolomei, M. S. (2013). X-inactivation, imprinting, and long noncoding RNAs in health and disease. Cell 152, 1308-1323.
[0282] Lee, J. T., Davidow, L. S., and Warshawsky, D. (1999). Tsix, a gene antisense to Xist at the X-inactivation centre. Nature genetics 21, 400-404.
[0283] Lewis, P. W., Elsaesser, S. J., Noh, K. M., Stadler, S. C., and Allis, C. D. (2010). Daxx is an H3.3-specific histone chaperone and cooperates with ATRX in replication-independent chromatin assembly at telomeres. Proceedings of the National Academy of Sciences of the United States of America 107, 14075-14080.
[0284] Maenner, S., Blaud, M., Fouillen, L., Savoye, A., Marchand, V., Dubois, A., Sanglier-Cianferani, S., Van Dorsselaer, A., Clerc, P., Avner, P., et al. (2010). 2-D structure of the A region of Xist RNA and its implication for PRC2 association. PLoS biology 8, e1000276.
[0285] Maenner, S., Muller, M., Frohlich, J., Langer, D., and Becker, P. B. (2013). ATP-dependent roX RNA remodeling by the helicase maleless enables specific association of MSL proteins. Molecular cell 51, 174-184.
[0286] Mitson, M., Kelley, L. A., Sternberg, M. J., Higgs, D. R., and Gibbons, R. J. (2011). Functional significance of mutations in the Snf2 domain of ATRX. Human molecular genetics 20, 2603-2610.
[0287] Muller, J., and Verrijzer, P. (2009). Biochemical mechanisms of gene regulation by polycomb group protein complexes. Current opinion in genetics & development 19, 150-158.
[0288] Nusinow, D. A., Hernandez-Munoz, I., Fazzio, T. G., Shah, G. M., Kraus, W. L., and Panning, B. (2007). Poly(ADP-ribose) polymerase 1 is inhibited by a histone H2A variant, MacroH2A, and contributes to silencing of the inactive X chromosome. The Journal of biological chemistry 282, 12851-12859.
[0289] Ogawa, Y., Sun, B. K., and Lee, J. T. (2008). Intersection of the RNA interference and X-inactivation pathways. Science 320, 1336-1341.
[0290] Pinter, S. F., Sadreyev, R. I., Yildirim, E., Jeon, Y., Ohsumi, T. K., Borowsky, M., and Lee, J. T. (2012). Spreading of X chromosome inactivation via a hierarchy of defined Polycomb stations. Genome research 22, 1864-1876.
[0291] Ratnakumar, K., and Bernstein, E. (2013). ATRX: the case of a peculiar chromatin remodeler. Epigenetics: official journal of the DNA Methylation Society 8, 3-9.
[0292] Simon, J. A., and Kingston, R. E. (2013). Occupying chromatin: Polycomb mechanisms for getting to genomic targets, stopping transcriptional traffic, and staying put. Molecular cell 49, 808-824.
[0293] Simon, M. D., Pinter, S. F., Fang, R., Sarma, K., Rutenberg-Schoenberg, M., Bowman, S. K., Kesner, B. A., Maier, V. K., Kingston, R. E., and Lee, J. T. (2013). High-resolution Xist binding maps reveal two-step spreading during X-chromosome inactivation. Nature 504, 465-469.
[0294] Starmer, J., and Magnuson, T. (2009). A new model for random X chromosome inactivation. Development 136, 1-10.
[0295] Sun, B. K., Deaton, A. M., and Lee, J. T. (2006). A transient heterochromatic state in Xist preempts X inactivation choice without RNA stabilization. Molecular cell 21, 617-628.
[0296] Sun, S., Del Rosario, B. C., Szanto, A., Ogawa, Y., Jeon, Y., and Lee, J. T. (2013). Jpx RNA activates Xist by evicting CTCF. Cell 153, 1537-1551.
[0297] Tang, J., Wu, S., Liu, H., Stratt, R., Barak, O. G., Shiekhattar, R., Picketts, D. J., and Yang, X. (2004). A novel transcription regulatory complex containing death domain-associated protein and the ATR-X syndrome protein. The Journal of biological chemistry 279, 20369-20377.
[0298] Tian, D., Sun, S., and Lee, J. T. (2010). The long noncoding RNA, Jpx, is a molecular switch for X chromosome inactivation. Cell 143, 390-403.
[0299] Wilker, E. W., van Vugt, M. A., Artim, S. A., Huang, P. H., Petersen, C. P., Reinhardt, H. C., Feng, Y., Sharp, P. A., Sonenberg, N., White, F. M., et al. (2007). 14-3-3sigma controls mitotic translation to facilitate cytokinesis. Nature 446, 329-332.
[0300] Wutz, A. (2011). Gene silencing in X-chromosome inactivation: advances in understanding facultative heterochromatin formation. Nat Rev Genet 12, 542-553.
[0301] Wutz, A., Rasmussen, T. P., and Jaenisch, R. (2002). Chromosomal silencing and localization are mediated by different domains of Xist RNA. Nature genetics 30, 167-174.
[0302] Xue, Y., Gibbons, R., Yan, Z., Yang, D., McDowell, T. L., Sechi, S., Qin, J., Zhou, S., Higgs, D., and Wang, W. (2003). The ATRX syndrome protein forms a chromatin-remodeling complex with Daxx and localizes in promyelocytic leukemia nuclear bodies. Proceedings of the National Academy of Sciences of the United States of America 100, 10635-10640.
[0303] Yang, F., Babak, T., Shendure, J., and Disteche, C. M. (2010). Global survey of escape from X inactivation by RNA-sequencing in mouse. Genome research 20, 614-622.
[0304] Yildirim, E., Sadreyev, R. I., Pinter, S. F., and Lee, J. T. (2012). X-chromosome hyperactivation in mammals via nonlinear relationships between chromatin states and transcription. Nature structural & molecular biology 19, 56-61.
[0305] Zhang, L. F., Huynh, K. D., and Lee, J. T. (2007). Perinucleolar targeting of the inactive X during S phase: evidence for a role in the maintenance of silencing. Cell 129, 693-706.
[0306] Zhao, J., Ohsumi, T. K., Kung, J. T., Ogawa, Y., Grau, D. J., Sarma, K., Song, J. J., Kingston, R. E., Borowsky, M., and Lee, J. T. (2010). Genome-wide identification of polycomb-associated RNAs by RIP-seq. Molecular cell 40, 939-953.
[0307] Zhao, J., Sun, B. K., Erwin, J. A., Song, J. J., and Lee, J. T. (2008). Polycomb proteins targeted by a short repeat RNA to the mouse X chromosome. Science 322, 750-756.

TABLE 1

| chromo- | | | | | |
|---|---|---|---|---|---|
| some | start | stop | strand | nearest gene | ID |
| 1 | 3984200 | 3985200 | + | int | 1 |
| 1 | 4048800 | 4050200 | + | int | 2 |
| 1 | 4837600 | 4839000 | + | int | 3 |
| 1 | 4946800 | 4947800 | − | Rgs20 | 4 |
| 1 | 4946800 | 4947800 | − | Rgs20 | 5 |
| 1 | 5096200 | 5097400 | + | Atp6v1h | 6 |
| 1 | 5347000 | 5348600 | + | int | 7 |
| 1 | 5953600 | 5955000 | + | int | 8 |
| 1 | 6010600 | 6011600 | + | int | 9 |
| 1 | 6712600 | 6713600 | + | int | 10 |
| 1 | 7165200 | 7166200 | + | int | 11 |
| 1 | 8145200 | 8146400 | + | int | 12 |
| 1 | 8846000 | 8847000 | − | Sntg1 | 13 |
| 1 | 9017600 | 9018600 | − | Sntg1 | 14 |
| 1 | 9171800 | 9172800 | − | Sntg1 | 15 |
| 1 | 9182000 | 9183000 | − | Sntg1 | 16 |
| 1 | 9431800 | 9433000 | + | int | 17 |
| 1 | 9504600 | 9506000 | + | int | 18 |
| 1 | 9568400 | 9569400 | − | 2610203C22Rik | 19 |
| 1 | 9711800 | 9713200 | + | int | 20 |
| 1 | 12136200 | 12137200 | + | int | 21 |
| 1 | 12151000 | 12152000 | + | int | 22 |
| 1 | 12348200 | 12349200 | + | int | 23 |
| 1 | 12665000 | 12666000 | + | int | 24 |
| 1 | 13447200 | 13448200 | + | int | 25 |
| 1 | 13609000 | 13610200 | + | int | 26 |
| 1 | 13675800 | 13676800 | + | Xkr9 | 27 |
| 1 | 16761800 | 16762800 | + | int | 28 |
| 1 | 16900600 | 16901600 | + | int | 29 |
| 1 | 17350400 | 17351800 | + | int | 30 |
| 1 | 17505400 | 17506400 | + | int | 31 |
| 1 | 17510600 | 17511600 | + | int | 32 |
| 1 | 17666400 | 17667400 | + | int | 33 |
| 1 | 17786400 | 17787600 | + | int | 34 |
| 1 | 18033000 | 18034000 | + | int | 35 |
| 1 | 18265000 | 18266200 | + | int | 36 |
| 1 | 18790600 | 18791600 | + | int | 37 |
| 1 | 18812200 | 18813600 | + | int | 38 |
| 1 | 19122000 | 19123800 | + | Tcfap2d | 39 |
| 1 | 19285000 | 19286200 | + | int | 40 |
| 1 | 19351000 | 19352000 | + | int | 41 |
| 1 | 20046400 | 20047400 | + | int | 42 |
| 1 | 20121200 | 20122200 | − | Pkhd1 | 43 |
| 1 | 20571800 | 20572800 | − | Pkhd1 | 44 |
| 1 | 20932200 | 20933400 | + | int | 45 |
| 1 | 21492600 | 21493800 | − | Kcnq5 | 46 |
| 1 | 22013800 | 22014800 | + | int | 47 |
| 1 | 22680000 | 22681000 | − | Rims1 | 48 |
| 1 | 22854000 | 22855000 | + | int | 49 |
| 1 | 23704000 | 23705200 | + | int | 50 |
| 1 | 24429800 | 24430800 | − | Col19a1 | 51 |
| 1 | 25036800 | 25038000 | + | int | 52 |
| 1 | 25090000 | 25091400 | + | int | 53 |
| 1 | 25194400 | 25195600 | − | Bai3 | 54 |
| 1 | 25517600 | 25518800 | − | Bai3 | 55 |
| 1 | 25687400 | 25688400 | − | Bai3 | 56 |
| 1 | 25732600 | 25733600 | − | Bai3 | 57 |
| 1 | 25944200 | 25945400 | + | int | 58 |
| 1 | 26027800 | 26028800 | + | int | 59 |
| 1 | 26401400 | 26402400 | + | int | 60 |
| 1 | 26623800 | 26625400 | + | int | 61 |
| 1 | 26872200 | 26873200 | + | int | 62 |
| 1 | 26906600 | 26908000 | + | int | 63 |
| 1 | 27433800 | 27434800 | + | int | 64 |
| 1 | 27537400 | 27538800 | + | int | 65 |
| 1 | 27592600 | 27593600 | + | int | 66 |
| 1 | 27597800 | 27599000 | + | int | 67 |
| 1 | 27602600 | 27604400 | + | int | 68 |
| 1 | 27657600 | 27658600 | + | int | 69 |
| 1 | 27663200 | 27664400 | + | int | 70 |
| 1 | 27694200 | 27695200 | + | int | 71 |
| 1 | 27857200 | 27858200 | + | int | 72 |
| 1 | 27957000 | 27958200 | + | int | 73 |
| 1 | 28422400 | 28423400 | + | int | 74 |
| 1 | 28878400 | 28879600 | + | int | 75 |
| 1 | 29610200 | 29611600 | + | int | 76 |
| 1 | 29847800 | 29848800 | + | int | 77 |
| 1 | 29889000 | 29890000 | + | int | 78 |
| 1 | 30060600 | 30062200 | + | int | 79 |
| 1 | 30103800 | 30105000 | + | int | 80 |
| 1 | 30174800 | 30176400 | + | int | 81 |
| 1 | 30373000 | 30374000 | + | int | 82 |
| 1 | 30746200 | 30747800 | + | int | 83 |
| 1 | 31501400 | 31502400 | + | int | 84 |
| 1 | 31683600 | 31684800 | + | int | 85 |
| 1 | 31814600 | 31815600 | + | int | 86 |
| 1 | 31850000 | 31851600 | + | int | 87 |
| 1 | 32473400 | 32474800 | + | Khdrbs2 | 88 |
| 1 | 32614000 | 32615000 | + | Khdrbs2 | 89 |
| 1 | 32852000 | 32853600 | + | int | 90 |
| 1 | 33239000 | 33240400 | + | int | 91 |
| 1 | 33883000 | 33884000 | + | int | 92 |
| 1 | 35496600 | 35497600 | + | int | 93 |
| 1 | 36586400 | 36587600 | − | Ankrd23 | 94 |
| 1 | 40794600 | 40795600 | + | Slc9a2 | 95 |
| 1 | 41579400 | 41581000 | + | int | 96 |
| 1 | 43427600 | 43428600 | + | int | 97 |
| 1 | 44004400 | 44005400 | + | Tpp2 | 98 |
| 1 | 44148400 | 44149600 | − | 1700029F09Rik | 99 |
| 1 | 44207000 | 44208000 | + | Ercc5 | 100 |
| 1 | 44691200 | 44692200 | + | Gulp1 | 101 |
| 1 | 44700800 | 44701800 | + | Gulp1 | 102 |
| 1 | 44811600 | 44812800 | + | Gulp1 | 103 |
| 1 | 44923600 | 44924800 | + | int | 104 |
| 1 | 45034000 | 45035200 | + | int | 105 |
| 1 | 45039800 | 45040800 | + | int | 106 |
| 1 | 45130800 | 45131800 | + | int | 107 |
| 1 | 45283800 | 45285000 | + | int | 108 |
| 1 | 45709600 | 45710800 | + | int | 109 |
| 1 | 45803800 | 45805400 | + | int | 110 |
| 1 | 46892000 | 46893000 | − | Slc39a10 | 111 |
| 1 | 47883800 | 47884800 | + | int | 112 |
| 1 | 48021600 | 48022600 | + | int | 113 |
| 1 | 48066000 | 48067000 | + | int | 114 |
| 1 | 48099200 | 48101000 | + | int | 115 |
| 1 | 48167200 | 48168200 | + | int | 116 |
| 1 | 48622000 | 48623200 | + | int | 117 |
| 1 | 48764800 | 48766000 | + | int | 118 |
| 1 | 48836800 | 48837800 | + | int | 119 |
| 1 | 49156000 | 49157400 | + | int | 120 |
| 1 | 49248000 | 49249200 | + | int | 121 |
| 1 | 49253400 | 49254400 | + | int | 122 |
| 1 | 49284400 | 49285600 | + | int | 123 |
| 1 | 49406000 | 49407000 | + | int | 124 |
| 1 | 49421000 | 49422000 | + | int | 125 |
| 1 | 49549000 | 49550400 | + | int | 126 |
| 1 | 49637800 | 49638800 | + | int | 127 |
| 1 | 49675000 | 49676000 | + | int | 128 |
| 1 | 49930000 | 49931200 | + | int | 129 |
| 1 | 50024200 | 50025800 | + | int | 130 |
| 1 | 50159800 | 50161200 | + | int | 131 |
| 1 | 50300200 | 50301200 | + | int | 132 |
| 1 | 50363000 | 50364400 | + | int | 133 |
| 1 | 50502200 | 50503200 | + | int | 134 |
| 1 | 50751600 | 50752800 | + | int | 135 |
| 1 | 50851600 | 50852600 | + | int | 136 |
| 1 | 51025200 | 51026200 | + | Tmeff2 | 137 |
| 1 | 51217000 | 51218000 | + | Tmeff2 | 138 |
| 1 | 51638600 | 51639800 | + | int | 139 |
| 1 | 51780200 | 51781200 | + | int | 140 |
| 1 | 52048600 | 52049800 | + | int | 141 |
| 1 | 52735600 | 52737000 | − | Mfsd6 | 142 |
| 1 | 52735600 | 52737000 | − | Mfsd6 | 143 |
| 1 | 52834000 | 52835400 | + | int | 144 |
| 1 | 53224000 | 53225000 | − | 1700019A02Rik | 145 |
| 1 | 53305200 | 53306200 | − | Pms1 | 146 |
| 1 | 53431200 | 53432600 | + | int | 147 |
| 1 | 54287000 | 54288000 | + | int | 148 |
| 1 | 55471200 | 55472200 | + | Plcl1 | 149 |
| 1 | 55526000 | 55527600 | + | Plcl1 | 150 |
| 1 | 55744800 | 55746000 | + | Plcl1 | 151 |
| 1 | 55747200 | 55748600 | + | Plcl1 | 152 |
| 1 | 56491600 | 56492600 | + | int | 153 |
| 1 | 56655600 | 56656600 | + | int | 154 |
| 1 | 56838200 | 56840000 | + | int | 155 |
| 1 | 57442400 | 57443600 | + | int | 156 |
| 1 | 57912600 | 57913600 | + | Spats2l | 157 |
| 1 | 57912600 | 57913600 | + | Spats2l | 158 |
| 1 | 58763800 | 58765000 | + | int | 159 |
| 1 | 58864200 | 58865200 | + | Casp8 | 160 |
| 1 | 58864200 | 58865200 | + | Casp8 | 161 |
| 1 | 58906800 | 58907800 | + | int | 162 |
| 1 | 59786600 | 59788000 | + | int | 163 |
| 1 | 59982600 | 59983800 | + | Fam117b | 164 |
| 1 | 60704400 | 60705400 | + | int | 165 |
| 1 | 61454000 | 61455200 | + | int | 166 |
| 1 | 61521600 | 61522800 | + | int | 167 |
| 1 | 61883200 | 61884200 | + | Pard3b | 168 |
| 1 | 61933600 | 61934600 | + | Pard3b | 169 |
| 1 | 62774600 | 62776000 | + | Nrp2 | 170 |
| 1 | 62774600 | 62776000 | + | Nrp2 | 171 |
| 1 | 63411200 | 63412200 | + | int | 172 |
| 1 | 64313400 | 64314800 | + | int | 173 |
| 1 | 65117600 | 65118600 | − | Crygc | 174 |
| 1 | 65117600 | 65118600 | − | Crygc | 175 |
| 1 | 65146400 | 65148000 | − | Cryga | 176 |
| 1 | 65300000 | 65301000 | + | Pikfyve | 177 |
| 1 | 65409800 | 65410800 | + | Pth2r | 178 |
| 1 | 65577200 | 65578800 | + | int | 179 |
| 1 | 65649200 | 65650200 | + | int | 180 |
| 1 | 66493600 | 66494600 | + | int | 181 |
| 1 | 66559600 | 66561200 | + | Unc80 | 182 |
| 1 | 66892400 | 66893600 | − | Acadl | 183 |
| 1 | 67173600 | 67174800 | + | Cps1 | 184 |
| 1 | 68347600 | 68349000 | − | Erbb4 | 185 |
| 1 | 68414400 | 68416000 | − | Erbb4 | 186 |
| 1 | 68643400 | 68644600 | − | Erbb4 | 187 |
| 1 | 68688000 | 68689000 | − | Erbb4 | 188 |
| 1 | 68912600 | 68913600 | − | Erbb4 | 189 |
| 1 | 69452200 | 69453200 | + | int | 190 |
| 1 | 69606000 | 69607200 | − | Ikzf2 | 191 |
| 1 | 69895200 | 69896200 | + | Spag16 | 192 |
| 1 | 70667800 | 70669000 | + | Spag16 | 193 |
| 1 | 70667800 | 70669000 | + | Spag16 | 194 |
| 1 | 70774800 | 70775800 | + | Vwc2l | 195 |
| 1 | 71738800 | 71739800 | + | int | 196 |
| 1 | 72160000 | 72161600 | + | int | 197 |
| 1 | 72602200 | 72603400 | + | int | 198 |
| 1 | 73456200 | 73457200 | − | Pinc | 199 |
| 1 | 74399400 | 74400600 | + | Pnkd | 200 |
| 1 | 74399400 | 74400600 | + | Pnkd | 201 |
| 1 | 74618000 | 74619000 | − | Zfp142 | 202 |
| 1 | 75227200 | 75228400 | + | int | 203 |
| 1 | 75487600 | 75488600 | − | Obsl1 | 204 |
| 1 | 75814400 | 75815800 | + | int | 205 |
| 1 | 77567000 | 77568200 | + | int | 206 |
| 1 | 79414200 | 79415400 | + | int | 207 |
| 1 | 79541800 | 79543000 | + | int | 208 |
| 1 | 80037600 | 80038600 | + | int | 209 |
| 1 | 80457200 | 80458400 | + | int | 210 |
| 1 | 80912200 | 80913800 | + | int | 211 |
| 1 | 80936000 | 80937000 | + | int | 212 |
| 1 | 80987000 | 80988000 | + | int | 213 |
| 1 | 81125400 | 81126400 | + | 9430031J16Rik | 214 |
| 1 | 81461200 | 81462400 | + | int | 215 |
| 1 | 81593000 | 81594000 | + | int | 216 |
| 1 | 81878800 | 81880200 | + | int | 217 |
| 1 | 82506800 | 82508000 | − | Col4a4 | 218 |
| 1 | 84984400 | 84985400 | + | int | 219 |
| 1 | 84989800 | 84991200 | + | int | 220 |
| 1 | 85082800 | 85084000 | + | int | 221 |
| 1 | 85110800 | 85111800 | + | int | 222 |
| 1 | 85118000 | 85119000 | + | int | 223 |
| 1 | 85184200 | 85185600 | + | int | 224 |
| 1 | 85197200 | 85198400 | + | Gm7609 | 225 |
| 1 | 87349400 | 87350400 | + | int | 226 |
| 1 | 87534600 | 87535600 | + | Sp140 | 227 |
| 1 | 87822600 | 87823800 | + | int | 228 |
| 1 | 88996600 | 88997600 | − | Alpi | 229 |
| 1 | 89379000 | 89380000 | − | Ngef | 230 |
| 1 | 89379000 | 89380000 | − | Ngef | 231 |
| 1 | 90231800 | 90232800 | + | Trpm8 | 232 |
| 1 | 90239600 | 90240600 | + | Trpm8 | 233 |
| 1 | 90919000 | 90920000 | + | int | 234 |
| 1 | 91654000 | 91655200 | + | Agap1 | 235 |
| 1 | 92299200 | 92300600 | + | int | 236 |
| 1 | 93012000 | 93013000 | + | Lrrfip1 | 237 |
| 1 | 93012000 | 93013000 | + | Lrrfip1 | 238 |
| 1 | 93012000 | 93013000 | + | Lrrfip1 | 239 |
| 1 | 93560400 | 93561600 | + | int | 240 |
| 1 | 95684600 | 95685600 | + | Atg4b | 241 |
| 1 | 95747600 | 95748800 | + | D2hgdh | 242 |
| 1 | 95813400 | 95814600 | + | int | 243 |
| 1 | 96748600 | 96750200 | + | int | 244 |
| 1 | 96754600 | 96755600 | + | int | 245 |
| 1 | 96883400 | 96884400 | + | int | 246 |
| 1 | 96969200 | 96970200 | + | int | 247 |
| 1 | 96976400 | 96977400 | + | int | 248 |
| 1 | 98315400 | 98316400 | + | int | 249 |
| 1 | 98356400 | 98357400 | + | int | 250 |
| 1 | 98534000 | 98535200 | + | int | 251 |
| 1 | 98542600 | 98543600 | + | int | 252 |
| 1 | 98842200 | 98843200 | − | Slco6b1 | 253 |
| 1 | 98893400 | 98894400 | − | Slco6b1 | 254 |
| 1 | 99522600 | 99523600 | + | int | 255 |
| 1 | 100160200 | 100161600 | + | int | 256 |
| 1 | 100437600 | 100438600 | + | int | 257 |
| 1 | 100961600 | 100962600 | + | int | 258 |
| 1 | 101285400 | 101287200 | + | int | 259 |
| 1 | 101693000 | 101694000 | + | Cntnap5b | 260 |
| 1 | 102018600 | 102019600 | + | Cntnap5b | 261 |
| 1 | 102054000 | 102055000 | + | Cntnap5b | 262 |
| 1 | 102087000 | 102088200 | + | Cntnap5b | 263 |
| 1 | 102168800 | 102169800 | + | Cntnap5b | 264 |
| 1 | 102316200 | 102317200 | + | Cntnap5b | 265 |
| 1 | 102570200 | 102571200 | + | int | 266 |
| 1 | 103103000 | 103104000 | + | int | 267 |
| 1 | 103106600 | 103107600 | + | int | 268 |
| 1 | 103594200 | 103595200 | + | int | 269 |
| 1 | 104052200 | 104053200 | + | int | 270 |
| 1 | 104927600 | 104928600 | + | int | 271 |
| 1 | 105221800 | 105222800 | + | int | 272 |
| 1 | 106094800 | 106096200 | + | int | 273 |
| 1 | 106391000 | 106392000 | + | int | 274 |
| 1 | 108923400 | 108924800 | + | int | 275 |
| 1 | 109016200 | 109017800 | + | int | 276 |
| 1 | 109115600 | 109116600 | + | int | 277 |
| 1 | 109803000 | 109804000 | + | int | 278 |
| 1 | 110131200 | 110132200 | + | int | 279 |
| 1 | 110406400 | 110408000 | + | int | 280 |
| 1 | 110413200 | 110414800 | + | int | 281 |
| 1 | 110624400 | 110625600 | + | int | 282 |
| 1 | 110852800 | 110853800 | + | int | 283 |
| 1 | 111057800 | 111059000 | + | int | 284 |
| 1 | 111122400 | 111123400 | + | int | 285 |
| 1 | 111166000 | 111167200 | + | int | 286 |
| 1 | 111228000 | 111229600 | + | int | 287 |
| 1 | 111429400 | 111430400 | + | int | 288 |
| 1 | 111825800 | 111827000 | + | int | 289 |
| 1 | 111881400 | 111882600 | + | Cdh7 | 290 |
| 1 | 112163200 | 112164200 | + | int | 291 |
| 1 | 112224400 | 112225400 | + | int | 292 |
| 1 | 112600000 | 112601200 | + | int | 293 |
| 1 | 112717600 | 112718600 | + | int | 294 |
| 1 | 112945200 | 112946800 | + | int | 295 |
| 1 | 113378000 | 113379200 | + | int | 296 |
| 1 | 113415000 | 113416000 | + | int | 297 |
| 1 | 113539800 | 113540800 | + | int | 298 |
| 1 | 113748400 | 113749400 | + | int | 299 |
| 1 | 113796400 | 113797600 | + | int | 300 |
| 1 | 114220600 | 114222200 | + | int | 301 |
| 1 | 114561400 | 114562400 | + | int | 302 |
| 1 | 114798000 | 114799000 | + | int | 303 |
| 1 | 114844000 | 114845000 | + | int | 304 |
| 1 | 115298200 | 115299200 | + | int | 305 |
| 1 | 116072000 | 116073200 | + | int | 306 |
| 1 | 117155200 | 117156400 | + | int | 307 |
| 1 | 117175800 | 117177200 | + | int | 308 |
| 1 | 117248400 | 117250000 | + | int | 309 |
| 1 | 117259000 | 117260000 | + | int | 310 |
| 1 | 118071200 | 118072400 | + | Cntnap5a | 311 |
| 1 | 118353400 | 118354800 | + | Cntnap5a | 312 |
| 1 | 118976600 | 118978000 | + | int | 313 |
| 1 | 119674800 | 119676400 | + | int | 314 |
| 1 | 120652600 | 120653800 | + | int | 315 |
| 1 | 121194200 | 121195200 | + | int | 316 |
| 1 | 121378600 | 121379600 | − | Ralb | 317 |
| 1 | 121459200 | 121460400 | − | Epb4int1l5 | 318 |
| 1 | 121787600 | 121788800 | + | int | 319 |
| 1 | 122042400 | 122043400 | + | 3110009E18Rik | 320 |
| 1 | 122238200 | 122239200 | + | C1ql2 | 321 |
| 1 | 123776800 | 123777800 | + | int | 322 |
| 1 | 124084200 | 124085200 | + | int | 323 |
| 1 | 125032000 | 125033400 | + | int | 324 |
| 1 | 125600200 | 125601200 | − | Dpp10 | 325 |
| 1 | 126102400 | 126103600 | + | int | 326 |
| 1 | 127691600 | 127692600 | + | Gpr39 | 327 |
| 1 | 129208000 | 129209000 | + | Mgat5 | 328 |
| 1 | 130804200 | 130806000 | + | int | 329 |
| 1 | 130997600 | 130998600 | + | int | 330 |
| 1 | 131050000 | 131051000 | + | int | 331 |
| 1 | 131491800 | 131492800 | + | Thsd7b | 332 |
| 1 | 131874800 | 131876200 | + | Thsd7b | 333 |
| 1 | 131917000 | 131918400 | + | Thsd7b | 334 |
| 1 | 132255600 | 132256800 | + | int | 335 |
| 1 | 132260400 | 132261400 | + | int | 336 |
| 1 | 133434200 | 133435200 | + | Fam72a | 337 |
| 1 | 134603600 | 134604800 | − | Nfasc | 338 |
| 1 | 134603600 | 134604800 | − | Nfasc | 339 |
| 1 | 135678200 | 135679400 | + | int | 340 |
| 1 | 136302600 | 136303800 | + | Cyb5r1 | 341 |
| 1 | 136584800 | 136586000 | + | Syt2 | 342 |
| 1 | 136694600 | 136695600 | − | 9530009M10Rik | 343 |
| 1 | 136694600 | 136695600 | − | Ppp1r12b | 344 |
| 1 | 138808200 | 138809400 | − | Nr5a2 | 345 |
| 1 | 138808200 | 138809400 | − | Nr5a2 | 346 |
| 1 | 138906600 | 138907800 | + | int | 347 |
| 1 | 139059200 | 139060200 | + | int | 348 |
| 1 | 139217000 | 139218200 | + | int | 349 |
| 1 | 139257200 | 139258200 | + | int | 350 |
| 1 | 140710400 | 140711400 | + | int | 351 |
| 1 | 141290000 | 141291000 | + | int | 352 |
| 1 | 141668000 | 141669000 | − | EG214403 | 353 |
| 1 | 141728600 | 141729800 | − | BC026782 | 354 |
| 1 | 141743600 | 141744600 | − | BC026782 | 355 |
| 1 | 141831600 | 141833200 | + | int | 356 |
| 1 | 141938600 | 141939600 | + | int | 357 |
| 1 | 142041600 | 142042600 | − | Cfh | 358 |
| 1 | 142049800 | 142051400 | − | Cfh | 359 |
| 1 | 142505000 | 142506000 | + | Kcnt2 | 360 |
| 1 | 142552800 | 142553800 | + | int | 361 |
| 1 | 142761000 | 142762000 | + | int | 362 |
| 1 | 142915200 | 142916600 | + | int | 363 |
| 1 | 143056000 | 143057000 | + | int | 364 |
| 1 | 143193200 | 143194600 | + | int | 365 |
| 1 | 143608400 | 143610200 | + | int | 366 |
| 1 | 143725600 | 143726600 | + | int | 367 |
| 1 | 143759400 | 143760400 | + | int | 368 |
| 1 | 143866200 | 143867200 | + | int | 369 |
| 1 | 143878800 | 143880600 | + | int | 370 |
| 1 | 144094200 | 144095400 | + | int | 371 |
| 1 | 144200800 | 144202000 | + | int | 372 |
| 1 | 144544800 | 144545800 | + | int | 373 |
| 1 | 144576400 | 144577400 | + | int | 374 |
| 1 | 144699400 | 144700600 | + | int | 375 |
| 1 | 145158400 | 145160000 | + | int | 376 |
| 1 | 145332600 | 145333600 | + | int | 377 |
| 1 | 146339600 | 146340800 | + | int | 378 |
| 1 | 146651400 | 146652400 | + | int | 379 |
| 1 | 146953600 | 146954600 | + | int | 380 |
| 1 | 147178200 | 147179200 | + | int | 381 |
| 1 | 147621600 | 147622800 | + | int | 382 |
| 1 | 147861800 | 147862800 | + | int | 383 |
| 1 | 149019000 | 149020200 | + | int | 384 |
| 1 | 149378400 | 149379600 | + | int | 385 |
| 1 | 149953200 | 149954600 | + | int | 386 |
| 1 | 150278000 | 150279000 | + | int | 387 |
| 1 | 150488600 | 150489800 | + | int | 388 |
| 1 | 150580200 | 150581400 | + | int | 389 |
| 1 | 150769600 | 150770800 | + | int | 390 |
| 1 | 150968600 | 150969800 | + | int | 391 |
| 1 | 151621800 | 151622800 | + | int | 392 |
| 1 | 152041600 | 152042800 | + | int | 393 |
| 1 | 152262000 | 152263000 | + | Tpr | 394 |
| 1 | 152515800 | 152517200 | − | Hmcn1 | 395 |
| 1 | 152969000 | 152970200 | + | int | 396 |
| 1 | 153263400 | 153264600 | − | 1200016B10Rik | 397 |
| 1 | 153958200 | 153959400 | + | int | 398 |
| 1 | 155218200 | 155219200 | + | int | 399 |
| 1 | 155569800 | 155571000 | + | int | 400 |
| 1 | 155992200 | 155993400 | + | int | 401 |
| 1 | 156357000 | 156358000 | − | Cacna1e | 402 |
| 1 | 156783200 | 156784200 | + | int | 403 |
| 1 | 157253200 | 157254200 | − | Xpr1 | 404 |
| 1 | 159245400 | 159246400 | − | Rasal2 | 405 |
| 1 | 159247600 | 159248600 | − | Rasal2 | 406 |
| 1 | 159750800 | 159751800 | + | int | 407 |
| 1 | 159926800 | 159927800 | + | int | 408 |
| 1 | 161132000 | 161133200 | + | int | 409 |
| 1 | 161263800 | 161265000 | + | Rfwd2 | 410 |
| 1 | 162694000 | 162695000 | − | Rabgap1l | 411 |
| 1 | 163575000 | 163576000 | + | int | 412 |
| 1 | 164557800 | 164559000 | + | int | 413 |
| 1 | 165119000 | 165120000 | + | int | 414 |
| 1 | 165576600 | 165577800 | + | int | 415 |
| 1 | 165646800 | 165648000 | − | Mettl11b | 416 |
| 1 | 167881000 | 167882000 | − | Pou2f1 | 417 |
| 1 | 168092600 | 168093600 | + | Gpa33 | 418 |
| 1 | 168499600 | 168500600 | + | int | 419 |
| 1 | 168878000 | 168879000 | + | int | 420 |
| 1 | 169269600 | 169271400 | + | int | 421 |
| 1 | 169762800 | 169764000 | + | Lmx1a | 422 |
| 1 | 170649000 | 170650400 | + | int | 423 |
| 1 | 171473400 | 171474400 | + | int | 424 |
| 1 | 171863800 | 171864800 | + | 1700084C01Rik | 425 |
| 1 | 172732200 | 172733200 | − | Atf6 | 426 |
| 1 | 173000400 | 173001800 | + | int | 427 |
| 1 | 173003800 | 173004800 | + | int | 428 |
| 1 | 173008000 | 173009400 | + | int | 429 |
| 1 | 173245800 | 173246800 | + | int | 430 |
| 1 | 173847200 | 173848200 | + | Slamf6 | 431 |
| 1 | 175003000 | 175004200 | + | int | 432 |
| 1 | 175432400 | 175433400 | + | int | 433 |
| 1 | 176330600 | 176331600 | + | int | 434 |
| 1 | 176780800 | 176783200 | − | Grem2 | 435 |
| 1 | 176908600 | 176909800 | + | int | 436 |
| 1 | 176994000 | 176995000 | − | Rgs7 | 437 |
| 1 | 179011800 | 179013000 | − | Akt3 | 438 |
| 1 | 179210800 | 179212000 | + | int | 439 |
| 1 | 179278800 | 179280000 | + | int | 440 |
| 1 | 179457400 | 179458600 | + | int | 441 |
| 1 | 179666800 | 179668000 | + | 1700016C15Rik | 442 |
| 1 | 179824200 | 179825200 | + | int | 443 |
| 1 | 180404200 | 180405400 | + | Efcab2 | 444 |
| 1 | 181133600 | 181134600 | − | Smyd3 | 445 |
| 1 | 183237600 | 183238600 | + | int | 446 |
| 1 | 183328600 | 183330200 | + | Cnih3 | 447 |
| 1 | 183621800 | 183622800 | + | int | 448 |
| 1 | 184237400 | 184238600 | + | int | 449 |
| 1 | 184590200 | 184591200 | + | int | 450 |
| 1 | 184719200 | 184720200 | + | Susd4 | 451 |
| 1 | 184920600 | 184922000 | + | int | 452 |
| 1 | 185500200 | 185501200 | + | int | 453 |
| 1 | 186569800 | 186570800 | + | int | 454 |
| 1 | 189241400 | 189242400 | + | int | 455 |
| 1 | 189942000 | 189943000 | + | Esrrg | 456 |
| 1 | 189973200 | 189974200 | + | Esrrg | 457 |
| 1 | 191339600 | 191340800 | + | int | 458 |
| 1 | 192268000 | 192269000 | + | int | 459 |
| 1 | 192306800 | 192307800 | + | int | 460 |
| 1 | 192785800 | 192787200 | − | Vash2 | 461 |
| 1 | 192785800 | 192787200 | − | Vash2 | 462 |
| 1 | 192942000 | 192943400 | + | int | 463 |
| 1 | 193091800 | 193092800 | + | int | 464 |
| 1 | 193133000 | 193134200 | − | Nenf | 465 |
| 1 | 193234400 | 193235800 | + | int | 466 |
| 1 | 193500200 | 193501200 | + | int | 467 |
| 1 | 195017400 | 195018800 | − | Traf3ip3 | 468 |
| 1 | 196668200 | 196669200 | + | int | 469 |
| 1 | 196886800 | 196887800 | − | Cd46 | 470 |
| 2 | 3609400 | 3610600 | + | int | 471 |
| 2 | 5050200 | 5051200 | + | int | 472 |
| 2 | 5089200 | 5090200 | + | Ccdc3 | 473 |
| 2 | 5299400 | 5301200 | − | Camk1d | 474 |
| 2 | 6237200 | 6240800 | + | int | 475 |
| 2 | 6389600 | 6390600 | + | int | 476 |
| 2 | 7499000 | 7500000 | + | int | 477 |
| 2 | 7550800 | 7552200 | + | int | 478 |
| 2 | 7643400 | 7644600 | + | int | 479 |
| 2 | 8003000 | 8004200 | + | int | 480 |
| 2 | 8178600 | 8179600 | + | int | 481 |
| 2 | 8338800 | 8340000 | + | int | 482 |
| 2 | 9883000 | 9884200 | − | Taf3 | 483 |
| 2 | 10627000 | 10628200 | + | int | 484 |
| 2 | 12696800 | 12698000 | + | int | 485 |
| 2 | 13433200 | 13434200 | − | Trdmt1 | 486 |
| 2 | 14073400 | 14074400 | + | int | 487 |
| 2 | 15978400 | 15979600 | + | int | 488 |
| 2 | 16381200 | 16382200 | + | Plxdc2 | 489 |
| 2 | 17044400 | 17045600 | + | int | 490 |
| 2 | 17717800 | 17719000 | + | int | 491 |
| 2 | 19088600 | 19089600 | + | int | 492 |
| 2 | 20811200 | 20812200 | − | Arhgap21 | 493 |
| 2 | 22589600 | 22590800 | + | int | 494 |
| 2 | 23062800 | 23063800 | + | 4931423N10Rik | 495 |
| 2 | 23171400 | 23172400 | + | int | 496 |
| 2 | 23518200 | 23519600 | + | int | 497 |
| 2 | 23710400 | 23711400 | + | int | 498 |
| 2 | 23773200 | 23774600 | + | int | 499 |
| 2 | 24007200 | 24008400 | + | Il1f8 | 500 |
| 2 | 25287200 | 25288400 | + | Abca2 | 501 |
| 2 | 25843200 | 25844400 | + | int | 502 |
| 2 | 25895000 | 25896000 | + | int | 503 |
| 2 | 26335000 | 26336000 | − | Notch1 | 504 |
| 2 | 26375200 | 26376200 | + | int | 505 |
| 2 | 26538800 | 26539800 | + | int | 506 |
| 2 | 27668200 | 27669400 | + | int | 507 |
| 2 | 28607800 | 28608800 | + | 1190002A17Rik | 508 |
| 2 | 33666200 | 33667200 | − | Fam125b | 509 |
| 2 | 35868600 | 35869800 | + | int | 510 |
| 2 | 36593800 | 36595200 | + | int | 511 |
| 2 | 36749400 | 36750600 | + | int | 512 |
| 2 | 36842400 | 36843600 | + | int | 513 |
| 2 | 36872800 | 36873800 | + | int | 514 |
| 2 | 37001400 | 37003000 | + | int | 515 |
| 2 | 37056600 | 37057600 | + | Olfr365 | 516 |
| 2 | 37730400 | 37731600 | − | Dennd1a | 517 |
| 2 | 39174800 | 39175800 | + | int | 518 |
| 2 | 39238800 | 39239800 | + | int | 519 |
| 2 | 39300000 | 39301000 | + | int | 520 |
| 2 | 39386800 | 39387800 | + | int | 521 |
| 2 | 39405400 | 39406400 | + | int | 522 |
| 2 | 39553800 | 39554800 | + | int | 523 |
| 2 | 39789600 | 39791000 | + | int | 524 |
| 2 | 39809000 | 39810200 | + | int | 525 |
| 2 | 39823800 | 39825200 | + | int | 526 |
| 2 | 39974200 | 39975200 | + | int | 527 |
| 2 | 40343600 | 40344600 | + | int | 528 |
| 2 | 40472600 | 40473600 | − | Lrp1b | 529 |
| 2 | 41606400 | 41607400 | − | Lrp1b | 530 |
| 2 | 41907200 | 41908800 | − | Lrp1b | 531 |
| 2 | 41939400 | 41941000 | − | Lrp1b | 532 |
| 2 | 42153000 | 42154400 | − | Lrp1b | 533 |
| 2 | 42273000 | 42274000 | − | Lrp1b | 534 |
| 2 | 42305000 | 42306000 | − | Lrp1b | 535 |
| 2 | 42414800 | 42416400 | − | Lrp1b | 536 |
| 2 | 42571400 | 42572600 | + | int | 537 |
| 2 | 43353600 | 43355000 | + | int | 538 |
| 2 | 43447600 | 43448600 | + | Kynu | 539 |
| 2 | 43952000 | 43953000 | + | Arhgap15 | 540 |
| 2 | 44585400 | 44586600 | − | Gtdc1 | 541 |
| 2 | 44857200 | 44858200 | − | Zeb2 | 542 |
| 2 | 45274200 | 45275600 | + | int | 543 |
| 2 | 46193000 | 46194400 | + | int | 544 |
| 2 | 46577800 | 46578800 | + | int | 545 |
| 2 | 46830600 | 46831600 | + | int | 546 |
| 2 | 46839200 | 46840400 | + | int | 547 |
| 2 | 47306400 | 47307400 | + | int | 548 |
| 2 | 47308800 | 47310000 | + | int | 549 |
| 2 | 47400400 | 47401400 | + | int | 550 |
| 2 | 47912400 | 47913400 | + | int | 551 |
| 2 | 48822400 | 48823400 | + | Mbd5 | 552 |
| 2 | 48915600 | 48916600 | + | Mbd5 | 553 |
| 2 | 49621200 | 49622200 | + | Kif5c | 554 |
| 2 | 49801600 | 49803000 | + | Lypd6b | 555 |
| 2 | 49842400 | 49843400 | + | int | 556 |
| 2 | 50194400 | 50195400 | + | int | 557 |
| 2 | 51288400 | 51289400 | + | int | 558 |
| 2 | 51706000 | 51707600 | + | int | 559 |
| 2 | 51953800 | 51955000 | + | Rif1 | 560 |
| 2 | 53332800 | 53333800 | + | int | 561 |
| 2 | 53550600 | 53551600 | + | int | 562 |
| 2 | 53966600 | 53967600 | + | int | 563 |
| 2 | 54377200 | 54378200 | + | Galnt13 | 564 |
| 2 | 54690400 | 54691400 | + | Galnt13 | 565 |
| 2 | 54824400 | 54825800 | + | Galnt13 | 566 |
| 2 | 55099200 | 55100800 | + | int | 567 |
| 2 | 55379800 | 55380800 | + | Kcnj3 | 568 |
| 2 | 55976800 | 55978200 | + | int | 569 |
| 2 | 55991000 | 55992400 | + | int | 570 |
| 2 | 56264600 | 56266000 | + | int | 571 |
| 2 | 56325600 | 56327200 | + | int | 572 |
| 2 | 56798600 | 56800200 | + | int | 573 |
| 2 | 58959000 | 58960200 | − | Ccdc148 | 574 |
| 2 | 61964200 | 61965200 | + | Slc4a10 | 575 |
| 2 | 62612800 | 62613800 | − | Kcnh7 | 576 |
| 2 | 64019400 | 64020600 | + | int | 577 |
| 2 | 64120800 | 64122000 | + | int | 578 |
| 2 | 64479600 | 64480600 | + | int | 579 |
| 2 | 64555800 | 64557200 | + | int | 580 |
| 2 | 64609400 | 64611000 | + | int | 581 |
| 2 | 67163200 | 67164800 | + | int | 582 |
| 2 | 67256600 | 67257600 | + | int | 583 |
| 2 | 69210800 | 69212200 | + | int | 584 |
| 2 | 69812600 | 69813800 | + | Ubr3 | 585 |
| 2 | 70219800 | 70220800 | + | Myo3b | 586 |
| 2 | 70393800 | 70394800 | + | int | 587 |
| 2 | 71730600 | 71731600 | + | Pdk1 | 588 |
| 2 | 73797400 | 73799000 | + | int | 589 |
| 2 | 73917000 | 73918000 | + | int | 590 |
| 2 | 75726000 | 75727200 | + | Agps | 591 |
| 2 | 75811600 | 75812800 | + | int | 592 |
| 2 | 77432200 | 77433200 | − | Zfp385b | 593 |
| 2 | 77432200 | 77433200 | − | Zfp385b | 594 |
| 2 | 77934800 | 77935800 | + | int | 595 |
| 2 | 79549800 | 79551000 | + | Ppp1r1c | 596 |
| 2 | 79599200 | 79600600 | + | Ppp1r1c | 597 |
| 2 | 79926200 | 79927400 | − | Pde1a | 598 |
| 2 | 79926200 | 79927400 | − | Pde1a | 599 |
| 2 | 80661200 | 80662200 | + | int | 600 |
| 2 | 80970800 | 80971800 | + | int | 601 |
| 2 | 81051600 | 81053200 | + | int | 602 |
| 2 | 81065000 | 81066000 | + | int | 603 |
| 2 | 81144800 | 81146200 | + | int | 604 |
| 2 | 81221800 | 81223000 | + | int | 605 |
| 2 | 81505400 | 81509000 | + | int | 606 |
| 2 | 82216200 | 82217800 | + | int | 607 |
| 2 | 82299200 | 82300600 | + | int | 608 |
| 2 | 82762800 | 82764000 | + | int | 609 |
| 2 | 83221400 | 83222400 | + | int | 610 |
| 2 | 83363000 | 83364200 | + | int | 611 |
| 2 | 84221000 | 84222000 | − | Calcrl | 612 |
| 2 | 85145200 | 85146200 | + | int | 613 |
| 2 | 85616600 | 85617800 | + | Olfr1014 | 614 |
| 2 | 85639600 | 85640600 | − | Olfr1016 | 615 |
| 2 | 85689400 | 85690600 | + | Olfr1020 | 616 |
| 2 | 85703400 | 85704600 | + | int | 617 |
| 2 | 86094800 | 86096000 | − | Olfr1049 | 618 |
| 2 | 86115800 | 86116800 | − | Olfr1051 | 619 |
| 2 | 86278600 | 86280200 | + | int | 620 |
| 2 | 86416000 | 86417200 | + | int | 621 |
| 2 | 86753800 | 86754800 | + | int | 622 |
| 2 | 86917200 | 86918200 | + | int | 623 |
| 2 | 87040800 | 87041800 | + | int | 624 |
| 2 | 87053200 | 87054200 | + | Olfr1113 | 625 |
| 2 | 87630000 | 87631200 | + | int | 626 |
| 2 | 87673000 | 87674200 | + | Olfr1148 | 627 |
| 2 | 87704400 | 87705600 | + | Olfr1152 | 628 |
| 2 | 87780800 | 87781800 | + | int | 629 |
| 2 | 87810200 | 87811600 | − | Olfr1157 | 630 |
| 2 | 88012800 | 88014000 | + | int | 631 |
| 2 | 88038400 | 88039400 | + | int | 632 |
| 2 | 88070800 | 88071800 | + | int | 633 |
| 2 | 88094800 | 88096000 | + | int | 634 |
| 2 | 88194400 | 88195600 | + | int | 635 |
| 2 | 88297600 | 88298800 | + | Olfr1183 | 636 |
| 2 | 88326400 | 88327600 | + | Olfr1184 | 637 |
| 2 | 88444000 | 88445000 | + | int | 638 |
| 2 | 88602200 | 88603200 | + | int | 639 |
| 2 | 88655000 | 88656200 | + | Olfr1202 | 640 |
| 2 | 88670800 | 88672000 | + | Olfr1203 | 641 |
| 2 | 88749400 | 88751000 | − | Olfr1209 | 642 |
| 2 | 89028400 | 89029400 | + | int | 643 |
| 2 | 89769600 | 89771000 | + | Olfr1258 | 644 |
| 2 | 89934600 | 89936000 | + | int | 645 |
| 2 | 90125600 | 90126600 | − | Olfr1272 | 646 |
| 2 | 90235200 | 90236200 | + | int | 647 |
| 2 | 90283600 | 90284800 | − | Ptprj | 648 |
| 2 | 90283600 | 90284800 | − | Ptprj | 649 |
| 2 | 91381200 | 91382200 | + | int | 650 |
| 2 | 93339200 | 93340200 | + | int | 651 |
| 2 | 93720600 | 93721800 | + | int | 652 |
| 2 | 94443000 | 94444400 | + | int | 653 |
| 2 | 95230000 | 95231200 | + | int | 654 |
| 2 | 95532400 | 95533400 | + | int | 655 |
| 2 | 95705600 | 95707000 | + | int | 656 |
| 2 | 95714200 | 95715600 | + | int | 657 |
| 2 | 96139600 | 96140600 | + | int | 658 |
| 2 | 96535000 | 96536000 | + | int | 659 |
| 2 | 97400200 | 97401400 | + | Lrrc4c | 660 |
| 2 | 97488200 | 97489200 | + | int | 661 |
| 2 | 97626600 | 97628000 | + | int | 662 |
| 2 | 98241000 | 98242400 | + | int | 663 |
| 2 | 98260800 | 98262400 | + | int | 664 |
| 2 | 98310200 | 98311200 | + | int | 665 |
| 2 | 98316800 | 98318000 | + | int | 666 |
| 2 | 98357200 | 98358400 | + | int | 667 |
| 2 | 98501800 | 98507800 | + | int | 668 |
| 2 | 98542000 | 98543400 | + | int | 669 |
| 2 | 99591800 | 99592800 | + | int | 670 |
| 2 | 99701400 | 99702400 | + | int | 671 |
| 2 | 99834600 | 99835600 | + | int | 672 |
| 2 | 99960600 | 99961800 | + | int | 673 |
| 2 | 100270400 | 100271600 | + | int | 674 |
| 2 | 100774000 | 100775000 | + | int | 675 |
| 2 | 101096800 | 101097800 | + | int | 676 |
| 2 | 102313600 | 102315000 | + | int | 677 |
| 2 | 102370600 | 102371600 | + | int | 678 |
| 2 | 107632400 | 107633400 | + | int | 679 |
| 2 | 107882200 | 107883400 | + | int | 680 |
| 2 | 107917000 | 107918200 | + | int | 681 |
| 2 | 108026600 | 108027800 | + | int | 682 |
| 2 | 108042200 | 108043800 | + | int | 683 |
| 2 | 108204600 | 108206000 | + | int | 684 |
| 2 | 108432600 | 108433800 | + | int | 685 |
| 2 | 109201600 | 109202800 | + | int | 686 |
| 2 | 109940000 | 109941000 | + | int | 687 |
| 2 | 109942200 | 109943200 | + | int | 688 |
| 2 | 110392200 | 110393400 | + | int | 689 |
| 2 | 110574600 | 110575600 | + | Muc15 | 690 |
| 2 | 110574600 | 110575600 | − | Ano3 | 691 |
| 2 | 110574600 | 110575600 | − | Ano3 | 692 |
| 2 | 110635600 | 110636600 | − | Ano3 | 693 |
| 2 | 110635600 | 110636600 | − | Ano3 | 694 |
| 2 | 110845000 | 110846000 | + | int | 695 |
| 2 | 111150600 | 111151800 | + | int | 696 |
| 2 | 111219000 | 111220200 | + | Olfr1284 | 697 |
| 2 | 111380800 | 111383200 | − | Olfr1294 | 698 |
| 2 | 111504200 | 111505400 | + | Olfr1299 | 699 |
| 2 | 111504200 | 111505400 | + | Olfr1300-ps1 | 700 |
| 2 | 111506800 | 111508400 | + | Olfr1300-ps1 | 701 |
| 2 | 111802400 | 111803800 | − | Olfr1308 | 702 |
| 2 | 114469600 | 114470600 | − | Atpbd4 | 703 |
| 2 | 114533400 | 114535000 | + | int | 704 |
| 2 | 114801400 | 114802400 | + | int | 705 |
| 2 | 115067000 | 115068400 | + | int | 706 |
| 2 | 119880000 | 119882000 | + | int | 707 |
| 2 | 121580800 | 121581800 | − | Frmd5 | 708 |
| 2 | 122092200 | 122093200 | + | int | 709 |
| 2 | 124984400 | 124985600 | + | Slc12a1 | 710 |
| 2 | 125574400 | 125575400 | − | Secisbp2l | 711 |
| 2 | 125711000 | 125712000 | + | Galk2 | 712 |
| 2 | 125801000 | 125802000 | + | Galk2 | 713 |
| 2 | 125985200 | 125986200 | + | Dtwd1 | 714 |
| 2 | 127595200 | 127596200 | − | Nphp1 | 715 |
| 2 | 128786000 | 128787000 | + | int | 716 |
| 2 | 129324200 | 129325200 | − | F830045P16Rik | 717 |
| 2 | 131280000 | 131281000 | + | int | 718 |
| 2 | 131699200 | 131700200 | + | int | 719 |
| 2 | 133551400 | 133552400 | + | int | 720 |
| 2 | 136204400 | 136205800 | − | Pak7 | 721 |
| 2 | 136688400 | 136689600 | + | int | 722 |
| 2 | 139046800 | 139048400 | + | int | 723 |
| 2 | 139268400 | 139269600 | + | int | 724 |
| 2 | 139937600 | 139938600 | + | int | 725 |
| 2 | 140215400 | 140216400 | − | Sel1l2 | 726 |
| 2 | 140702000 | 140703000 | + | Macrod2 | 727 |
| 2 | 141001000 | 141002000 | + | Macrod2 | 728 |
| 2 | 141849200 | 141850200 | + | Macrod2 | 729 |
| 2 | 141863000 | 141864200 | + | Macrod2 | 730 |
| 2 | 141970600 | 141971600 | + | Macrod2 | 731 |
| 2 | 142075800 | 142076800 | + | Macrod2 | 732 |
| 2 | 142219000 | 142220600 | + | int | 733 |
| 2 | 142254000 | 142255400 | + | int | 734 |
| 2 | 147369400 | 147370400 | + | int | 735 |
| 2 | 149178000 | 149179400 | + | int | 736 |
| 2 | 149194200 | 149195600 | + | int | 737 |
| 2 | 151069600 | 151071200 | + | int | 738 |
| 2 | 151175000 | 151176600 | + | int | 739 |
| 2 | 151286600 | 151287800 | + | int | 740 |
| 2 | 156348200 | 156349400 | + | Epb4int1l1 | 741 |
| 2 | 156348200 | 156349400 | + | Epb4int1l1 | 742 |
| 2 | 156600800 | 156601800 | + | Myl9 | 743 |
| 2 | 158110400 | 158111800 | + | int | 744 |
| 2 | 159053000 | 159054200 | + | int | 745 |
| 2 | 159490000 | 159491000 | + | int | 746 |
| 2 | 159944600 | 159946000 | + | int | 747 |
| 2 | 159965600 | 159966800 | + | int | 748 |
| 2 | 161637800 | 161638800 | − | Ptprt | 749 |
| 2 | 162814800 | 162816400 | + | Sgk2 | 750 |
| 2 | 162986200 | 162987200 | + | int | 751 |
| 2 | 163074200 | 163075200 | + | Tox2 | 752 |
| 2 | 166840800 | 166841800 | + | Ddx27 | 753 |
| 2 | 168462400 | 168463800 | − | Atp9a | 754 |
| 2 | 169086200 | 169087600 | + | int | 755 |
| 2 | 170545400 | 170546800 | + | int | 756 |
| 2 | 171508400 | 171509400 | + | int | 757 |
| 2 | 172146000 | 172147000 | + | int | 758 |
| 2 | 172578000 | 172579400 | + | int | 759 |
| 2 | 174866800 | 174867800 | + | int | 760 |
| 2 | 174869400 | 174870400 | + | int | 761 |
| 2 | 176864200 | 176865200 | + | int | 762 |
| 2 | 177093800 | 177094800 | + | int | 763 |
| 2 | 177340000 | 177341000 | + | int | 764 |
| 2 | 177718600 | 177719600 | + | int | 765 |
| 2 | 178344600 | 178345800 | + | int | 766 |
| 2 | 179256400 | 179257600 | + | Cdh4 | 767 |
| 3 | 3354200 | 3355600 | + | int | 768 |
| 3 | 3776400 | 3777600 | + | int | 769 |
| 3 | 3801400 | 3802400 | + | int | 770 |
| 3 | 3893400 | 3894400 | + | int | 771 |
| 3 | 4412200 | 4413200 | + | int | 772 |
| 3 | 4520200 | 4521200 | + | int | 773 |
| 3 | 4992400 | 4993400 | + | int | 774 |
| 3 | 5045600 | 5046600 | + | int | 775 |
| 3 | 5142000 | 5143200 | + | int | 776 |
| 3 | 5445400 | 5447400 | + | int | 777 |
| 3 | 5859800 | 5861600 | + | int | 778 |
| 3 | 5902800 | 5903800 | + | int | 779 |
| 3 | 6280000 | 6281000 | + | int | 780 |
| 3 | 6328600 | 6330000 | + | int | 781 |
| 3 | 6555800 | 6556800 | + | int | 782 |
| 3 | 7605400 | 7606400 | − | Il7 | 783 |
| 3 | 7700800 | 7702000 | + | int | 784 |
| 3 | 7863800 | 7864800 | + | int | 785 |
| 3 | 7906200 | 7907800 | + | int | 786 |
| 3 | 9079000 | 9080600 | + | int | 787 |
| 3 | 9326000 | 9327200 | + | int | 788 |
| 3 | 10561800 | 10563000 | + | int | 789 |
| 3 | 10603400 | 10605000 | + | int | 790 |
| 3 | 10654800 | 10655800 | + | int | 791 |
| 3 | 10789800 | 10790800 | + | int | 792 |
| 3 | 11077800 | 11081200 | + | int | 793 |
| 3 | 11328200 | 11329600 | + | int | 794 |
| 3 | 11367000 | 11368200 | + | int | 795 |
| 3 | 11467400 | 11468600 | + | int | 796 |
| 3 | 11993400 | 11994800 | + | int | 797 |
| 3 | 12247600 | 12248800 | + | int | 798 |
| 3 | 12663400 | 12664600 | + | int | 799 |
| 3 | 12771000 | 12772000 | + | int | 800 |
| 3 | 13266400 | 13267800 | + | int | 801 |
| 3 | 13730400 | 13731400 | + | Ralyl | 802 |
| 3 | 14488800 | 14489800 | + | Slc7a12 | 803 |
| 3 | 14511000 | 14512000 | + | int | 804 |
| 3 | 14570000 | 14571200 | + | Lrrcc1 | 805 |
| 3 | 15123600 | 15124600 | + | int | 806 |
| 3 | 15255200 | 15256200 | + | int | 807 |
| 3 | 15367400 | 15368800 | + | int | 808 |
| 3 | 15387800 | 15388800 | − | Sirpb1a | 809 |
| 3 | 15443800 | 15445600 | + | int | 810 |
| 3 | 15551400 | 15552600 | − | Sirpb1b | 811 |
| 3 | 15553800 | 15555400 | − | Sirpb1b | 812 |
| 3 | 15590400 | 15592200 | + | int | 813 |
| 3 | 15695800 | 15696800 | − | LOC100038947 | 814 |
| 3 | 16417400 | 16418400 | + | int | 815 |
| 3 | 17119400 | 17120600 | + | int | 816 |
| 3 | 17266000 | 17267200 | + | int | 817 |
| 3 | 17332600 | 17333800 | + | int | 818 |
| 3 | 17596600 | 17598000 | + | int | 819 |
| 3 | 17603200 | 17604600 | + | int | 820 |
| 3 | 17645000 | 17646200 | + | int | 821 |
| 3 | 17989200 | 17990200 | − | Cyp7b1 | 822 |
| 3 | 18255200 | 18258000 | + | int | 823 |
| 3 | 18877200 | 18878200 | + | int | 824 |
| 3 | 18882800 | 18884400 | + | int | 825 |
| 3 | 20602400 | 20603400 | + | int | 826 |
| 3 | 20731600 | 20732600 | + | int | 827 |
| 3 | 21089200 | 21090800 | + | int | 828 |
| 3 | 21110200 | 21111600 | + | int | 829 |
| 3 | 21505600 | 21506600 | + | int | 830 |
| 3 | 21508600 | 21509600 | + | int | 831 |
| 3 | 22054600 | 22056000 | + | Tbl1xr1 | 832 |
| 3 | 22765600 | 22766600 | + | int | 833 |
| 3 | 23149000 | 23150200 | + | int | 834 |
| 3 | 23536600 | 23537800 | + | int | 835 |
| 3 | 23854800 | 23856000 | + | int | 836 |
| 3 | 24061400 | 24062800 | + | int | 837 |
| 3 | 24117800 | 24119200 | + | int | 838 |
| 3 | 24239800 | 24241000 | + | int | 839 |
| 3 | 24617000 | 24618000 | + | int | 840 |
| 3 | 24723400 | 24724400 | + | int | 841 |
| 3 | 24857600 | 24859000 | + | int | 842 |
| 3 | 25023800 | 25024800 | + | int | 843 |
| 3 | 25265800 | 25267200 | + | int | 844 |
| 3 | 25297000 | 25298600 | + | int | 845 |
| 3 | 25619000 | 25620000 | − | Nlgn1 | 846 |
| 3 | 25619000 | 25620000 | − | Nlgn1 | 847 |
| 3 | 26188800 | 26189800 | − | Nlgn1 | 848 |
| 3 | 26331200 | 26332200 | + | int | 849 |
| 3 | 27831000 | 27832200 | + | int | 850 |
| 3 | 28133600 | 28134600 | + | int | 851 |
| 3 | 28506200 | 28507200 | + | Tnik | 852 |
| 3 | 28506200 | 28507200 | + | Tnik | 853 |
| 3 | 28823200 | 28824200 | + | Gm1527 | 854 |
| 3 | 28977400 | 28978600 | + | 6130401L20Rik | 855 |
| 3 | 29315600 | 29316800 | + | 6130401L20Rik | 856 |
| 3 | 29315600 | 29316800 | + | Mir551b | 857 |
| 3 | 29455400 | 29456400 | + | 6130401L20Rik | 858 |
| 3 | 30332000 | 30333000 | − | Mecom | 859 |
| 3 | 30673000 | 30674000 | + | int | 860 |
| 3 | 31545000 | 31546000 | + | int | 861 |
| 3 | 31631600 | 31633000 | + | int | 862 |
| 3 | 33178200 | 33179600 | + | int | 863 |
| 3 | 33498600 | 33500000 | + | int | 864 |
| 3 | 33676800 | 33677800 | + | int | 865 |
| 3 | 33812200 | 33813800 | + | int | 866 |
| 3 | 34843000 | 34844000 | + | int | 867 |
| 3 | 35575800 | 35577000 | + | int | 868 |
| 3 | 36204400 | 36205400 | + | int | 869 |
| 3 | 36249200 | 36250200 | + | int | 870 |
| 3 | 36976400 | 36977600 | + | Adad1 | 871 |
| 3 | 37467800 | 37468800 | + | Spata5 | 872 |
| 3 | 38158600 | 38159800 | + | int | 873 |
| 3 | 38718800 | 38719800 | + | int | 874 |
| 3 | 38985200 | 38986200 | + | int | 875 |
| 3 | 41586600 | 41587600 | + | int | 876 |
| 3 | 42406800 | 42407800 | + | int | 877 |
| 3 | 42718600 | 42719600 | + | int | 878 |
| 3 | 42808200 | 42809400 | + | int | 879 |
| 3 | 42936800 | 42938200 | + | int | 880 |
| 3 | 43101600 | 43102600 | + | int | 881 |
| 3 | 43136600 | 43137600 | + | int | 882 |
| 3 | 43161400 | 43162600 | + | int | 883 |
| 3 | 43335600 | 43336600 | + | int | 884 |
| 3 | 43363800 | 43364800 | + | int | 885 |
| 3 | 43510200 | 43511200 | + | int | 886 |
| 3 | 43572800 | 43573800 | + | int | 887 |
| 3 | 43916800 | 43917800 | + | int | 888 |
| 3 | 44081800 | 44082800 | + | int | 889 |
| 3 | 44209000 | 44210200 | + | int | 890 |
| 3 | 44267000 | 44268000 | + | int | 891 |
| 3 | 44441200 | 44442200 | + | int | 892 |
| 3 | 44653000 | 44654400 | + | int | 893 |
| 3 | 44684800 | 44685800 | + | int | 894 |
| 3 | 44885400 | 44886400 | + | int | 895 |
| 3 | 45284200 | 45285400 | + | int | 896 |
| 3 | 45372200 | 45373200 | + | int | 897 |
| 3 | 45769800 | 45771200 | + | int | 898 |
| 3 | 46555800 | 46557000 | + | int | 899 |
| 3 | 46596000 | 46597000 | + | int | 900 |
| 3 | 47093800 | 47095000 | + | int | 901 |
| 3 | 47185600 | 47186800 | + | int | 902 |
| 3 | 47541200 | 47542600 | + | int | 903 |
| 3 | 47891800 | 47892800 | + | int | 904 |
| 3 | 47897000 | 47898000 | + | int | 905 |
| 3 | 47902600 | 47903600 | + | int | 906 |
| 3 | 48218400 | 48219600 | + | int | 907 |
| 3 | 48369800 | 48371400 | + | int | 908 |
| 3 | 48945800 | 48946800 | + | int | 909 |
| 3 | 49308200 | 49309200 | + | int | 910 |
| 3 | 49411200 | 49412200 | + | int | 911 |
| 3 | 49693000 | 49694000 | + | int | 912 |
| 3 | 50044400 | 50045600 | + | int | 913 |
| 3 | 50123200 | 50124200 | + | int | 914 |
| 3 | 50903800 | 50905000 | + | int | 915 |
| 3 | 52562600 | 52563600 | + | int | 916 |
| 3 | 55728400 | 55729400 | − | Nbea | 917 |
| 3 | 56217800 | 56219000 | + | int | 918 |
| 3 | 56367000 | 56368000 | + | int | 919 |
| 3 | 57641400 | 57642600 | + | int | 920 |
| 3 | 57851400 | 57852400 | + | int | 921 |
| 3 | 58992000 | 58993000 | + | Med12l | 922 |
| 3 | 59074200 | 59075600 | + | Med12l | 923 |
| 3 | 59300400 | 59301400 | + | int | 924 |
| 3 | 59503800 | 59505000 | + | int | 925 |
| 3 | 60024400 | 60025400 | + | int | 926 |
| 3 | 60122200 | 60123200 | + | int | 927 |
| 3 | 60573600 | 60574600 | + | int | 928 |
| 3 | 60887200 | 60888200 | + | int | 929 |
| 3 | 60995800 | 60996800 | + | int | 930 |
| 3 | 61241600 | 61243000 | + | int | 931 |
| 3 | 61883600 | 61884800 | + | int | 932 |
| 3 | 62302800 | 62304200 | − | Dhx36 | 933 |
| 3 | 62626400 | 62627400 | + | int | 934 |
| 3 | 63229400 | 63230400 | + | int | 935 |
| 3 | 63251400 | 63252400 | + | int | 936 |
| 3 | 63315200 | 63317000 | + | int | 937 |
| 3 | 64203000 | 64204000 | − | Vmn2r4 | 938 |
| 3 | 64493200 | 64494200 | − | Vmn2r-ps11 | 939 |
| 3 | 64819600 | 64820800 | + | int | 940 |
| 3 | 64980400 | 64981800 | + | Kcnab1 | 941 |
| 3 | 66857600 | 66858600 | + | Rsrc1 | 942 |
| 3 | 67403600 | 67404600 | + | Mfsd1 | 943 |
| 3 | 68722600 | 68723600 | − | Ift80 | 944 |
| 3 | 68735600 | 68736800 | − | Ift80 | 945 |
| 3 | 69468000 | 69469200 | + | int | 946 |
| 3 | 69767800 | 69768800 | + | int | 947 |
| 3 | 70586800 | 70588200 | + | int | 948 |
| 3 | 71094800 | 71095800 | + | int | 949 |
| 3 | 71204600 | 71205800 | + | int | 950 |
| 3 | 71287200 | 71288800 | + | int | 951 |
| 3 | 71321800 | 71323200 | + | int | 952 |
| 3 | 71327600 | 71329000 | + | int | 953 |
| 3 | 71586600 | 71588000 | + | int | 954 |
| 3 | 71601400 | 71602400 | + | int | 955 |
| 3 | 72005400 | 72007000 | + | int | 956 |
| 3 | 72054000 | 72055200 | + | int | 957 |
| 3 | 72163000 | 72164000 | + | int | 958 |
| 3 | 72253400 | 72254800 | + | int | 959 |
| 3 | 72317200 | 72318400 | + | int | 960 |
| 3 | 72330200 | 72331800 | + | int | 961 |
| 3 | 72376600 | 72377600 | + | int | 962 |
| 3 | 72520800 | 72522000 | + | int | 963 |
| 3 | 72658000 | 72659200 | + | int | 964 |
| 3 | 72797600 | 72798600 | + | int | 965 |
| 3 | 72967400 | 72968800 | + | int | 966 |
| 3 | 73122800 | 73124000 | + | int | 967 |
| 3 | 73188000 | 73189200 | + | int | 968 |
| 3 | 73647600 | 73648600 | + | int | 969 |
| 3 | 73755200 | 73756200 | + | int | 970 |
| 3 | 74455600 | 74457400 | + | int | 971 |
| 3 | 74509400 | 74510600 | + | int | 972 |
| 3 | 74513400 | 74514600 | + | int | 973 |
| 3 | 74930400 | 74931400 | − | Zbbx | 974 |
| 3 | 75249400 | 75250600 | + | int | 975 |
| 3 | 76467200 | 76468400 | + | Fstl5 | 976 |
| 3 | 76868200 | 76869800 | + | int | 977 |
| 3 | 76957200 | 76958400 | + | int | 978 |
| 3 | 76975400 | 76977000 | + | int | 979 |
| 3 | 77836200 | 77837400 | + | int | 980 |
| 3 | 77852600 | 77854000 | + | int | 981 |
| 3 | 78143800 | 78145000 | + | int | 982 |
| 3 | 78150800 | 78152000 | + | int | 983 |
| 3 | 78353200 | 78354200 | + | int | 984 |
| 3 | 78413600 | 78414800 | + | int | 985 |
| 3 | 78474800 | 78475800 | + | int | 986 |
| 3 | 79947600 | 79948600 | + | int | 987 |
| 3 | 79989200 | 79990200 | + | int | 988 |
| 3 | 80033200 | 80034200 | + | int | 989 |
| 3 | 80354600 | 80355800 | + | int | 990 |
| 3 | 80390400 | 80391600 | + | int | 991 |
| 3 | 80724800 | 80725800 | + | int | 992 |
| 3 | 80804800 | 80806000 | + | int | 993 |
| 3 | 81118400 | 81119400 | + | int | 994 |
| 3 | 81184600 | 81185600 | + | int | 995 |
| 3 | 81440200 | 81441200 | + | int | 996 |
| 3 | 82344400 | 82345400 | − | Npy2r | 997 |
| 3 | 86318200 | 86321400 | + | Lrba | 998 |
| 3 | 86318200 | 86321400 | + | Lrba | 999 |
| 3 | 86318200 | 86321400 | + | Lrba | 1000 |
| 3 | 86360400 | 86361400 | + | Lrba | 1001 |
| 3 | 86360400 | 86361400 | + | Lrba | 1002 |
| 3 | 86360400 | 86361400 | + | Lrba | 1003 |
| 3 | 86481000 | 86482000 | + | Lrba | 1004 |
| 3 | 86481000 | 86482000 | + | Lrba | 1005 |
| 3 | 86481000 | 86482000 | + | Lrba | 1006 |
| 3 | 86540200 | 86541400 | + | Lrba | 1007 |
| 3 | 86540200 | 86541400 | + | Lrba | 1008 |
| 3 | 86540200 | 86541400 | + | Lrba | 1009 |
| 3 | 86584800 | 86585800 | + | Lrba | 1010 |
| 3 | 87137400 | 87138400 | + | int | 1011 |
| 3 | 88256000 | 88258000 | − | Sema4a | 1012 |
| 3 | 88256000 | 88258000 | − | Sema4a | 1013 |
| 3 | 88256000 | 88258000 | − | Sema4a | 1014 |
| 3 | 88256000 | 88258000 | − | Sema4a | 1015 |
| 3 | 90613400 | 90614400 | + | int | 1016 |
| 3 | 90680000 | 90681200 | + | int | 1017 |
| 3 | 90754200 | 90755400 | + | int | 1018 |
| 3 | 91016600 | 91017600 | + | int | 1019 |
| 3 | 91067400 | 91068400 | + | int | 1020 |
| 3 | 91072000 | 91073200 | + | int | 1021 |
| 3 | 91229600 | 91231000 | + | int | 1022 |
| 3 | 91354600 | 91356000 | + | int | 1023 |
| 3 | 91696400 | 91697400 | + | int | 1024 |
| 3 | 91735400 | 91737000 | + | int | 1025 |
| 3 | 91752800 | 91753800 | + | int | 1026 |
| 3 | 91867800 | 91869200 | + | int | 1027 |
| 3 | 92199400 | 92200400 | + | int | 1028 |
| 3 | 93251000 | 93252200 | + | Tchh | 1029 |
| 3 | 93471200 | 93472600 | + | int | 1030 |
| 3 | 95306000 | 95307000 | + | Ctsk | 1031 |
| 3 | 95326600 | 95327600 | + | int | 1032 |
| 3 | 96601200 | 96602200 | + | int | 1033 |
| 3 | 98191400 | 98192400 | + | Zfp697 | 1034 |
| 3 | 98637200 | 98638600 | + | int | 1035 |
| 3 | 98824600 | 98825600 | + | int | 1036 |
| 3 | 99230800 | 99232000 | + | int | 1037 |
| 3 | 99422800 | 99424200 | + | int | 1038 |
| 3 | 99483400 | 99484600 | + | int | 1039 |
| 3 | 99520200 | 99521400 | + | int | 1040 |
| 3 | 99531600 | 99532800 | + | int | 1041 |
| 3 | 100529800 | 100530800 | + | int | 1042 |
| 3 | 101128600 | 101129800 | + | int | 1043 |
| 3 | 101328400 | 101329400 | + | int | 1044 |
| 3 | 102649600 | 102650600 | − | Sycp1 | 1045 |
| 3 | 102812200 | 102813600 | + | int | 1046 |
| 3 | 103964000 | 103965200 | − | Magi3 | 1047 |
| 3 | 103967200 | 103968200 | − | Magi3 | 1048 |
| 3 | 104251800 | 104252800 | + | int | 1049 |
| 3 | 104686400 | 104687600 | + | St7l | 1050 |
| 3 | 104833600 | 104834600 | − | Cttnbp2nl | 1051 |
| 3 | 104833600 | 104834600 | − | Cttnbp2nl | 1052 |
| 3 | 105896200 | 105897200 | + | int | 1053 |
| 3 | 105948200 | 105949200 | + | int | 1054 |
| 3 | 106028000 | 106029200 | + | int | 1055 |
| 3 | 106068400 | 106069400 | + | int | 1056 |
| 3 | 106168400 | 106169600 | + | int | 1057 |
| 3 | 106725200 | 106726600 | + | int | 1058 |
| 3 | 107182000 | 107183000 | + | int | 1059 |
| 3 | 107762800 | 107764400 | + | int | 1060 |
| 3 | 108595000 | 108596000 | + | int | 1061 |
| 3 | 108849200 | 108850400 | + | int | 1062 |
| 3 | 108907000 | 108908000 | + | 4930443G12Rik | 1063 |
| 3 | 109117200 | 109118200 | + | int | 1064 |
| 3 | 110869200 | 110870200 | + | int | 1065 |
| 3 | 110977200 | 110978400 | + | int | 1066 |
| 3 | 111236000 | 111237000 | + | int | 1067 |
| 3 | 111459000 | 111460600 | + | int | 1068 |
| 3 | 111545200 | 111546200 | + | int | 1069 |
| 3 | 111609800 | 111610800 | + | int | 1070 |
| 3 | 112178400 | 112179400 | + | int | 1071 |
| 3 | 112435800 | 112436800 | + | int | 1072 |
| 3 | 112675600 | 112677200 | + | int | 1073 |
| 3 | 112965600 | 112966600 | + | int | 1074 |
| 3 | 113043200 | 113044200 | + | int | 1075 |
| 3 | 113314400 | 113315400 | − | Rnpc3 | 1076 |
| 3 | 113350000 | 113351200 | + | int | 1077 |
| 3 | 113414800 | 113416000 | + | int | 1078 |
| 3 | 113444000 | 113445000 | + | int | 1079 |
| 3 | 113474200 | 113475400 | + | int | 1080 |
| 3 | 114039800 | 114041000 | + | int | 1081 |
| 3 | 114132200 | 114133800 | + | int | 1082 |
| 3 | 114143400 | 114144400 | + | int | 1083 |
| 3 | 114251600 | 114252600 | + | int | 1084 |
| 3 | 114333200 | 114334600 | + | int | 1085 |
| 3 | 114456800 | 114458000 | + | int | 1086 |
| 3 | 114566200 | 114568000 | + | int | 1087 |
| 3 | 114789200 | 114790200 | + | Olfm3 | 1088 |
| 3 | 114789200 | 114790200 | + | Olfm3 | 1089 |
| 3 | 115115200 | 115116400 | + | int | 1090 |
| 3 | 115382000 | 115383000 | + | int | 1091 |
| 3 | 115908600 | 115909800 | + | int | 1092 |
| 3 | 117176400 | 117177400 | + | int | 1093 |
| 3 | 118428200 | 118429600 | + | Dpyd | 1094 |
| 3 | 118535800 | 118537000 | + | Dpyd | 1095 |
| 3 | 118553600 | 118554600 | + | Dpyd | 1096 |
| 3 | 118677800 | 118679000 | + | Dpyd | 1097 |
| 3 | 119370400 | 119371400 | + | int | 1098 |
| 3 | 120026400 | 120027600 | + | int | 1099 |
| 3 | 120526200 | 120527200 | + | int | 1100 |
| 3 | 120679400 | 120680400 | + | int | 1101 |
| 3 | 120856600 | 120857800 | + | int | 1102 |
| 3 | 122383400 | 122384400 | + | int | 1103 |
| 3 | 122788200 | 122789800 | − | Synpo2 | 1104 |
| 3 | 123812000 | 123813200 | + | int | 1105 |
| 3 | 124251200 | 124252400 | + | int | 1106 |
| 3 | 124588400 | 124589400 | + | int | 1107 |
| 3 | 124745000 | 124746000 | + | int | 1108 |
| 3 | 124898000 | 124899000 | + | int | 1109 |
| 3 | 124918400 | 124919400 | + | int | 1110 |
| 3 | 126642600 | 126643600 | − | Ank2 | 1111 |
| 3 | 126642600 | 126643600 | − | Ank2 | 1112 |
| 3 | 128445800 | 128446800 | + | int | 1113 |
| 3 | 129593200 | 129594400 | + | Pla2g12a | 1114 |
| 3 | 129593200 | 129594400 | + | Pla2g12a | 1115 |
| 3 | 131697800 | 131698800 | + | int | 1116 |
| 3 | 133748800 | 133750400 | + | int | 1117 |
| 3 | 133814400 | 133815600 | + | int | 1118 |
| 3 | 134082000 | 134083200 | + | int | 1119 |
| 3 | 134236200 | 134237200 | + | int | 1120 |
| 3 | 134558400 | 134559800 | + | Tacr3 | 1121 |
| 3 | 135809400 | 135810600 | − | Bank1 | 1122 |
| 3 | 136020000 | 136021200 | + | int | 1123 |
| 3 | 136149200 | 136150400 | + | int | 1124 |
| 3 | 136890800 | 136892200 | + | int | 1125 |
| 3 | 137046400 | 137047400 | + | Emcn | 1126 |
| 3 | 137773800 | 137775000 | − | Mttp | 1127 |
| 3 | 137773800 | 137775000 | − | Mttp | 1128 |
| 3 | 137878400 | 137879400 | + | Adh7 | 1129 |
| 3 | 138665200 | 138666200 | − | Rap1gds1 | 1130 |
| 3 | 139141000 | 139142200 | + | B930007M17Rik | 1131 |
| 3 | 139200200 | 139201200 | + | B930007M17Rik | 1132 |
| 3 | 139476200 | 139477400 | + | int | 1133 |
| 3 | 139572000 | 139573000 | + | int | 1134 |
| 3 | 140406800 | 140408000 | + | int | 1135 |
| 3 | 140470600 | 140471600 | + | int | 1136 |
| 3 | 140954600 | 140956000 | + | int | 1137 |
| 3 | 141034200 | 141035400 | + | int | 1138 |
| 3 | 141063000 | 141064000 | + | int | 1139 |
| 3 | 142279000 | 142280000 | + | Gbp1 | 1140 |
| 3 | 142491200 | 142492200 | − | Pkn2 | 1141 |
| 3 | 143995800 | 143996800 | + | int | 1142 |
| 3 | 144506800 | 144507800 | − | Clca4 | 1143 |
| 3 | 144542800 | 144543800 | − | Gm6289 | 1144 |
| 3 | 144955800 | 144956800 | + | Col24a1 | 1145 |
| 3 | 146992800 | 146994400 | + | int | 1146 |
| 3 | 147026600 | 147027600 | + | int | 1147 |
| 3 | 147357400 | 147358800 | + | int | 1148 |
| 3 | 147441000 | 147442000 | + | int | 1149 |
| 3 | 147751200 | 147752400 | + | int | 1150 |
| 3 | 148380000 | 148381000 | + | int | 1151 |
| 3 | 148585200 | 148586200 | − | Lphn2 | 1152 |
| 3 | 149352800 | 149353800 | + | int | 1153 |
| 3 | 149669600 | 149670600 | + | int | 1154 |
| 3 | 150284000 | 150285200 | + | int | 1155 |
| 3 | 151264000 | 151265200 | + | int | 1156 |
| 3 | 151285600 | 151286600 | + | int | 1157 |
| 3 | 151789400 | 151790400 | − | Gipc2 | 1158 |
| 3 | 152620600 | 152622000 | − | St6galnac5 | 1159 |
| 3 | 153175400 | 153176400 | − | St6galnac3 | 1160 |
| 3 | 153494200 | 153495800 | + | int | 1161 |
| 3 | 154325600 | 154326600 | + | int | 1162 |
| 3 | 155135000 | 155136200 | + | int | 1163 |
| 3 | 155426800 | 155428000 | + | int | 1164 |
| 3 | 155503000 | 155504200 | + | int | 1165 |
| 3 | 155625400 | 155626400 | + | int | 1166 |
| 3 | 155660000 | 155661400 | + | int | 1167 |
| 3 | 155706800 | 155707800 | + | int | 1168 |
| 3 | 157490600 | 157491600 | + | int | 1169 |
| 3 | 157985400 | 157986400 | − | Lrrc7 | 1170 |
| 3 | 158808000 | 158809000 | + | int | 1171 |
| 3 | 158943000 | 158944000 | + | int | 1172 |
| 4 | 3808400 | 3809400 | + | int | 1173 |
| 4 | 4169200 | 4170200 | + | int | 1174 |
| 4 | 4478400 | 4479400 | + | int | 1175 |
| 4 | 4772000 | 4773000 | + | int | 1176 |
| 4 | 4789800 | 4790800 | + | int | 1177 |
| 4 | 5994600 | 5995600 | + | int | 1178 |
| 4 | 6072200 | 6073200 | + | int | 1179 |
| 4 | 6504600 | 6505800 | + | int | 1180 |
| 4 | 8657000 | 8658000 | + | Chd7 | 1181 |
| 4 | 10044200 | 10045200 | + | int | 1182 |
| 4 | 10404800 | 10405800 | + | int | 1183 |
| 4 | 11960600 | 11961600 | + | int | 1184 |
| 4 | 12868200 | 12869400 | + | Gm11818 | 1185 |
| 4 | 12920600 | 12921600 | + | int | 1186 |
| 4 | 13111200 | 13112200 | + | int | 1187 |
| 4 | 14063600 | 14065000 | + | int | 1188 |
| 4 | 14494800 | 14495800 | − | Slc26a7 | 1189 |
| 4 | 14716800 | 14718000 | − | Lrrc69 | 1190 |
| 4 | 14737400 | 14738800 | − | Otud6b | 1191 |
| 4 | 15099000 | 15100200 | + | int | 1192 |
| 4 | 15662000 | 15663400 | + | int | 1193 |
| 4 | 16119200 | 16120400 | + | int | 1194 |
| 4 | 16192200 | 16193200 | + | int | 1195 |
| 4 | 16252800 | 16254400 | + | int | 1196 |
| 4 | 16372800 | 16374200 | + | int | 1197 |
| 4 | 16456000 | 16457400 | + | int | 1198 |
| 4 | 16685200 | 16686400 | + | int | 1199 |
| 4 | 16781800 | 16782800 | + | int | 1200 |
| 4 | 17139400 | 17140400 | + | int | 1201 |
| 4 | 17283800 | 17284800 | + | int | 1202 |
| 4 | 17344600 | 17346000 | + | int | 1203 |
| 4 | 17421600 | 17422600 | + | int | 1204 |
| 4 | 17553600 | 17556800 | + | int | 1205 |
| 4 | 17899200 | 17900200 | + | Mmp16 | 1206 |
| 4 | 18112800 | 18114400 | + | int | 1207 |
| 4 | 18144000 | 18145600 | + | int | 1208 |
| 4 | 18521600 | 18522600 | + | int | 1209 |
| 4 | 18849000 | 18850200 | + | int | 1210 |
| 4 | 20249800 | 20251000 | − | Nkain3 | 1211 |
| 4 | 20494200 | 20495400 | − | Nkain3 | 1212 |
| 4 | 20595000 | 20596000 | − | Nkain3 | 1213 |
| 4 | 21527000 | 21528000 | + | int | 1214 |
| 4 | 22458800 | 22459800 | + | int | 1215 |
| 4 | 23006000 | 23007400 | + | int | 1216 |
| 4 | 23304000 | 23305000 | + | int | 1217 |
| 4 | 23338600 | 23340000 | + | int | 1218 |
| 4 | 23572000 | 23573200 | + | int | 1219 |
| 4 | 23869200 | 23870200 | + | int | 1220 |
| 4 | 24385800 | 24386800 | + | int | 1221 |
| 4 | 24398200 | 24399200 | + | int | 1222 |
| 4 | 25547000 | 25548200 | − | Fut9 | 1223 |
| 4 | 25581400 | 25582400 | − | Fut9 | 1224 |
| 4 | 25742600 | 25743600 | + | int | 1225 |
| 4 | 25847800 | 25849000 | + | int | 1226 |
| 4 | 26329200 | 26330400 | + | int | 1227 |
| 4 | 26520400 | 26521400 | + | int | 1228 |
| 4 | 26593400 | 26594600 | + | int | 1229 |
| 4 | 26747200 | 26748200 | + | int | 1230 |
| 4 | 28208400 | 28209400 | + | int | 1231 |
| 4 | 28280800 | 28282200 | + | int | 1232 |
| 4 | 28742000 | 28743000 | + | Epha7 | 1233 |
| 4 | 28742000 | 28743000 | + | Epha7 | 1234 |
| 4 | 28839200 | 28840600 | + | Epha7 | 1235 |
| 4 | 28839200 | 28840600 | + | Epha7 | 1236 |
| 4 | 29286000 | 29287400 | + | int | 1237 |
| 4 | 29293400 | 29294400 | + | int | 1238 |
| 4 | 29800400 | 29801800 | + | int | 1239 |
| 4 | 30466000 | 30467400 | + | int | 1240 |
| 4 | 31373600 | 31375000 | + | int | 1241 |
| 4 | 32068200 | 32069600 | + | Map3k7 | 1242 |
| 4 | 33807600 | 33808600 | + | int | 1243 |
| 4 | 34283200 | 34284200 | + | int | 1244 |
| 4 | 34296400 | 34298000 | + | int | 1245 |
| 4 | 34301000 | 34302400 | + | int | 1246 |
| 4 | 35533800 | 35535400 | + | int | 1247 |
| 4 | 36101800 | 36102800 | − | Lingo2 | 1248 |
| 4 | 36101800 | 36102800 | − | Lingo2 | 1249 |
| 4 | 36313400 | 36314600 | − | Lingo2 | 1250 |
| 4 | 36313400 | 36314600 | − | Lingo2 | 1251 |
| 4 | 36405000 | 36406000 | − | Lingo2 | 1252 |
| 4 | 36405000 | 36406000 | − | Lingo2 | 1253 |
| 4 | 36566200 | 36567200 | − | Lingo2 | 1254 |
| 4 | 36566200 | 36567200 | − | Lingo2 | 1255 |
| 4 | 36846000 | 36847000 | − | Lingo2 | 1256 |
| 4 | 37023800 | 37025000 | + | int | 1257 |
| 4 | 37157400 | 37158800 | + | int | 1258 |
| 4 | 37338600 | 37339800 | + | int | 1259 |
| 4 | 37367800 | 37369000 | + | int | 1260 |
| 4 | 37416600 | 37417600 | + | int | 1261 |
| 4 | 37556000 | 37557000 | + | int | 1262 |
| 4 | 37753600 | 37754600 | + | int | 1263 |
| 4 | 37756400 | 37757600 | + | int | 1264 |
| 4 | 37889400 | 37890600 | + | int | 1265 |
| 4 | 38191800 | 38192800 | + | int | 1266 |
| 4 | 38210600 | 38211600 | + | int | 1267 |
| 4 | 38361000 | 38362400 | + | int | 1268 |
| 4 | 38710600 | 38711600 | + | int | 1269 |
| 4 | 38795600 | 38796600 | + | int | 1270 |
| 4 | 38897800 | 38899200 | + | int | 1271 |
| 4 | 38951000 | 38952000 | + | int | 1272 |
| 4 | 39010200 | 39011600 | + | int | 1273 |
| 4 | 39022000 | 39023400 | + | int | 1274 |
| 4 | 39121400 | 39122400 | + | int | 1275 |
| 4 | 41065600 | 41066600 | − | Nol6 | 1276 |
| 4 | 42169400 | 42170400 | + | int | 1277 |
| 4 | 42847400 | 42848600 | + | int | 1278 |
| 4 | 44362800 | 44364800 | + | Melk | 1279 |
| 4 | 47380000 | 47381200 | + | Tgfbr1 | 1280 |
| 4 | 47471600 | 47473200 | + | int | 1281 |
| 4 | 48459000 | 48460400 | − | Tex10 | 1282 |
| 4 | 49953600 | 49954600 | + | int | 1283 |
| 4 | 50339400 | 50340800 | + | int | 1284 |
| 4 | 50522200 | 50523200 | + | int | 1285 |
| 4 | 50646000 | 50647400 | + | int | 1286 |
| 4 | 51324000 | 51325600 | + | int | 1287 |
| 4 | 51439200 | 51440600 | + | int | 1288 |
| 4 | 51935400 | 51936600 | + | int | 1289 |
| 4 | 52100600 | 52101600 | + | int | 1290 |
| 4 | 52215200 | 52216200 | + | int | 1291 |
| 4 | 52528000 | 52529000 | + | int | 1292 |
| 4 | 52850200 | 52851200 | + | int | 1293 |
| 4 | 53340000 | 53341000 | + | int | 1294 |
| 4 | 53548400 | 53549600 | + | Slc44a1 | 1295 |
| 4 | 53548400 | 53549600 | + | Slc44a1 | 1296 |
| 4 | 59145200 | 59146200 | + | int | 1297 |
| 4 | 60032800 | 60034200 | + | int | 1298 |
| 4 | 60604800 | 60606600 | − | LOC100048885 | 1299 |
| 4 | 60604800 | 60606600 | − | Mup2 | 1300 |
| 4 | 61241400 | 61242400 | + | int | 1301 |
| 4 | 61379600 | 61380600 | + | int | 1302 |
| 4 | 64140000 | 64141000 | + | int | 1303 |
| 4 | 64401000 | 64402200 | + | int | 1304 |
| 4 | 64413000 | 64414000 | + | int | 1305 |
| 4 | 65176600 | 65178000 | − | Astn2 | 1306 |
| 4 | 66365000 | 66366000 | + | int | 1307 |
| 4 | 67233400 | 67234400 | + | int | 1308 |
| 4 | 67313400 | 67315000 | + | int | 1309 |
| 4 | 67626600 | 67627600 | + | int | 1310 |
| 4 | 67781400 | 67782600 | + | int | 1311 |
| 4 | 68062400 | 68063400 | + | int | 1312 |
| 4 | 68149000 | 68150200 | + | int | 1313 |
| 4 | 69016800 | 69017800 | + | int | 1314 |
| 4 | 70332000 | 70333000 | + | int | 1315 |
| 4 | 71130200 | 71131400 | + | int | 1316 |
| 4 | 71238800 | 71240000 | + | int | 1317 |
| 4 | 72546400 | 72548000 | + | int | 1318 |
| 4 | 72780600 | 72782000 | + | int | 1319 |
| 4 | 72894200 | 72895200 | + | int | 1320 |
| 4 | 73089000 | 73090200 | + | int | 1321 |
| 4 | 74031000 | 74032000 | + | Kdm4c | 1322 |
| 4 | 74031000 | 74032000 | + | Kdm4c | 1323 |
| 4 | 74484600 | 74485600 | + | int | 1324 |
| 4 | 74619400 | 74620600 | + | int | 1325 |
| 4 | 74739800 | 74741600 | + | int | 1326 |
| 4 | 74776000 | 74777200 | + | int | 1327 |
| 4 | 75030400 | 75031600 | + | int | 1328 |
| 4 | 75271800 | 75272800 | + | int | 1329 |
| 4 | 75550200 | 75551200 | + | int | 1330 |
| 4 | 76342400 | 76343800 | + | int | 1331 |
| 4 | 76457000 | 76458400 | + | int | 1332 |
| 4 | 77249400 | 77250600 | + | int | 1333 |
| 4 | 77345800 | 77347000 | + | int | 1334 |
| 4 | 77386400 | 77387400 | + | int | 1335 |
| 4 | 77557000 | 77558000 | + | int | 1336 |
| 4 | 77918600 | 77919600 | + | int | 1337 |
| 4 | 78037800 | 78039200 | + | int | 1338 |
| 4 | 78241200 | 78242400 | + | int | 1339 |
| 4 | 78341200 | 78342400 | + | int | 1340 |
| 4 | 78706200 | 78707200 | + | int | 1341 |
| 4 | 78748400 | 78749400 | + | int | 1342 |
| 4 | 78991200 | 78992400 | + | int | 1343 |
| 4 | 79015000 | 79016000 | + | int | 1344 |
| 4 | 79336000 | 79337000 | + | int | 1345 |
| 4 | 79444400 | 79445400 | + | int | 1346 |
| 4 | 79464400 | 79465400 | + | int | 1347 |
| 4 | 80049400 | 80050400 | + | int | 1348 |
| 4 | 80076200 | 80077600 | + | int | 1349 |
| 4 | 80302600 | 80303600 | + | int | 1350 |
| 4 | 81962200 | 81963200 | − | Nfib | 1351 |
| 4 | 82366200 | 82367200 | + | int | 1352 |
| 4 | 82451800 | 82452800 | − | Zdhhc21 | 1353 |
| 4 | 82719600 | 82720800 | + | int | 1354 |
| 4 | 83522400 | 83523400 | + | int | 1355 |
| 4 | 84220400 | 84221600 | − | Bnc2 | 1356 |
| 4 | 84457000 | 84458000 | + | int | 1357 |
| 4 | 85432800 | 85434200 | + | int | 1358 |
| 4 | 88407000 | 88408800 | + | int | 1359 |
| 4 | 90961400 | 90962600 | − | Elavl2 | 1360 |
| 4 | 90961400 | 90962600 | − | Elavl2 | 1361 |
| 4 | 90961400 | 90962600 | − | Elavl2 | 1362 |
| 4 | 91050200 | 91051200 | − | Elavl2 | 1363 |
| 4 | 91435600 | 91437200 | + | int | 1364 |
| 4 | 91460000 | 91461000 | + | int | 1365 |
| 4 | 91540800 | 91542000 | + | int | 1366 |
| 4 | 91777800 | 91778800 | + | int | 1367 |
| 4 | 92088800 | 92090000 | + | int | 1368 |
| 4 | 92156800 | 92158000 | + | int | 1369 |
| 4 | 92456800 | 92457800 | + | int | 1370 |
| 4 | 92517200 | 92518400 | + | int | 1371 |
| 4 | 92528200 | 92529600 | + | int | 1372 |
| 4 | 92587600 | 92588600 | + | int | 1373 |
| 4 | 92738000 | 92739000 | + | int | 1374 |
| 4 | 93245800 | 93246800 | + | int | 1375 |
| 4 | 93292000 | 93293000 | + | int | 1376 |
| 4 | 93965800 | 93967000 | + | int | 1377 |
| 4 | 95030600 | 95031800 | + | int | 1378 |
| 4 | 95885800 | 95886800 | − | Cyp2j7-ps | 1379 |
| 4 | 96290400 | 96291400 | + | int | 1380 |
| 4 | 98691200 | 98692200 | − | Dock7 | 1381 |
| 4 | 99989200 | 99990600 | + | Ror1 | 1382 |
| 4 | 100655400 | 100656600 | + | Cachd1 | 1383 |
| 4 | 101618000 | 101619000 | + | int | 1384 |
| 4 | 102944800 | 102945800 | − | 4921539E11Rik | 1385 |
| 4 | 103117000 | 103118000 | + | int | 1386 |
| 4 | 110122000 | 110123400 | + | Agbl4 | 1387 |
| 4 | 110134200 | 110135200 | + | Agbl4 | 1388 |
| 4 | 110750400 | 110751800 | + | Agbl4 | 1389 |
| 4 | 111071800 | 111073000 | + | Agbl4 | 1390 |
| 4 | 117675600 | 117676600 | − | St3gal3 | 1391 |
| 4 | 117675600 | 117676600 | − | St3gal3 | 1392 |
| 4 | 118329200 | 118330200 | + | int | 1393 |
| 4 | 119369600 | 119370600 | + | int | 1394 |
| 4 | 120168000 | 120169000 | + | Scmh1 | 1395 |
| 4 | 120350400 | 120351400 | + | int | 1396 |
| 4 | 121129200 | 121130200 | + | int | 1397 |
| 4 | 123522400 | 123523400 | + | int | 1398 |
| 4 | 123776400 | 123777400 | + | int | 1399 |
| 4 | 126425000 | 126426200 | − | Ncdn | 1400 |
| 4 | 127658200 | 127659200 | + | int | 1401 |
| 4 | 128554200 | 128555600 | + | int | 1402 |
| 4 | 129024400 | 129025400 | + | int | 1403 |
| 4 | 129755600 | 129756600 | + | Col16a1 | 1404 |
| 4 | 133130200 | 133131200 | + | Gpatch3 | 1405 |
| 4 | 133473800 | 133475000 | + | int | 1406 |
| 4 | 134096200 | 134097800 | − | Sepn1 | 1407 |
| 4 | 134128400 | 134129400 | − | Man1c1 | 1408 |
| 4 | 134150000 | 134151800 | − | Man1c1 | 1409 |
| 4 | 135631400 | 135632600 | + | int | 1410 |
| 4 | 135811400 | 135812400 | + | Tcea3 | 1411 |
| 4 | 138547200 | 138548800 | + | Tmco4 | 1412 |
| 4 | 139652000 | 139653000 | − | Igsf21 | 1413 |
| 4 | 140179000 | 140180000 | − | Arhgef10l | 1414 |
| 4 | 140179000 | 140180000 | − | Arhgef10l | 1415 |
| 4 | 140600600 | 140601600 | − | Crocc | 1416 |
| 4 | 140600600 | 140601600 | − | Crocc | 1417 |
| 4 | 140951600 | 140953000 | − | Clcnka | 1418 |
| 4 | 140951600 | 140953000 | − | Clcnka | 1419 |
| 4 | 141514200 | 141515200 | − | Fhad1 | 1420 |
| 4 | 142583200 | 142584400 | + | int | 1421 |
| 4 | 142814800 | 142816200 | + | int | 1422 |
| 4 | 142831600 | 142832600 | + | int | 1423 |
| 4 | 143573200 | 143575000 | + | int | 1424 |
| 4 | 143577800 | 143579000 | + | int | 1425 |
| 4 | 144914000 | 144915200 | + | int | 1426 |
| 4 | 145042600 | 145044000 | + | int | 1427 |
| 4 | 145421200 | 145422600 | + | int | 1428 |
| 4 | 145664400 | 145665600 | + | int | 1429 |
| 4 | 146134600 | 146135600 | + | Zfp600 | 1430 |
| 4 | 146134600 | 146135600 | + | Zfp600 | 1431 |
| 4 | 146556000 | 146557400 | + | 1700029I01Rik | 1432 |
| 4 | 146556000 | 146557400 | + | Gm13152 | 1433 |
| 4 | 146717000 | 146718200 | + | Gm13152 | 1434 |
| 4 | 146810600 | 146811600 | + | Gm13152 | 1435 |
| 4 | 147135600 | 147136600 | − | Gm13157 | 1436 |
| 4 | 147299400 | 147300400 | − | Plod1 | 1437 |
| 4 | 148703800 | 148705200 | − | Ube4b | 1438 |
| 4 | 150008800 | 150009800 | − | Slc45a1 | 1439 |
| 4 | 150199000 | 150200000 | + | int | 1440 |
| 4 | 150554600 | 150555600 | − | Camta1 | 1441 |
| 4 | 151351600 | 151352800 | + | Dnajc11 | 1442 |
| 4 | 151809000 | 151810000 | − | Kcnab2 | 1443 |
| 4 | 152277600 | 152280600 | + | int | 1444 |
| 4 | 154362400 | 154364200 | − | Plch2 | 1445 |
| 4 | 154428200 | 154429400 | + | int | 1446 |
| 4 | 155233600 | 155235000 | − | Tas1r3 | 1447 |
| 5 | 3292200 | 3293200 | + | int | 1448 |
| 5 | 3612000 | 3613200 | + | Pex1 | 1449 |
| 5 | 4361600 | 4362600 | + | int | 1450 |
| 5 | 4423400 | 4424400 | + | int | 1451 |
| 5 | 5948400 | 5949800 | + | int | 1452 |
| 5 | 6357200 | 6358400 | + | int | 1453 |
| 5 | 6428400 | 6429400 | + | int | 1454 |
| 5 | 8276200 | 8277200 | − | Adam22 | 1455 |
| 5 | 8276200 | 8277200 | − | Adam22 | 1456 |
| 5 | 8276200 | 8277200 | − | Adam22 | 1457 |
| 5 | 8487600 | 8488600 | + | int | 1458 |
| 5 | 8728600 | 8729600 | + | Abcb1a | 1459 |
| 5 | 10565000 | 10566200 | + | int | 1460 |
| 5 | 10642800 | 10644000 | + | int | 1461 |
| 5 | 11945600 | 11947200 | + | int | 1462 |
| 5 | 13094400 | 13095800 | + | int | 1463 |
| 5 | 13203200 | 13204200 | + | int | 1464 |
| 5 | 13319000 | 13320600 | + | int | 1465 |
| 5 | 13542000 | 13543000 | + | Sema3a | 1466 |
| 5 | 13599000 | 13600000 | + | Sema3a | 1467 |
| 5 | 13807600 | 13808600 | + | int | 1468 |
| 5 | 14933200 | 14934800 | − | Speer4e | 1469 |
| 5 | 14974200 | 14975200 | + | Speer8-ps1 | 1470 |
| 5 | 15194600 | 15195600 | + | Speer7-ps1 | 1471 |
| 5 | 15613600 | 15615400 | + | Cacna2d1 | 1472 |
| 5 | 15984600 | 15985600 | + | int | 1473 |
| 5 | 16589400 | 16590400 | + | int | 1474 |
| 5 | 17204400 | 17205600 | + | Sema3c | 1475 |
| 5 | 17406200 | 17407200 | + | int | 1476 |
| 5 | 17626400 | 17628000 | + | int | 1477 |
| 5 | 17703600 | 17704800 | + | int | 1478 |
| 5 | 19124400 | 19125600 | + | Magi2 | 1479 |
| 5 | 19148600 | 19149600 | + | Magi2 | 1480 |
| 5 | 21254600 | 21255600 | + | Pmpcb | 1481 |
| 5 | 21597000 | 21598000 | − | Reln | 1482 |
| 5 | 22608400 | 22609400 | + | Lhfpl3 | 1483 |
| 5 | 22685400 | 22686800 | + | Lhfpl3 | 1484 |
| 5 | 28488200 | 28489200 | + | int | 1485 |
| 5 | 28822400 | 28823400 | + | 9530036O11Rik | 1486 |
| 5 | 29326000 | 29327200 | + | int | 1487 |
| 5 | 33072000 | 33073200 | + | int | 1488 |
| 5 | 33075800 | 33077200 | + | int | 1489 |
| 5 | 33081000 | 33084800 | − | Pisd | 1490 |
| 5 | 35588800 | 35590400 | + | int | 1491 |
| 5 | 39681200 | 39682400 | + | int | 1492 |
| 5 | 40825800 | 40826800 | + | int | 1493 |
| 5 | 41358400 | 41359400 | + | int | 1494 |
| 5 | 42036600 | 42037800 | − | Rab28 | 1495 |
| 5 | 42288600 | 42289600 | + | int | 1496 |
| 5 | 43178400 | 43179400 | + | int | 1497 |
| 5 | 43327000 | 43328000 | + | int | 1498 |
| 5 | 46996800 | 46997800 | + | int | 1499 |
| 5 | 47249800 | 47251000 | + | int | 1500 |
| 5 | 47267200 | 47268400 | + | int | 1501 |
| 5 | 47939200 | 47940200 | + | int | 1502 |
| 5 | 48281600 | 48283000 | + | int | 1503 |
| 5 | 49764400 | 49765400 | + | int | 1504 |
| 5 | 49989200 | 49990200 | + | int | 1505 |
| 5 | 50510600 | 50511600 | + | int | 1506 |
| 5 | 50667200 | 50668800 | + | int | 1507 |
| 5 | 52144600 | 52145600 | + | int | 1508 |
| 5 | 52889600 | 52890600 | + | int | 1509 |
| 5 | 53327600 | 53328600 | + | int | 1510 |
| 5 | 53456000 | 53457200 | + | Slc34a2 | 1511 |
| 5 | 54183600 | 54185000 | + | int | 1512 |
| 5 | 54195600 | 54196600 | + | int | 1513 |
| 5 | 54485200 | 54486200 | + | Stim2 | 1514 |
| 5 | 54534000 | 54535200 | + | int | 1515 |
| 5 | 54941800 | 54942800 | + | int | 1516 |
| 5 | 54945000 | 54946200 | + | int | 1517 |
| 5 | 55224800 | 55226000 | + | int | 1518 |
| 5 | 55788200 | 55789600 | + | int | 1519 |
| 5 | 55793800 | 55795000 | + | int | 1520 |
| 5 | 55965600 | 55966600 | + | int | 1521 |
| 5 | 56106800 | 56107800 | + | int | 1522 |
| 5 | 56137400 | 56138400 | + | int | 1523 |
| 5 | 56440800 | 56442600 | + | int | 1524 |
| 5 | 56521400 | 56522600 | + | int | 1525 |
| 5 | 57202600 | 57203800 | + | int | 1526 |
| 5 | 58412000 | 58413000 | + | Pcdh7 | 1527 |
| 5 | 59003600 | 59004600 | + | int | 1528 |
| 5 | 59028800 | 59029800 | + | int | 1529 |
| 5 | 59093000 | 59094200 | + | int | 1530 |
| 5 | 59142600 | 59144000 | + | int | 1531 |
| 5 | 59237800 | 59239000 | + | int | 1532 |
| 5 | 59278800 | 59279800 | + | int | 1533 |
| 5 | 59303600 | 59305200 | + | int | 1534 |
| 5 | 59336200 | 59337200 | + | int | 1535 |
| 5 | 59682600 | 59684000 | + | int | 1536 |
| 5 | 59801200 | 59802400 | + | int | 1537 |
| 5 | 59940200 | 59941600 | + | int | 1538 |
| 5 | 60437800 | 60439200 | + | int | 1539 |
| 5 | 60743000 | 60744200 | + | int | 1540 |
| 5 | 60881800 | 60882800 | + | int | 1541 |
| 5 | 61190600 | 61191600 | + | int | 1542 |
| 5 | 61212800 | 61214000 | + | int | 1543 |
| 5 | 61291200 | 61292200 | + | int | 1544 |
| 5 | 61302800 | 61304200 | + | int | 1545 |
| 5 | 61497600 | 61498800 | + | int | 1546 |
| 5 | 61592400 | 61593400 | + | int | 1547 |
| 5 | 61649600 | 61650600 | + | int | 1548 |
| 5 | 61868800 | 61870200 | + | int | 1549 |
| 5 | 61951800 | 61953200 | + | int | 1550 |
| 5 | 62003800 | 62005000 | + | int | 1551 |
| 5 | 62195000 | 62196000 | + | int | 1552 |
| 5 | 62472800 | 62473800 | + | int | 1553 |
| 5 | 62564200 | 62565400 | + | int | 1554 |
| 5 | 62692000 | 62693000 | + | int | 1555 |
| 5 | 62730800 | 62731800 | + | int | 1556 |
| 5 | 63515600 | 63516600 | + | int | 1557 |
| 5 | 63536800 | 63537800 | + | int | 1558 |
| 5 | 68779400 | 68780400 | + | int | 1559 |
| 5 | 69210600 | 69211800 | + | int | 1560 |
| 5 | 69959000 | 69960000 | + | Guf1 | 1561 |
| 5 | 70008600 | 70009600 | + | int | 1562 |
| 5 | 70279200 | 70280200 | + | int | 1563 |
| 5 | 70346000 | 70347400 | + | int | 1564 |
| 5 | 70995800 | 70997000 | + | int | 1565 |
| 5 | 71141400 | 71142600 | − | Gabrg1 | 1566 |
| 5 | 71269200 | 71270200 | + | int | 1567 |
| 5 | 71985600 | 71986800 | − | Gabra4 | 1568 |
| 5 | 73834400 | 73835600 | + | Cwh43 | 1569 |
| 5 | 74310400 | 74311400 | + | int | 1570 |
| 5 | 79128400 | 79129400 | + | int | 1571 |
| 5 | 79261400 | 79262600 | + | int | 1572 |
| 5 | 79391400 | 79392400 | + | int | 1573 |
| 5 | 79412800 | 79414200 | + | int | 1574 |
| 5 | 79583000 | 79584200 | + | int | 1575 |
| 5 | 79670400 | 79671600 | + | int | 1576 |
| 5 | 80360000 | 80361200 | + | int | 1577 |
| 5 | 80660000 | 80661600 | + | int | 1578 |
| 5 | 80722800 | 80723800 | + | int | 1579 |
| 5 | 81194800 | 81195800 | + | int | 1580 |
| 5 | 81633600 | 81634600 | + | Lphn3 | 1581 |
| 5 | 81735600 | 81736600 | + | Lphn3 | 1582 |
| 5 | 82594800 | 82595800 | + | int | 1583 |
| 5 | 82871600 | 82872600 | + | int | 1584 |
| 5 | 83023800 | 83025000 | + | int | 1585 |
| 5 | 83154200 | 83155800 | + | int | 1586 |
| 5 | 83233200 | 83234400 | + | int | 1587 |
| 5 | 83577600 | 83578800 | + | int | 1588 |
| 5 | 83662800 | 83663800 | + | int | 1589 |
| 5 | 83897200 | 83898200 | + | int | 1590 |
| 5 | 83905400 | 83906400 | + | int | 1591 |
| 5 | 84352600 | 84353600 | + | int | 1592 |
| 5 | 84625800 | 84627200 | − | Epha5 | 1593 |
| 5 | 84862000 | 84863600 | + | int | 1594 |
| 5 | 84901200 | 84902600 | + | int | 1595 |
| 5 | 85465800 | 85466800 | + | int | 1596 |
| 5 | 85563000 | 85564000 | + | int | 1597 |
| 5 | 86162000 | 86163000 | + | int | 1598 |
| 5 | 86760600 | 86761800 | − | Tmprss11d | 1599 |
| 5 | 87020400 | 87021400 | − | Tmprss11f | 1600 |
| 5 | 87310800 | 87312200 | + | int | 1601 |
| 5 | 87529200 | 87530400 | + | int | 1602 |
| 5 | 88087200 | 88088600 | + | int | 1603 |
| 5 | 88472000 | 88473200 | + | int | 1604 |
| 5 | 90264000 | 90265000 | − | Adamts3 | 1605 |
| 5 | 91633000 | 91634000 | + | int | 1606 |
| 5 | 92115600 | 92117000 | + | int | 1607 |
| 5 | 94177000 | 94178400 | + | int | 1608 |
| 5 | 96519400 | 96520800 | − | Cnot6l | 1609 |
| 5 | 96519400 | 96520800 | − | Cnot6l | 1610 |
| 5 | 96942000 | 96943000 | + | Fras1 | 1611 |
| 5 | 98046000 | 98047000 | + | int | 1612 |
| 5 | 98151800 | 98153000 | + | int | 1613 |
| 5 | 98955200 | 98956400 | + | 1700007G11Rik | 1614 |
| 5 | 99155000 | 99156000 | + | 1700007G11Rik | 1615 |
| 5 | 99195800 | 99196800 | + | 1700007G11Rik | 1616 |
| 5 | 102262800 | 102263800 | − | Wdfy3 | 1617 |
| 5 | 102434800 | 102435800 | − | Wdfy3 | 1618 |
| 5 | 103134200 | 103135200 | + | Arhgap24 | 1619 |
| 5 | 104357600 | 104358600 | + | int | 1620 |
| 5 | 109166400 | 109167400 | + | int | 1621 |
| 5 | 109332200 | 109333200 | + | int | 1622 |
| 5 | 109623000 | 109624000 | − | Vmn2r13 | 1623 |
| 5 | 109669400 | 109670400 | + | int | 1624 |
| 5 | 109831200 | 109832600 | + | int | 1625 |
| 5 | 110362400 | 110363600 | + | int | 1626 |
| 5 | 110936400 | 110937400 | + | int | 1627 |
| 5 | 111690800 | 111691800 | + | Ttc28 | 1628 |
| 5 | 111905000 | 111906000 | + | int | 1629 |
| 5 | 113490400 | 113491400 | − | Crybb2 | 1630 |
| 5 | 114571000 | 114572000 | + | Usp30 | 1631 |
| 5 | 116666800 | 116667800 | − | Ccdc60 | 1632 |
| 5 | 122055400 | 122056600 | − | 9330129D05Rik | 1633 |
| 5 | 125744600 | 125745600 | + | int | 1634 |
| 5 | 126231400 | 126233000 | + | Tmem132b | 1635 |
| 5 | 126426800 | 126427800 | + | int | 1636 |
| 5 | 126541000 | 126542400 | + | int | 1637 |
| 5 | 127984600 | 127985600 | + | Tmem132c | 1638 |
| 5 | 130577400 | 130578600 | + | Tpst1 | 1639 |
| 5 | 130577400 | 130578600 | + | Tpst1 | 1640 |
| 5 | 133197600 | 133198800 | + | int | 1641 |
| 5 | 134482400 | 134483400 | + | int | 1642 |
| 5 | 134490200 | 134491400 | + | int | 1643 |
| 5 | 135262400 | 135263600 | + | int | 1644 |
| 5 | 137639400 | 137640400 | + | int | 1645 |
| 5 | 137711200 | 137712200 | + | int | 1646 |
| 5 | 137934800 | 137935800 | + | int | 1647 |
| 5 | 138713600 | 138714800 | − | Gal3st4 | 1648 |
| 5 | 138975200 | 138976200 | + | int | 1649 |
| 5 | 141760800 | 141761800 | + | Sdk1 | 1650 |
| 5 | 145294600 | 145295600 | + | int | 1651 |
| 5 | 145807600 | 145808600 | + | int | 1652 |
| 5 | 146827200 | 146828200 | + | int | 1653 |
| 5 | 147071800 | 147073600 | + | Cdk8 | 1654 |
| 5 | 147360200 | 147361400 | + | int | 1655 |
| 5 | 147692000 | 147693200 | + | int | 1656 |
| 5 | 149146800 | 149147800 | − | Slc7a1 | 1657 |
| 5 | 150800000 | 150801400 | + | int | 1658 |
| 5 | 152408000 | 152409000 | + | int | 1659 |
| 6 | 3000000 | 3001400 | + | int | 1660 |
| 6 | 3150400 | 3152000 | + | int | 1661 |
| 6 | 3166400 | 3167600 | + | int | 1662 |
| 6 | 3511600 | 3512600 | + | Ccdc132 | 1663 |
| 6 | 3511600 | 3512600 | + | Ccdc132 | 1664 |
| 6 | 3632600 | 3633600 | + | int | 1665 |
| 6 | 4550200 | 4551200 | + | Casd1 | 1666 |
| 6 | 4560000 | 4561000 | + | Casd1 | 1667 |
| 6 | 4841800 | 4842800 | + | int | 1668 |
| 6 | 5675600 | 5676600 | + | Dync1i1 | 1669 |
| 6 | 7615600 | 7617000 | + | int | 1670 |
| 6 | 9224000 | 9225400 | + | int | 1671 |
| 6 | 9236600 | 9237600 | + | int | 1672 |
| 6 | 9269600 | 9270600 | + | int | 1673 |
| 6 | 9389800 | 9391200 | + | int | 1674 |
| 6 | 9430800 | 9432400 | + | int | 1675 |
| 6 | 9685600 | 9686600 | + | int | 1676 |
| 6 | 9719400 | 9721000 | + | int | 1677 |
| 6 | 9756400 | 9757800 | + | int | 1678 |
| 6 | 10121600 | 10123200 | + | int | 1679 |
| 6 | 10666800 | 10668000 | + | int | 1680 |
| 6 | 10761400 | 10762600 | + | int | 1681 |
| 6 | 11055400 | 11056600 | + | int | 1682 |
| 6 | 11249000 | 11250000 | + | int | 1683 |
| 6 | 11670400 | 11671400 | + | int | 1684 |
| 6 | 12363200 | 12364200 | − | Thsd7a | 1685 |
| 6 | 13864200 | 13865200 | + | int | 1686 |
| 6 | 14216400 | 14217400 | + | int | 1687 |
| 6 | 14538800 | 14540000 | + | int | 1688 |
| 6 | 14983200 | 14984400 | + | Foxp2 | 1689 |
| 6 | 15103000 | 15104200 | + | Foxp2 | 1690 |
| 6 | 15414800 | 15415800 | + | int | 1691 |
| 6 | 15557400 | 15558400 | + | int | 1692 |
| 6 | 15946400 | 15947800 | + | int | 1693 |
| 6 | 16727000 | 16728200 | + | int | 1694 |
| 6 | 16983800 | 16985200 | + | int | 1695 |
| 6 | 17181800 | 17183000 | + | int | 1696 |
| 6 | 17852800 | 17853800 | + | St7 | 1697 |
| 6 | 18613600 | 18614600 | + | int | 1698 |
| 6 | 18917800 | 18919200 | + | int | 1699 |
| 6 | 19162600 | 19163600 | + | int | 1700 |
| 6 | 19870600 | 19871800 | + | int | 1701 |
| 6 | 20128000 | 20129200 | + | int | 1702 |
| 6 | 20518600 | 20520000 | + | int | 1703 |
| 6 | 20759800 | 20761000 | + | int | 1704 |
| 6 | 20899200 | 20900400 | + | int | 1705 |
| 6 | 21030800 | 21032000 | + | int | 1706 |
| 6 | 21181000 | 21182000 | + | Kcnd2 | 1707 |
| 6 | 21195000 | 21196000 | + | Kcnd2 | 1708 |
| 6 | 21235200 | 21236400 | + | Kcnd2 | 1709 |
| 6 | 22204000 | 22205000 | + | A430107O13Rik | 1710 |
| 6 | 22546200 | 22547600 | + | int | 1711 |
| 6 | 22582800 | 22584400 | + | int | 1712 |
| 6 | 23906800 | 23908000 | + | int | 1713 |
| 6 | 24915400 | 24916600 | + | int | 1714 |
| 6 | 24983000 | 24984200 | + | int | 1715 |
| 6 | 25811200 | 25812400 | + | int | 1716 |
| 6 | 26157400 | 26158400 | + | int | 1717 |
| 6 | 26420800 | 26422000 | + | int | 1718 |
| 6 | 26752800 | 26753800 | + | int | 1719 |
| 6 | 26927600 | 26928800 | + | int | 1720 |
| 6 | 27838600 | 27839600 | − | Grm8 | 1721 |
| 6 | 28164600 | 28165800 | + | int | 1722 |
| 6 | 28487400 | 28488400 | + | Snd1 | 1723 |
| 6 | 29184000 | 29185200 | + | int | 1724 |
| 6 | 31446000 | 31447000 | + | Mkln1 | 1725 |
| 6 | 32117200 | 32118200 | − | Plxna4 | 1726 |
| 6 | 33269600 | 33270800 | + | Exoc4 | 1727 |
| 6 | 33316000 | 33317000 | + | Exoc4 | 1728 |
| 6 | 33830000 | 33831000 | + | Exoc4 | 1729 |
| 6 | 34151000 | 34152200 | + | int | 1730 |
| 6 | 35338200 | 35339400 | + | int | 1731 |
| 6 | 35673800 | 35674800 | + | int | 1732 |
| 6 | 35861800 | 35862800 | + | int | 1733 |
| 6 | 37290200 | 37291400 | − | Creb3l2 | 1734 |
| 6 | 39093000 | 39094000 | − | Jhdm1d | 1735 |
| 6 | 41074000 | 41075200 | + | int | 1736 |
| 6 | 41465000 | 41466200 | + | int | 1737 |
| 6 | 42436200 | 42437200 | − | Olfr456 | 1738 |
| 6 | 43081400 | 43082400 | + | int | 1739 |
| 6 | 43819000 | 43821800 | + | int | 1740 |
| 6 | 44019200 | 44020200 | + | int | 1741 |
| 6 | 44182200 | 44183200 | + | int | 1742 |
| 6 | 44745800 | 44747000 | + | int | 1743 |
| 6 | 44778800 | 44780400 | + | int | 1744 |
| 6 | 44840400 | 44841600 | + | int | 1745 |
| 6 | 44932200 | 44933400 | + | int | 1746 |
| 6 | 45148600 | 45149600 | + | Cntnap2 | 1747 |
| 6 | 45536000 | 45537000 | + | Cntnap2 | 1748 |
| 6 | 45841600 | 45842600 | + | Cntnap2 | 1749 |
| 6 | 45882000 | 45883000 | + | Cntnap2 | 1750 |
| 6 | 45954400 | 45955400 | + | Cntnap2 | 1751 |
| 6 | 46014200 | 46015200 | + | Cntnap2 | 1752 |
| 6 | 46016600 | 46017600 | + | Cntnap2 | 1753 |
| 6 | 46505000 | 46506200 | + | Cntnap2 | 1754 |
| 6 | 49167400 | 49168800 | − | Igf2bp3 | 1755 |
| 6 | 49378800 | 49379800 | + | Stk31 | 1756 |
| 6 | 49417600 | 49418600 | + | Stk31 | 1757 |
| 6 | 50882000 | 50883000 | + | int | 1758 |
| 6 | 51035600 | 51036600 | + | int | 1759 |
| 6 | 51715600 | 51716800 | + | int | 1760 |
| 6 | 54116800 | 54117800 | + | Chn2 | 1761 |
| 6 | 54425800 | 54426800 | + | Wipf3 | 1762 |
| 6 | 55917800 | 55919200 | + | Ccdc129 | 1763 |
| 6 | 56181800 | 56182800 | − | Pde1c | 1764 |
| 6 | 56181800 | 56182800 | − | Pde1c | 1765 |
| 6 | 56181800 | 56182800 | − | Pde1c | 1766 |
| 6 | 56181800 | 56182800 | − | Pde1c | 1767 |
| 6 | 56181800 | 56182800 | − | Pde1c | 1768 |
| 6 | 56181800 | 56182800 | − | Pde1c | 1769 |
| 6 | 56267400 | 56269000 | − | Pde1c | 1770 |
| 6 | 56267400 | 56269000 | − | Pde1c | 1771 |
| 6 | 56267400 | 56269000 | − | Pde1c | 1772 |
| 6 | 56267400 | 56269000 | − | Pde1c | 1773 |
| 6 | 56267400 | 56269000 | − | Pde1c | 1774 |
| 6 | 56267400 | 56269000 | − | Pde1c | 1775 |
| 6 | 58517600 | 58519000 | + | int | 1776 |
| 6 | 58759200 | 58760800 | + | int | 1777 |
| 6 | 58911800 | 58913000 | − | Fam13a | 1778 |
| 6 | 59170000 | 59171200 | + | int | 1779 |
| 6 | 59390000 | 59391200 | + | int | 1780 |
| 6 | 59499000 | 59500000 | + | int | 1781 |
| 6 | 59593200 | 59594600 | + | int | 1782 |
| 6 | 59849400 | 59852800 | + | int | 1783 |
| 6 | 60078000 | 60079200 | + | int | 1784 |
| 6 | 60423000 | 60424000 | + | int | 1785 |
| 6 | 61614600 | 61615600 | + | Fam190a | 1786 |
| 6 | 62114000 | 62115000 | + | Fam190a | 1787 |
| 6 | 62229400 | 62230400 | + | Fam190a | 1788 |
| 6 | 62431600 | 62432800 | + | int | 1789 |
| 6 | 62471000 | 62472200 | + | int | 1790 |
| 6 | 62721000 | 62722000 | + | int | 1791 |
| 6 | 63714400 | 63715600 | + | Grid2 | 1792 |
| 6 | 64266400 | 64267800 | + | Grid2 | 1793 |
| 6 | 65058800 | 65059800 | + | Smarcad1 | 1794 |
| 6 | 66253800 | 66255200 | + | int | 1795 |
| 6 | 66790400 | 66791600 | + | int | 1796 |
| 6 | 67605200 | 67606400 | + | int | 1797 |
| 6 | 67640800 | 67641800 | + | int | 1798 |
| 6 | 67850800 | 67851800 | + | int | 1799 |
| 6 | 68437000 | 68438200 | + | int | 1800 |
| 6 | 68618000 | 68619000 | + | int | 1801 |
| 6 | 68686200 | 68687200 | + | int | 1802 |
| 6 | 68821000 | 68822000 | + | int | 1803 |
| 6 | 69120600 | 69122000 | + | int | 1804 |
| 6 | 69450000 | 69451000 | + | int | 1805 |
| 6 | 69681600 | 69683200 | + | int | 1806 |
| 6 | 70105200 | 70106600 | + | int | 1807 |
| 6 | 70194600 | 70195800 | + | int | 1808 |
| 6 | 70340800 | 70341800 | + | int | 1809 |
| 6 | 71484600 | 71485600 | + | int | 1810 |
| 6 | 72285200 | 72286200 | − | Usp39 | 1811 |
| 6 | 74162400 | 74163400 | + | int | 1812 |
| 6 | 74176400 | 74177600 | + | int | 1813 |
| 6 | 74212600 | 74213600 | + | int | 1814 |
| 6 | 74260000 | 74261000 | + | int | 1815 |
| 6 | 74416000 | 74417000 | + | int | 1816 |
| 6 | 74714000 | 74715400 | + | int | 1817 |
| 6 | 74764200 | 74765800 | + | int | 1818 |
| 6 | 75034400 | 75035800 | + | int | 1819 |
| 6 | 75271800 | 75272800 | + | int | 1820 |
| 6 | 75613400 | 75615000 | + | int | 1821 |
| 6 | 76479600 | 76480600 | + | int | 1822 |
| 6 | 77758800 | 77759800 | − | Ctnna2 | 1823 |
| 6 | 78421600 | 78423200 | − | Reg3g | 1824 |
| 6 | 78533800 | 78535000 | + | int | 1825 |
| 6 | 79043000 | 79044000 | + | int | 1826 |
| 6 | 79281600 | 79282600 | + | int | 1827 |
| 6 | 79652000 | 79653000 | + | int | 1828 |
| 6 | 80624600 | 80625800 | + | int | 1829 |
| 6 | 82187200 | 82188200 | + | int | 1830 |
| 6 | 83306200 | 83307400 | + | Bola3 | 1831 |
| 6 | 83737600 | 83738600 | + | int | 1832 |
| 6 | 87777200 | 87778200 | − | Isy1 | 1833 |
| 6 | 87829600 | 87830600 | + | int | 1834 |
| 6 | 87859200 | 87860200 | + | Copg | 1835 |
| 6 | 89785400 | 89787000 | + | int | 1836 |
| 6 | 90130800 | 90132000 | + | int | 1837 |
| 6 | 92736800 | 92737800 | − | Adamts9 | 1838 |
| 6 | 94432800 | 94433800 | + | int | 1839 |
| 6 | 95353200 | 95354600 | + | int | 1840 |
| 6 | 96835000 | 96836000 | − | Fam19a4 | 1841 |
| 6 | 101645400 | 101646400 | + | int | 1842 |
| 6 | 102445400 | 102446400 | + | int | 1843 |
| 6 | 102669400 | 102670400 | + | int | 1844 |
| 6 | 103002000 | 103003200 | + | int | 1845 |
| 6 | 103598200 | 103600000 | + | Chl1 | 1846 |
| 6 | 104189800 | 104191000 | + | int | 1847 |
| 6 | 104356600 | 104357600 | + | int | 1848 |
| 6 | 104453000 | 104454000 | + | Cntn6 | 1849 |
| 6 | 104521000 | 104522200 | + | Cntn6 | 1850 |
| 6 | 104986400 | 104987600 | + | int | 1851 |
| 6 | 105151000 | 105152200 | + | int | 1852 |
| 6 | 105196200 | 105197200 | + | int | 1853 |
| 6 | 106508800 | 106509800 | + | Cntn4 | 1854 |
| 6 | 106508800 | 106509800 | + | Cntn4 | 1855 |
| 6 | 106508800 | 106509800 | + | Cntn4 | 1856 |
| 6 | 107101200 | 107102800 | + | int | 1857 |
| 6 | 107953400 | 107954400 | + | int | 1858 |
| 6 | 109509800 | 109510800 | + | int | 1859 |
| 6 | 109863400 | 109864400 | + | int | 1860 |
| 6 | 111174600 | 111175600 | + | Grm7 | 1861 |
| 6 | 111705800 | 111706800 | + | int | 1862 |
| 6 | 112074800 | 112075800 | + | int | 1863 |
| 6 | 112327800 | 112329200 | − | D630042P16Rik | 1864 |
| 6 | 112382600 | 112383600 | + | int | 1865 |
| 6 | 113859600 | 113860600 | − | Atp2b2 | 1866 |
| 6 | 113935200 | 113937000 | − | Atp2b2 | 1867 |
| 6 | 114081000 | 114082000 | + | Slc6a11 | 1868 |
| 6 | 116478200 | 116479200 | + | int | 1869 |
| 6 | 116576200 | 116577400 | − | Zfp422 | 1870 |
| 6 | 117290200 | 117291400 | + | int | 1871 |
| 6 | 118233000 | 118234200 | + | int | 1872 |
| 6 | 118965200 | 118966200 | − | Cacna1c | 1873 |
| 6 | 118965200 | 118966200 | − | Cacna1c | 1874 |
| 6 | 119295000 | 119296000 | + | Cacna2d4 | 1875 |
| 6 | 119301800 | 119303000 | + | Cacna2d4 | 1876 |
| 6 | 119646600 | 119647600 | − | Erc1 | 1877 |
| 6 | 120439000 | 120440000 | − | Cecr6 | 1878 |
| 6 | 121246800 | 121247800 | + | Slc6a13 | 1879 |
| 6 | 122353600 | 122354800 | + | int | 1880 |
| 6 | 122405600 | 122406800 | − | Rimklb | 1881 |
| 6 | 123243000 | 123244000 | + | int | 1882 |
| 6 | 123425200 | 123426200 | + | int | 1883 |
| 6 | 123445600 | 123446800 | − | Vmn2r21 | 1884 |
| 6 | 123456600 | 123457800 | − | Vmn2r21 | 1885 |
| 6 | 123540600 | 123541600 | + | int | 1886 |
| 6 | 123562800 | 123564200 | − | Vmn2r22 | 1887 |
| 6 | 123573800 | 123575000 | − | Vmn2r22 | 1888 |
| 6 | 123646600 | 123647600 | + | int | 1889 |
| 6 | 124247200 | 124248400 | + | int | 1890 |
| 6 | 126200800 | 126202200 | + | int | 1891 |
| 6 | 127044000 | 127045000 | − | 9630033F20Rik | 1892 |
| 6 | 127963200 | 127964400 | − | Tspan9 | 1893 |
| 6 | 128595800 | 128597200 | + | int | 1894 |
| 6 | 128651600 | 128653200 | + | int | 1895 |
| 6 | 129199600 | 129201000 | + | int | 1896 |
| 6 | 129695400 | 129696400 | + | int | 1897 |
| 6 | 129879200 | 129880600 | + | int | 1898 |
| 6 | 130631800 | 130632800 | + | int | 1899 |
| 6 | 130818200 | 130819600 | + | int | 1900 |
| 6 | 131554800 | 131555800 | + | int | 1901 |
| 6 | 131965800 | 131966800 | + | int | 1902 |
| 6 | 132268200 | 132269200 | − | Gm4736 | 1903 |
| 6 | 132545600 | 132546600 | + | Prp2 | 1904 |
| 6 | 133348200 | 133349600 | + | int | 1905 |
| 6 | 133592000 | 133593400 | + | int | 1906 |
| 6 | 133594800 | 133595800 | + | int | 1907 |
| 6 | 133725000 | 133726000 | + | int | 1908 |
| 6 | 134139600 | 134140600 | + | Etv6 | 1909 |
| 6 | 135259800 | 135260800 | − | Pbp2 | 1910 |
| 6 | 136272400 | 136273800 | + | int | 1911 |
| 6 | 136674200 | 136675200 | − | Gucy2c | 1912 |
| 6 | 137077800 | 137079200 | − | Rerg | 1913 |
| 6 | 137077800 | 137079200 | − | Rerg | 1914 |
| 6 | 137440000 | 137441800 | − | Eps8 | 1915 |
| 6 | 137500400 | 137501800 | − | Eps8 | 1916 |
| 6 | 137780800 | 137782000 | + | Dera | 1917 |
| 6 | 138518200 | 138519600 | − | Lmo3 | 1918 |
| 6 | 138953800 | 138955200 | + | int | 1919 |
| 6 | 139239000 | 139240000 | + | int | 1920 |
| 6 | 139342600 | 139343800 | + | int | 1921 |
| 6 | 141023400 | 141024400 | + | int | 1922 |
| 6 | 141241200 | 141242200 | + | Pde3a | 1923 |
| 6 | 141474200 | 141475200 | + | Slco1c1 | 1924 |
| 6 | 142173000 | 142174000 | + | int | 1925 |
| 6 | 145046400 | 145047400 | + | int | 1926 |
| 6 | 145415600 | 145416600 | + | int | 1927 |
| 6 | 145605400 | 145607000 | + | int | 1928 |
| 6 | 145786400 | 145787800 | + | int | 1929 |
| 6 | 146469800 | 146470800 | + | int | 1930 |
| 6 | 147252000 | 147253400 | + | int | 1931 |
| 6 | 148303200 | 148304200 | + | Rps4y2 | 1932 |
| 6 | 148303200 | 148304200 | − | Tmtc1 | 1933 |
| 7 | 3089000 | 3090400 | + | int | 1934 |
| 7 | 3110600 | 3112000 | + | int | 1935 |
| 7 | 7230200 | 7231400 | − | Vmn2r29 | 1936 |
| 7 | 7251600 | 7253200 | − | Clcn4-2 | 1937 |
| 7 | 7326600 | 7327600 | + | int | 1938 |
| 7 | 7493400 | 7494800 | + | int | 1939 |
| 7 | 9112200 | 9113200 | + | int | 1940 |
| 7 | 10685200 | 10686400 | − | Vmn2r51 | 1941 |
| 7 | 11201000 | 11202200 | + | int | 1942 |
| 7 | 11580400 | 11581400 | + | int | 1943 |
| 7 | 12081200 | 12082400 | + | int | 1944 |
| 7 | 13751600 | 13753200 | + | int | 1945 |
| 7 | 14150000 | 14151200 | − | 9230107M04Rik | 1946 |
| 7 | 14620400 | 14621400 | + | int | 1947 |
| 7 | 14962400 | 14963400 | + | int | 1948 |
| 7 | 15909000 | 15910400 | + | int | 1949 |
| 7 | 15983800 | 15985600 | + | Obox2 | 1950 |
| 7 | 16052600 | 16053600 | + | int | 1951 |
| 7 | 16139400 | 16140400 | + | Obox1 | 1952 |
| 7 | 18413400 | 18414800 | + | int | 1953 |
| 7 | 18701800 | 18702800 | + | int | 1954 |
| 7 | 19820000 | 19821000 | + | Opa3 | 1955 |
| 7 | 20025200 | 20026400 | − | Mark4 | 1956 |
| 7 | 24135600 | 24137800 | + | Nlrp4e | 1957 |
| 7 | 24154600 | 24155800 | + | int | 1958 |
| 7 | 25281000 | 25282000 | + | Cadm4 | 1959 |
| 7 | 26855200 | 26856400 | + | Cyp2b13 | 1960 |
| 7 | 27281200 | 27282400 | + | int | 1961 |
| 7 | 28703800 | 28704800 | − | 1700049G17Rik | 1962 |
| 7 | 28717400 | 28718400 | − | 1700049G17Rik | 1963 |
| 7 | 28905000 | 28906000 | + | Fcgbp | 1964 |
| 7 | 29983000 | 29984000 | − | Catsperg1 | 1965 |
| 7 | 30077800 | 30078800 | + | Ppp1r14a | 1966 |
| 7 | 30184600 | 30185600 | − | Sipa1l3 | 1967 |
| 7 | 31256600 | 31257600 | + | Nphs1 | 1968 |
| 7 | 31496600 | 31498000 | + | Atp4a | 1969 |
| 7 | 32139800 | 32141000 | + | int | 1970 |
| 7 | 33253600 | 33255000 | + | int | 1971 |
| 7 | 33262400 | 33263600 | + | int | 1972 |
| 7 | 34085000 | 34086000 | + | int | 1973 |
| 7 | 34338600 | 34339600 | + | int | 1974 |
| 7 | 36382800 | 36383800 | + | Ankrd27 | 1975 |
| 7 | 36382800 | 36383800 | + | Ankrd27 | 1976 |
| 7 | 36558800 | 36560200 | − | Zfp507 | 1977 |
| 7 | 37977800 | 37979000 | + | int | 1978 |
| 7 | 38467400 | 38468400 | − | Zfp536 | 1979 |
| 7 | 38581000 | 38582200 | + | int | 1980 |
| 7 | 38852600 | 38853600 | + | int | 1981 |
| 7 | 39348200 | 39349200 | + | int | 1982 |
| 7 | 47855200 | 47856800 | + | int | 1983 |
| 7 | 48169800 | 48171000 | + | Vstm2b | 1984 |
| 7 | 48348400 | 48349600 | + | int | 1985 |
| 7 | 48542800 | 48543800 | + | Gm5592 | 1986 |
| 7 | 49447000 | 49448000 | + | Vmn2r60 | 1987 |
| 7 | 50134400 | 50135400 | + | int | 1988 |
| 7 | 50622400 | 50623800 | + | int | 1989 |
| 7 | 53357200 | 53358400 | − | Kcnj11 | 1990 |
| 7 | 53719600 | 53720800 | − | Sergef | 1991 |
| 7 | 54757000 | 54758800 | + | int | 1992 |
| 7 | 55026000 | 55027000 | + | int | 1993 |
| 7 | 55466800 | 55467800 | + | int | 1994 |
| 7 | 57611000 | 57612000 | + | Nell1 | 1995 |
| 7 | 57795600 | 57796800 | + | Nell1 | 1996 |
| 7 | 58108400 | 58109600 | + | Nell1 | 1997 |
| 7 | 58304200 | 58305400 | + | int | 1998 |
| 7 | 59401600 | 59402800 | + | int | 1999 |
| 7 | 59817000 | 59818000 | + | int | 2000 |
| 7 | 59861000 | 59862000 | + | int | 2001 |
| 7 | 60245800 | 60247000 | + | int | 2002 |
| 7 | 62011000 | 62012000 | + | int | 2003 |
| 7 | 62567000 | 62568000 | + | int | 2004 |
| 7 | 62729000 | 62730400 | + | int | 2005 |
| 7 | 63120800 | 63121800 | + | Cyfip1 | 2006 |
| 7 | 63865400 | 63866400 | + | int | 2007 |
| 7 | 64199200 | 64200400 | − | Gabrg3 | 2008 |
| 7 | 65244000 | 65245400 | + | int | 2009 |
| 7 | 65432800 | 65434600 | + | int | 2010 |
| 7 | 65646800 | 65648200 | + | int | 2011 |
| 7 | 65654200 | 65655400 | + | int | 2012 |
| 7 | 66346200 | 66347200 | + | int | 2013 |
| 7 | 67195000 | 67196000 | − | Snrpn | 2014 |
| 7 | 67195000 | 67196000 | − | Snrpn | 2015 |
| 7 | 67280800 | 67281800 | − | Snrpn | 2016 |
| 7 | 67292800 | 67293800 | + | int | 2017 |
| 7 | 67368600 | 67369600 | + | int | 2018 |
| 7 | 67626000 | 67627000 | + | int | 2019 |
| 7 | 67883400 | 67884400 | + | int | 2020 |
| 7 | 68087600 | 68089200 | + | int | 2021 |
| 7 | 68164400 | 68165400 | + | int | 2022 |
| 7 | 68480400 | 68482000 | + | int | 2023 |
| 7 | 69186200 | 69187200 | + | int | 2024 |
| 7 | 69480600 | 69481600 | + | int | 2025 |
| 7 | 69593200 | 69594200 | + | int | 2026 |
| 7 | 69631400 | 69632600 | + | int | 2027 |
| 7 | 70768200 | 70769200 | + | Otud7a | 2028 |
| 7 | 71650200 | 71651200 | + | Apba2 | 2029 |
| 7 | 73351200 | 73352400 | + | int | 2030 |
| 7 | 74458000 | 74459400 | − | Mef2a | 2031 |
| 7 | 75570600 | 75571600 | + | int | 2032 |
| 7 | 76015800 | 76016800 | + | int | 2033 |
| 7 | 76319000 | 76320000 | + | int | 2034 |
| 7 | 76595400 | 76596400 | + | int | 2035 |
| 7 | 78979000 | 78980000 | + | int | 2036 |
| 7 | 79987600 | 79988600 | + | int | 2037 |
| 7 | 80985200 | 80986200 | + | int | 2038 |
| 7 | 82743200 | 82744400 | + | Akap13 | 2039 |
| 7 | 84006800 | 84008400 | + | int | 2040 |
| 7 | 86027400 | 86028400 | + | int | 2041 |
| 7 | 88780600 | 88782200 | − | Homer2 | 2042 |
| 7 | 88780600 | 88782200 | − | Homer2 | 2043 |
| 7 | 89896600 | 89897600 | + | Eftud1 | 2044 |
| 7 | 92543800 | 92544800 | + | int | 2045 |
| 7 | 92722600 | 92724000 | + | int | 2046 |
| 7 | 93340600 | 93341600 | + | int | 2047 |
| 7 | 93385000 | 93386800 | − | Vmn2r76 | 2048 |
| 7 | 93464000 | 93465200 | + | int | 2049 |
| 7 | 93517400 | 93519000 | + | int | 2050 |
| 7 | 93752000 | 93753000 | + | int | 2051 |
| 7 | 94280800 | 94282000 | + | int | 2052 |
| 7 | 94814000 | 94815000 | + | Grm5 | 2053 |
| 7 | 94882600 | 94884000 | + | Grm5 | 2054 |
| 7 | 95230600 | 95231600 | + | Grm5 | 2055 |
| 7 | 95775200 | 95776200 | + | int | 2056 |
| 7 | 101332600 | 101333600 | + | int | 2057 |
| 7 | 102610200 | 102612000 | + | int | 2058 |
| 7 | 105289600 | 105291000 | − | Capn5 | 2059 |
| 7 | 106302000 | 106303400 | − | Dgat2 | 2060 |
| 7 | 106380600 | 106381600 | − | Mogat2 | 2061 |
| 7 | 106611000 | 106612800 | + | Klhl35 | 2062 |
| 7 | 107168600 | 107169800 | + | Chrdl2 | 2063 |
| 7 | 108711800 | 108713000 | − | Art2a-ps | 2064 |
| 7 | 109861600 | 109863200 | − | Olfr33 | 2065 |
| 7 | 109872000 | 109873200 | − | Olfr559 | 2066 |
| 7 | 110035400 | 110036600 | − | Olfr569 | 2067 |
| 7 | 110189800 | 110191000 | + | Olfr582 | 2068 |
| 7 | 110818600 | 110819800 | − | Olfr624 | 2069 |
| 7 | 110929400 | 110930800 | − | Olfr68 | 2070 |
| 7 | 111029800 | 111030800 | − | Olfr66 | 2071 |
| 7 | 111127600 | 111128800 | + | Olfr635 | 2072 |
| 7 | 112291800 | 112292800 | − | Olfr683 | 2073 |
| 7 | 112347600 | 112349000 | + | int | 2074 |
| 7 | 112715400 | 112716600 | − | Apbb1 | 2075 |
| 7 | 113539400 | 113540600 | + | int | 2076 |
| 7 | 113989800 | 113990800 | + | int | 2077 |
| 7 | 114142200 | 114145600 | − | Olfr2 | 2078 |
| 7 | 114229000 | 114230000 | + | int | 2079 |
| 7 | 114345200 | 114346200 | + | int | 2080 |
| 7 | 115094800 | 115096000 | + | Olfr474 | 2081 |
| 7 | 115466400 | 115467400 | − | Olfr492 | 2082 |
| 7 | 115826200 | 115827200 | + | int | 2083 |
| 7 | 115898000 | 115899400 | + | Olfr513 | 2084 |
| 7 | 116267400 | 116268800 | + | int | 2085 |
| 7 | 116271000 | 116272800 | + | int | 2086 |
| 7 | 116741600 | 116742600 | − | St5 | 2087 |
| 7 | 117635800 | 117637000 | − | Sbf2 | 2088 |
| 7 | 118129000 | 118130000 | + | int | 2089 |
| 7 | 120621200 | 120622600 | + | int | 2090 |
| 7 | 121554200 | 121555400 | − | 4933406I18Rik | 2091 |
| 7 | 121554200 | 121555400 | − | 4933406I18Rik | 2092 |
| 7 | 122072400 | 122073400 | + | int | 2093 |
| 7 | 123447800 | 123449000 | + | int | 2094 |
| 7 | 126896000 | 126897000 | + | int | 2095 |
| 7 | 127424200 | 127425600 | + | Abca14 | 2096 |
| 7 | 128303200 | 128304400 | + | Otoa | 2097 |
| 7 | 129446800 | 129448000 | + | Prkcb | 2098 |
| 7 | 130410600 | 130411600 | + | Slc5a11 | 2099 |
| 7 | 131239800 | 131241000 | + | int | 2100 |
| 7 | 137902400 | 137903600 | + | Tacc2 | 2101 |
| 7 | 137902400 | 137903600 | + | Tacc2 | 2102 |
| 7 | 137902400 | 137903600 | + | Tacc2 | 2103 |
| 7 | 137977200 | 137979000 | + | int | 2104 |
| 7 | 138533200 | 138534200 | − | Ikzf5 | 2105 |
| 7 | 138899800 | 138901000 | + | int | 2106 |
| 7 | 139354400 | 139355600 | + | int | 2107 |
| 7 | 140328600 | 140329800 | + | int | 2108 |
| 7 | 143849000 | 143850000 | + | int | 2109 |
| 7 | 144674800 | 144675800 | + | int | 2110 |
| 7 | 145191600 | 145192600 | + | int | 2111 |
| 7 | 146385400 | 146386400 | − | Stk32c | 2112 |
| 7 | 146920000 | 146921000 | + | int | 2113 |
| 7 | 148529200 | 148530200 | + | Eps8l2 | 2114 |
| 7 | 148824200 | 148825600 | − | Muc6 | 2115 |
| 7 | 148998200 | 148999400 | + | Muc5ac | 2116 |
| 7 | 149186400 | 149187400 | + | Brsk2 | 2117 |
| 7 | 149186400 | 149187400 | + | Brsk2 | 2118 |
| 7 | 149511800 | 149512800 | − | 6330512M04Rik | 2119 |
| 7 | 150018200 | 150019600 | + | int | 2120 |
| 7 | 150888600 | 150889800 | − | Osbpl5 | 2121 |
| 7 | 151497000 | 151498000 | + | Shank2 | 2122 |
| 7 | 151497000 | 151498000 | + | Shank2 | 2123 |
| 8 | 3161200 | 3162200 | − | Insr | 2124 |
| 8 | 3445400 | 3446400 | + | Arhgef18 | 2125 |
| 8 | 3998200 | 3999200 | + | int | 2126 |
| 8 | 4987200 | 4988200 | + | int | 2127 |
| 8 | 5568000 | 5569800 | + | int | 2128 |
| 8 | 5922400 | 5923400 | + | int | 2129 |
| 8 | 6061800 | 6063200 | + | int | 2130 |
| 8 | 6336200 | 6337200 | + | int | 2131 |
| 8 | 6343000 | 6344000 | + | int | 2132 |
| 8 | 6436400 | 6437400 | + | int | 2133 |
| 8 | 6875800 | 6877000 | + | int | 2134 |
| 8 | 6977000 | 6978000 | + | int | 2135 |
| 8 | 7452800 | 7453800 | + | int | 2136 |
| 8 | 7612800 | 7614400 | + | int | 2137 |
| 8 | 9668600 | 9669600 | − | Fam155a | 2138 |
| 8 | 11530000 | 11531000 | − | Cars2 | 2139 |
| 8 | 11972800 | 11973800 | + | int | 2140 |
| 8 | 12287600 | 12288600 | + | int | 2141 |
| 8 | 13508600 | 13509800 | + | int | 2142 |
| 8 | 13859600 | 13860800 | + | int | 2143 |
| 8 | 14194800 | 14195800 | + | Dlgap2 | 2144 |
| 8 | 14361200 | 14362600 | + | Dlgap2 | 2145 |
| 8 | 14906200 | 14907200 | + | int | 2146 |
| 8 | 15065400 | 15066400 | + | Myom2 | 2147 |
| 8 | 15386600 | 15387600 | + | int | 2148 |
| 8 | 15506200 | 15507200 | + | int | 2149 |
| 8 | 16230800 | 16231800 | − | Csmd1 | 2150 |
| 8 | 16697200 | 16698200 | − | Csmd1 | 2151 |
| 8 | 17874600 | 17875600 | + | int | 2152 |
| 8 | 17985600 | 17987200 | + | int | 2153 |
| 8 | 18439200 | 18440200 | + | int | 2154 |
| 8 | 19203600 | 19204600 | + | int | 2155 |
| 8 | 19679800 | 19680800 | + | int | 2156 |
| 8 | 19697400 | 19698600 | + | int | 2157 |
| 8 | 19702800 | 19703800 | + | int | 2158 |
| 8 | 19724600 | 19725600 | + | int | 2159 |
| 8 | 19756200 | 19757200 | + | int | 2160 |
| 8 | 19779000 | 19780000 | + | int | 2161 |
| 8 | 19857200 | 19858200 | + | int | 2162 |
| 8 | 19862800 | 19864000 | − | 6820431F20Rik | 2163 |
| 8 | 19878400 | 19879600 | − | 6820431F20Rik | 2164 |
| 8 | 19931600 | 19932600 | + | int | 2165 |
| 8 | 19935200 | 19936600 | − | Gm15319 | 2166 |
| 8 | 19940000 | 19941400 | − | Gm15319 | 2167 |
| 8 | 19962800 | 19963800 | + | int | 2168 |
| 8 | 19990000 | 19991400 | − | 2610005L07Rik | 2169 |
| 8 | 19990000 | 19991400 | − | 6820431F20Rik | 2170 |
| 8 | 20005600 | 20007000 | − | 2610005L07Rik | 2171 |
| 8 | 20005600 | 20007000 | − | 6820431F20Rik | 2172 |
| 8 | 22133400 | 22134800 | + | int | 2173 |
| 8 | 22149600 | 22151000 | + | int | 2174 |
| 8 | 22392800 | 22393800 | + | int | 2175 |
| 8 | 24131200 | 24132200 | + | Ank1 | 2176 |
| 8 | 25985000 | 25986200 | − | Adam32 | 2177 |
| 8 | 26000600 | 26001600 | − | Adam32 | 2178 |
| 8 | 30506000 | 30507000 | + | int | 2179 |
| 8 | 31219600 | 31221000 | + | int | 2180 |
| 8 | 31301000 | 31302000 | + | int | 2181 |
| 8 | 31487400 | 31489200 | + | int | 2182 |
| 8 | 32338400 | 32339600 | + | Fut10 | 2183 |
| 8 | 32338400 | 32339600 | + | Fut10 | 2184 |
| 8 | 34035200 | 34036200 | − | Gm3985 | 2185 |
| 8 | 35580400 | 35581800 | + | int | 2186 |
| 8 | 36659600 | 36660600 | + | Mfhas1 | 2187 |
| 8 | 39001800 | 39002800 | − | Sgcz | 2188 |
| 8 | 39570400 | 39572000 | − | Sgcz | 2189 |
| 8 | 40023600 | 40024600 | + | int | 2190 |
| 8 | 41357600 | 41358600 | + | int | 2191 |
| 8 | 41792800 | 41794200 | + | int | 2192 |
| 8 | 42859400 | 42860400 | + | int | 2193 |
| 8 | 42872400 | 42873600 | + | int | 2194 |
| 8 | 43332000 | 43333400 | + | int | 2195 |
| 8 | 43476000 | 43477200 | + | int | 2196 |
| 8 | 43645600 | 43646600 | + | int | 2197 |
| 8 | 43730800 | 43731800 | + | int | 2198 |
| 8 | 43800000 | 43801000 | + | int | 2199 |
| 8 | 43881200 | 43882200 | + | int | 2200 |
| 8 | 45031400 | 45032600 | + | int | 2201 |
| 8 | 45384400 | 45385600 | + | int | 2202 |
| 8 | 47046400 | 47048200 | − | 1700029J07Rik | 2203 |
| 8 | 48796400 | 48797600 | − | Cdkn2aip | 2204 |
| 8 | 50597600 | 50598800 | + | int | 2205 |
| 8 | 50938800 | 50939800 | + | int | 2206 |
| 8 | 51013800 | 51015000 | + | int | 2207 |
| 8 | 51316800 | 51318200 | + | int | 2208 |
| 8 | 51327800 | 51328800 | + | int | 2209 |
| 8 | 51585400 | 51588400 | + | int | 2210 |
| 8 | 51828000 | 51829000 | + | int | 2211 |
| 8 | 52309200 | 52310600 | + | int | 2212 |
| 8 | 52363200 | 52364400 | + | int | 2213 |
| 8 | 52749400 | 52750400 | + | int | 2214 |
| 8 | 53143400 | 53144800 | + | int | 2215 |
| 8 | 53208000 | 53209000 | + | int | 2216 |
| 8 | 53216600 | 53217600 | + | int | 2217 |
| 8 | 53356000 | 53357000 | + | int | 2218 |
| 8 | 53489600 | 53491000 | + | int | 2219 |
| 8 | 53690800 | 53692200 | + | int | 2220 |
| 8 | 53978800 | 53980200 | + | int | 2221 |
| 8 | 54082400 | 54083400 | + | int | 2222 |
| 8 | 54409600 | 54411000 | + | int | 2223 |
| 8 | 54904800 | 54905800 | + | int | 2224 |
| 8 | 55982400 | 55983600 | + | int | 2225 |
| 8 | 56199400 | 56201000 | + | int | 2226 |
| 8 | 58030800 | 58032400 | + | int | 2227 |
| 8 | 58683400 | 58684400 | + | int | 2228 |
| 8 | 58750400 | 58751400 | + | int | 2229 |
| 8 | 59091000 | 59092000 | + | int | 2230 |
| 8 | 59610600 | 59611800 | + | int | 2231 |
| 8 | 60555600 | 60556600 | − | Galntl6 | 2232 |
| 8 | 60704600 | 60706000 | − | Galntl6 | 2233 |
| 8 | 61308400 | 61309800 | − | Galntl6 | 2234 |
| 8 | 61349600 | 61350600 | − | Galntl6 | 2235 |
| 8 | 62073600 | 62074600 | + | int | 2236 |
| 8 | 62194000 | 62195200 | + | int | 2237 |
| 8 | 62324800 | 62325800 | + | int | 2238 |
| 8 | 62358800 | 62360400 | + | int | 2239 |
| 8 | 62677200 | 62678400 | + | int | 2240 |
| 8 | 64805600 | 64806600 | + | int | 2241 |
| 8 | 65681400 | 65682400 | + | Spock3 | 2242 |
| 8 | 65698800 | 65700400 | + | Spock3 | 2243 |
| 8 | 65751400 | 65752400 | + | Spock3 | 2244 |
| 8 | 66290000 | 66291200 | + | int | 2245 |
| 8 | 67053200 | 67054200 | + | int | 2246 |
| 8 | 67829400 | 67830600 | + | int | 2247 |
| 8 | 68609200 | 68610200 | + | 1-Mar | 2248 |
| 8 | 68609200 | 68610200 | + | 1-Mar | 2249 |
| 8 | 68768200 | 68769200 | + | 1-Mar | 2250 |
| 8 | 68768200 | 68769200 | + | 1-Mar | 2251 |
| 8 | 68876400 | 68877600 | + | 1-Mar | 2252 |
| 8 | 68876400 | 68877600 | + | 1-Mar | 2253 |
| 8 | 68951800 | 68952800 | + | 1-Mar | 2254 |
| 8 | 68951800 | 68952800 | + | 1-Mar | 2255 |
| 8 | 68951800 | 68952800 | + | 1-Mar | 2256 |
| 8 | 69814600 | 69815600 | + | int | 2257 |
| 8 | 69899400 | 69900400 | + | int | 2258 |
| 8 | 72718400 | 72719600 | − | Slc25a42 | 2259 |
| 8 | 73434800 | 73436000 | + | Mtap1s | 2260 |
| 8 | 74601200 | 74602600 | + | int | 2261 |
| 8 | 74647200 | 74648600 | + | int | 2262 |
| 8 | 76084000 | 76085200 | + | int | 2263 |
| 8 | 77770600 | 77771800 | + | int | 2264 |
| 8 | 78455400 | 78456600 | + | 1700007B14Rik | 2265 |
| 8 | 78462600 | 78463800 | + | 1700007B14Rik | 2266 |
| 8 | 78818000 | 78819000 | + | int | 2267 |
| 8 | 79194600 | 79195800 | + | int | 2268 |
| 8 | 79337800 | 79338800 | − | Gm10649 | 2269 |
| 8 | 82496000 | 82497000 | − | Hhip | 2270 |
| 8 | 82868600 | 82869600 | + | int | 2271 |
| 8 | 83168000 | 83169400 | + | Frem3 | 2272 |
| 8 | 83776400 | 83777400 | + | int | 2273 |
| 8 | 84980400 | 84981600 | + | int | 2274 |
| 8 | 85108200 | 85109200 | + | int | 2275 |
| 8 | 85147800 | 85149000 | + | int | 2276 |
| 8 | 85543000 | 85544200 | + | Rnf150 | 2277 |
| 8 | 85801800 | 85802800 | + | int | 2278 |
| 8 | 86406000 | 86407000 | + | int | 2279 |
| 8 | 86500400 | 86501400 | + | Prkaca | 2280 |
| 8 | 87117800 | 87118800 | + | Cacna1a | 2281 |
| 8 | 87716000 | 87717000 | + | int | 2282 |
| 8 | 88638000 | 88639000 | + | int | 2283 |
| 8 | 88665400 | 88666400 | + | int | 2284 |
| 8 | 89850400 | 89851800 | + | int | 2285 |
| 8 | 90572200 | 90573400 | + | int | 2286 |
| 8 | 90897200 | 90898200 | + | int | 2287 |
| 8 | 91329000 | 91330400 | + | int | 2288 |
| 8 | 93368200 | 93369200 | + | Chd9 | 2289 |
| 8 | 93575000 | 93576000 | + | Chd9 | 2290 |
| 8 | 95250800 | 95252000 | + | int | 2291 |
| 8 | 95969800 | 95970800 | + | int | 2292 |
| 8 | 97478200 | 97479200 | + | int | 2293 |
| 8 | 99298000 | 99299000 | + | int | 2294 |
| 8 | 99697200 | 99698600 | + | int | 2295 |
| 8 | 100440400 | 100441400 | + | int | 2296 |
| 8 | 100790200 | 100791200 | + | int | 2297 |
| 8 | 100887000 | 100888000 | + | int | 2298 |
| 8 | 101223000 | 101224600 | + | int | 2299 |
| 8 | 101521600 | 101522800 | + | int | 2300 |
| 8 | 101642000 | 101643000 | − | Cdh8 | 2301 |
| 8 | 101642000 | 101643000 | − | Cdh8 | 2302 |
| 8 | 102228400 | 102229400 | + | int | 2303 |
| 8 | 102506800 | 102508600 | + | int | 2304 |
| 8 | 102725600 | 102726600 | + | int | 2305 |
| 8 | 103025800 | 103026800 | + | int | 2306 |
| 8 | 103113400 | 103114800 | + | int | 2307 |
| 8 | 103228400 | 103229400 | + | int | 2308 |
| 8 | 103532800 | 103534200 | + | int | 2309 |
| 8 | 103567200 | 103568400 | + | int | 2310 |
| 8 | 104096200 | 104098200 | + | int | 2311 |
| 8 | 104192200 | 104193400 | + | int | 2312 |
| 8 | 104502200 | 104503200 | + | int | 2313 |
| 8 | 105158200 | 105159200 | − | Cdh11 | 2314 |
| 8 | 107237800 | 107238800 | + | int | 2315 |
| 8 | 108631800 | 108633200 | + | Nfatc3 | 2316 |
| 8 | 110922200 | 110923400 | + | int | 2317 |
| 8 | 111060200 | 111061200 | + | int | 2318 |
| 8 | 111693000 | 111694000 | + | int | 2319 |
| 8 | 115377600 | 115378800 | + | Cntnap4 | 2320 |
| 8 | 115717800 | 115718800 | + | int | 2321 |
| 8 | 123527000 | 123528000 | + | int | 2322 |
| 8 | 126030600 | 126032000 | − | Dbndd1 | 2323 |
| 8 | 126030600 | 126032000 | − | Dbndd1 | 2324 |
| 8 | 127108600 | 127110000 | + | Capn9 | 2325 |
| 8 | 128152200 | 128153200 | + | int | 2326 |
| 8 | 128305600 | 128306800 | − | Pcnxl2 | 2327 |
| 8 | 129038200 | 129039400 | + | int | 2328 |
| 8 | 131364600 | 131365600 | + | int | 2329 |
| 8 | 131387400 | 131388400 | + | int | 2330 |
| 8 | 131525000 | 131526000 | − | Ccdc7 | 2331 |
| 8 | 131689400 | 131690400 | + | 1700008F21Rik | 2332 |
| 9 | 3006200 | 3007600 | + | int | 2333 |
| 9 | 3012400 | 3013400 | + | int | 2334 |
| 9 | 3015400 | 3016400 | + | int | 2335 |
| 9 | 3031800 | 3032800 | + | int | 2336 |
| 9 | 3447400 | 3448400 | + | Cwf19l2 | 2337 |
| 9 | 3537800 | 3539600 | + | Gucy1a2 | 2338 |
| 9 | 3763400 | 3764600 | + | Gucy1a2 | 2339 |
| 9 | 5124400 | 5125400 | + | int | 2340 |
| 9 | 5146400 | 5147600 | + | int | 2341 |
| 9 | 5174600 | 5176000 | + | int | 2342 |
| 9 | 5421200 | 5422200 | + | int | 2343 |
| 9 | 5482000 | 5483200 | + | int | 2344 |
| 9 | 5779000 | 5780000 | + | int | 2345 |
| 9 | 5798000 | 5799000 | + | int | 2346 |
| 9 | 5808400 | 5809400 | + | int | 2347 |
| 9 | 5834800 | 5835800 | + | int | 2348 |
| 9 | 5861000 | 5862000 | + | int | 2349 |
| 9 | 5958200 | 5959200 | + | int | 2350 |
| 9 | 6307800 | 6308800 | + | Pdgfd | 2351 |
| 9 | 8291800 | 8293400 | + | int | 2352 |
| 9 | 9640400 | 9641600 | + | int | 2353 |
| 9 | 9752600 | 9753800 | − | Cntn5 | 2354 |
| 9 | 9752600 | 9753800 | − | Cntn5 | 2355 |
| 9 | 10497600 | 10498600 | − | Cntn5 | 2356 |
| 9 | 10497600 | 10498600 | − | Cntn5 | 2357 |
| 9 | 10569200 | 10570200 | − | Cntn5 | 2358 |
| 9 | 10569200 | 10570200 | − | Cntn5 | 2359 |
| 9 | 10668600 | 10669600 | − | Cntn5 | 2360 |
| 9 | 10668600 | 10669600 | − | Cntn5 | 2361 |
| 9 | 10831400 | 10832400 | − | Cntn5 | 2362 |
| 9 | 10831400 | 10832400 | − | Cntn5 | 2363 |
| 9 | 12233600 | 12234600 | + | int | 2364 |
| 9 | 12287200 | 12288400 | + | int | 2365 |
| 9 | 12366000 | 12367600 | + | int | 2366 |
| 9 | 12732600 | 12733600 | + | int | 2367 |
| 9 | 12764000 | 12765000 | + | int | 2368 |
| 9 | 14718800 | 14719800 | + | int | 2369 |
| 9 | 16726400 | 16728000 | + | int | 2370 |
| 9 | 17167800 | 17169000 | + | int | 2371 |
| 9 | 17201600 | 17202600 | + | int | 2372 |
| 9 | 17525200 | 17526800 | + | int | 2373 |
| 9 | 18035400 | 18036600 | + | int | 2374 |
| 9 | 18649200 | 18650600 | + | int | 2375 |
| 9 | 19043800 | 19045400 | + | int | 2376 |
| 9 | 19200600 | 19201600 | + | int | 2377 |
| 9 | 19487600 | 19488600 | + | int | 2378 |
| 9 | 19512000 | 19513200 | + | int | 2379 |
| 9 | 19519400 | 19520800 | + | int | 2380 |
| 9 | 19536800 | 19538400 | + | int | 2381 |
| 9 | 19582800 | 19583800 | + | Olfr58 | 2382 |
| 9 | 19800800 | 19801800 | + | int | 2383 |
| 9 | 20165600 | 20166800 | − | Zfp560 | 2384 |
| 9 | 20643000 | 20644200 | + | int | 2385 |
| 9 | 21546200 | 21547400 | + | Ldlr | 2386 |
| 9 | 22407400 | 22408400 | + | Bbs9 | 2387 |
| 9 | 24345600 | 24347400 | + | int | 2388 |
| 9 | 24424400 | 24425400 | − | Dpy19l2 | 2389 |
| 9 | 24792000 | 24793000 | + | int | 2390 |
| 9 | 27193400 | 27194800 | + | int | 2391 |
| 9 | 27534000 | 27535200 | + | int | 2392 |
| 9 | 27737400 | 27738600 | + | Opcml | 2393 |
| 9 | 28490800 | 28492000 | + | Opcml | 2394 |
| 9 | 30360200 | 30361600 | + | int | 2395 |
| 9 | 31664200 | 31665200 | − | Barx2 | 2396 |
| 9 | 32352800 | 32353800 | + | int | 2397 |
| 9 | 33453000 | 33454200 | + | int | 2398 |
| 9 | 34636800 | 34637800 | + | Kirrel3 | 2399 |
| 9 | 34636800 | 34637800 | + | Kirrel3 | 2400 |
| 9 | 35112200 | 35113800 | + | int | 2401 |
| 9 | 36271200 | 36272200 | + | int | 2402 |
| 9 | 37507600 | 37508800 | + | int | 2403 |
| 9 | 38014200 | 38015400 | + | Olfr893 | 2404 |
| 9 | 38163600 | 38165200 | + | int | 2405 |
| 9 | 38662400 | 38663800 | + | Olfr26 | 2406 |
| 9 | 38687800 | 38689400 | + | int | 2407 |
| 9 | 38783000 | 38784400 | + | Olfr933 | 2408 |
| 9 | 38949400 | 38950800 | + | Olfr242 | 2409 |
| 9 | 38949400 | 38950800 | + | Olfr27 | 2410 |
| 9 | 39189600 | 39190800 | + | int | 2411 |
| 9 | 39235800 | 39237200 | − | Olfr952 | 2412 |
| 9 | 39281200 | 39282800 | − | Olfr955 | 2413 |
| 9 | 39430600 | 39431600 | + | Olfr960 | 2414 |
| 9 | 39454200 | 39455200 | + | Olfr961 | 2415 |
| 9 | 39493600 | 39494600 | + | int | 2416 |
| 9 | 39646800 | 39648000 | + | Olfr971 | 2417 |
| 9 | 39801200 | 39802600 | + | Olfr978 | 2418 |
| 9 | 40350000 | 40351200 | + | int | 2419 |
| 9 | 41936000 | 41937000 | + | int | 2420 |
| 9 | 43370200 | 43371600 | + | int | 2421 |
| 9 | 44432400 | 44433400 | + | Ddx6 | 2422 |
| 9 | 44499400 | 44500600 | − | Phldb1 | 2423 |
| 9 | 47469000 | 47470000 | + | Cadm1 | 2424 |
| 9 | 47659200 | 47660200 | + | Cadm1 | 2425 |
| 9 | 47818600 | 47819600 | + | int | 2426 |
| 9 | 48849200 | 48850200 | + | Usp28 | 2427 |
| 9 | 51106000 | 51107200 | − | 1810046K07Rik | 2428 |
| 9 | 52207000 | 52208600 | + | int | 2429 |
| 9 | 53853000 | 53854000 | + | int | 2430 |
| 9 | 53886400 | 53888200 | − | Tnfaip8l3 | 2431 |
| 9 | 56070800 | 56072400 | − | C230081A13Rik | 2432 |
| 9 | 57731800 | 57732800 | + | int | 2433 |
| 9 | 58707600 | 58708800 | + | Hcn4 | 2434 |
| 9 | 61365600 | 61366600 | + | int | 2435 |
| 9 | 61807600 | 61808600 | − | Paqr5 | 2436 |
| 9 | 63462000 | 63463200 | + | Aagab | 2437 |
| 9 | 63938600 | 63939800 | + | int | 2438 |
| 9 | 66401600 | 66403200 | − | Usp3 | 2439 |
| 9 | 73142800 | 73143800 | + | int | 2440 |
| 9 | 75740000 | 75741400 | + | Bmp5 | 2441 |
| 9 | 76231000 | 76232000 | + | int | 2442 |
| 9 | 76342600 | 76343600 | − | Fam83b | 2443 |
| 9 | 76567800 | 76568800 | + | int | 2444 |
| 9 | 76935400 | 76936600 | + | int | 2445 |
| 9 | 77097000 | 77098000 | − | 2310046A06Rik | 2446 |
| 9 | 79331600 | 79332600 | + | int | 2447 |
| 9 | 79562200 | 79563200 | − | Col12a1 | 2448 |
| 9 | 80540400 | 80541600 | + | int | 2449 |
| 9 | 80950600 | 80951600 | + | int | 2450 |
| 9 | 81336800 | 81337800 | + | int | 2451 |
| 9 | 81403800 | 81404800 | + | int | 2452 |
| 9 | 84306200 | 84307200 | + | int | 2453 |
| 9 | 84429200 | 84430400 | + | int | 2454 |
| 9 | 84638800 | 84640200 | + | int | 2455 |
| 9 | 84703800 | 84704800 | + | int | 2456 |
| 9 | 86793200 | 86794200 | + | int | 2457 |
| 9 | 87023000 | 87024000 | + | int | 2458 |
| 9 | 88023000 | 88024200 | + | int | 2459 |
| 9 | 88181000 | 88182200 | + | int | 2460 |
| 9 | 88682600 | 88683800 | + | int | 2461 |
| 9 | 88723400 | 88724400 | + | int | 2462 |
| 9 | 88784400 | 88785600 | + | int | 2463 |
| 9 | 88794200 | 88795400 | + | int | 2464 |
| 9 | 89385800 | 89387200 | + | int | 2465 |
| 9 | 90254200 | 90255200 | + | int | 2466 |
| 9 | 90466400 | 90467400 | + | int | 2467 |
| 9 | 90723000 | 90724400 | + | int | 2468 |
| 9 | 90748200 | 90749400 | + | int | 2469 |
| 9 | 91067000 | 91068000 | + | int | 2470 |
| 9 | 91331000 | 91332000 | + | int | 2471 |
| 9 | 91376400 | 91378200 | + | int | 2472 |
| 9 | 91595600 | 91597000 | + | int | 2473 |
| 9 | 92200000 | 92201000 | + | int | 2474 |
| 9 | 93713600 | 93715000 | + | int | 2475 |
| 9 | 96719000 | 96720200 | + | int | 2476 |
| 9 | 99464000 | 99465200 | − | Armc8 | 2477 |
| 9 | 99464000 | 99465200 | − | Armc8 | 2478 |
| 9 | 99966400 | 99967800 | + | int | 2479 |
| 9 | 100325200 | 100326200 | + | int | 2480 |
| 9 | 102758600 | 102759600 | + | Ryk | 2481 |
| 9 | 105372200 | 105373200 | − | Atp2c1 | 2482 |
| 9 | 105720800 | 105722600 | − | Col6a6 | 2483 |
| 9 | 106285400 | 106287200 | + | int | 2484 |
| 9 | 109610200 | 109611600 | + | int | 2485 |
| 9 | 110537400 | 110538400 | − | Nbeal2 | 2486 |
| 9 | 111861000 | 111862000 | + | int | 2487 |
| 9 | 112067000 | 112068200 | − | Arpp21 | 2488 |
| 9 | 112067000 | 112068200 | − | Arpp21 | 2489 |
| 9 | 112067000 | 112068200 | − | Arpp21 | 2490 |
| 9 | 112067000 | 112068200 | − | Arpp21 | 2491 |
| 9 | 112067000 | 112068200 | − | Arpp21 | 2492 |
| 9 | 112067000 | 112068200 | − | Arpp21 | 2493 |
| 9 | 112857400 | 112858800 | + | int | 2494 |
| 9 | 113290800 | 113292000 | + | int | 2495 |
| 9 | 114980400 | 114981400 | + | Osbpl10 | 2496 |
| 9 | 115950400 | 115951400 | + | Gadl1 | 2497 |
| 9 | 119131600 | 119132600 | − | 9330176C04Rik | 2498 |
| 9 | 123370200 | 123372000 | + | Lars2 | 2499 |
| 10 | 4232800 | 4234000 | + | int | 2500 |
| 10 | 4883000 | 4884000 | + | Syne1 | 2501 |
| 10 | 5514800 | 5516000 | − | Esr1 | 2502 |
| 10 | 6234400 | 6235400 | − | Mthfd1l | 2503 |
| 10 | 6234400 | 6235400 | − | Mthfd1l | 2504 |
| 10 | 7872600 | 7873800 | + | int | 2505 |
| 10 | 8275600 | 8277200 | + | int | 2506 |
| 10 | 9978400 | 9979800 | + | int | 2507 |
| 10 | 11250400 | 11251600 | + | int | 2508 |
| 10 | 11495600 | 11497000 | + | int | 2509 |
| 10 | 11881400 | 11882800 | + | int | 2510 |
| 10 | 14497800 | 14498800 | + | int | 2511 |
| 10 | 14842000 | 14843000 | + | int | 2512 |
| 10 | 15156000 | 15157400 | + | int | 2513 |
| 10 | 15253400 | 15254800 | + | int | 2514 |
| 10 | 15266000 | 15267400 | + | int | 2515 |
| 10 | 15278200 | 15279400 | + | int | 2516 |
| 10 | 15328600 | 15330000 | + | int | 2517 |
| 10 | 15420000 | 15421400 | + | int | 2518 |
| 10 | 15437600 | 15438600 | + | int | 2519 |
| 10 | 15486000 | 15487000 | + | int | 2520 |
| 10 | 15511000 | 15512400 | + | int | 2521 |
| 10 | 15536800 | 15537800 | + | int | 2522 |
| 10 | 15734600 | 15736000 | + | int | 2523 |
| 10 | 15894800 | 15895800 | + | int | 2524 |
| 10 | 15950400 | 15951800 | + | int | 2525 |
| 10 | 16036000 | 16037400 | + | int | 2526 |
| 10 | 16094600 | 16095600 | + | int | 2527 |
| 10 | 16119000 | 16120200 | + | int | 2528 |
| 10 | 16455800 | 16457000 | + | int | 2529 |
| 10 | 16461600 | 16463000 | + | int | 2530 |
| 10 | 16635600 | 16636800 | + | int | 2531 |
| 10 | 17026600 | 17027600 | + | int | 2532 |
| 10 | 19880800 | 19881800 | + | Mtap7 | 2533 |
| 10 | 20508400 | 20509600 | + | int | 2534 |
| 10 | 21861800 | 21863400 | + | int | 2535 |
| 10 | 22087400 | 22088800 | + | Raet1a | 2536 |
| 10 | 22087400 | 22088800 | + | Raet1b | 2537 |
| 10 | 22087400 | 22088800 | + | Raet1c | 2538 |
| 10 | 22087400 | 22088800 | + | Raet1d | 2539 |
| 10 | 22249200 | 22250800 | + | int | 2540 |
| 10 | 22919200 | 22920600 | − | Eya4 | 2541 |
| 10 | 23458400 | 23459600 | + | int | 2542 |
| 10 | 23493200 | 23494200 | + | int | 2543 |
| 10 | 23673600 | 23674800 | + | int | 2544 |
| 10 | 23884000 | 23885000 | + | Stx7 | 2545 |
| 10 | 24145000 | 24146000 | + | int | 2546 |
| 10 | 25713200 | 25714200 | − | Tmem200a | 2547 |
| 10 | 26343000 | 26344200 | + | int | 2548 |
| 10 | 27039200 | 27040400 | − | Lama2 | 2549 |
| 10 | 27137200 | 27138600 | − | Lama2 | 2550 |
| 10 | 28885800 | 28886800 | + | 6330407J23Rik | 2551 |
| 10 | 29103600 | 29104600 | + | int | 2552 |
| 10 | 29282200 | 29283400 | + | int | 2553 |
| 10 | 29346800 | 29348600 | + | int | 2554 |
| 10 | 29501200 | 29502200 | + | int | 2555 |
| 10 | 29819400 | 29820400 | + | int | 2556 |
| 10 | 29862600 | 29863600 | + | int | 2557 |
| 10 | 29932400 | 29933800 | + | int | 2558 |
| 10 | 30043600 | 30044600 | + | int | 2559 |
| 10 | 30986000 | 30987000 | + | int | 2560 |
| 10 | 31394000 | 31395000 | + | int | 2561 |
| 10 | 31844800 | 31846000 | − | Nkain2 | 2562 |
| 10 | 31844800 | 31846000 | − | Nkain2 | 2563 |
| 10 | 31945800 | 31946800 | − | Nkain2 | 2564 |
| 10 | 31945800 | 31946800 | − | Nkain2 | 2565 |
| 10 | 32041200 | 32042600 | − | Nkain2 | 2566 |
| 10 | 32041200 | 32042600 | − | Nkain2 | 2567 |
| 10 | 32553600 | 32554800 | − | Nkain2 | 2568 |
| 10 | 32553600 | 32554800 | − | Nkain2 | 2569 |
| 10 | 33006200 | 33007200 | + | Trdn | 2570 |
| 10 | 33324600 | 33326000 | − | Clvs2 | 2571 |
| 10 | 33364200 | 33365200 | + | int | 2572 |
| 10 | 33540400 | 33541600 | + | int | 2573 |
| 10 | 33692600 | 33693600 | + | int | 2574 |
| 10 | 34275200 | 34276600 | + | Frk | 2575 |
| 10 | 34573600 | 34575200 | + | int | 2576 |
| 10 | 34712800 | 34713800 | + | int | 2577 |
| 10 | 34879000 | 34880000 | + | int | 2578 |
| 10 | 35130800 | 35131800 | + | int | 2579 |
| 10 | 35185400 | 35186800 | + | int | 2580 |
| 10 | 35369200 | 35370200 | + | int | 2581 |
| 10 | 35541400 | 35542600 | + | int | 2582 |
| 10 | 35622600 | 35623800 | + | int | 2583 |
| 10 | 35734400 | 35735400 | + | int | 2584 |
| 10 | 35887000 | 35888000 | + | int | 2585 |
| 10 | 36539400 | 36541000 | + | Hs3st5 | 2586 |
| 10 | 37609200 | 37610400 | + | int | 2587 |
| 10 | 37717400 | 37718400 | + | int | 2588 |
| 10 | 37738800 | 37740000 | + | int | 2589 |
| 10 | 37910400 | 37911400 | + | int | 2590 |
| 10 | 37949200 | 37950200 | + | int | 2591 |
| 10 | 39000400 | 39001600 | + | int | 2592 |
| 10 | 39616000 | 39617000 | − | AA474331 | 2593 |
| 10 | 39641000 | 39642000 | − | 2010001E11Rik | 2594 |
| 10 | 39730800 | 39731800 | − | Al317395 | 2595 |
| 10 | 40428400 | 40429400 | + | 9030224M15Rik | 2596 |
| 10 | 40548200 | 40549200 | + | int | 2597 |
| 10 | 44312200 | 44313200 | + | int | 2598 |
| 10 | 45205200 | 45206400 | + | int | 2599 |
| 10 | 45666800 | 45668000 | + | int | 2600 |
| 10 | 45888800 | 45890200 | + | int | 2601 |
| 10 | 46186200 | 46187400 | + | int | 2602 |
| 10 | 46524200 | 46525200 | + | int | 2603 |
| 10 | 46652600 | 46653800 | + | int | 2604 |
| 10 | 46753800 | 46754800 | + | int | 2605 |
| 10 | 47048400 | 47049400 | + | int | 2606 |
| 10 | 47099600 | 47100600 | + | int | 2607 |
| 10 | 47418800 | 47420000 | + | int | 2608 |
| 10 | 47461400 | 47462600 | + | int | 2609 |
| 10 | 47560200 | 47561400 | + | int | 2610 |
| 10 | 47630800 | 47632000 | + | int | 2611 |
| 10 | 48015800 | 48016800 | + | int | 2612 |
| 10 | 48131600 | 48132800 | + | int | 2613 |
| 10 | 48142600 | 48144000 | + | int | 2614 |
| 10 | 48198200 | 48199400 | + | int | 2615 |
| 10 | 48284200 | 48285200 | + | int | 2616 |
| 10 | 48367200 | 48368600 | + | int | 2617 |
| 10 | 48511800 | 48512800 | + | int | 2618 |
| 10 | 48552600 | 48553600 | + | int | 2619 |
| 10 | 48822400 | 48823400 | − | Grik2 | 2620 |
| 10 | 49071600 | 49073200 | − | Grik2 | 2621 |
| 10 | 49124200 | 49125400 | − | Grik2 | 2622 |
| 10 | 49261600 | 49263000 | − | Grik2 | 2623 |
| 10 | 49286000 | 49287400 | − | Grik2 | 2624 |
| 10 | 49290400 | 49291400 | − | Grik2 | 2625 |
| 10 | 49293000 | 49294600 | − | Grik2 | 2626 |
| 10 | 49315400 | 49316400 | − | Grik2 | 2627 |
| 10 | 50187200 | 50188200 | + | int | 2628 |
| 10 | 50494800 | 50496000 | + | Ascc3 | 2629 |
| 10 | 50533800 | 50535000 | + | Ascc3 | 2630 |
| 10 | 50703000 | 50704400 | + | Sim1 | 2631 |
| 10 | 50852600 | 50853600 | + | int | 2632 |
| 10 | 50921200 | 50922600 | + | int | 2633 |
| 10 | 50942000 | 50943200 | + | int | 2634 |
| 10 | 51056000 | 51057600 | + | int | 2635 |
| 10 | 51268600 | 51269800 | + | int | 2636 |
| 10 | 51358400 | 51359600 | + | int | 2637 |
| 10 | 51619000 | 51620600 | + | int | 2638 |
| 10 | 52742200 | 52745400 | + | Slc35f1 | 2639 |
| 10 | 53545200 | 53546200 | + | int | 2640 |
| 10 | 54218800 | 54220000 | + | int | 2641 |
| 10 | 54287400 | 54288400 | + | int | 2642 |
| 10 | 54535800 | 54537000 | + | int | 2643 |
| 10 | 54937800 | 54938800 | + | int | 2644 |
| 10 | 54963200 | 54964200 | + | int | 2645 |
| 10 | 55127000 | 55128600 | + | int | 2646 |
| 10 | 55224200 | 55225400 | + | int | 2647 |
| 10 | 55856400 | 55857400 | − | D630037F22Rik | 2648 |
| 10 | 55899200 | 55900200 | − | D630037F22Rik | 2649 |
| 10 | 56293400 | 56294400 | + | int | 2650 |
| 10 | 56738400 | 56739800 | + | int | 2651 |
| 10 | 56903800 | 56904800 | + | int | 2652 |
| 10 | 56968800 | 56970200 | + | int | 2653 |
| 10 | 57024600 | 57026000 | + | int | 2654 |
| 10 | 57157400 | 57158600 | + | int | 2655 |
| 10 | 57681600 | 57682600 | + | int | 2656 |
| 10 | 57686400 | 57688200 | + | int | 2657 |
| 10 | 57690400 | 57692000 | + | int | 2658 |
| 10 | 57694200 | 57695800 | − | 4933403O03Rik | 2659 |
| 10 | 57694200 | 57695800 | − | Dux | 2660 |
| 10 | 57884600 | 57885600 | + | Lims1 | 2661 |
| 10 | 57884600 | 57885600 | + | Lims1 | 2662 |
| 10 | 57884600 | 57885600 | + | Lims1 | 2663 |
| 10 | 58367800 | 58368800 | + | Sh3rf3 | 2664 |
| 10 | 58860000 | 58861000 | + | int | 2665 |
| 10 | 60986400 | 60987400 | + | Lrrc20 | 2666 |
| 10 | 60989600 | 60990600 | + | Lrrc20 | 2667 |
| 10 | 63621200 | 63622200 | + | Ctnna3 | 2668 |
| 10 | 63621200 | 63622200 | + | Ctnna3 | 2669 |
| 10 | 63621200 | 63622200 | + | Ctnna3 | 2670 |
| 10 | 64127400 | 64128400 | + | Ctnna3 | 2671 |
| 10 | 64127400 | 64128400 | + | Ctnna3 | 2672 |
| 10 | 64127400 | 64128400 | + | Ctnna3 | 2673 |
| 10 | 64206600 | 64207600 | + | Ctnna3 | 2674 |
| 10 | 64206600 | 64207600 | + | Ctnna3 | 2675 |
| 10 | 64206600 | 64207600 | + | Ctnna3 | 2676 |
| 10 | 64217400 | 64218600 | + | Ctnna3 | 2677 |
| 10 | 64217400 | 64218600 | + | Ctnna3 | 2678 |
| 10 | 64217400 | 64218600 | + | Ctnna3 | 2679 |
| 10 | 64465400 | 64466400 | + | Ctnna3 | 2680 |
| 10 | 64465400 | 64466400 | + | Ctnna3 | 2681 |
| 10 | 64465400 | 64466400 | + | Ctnna3 | 2682 |
| 10 | 64717000 | 64718200 | + | int | 2683 |
| 10 | 65097400 | 65098400 | + | int | 2684 |
| 10 | 65268000 | 65269000 | + | int | 2685 |
| 10 | 65877800 | 65879000 | + | int | 2686 |
| 10 | 67910600 | 67911800 | − | 1700040L02Rik | 2687 |
| 10 | 67932600 | 67933600 | − | 1700040L02Rik | 2688 |
| 10 | 68495600 | 68496800 | + | int | 2689 |
| 10 | 68607200 | 68608200 | + | int | 2690 |
| 10 | 68699200 | 68700200 | + | Rhobtb1 | 2691 |
| 10 | 71354600 | 71355800 | + | int | 2692 |
| 10 | 71661400 | 71662600 | + | int | 2693 |
| 10 | 71741800 | 71742800 | + | int | 2694 |
| 10 | 71758800 | 71759800 | + | int | 2695 |
| 10 | 71767800 | 71769000 | + | int | 2696 |
| 10 | 71990200 | 71991400 | + | int | 2697 |
| 10 | 72520000 | 72521000 | + | int | 2698 |
| 10 | 72525600 | 72527000 | + | int | 2699 |
| 10 | 72587000 | 72588200 | + | int | 2700 |
| 10 | 72643400 | 72644400 | + | int | 2701 |
| 10 | 73144400 | 73145400 | + | int | 2702 |
| 10 | 74213600 | 74214800 | + | int | 2703 |
| 10 | 76140000 | 76141200 | + | int | 2704 |
| 10 | 76407800 | 76408800 | − | Pcbp3 | 2705 |
| 10 | 77850800 | 77851800 | + | int | 2706 |
| 10 | 78461400 | 78463000 | + | int | 2707 |
| 10 | 80443800 | 80444800 | − | Gng7 | 2708 |
| 10 | 80443800 | 80444800 | − | Gng7 | 2709 |
| 10 | 80640600 | 80642200 | + | Eef2 | 2710 |
| 10 | 80640600 | 80642200 | + | Snord37 | 2711 |
| 10 | 81466600 | 81468000 | + | int | 2712 |
| 10 | 81530600 | 81531600 | + | int | 2713 |
| 10 | 81545200 | 81546600 | + | int | 2714 |
| 10 | 81685400 | 81686600 | + | int | 2715 |
| 10 | 81868800 | 81869800 | + | int | 2716 |
| 10 | 81916200 | 81917400 | + | int | 2717 |
| 10 | 81934200 | 81935400 | + | int | 2718 |
| 10 | 82061200 | 82062200 | + | int | 2719 |
| 10 | 82417200 | 82418800 | + | int | 2720 |
| 10 | 85369600 | 85370800 | − | Prdm4 | 2721 |
| 10 | 86733000 | 86734200 | + | int | 2722 |
| 10 | 89670200 | 89671200 | + | Anks1b | 2723 |
| 10 | 90012600 | 90014000 | + | Anks1b | 2724 |
| 10 | 90907400 | 90908400 | + | int | 2725 |
| 10 | 91379600 | 91380800 | + | int | 2726 |
| 10 | 92445400 | 92446400 | + | int | 2727 |
| 10 | 92892000 | 92893000 | + | int | 2728 |
| 10 | 93083000 | 93084000 | + | int | 2729 |
| 10 | 93135000 | 93136000 | + | Ntn4 | 2730 |
| 10 | 95590800 | 95592000 | + | int | 2731 |
| 10 | 96356800 | 96358000 | + | int | 2732 |
| 10 | 96635400 | 96636400 | + | int | 2733 |
| 10 | 96782200 | 96783600 | + | int | 2734 |
| 10 | 96975600 | 96976600 | + | Dcn | 2735 |
| 10 | 96975600 | 96976600 | + | Dcn | 2736 |
| 10 | 97065800 | 97066800 | + | int | 2737 |
| 10 | 97434200 | 97435200 | + | int | 2738 |
| 10 | 97733400 | 97734800 | + | int | 2739 |
| 10 | 97885800 | 97886800 | + | int | 2740 |
| 10 | 98416800 | 98417800 | + | Atp2b1 | 2741 |
| 10 | 98830400 | 98831400 | + | int | 2742 |
| 10 | 99233400 | 99234400 | + | int | 2743 |
| 10 | 99461800 | 99462800 | + | int | 2744 |
| 10 | 99759800 | 99761200 | + | int | 2745 |
| 10 | 99928800 | 99929800 | − | Tmtc3 | 2746 |
| 10 | 99928800 | 99929800 | − | Tmtc3 | 2747 |
| 10 | 100446600 | 100447800 | + | int | 2748 |
| 10 | 100541600 | 100542800 | + | int | 2749 |
| 10 | 100651200 | 100652600 | + | int | 2750 |
| 10 | 100984400 | 100985400 | + | int | 2751 |
| 10 | 101047600 | 101048800 | + | int | 2752 |
| 10 | 101108600 | 101109800 | + | int | 2753 |
| 10 | 101127400 | 101128400 | + | int | 2754 |
| 10 | 101238600 | 101239800 | + | int | 2755 |
| 10 | 101382200 | 101383200 | + | int | 2756 |
| 10 | 101482600 | 101484000 | + | int | 2757 |
| 10 | 101609000 | 101610400 | + | int | 2758 |
| 10 | 101710000 | 101711000 | + | Mgat4c | 2759 |
| 10 | 101710000 | 101711000 | + | Mgat4c | 2760 |
| 10 | 101763600 | 101764600 | + | Mgat4c | 2761 |
| 10 | 101763600 | 101764600 | + | Mgat4c | 2762 |
| 10 | 101836400 | 101837600 | + | Mgat4c | 2763 |
| 10 | 101836400 | 101837600 | + | Mgat4c | 2764 |
| 10 | 101836400 | 101837600 | + | Mgat4c | 2765 |
| 10 | 102100000 | 102101600 | + | int | 2766 |
| 10 | 102170800 | 102172200 | + | int | 2767 |
| 10 | 102184200 | 102185600 | + | int | 2768 |
| 10 | 102740000 | 102741000 | + | int | 2769 |
| 10 | 102831000 | 102832400 | + | Slc6a15 | 2770 |
| 10 | 102838800 | 102839800 | + | Slc6a15 | 2771 |
| 10 | 103376400 | 103378000 | + | int | 2772 |
| 10 | 103514000 | 103515600 | + | int | 2773 |
| 10 | 103780400 | 103781400 | + | int | 2774 |
| 10 | 103827400 | 103828400 | + | int | 2775 |
| 10 | 104001600 | 104002600 | + | int | 2776 |
| 10 | 104058800 | 104059800 | + | int | 2777 |
| 10 | 104087600 | 104089000 | + | int | 2778 |
| 10 | 104171600 | 104173000 | + | int | 2779 |
| 10 | 104280800 | 104281800 | + | int | 2780 |
| 10 | 104517000 | 104518800 | + | int | 2781 |
| 10 | 104543400 | 104544400 | + | int | 2782 |
| 10 | 105255000 | 105256200 | − | BC067068 | 2783 |
| 10 | 105452800 | 105454200 | + | int | 2784 |
| 10 | 105513600 | 105514800 | + | int | 2785 |
| 10 | 105625000 | 105626200 | + | int | 2786 |
| 10 | 105721000 | 105722000 | + | int | 2787 |
| 10 | 105939200 | 105940200 | + | Ppfia2 | 2788 |
| 10 | 105955600 | 105956600 | + | Ppfia2 | 2789 |
| 10 | 106060000 | 106061200 | + | Ppfia2 | 2790 |
| 10 | 106206400 | 106207400 | + | Ppfia2 | 2791 |
| 10 | 106479400 | 106480400 | − | Acss3 | 2792 |
| 10 | 106479400 | 106480400 | − | Acss3 | 2793 |
| 10 | 106943400 | 106944400 | + | int | 2794 |
| 10 | 106953400 | 106954400 | + | int | 2795 |
| 10 | 107019200 | 107020200 | − | Ptprq | 2796 |
| 10 | 108319200 | 108320200 | − | Syt1 | 2797 |
| 10 | 108414600 | 108415600 | − | Syt1 | 2798 |
| 10 | 111611800 | 111613000 | + | Caps2 | 2799 |
| 10 | 111658600 | 111659800 | + | int | 2800 |
| 10 | 112041800 | 112045000 | + | int | 2801 |
| 10 | 112124200 | 112125200 | + | int | 2802 |
| 10 | 112764200 | 112765200 | + | int | 2803 |
| 10 | 112798600 | 112800000 | + | int | 2804 |
| 10 | 112959000 | 112962000 | + | int | 2805 |
| 10 | 113013600 | 113014600 | + | int | 2806 |
| 10 | 113085400 | 113086800 | + | int | 2807 |
| 10 | 113135800 | 113137200 | + | int | 2808 |
| 10 | 113450600 | 113451600 | + | int | 2809 |
| 10 | 113483000 | 113484000 | + | int | 2810 |
| 10 | 113569200 | 113570600 | + | int | 2811 |
| 10 | 113892800 | 113893800 | − | Trhde | 2812 |
| 10 | 114253400 | 114254400 | + | int | 2813 |
| 10 | 115200600 | 115201600 | + | int | 2814 |
| 10 | 115550200 | 115551200 | + | Ptprr | 2815 |
| 10 | 115550200 | 115551200 | − | 4933416C03Rik | 2816 |
| 10 | 115580800 | 115581800 | + | Ptprr | 2817 |
| 10 | 116198200 | 116199400 | + | int | 2818 |
| 10 | 117507200 | 117508200 | + | int | 2819 |
| 10 | 117593600 | 117594600 | + | Mdm1 | 2820 |
| 10 | 117949200 | 117950200 | + | int | 2821 |
| 10 | 120579800 | 120581200 | + | int | 2822 |
| 10 | 121663400 | 121664400 | + | int | 2823 |
| 10 | 122890200 | 122891200 | + | Fam19a2 | 2824 |
| 10 | 123125800 | 123126800 | + | Fam19a2 | 2825 |
| 10 | 123382000 | 123383000 | + | int | 2826 |
| 10 | 124000600 | 124001600 | + | int | 2827 |
| 10 | 124030400 | 124031600 | + | int | 2828 |
| 10 | 124116800 | 124118000 | + | int | 2829 |
| 10 | 125721800 | 125722800 | + | int | 2830 |
| 10 | 125947800 | 125949600 | + | int | 2831 |
| 10 | 126665400 | 126666400 | − | Kif5a | 2832 |
| 10 | 126665400 | 126666400 | − | Kif5a | 2833 |
| 10 | 126734200 | 126735400 | − | Mars | 2834 |
| 10 | 128848800 | 128850400 | + | int | 2835 |
| 10 | 128868800 | 128869800 | + | int | 2836 |
| 10 | 128923800 | 128925000 | + | int | 2837 |
| 10 | 129068200 | 129069400 | + | int | 2838 |
| 10 | 129077000 | 129078000 | + | int | 2839 |
| 10 | 129084000 | 129087200 | + | Olfr799 | 2840 |
| 10 | 129133600 | 129134600 | + | int | 2841 |
| 10 | 129207600 | 129209000 | + | int | 2842 |
| 10 | 129219600 | 129220600 | + | int | 2843 |
| 10 | 129340600 | 129342000 | − | Olfr815 | 2844 |
| 10 | 129563200 | 129564200 | − | Olfr824 | 2845 |
| 10 | 129607600 | 129608600 | + | int | 2846 |
| 10 | 129690400 | 129691400 | + | int | 2847 |
| 10 | 129695800 | 129697200 | + | int | 2848 |
| 10 | 129850200 | 129851200 | + | int | 2849 |
| 11 | 3025400 | 3026600 | + | Pisd-ps1 | 2850 |
| 11 | 3025400 | 3026600 | + | Pisd-ps3 | 2851 |
| 11 | 3528800 | 3529800 | + | int | 2852 |
| 11 | 3544400 | 3545400 | − | Tug1 | 2853 |
| 11 | 3544400 | 3545400 | − | Tug1 | 2854 |
| 11 | 3970600 | 3971600 | + | Sec14l3 | 2855 |
| 11 | 5911000 | 5912600 | − | Camk2b | 2856 |
| 11 | 8948400 | 8949400 | + | Gm11992 | 2857 |
| 11 | 8948400 | 8949400 | − | Sun3 | 2858 |
| 11 | 8984000 | 8985600 | + | int | 2859 |
| 11 | 10692800 | 10694200 | + | int | 2860 |
| 11 | 11325600 | 11326800 | − | Zpbp | 2861 |
| 11 | 12406000 | 12407200 | + | int | 2862 |
| 11 | 12677800 | 12679200 | + | int | 2863 |
| 11 | 12882800 | 12884000 | + | int | 2864 |
| 11 | 13792800 | 13793800 | + | int | 2865 |
| 11 | 13907200 | 13908200 | + | int | 2866 |
| 11 | 14208400 | 14209600 | + | int | 2867 |
| 11 | 14295200 | 14296200 | + | int | 2868 |
| 11 | 14483400 | 14484400 | + | int | 2869 |
| 11 | 14639200 | 14641000 | + | int | 2870 |
| 11 | 15441200 | 15442200 | + | int | 2871 |
| 11 | 15473600 | 15475000 | + | int | 2872 |
| 11 | 15524400 | 15525800 | + | int | 2873 |
| 11 | 15555000 | 15556000 | + | int | 2874 |
| 11 | 15572000 | 15573000 | + | int | 2875 |
| 11 | 15589800 | 15591400 | + | int | 2876 |
| 11 | 16160600 | 16161600 | + | Vstm2a | 2877 |
| 11 | 16260800 | 16262000 | + | int | 2878 |
| 11 | 16325200 | 16326200 | + | int | 2879 |
| 11 | 16575400 | 16576400 | + | int | 2880 |
| 11 | 16627800 | 16629600 | + | int | 2881 |
| 11 | 16913800 | 16915000 | + | int | 2882 |
| 11 | 17051000 | 17052200 | + | int | 2883 |
| 11 | 17138200 | 17139200 | + | int | 2884 |
| 11 | 17996800 | 17997800 | + | int | 2885 |
| 11 | 18186800 | 18187800 | + | int | 2886 |
| 11 | 18421400 | 18422400 | + | int | 2887 |
| 11 | 19485200 | 19486600 | + | int | 2888 |
| 11 | 21291600 | 21292600 | + | int | 2889 |
| 11 | 21352600 | 21353600 | + | int | 2890 |
| 11 | 21758800 | 21759800 | + | AV249152 | 2891 |
| 11 | 25253000 | 25254400 | + | int | 2892 |
| 11 | 25496400 | 25497400 | + | int | 2893 |
| 11 | 26908200 | 26909400 | + | int | 2894 |
| 11 | 27186000 | 27187000 | + | int | 2895 |
| 11 | 27218000 | 27219400 | + | int | 2896 |
| 11 | 27246800 | 27248000 | + | int | 2897 |
| 11 | 28060200 | 28061200 | + | int | 2898 |
| 11 | 28437600 | 28438600 | − | Ccdc85a | 2899 |
| 11 | 28678000 | 28679200 | + | int | 2900 |
| 11 | 29363000 | 29364000 | + | Ccdc88a | 2901 |
| 11 | 30888400 | 30889400 | + | Asb3 | 2902 |
| 11 | 30888400 | 30889400 | − | Chac2 | 2903 |
| 11 | 31056800 | 31057800 | + | int | 2904 |
| 11 | 32525800 | 32526800 | + | int | 2905 |
| 11 | 33450800 | 33451800 | − | Gabrp | 2906 |
| 11 | 33506800 | 33508200 | + | int | 2907 |
| 11 | 37066000 | 37067000 | + | int | 2908 |
| 11 | 37075000 | 37076200 | + | int | 2909 |
| 11 | 37547400 | 37548400 | + | int | 2910 |
| 11 | 37791000 | 37792000 | + | int | 2911 |
| 11 | 38180000 | 38181000 | + | int | 2912 |
| 11 | 38306000 | 38307000 | + | int | 2913 |
| 11 | 38991400 | 38993000 | + | int | 2914 |
| 11 | 39269600 | 39270600 | + | int | 2915 |
| 11 | 39639000 | 39640000 | + | int | 2916 |
| 11 | 39785800 | 39787200 | + | int | 2917 |
| 11 | 40460400 | 40461600 | + | int | 2918 |
| 11 | 40653000 | 40654000 | + | int | 2919 |
| 11 | 40732600 | 40733600 | + | int | 2920 |
| 11 | 40903400 | 40904800 | + | int | 2921 |
| 11 | 41458400 | 41459400 | + | int | 2922 |
| 11 | 41663000 | 41664000 | + | int | 2923 |
| 11 | 44223600 | 44224600 | + | Il12b | 2924 |
| 11 | 46873200 | 46874200 | − | Sgcd | 2925 |
| 11 | 47700200 | 47701200 | + | int | 2926 |
| 11 | 47888600 | 47889600 | + | int | 2927 |
| 11 | 48041000 | 48042200 | + | int | 2928 |
| 11 | 48525800 | 48526800 | + | int | 2929 |
| 11 | 49380600 | 49381800 | + | int | 2930 |
| 11 | 50595000 | 50596000 | + | Adamts2 | 2931 |
| 11 | 50953000 | 50954000 | + | int | 2932 |
| 11 | 51250200 | 51251200 | + | Col23a1 | 2933 |
| 11 | 52732800 | 52733800 | + | Fstl4 | 2934 |
| 11 | 55865800 | 55866800 | + | int | 2935 |
| 11 | 57369000 | 57370400 | + | int | 2936 |
| 11 | 57372200 | 57373200 | + | int | 2937 |
| 11 | 58332400 | 58333400 | + | int | 2938 |
| 11 | 58663800 | 58664800 | + | int | 2939 |
| 11 | 58666000 | 58667000 | + | int | 2940 |
| 11 | 58858000 | 58859000 | − | Obscn | 2941 |
| 11 | 58858000 | 58859000 | − | Obscn | 2942 |
| 11 | 61004400 | 61005400 | + | int | 2943 |
| 11 | 62049400 | 62050400 | + | int | 2944 |
| 11 | 73388200 | 73389200 | + | int | 2945 |
| 11 | 73419400 | 73420400 | + | int | 2946 |
| 11 | 74019200 | 74020600 | − | Olfr43 | 2947 |
| 11 | 81386000 | 81387200 | − | 1700071K01Rik | 2948 |
| 11 | 81386000 | 81387200 | − | Accn1 | 2949 |
| 11 | 85255000 | 85256000 | + | Bcas3 | 2950 |
| 11 | 85271200 | 85272400 | + | Bcas3 | 2951 |
| 11 | 85936400 | 85937400 | − | Brip1 | 2952 |
| 11 | 90349000 | 90350000 | − | Stxbp4 | 2953 |
| 11 | 91489200 | 91490200 | + | int | 2954 |
| 11 | 91846800 | 91847800 | + | int | 2955 |
| 11 | 91999600 | 92000800 | + | int | 2956 |
| 11 | 92354000 | 92355000 | + | int | 2957 |
| 11 | 92548000 | 92549200 | + | int | 2958 |
| 11 | 92641000 | 92642000 | + | int | 2959 |
| 11 | 92689200 | 92690200 | + | int | 2960 |
| 11 | 92807600 | 92808600 | + | int | 2961 |
| 11 | 93843800 | 93844800 | + | int | 2962 |
| 11 | 95042400 | 95043600 | + | int | 2963 |
| 11 | 100381200 | 100382200 | − | Acly | 2964 |
| 11 | 101854600 | 101855800 | + | int | 2965 |
| 11 | 103624600 | 103625600 | + | int | 2966 |
| 11 | 103933400 | 103935200 | + | int | 2967 |
| 11 | 107644600 | 107645800 | − | Cacng4 | 2968 |
| 11 | 108543200 | 108544200 | + | Ccdc46 | 2969 |
| 11 | 108543200 | 108544200 | + | Ccdc46 | 2970 |
| 11 | 108543200 | 108544200 | + | Ccdc46 | 2971 |
| 11 | 108872400 | 108874000 | + | int | 2972 |
| 11 | 109054000 | 109055000 | + | int | 2973 |
| 11 | 113374000 | 113375200 | − | Slc39a11 | 2974 |
| 11 | 116199400 | 116200600 | − | Foxj1 | 2975 |
| 11 | 116199400 | 116200600 | − | Rnf157 | 2976 |
| 11 | 117026800 | 117027800 | + | int | 2977 |
| 11 | 117311600 | 117312800 | + | int | 2978 |
| 11 | 118253800 | 118254800 | − | Lgals3bp | 2979 |
| 11 | 118570600 | 118571800 | − | D11Bwg0517e | 2980 |
| 12 | 3021400 | 3022400 | + | int | 2981 |
| 12 | 3109000 | 3110800 | + | int | 2982 |
| 12 | 5435600 | 5436600 | + | int | 2983 |
| 12 | 6096400 | 6097400 | + | int | 2984 |
| 12 | 7445200 | 7446200 | + | int | 2985 |
| 12 | 8137400 | 8138400 | + | int | 2986 |
| 12 | 8379200 | 8380200 | + | int | 2987 |
| 12 | 9684800 | 9685800 | + | int | 2988 |
| 12 | 9868400 | 9869400 | + | int | 2989 |
| 12 | 10195800 | 10196800 | + | int | 2990 |
| 12 | 13854200 | 13856000 | + | int | 2991 |
| 12 | 14179000 | 14180000 | + | int | 2992 |
| 12 | 14907800 | 14909200 | + | int | 2993 |
| 12 | 15114600 | 15115600 | + | int | 2994 |
| 12 | 15451600 | 15452800 | + | int | 2995 |
| 12 | 16558600 | 16560200 | − | Lpin1 | 2996 |
| 12 | 17146000 | 17147000 | + | int | 2997 |
| 12 | 18179600 | 18180600 | + | int | 2998 |
| 12 | 18800800 | 18802400 | + | int | 2999 |
| 12 | 19146800 | 19148400 | + | int | 3000 |
| 12 | 19561600 | 19562600 | + | int | 3001 |
| 12 | 19856800 | 19857800 | + | int | 3002 |
| 12 | 20201600 | 20203000 | + | int | 3003 |
| 12 | 20515000 | 20516000 | + | int | 3004 |
| 12 | 20815000 | 20816200 | − | 1700030C10Rik | 3005 |
| 12 | 20926600 | 20927600 | + | int | 3006 |
| 12 | 21055200 | 21056200 | + | int | 3007 |
| 12 | 21582200 | 21583200 | + | int | 3008 |
| 12 | 22897600 | 22898600 | + | int | 3009 |
| 12 | 23080800 | 23081800 | + | int | 3010 |
| 12 | 23186200 | 23187600 | + | int | 3011 |
| 12 | 24442600 | 24443800 | + | int | 3012 |
| 12 | 24844200 | 24845600 | + | int | 3013 |
| 12 | 25109200 | 25110400 | + | int | 3014 |
| 12 | 26731200 | 26732200 | + | int | 3015 |
| 12 | 27529200 | 27530200 | + | int | 3016 |
| 12 | 28083400 | 28084600 | + | int | 3017 |
| 12 | 29079800 | 29080800 | + | int | 3018 |
| 12 | 29626800 | 29628200 | + | int | 3019 |
| 12 | 29843800 | 29844800 | + | int | 3020 |
| 12 | 30792200 | 30793200 | − | Tpo | 3021 |
| 12 | 34899400 | 34900800 | + | int | 3022 |
| 12 | 35835800 | 35836800 | + | int | 3023 |
| 12 | 35870600 | 35871600 | + | int | 3024 |
| 12 | 36112000 | 36113200 | + | int | 3025 |
| 12 | 37684600 | 37685800 | + | int | 3026 |
| 12 | 37904200 | 37905200 | + | Meox2 | 3027 |
| 12 | 38003600 | 38005400 | + | Tmem195 | 3028 |
| 12 | 38760400 | 38762000 | + | Dgkb | 3029 |
| 12 | 39042400 | 39043400 | + | Dgkb | 3030 |
| 12 | 39136400 | 39137400 | + | Dgkb | 3031 |
| 12 | 40223600 | 40224800 | + | int | 3032 |
| 12 | 42112000 | 42113400 | + | Immp2l | 3033 |
| 12 | 42811000 | 42812000 | + | Immp2l | 3034 |
| 12 | 43141600 | 43143000 | + | int | 3035 |
| 12 | 43628400 | 43629400 | + | int | 3036 |
| 12 | 43833200 | 43834200 | + | int | 3037 |
| 12 | 44162800 | 44163800 | + | int | 3038 |
| 12 | 44491000 | 44492000 | + | int | 3039 |
| 12 | 45542800 | 45544200 | + | Nrcam | 3040 |
| 12 | 45674400 | 45675400 | + | Nrcam | 3041 |
| 12 | 45872600 | 45874400 | + | int | 3042 |
| 12 | 46516000 | 46517000 | + | int | 3043 |
| 12 | 46644600 | 46645600 | + | int | 3044 |
| 12 | 46755600 | 46757400 | + | int | 3045 |
| 12 | 46774800 | 46776200 | + | int | 3046 |
| 12 | 46860200 | 46861200 | + | int | 3047 |
| 12 | 47045400 | 47046400 | + | int | 3048 |
| 12 | 47049600 | 47051400 | + | int | 3049 |
| 12 | 48059000 | 48060000 | + | int | 3050 |
| 12 | 48346400 | 48347800 | + | int | 3051 |
| 12 | 48582000 | 48583000 | + | int | 3052 |
| 12 | 48992600 | 48993600 | + | int | 3053 |
| 12 | 49195400 | 49196600 | + | int | 3054 |
| 12 | 49814000 | 49815000 | + | int | 3055 |
| 12 | 49887200 | 49888600 | + | int | 3056 |
| 12 | 50262200 | 50263800 | + | int | 3057 |
| 12 | 50530000 | 50531400 | + | int | 3058 |
| 12 | 51024000 | 51025400 | + | int | 3059 |
| 12 | 51174200 | 51175400 | + | int | 3060 |
| 12 | 51196800 | 51197800 | + | int | 3061 |
| 12 | 52020400 | 52021600 | + | int | 3062 |
| 12 | 52250000 | 52251000 | + | int | 3063 |
| 12 | 53361000 | 53362000 | + | Nubpl | 3064 |
| 12 | 53959000 | 53960000 | + | Akap6 | 3065 |
| 12 | 54051200 | 54052800 | + | Akap6 | 3066 |
| 12 | 54558600 | 54560000 | + | Npas3 | 3067 |
| 12 | 58315400 | 58316400 | + | int | 3068 |
| 12 | 58616200 | 58617800 | + | int | 3069 |
| 12 | 59072000 | 59073000 | + | int | 3070 |
| 12 | 59350000 | 59351000 | + | int | 3071 |
| 12 | 59361000 | 59362000 | + | int | 3072 |
| 12 | 61344600 | 61345600 | + | int | 3073 |
| 12 | 61368000 | 61369200 | + | int | 3074 |
| 12 | 61611400 | 61612400 | + | int | 3075 |
| 12 | 61690800 | 61692200 | + | int | 3076 |
| 12 | 61726800 | 61727800 | + | int | 3077 |
| 12 | 61731000 | 61732200 | + | int | 3078 |
| 12 | 61953400 | 61955000 | + | int | 3079 |
| 12 | 62705400 | 62706400 | + | Lrfn5 | 3080 |
| 12 | 62825600 | 62826800 | + | Lrfn5 | 3081 |
| 12 | 63155000 | 63156200 | + | int | 3082 |
| 12 | 63333400 | 63335000 | + | int | 3083 |
| 12 | 63606200 | 63607400 | + | int | 3084 |
| 12 | 63692000 | 63693400 | + | int | 3085 |
| 12 | 64053400 | 64054400 | + | int | 3086 |
| 12 | 64554400 | 64555800 | + | int | 3087 |
| 12 | 65112600 | 65113600 | + | int | 3088 |
| 12 | 65187800 | 65189200 | + | int | 3089 |
| 12 | 66763800 | 66764800 | + | int | 3090 |
| 12 | 67134000 | 67135000 | + | int | 3091 |
| 12 | 67188000 | 67189200 | + | int | 3092 |
| 12 | 67384600 | 67385800 | − | Rpl10l | 3093 |
| 12 | 67628400 | 67630000 | − | Mdga2 | 3094 |
| 12 | 68165400 | 68166400 | − | Mdga2 | 3095 |
| 12 | 68343600 | 68344800 | + | int | 3096 |
| 12 | 68980600 | 68982000 | + | int | 3097 |
| 12 | 71342600 | 71343600 | + | int | 3098 |
| 12 | 71471600 | 71472600 | + | int | 3099 |
| 12 | 73370400 | 73371400 | − | Rtn1 | 3100 |
| 12 | 75731600 | 75733000 | + | int | 3101 |
| 12 | 78015200 | 78016200 | + | Fntb | 3102 |
| 12 | 79334800 | 79335800 | + | Gphn | 3103 |
| 12 | 79451200 | 79452800 | + | Gphn | 3104 |
| 12 | 80758800 | 80760400 | + | Rad51l1 | 3105 |
| 12 | 86225400 | 86226400 | + | int | 3106 |
| 12 | 89412600 | 89414000 | + | int | 3107 |
| 12 | 89536000 | 89537000 | + | int | 3108 |
| 12 | 89715200 | 89716200 | + | int | 3109 |
| 12 | 90412600 | 90413600 | + | Nrxn3 | 3110 |
| 12 | 91442600 | 91443600 | + | Nrxn3 | 3111 |
| 12 | 92037000 | 92038200 | + | int | 3112 |
| 12 | 92478000 | 92479200 | − | 4930534B04Rik | 3113 |
| 12 | 93445000 | 93446000 | + | int | 3114 |
| 12 | 93525200 | 93526200 | + | int | 3115 |
| 12 | 94564600 | 94565600 | + | int | 3116 |
| 12 | 95060600 | 95062200 | + | int | 3117 |
| 12 | 95166400 | 95167800 | + | int | 3118 |
| 12 | 95659800 | 95661400 | + | int | 3119 |
| 12 | 96206400 | 96207400 | + | int | 3120 |
| 12 | 96333600 | 96334800 | + | int | 3121 |
| 12 | 96493600 | 96494600 | + | int | 3122 |
| 12 | 97855400 | 97856600 | + | int | 3123 |
| 12 | 97913600 | 97915000 | + | int | 3124 |
| 12 | 98087400 | 98089000 | + | int | 3125 |
| 12 | 98700600 | 98701800 | + | int | 3126 |
| 12 | 98877000 | 98878000 | + | int | 3127 |
| 12 | 98926400 | 98927800 | + | int | 3128 |
| 12 | 99008200 | 99009400 | + | int | 3129 |
| 12 | 100882600 | 100884200 | + | int | 3130 |
| 12 | 101335400 | 101336400 | + | int | 3131 |
| 12 | 101340600 | 101341600 | + | int | 3132 |
| 12 | 101580000 | 101581000 | − | Ttc7b | 3133 |
| 12 | 102406800 | 102407800 | + | int | 3134 |
| 12 | 102438400 | 102440000 | + | int | 3135 |
| 12 | 102738400 | 102739400 | + | Catsperb | 3136 |
| 12 | 102910400 | 102911400 | − | Tc2n | 3137 |
| 12 | 102910400 | 102911400 | − | Tc2n | 3138 |
| 12 | 102915000 | 102916000 | − | Tc2n | 3139 |
| 12 | 102915000 | 102916000 | − | Tc2n | 3140 |
| 12 | 102943400 | 102944600 | − | Tc2n | 3141 |
| 12 | 102943400 | 102944600 | − | Tc2n | 3142 |
| 12 | 104721800 | 104723000 | + | int | 3143 |
| 12 | 104976000 | 104977000 | − | Serpina1b | 3144 |
| 12 | 105290200 | 105291200 | + | int | 3145 |
| 12 | 106858800 | 106859800 | − | Atg2b | 3146 |
| 12 | 107360800 | 107361800 | + | int | 3147 |
| 12 | 107454600 | 107455800 | + | int | 3148 |
| 12 | 107457000 | 107458000 | + | int | 3149 |
| 12 | 108543000 | 108544000 | + | int | 3150 |
| 12 | 109152000 | 109153000 | − | Bcl11b | 3151 |
| 12 | 110748000 | 110749200 | + | int | 3152 |
| 12 | 110996000 | 110997000 | + | int | 3153 |
| 12 | 111278400 | 111279400 | + | int | 3154 |
| 12 | 112535400 | 112536600 | − | Cdc42bpb | 3155 |
| 12 | 113299800 | 113300800 | + | Tdrd9 | 3156 |
| 12 | 115169600 | 115170800 | + | int | 3157 |
| 12 | 115212200 | 115213600 | + | int | 3158 |
| 12 | 115225800 | 115226800 | + | int | 3159 |
| 12 | 115460600 | 115461600 | + | int | 3160 |
| 12 | 115470200 | 115471800 | + | int | 3161 |
| 12 | 115575200 | 115576800 | + | int | 3162 |
| 12 | 115821400 | 115822600 | + | int | 3163 |
| 12 | 116088800 | 116090200 | + | int | 3164 |
| 12 | 119591400 | 119592400 | + | int | 3165 |
| 12 | 119798400 | 119799400 | + | int | 3166 |
| 12 | 120211000 | 120212600 | + | int | 3167 |
| 12 | 120743400 | 120745000 | + | int | 3168 |
| 12 | 120814600 | 120816200 | + | int | 3169 |
| 12 | 120870000 | 120871200 | + | int | 3170 |
| 12 | 120974800 | 120975800 | + | int | 3171 |
| 12 | 121170600 | 121172000 | + | int | 3172 |
| 13 | 3136600 | 3138200 | + | int | 3173 |
| 13 | 3298800 | 3300200 | + | int | 3174 |
| 13 | 3371800 | 3373400 | + | int | 3175 |
| 13 | 3469400 | 3470800 | + | int | 3176 |
| 13 | 3490400 | 3491400 | + | 2810429I04Rik | 3177 |
| 13 | 4090200 | 4091600 | + | int | 3178 |
| 13 | 4427200 | 4428400 | + | int | 3179 |
| 13 | 4838400 | 4839400 | + | int | 3180 |
| 13 | 5522400 | 5523400 | + | int | 3181 |
| 13 | 5691800 | 5694800 | + | int | 3182 |
| 13 | 6272000 | 6273000 | + | int | 3183 |
| 13 | 7510600 | 7511800 | + | int | 3184 |
| 13 | 9832800 | 9834600 | + | int | 3185 |
| 13 | 9865400 | 9866400 | + | int | 3186 |
| 13 | 10948600 | 10949600 | + | int | 3187 |
| 13 | 10997800 | 10998800 | + | int | 3188 |
| 13 | 12821600 | 12822600 | + | int | 3189 |
| 13 | 13029800 | 13030800 | + | int | 3190 |
| 13 | 13048200 | 13049200 | + | int | 3191 |
| 13 | 13102200 | 13103200 | + | int | 3192 |
| 13 | 13133600 | 13135000 | + | int | 3193 |
| 13 | 14351400 | 14352800 | − | Hecw1 | 3194 |
| 13 | 14421800 | 14422800 | − | Hecw1 | 3195 |
| 13 | 14630800 | 14632200 | + | int | 3196 |
| 13 | 14902200 | 14903200 | + | int | 3197 |
| 13 | 15389800 | 15393200 | + | int | 3198 |
| 13 | 16174600 | 16176000 | + | int | 3199 |
| 13 | 16610600 | 16611600 | + | int | 3200 |
| 13 | 18041800 | 18043000 | + | int | 3201 |
| 13 | 18540200 | 18541200 | + | int | 3202 |
| 13 | 19218800 | 19219800 | + | Amph | 3203 |
| 13 | 19857800 | 19858800 | − | Gpr141 | 3204 |
| 13 | 21160000 | 21161200 | + | int | 3205 |
| 13 | 21164000 | 21165000 | − | Olfr1370 | 3206 |
| 13 | 21215000 | 21216400 | + | int | 3207 |
| 13 | 22819000 | 22820200 | − | Vmn1r207-ps | 3208 |
| 13 | 23056200 | 23057200 | + | int | 3209 |
| 13 | 24383800 | 24384800 | + | int | 3210 |
| 13 | 25547400 | 25548600 | + | int | 3211 |
| 13 | 26451000 | 26452000 | + | int | 3212 |
| 13 | 26457200 | 26458200 | + | int | 3213 |
| 13 | 27105400 | 27106800 | + | int | 3214 |
| 13 | 27429200 | 27430600 | + | int | 3215 |
| 13 | 27622200 | 27623400 | + | int | 3216 |
| 13 | 27785600 | 27786600 | + | int | 3217 |
| 13 | 28471400 | 28472400 | + | int | 3218 |
| 13 | 28625800 | 28627200 | + | int | 3219 |
| 13 | 32653200 | 32654200 | + | int | 3220 |
| 13 | 33195000 | 33196200 | + | int | 3221 |
| 13 | 33463200 | 33464800 | + | int | 3222 |
| 13 | 34129000 | 34130000 | + | Bphl | 3223 |
| 13 | 36930600 | 36932200 | + | int | 3224 |
| 13 | 40169600 | 40171000 | − | Ofcc1 | 3225 |
| 13 | 41369000 | 41370000 | + | BC024659 | 3226 |
| 13 | 42205400 | 42206400 | + | Hivep1 | 3227 |
| 13 | 42234800 | 42236000 | + | Hivep1 | 3228 |
| 13 | 43098200 | 43099600 | + | Phactr1 | 3229 |
| 13 | 43098200 | 43099600 | + | Phactr1 | 3230 |
| 13 | 43380000 | 43381000 | − | Gfod1 | 3231 |
| 13 | 44935200 | 44936200 | + | Jarid2 | 3232 |
| 13 | 44964800 | 44965800 | + | Jarid2 | 3233 |
| 13 | 45841000 | 45842200 | − | Atxn1 | 3234 |
| 13 | 47842600 | 47843600 | + | int | 3235 |
| 13 | 49795600 | 49796600 | + | Iars | 3236 |
| 13 | 49859600 | 49860600 | + | int | 3237 |
| 13 | 50121800 | 50123400 | + | int | 3238 |
| 13 | 50282400 | 50283400 | + | int | 3239 |
| 13 | 50718200 | 50719600 | + | int | 3240 |
| 13 | 50862400 | 50863600 | + | int | 3241 |
| 13 | 51414800 | 51415800 | + | int | 3242 |
| 13 | 52703800 | 52704800 | + | Sykb | 3243 |
| 13 | 55262400 | 55263400 | + | Fgfr4 | 3244 |
| 13 | 56473400 | 56474400 | + | int | 3245 |
| 13 | 57046200 | 57047200 | + | int | 3246 |
| 13 | 57541000 | 57542000 | − | Spock1 | 3247 |
| 13 | 57541000 | 57542000 | − | Spock1 | 3248 |
| 13 | 58151800 | 58152800 | + | int | 3249 |
| 13 | 60932800 | 60933800 | + | int | 3250 |
| 13 | 61246600 | 61250000 | + | int | 3251 |
| 13 | 61530000 | 61531000 | + | int | 3252 |
| 13 | 61761000 | 61762400 | + | int | 3253 |
| 13 | 61926800 | 61928200 | + | int | 3254 |
| 13 | 64836800 | 64837800 | + | int | 3255 |
| 13 | 65245600 | 65246600 | + | int | 3256 |
| 13 | 65253400 | 65254800 | + | Olfr466 | 3257 |
| 13 | 65628200 | 65629200 | + | int | 3258 |
| 13 | 65713000 | 65714400 | + | int | 3259 |
| 13 | 65760800 | 65761800 | + | int | 3260 |
| 13 | 65827200 | 65828200 | + | int | 3261 |
| 13 | 65858200 | 65859400 | + | int | 3262 |
| 13 | 66091200 | 66093000 | + | int | 3263 |
| 13 | 66565600 | 66567000 | + | int | 3264 |
| 13 | 66663800 | 66664800 | + | int | 3265 |
| 13 | 67069400 | 67070400 | + | Ptdss1 | 3266 |
| 13 | 67552200 | 67553200 | − | Zfp874 | 3267 |
| 13 | 69029200 | 69030200 | − | Adcy2 | 3268 |
| 13 | 69484600 | 69485600 | + | int | 3269 |
| 13 | 71807800 | 71808800 | + | int | 3270 |
| 13 | 73380800 | 73381800 | + | int | 3271 |
| 13 | 74330000 | 74331000 | − | Exoc3 | 3272 |
| 13 | 74370400 | 74371400 | − | Ahrr | 3273 |
| 13 | 76431400 | 76432600 | + | int | 3274 |
| 13 | 76645800 | 76647000 | + | Mctp1 | 3275 |
| 13 | 77099400 | 77100400 | + | Mctp1 | 3276 |
| 13 | 77937800 | 77939000 | + | Fam172a | 3277 |
| 13 | 78021400 | 78022400 | + | Fam172a | 3278 |
| 13 | 78096600 | 78097600 | + | Fam172a | 3279 |
| 13 | 78106800 | 78108000 | + | Fam172a | 3280 |
| 13 | 78170200 | 78171400 | + | Fam172a | 3281 |
| 13 | 78382800 | 78383800 | + | int | 3282 |
| 13 | 78941600 | 78942600 | + | int | 3283 |
| 13 | 79178400 | 79179800 | + | int | 3284 |
| 13 | 79201200 | 79202600 | + | int | 3285 |
| 13 | 79732000 | 79733000 | + | int | 3286 |
| 13 | 79743200 | 79744200 | + | int | 3287 |
| 13 | 79747800 | 79748800 | + | int | 3288 |
| 13 | 80068800 | 80070400 | + | int | 3289 |
| 13 | 80123000 | 80124200 | + | int | 3290 |
| 13 | 80246200 | 80247200 | + | int | 3291 |
| 13 | 81171800 | 81173200 | + | 9330111N05Rik | 3292 |
| 13 | 81206000 | 81207200 | + | 9330111N05Rik | 3293 |
| 13 | 81406200 | 81407200 | − | Gpr98 | 3294 |
| 13 | 81659400 | 81660600 | − | Gpr98 | 3295 |
| 13 | 82308200 | 82309400 | + | int | 3296 |
| 13 | 82501000 | 82502000 | + | int | 3297 |
| 13 | 82608800 | 82610200 | + | int | 3298 |
| 13 | 82836400 | 82837800 | + | int | 3299 |
| 13 | 83029400 | 83030400 | + | int | 3300 |
| 13 | 83654000 | 83655000 | + | Mef2c | 3301 |
| 13 | 83971800 | 83973400 | + | int | 3302 |
| 13 | 84305200 | 84306400 | + | int | 3303 |
| 13 | 84916400 | 84917600 | + | int | 3304 |
| 13 | 85006400 | 85007600 | + | int | 3305 |
| 13 | 85149200 | 85150200 | + | int | 3306 |
| 13 | 85760800 | 85761800 | + | int | 3307 |
| 13 | 86539400 | 86540400 | + | int | 3308 |
| 13 | 86544400 | 86545600 | + | int | 3309 |
| 13 | 86661000 | 86662000 | + | int | 3310 |
| 13 | 87544800 | 87546600 | + | int | 3311 |
| 13 | 87860600 | 87861800 | + | int | 3312 |
| 13 | 87920400 | 87921400 | + | int | 3313 |
| 13 | 88301400 | 88302600 | + | int | 3314 |
| 13 | 88315400 | 88316600 | + | int | 3315 |
| 13 | 88390600 | 88391600 | + | int | 3316 |
| 13 | 88400000 | 88401000 | + | int | 3317 |
| 13 | 88513600 | 88514600 | + | int | 3318 |
| 13 | 88761200 | 88762400 | + | int | 3319 |
| 13 | 89209400 | 89210600 | + | Edil3 | 3320 |
| 13 | 89603400 | 89604400 | + | int | 3321 |
| 13 | 89623600 | 89625200 | + | int | 3322 |
| 13 | 89753000 | 89754000 | + | int | 3323 |
| 13 | 89851200 | 89852400 | − | Vcan | 3324 |
| 13 | 89851200 | 89852400 | − | Vcan | 3325 |
| 13 | 89851200 | 89852400 | − | Vcan | 3326 |
| 13 | 90731800 | 90733200 | + | int | 3327 |
| 13 | 90851000 | 90852000 | + | int | 3328 |
| 13 | 91185000 | 91186200 | − | Atg10 | 3329 |
| 13 | 91241400 | 91242400 | − | Atg10 | 3330 |
| 13 | 91634400 | 91635400 | + | Ssbp2 | 3331 |
| 13 | 91766400 | 91769400 | + | Ssbp2 | 3332 |
| 13 | 92880600 | 92881600 | − | Rasgrf2 | 3333 |
| 13 | 93173800 | 93174800 | + | int | 3334 |
| 13 | 94394600 | 94395600 | − | Bhmt | 3335 |
| 13 | 94790800 | 94792000 | + | int | 3336 |
| 13 | 95371400 | 95372400 | + | int | 3337 |
| 13 | 95721400 | 95722800 | + | int | 3338 |
| 13 | 96853800 | 96855200 | − | Sv2c | 3339 |
| 13 | 98385400 | 98386400 | + | int | 3340 |
| 13 | 99050600 | 99051600 | + | int | 3341 |
| 13 | 100012400 | 100013400 | + | Zfp366 | 3342 |
| 13 | 100078200 | 100079600 | + | int | 3343 |
| 13 | 101033400 | 101034800 | + | int | 3344 |
| 13 | 101083200 | 101084400 | − | Naip6 | 3345 |
| 13 | 101083200 | 101084400 | − | Naip7 | 3346 |
| 13 | 101714000 | 101715400 | + | int | 3347 |
| 13 | 102178200 | 102179400 | + | int | 3348 |
| 13 | 102761200 | 102762200 | + | int | 3349 |
| 13 | 102812200 | 102813400 | + | int | 3350 |
| 13 | 102965000 | 102966000 | + | int | 3351 |
| 13 | 103027400 | 103028600 | + | int | 3352 |
| 13 | 103032800 | 103033800 | + | int | 3353 |
| 13 | 104190000 | 104191200 | + | int | 3354 |
| 13 | 104623800 | 104625000 | − | Erbb2ip | 3355 |
| 13 | 105081800 | 105083000 | + | Adamts6 | 3356 |
| 13 | 106039400 | 106040400 | − | Rnf180 | 3357 |
| 13 | 106448400 | 106449400 | + | int | 3358 |
| 13 | 107037400 | 107038600 | + | int | 3359 |
| 13 | 111534000 | 111535400 | + | int | 3360 |
| 13 | 111939200 | 111940200 | + | int | 3361 |
| 13 | 112678400 | 112679600 | + | int | 3362 |
| 13 | 112686200 | 112687200 | + | int | 3363 |
| 13 | 113524000 | 113525000 | + | Slc38a9 | 3364 |
| 13 | 114916600 | 114917600 | + | Arl15 | 3365 |
| 13 | 115458400 | 115459400 | + | int | 3366 |
| 13 | 116003200 | 116004400 | + | int | 3367 |
| 13 | 116097800 | 116098800 | + | int | 3368 |
| 13 | 116806400 | 116807400 | + | int | 3369 |
| 13 | 116887600 | 116888600 | + | int | 3370 |
| 13 | 117285400 | 117286600 | + | int | 3371 |
| 13 | 117304600 | 117305600 | + | int | 3372 |
| 13 | 117335200 | 117336200 | + | int | 3373 |
| 13 | 117418400 | 117419400 | + | int | 3374 |
| 13 | 117599600 | 117601200 | + | int | 3375 |
| 13 | 117932400 | 117933600 | + | int | 3376 |
| 13 | 118017600 | 118018600 | + | Emb | 3377 |
| 13 | 118305400 | 118306800 | + | int | 3378 |
| 13 | 119067400 | 119068400 | + | int | 3379 |
| 13 | 119402000 | 119403200 | + | int | 3380 |
| 13 | 119867600 | 119868600 | + | int | 3381 |
| 13 | 120260800 | 120261800 | + | 4833420G17Rik | 3382 |
| 14 | 3120400 | 3121400 | + | int | 3383 |
| 14 | 4285000 | 4286200 | + | int | 3384 |
| 14 | 5338600 | 5339800 | + | int | 3385 |
| 14 | 5377200 | 5378200 | + | int | 3386 |
| 14 | 6093600 | 6094600 | + | int | 3387 |
| 14 | 6169800 | 6171000 | + | int | 3388 |
| 14 | 7378400 | 7379400 | + | int | 3389 |
| 14 | 7820800 | 7821800 | + | int | 3390 |
| 14 | 8261600 | 8262800 | + | int | 3391 |
| 14 | 8490400 | 8491600 | + | int | 3392 |
| 14 | 9118400 | 9120200 | + | int | 3393 |
| 14 | 9124400 | 9125400 | + | int | 3394 |
| 14 | 10548400 | 10549400 | − | Fhit | 3395 |
| 14 | 11668200 | 11669200 | − | Fhit | 3396 |
| 14 | 12212000 | 12213000 | + | int | 3397 |
| 14 | 14458800 | 14460200 | + | int | 3398 |
| 14 | 14599200 | 14601000 | + | int | 3399 |
| 14 | 15022000 | 15023000 | + | int | 3400 |
| 14 | 15245600 | 15246800 | + | int | 3401 |
| 14 | 16190200 | 16191400 | − | Lrrc3b | 3402 |
| 14 | 16387600 | 16388600 | + | int | 3403 |
| 14 | 16433600 | 16434600 | + | int | 3404 |
| 14 | 16649400 | 16650400 | + | int | 3405 |
| 14 | 17739200 | 17740200 | + | int | 3406 |
| 14 | 19600000 | 19601600 | − | Ube2e2 | 3407 |
| 14 | 22819000 | 22820200 | + | int | 3408 |
| 14 | 22892600 | 22893800 | + | 1700112E06Rik | 3409 |
| 14 | 25568600 | 25569600 | + | int | 3410 |
| 14 | 28751600 | 28753000 | + | Erc2 | 3411 |
| 14 | 28774000 | 28775200 | + | Erc2 | 3412 |
| 14 | 29960600 | 29962200 | − | Cacna2d3 | 3413 |
| 14 | 32122800 | 32123800 | − | Dnahc1 | 3414 |
| 14 | 32134200 | 32135200 | − | Dnahc1 | 3415 |
| 14 | 33773200 | 33774200 | − | Wdfy4 | 3416 |
| 14 | 34378200 | 34379400 | + | int | 3417 |
| 14 | 35979600 | 35980600 | + | Grid1 | 3418 |
| 14 | 36831200 | 36832400 | + | int | 3419 |
| 14 | 37661800 | 37662800 | + | int | 3420 |
| 14 | 37683400 | 37685000 | + | int | 3421 |
| 14 | 37902600 | 37903600 | − | Cdhr1 | 3422 |
| 14 | 38389400 | 38390400 | + | int | 3423 |
| 14 | 38449000 | 38450000 | + | int | 3424 |
| 14 | 39302200 | 39303200 | − | Nrg3 | 3425 |
| 14 | 39909800 | 39910800 | − | Nrg3 | 3426 |
| 14 | 40501400 | 40502600 | + | int | 3427 |
| 14 | 40524600 | 40526200 | + | int | 3428 |
| 14 | 40670600 | 40671600 | + | int | 3429 |
| 14 | 40774400 | 40775800 | + | int | 3430 |
| 14 | 40903600 | 40904600 | + | int | 3431 |
| 14 | 40959200 | 40960200 | + | int | 3432 |
| 14 | 42962800 | 42964400 | + | int | 3433 |
| 14 | 43352600 | 43353600 | + | int | 3434 |
| 14 | 43928000 | 43929600 | + | int | 3435 |
| 14 | 43946800 | 43947800 | + | int | 3436 |
| 14 | 44074800 | 44075800 | + | int | 3437 |
| 14 | 44109000 | 44110600 | + | int | 3438 |
| 14 | 44745400 | 44746400 | − | 4930503E14Rik | 3439 |
| 14 | 45810800 | 45811800 | − | Txndc16 | 3440 |
| 14 | 46728000 | 46729800 | + | int | 3441 |
| 14 | 48396400 | 48397800 | + | int | 3442 |
| 14 | 48512600 | 48513600 | + | int | 3443 |
| 14 | 48641000 | 48642200 | + | int | 3444 |
| 14 | 48654600 | 48655600 | + | int | 3445 |
| 14 | 50314000 | 50315400 | − | 3632451O06Rik | 3446 |
| 14 | 50465200 | 50466600 | + | int | 3447 |
| 14 | 50693400 | 50695600 | + | int | 3448 |
| 14 | 51165200 | 51166200 | + | int | 3449 |
| 14 | 51618800 | 51619800 | + | int | 3450 |
| 14 | 53090800 | 53091800 | + | int | 3451 |
| 14 | 53605000 | 53606600 | + | int | 3452 |
| 14 | 53916200 | 53917800 | + | int | 3453 |
| 14 | 54028800 | 54029800 | + | int | 3454 |
| 14 | 54495600 | 54496800 | + | int | 3455 |
| 14 | 54554800 | 54556400 | + | int | 3456 |
| 14 | 54917800 | 54919200 | + | int | 3457 |
| 14 | 55668400 | 55669400 | + | int | 3458 |
| 14 | 56869200 | 56870200 | + | int | 3459 |
| 14 | 57068800 | 57069800 | + | Rnf17 | 3460 |
| 14 | 57897000 | 57898000 | − | Cryl1 | 3461 |
| 14 | 57899200 | 57900200 | − | Cryl1 | 3462 |
| 14 | 59704400 | 59705400 | + | int | 3463 |
| 14 | 61864600 | 61865600 | − | Sgcg | 3464 |
| 14 | 62008800 | 62009800 | − | Kpna3 | 3465 |
| 14 | 62540000 | 62541000 | + | int | 3466 |
| 14 | 62558800 | 62560200 | + | int | 3467 |
| 14 | 64421800 | 64423000 | + | Xkr6 | 3468 |
| 14 | 65658000 | 65659000 | + | Ints9 | 3469 |
| 14 | 66963400 | 66964400 | + | Stmn4 | 3470 |
| 14 | 69690800 | 69691800 | + | int | 3471 |
| 14 | 70162400 | 70163400 | + | int | 3472 |
| 14 | 71180200 | 71181600 | + | int | 3473 |
| 14 | 71804000 | 71805200 | + | int | 3474 |
| 14 | 71947800 | 71948800 | + | int | 3475 |
| 14 | 73127800 | 73129000 | + | int | 3476 |
| 14 | 73562000 | 73563200 | + | Rcbtb2 | 3477 |
| 14 | 73562000 | 73563200 | + | Rcbtb2 | 3478 |
| 14 | 79851600 | 79853000 | + | Gm5465 | 3479 |
| 14 | 80785600 | 80786600 | + | int | 3480 |
| 14 | 81186800 | 81188000 | + | int | 3481 |
| 14 | 81446000 | 81447200 | + | int | 3482 |
| 14 | 81526000 | 81527200 | + | int | 3483 |
| 14 | 81536000 | 81537000 | + | int | 3484 |
| 14 | 81952800 | 81954200 | + | int | 3485 |
| 14 | 82137000 | 82138000 | + | int | 3486 |
| 14 | 82298000 | 82299400 | + | int | 3487 |
| 14 | 82456800 | 82457800 | + | int | 3488 |
| 14 | 82643400 | 82644400 | + | int | 3489 |
| 14 | 82805800 | 82807200 | + | int | 3490 |
| 14 | 83027000 | 83028000 | + | int | 3491 |
| 14 | 83198400 | 83199400 | + | int | 3492 |
| 14 | 83295800 | 83296800 | + | int | 3493 |
| 14 | 83304200 | 83305200 | + | int | 3494 |
| 14 | 83441000 | 83442600 | + | int | 3495 |
| 14 | 83648200 | 83649200 | + | int | 3496 |
| 14 | 83683400 | 83684600 | + | int | 3497 |
| 14 | 83701800 | 83702800 | + | int | 3498 |
| 14 | 84033600 | 84034600 | + | int | 3499 |
| 14 | 84228000 | 84229600 | + | int | 3500 |
| 14 | 84300000 | 84301200 | + | int | 3501 |
| 14 | 84329400 | 84330400 | + | int | 3502 |
| 14 | 84357000 | 84358000 | + | int | 3503 |
| 14 | 84413200 | 84414600 | + | int | 3504 |
| 14 | 84426400 | 84428000 | + | int | 3505 |
| 14 | 84442400 | 84444000 | + | int | 3506 |
| 14 | 84532200 | 84533200 | + | int | 3507 |
| 14 | 84555800 | 84556800 | + | int | 3508 |
| 14 | 84601000 | 84602600 | + | int | 3509 |
| 14 | 84702400 | 84703600 | + | int | 3510 |
| 14 | 84761600 | 84763000 | + | int | 3511 |
| 14 | 85025600 | 85026600 | + | int | 3512 |
| 14 | 85058600 | 85060200 | + | int | 3513 |
| 14 | 85222000 | 85223400 | + | int | 3514 |
| 14 | 85878400 | 85879600 | + | int | 3515 |
| 14 | 86057800 | 86059000 | + | int | 3516 |
| 14 | 86149600 | 86150600 | + | int | 3517 |
| 14 | 86207000 | 86208200 | + | int | 3518 |
| 14 | 87291200 | 87292200 | − | Diap3 | 3519 |
| 14 | 87335800 | 87336800 | − | Diap3 | 3520 |
| 14 | 88211000 | 88212000 | + | int | 3521 |
| 14 | 88663000 | 88664000 | + | int | 3522 |
| 14 | 89573400 | 89574800 | + | int | 3523 |
| 14 | 89861000 | 89862000 | + | int | 3524 |
| 14 | 89957200 | 89958200 | + | int | 3525 |
| 14 | 90041400 | 90042800 | + | int | 3526 |
| 14 | 90109400 | 90110600 | + | int | 3527 |
| 14 | 90438600 | 90439600 | + | int | 3528 |
| 14 | 90674200 | 90675200 | + | int | 3529 |
| 14 | 90694400 | 90695600 | + | int | 3530 |
| 14 | 91157000 | 91158800 | + | int | 3531 |
| 14 | 91565200 | 91566600 | + | int | 3532 |
| 14 | 92009200 | 92010200 | + | int | 3533 |
| 14 | 92215800 | 92217000 | + | int | 3534 |
| 14 | 92439400 | 92440400 | + | int | 3535 |
| 14 | 92489200 | 92490200 | + | int | 3536 |
| 14 | 94033800 | 94035000 | − | Pcdh9 | 3537 |
| 14 | 94240000 | 94241000 | − | Pcdh9 | 3538 |
| 14 | 94264600 | 94266400 | − | Pcdh9 | 3539 |
| 14 | 94756400 | 94757600 | + | int | 3540 |
| 14 | 94809000 | 94810400 | + | int | 3541 |
| 14 | 94813400 | 94814400 | + | int | 3542 |
| 14 | 95263400 | 95264400 | + | int | 3543 |
| 14 | 95504400 | 95505400 | + | int | 3544 |
| 14 | 96336000 | 96337000 | + | int | 3545 |
| 14 | 96347400 | 96348400 | + | int | 3546 |
| 14 | 96553000 | 96554200 | − | Klhl1 | 3547 |
| 14 | 97006000 | 97007000 | + | int | 3548 |
| 14 | 97099200 | 97100400 | + | int | 3549 |
| 14 | 97514200 | 97515200 | + | int | 3550 |
| 14 | 97591600 | 97593200 | + | int | 3551 |
| 14 | 97894000 | 97895400 | + | int | 3552 |
| 14 | 98609400 | 98610400 | + | int | 3553 |
| 14 | 98942000 | 98943000 | + | int | 3554 |
| 14 | 99548400 | 99549400 | + | Pibf1 | 3555 |
| 14 | 99548400 | 99549400 | + | Pibf1 | 3556 |
| 14 | 99962400 | 99963400 | + | int | 3557 |
| 14 | 100273200 | 100274400 | − | Klf12 | 3558 |
| 14 | 101003000 | 101004000 | + | int | 3559 |
| 14 | 102856400 | 102857400 | + | int | 3560 |
| 14 | 103041400 | 103042800 | + | int | 3561 |
| 14 | 103283600 | 103284600 | + | int | 3562 |
| 14 | 103303200 | 103304600 | + | int | 3563 |
| 14 | 103501400 | 103502400 | − | Fbxl3 | 3564 |
| 14 | 103813400 | 103814400 | + | int | 3565 |
| 14 | 104688000 | 104689000 | + | int | 3566 |
| 14 | 104721200 | 104722400 | + | int | 3567 |
| 14 | 105098400 | 105099600 | + | D130009I18Rik | 3568 |
| 14 | 106492600 | 106493600 | + | int | 3569 |
| 14 | 106516800 | 106518400 | + | int | 3570 |
| 14 | 106807000 | 106808000 | + | int | 3571 |
| 14 | 106963000 | 106964400 | + | int | 3572 |
| 14 | 107129200 | 107130800 | + | int | 3573 |
| 14 | 107303800 | 107304800 | + | int | 3574 |
| 14 | 107539400 | 107540400 | + | int | 3575 |
| 14 | 107786600 | 107788200 | + | int | 3576 |
| 14 | 107825800 | 107827400 | + | int | 3577 |
| 14 | 107892000 | 107893200 | + | int | 3578 |
| 14 | 108258000 | 108259000 | + | int | 3579 |
| 14 | 108485600 | 108486600 | + | int | 3580 |
| 14 | 108845600 | 108846600 | + | int | 3581 |
| 14 | 109550800 | 109552200 | + | int | 3582 |
| 14 | 109921600 | 109922600 | + | int | 3583 |
| 14 | 110198000 | 110199000 | + | int | 3584 |
| 14 | 110928000 | 110929000 | + | int | 3585 |
| 14 | 111221200 | 111222400 | + | int | 3586 |
| 14 | 111345600 | 111347200 | + | int | 3587 |
| 14 | 111582600 | 111584000 | + | int | 3588 |
| 14 | 112073200 | 112074200 | + | Slitrk5 | 3589 |
| 14 | 112480200 | 112481200 | + | int | 3590 |
| 14 | 113105800 | 113107600 | + | int | 3591 |
| 14 | 113395000 | 113396200 | + | int | 3592 |
| 14 | 114171400 | 114173000 | + | int | 3593 |
| 14 | 114580600 | 114581800 | + | int | 3594 |
| 14 | 115040600 | 115042000 | + | int | 3595 |
| 14 | 115222800 | 115224200 | + | int | 3596 |
| 14 | 115693600 | 115695000 | + | Gpc5 | 3597 |
| 14 | 116083600 | 116084600 | + | Gpc5 | 3598 |
| 14 | 116305600 | 116306600 | + | Gpc5 | 3599 |
| 14 | 116913800 | 116914800 | + | Gpc5 | 3600 |
| 14 | 116941200 | 116942200 | + | int | 3601 |
| 14 | 117140200 | 117141600 | + | int | 3602 |
| 14 | 117203800 | 117205000 | + | int | 3603 |
| 14 | 117213200 | 117214400 | + | int | 3604 |
| 14 | 118655000 | 118656000 | + | int | 3605 |
| 14 | 118959000 | 118960000 | − | Abcc4 | 3606 |
| 14 | 118959000 | 118960000 | − | Abcc4 | 3607 |
| 14 | 119430200 | 119431200 | − | Uggt2 | 3608 |
| 14 | 119630000 | 119631000 | + | Hs6st3 | 3609 |
| 14 | 119695200 | 119696200 | + | Hs6st3 | 3610 |
| 14 | 120228000 | 120229000 | + | Hs6st3 | 3611 |
| 14 | 120385600 | 120386600 | + | int | 3612 |
| 14 | 120968800 | 120969800 | + | int | 3613 |
| 14 | 121111800 | 121112800 | + | int | 3614 |
| 14 | 122576000 | 122577200 | + | int | 3615 |
| 14 | 123027200 | 123028400 | + | Pcca | 3616 |
| 14 | 123560000 | 123561000 | + | int | 3617 |
| 14 | 123879600 | 123880600 | − | Nalcn | 3618 |
| 15 | 3894400 | 3895600 | + | int | 3619 |
| 15 | 6677600 | 6678600 | + | Rictor | 3620 |
| 15 | 6755200 | 6756200 | + | int | 3621 |
| 15 | 8118400 | 8119400 | + | 2410089E03Rik | 3622 |
| 15 | 9130000 | 9131000 | + | int | 3623 |
| 15 | 9669000 | 9670000 | − | Spef2 | 3624 |
| 15 | 11142600 | 11144200 | + | Adamts12 | 3625 |
| 15 | 13450000 | 13451200 | + | int | 3626 |
| 15 | 13512600 | 13513800 | + | int | 3627 |
| 15 | 13615600 | 13616800 | + | int | 3628 |
| 15 | 14181400 | 14182400 | + | int | 3629 |
| 15 | 14248200 | 14249200 | + | int | 3630 |
| 15 | 14548800 | 14549800 | + | int | 3631 |
| 15 | 14785600 | 14786600 | + | int | 3632 |
| 15 | 14855800 | 14857600 | + | int | 3633 |
| 15 | 14918000 | 14919200 | + | int | 3634 |
| 15 | 15064800 | 15065800 | + | int | 3635 |
| 15 | 15363400 | 15365000 | + | int | 3636 |
| 15 | 15656800 | 15658200 | + | int | 3637 |
| 15 | 15804800 | 15806200 | + | int | 3638 |
| 15 | 16123600 | 16124800 | + | int | 3639 |
| 15 | 16191600 | 16193000 | + | int | 3640 |
| 15 | 16552000 | 16553200 | + | int | 3641 |
| 15 | 16588200 | 16589400 | + | int | 3642 |
| 15 | 16634400 | 16636000 | + | int | 3643 |
| 15 | 16736000 | 16737000 | + | Cdh9 | 3644 |
| 15 | 16816200 | 16817200 | + | int | 3645 |
| 15 | 17426800 | 17427800 | + | int | 3646 |
| 15 | 17875000 | 17876000 | + | int | 3647 |
| 15 | 17884600 | 17886000 | + | int | 3648 |
| 15 | 17909400 | 17910800 | + | int | 3649 |
| 15 | 19275200 | 19276200 | + | int | 3650 |
| 15 | 19457600 | 19458800 | + | int | 3651 |
| 15 | 19515200 | 19516200 | + | int | 3652 |
| 15 | 19541000 | 19542000 | + | int | 3653 |
| 15 | 19715400 | 19716600 | + | int | 3654 |
| 15 | 19768000 | 19769000 | + | int | 3655 |
| 15 | 19849200 | 19850600 | + | int | 3656 |
| 15 | 20131400 | 20132600 | + | int | 3657 |
| 15 | 20298600 | 20300200 | + | int | 3658 |
| 15 | 20365600 | 20366600 | + | int | 3659 |
| 15 | 20452000 | 20453000 | + | int | 3660 |
| 15 | 20578000 | 20579000 | + | int | 3661 |
| 15 | 20740200 | 20741200 | + | int | 3662 |
| 15 | 21491600 | 21493200 | + | Cdh12 | 3663 |
| 15 | 21558400 | 21559400 | + | int | 3664 |
| 15 | 21607600 | 21608600 | + | int | 3665 |
| 15 | 21627400 | 21628400 | + | int | 3666 |
| 15 | 21655400 | 21656800 | + | int | 3667 |
| 15 | 21929400 | 21930400 | + | int | 3668 |
| 15 | 22380800 | 22381800 | + | int | 3669 |
| 15 | 22487600 | 22488600 | + | int | 3670 |
| 15 | 22543200 | 22544400 | + | int | 3671 |
| 15 | 22630200 | 22631600 | + | int | 3672 |
| 15 | 22633400 | 22635000 | + | int | 3673 |
| 15 | 22705400 | 22706600 | + | int | 3674 |
| 15 | 23066600 | 23067600 | + | Cdh18 | 3675 |
| 15 | 23286200 | 23287200 | + | Cdh18 | 3676 |
| 15 | 23437800 | 23438800 | + | int | 3677 |
| 15 | 23792200 | 23793600 | + | int | 3678 |
| 15 | 23928200 | 23929400 | + | int | 3679 |
| 15 | 23968400 | 23969600 | + | int | 3680 |
| 15 | 24119600 | 24120800 | + | int | 3681 |
| 15 | 24363400 | 24364400 | + | int | 3682 |
| 15 | 24561400 | 24562600 | + | int | 3683 |
| 15 | 24823200 | 24824200 | + | int | 3684 |
| 15 | 24922600 | 24923600 | + | int | 3685 |
| 15 | 25174800 | 25176200 | + | int | 3686 |
| 15 | 26658400 | 26659600 | − | Fbxl7 | 3687 |
| 15 | 27127200 | 27128400 | + | int | 3688 |
| 15 | 28481400 | 28483000 | + | int | 3689 |
| 15 | 28618400 | 28619400 | + | int | 3690 |
| 15 | 28853400 | 28854800 | + | int | 3691 |
| 15 | 28880200 | 28881400 | + | int | 3692 |
| 15 | 29101200 | 29102200 | + | int | 3693 |
| 15 | 30016400 | 30018200 | + | int | 3694 |
| 15 | 30879200 | 30880400 | + | Ctnnd2 | 3695 |
| 15 | 32152200 | 32153400 | + | int | 3696 |
| 15 | 32743600 | 32744600 | + | int | 3697 |
| 15 | 33305800 | 33306800 | + | Pgcp | 3698 |
| 15 | 33423000 | 33424000 | + | Pgcp | 3699 |
| 15 | 33461800 | 33462800 | + | Pgcp | 3700 |
| 15 | 35119000 | 35120000 | + | int | 3701 |
| 15 | 35668600 | 35669800 | + | Vps13b | 3702 |
| 15 | 37207000 | 37208000 | + | Grhl2 | 3703 |
| 15 | 39268400 | 39269800 | + | Rims2 | 3704 |
| 15 | 39279800 | 39281200 | + | Rims2 | 3705 |
| 15 | 40339200 | 40340200 | + | int | 3706 |
| 15 | 40603400 | 40604400 | + | Zfpm2 | 3707 |
| 15 | 40695200 | 40696400 | + | Zfpm2 | 3708 |
| 15 | 41232400 | 41233400 | + | int | 3709 |
| 15 | 41834800 | 41836000 | + | int | 3710 |
| 15 | 43404000 | 43405600 | + | int | 3711 |
| 15 | 43561000 | 43562000 | + | int | 3712 |
| 15 | 43744000 | 43745200 | + | int | 3713 |
| 15 | 43850200 | 43851400 | + | int | 3714 |
| 15 | 44177600 | 44178800 | + | int | 3715 |
| 15 | 44411200 | 44412200 | + | Pkhd1l1 | 3716 |
| 15 | 44561600 | 44562600 | − | Sybu | 3717 |
| 15 | 44561600 | 44562600 | − | Sybu | 3718 |
| 15 | 45062600 | 45063600 | + | int | 3719 |
| 15 | 45093000 | 45094200 | + | int | 3720 |
| 15 | 45182800 | 45184000 | + | int | 3721 |
| 15 | 45311600 | 45312600 | + | int | 3722 |
| 15 | 45364000 | 45365200 | + | int | 3723 |
| 15 | 45786800 | 45787800 | + | int | 3724 |
| 15 | 45810400 | 45811800 | + | int | 3725 |
| 15 | 45851200 | 45852600 | + | int | 3726 |
| 15 | 45857400 | 45858600 | + | int | 3727 |
| 15 | 46060800 | 46061800 | + | int | 3728 |
| 15 | 46100200 | 46101200 | + | int | 3729 |
| 15 | 46111600 | 46112600 | + | int | 3730 |
| 15 | 46274600 | 46275600 | + | int | 3731 |
| 15 | 46295600 | 46296800 | + | int | 3732 |
| 15 | 46390600 | 46391600 | + | int | 3733 |
| 15 | 46482400 | 46483400 | + | int | 3734 |
| 15 | 46498200 | 46499400 | + | int | 3735 |
| 15 | 46572600 | 46573600 | + | int | 3736 |
| 15 | 46770400 | 46771600 | + | int | 3737 |
| 15 | 46833000 | 46834000 | + | int | 3738 |
| 15 | 46931800 | 46932800 | + | int | 3739 |
| 15 | 47020600 | 47022000 | + | int | 3740 |
| 15 | 47293400 | 47294600 | + | int | 3741 |
| 15 | 47948800 | 47950200 | − | Csmd3 | 3742 |
| 15 | 47972800 | 47973800 | − | Csmd3 | 3743 |
| 15 | 48159800 | 48161000 | − | Csmd3 | 3744 |
| 15 | 48454800 | 48455800 | − | Csmd3 | 3745 |
| 15 | 49030000 | 49031200 | + | int | 3746 |
| 15 | 49121000 | 49122000 | + | int | 3747 |
| 15 | 49161200 | 49162600 | + | int | 3748 |
| 15 | 49163800 | 49165000 | + | int | 3749 |
| 15 | 49184400 | 49186000 | + | int | 3750 |
| 15 | 49456000 | 49457000 | + | int | 3751 |
| 15 | 49888000 | 49889200 | + | int | 3752 |
| 15 | 50166800 | 50168000 | + | int | 3753 |
| 15 | 50653400 | 50654400 | − | Trps1 | 3754 |
| 15 | 50677400 | 50678800 | − | Trps1 | 3755 |
| 15 | 50820600 | 50821800 | + | int | 3756 |
| 15 | 50924000 | 50925200 | + | int | 3757 |
| 15 | 52437000 | 52438200 | + | int | 3758 |
| 15 | 53396600 | 53397800 | − | Samd12 | 3759 |
| 15 | 53766200 | 53767600 | + | int | 3760 |
| 15 | 54603800 | 54604800 | + | int | 3761 |
| 15 | 54633400 | 54634600 | + | int | 3762 |
| 15 | 55930200 | 55931200 | + | int | 3763 |
| 15 | 56235600 | 56236600 | + | int | 3764 |
| 15 | 56246000 | 56247200 | + | int | 3765 |
| 15 | 56271000 | 56272200 | + | int | 3766 |
| 15 | 56371000 | 56372000 | + | int | 3767 |
| 15 | 56385400 | 56386400 | + | int | 3768 |
| 15 | 56732400 | 56733400 | + | int | 3769 |
| 15 | 57135600 | 57136800 | − | BC026439 | 3770 |
| 15 | 58153800 | 58154800 | − | Klhl38 | 3771 |
| 15 | 58358000 | 58359400 | + | int | 3772 |
| 15 | 61946000 | 61947000 | + | Pvt1 | 3773 |
| 15 | 62437000 | 62438000 | + | int | 3774 |
| 15 | 62448800 | 62450000 | + | int | 3775 |
| 15 | 63736000 | 63737000 | − | Gsdmc4 | 3776 |
| 15 | 65262000 | 65263400 | + | int | 3777 |
| 15 | 66405800 | 66406800 | + | Phf20l1 | 3778 |
| 15 | 67739000 | 67740000 | + | int | 3779 |
| 15 | 67863400 | 67864400 | + | int | 3780 |
| 15 | 68566400 | 68567400 | + | int | 3781 |
| 15 | 69325000 | 69326200 | + | int | 3782 |
| 15 | 69454200 | 69455400 | + | int | 3783 |
| 15 | 69574000 | 69575000 | + | int | 3784 |
| 15 | 69872200 | 69873200 | + | int | 3785 |
| 15 | 69908400 | 69909600 | + | int | 3786 |
| 15 | 73370400 | 73371400 | + | Dennd3 | 3787 |
| 15 | 74293200 | 74294200 | + | int | 3788 |
| 15 | 74916400 | 74918000 | + | int | 3789 |
| 15 | 75156600 | 75157800 | + | int | 3790 |
| 15 | 80068800 | 80070000 | + | Smcr7l | 3791 |
| 15 | 81519800 | 81520800 | − | Chadl | 3792 |
| 15 | 81802800 | 81803800 | + | int | 3793 |
| 15 | 82383200 | 82384200 | + | Cyp2d12 | 3794 |
| 15 | 82490400 | 82492000 | + | int | 3795 |
| 15 | 83481400 | 83482400 | − | Scube1 | 3796 |
| 15 | 84042200 | 84043200 | + | Samm50 | 3797 |
| 15 | 84236200 | 84237200 | − | 1810041L15Rik | 3798 |
| 15 | 85114200 | 85115400 | + | Fbln1 | 3799 |
| 15 | 85565400 | 85566400 | + | Ppara | 3800 |
| 15 | 85565400 | 85566400 | + | Ppara | 3801 |
| 15 | 85816400 | 85817600 | − | Celsr1 | 3802 |
| 15 | 86024600 | 86026200 | + | int | 3803 |
| 15 | 86457200 | 86458600 | + | int | 3804 |
| 15 | 87299800 | 87301000 | + | int | 3805 |
| 15 | 87793400 | 87794400 | + | int | 3806 |
| 15 | 87976200 | 87977200 | + | int | 3807 |
| 15 | 90410400 | 90411400 | − | Cpne8 | 3808 |
| 15 | 91359200 | 91360200 | − | Slc2a13 | 3809 |
| 15 | 91550400 | 91551400 | + | Lrrk2 | 3810 |
| 15 | 91553400 | 91554400 | + | Lrrk2 | 3811 |
| 15 | 95381200 | 95382200 | + | int | 3812 |
| 15 | 95697800 | 95698800 | + | Ano6 | 3813 |
| 15 | 97567200 | 97568200 | + | int | 3814 |
| 15 | 98692800 | 98693800 | − | Mll2 | 3815 |
| 15 | 99565400 | 99567200 | − | Lass5 | 3816 |
| 15 | 100231200 | 100232400 | − | Slc11a2 | 3817 |
| 15 | 100231200 | 100232400 | − | Slc11a2 | 3818 |
| 15 | 100660600 | 100661600 | + | int | 3819 |
| 15 | 101465200 | 101466200 | − | Krt85 | 3820 |
| 15 | 102743200 | 102744200 | + | int | 3821 |
| 15 | 103276000 | 103277200 | − | BC048502 | 3822 |
| 16 | 3258800 | 3260000 | + | int | 3823 |
| 16 | 4154800 | 4155800 | − | Crebbp | 3824 |
| 16 | 4278200 | 4279400 | + | int | 3825 |
| 16 | 5667800 | 5668800 | + | int | 3826 |
| 16 | 7606200 | 7607800 | + | int | 3827 |
| 16 | 7910000 | 7911200 | + | int | 3828 |
| 16 | 9222000 | 9223600 | + | int | 3829 |
| 16 | 11143200 | 11145000 | − | Zc3h7a | 3830 |
| 16 | 11422200 | 11423400 | + | Snx29 | 3831 |
| 16 | 12730000 | 12731000 | + | int | 3832 |
| 16 | 13216200 | 13217400 | + | int | 3833 |
| 16 | 14261000 | 14262200 | − | Myh11 | 3834 |
| 16 | 14605200 | 14606400 | + | A630010A05Rik | 3835 |
| 16 | 14633000 | 14634400 | + | int | 3836 |
| 16 | 15118000 | 15119200 | + | int | 3837 |
| 16 | 15141200 | 15142200 | + | int | 3838 |
| 16 | 16189600 | 16190800 | + | int | 3839 |
| 16 | 16441400 | 16442400 | − | Fgd4 | 3840 |
| 16 | 16441400 | 16442400 | − | Fgd4 | 3841 |
| 16 | 19690000 | 19691200 | − | Lamp3 | 3842 |
| 16 | 22734200 | 22735200 | + | int | 3843 |
| 16 | 22736600 | 22737600 | + | int | 3844 |
| 16 | 23191400 | 23192600 | + | int | 3845 |
| 16 | 23872600 | 23874000 | + | int | 3846 |
| 16 | 25479800 | 25481400 | + | int | 3847 |
| 16 | 25892400 | 25894000 | + | int | 3848 |
| 16 | 26450200 | 26451200 | + | int | 3849 |
| 16 | 27017200 | 27018200 | + | int | 3850 |
| 16 | 27301800 | 27302800 | + | int | 3851 |
| 16 | 28126400 | 28127400 | + | int | 3852 |
| 16 | 29485200 | 29486400 | − | Atp13a4 | 3853 |
| 16 | 29485200 | 29486400 | − | Atp13a4 | 3854 |
| 16 | 31719200 | 31720400 | + | Dlg1 | 3855 |
| 16 | 31725000 | 31726000 | + | Dlg1 | 3856 |
| 16 | 32535600 | 32536600 | + | int | 3857 |
| 16 | 37156800 | 37157800 | − | Stxbp5l | 3858 |
| 16 | 37384600 | 37385800 | − | Stxbp5l | 3859 |
| 16 | 38496600 | 38497600 | + | int | 3860 |
| 16 | 39742200 | 39743200 | + | int | 3861 |
| 16 | 40202200 | 40203400 | + | int | 3862 |
| 16 | 40218600 | 40220200 | + | int | 3863 |
| 16 | 40256600 | 40257600 | + | int | 3864 |
| 16 | 41168200 | 41169200 | + | int | 3865 |
| 16 | 41306800 | 41308000 | + | int | 3866 |
| 16 | 41848800 | 41849800 | + | Lsamp | 3867 |
| 16 | 42038600 | 42040000 | + | Lsamp | 3868 |
| 16 | 42907200 | 42908200 | + | int | 3869 |
| 16 | 44832600 | 44834000 | + | Cd200r4 | 3870 |
| 16 | 45188600 | 45189600 | + | Atg3 | 3871 |
| 16 | 46584600 | 46585600 | + | int | 3872 |
| 16 | 47108200 | 47109200 | + | int | 3873 |
| 16 | 47119600 | 47120800 | + | int | 3874 |
| 16 | 47187400 | 47188800 | + | int | 3875 |
| 16 | 47432000 | 47433200 | + | int | 3876 |
| 16 | 48783400 | 48784400 | + | int | 3877 |
| 16 | 48835200 | 48836200 | + | int | 3878 |
| 16 | 49544200 | 49545200 | + | int | 3879 |
| 16 | 51792800 | 51794000 | + | int | 3880 |
| 16 | 53009200 | 53010400 | + | int | 3881 |
| 16 | 53064000 | 53065000 | + | int | 3882 |
| 16 | 53176600 | 53177800 | + | int | 3883 |
| 16 | 53253600 | 53254800 | + | int | 3884 |
| 16 | 53476800 | 53477800 | + | int | 3885 |
| 16 | 53694200 | 53695600 | + | int | 3886 |
| 16 | 53805000 | 53806200 | + | int | 3887 |
| 16 | 54239200 | 54240600 | + | int | 3888 |
| 16 | 54337400 | 54338400 | + | int | 3889 |
| 16 | 54464400 | 54465800 | + | int | 3890 |
| 16 | 54549000 | 54550200 | + | int | 3891 |
| 16 | 54590000 | 54591000 | + | int | 3892 |
| 16 | 55008000 | 55009000 | + | int | 3893 |
| 16 | 56489800 | 56490800 | + | Abi3bp | 3894 |
| 16 | 56690200 | 56691600 | + | Abi3bp | 3895 |
| 16 | 56690200 | 56691600 | − | Tfg | 3896 |
| 16 | 56981600 | 56982600 | + | int | 3897 |
| 16 | 57390800 | 57392600 | + | Filip1l | 3898 |
| 16 | 57390800 | 57392600 | − | 2610528E23Rik | 3899 |
| 16 | 57768400 | 57769600 | + | int | 3900 |
| 16 | 59170200 | 59171400 | − | Olfr196 | 3901 |
| 16 | 59427600 | 59428600 | + | Gabrr3 | 3902 |
| 16 | 59793200 | 59794200 | − | Epha6 | 3903 |
| 16 | 60571000 | 60572200 | − | Epha6 | 3904 |
| 16 | 61020000 | 61021000 | + | int | 3905 |
| 16 | 61066200 | 61067400 | + | int | 3906 |
| 16 | 61144200 | 61145600 | + | int | 3907 |
| 16 | 61178200 | 61179400 | + | int | 3908 |
| 16 | 61193800 | 61195400 | + | int | 3909 |
| 16 | 61429000 | 61430000 | + | int | 3910 |
| 16 | 62077600 | 62078600 | + | int | 3911 |
| 16 | 62097200 | 62098200 | + | int | 3912 |
| 16 | 62483200 | 62484400 | + | int | 3913 |
| 16 | 63099200 | 63100400 | + | int | 3914 |
| 16 | 63169400 | 63170800 | + | int | 3915 |
| 16 | 63290800 | 63292200 | + | int | 3916 |
| 16 | 63531800 | 63532800 | + | int | 3917 |
| 16 | 64460200 | 64461200 | + | int | 3918 |
| 16 | 64473200 | 64474200 | + | int | 3919 |
| 16 | 65253200 | 65254600 | + | int | 3920 |
| 16 | 65404600 | 65405600 | + | int | 3921 |
| 16 | 65935400 | 65937000 | + | int | 3922 |
| 16 | 65945000 | 65946000 | + | int | 3923 |
| 16 | 66017200 | 66018200 | + | int | 3924 |
| 16 | 66201200 | 66202200 | + | int | 3925 |
| 16 | 66286600 | 66287600 | + | int | 3926 |
| 16 | 66369600 | 66371200 | + | int | 3927 |
| 16 | 66560200 | 66561400 | + | int | 3928 |
| 16 | 66806000 | 66807000 | − | Cadm2 | 3929 |
| 16 | 66827600 | 66828800 | − | Cadm2 | 3930 |
| 16 | 67844400 | 67845800 | + | int | 3931 |
| 16 | 67989800 | 67991200 | + | int | 3932 |
| 16 | 67994200 | 67995200 | + | int | 3933 |
| 16 | 67996400 | 67997800 | + | int | 3934 |
| 16 | 68164200 | 68165800 | + | int | 3935 |
| 16 | 68524200 | 68525200 | + | int | 3936 |
| 16 | 68755800 | 68756800 | + | int | 3937 |
| 16 | 69068600 | 69069600 | + | int | 3938 |
| 16 | 69257600 | 69259000 | + | int | 3939 |
| 16 | 69285200 | 69286600 | + | int | 3940 |
| 16 | 69863600 | 69864800 | − | Speer2 | 3941 |
| 16 | 69877600 | 69879000 | + | int | 3942 |
| 16 | 69954600 | 69955600 | + | int | 3943 |
| 16 | 70135400 | 70136800 | + | int | 3944 |
| 16 | 70200600 | 70202000 | + | int | 3945 |
| 16 | 70390400 | 70391400 | + | Gbe1 | 3946 |
| 16 | 70953600 | 70954600 | + | int | 3947 |
| 16 | 71135200 | 71136200 | + | int | 3948 |
| 16 | 71424000 | 71425000 | + | int | 3949 |
| 16 | 71516400 | 71517400 | + | int | 3950 |
| 16 | 71561400 | 71562800 | + | int | 3951 |
| 16 | 71564000 | 71565000 | + | int | 3952 |
| 16 | 72523200 | 72524600 | + | int | 3953 |
| 16 | 72612200 | 72613400 | + | int | 3954 |
| 16 | 74019000 | 74020000 | − | Robo2 | 3955 |
| 16 | 74307000 | 74308200 | − | Robo2 | 3956 |
| 16 | 74526200 | 74527600 | + | int | 3957 |
| 16 | 74922400 | 74923400 | + | int | 3958 |
| 16 | 75134000 | 75135600 | + | int | 3959 |
| 16 | 75368400 | 75369600 | + | int | 3960 |
| 16 | 75978000 | 75979000 | + | int | 3961 |
| 16 | 76585000 | 76586400 | + | int | 3962 |
| 16 | 77847000 | 77848000 | + | int | 3963 |
| 16 | 78075400 | 78076400 | + | int | 3964 |
| 16 | 79144600 | 79146200 | + | int | 3965 |
| 16 | 79824600 | 79825800 | + | int | 3966 |
| 16 | 79917800 | 79918800 | + | int | 3967 |
| 16 | 80116200 | 80117200 | + | int | 3968 |
| 16 | 80169600 | 80170600 | + | int | 3969 |
| 16 | 80397200 | 80398400 | + | int | 3970 |
| 16 | 80956000 | 80957000 | + | int | 3971 |
| 16 | 81151600 | 81152600 | + | int | 3972 |
| 16 | 81202400 | 81203400 | + | Ncam2 | 3973 |
| 16 | 81202400 | 81203400 | + | Ncam2 | 3974 |
| 16 | 81216400 | 81217400 | + | Ncam2 | 3975 |
| 16 | 81216400 | 81217400 | + | Ncam2 | 3976 |
| 16 | 81350200 | 81351200 | + | Ncam2 | 3977 |
| 16 | 81350200 | 81351200 | + | Ncam2 | 3978 |
| 16 | 81592600 | 81593600 | + | Ncam2 | 3979 |
| 16 | 81592600 | 81593600 | + | Ncam2 | 3980 |
| 16 | 81756800 | 81757800 | + | int | 3981 |
| 16 | 81916800 | 81918200 | + | int | 3982 |
| 16 | 81919400 | 81920800 | + | int | 3983 |
| 16 | 82075800 | 82077600 | + | int | 3984 |
| 16 | 82289200 | 82290200 | + | int | 3985 |
| 16 | 82441400 | 82442600 | + | int | 3986 |
| 16 | 82582400 | 82584000 | + | int | 3987 |
| 16 | 82596200 | 82597600 | + | int | 3988 |
| 16 | 82600400 | 82601600 | + | int | 3989 |
| 16 | 82645200 | 82646200 | + | int | 3990 |
| 16 | 82803000 | 82804400 | + | int | 3991 |
| 16 | 82839400 | 82840600 | + | int | 3992 |
| 16 | 83353800 | 83354800 | + | int | 3993 |
| 16 | 83521800 | 83523000 | + | int | 3994 |
| 16 | 83689200 | 83690200 | + | int | 3995 |
| 16 | 83701200 | 83702400 | + | int | 3996 |
| 16 | 83983800 | 83985000 | + | int | 3997 |
| 16 | 86178000 | 86179800 | + | int | 3998 |
| 16 | 86481000 | 86482000 | + | int | 3999 |
| 16 | 88283600 | 88284800 | − | Grik1 | 4000 |
| 16 | 89278400 | 89279400 | + | int | 4001 |
| 16 | 89631800 | 89632800 | + | int | 4002 |
| 16 | 89837000 | 89838200 | − | Tiam1 | 4003 |
| 16 | 89837000 | 89838200 | − | Tiam1 | 4004 |
| 16 | 90354400 | 90355400 | + | int | 4005 |
| 16 | 90468600 | 90469600 | + | Hunk | 4006 |
| 16 | 91003000 | 91004200 | − | Synj1 | 4007 |
| 16 | 91003000 | 91004200 | − | Synj1 | 4008 |
| 16 | 92979600 | 92980800 | + | int | 4009 |
| 16 | 93363800 | 93364800 | + | int | 4010 |
| 16 | 93623600 | 93624600 | + | int | 4011 |
| 16 | 93725800 | 93727200 | + | Dopey2 | 4012 |
| 16 | 93725800 | 93727200 | + | Dopey2 | 4013 |
| 16 | 94071400 | 94072400 | + | int | 4014 |
| 17 | 3076800 | 3078400 | − | Pisd-ps2 | 4015 |
| 17 | 3081800 | 3083000 | − | Pisd-ps2 | 4016 |
| 17 | 3267800 | 3269000 | + | int | 4017 |
| 17 | 4573200 | 4574400 | + | int | 4018 |
| 17 | 5232200 | 5233200 | + | Arid1b | 4019 |
| 17 | 5777000 | 5778000 | + | int | 4020 |
| 17 | 6300200 | 6301200 | + | Tmem181a | 4021 |
| 17 | 6333800 | 6335200 | + | int | 4022 |
| 17 | 6449400 | 6450600 | − | Tmem181b-ps | 4023 |
| 17 | 6515400 | 6516400 | + | int | 4024 |
| 17 | 6574000 | 6575200 | + | int | 4025 |
| 17 | 6677800 | 6678800 | + | int | 4026 |
| 17 | 6780000 | 6781400 | + | int | 4027 |
| 17 | 6883000 | 6884000 | + | Sytl3 | 4028 |
| 17 | 6911000 | 6912600 | + | Sytl3 | 4029 |
| 17 | 6911000 | 6912600 | + | Sytl3 | 4030 |
| 17 | 6911000 | 6912600 | + | Sytl3 | 4031 |
| 17 | 7093800 | 7094800 | + | int | 4032 |
| 17 | 7571000 | 7572000 | − | Gm9992 | 4033 |
| 17 | 7613000 | 7614000 | + | int | 4034 |
| 17 | 8761800 | 8762800 | + | int | 4035 |
| 17 | 10103200 | 10104200 | + | int | 4036 |
| 17 | 10501400 | 10503000 | − | Qk | 4037 |
| 17 | 10501400 | 10503000 | − | Qk | 4038 |
| 17 | 11493800 | 11494800 | + | Park2 | 4039 |
| 17 | 13244800 | 13246000 | − | Gpr31c | 4040 |
| 17 | 13291000 | 13294000 | + | Tcp10a | 4041 |
| 17 | 13291000 | 13294000 | − | Gm11166 | 4042 |
| 17 | 13314000 | 13315000 | + | Tcp10a | 4043 |
| 17 | 13314000 | 13315000 | − | Unc93a | 4044 |
| 17 | 13538200 | 13539600 | + | Tcp10a | 4045 |
| 17 | 13578400 | 13581600 | + | int | 4046 |
| 17 | 13599200 | 13600200 | + | int | 4047 |
| 17 | 14035600 | 14036600 | + | Mllt4 | 4048 |
| 17 | 14281200 | 14282200 | + | int | 4049 |
| 17 | 15123600 | 15125000 | + | 9030025P20Rik | 4050 |
| 17 | 15128600 | 15129600 | + | int | 4051 |
| 17 | 15154800 | 15156400 | + | Gm3435 | 4052 |
| 17 | 15160000 | 15161000 | + | int | 4053 |
| 17 | 16935800 | 16936800 | + | int | 4054 |
| 17 | 17641000 | 17644000 | + | int | 4055 |
| 17 | 18075600 | 18076600 | + | int | 4056 |
| 17 | 18423600 | 18424800 | + | int | 4057 |
| 17 | 18547200 | 18548200 | + | int | 4058 |
| 17 | 18567400 | 18568400 | + | Vmn2r95 | 4059 |
| 17 | 18619000 | 18620200 | + | int | 4060 |
| 17 | 18652200 | 18653400 | + | int | 4061 |
| 17 | 19164800 | 19165800 | + | int | 4062 |
| 17 | 19567200 | 19568200 | + | int | 4063 |
| 17 | 19723800 | 19725400 | + | Vmn2r101 | 4064 |
| 17 | 19789200 | 19790400 | + | int | 4065 |
| 17 | 19948400 | 19949600 | + | Vmn2r103 | 4066 |
| 17 | 20083600 | 20084800 | + | int | 4067 |
| 17 | 20311000 | 20312400 | + | int | 4068 |
| 17 | 20727600 | 20729200 | − | Vmn2r110 | 4069 |
| 17 | 20772800 | 20774400 | + | int | 4070 |
| 17 | 20794800 | 20796000 | + | int | 4071 |
| 17 | 20845400 | 20846400 | + | int | 4072 |
| 17 | 20869400 | 20871000 | + | Vmn1r227 | 4073 |
| 17 | 20905400 | 20906600 | + | int | 4074 |
| 17 | 20983800 | 20985000 | + | Vmn1r230 | 4075 |
| 17 | 21009800 | 21010800 | + | int | 4076 |
| 17 | 21201800 | 21202800 | + | int | 4077 |
| 17 | 21294600 | 21295800 | + | int | 4078 |
| 17 | 21317800 | 21319000 | + | int | 4079 |
| 17 | 21347600 | 21348800 | + | int | 4080 |
| 17 | 21402000 | 21403000 | + | int | 4081 |
| 17 | 22688200 | 22689200 | − | Vmn2r111 | 4082 |
| 17 | 23098000 | 23099200 | + | int | 4083 |
| 17 | 23291600 | 23292600 | + | int | 4084 |
| 17 | 23511400 | 23512400 | + | int | 4085 |
| 17 | 28954600 | 28955800 | + | Brpf3 | 4086 |
| 17 | 29334000 | 29335000 | − | Cpne5 | 4087 |
| 17 | 31349000 | 31350000 | + | Ubash3a | 4088 |
| 17 | 31538800 | 31539800 | + | Pde9a | 4089 |
| 17 | 34755400 | 34756400 | − | Egfl8 | 4090 |
| 17 | 34755400 | 34756400 | − | Ppt2 | 4091 |
| 17 | 34879600 | 34880600 | − | C4b | 4092 |
| 17 | 37362000 | 37363000 | + | Olfr96 | 4093 |
| 17 | 37450200 | 37451400 | − | Olfr100 | 4094 |
| 17 | 37450200 | 37451400 | − | Olfr102 | 4095 |
| 17 | 37558800 | 37559800 | + | int | 4096 |
| 17 | 37793800 | 37795200 | + | int | 4097 |
| 17 | 37900600 | 37901600 | + | int | 4098 |
| 17 | 38690600 | 38691600 | + | Esp34 | 4099 |
| 17 | 39449000 | 39450000 | + | int | 4100 |
| 17 | 39697800 | 39699000 | + | int | 4101 |
| 17 | 39804800 | 39806200 | + | int | 4102 |
| 17 | 39830000 | 39831400 | + | int | 4103 |
| 17 | 39857800 | 39858800 | + | int | 4104 |
| 17 | 39950400 | 39951400 | + | int | 4105 |
| 17 | 40004400 | 40005400 | + | int | 4106 |
| 17 | 40136800 | 40137800 | + | int | 4107 |
| 17 | 41595800 | 41597000 | + | int | 4108 |
| 17 | 41610800 | 41611800 | + | int | 4109 |
| 17 | 42065000 | 42066000 | + | int | 4110 |
| 17 | 42185000 | 42186400 | + | int | 4111 |
| 17 | 43438200 | 43439200 | + | Gpr110 | 4112 |
| 17 | 46984200 | 46985200 | + | int | 4113 |
| 17 | 50852400 | 50853400 | + | int | 4114 |
| 17 | 51280800 | 51282400 | − | Tbc1d5 | 4115 |
| 17 | 51970400 | 51971400 | − | Satb1 | 4116 |
| 17 | 51970400 | 51971400 | − | Satb1 | 4117 |
| 17 | 52392600 | 52394000 | + | int | 4118 |
| 17 | 53333200 | 53334200 | + | int | 4119 |
| 17 | 53451600 | 53452800 | + | int | 4120 |
| 17 | 53510400 | 53511800 | + | int | 4121 |
| 17 | 53576400 | 53577400 | − | Efhb | 4122 |
| 17 | 53740600 | 53741600 | + | Kat2b | 4123 |
| 17 | 53740600 | 53741600 | + | Kat2b | 4124 |
| 17 | 55061400 | 55062400 | + | int | 4125 |
| 17 | 55304000 | 55305000 | + | int | 4126 |
| 17 | 55445800 | 55446800 | + | int | 4127 |
| 17 | 56737800 | 56738800 | + | Safb | 4128 |
| 17 | 57833600 | 57834600 | + | int | 4129 |
| 17 | 59167000 | 59168200 | + | int | 4130 |
| 17 | 59358600 | 59359800 | + | int | 4131 |
| 17 | 59775600 | 59776600 | + | int | 4132 |
| 17 | 59962400 | 59963600 | + | int | 4133 |
| 17 | 60026800 | 60027800 | + | int | 4134 |
| 17 | 60270000 | 60271200 | + | int | 4135 |
| 17 | 60634200 | 60635600 | + | int | 4136 |
| 17 | 61054600 | 61055600 | + | int | 4137 |
| 17 | 61131200 | 61132400 | + | int | 4138 |
| 17 | 61500000 | 61501000 | + | int | 4139 |
| 17 | 61622000 | 61623000 | + | int | 4140 |
| 17 | 61639000 | 61640000 | + | int | 4141 |
| 17 | 61751800 | 61753200 | + | int | 4142 |
| 17 | 61756600 | 61757600 | + | int | 4143 |
| 17 | 61829200 | 61830400 | + | int | 4144 |
| 17 | 61968400 | 61969400 | + | int | 4145 |
| 17 | 62033200 | 62034400 | + | int | 4146 |
| 17 | 62052800 | 62053800 | + | int | 4147 |
| 17 | 62250000 | 62251200 | + | int | 4148 |
| 17 | 62269600 | 62270800 | + | int | 4149 |
| 17 | 62460400 | 62462200 | + | int | 4150 |
| 17 | 62582200 | 62583200 | + | int | 4151 |
| 17 | 62762000 | 62763000 | + | int | 4152 |
| 17 | 62834200 | 62835400 | + | int | 4153 |
| 17 | 63796400 | 63797400 | − | Fbxl17 | 4154 |
| 17 | 64021800 | 64022800 | + | int | 4155 |
| 17 | 66660600 | 66661800 | + | int | 4156 |
| 17 | 66924200 | 66925400 | − | 9130404H23Rik | 4157 |
| 17 | 68432600 | 68433800 | + | int | 4158 |
| 17 | 71312200 | 71314000 | + | int | 4159 |
| 17 | 76478200 | 76479600 | + | int | 4160 |
| 17 | 76965400 | 76966400 | + | int | 4161 |
| 17 | 76969800 | 76970800 | + | int | 4162 |
| 17 | 77281800 | 77282800 | + | int | 4163 |
| 17 | 77443400 | 77444600 | + | int | 4164 |
| 17 | 77459800 | 77461200 | + | int | 4165 |
| 17 | 77627200 | 77628800 | + | int | 4166 |
| 17 | 77806400 | 77807800 | + | int | 4167 |
| 17 | 78184200 | 78185400 | + | int | 4168 |
| 17 | 82168200 | 82169400 | + | int | 4169 |
| 17 | 82199800 | 82200800 | + | int | 4170 |
| 17 | 83630400 | 83631400 | + | int | 4171 |
| 17 | 85125000 | 85126000 | − | Lrpprc | 4172 |
| 17 | 90592600 | 90593600 | − | Nrxn1 | 4173 |
| 17 | 90821400 | 90822600 | − | Nrxn1 | 4174 |
| 17 | 91315200 | 91316600 | − | Nrxn1 | 4175 |
| 17 | 91547000 | 91548000 | + | int | 4176 |
| 17 | 91599200 | 91600400 | + | int | 4177 |
| 17 | 91769400 | 91770400 | + | int | 4178 |
| 17 | 92091000 | 92092800 | + | int | 4179 |
| 17 | 92295200 | 92296200 | + | int | 4180 |
| 17 | 92736600 | 92738200 | + | int | 4181 |
| 17 | 93110800 | 93111800 | + | int | 4182 |
| 17 | 93256200 | 93257400 | + | int | 4183 |
| 17 | 93277400 | 93278800 | + | int | 4184 |
| 17 | 93515200 | 93516200 | + | int | 4185 |
| 17 | 93522400 | 93523400 | + | int | 4186 |
| 17 | 93734800 | 93736200 | + | int | 4187 |
| 17 | 93754000 | 93755200 | + | int | 4188 |
| 17 | 93853000 | 93854000 | + | int | 4189 |
| 17 | 93881400 | 93882600 | + | int | 4190 |
| 17 | 94145600 | 94146800 | + | int | 4191 |
| 17 | 94704200 | 94705600 | + | int | 4192 |
| 17 | 94744000 | 94745000 | + | int | 4193 |
| 17 | 95215600 | 95216600 | − | 2610044O15Rik | 4194 |
| 18 | 3004800 | 3006400 | + | int | 4195 |
| 18 | 3168400 | 3169400 | + | int | 4196 |
| 18 | 3618400 | 3619600 | + | int | 4197 |
| 18 | 3697800 | 3699600 | + | int | 4198 |
| 18 | 3701000 | 3702000 | + | int | 4199 |
| 18 | 4431600 | 4432600 | + | int | 4200 |
| 18 | 6273800 | 6274800 | + | int | 4201 |
| 18 | 7297000 | 7298200 | − | Armc4 | 4202 |
| 18 | 7851800 | 7852800 | + | int | 4203 |
| 18 | 8323000 | 8324200 | + | int | 4204 |
| 18 | 9536000 | 9537400 | + | int | 4205 |
| 18 | 9540200 | 9541200 | + | int | 4206 |
| 18 | 9548200 | 9549200 | + | int | 4207 |
| 18 | 11293800 | 11294800 | + | int | 4208 |
| 18 | 11303600 | 11305000 | + | int | 4209 |
| 18 | 11749400 | 11750600 | + | int | 4210 |
| 18 | 11855800 | 11857000 | + | Rbbp8 | 4211 |
| 18 | 15870800 | 15872200 | − | Chst9 | 4212 |
| 18 | 16260000 | 16261000 | + | int | 4213 |
| 18 | 16297600 | 16298600 | + | int | 4214 |
| 18 | 16475200 | 16476400 | + | int | 4215 |
| 18 | 17762600 | 17763600 | + | int | 4216 |
| 18 | 17997800 | 17999200 | + | int | 4217 |
| 18 | 18032800 | 18034000 | + | int | 4218 |
| 18 | 18105800 | 18107000 | + | int | 4219 |
| 18 | 18405600 | 18406600 | + | int | 4220 |
| 18 | 18647200 | 18648400 | + | int | 4221 |
| 18 | 18707600 | 18709000 | + | int | 4222 |
| 18 | 18986200 | 18987200 | + | int | 4223 |
| 18 | 19169800 | 19171600 | + | int | 4224 |
| 18 | 19237600 | 19238800 | + | int | 4225 |
| 18 | 19308400 | 19309400 | + | int | 4226 |
| 18 | 19517600 | 19519000 | + | int | 4227 |
| 18 | 19953400 | 19954600 | + | int | 4228 |
| 18 | 19984800 | 19986000 | + | int | 4229 |
| 18 | 20774400 | 20775400 | + | int | 4230 |
| 18 | 22223600 | 22224600 | − | 4921528I01Rik | 4231 |
| 18 | 23360600 | 23361800 | + | int | 4232 |
| 18 | 25094200 | 25095200 | + | Fhod3 | 4233 |
| 18 | 25531200 | 25532200 | + | AW554918 | 4234 |
| 18 | 26299400 | 26301000 | + | int | 4235 |
| 18 | 26750200 | 26751200 | + | int | 4236 |
| 18 | 27757200 | 27758200 | + | int | 4237 |
| 18 | 27968400 | 27969600 | + | int | 4238 |
| 18 | 28332000 | 28333200 | + | int | 4239 |
| 18 | 29180000 | 29181200 | + | int | 4240 |
| 18 | 29471600 | 29472600 | + | int | 4241 |
| 18 | 30213600 | 30214600 | + | int | 4242 |
| 18 | 31376800 | 31378200 | − | Rit2 | 4243 |
| 18 | 31769000 | 31770000 | − | Slc25a46 | 4244 |
| 18 | 32286200 | 32287800 | − | Proc | 4245 |
| 18 | 32286200 | 32287800 | − | Proc | 4246 |
| 18 | 33588600 | 33591600 | + | int | 4247 |
| 18 | 34477200 | 34478200 | + | Apc | 4248 |
| 18 | 37044600 | 37045600 | + | int | 4249 |
| 18 | 37148200 | 37149600 | + | Pcdha1 | 4250 |
| 18 | 37148200 | 37149600 | + | Pcdha2 | 4251 |
| 18 | 37148200 | 37149600 | + | Pcdha3 | 4252 |
| 18 | 37148200 | 37149600 | + | Pcdha4 | 4253 |
| 18 | 37148200 | 37149600 | + | Pcdha4-g | 4254 |
| 18 | 37148200 | 37149600 | + | Pcdha5 | 4255 |
| 18 | 37148200 | 37149600 | + | Pcdha6 | 4256 |
| 18 | 37148200 | 37149600 | + | Pcdha7 | 4257 |
| 18 | 37148200 | 37149600 | + | Pcdha8 | 4258 |
| 18 | 37158600 | 37159800 | + | Pcdha1 | 4259 |
| 18 | 37158600 | 37159800 | + | Pcdha2 | 4260 |
| 18 | 37158600 | 37159800 | + | Pcdha3 | 4261 |
| 18 | 37158600 | 37159800 | + | Pcdha4 | 4262 |
| 18 | 37158600 | 37159800 | + | Pcdha4-g | 4263 |
| 18 | 37158600 | 37159800 | + | Pcdha5 | 4264 |
| 18 | 37158600 | 37159800 | + | Pcdha6 | 4265 |
| 18 | 37158600 | 37159800 | + | Pcdha7 | 4266 |
| 18 | 37158600 | 37159800 | + | Pcdha8 | 4267 |
| 18 | 37158600 | 37159800 | + | Pcdha9 | 4268 |
| 18 | 37477200 | 37479000 | + | Pcdha4-g | 4269 |
| 18 | 37477200 | 37479000 | + | Pcdhb5 | 4270 |
| 18 | 37754400 | 37755400 | + | Pcdha4-g | 4271 |
| 18 | 39608200 | 39609200 | − | Nr3c1 | 4272 |
| 18 | 41190600 | 41192000 | + | int | 4273 |
| 18 | 41320200 | 41321200 | + | int | 4274 |
| 18 | 41566600 | 41567800 | + | int | 4275 |
| 18 | 44384200 | 44385400 | + | int | 4276 |
| 18 | 45305200 | 45306800 | + | int | 4277 |
| 18 | 46547200 | 46548200 | + | int | 4278 |
| 18 | 46712200 | 46713200 | + | int | 4279 |
| 18 | 47048000 | 47049000 | + | 4833403I15Rik | 4280 |
| 18 | 47157800 | 47159000 | + | Commd10 | 4281 |
| 18 | 47164600 | 47165600 | + | Commd10 | 4282 |
| 18 | 48068200 | 48069400 | + | int | 4283 |
| 18 | 48479800 | 48480800 | + | int | 4284 |
| 18 | 48494600 | 48495600 | + | int | 4285 |
| 18 | 48815800 | 48817200 | + | int | 4286 |
| 18 | 49768600 | 49769600 | + | int | 4287 |
| 18 | 50055400 | 50057200 | + | Dmxl1 | 4288 |
| 18 | 51092000 | 51093200 | + | int | 4289 |
| 18 | 51193600 | 51194600 | + | int | 4290 |
| 18 | 51531600 | 51532600 | + | int | 4291 |
| 18 | 51889800 | 51891600 | + | int | 4292 |
| 18 | 51927000 | 51928000 | + | int | 4293 |
| 18 | 52079400 | 52080600 | + | int | 4294 |
| 18 | 52601200 | 52602200 | + | int | 4295 |
| 18 | 53922800 | 53923800 | + | int | 4296 |
| 18 | 54102400 | 54104000 | + | Csnk1g3 | 4297 |
| 18 | 54539000 | 54540000 | + | int | 4298 |
| 18 | 54858000 | 54859600 | + | int | 4299 |
| 18 | 58383600 | 58384600 | + | int | 4300 |
| 18 | 58409800 | 58410800 | + | int | 4301 |
| 18 | 59197200 | 59199000 | + | Adamts19 | 4302 |
| 18 | 59644000 | 59645200 | + | int | 4303 |
| 18 | 60014200 | 60015200 | + | int | 4304 |
| 18 | 60088200 | 60089400 | + | int | 4305 |
| 18 | 60174000 | 60175000 | + | int | 4306 |
| 18 | 60251800 | 60253400 | + | int | 4307 |
| 18 | 63633000 | 63634000 | + | int | 4308 |
| 18 | 63692400 | 63693600 | + | int | 4309 |
| 18 | 63916200 | 63917200 | + | Wdr7 | 4310 |
| 18 | 67671800 | 67672800 | − | Spire1 | 4311 |
| 18 | 67671800 | 67672800 | − | Spire1 | 4312 |
| 18 | 70189200 | 70190600 | − | Rab27b | 4313 |
| 18 | 70189200 | 70190600 | − | Rab27b | 4314 |
| 18 | 70200000 | 70201000 | − | Rab27b | 4315 |
| 18 | 70200000 | 70201000 | − | Rab27b | 4316 |
| 18 | 70668800 | 70669800 | − | Poli | 4317 |
| 18 | 70668800 | 70669800 | − | Poli | 4318 |
| 18 | 71582000 | 71583000 | − | Dcc | 4319 |
| 18 | 71772000 | 71773000 | − | Dcc | 4320 |
| 18 | 71817400 | 71818400 | − | Dcc | 4321 |
| 18 | 72371400 | 72372400 | − | Dcc | 4322 |
| 18 | 73085200 | 73086200 | + | int | 4323 |
| 18 | 73387200 | 73388200 | + | int | 4324 |
| 18 | 73415200 | 73416800 | + | int | 4325 |
| 18 | 73480400 | 73481400 | + | int | 4326 |
| 18 | 73594000 | 73595200 | + | int | 4327 |
| 18 | 74350200 | 74351400 | + | int | 4328 |
| 18 | 74359400 | 74360800 | − | Ska1 | 4329 |
| 18 | 74561800 | 74562800 | + | int | 4330 |
| 18 | 75236000 | 75237000 | + | Dym | 4331 |
| 18 | 77071000 | 77072000 | + | int | 4332 |
| 18 | 77415800 | 77417400 | + | int | 4333 |
| 18 | 79710400 | 79711400 | + | int | 4334 |
| 18 | 81267800 | 81268800 | + | int | 4335 |
| 18 | 81913600 | 81914600 | + | int | 4336 |
| 18 | 83618800 | 83619800 | + | int | 4337 |
| 18 | 85338200 | 85339200 | + | int | 4338 |
| 18 | 86235800 | 86236800 | + | int | 4339 |
| 18 | 86275000 | 86276000 | + | int | 4340 |
| 18 | 86667600 | 86668800 | + | Neto1 | 4341 |
| 18 | 86756000 | 86757600 | + | int | 4342 |
| 18 | 87451200 | 87452200 | + | int | 4343 |
| 18 | 87531200 | 87532200 | + | int | 4344 |
| 18 | 87614000 | 87617200 | + | int | 4345 |
| 18 | 87736400 | 87737600 | + | int | 4346 |
| 18 | 87880400 | 87881600 | + | int | 4347 |
| 18 | 88030600 | 88031800 | + | int | 4348 |
| 18 | 88375400 | 88376600 | + | int | 4349 |
| 18 | 88785400 | 88786600 | + | int | 4350 |
| 18 | 89453200 | 89454200 | + | int | 4351 |
| 18 | 89830200 | 89831200 | − | Dok6 | 4352 |
| 18 | 89923800 | 89924800 | − | Dok6 | 4353 |
| 18 | 90187000 | 90188200 | + | int | 4354 |
| 18 | 90309800 | 90311000 | + | int | 4355 |
| 18 | 90641800 | 90643000 | + | int | 4356 |
| 18 | 90769400 | 90770400 | + | int | 4357 |
| 19 | 7758200 | 7759200 | − | Slc22a19 | 4358 |
| 19 | 9622400 | 9623400 | + | int | 4359 |
| 19 | 9869400 | 9870400 | + | int | 4360 |
| 19 | 11499800 | 11501000 | + | Ms4a4c | 4361 |
| 19 | 12762400 | 12763800 | + | int | 4362 |
| 19 | 12888800 | 12889800 | + | Lpxn | 4363 |
| 19 | 12958000 | 12959200 | + | Olfr1445 | 4364 |
| 19 | 12994000 | 12995000 | − | Olfr1448 | 4365 |
| 19 | 13258800 | 13260000 | + | int | 4366 |
| 19 | 13481200 | 13482800 | + | Olfr1469 | 4367 |
| 19 | 13581800 | 13583000 | + | int | 4368 |
| 19 | 13781200 | 13782200 | + | int | 4369 |
| 19 | 13817800 | 13819400 | + | int | 4370 |
| 19 | 14069400 | 14070400 | + | int | 4371 |
| 19 | 14126400 | 14127400 | + | int | 4372 |
| 19 | 14762400 | 14763400 | + | int | 4373 |
| 19 | 15657600 | 15658600 | + | int | 4374 |
| 19 | 17413400 | 17414800 | − | Gcnt1 | 4375 |
| 19 | 17413400 | 17414800 | − | Gcnt1 | 4376 |
| 19 | 17413400 | 17414800 | − | Gcnt1 | 4377 |
| 19 | 18560000 | 18561000 | + | int | 4378 |
| 19 | 19188200 | 19189400 | − | Rorb | 4379 |
| 19 | 19335800 | 19337000 | + | int | 4380 |
| 19 | 19342000 | 19343600 | + | int | 4381 |
| 19 | 19861200 | 19862200 | + | int | 4382 |
| 19 | 19973400 | 19974600 | + | int | 4383 |
| 19 | 20190800 | 20192200 | + | int | 4384 |
| 19 | 22397200 | 22398200 | + | Trpm3 | 4385 |
| 19 | 22547800 | 22548800 | + | Trpm3 | 4386 |
| 19 | 22547800 | 22548800 | + | Trpm3 | 4387 |
| 19 | 22871200 | 22872200 | + | Trpm3 | 4388 |
| 19 | 22871200 | 22872200 | + | Trpm3 | 4389 |
| 19 | 22871200 | 22872200 | + | Trpm3 | 4390 |
| 19 | 23204600 | 23205800 | + | int | 4391 |
| 19 | 23924200 | 23925200 | + | Apba1 | 4392 |
| 19 | 27943400 | 27944400 | − | Rfx3 | 4393 |
| 19 | 27943400 | 27944400 | − | Rfx3 | 4394 |
| 19 | 29135400 | 29136400 | + | int | 4395 |
| 19 | 29796600 | 29797600 | − | 9930021J03Rik | 4396 |
| 19 | 29908800 | 29909800 | + | int | 4397 |
| 19 | 32350600 | 32351600 | − | Sgms1 | 4398 |
| 19 | 32350600 | 32351600 | − | Sgms1 | 4399 |
| 19 | 33642200 | 33643600 | − | Al747699 | 4400 |
| 19 | 33807600 | 33808600 | + | int | 4401 |
| 19 | 35508000 | 35509000 | + | int | 4402 |
| 19 | 36030000 | 36031200 | + | int | 4403 |
| 19 | 39250200 | 39252000 | + | Cyp2c66 | 4404 |
| 19 | 39608800 | 39609800 | + | Cyp2c39 | 4405 |
| 19 | 39833400 | 39834400 | + | int | 4406 |
| 19 | 39859800 | 39861000 | − | Cyp2c40 | 4407 |
| 19 | 39865600 | 39866600 | − | Cyp2c40 | 4408 |
| 19 | 39908800 | 39909800 | + | int | 4409 |
| 19 | 41430600 | 41431600 | − | Pik3ap1 | 4410 |
| 19 | 43418400 | 43419400 | − | Hpse2 | 4411 |
| 19 | 43424600 | 43425800 | − | Hpse2 | 4412 |
| 19 | 43893400 | 43894400 | + | Abcc2 | 4413 |
| 19 | 44797600 | 44799000 | + | int | 4414 |
| 19 | 48972200 | 48973200 | + | int | 4415 |
| 19 | 49640800 | 49642200 | + | int | 4416 |
| 19 | 50111000 | 50112600 | + | int | 4417 |
| 19 | 50887800 | 50888800 | + | int | 4418 |
| 19 | 51478400 | 51479800 | + | int | 4419 |
| 19 | 51683600 | 51684600 | + | int | 4420 |
| 19 | 51932600 | 51934200 | + | int | 4421 |
| 19 | 52556600 | 52558000 | + | int | 4422 |
| 19 | 53516000 | 53517000 | − | 5830416P10Rik | 4423 |
| 19 | 55528000 | 55529000 | + | Vti1a | 4424 |
| 19 | 55680600 | 55681600 | + | Vti1a | 4425 |
| 19 | 57534600 | 57537600 | + | Trub1 | 4426 |
| 19 | 57534600 | 57537600 | + | Trub1 | 4427 |
| 19 | 58621800 | 58622800 | + | 1700011F14Rik | 4428 |
| 19 | 59926200 | 59927200 | + | int | 4429 |
| 19 | 60750800 | 60752000 | + | int | 4430 |
| X | 3025400 | 3027200 | + | int | 4431 |
| X | 3060000 | 3061400 | + | int | 4432 |
| X | 3217600 | 3218800 | + | int | 4433 |
| X | 4150400 | 4151600 | + | int | 4434 |
| X | 4252800 | 4254400 | + | int | 4435 |
| X | 4780200 | 4781800 | + | int | 4436 |
| X | 4797600 | 4798600 | + | int | 4437 |
| X | 5351400 | 5352400 | + | int | 4438 |
| X | 5906400 | 5907400 | + | int | 4439 |
| X | 5960600 | 5961800 | + | int | 4440 |
| X | 5963200 | 5964200 | + | int | 4441 |
| X | 6097400 | 6098400 | + | Shroom4 | 4442 |
| X | 6219600 | 6220600 | + | int | 4443 |
| X | 6259200 | 6260200 | + | int | 4444 |
| X | 6339200 | 6340200 | + | int | 4445 |
| X | 6562000 | 6563000 | − | Ccnb3 | 4446 |
| X | 6843400 | 6844400 | + | int | 4447 |
| X | 7283200 | 7284200 | + | Gpkow | 4448 |
| X | 7472600 | 7473800 | + | Timm17b | 4449 |
| X | 7472600 | 7473800 | − | Pqbp1 | 4450 |
| X | 8205600 | 8207000 | + | int | 4451 |
| X | 8358400 | 8359600 | + | int | 4452 |
| X | 8539800 | 8541200 | − | Gm5634 | 4453 |
| X | 10499000 | 10500200 | + | int | 4454 |
| X | 10510800 | 10512000 | + | int | 4455 |
| X | 12074400 | 12075800 | + | int | 4456 |
| X | 12463200 | 12464400 | + | int | 4457 |
| X | 12961600 | 12962600 | + | int | 4458 |
| X | 13920000 | 13921000 | + | int | 4459 |
| X | 14057400 | 14058400 | + | int | 4460 |
| X | 14181200 | 14182400 | + | int | 4461 |
| X | 14251000 | 14252200 | + | int | 4462 |
| X | 14369200 | 14370200 | + | int | 4463 |
| X | 14627400 | 14628800 | + | int | 4464 |
| X | 14806000 | 14807000 | + | int | 4465 |
| X | 14868000 | 14869400 | + | int | 4466 |
| X | 15523000 | 15524400 | + | int | 4467 |
| X | 15810600 | 15811800 | + | int | 4468 |
| X | 16174800 | 16176000 | + | int | 4469 |
| X | 16227800 | 16228800 | + | Maoa | 4470 |
| X | 16255600 | 16257400 | + | Maoa | 4471 |
| X | 16346000 | 16347400 | − | Maob | 4472 |
| X | 16527400 | 16528800 | + | int | 4473 |
| X | 17018400 | 17019400 | + | int | 4474 |
| X | 17542800 | 17543800 | + | int | 4475 |
| X | 17807000 | 17808000 | + | Kdm6a | 4476 |
| X | 18099800 | 18101000 | + | int | 4477 |
| X | 18615600 | 18616600 | + | int | 4478 |
| X | 19057600 | 19058800 | + | int | 4479 |
| X | 19296200 | 19297600 | + | int | 4480 |
| X | 20677400 | 20679000 | + | int | 4481 |
| X | 20737000 | 20738200 | + | int | 4482 |
| X | 20853600 | 20854600 | + | int | 4483 |
| X | 22111400 | 22112400 | + | int | 4484 |
| X | 22354600 | 22355600 | + | int | 4485 |
| X | 22742400 | 22743800 | + | int | 4486 |
| X | 23481400 | 23482400 | + | Gm4907 | 4487 |
| X | 23489800 | 23491000 | + | int | 4488 |
| X | 23668800 | 23670200 | + | int | 4489 |
| X | 23746800 | 23748000 | + | int | 4490 |
| X | 23765200 | 23766200 | + | int | 4491 |
| X | 24817200 | 24819000 | + | int | 4492 |
| X | 25585600 | 25587000 | + | int | 4493 |
| X | 30353600 | 30355000 | + | int | 4494 |
| X | 30467800 | 30469200 | + | int | 4495 |
| X | 30628000 | 30629000 | + | int | 4496 |
| X | 30842800 | 30844400 | + | int | 4497 |
| X | 30960200 | 30961200 | + | int | 4498 |
| X | 31076200 | 31077800 | + | int | 4499 |
| X | 31309800 | 31311400 | + | int | 4500 |
| X | 31320400 | 31321400 | + | int | 4501 |
| X | 31404000 | 31405600 | + | int | 4502 |
| X | 31441600 | 31443200 | + | int | 4503 |
| X | 31964000 | 31965000 | + | int | 4504 |
| X | 31991400 | 31992400 | + | int | 4505 |
| X | 32007000 | 32008000 | + | int | 4506 |
| X | 32030800 | 32032200 | + | int | 4507 |
| X | 32089600 | 32090600 | + | int | 4508 |
| X | 32164800 | 32166400 | + | int | 4509 |
| X | 33297400 | 33298400 | + | int | 4510 |
| X | 33385600 | 33386800 | + | int | 4511 |
| X | 34970800 | 34971800 | + | Rhox4e | 4512 |
| X | 35023800 | 35024800 | − | Rhox4f | 4513 |
| X | 35241400 | 35242400 | + | int | 4514 |
| X | 35365200 | 35366400 | + | int | 4515 |
| X | 35731000 | 35732000 | + | int | 4516 |
| X | 35896800 | 35897800 | − | Cul4b | 4517 |
| X | 36217800 | 36218800 | + | 6030498E09Rik | 4518 |
| X | 36250000 | 36251400 | + | 6030498E09Rik | 4519 |
| X | 36410000 | 36411200 | + | int | 4520 |
| X | 37047600 | 37048600 | + | int | 4521 |
| X | 37301800 | 37303000 | + | int | 4522 |
| X | 37490000 | 37491200 | + | int | 4523 |
| X | 37499200 | 37500200 | + | int | 4524 |
| X | 37602800 | 37604200 | + | int | 4525 |
| X | 37834800 | 37836400 | + | int | 4526 |
| X | 37879000 | 37880400 | + | int | 4527 |
| X | 37937000 | 37938400 | + | int | 4528 |
| X | 38023800 | 38025000 | + | int | 4529 |
| X | 38038400 | 38039400 | + | int | 4530 |
| X | 38073400 | 38074400 | + | int | 4531 |
| X | 38244000 | 38245000 | + | int | 4532 |
| X | 38290000 | 38291000 | + | int | 4533 |
| X | 38505200 | 38506200 | + | int | 4534 |
| X | 38559000 | 38560000 | + | int | 4535 |
| X | 38571400 | 38572600 | + | int | 4536 |
| X | 39481000 | 39482200 | + | int | 4537 |
| X | 39626600 | 39627800 | + | Stag2 | 4538 |
| X | 39626600 | 39627800 | + | Stag2 | 4539 |
| X | 40125200 | 40126400 | − | Odz1 | 4540 |
| X | 40137200 | 40138200 | − | Odz1 | 4541 |
| X | 40232400 | 40233800 | − | Odz1 | 4542 |
| X | 40460200 | 40461400 | − | Odz1 | 4543 |
| X | 40507600 | 40509000 | − | Odz1 | 4544 |
| X | 40549400 | 40550800 | − | Odz1 | 4545 |
| X | 40605600 | 40606600 | − | Odz1 | 4546 |
| X | 40692400 | 40693400 | + | int | 4547 |
| X | 41078600 | 41079600 | + | int | 4548 |
| X | 41129400 | 41131000 | + | int | 4549 |
| X | 41136800 | 41137800 | + | int | 4550 |
| X | 41207400 | 41208400 | + | int | 4551 |
| X | 41320000 | 41321600 | + | int | 4552 |
| X | 41350600 | 41351600 | + | int | 4553 |
| X | 41475600 | 41476600 | + | int | 4554 |
| X | 41603400 | 41604800 | + | int | 4555 |
| X | 41614600 | 41616000 | + | int | 4556 |
| X | 41816000 | 41817200 | + | int | 4557 |
| X | 41885600 | 41886600 | + | int | 4558 |
| X | 41926200 | 41927400 | + | int | 4559 |
| X | 42273600 | 42275200 | + | int | 4560 |
| X | 42356200 | 42357600 | + | int | 4561 |
| X | 42440400 | 42441600 | + | 1110059M19Rik | 4562 |
| X | 42603800 | 42605200 | + | int | 4563 |
| X | 42617800 | 42618800 | + | int | 4564 |
| X | 42739600 | 42740800 | + | int | 4565 |
| X | 42769400 | 42770400 | + | int | 4566 |
| X | 42777600 | 42778600 | + | int | 4567 |
| X | 42810200 | 42811200 | + | int | 4568 |
| X | 42844200 | 42845200 | + | int | 4569 |
| X | 42850400 | 42851400 | + | int | 4570 |
| X | 42944200 | 42945400 | + | int | 4571 |
| X | 43025400 | 43026400 | + | int | 4572 |
| X | 43032200 | 43033600 | + | int | 4573 |
| X | 43120600 | 43121600 | + | int | 4574 |
| X | 43148400 | 43149600 | + | int | 4575 |
| X | 43205000 | 43206400 | + | int | 4576 |
| X | 43212400 | 43213400 | + | int | 4577 |
| X | 43418200 | 43419400 | + | int | 4578 |
| X | 43490600 | 43491800 | + | int | 4579 |
| X | 43790200 | 43791200 | + | int | 4580 |
| X | 43808600 | 43809600 | − | Gm4987 | 4581 |
| X | 43846200 | 43847200 | + | int | 4582 |
| X | 43851400 | 43852800 | + | int | 4583 |
| X | 44028200 | 44029600 | + | int | 4584 |
| X | 44682200 | 44683400 | + | int | 4585 |
| X | 45245000 | 45246000 | − | Smarca1 | 4586 |
| X | 45531000 | 45532000 | − | Zdhhc9 | 4587 |
| X | 46083200 | 46084600 | + | int | 4588 |
| X | 46313800 | 46315200 | + | int | 4589 |
| X | 46867600 | 46868600 | + | int | 4590 |
| X | 46932600 | 46933600 | + | int | 4591 |
| X | 46952200 | 46953200 | + | int | 4592 |
| X | 46970600 | 46972000 | + | int | 4593 |
| X | 47057600 | 47058800 | + | int | 4594 |
| X | 47125600 | 47126600 | + | int | 4595 |
| X | 47448200 | 47449600 | + | int | 4596 |
| X | 47473800 | 47475000 | + | int | 4597 |
| X | 47551400 | 47552600 | + | int | 4598 |
| X | 47559800 | 47560800 | + | int | 4599 |
| X | 47631800 | 47633400 | + | int | 4600 |
| X | 48094400 | 48095600 | + | int | 4601 |
| X | 48099800 | 48101000 | + | int | 4602 |
| X | 48704200 | 48705200 | + | int | 4603 |
| X | 49280200 | 49281400 | + | int | 4604 |
| X | 50186000 | 50187000 | + | int | 4605 |
| X | 50775400 | 50776400 | + | int | 4606 |
| X | 50882200 | 50883400 | + | int | 4607 |
| X | 51097400 | 51099000 | − | Xlr | 4608 |
| X | 51168800 | 51170000 | + | int | 4609 |
| X | 51349800 | 51350800 | + | int | 4610 |
| X | 51527400 | 51528400 | + | int | 4611 |
| X | 52621800 | 52623000 | + | int | 4612 |
| X | 53391800 | 53392800 | + | 3830403N18Rik | 4613 |
| X | 53406600 | 53407800 | + | 3830403N18Rik | 4614 |
| X | 53635200 | 53636400 | + | int | 4615 |
| X | 54639600 | 54640800 | − | Rbmx | 4616 |
| X | 54639600 | 54640800 | − | Rbmx | 4617 |
| X | 55654200 | 55655200 | + | int | 4618 |
| X | 55691200 | 55692400 | + | int | 4619 |
| X | 56047200 | 56048600 | + | int | 4620 |
| X | 56262400 | 56263400 | + | int | 4621 |
| X | 56856600 | 56857600 | + | int | 4622 |
| X | 56901600 | 56902600 | + | int | 4623 |
| X | 56940400 | 56941400 | + | int | 4624 |
| X | 57728200 | 57730000 | + | int | 4625 |
| X | 57738400 | 57739400 | + | int | 4626 |
| X | 57848000 | 57849000 | + | int | 4627 |
| X | 58358400 | 58359400 | + | int | 4628 |
| X | 58577600 | 58578600 | + | int | 4629 |
| X | 58709000 | 58710000 | + | int | 4630 |
| X | 58733400 | 58734400 | + | int | 4631 |
| X | 58896400 | 58898000 | + | int | 4632 |
| X | 59038600 | 59040200 | + | int | 4633 |
| X | 59101400 | 59102400 | + | int | 4634 |
| X | 59139000 | 59140000 | + | int | 4635 |
| X | 59254800 | 59255800 | + | int | 4636 |
| X | 59831200 | 59832400 | + | int | 4637 |
| X | 59877800 | 59879000 | + | int | 4638 |
| X | 60111600 | 60112600 | + | int | 4639 |
| X | 60172600 | 60173800 | + | int | 4640 |
| X | 60311200 | 60312200 | + | int | 4641 |
| X | 60322200 | 60323200 | + | int | 4642 |
| X | 60325800 | 60326800 | + | int | 4643 |
| X | 60351000 | 60352000 | + | int | 4644 |
| X | 60799600 | 60800600 | + | int | 4645 |
| X | 60862600 | 60863600 | + | int | 4646 |
| X | 60885600 | 60886600 | + | int | 4647 |
| X | 60910200 | 60911400 | + | int | 4648 |
| X | 61040400 | 61041400 | + | int | 4649 |
| X | 61099800 | 61100800 | + | int | 4650 |
| X | 61149000 | 61150200 | + | int | 4651 |
| X | 61171000 | 61172400 | + | int | 4652 |
| X | 61300400 | 61301600 | + | int | 4653 |
| X | 61528600 | 61529600 | − | Slitrk4 | 4654 |
| X | 61548200 | 61549600 | + | int | 4655 |
| X | 61708600 | 61709600 | + | int | 4656 |
| X | 61780400 | 61781600 | + | int | 4657 |
| X | 61974800 | 61975800 | + | int | 4658 |
| X | 62020600 | 62021600 | + | int | 4659 |
| X | 62184800 | 62186000 | + | int | 4660 |
| X | 62258400 | 62259400 | + | int | 4661 |
| X | 62459800 | 62460800 | + | int | 4662 |
| X | 62748000 | 62749600 | + | int | 4663 |
| X | 62755200 | 62756400 | + | int | 4664 |
| X | 62826000 | 62827000 | + | int | 4665 |
| X | 62879000 | 62880200 | + | int | 4666 |
| X | 62900800 | 62901800 | + | int | 4667 |
| X | 62987200 | 62988400 | + | int | 4668 |
| X | 63002000 | 63003400 | + | int | 4669 |
| X | 63053200 | 63054600 | + | int | 4670 |
| X | 63064200 | 63065200 | + | int | 4671 |
| X | 63175600 | 63176800 | + | int | 4672 |
| X | 63193800 | 63195200 | + | int | 4673 |
| X | 63265200 | 63266200 | + | int | 4674 |
| X | 63637400 | 63638600 | + | int | 4675 |
| X | 63685600 | 63686800 | + | int | 4676 |
| X | 63693000 | 63694000 | + | int | 4677 |
| X | 63811200 | 63812600 | + | int | 4678 |
| X | 63833600 | 63835000 | + | int | 4679 |
| X | 64328800 | 64330000 | + | int | 4680 |
| X | 64352400 | 64353800 | + | int | 4681 |
| X | 64584400 | 64585400 | + | int | 4682 |
| X | 64781400 | 64782400 | + | int | 4683 |
| X | 64912400 | 64914000 | + | int | 4684 |
| X | 65038400 | 65040000 | + | int | 4685 |
| X | 65065000 | 65066000 | + | int | 4686 |
| X | 65177400 | 65178600 | − | 4933436I01Rik | 4687 |
| X | 65544800 | 65545800 | + | int | 4688 |
| X | 65642800 | 65643800 | + | int | 4689 |
| X | 65907600 | 65909000 | + | int | 4690 |
| X | 66014800 | 66016000 | + | Fmr1nb | 4691 |
| X | 66171400 | 66172400 | + | int | 4692 |
| X | 66402800 | 66403800 | + | int | 4693 |
| X | 66476400 | 66477600 | + | int | 4694 |
| X | 66595400 | 66596400 | + | int | 4695 |
| X | 67099200 | 67100200 | + | Aff2 | 4696 |
| X | 67265600 | 67266600 | − | 1700111N16Rik | 4697 |
| X | 67327200 | 67328400 | − | 1700111N16Rik | 4698 |
| X | 68450000 | 68451000 | + | int | 4699 |
| X | 68666000 | 68667000 | + | Mtmr1 | 4700 |
| X | 69913600 | 69914600 | + | int | 4701 |
| X | 69937600 | 69938600 | + | int | 4702 |
| X | 70311800 | 70313400 | + | Pnma3 | 4703 |
| X | 70369200 | 70370600 | + | DXBay18 | 4704 |
| X | 70369200 | 70370600 | + | Gm14685 | 4705 |
| X | 70386600 | 70388000 | − | DXBay18 | 4706 |
| X | 70386600 | 70388000 | − | Gm14685 | 4707 |
| X | 70418800 | 70420400 | + | int | 4708 |
| X | 70540800 | 70542200 | + | int | 4709 |
| X | 70642800 | 70643800 | + | int | 4710 |
| X | 71393200 | 71394400 | + | Opn1mw | 4711 |
| X | 71511600 | 71512800 | + | int | 4712 |
| X | 71832200 | 71833800 | + | int | 4713 |
| X | 71885600 | 71886800 | − | Gm5640 | 4714 |
| X | 71919800 | 71921600 | + | int | 4715 |
| X | 71937000 | 71938000 | + | int | 4716 |
| X | 71959400 | 71960400 | + | int | 4717 |
| X | 71989200 | 71990600 | + | int | 4718 |
| X | 72036200 | 72037200 | + | int | 4719 |
| X | 72052200 | 72053400 | + | int | 4720 |
| X | 72086200 | 72087600 | + | Gm5936 | 4721 |
| X | 72156000 | 72157000 | + | int | 4722 |
| X | 72170600 | 72171600 | + | int | 4723 |
| X | 72396600 | 72397600 | − | 4930428E23Rik | 4724 |
| X | 72745600 | 72747200 | + | int | 4725 |
| X | 73236400 | 73237800 | + | int | 4726 |
| X | 73467600 | 73468600 | + | int | 4727 |
| X | 73495200 | 73496200 | + | int | 4728 |
| X | 73676000 | 73677000 | + | int | 4729 |
| X | 73758200 | 73759400 | + | int | 4730 |
| X | 73826600 | 73829600 | + | int | 4731 |
| X | 73843400 | 73845000 | + | int | 4732 |
| X | 74553600 | 74554600 | + | int | 4733 |
| X | 74580000 | 74581200 | + | int | 4734 |
| X | 75461000 | 75462000 | + | int | 4735 |
| X | 75531000 | 75532000 | + | int | 4736 |
| X | 75635800 | 75636800 | + | int | 4737 |
| X | 75744200 | 75745200 | − | Prrg1 | 4738 |
| X | 75744200 | 75745200 | − | Prrg1 | 4739 |
| X | 76162600 | 76164000 | + | int | 4740 |
| X | 76190600 | 76191800 | + | int | 4741 |
| X | 76264400 | 76265600 | + | int | 4742 |
| X | 76347000 | 76348400 | + | int | 4743 |
| X | 76448800 | 76450000 | + | int | 4744 |
| X | 76589000 | 76590000 | − | Gm8787 | 4745 |
| X | 76664000 | 76665800 | + | int | 4746 |
| X | 76832200 | 76833800 | + | int | 4747 |
| X | 76835200 | 76836800 | + | int | 4748 |
| X | 77503000 | 77504600 | + | int | 4749 |
| X | 77589800 | 77591200 | + | int | 4750 |
| X | 77650400 | 77651600 | + | int | 4751 |
| X | 77662400 | 77663600 | + | int | 4752 |
| X | 77894800 | 77896000 | + | int | 4753 |
| X | 78005000 | 78006000 | + | int | 4754 |
| X | 78034600 | 78035800 | + | int | 4755 |
| X | 78251800 | 78253200 | + | int | 4756 |
| X | 78408200 | 78409200 | + | int | 4757 |
| X | 78479000 | 78480000 | + | int | 4758 |
| X | 78693000 | 78694200 | − | 4930595M18Rik | 4759 |
| X | 78718400 | 78719600 | + | int | 4760 |
| X | 78860000 | 78861400 | + | int | 4761 |
| X | 78862600 | 78863600 | + | int | 4762 |
| X | 79261400 | 79262600 | + | int | 4763 |
| X | 79477200 | 79478200 | + | int | 4764 |
| X | 79978000 | 79979000 | + | int | 4765 |
| X | 80049000 | 80050000 | + | int | 4766 |
| X | 80055800 | 80057200 | + | int | 4767 |
| X | 80210000 | 80211200 | + | Dmd | 4768 |
| X | 80309400 | 80310600 | + | Dmd | 4769 |
| X | 81175400 | 81176400 | + | Dmd | 4770 |
| X | 81283600 | 81284600 | + | Dmd | 4771 |
| X | 81406000 | 81407000 | + | Dmd | 4772 |
| X | 81439400 | 81440400 | + | Dmd | 4773 |
| X | 81694800 | 81695800 | + | Dmd | 4774 |
| X | 81737200 | 81738200 | + | Dmd | 4775 |
| X | 81781400 | 81782600 | + | Dmd | 4776 |
| X | 82240000 | 82241000 | + | Dmd | 4777 |
| X | 82759000 | 82760000 | + | int | 4778 |
| X | 82801400 | 82802600 | + | int | 4779 |
| X | 82849800 | 82851200 | + | Tab3 | 4780 |
| X | 83133200 | 83134200 | + | 5430427O19Rik | 4781 |
| X | 83327800 | 83329800 | + | int | 4782 |
| X | 83366200 | 83367400 | + | int | 4783 |
| X | 83789200 | 83790400 | + | int | 4784 |
| X | 83875800 | 83877200 | + | int | 4785 |
| X | 83887600 | 83888800 | + | int | 4786 |
| X | 84005600 | 84006800 | − | Il1rapl1 | 4787 |
| X | 84074000 | 84075000 | − | Il1rapl1 | 4788 |
| X | 84370400 | 84371400 | − | Il1rapl1 | 4789 |
| X | 84433400 | 84434600 | − | Il1rapl1 | 4790 |
| X | 84445600 | 84447000 | − | Il1rapl1 | 4791 |
| X | 84719600 | 84720600 | − | Il1rapl1 | 4792 |
| X | 84946200 | 84947200 | − | Il1rapl1 | 4793 |
| X | 84984000 | 84985600 | − | Il1rapl1 | 4794 |
| X | 85091400 | 85092400 | − | Il1rapl1 | 4795 |
| X | 85270400 | 85271800 | − | Il1rapl1 | 4796 |
| X | 85288800 | 85290200 | − | Il1rapl1 | 4797 |
| X | 85686000 | 85687200 | + | int | 4798 |
| X | 85716600 | 85717600 | + | int | 4799 |
| X | 85732400 | 85733600 | + | int | 4800 |
| X | 85828000 | 85829000 | + | int | 4801 |
| X | 85844200 | 85845200 | + | int | 4802 |
| X | 85852600 | 85854000 | + | int | 4803 |
| X | 85891400 | 85892400 | + | int | 4804 |
| X | 85906800 | 85907800 | + | int | 4805 |
| X | 85942000 | 85943600 | + | int | 4806 |
| X | 86012000 | 86013400 | + | int | 4807 |
| X | 86183600 | 86184600 | + | int | 4808 |
| X | 86228000 | 86229000 | + | int | 4809 |
| X | 86243600 | 86244600 | + | int | 4810 |
| X | 86247600 | 86248600 | + | int | 4811 |
| X | 86297000 | 86298200 | + | int | 4812 |
| X | 86370600 | 86371600 | + | int | 4813 |
| X | 86700600 | 86701800 | + | int | 4814 |
| X | 86719800 | 86720800 | + | int | 4815 |
| X | 87025200 | 87026200 | + | int | 4816 |
| X | 87109800 | 87110800 | + | int | 4817 |
| X | 87287400 | 87288400 | + | int | 4818 |
| X | 87353200 | 87354200 | + | int | 4819 |
| X | 87377000 | 87378600 | + | int | 4820 |
| X | 87396400 | 87397400 | + | int | 4821 |
| X | 87889800 | 87891000 | + | int | 4822 |
| X | 87991200 | 87992400 | + | int | 4823 |
| X | 88014800 | 88015800 | + | int | 4824 |
| X | 88061000 | 88062600 | + | int | 4825 |
| X | 88134800 | 88136200 | + | Gm44 | 4826 |
| X | 88162600 | 88164000 | + | int | 4827 |
| X | 88235800 | 88236800 | + | int | 4828 |
| X | 88475600 | 88476600 | + | int | 4829 |
| X | 88543200 | 88544600 | + | int | 4830 |
| X | 88599600 | 88601400 | + | int | 4831 |
| X | 88689400 | 88690400 | + | int | 4832 |
| X | 88925800 | 88926800 | + | int | 4833 |
| X | 88950600 | 88952000 | + | int | 4834 |
| X | 89057400 | 89058600 | + | int | 4835 |
| X | 89228600 | 89230200 | + | int | 4836 |
| X | 89288800 | 89290200 | + | int | 4837 |
| X | 89611800 | 89612800 | − | Mageb18 | 4838 |
| X | 90008400 | 90009600 | + | int | 4839 |
| X | 90123800 | 90124800 | + | int | 4840 |
| X | 90266200 | 90267400 | + | int | 4841 |
| X | 90278600 | 90280000 | + | int | 4842 |
| X | 90772600 | 90773800 | − | Pola1 | 4843 |
| X | 91557400 | 91558400 | + | int | 4844 |
| X | 91818400 | 91819400 | + | int | 4845 |
| X | 91951400 | 91952400 | + | int | 4846 |
| X | 91994800 | 91996000 | + | int | 4847 |
| X | 92256000 | 92257000 | − | Arhgef9 | 4848 |
| X | 92291200 | 92292600 | − | Arhgef9 | 4849 |
| X | 92457400 | 92458400 | + | int | 4850 |
| X | 92549600 | 92550600 | + | int | 4851 |
| X | 92709400 | 92710400 | + | int | 4852 |
| X | 93065000 | 93066000 | + | Zc3h12b | 4853 |
| X | 93099400 | 93100400 | + | Zc3h12b | 4854 |
| X | 93136800 | 93137800 | − | Las1l | 4855 |
| X | 93286600 | 93287800 | + | int | 4856 |
| X | 93403000 | 93404200 | + | int | 4857 |
| X | 93467000 | 93468000 | − | Vsig4 | 4858 |
| X | 93530000 | 93531400 | − | Hsf3 | 4859 |
| X | 93570200 | 93571400 | + | int | 4860 |
| X | 93758400 | 93759600 | + | Heph | 4861 |
| X | 93758400 | 93759600 | + | Heph | 4862 |
| X | 94092600 | 94093600 | + | int | 4863 |
| X | 94202000 | 94203000 | + | int | 4864 |
| X | 94211400 | 94212600 | + | int | 4865 |
| X | 94304000 | 94305000 | + | int | 4866 |
| X | 94563800 | 94565000 | − | Eda2r | 4867 |
| X | 94563800 | 94565000 | − | Eda2r | 4868 |
| X | 94872600 | 94873600 | + | int | 4869 |
| X | 95209800 | 95210800 | + | int | 4870 |
| X | 95242400 | 95243400 | + | int | 4871 |
| X | 95260800 | 95261800 | + | int | 4872 |
| X | 95270000 | 95271000 | + | int | 4873 |
| X | 95313200 | 95314200 | + | int | 4874 |
| X | 95386000 | 95387400 | + | Ar | 4875 |
| X | 95475600 | 95476600 | + | Ar | 4876 |
| X | 96261200 | 96262200 | + | Stard8 | 4877 |
| X | 96959600 | 96960800 | + | int | 4878 |
| X | 96975600 | 96976600 | + | int | 4879 |
| X | 97261200 | 97262800 | + | Eda | 4880 |
| X | 97261200 | 97262800 | + | Eda | 4881 |
| X | 97384000 | 97385200 | + | Eda | 4882 |
| X | 97384000 | 97385200 | + | Eda | 4883 |
| X | 97453400 | 97454800 | + | Eda | 4884 |
| X | 97453400 | 97454800 | + | Eda | 4885 |
| X | 98674600 | 98675600 | + | int | 4886 |
| X | 99763200 | 99764200 | − | Phka1 | 4887 |
| X | 100301000 | 100302400 | + | int | 4888 |
| X | 100654200 | 100656200 | + | Tsix | 4889 |
| X | 100654200 | 100656200 | − | Xist | 4890 |
| X | 100661000 | 100662000 | + | Tsix | 4891 |
| X | 100661000 | 100662000 | − | Xist | 4892 |
| X | 100663400 | 100665600 | + | Tsix | 4893 |
| X | 100663400 | 100665600 | − | Xist | 4894 |
| X | 100669800 | 100673800 | + | Tsix | 4895 |
| X | 100669800 | 100673800 | − | Xist | 4896 |
| X | 101587800 | 101588800 | − | Abcb7 | 4897 |
| X | 101833200 | 101834400 | − | Zdhhc15 | 4898 |
| X | 101962400 | 101963400 | + | int | 4899 |
| X | 102171200 | 102172400 | + | int | 4900 |
| X | 102289000 | 102290200 | + | int | 4901 |
| X | 102484000 | 102485200 | + | int | 4902 |
| X | 102497000 | 102498000 | + | int | 4903 |
| X | 102520000 | 102521000 | + | int | 4904 |
| X | 102635400 | 102636600 | + | int | 4905 |
| X | 102674800 | 102676000 | + | int | 4906 |
| X | 102820600 | 102822000 | + | int | 4907 |
| X | 102967200 | 102968200 | + | Fgf16 | 4908 |
| X | 103023000 | 103024000 | − | Atrx | 4909 |
| X | 103210600 | 103211800 | + | Cox7b | 4910 |
| X | 103861400 | 103862600 | + | Gm5127 | 4911 |
| X | 104189200 | 104190400 | + | int | 4912 |
| X | 104213400 | 104214400 | + | int | 4913 |
| X | 104574600 | 104575600 | + | int | 4914 |
| X | 105022200 | 105023200 | + | Fam46d | 4915 |
| X | 105381400 | 105382600 | + | int | 4916 |
| X | 105637200 | 105638800 | + | int | 4917 |
| X | 105700200 | 105701400 | + | int | 4918 |
| X | 105716200 | 105717200 | + | int | 4919 |
| X | 105718400 | 105719400 | + | int | 4920 |
| X | 105722200 | 105723400 | + | int | 4921 |
| X | 105742000 | 105743000 | + | int | 4922 |
| X | 105904400 | 105905800 | + | int | 4923 |
| X | 106085000 | 106086000 | + | int | 4924 |
| X | 106243400 | 106244600 | + | int | 4925 |
| X | 106652000 | 106653000 | + | int | 4926 |
| X | 106656000 | 106657000 | + | int | 4927 |
| X | 106793600 | 106795400 | + | int | 4928 |
| X | 106882000 | 106883200 | + | int | 4929 |
| X | 106952600 | 106953800 | + | int | 4930 |
| X | 107162000 | 107163000 | + | int | 4931 |
| X | 107381200 | 107382200 | + | int | 4932 |
| X | 107405600 | 107407400 | + | int | 4933 |
| X | 107409600 | 107410800 | + | int | 4934 |
| X | 107887000 | 107888000 | + | int | 4935 |
| X | 108042200 | 108043400 | + | int | 4936 |
| X | 108303200 | 108304400 | + | Cylc1 | 4937 |
| X | 108579200 | 108580600 | − | Rps6ka6 | 4938 |
| X | 108763600 | 108765000 | − | Hdx | 4939 |
| X | 108880400 | 108881600 | + | int | 4940 |
| X | 109085600 | 109086600 | + | int | 4941 |
| X | 109249600 | 109250800 | + | int | 4942 |
| X | 109468400 | 109469400 | + | Apool | 4943 |
| X | 109483800 | 109485400 | + | Apool | 4944 |
| X | 109542000 | 109543600 | + | int | 4945 |
| X | 109588800 | 109590200 | + | int | 4946 |
| X | 109631200 | 109632200 | + | 2010106E10Rik | 4947 |
| X | 109882600 | 109883600 | + | int | 4948 |
| X | 109891400 | 109892400 | + | int | 4949 |
| X | 109920000 | 109921000 | + | int | 4950 |
| X | 109960200 | 109961200 | + | int | 4951 |
| X | 110062000 | 110063000 | + | int | 4952 |
| X | 110170400 | 110171400 | − | Chm | 4953 |
| X | 110320400 | 110321600 | + | int | 4954 |
| X | 110393000 | 110394200 | + | int | 4955 |
| X | 110423800 | 110424800 | + | Dach2 | 4956 |
| X | 110423800 | 110424800 | + | Dach2 | 4957 |
| X | 110499200 | 110500200 | + | Dach2 | 4958 |
| X | 110499200 | 110500200 | + | Dach2 | 4959 |
| X | 110673200 | 110674600 | + | Dach2 | 4960 |
| X | 110673200 | 110674600 | + | Dach2 | 4961 |
| X | 110898600 | 110899800 | + | Dach2 | 4962 |
| X | 110898600 | 110899800 | + | Dach2 | 4963 |
| X | 110977200 | 110978200 | + | int | 4964 |
| X | 110987400 | 110988400 | + | int | 4965 |
| X | 111078800 | 111079800 | + | int | 4966 |
| X | 111162800 | 111164000 | + | int | 4967 |
| X | 111175800 | 111176800 | + | int | 4968 |
| X | 111181600 | 111183000 | + | int | 4969 |
| X | 111201400 | 111203000 | + | int | 4970 |
| X | 111485000 | 111486200 | + | int | 4971 |
| X | 111492600 | 111493600 | + | int | 4972 |
| X | 111798600 | 111799600 | + | int | 4973 |
| X | 111941000 | 111942400 | + | int | 4974 |
| X | 111974600 | 111975800 | + | int | 4975 |
| X | 112135600 | 112137200 | + | int | 4976 |
| X | 112353400 | 112354600 | + | int | 4977 |
| X | 112369400 | 112370400 | + | int | 4978 |
| X | 112385200 | 112386200 | + | int | 4979 |
| X | 112401800 | 112403000 | + | int | 4980 |
| X | 112570200 | 112571800 | + | int | 4981 |
| X | 112662000 | 112663200 | + | int | 4982 |
| X | 112715000 | 112716000 | + | int | 4983 |
| X | 112867400 | 112868600 | + | int | 4984 |
| X | 113168600 | 113170200 | + | int | 4985 |
| X | 113299000 | 113300000 | + | int | 4986 |
| X | 113428400 | 113429800 | + | int | 4987 |
| X | 113443400 | 113445000 | + | int | 4988 |
| X | 113557800 | 113559000 | + | int | 4989 |
| X | 113683400 | 113684400 | + | int | 4990 |
| X | 113860400 | 113861400 | + | int | 4991 |
| X | 113865600 | 113867000 | + | int | 4992 |
| X | 114020200 | 114021400 | + | int | 4993 |
| X | 114143200 | 114144400 | + | int | 4994 |
| X | 114329600 | 114330600 | + | int | 4995 |
| X | 114401800 | 114403600 | + | int | 4996 |
| X | 114691800 | 114693000 | + | int | 4997 |
| X | 114843800 | 114845400 | + | int | 4998 |
| X | 114940800 | 114942200 | + | int | 4999 |
| X | 114967200 | 114968400 | + | int | 5000 |
| X | 115330200 | 115331600 | + | int | 5001 |
| X | 115567600 | 115568800 | + | int | 5002 |
| X | 116418000 | 116419200 | + | int | 5003 |
| X | 116771400 | 116774000 | + | int | 5004 |
| X | 116966000 | 116967400 | + | int | 5005 |
| X | 117014600 | 117015800 | + | int | 5006 |
| X | 117062000 | 117063600 | + | int | 5007 |
| X | 117138000 | 117139000 | + | int | 5008 |
| X | 117225600 | 117226800 | + | int | 5009 |
| X | 117248400 | 117249600 | + | int | 5010 |
| X | 117494600 | 117496000 | + | Pcdh11x | 5011 |
| X | 117529600 | 117531000 | + | Pcdh11x | 5012 |
| X | 117622800 | 117623800 | + | Pcdh11x | 5013 |
| X | 117659600 | 117660800 | + | Pcdh11x | 5014 |
| X | 117767000 | 117768200 | + | Pcdh11x | 5015 |
| X | 117801400 | 117802800 | + | Pcdh11x | 5016 |
| X | 117962000 | 117963200 | + | Pcdh11x | 5017 |
| X | 118019000 | 118020200 | + | Pcdh11x | 5018 |
| X | 118201800 | 118202800 | + | int | 5019 |
| X | 118252000 | 118253000 | + | int | 5020 |
| X | 118389000 | 118390000 | + | int | 5021 |
| X | 118517600 | 118518800 | + | int | 5022 |
| X | 118581200 | 118582200 | + | int | 5023 |
| X | 118819000 | 118820000 | + | int | 5024 |
| X | 118867800 | 118869000 | + | int | 5025 |
| X | 118937400 | 118939000 | + | int | 5026 |
| X | 118951200 | 118952600 | + | int | 5027 |
| X | 119007200 | 119008200 | + | int | 5028 |
| X | 119088000 | 119089200 | + | int | 5029 |
| X | 119095600 | 119096600 | + | int | 5030 |
| X | 119172400 | 119174000 | + | int | 5031 |
| X | 119304000 | 119305000 | + | int | 5032 |
| X | 119358600 | 119359600 | + | int | 5033 |
| X | 119366000 | 119367600 | + | int | 5034 |
| X | 119386200 | 119387200 | + | int | 5035 |
| X | 119484800 | 119486000 | + | int | 5036 |
| X | 119557000 | 119558000 | + | int | 5037 |
| X | 119673800 | 119674800 | + | int | 5038 |
| X | 119837000 | 119838400 | + | int | 5039 |
| X | 119851400 | 119852400 | + | int | 5040 |
| X | 120000200 | 120001400 | + | int | 5041 |
| X | 120064200 | 120065600 | + | int | 5042 |
| X | 120225400 | 120226400 | + | 3110007F17Rik | 5043 |
| X | 120269400 | 120270400 | + | int | 5044 |
| X | 120439600 | 120440800 | + | int | 5045 |
| X | 120723000 | 120724200 | + | int | 5046 |
| X | 121281000 | 121282800 | + | int | 5047 |
| X | 122724400 | 122725800 | + | int | 5048 |
| X | 122729400 | 122730600 | + | int | 5049 |
| X | 122852800 | 122853800 | + | int | 5050 |
| X | 122895400 | 122896600 | + | int | 5051 |
| X | 122927000 | 122928200 | + | int | 5052 |
| X | 123022800 | 123024400 | + | int | 5053 |
| X | 123370400 | 123371600 | + | int | 5054 |
| X | 123544600 | 123546000 | + | int | 5055 |
| X | 123609600 | 123610800 | + | int | 5056 |
| X | 123720000 | 123721200 | + | int | 5057 |
| X | 123925800 | 123926800 | + | 4921511C20Rik | 5058 |
| X | 123954200 | 123955200 | + | int | 5059 |
| X | 123993200 | 123994400 | + | int | 5060 |
| X | 124035600 | 124036800 | + | int | 5061 |
| X | 124221000 | 124222200 | + | int | 5062 |
| X | 124420400 | 124421400 | + | int | 5063 |
| X | 124537000 | 124538400 | + | int | 5064 |
| X | 124545600 | 124546600 | + | int | 5065 |
| X | 124613000 | 124614200 | + | int | 5066 |
| X | 124808200 | 124809400 | + | int | 5067 |
| X | 124894400 | 124895400 | + | int | 5068 |
| X | 124900600 | 124901800 | + | int | 5069 |
| X | 124918800 | 124919800 | + | int | 5070 |
| X | 124945200 | 124946200 | + | int | 5071 |
| X | 125015800 | 125017400 | + | int | 5072 |
| X | 125422000 | 125423600 | + | int | 5073 |
| X | 125486800 | 125488200 | + | int | 5074 |
| X | 125633600 | 125635200 | + | int | 5075 |
| X | 125715400 | 125716600 | + | int | 5076 |
| X | 125781800 | 125783000 | + | int | 5077 |
| X | 125833800 | 125835400 | + | int | 5078 |
| X | 126064800 | 126065800 | + | int | 5079 |
| X | 126136200 | 126137200 | + | int | 5080 |
| X | 126161600 | 126162800 | + | int | 5081 |
| X | 126193200 | 126194200 | + | int | 5082 |
| X | 126446200 | 126447200 | + | Diap2 | 5083 |
| X | 126446200 | 126447200 | + | Diap2 | 5084 |
| X | 126715400 | 126716400 | + | Diap2 | 5085 |
| X | 126715400 | 126716400 | + | Diap2 | 5086 |
| X | 126934800 | 126936200 | + | Diap2 | 5087 |
| X | 126961400 | 126962600 | + | Diap2 | 5088 |
| X | 127374400 | 127375400 | + | int | 5089 |
| X | 127674000 | 127675200 | + | int | 5090 |
| X | 129205600 | 129206600 | + | int | 5091 |
| X | 129314400 | 129315400 | + | int | 5092 |
| X | 129422600 | 129423600 | + | int | 5093 |
| X | 129467800 | 129469000 | + | int | 5094 |
| X | 129518600 | 129519600 | + | int | 5095 |
| X | 129624000 | 129625200 | + | int | 5096 |
| X | 129640000 | 129641400 | + | int | 5097 |
| X | 129650200 | 129651200 | + | int | 5098 |
| X | 129771200 | 129772200 | + | int | 5099 |
| X | 129778600 | 129779600 | + | int | 5100 |
| X | 129826800 | 129828400 | + | int | 5101 |
| X | 130035400 | 130036800 | + | int | 5102 |
| X | 130230200 | 130231400 | + | int | 5103 |
| X | 131266200 | 131267200 | + | int | 5104 |
| X | 131504000 | 131505000 | + | int | 5105 |
| X | 131659400 | 131660600 | + | int | 5106 |
| X | 131708200 | 131709800 | − | AV320801 | 5107 |
| X | 131708200 | 131709800 | − | Gm15023 | 5108 |
| X | 131927800 | 131929000 | + | int | 5109 |
| X | 131988400 | 131989600 | + | int | 5110 |
| X | 132032000 | 132033000 | + | AV320801 | 5111 |
| X | 132032000 | 132033000 | + | Gm15023 | 5112 |
| X | 132080600 | 132081800 | + | int | 5113 |
| X | 132161400 | 132163200 | − | Prame | 5114 |
| X | 132437800 | 132438800 | + | int | 5115 |
| X | 133225600 | 133227200 | + | int | 5116 |
| X | 133406200 | 133407200 | + | int | 5117 |
| X | 133698800 | 133699800 | + | int | 5118 |
| X | 133849800 | 133850800 | + | int | 5119 |
| X | 134070000 | 134071600 | + | int | 5120 |
| X | 134356200 | 134357200 | + | Il1rapl2 | 5121 |
| X | 134747200 | 134748200 | + | Il1rapl2 | 5122 |
| X | 134887800 | 134888800 | + | Il1rapl2 | 5123 |
| X | 134905800 | 134907000 | + | Il1rapl2 | 5124 |
| X | 135011200 | 135012600 | + | Il1rapl2 | 5125 |
| X | 135234400 | 135235600 | + | Il1rapl2 | 5126 |
| X | 135553200 | 135554200 | + | int | 5127 |
| X | 136506400 | 136507400 | − | Rbm41 | 5128 |
| X | 136506400 | 136507400 | − | Rbm41 | 5129 |
| X | 137787800 | 137788800 | − | Col4a6 | 5130 |
| X | 137930600 | 137932000 | + | Col4a5 | 5131 |
| X | 137947800 | 137949000 | + | Col4a5 | 5132 |
| X | 137954400 | 137955600 | + | Col4a5 | 5133 |
| X | 138325800 | 138327000 | + | int | 5134 |
| X | 138623400 | 138624600 | − | Gucy2f | 5135 |
| X | 139189600 | 139190800 | + | Tmem164 | 5136 |
| X | 139639800 | 139640800 | + | int | 5137 |
| X | 140127200 | 140128200 | + | Pak3 | 5138 |
| X | 141391400 | 141392400 | + | Zcchc16 | 5139 |
| X | 141395200 | 141396400 | + | Zcchc16 | 5140 |
| X | 141636000 | 141637000 | + | int | 5141 |
| X | 142038200 | 142039200 | + | int | 5142 |
| X | 142432400 | 142433400 | + | int | 5143 |
| X | 142602600 | 142603800 | + | int | 5144 |
| X | 142643400 | 142644400 | + | int | 5145 |
| X | 142706600 | 142707800 | + | int | 5146 |
| X | 142942800 | 142944000 | + | int | 5147 |
| X | 142953400 | 142955000 | + | int | 5148 |
| X | 143098600 | 143100000 | + | int | 5149 |
| X | 143154400 | 143155400 | + | int | 5150 |
| X | 143991200 | 143992200 | − | Lrch2 | 5151 |
| X | 145108600 | 145109800 | + | Gm15127 | 5152 |
| X | 145248800 | 145250000 | + | int | 5153 |
| X | 146206800 | 146208000 | + | int | 5154 |
| X | 146537400 | 146538800 | + | int | 5155 |
| X | 146775600 | 146776600 | + | int | 5156 |
| X | 146882800 | 146883800 | − | Tmem29 | 5157 |
| X | 147586400 | 147587400 | + | int | 5158 |
| X | 148261800 | 148262800 | + | Huwe1 | 5159 |
| X | 148272200 | 148273200 | + | Huwe1 | 5160 |
| X | 149103000 | 149104000 | − | Shroom2 | 5161 |
| X | 149352200 | 149353800 | + | int | 5162 |
| X | 149416800 | 149417800 | + | int | 5163 |
| X | 149421200 | 149422600 | + | int | 5164 |
| X | 149574200 | 149575200 | + | Rragb | 5165 |
| X | 149985800 | 149986800 | + | int | 5166 |
| X | 150014000 | 150015600 | + | int | 5167 |
| X | 150165000 | 150166000 | + | 2210013O21Rik | 5168 |
| X | 150355800 | 150356800 | + | int | 5169 |
| X | 150570800 | 150572000 | + | int | 5170 |
| X | 151119000 | 151120200 | + | int | 5171 |
| X | 151307000 | 151308200 | + | int | 5172 |
| X | 151472000 | 151473400 | + | int | 5173 |
| X | 152148400 | 152149600 | + | int | 5174 |
| X | 152249200 | 152250400 | + | int | 5175 |
| X | 152607600 | 152608600 | + | int | 5176 |
| X | 152652000 | 152653000 | + | int | 5177 |
| X | 152679000 | 152680400 | + | int | 5178 |
| X | 152839200 | 152840200 | + | int | 5179 |
| X | 152902600 | 152903800 | + | int | 5180 |
| X | 152925600 | 152926800 | + | int | 5181 |
| X | 153057200 | 153058200 | + | int | 5182 |
| X | 153083600 | 153085000 | + | int | 5183 |
| X | 153234600 | 153236000 | + | int | 5184 |
| X | 153373000 | 153374400 | + | int | 5185 |
| X | 153680600 | 153681800 | − | Phex | 5186 |
| X | 153753200 | 153754400 | − | Phex | 5187 |
| X | 153889800 | 153890800 | − | Sms | 5188 |
| X | 154006000 | 154007200 | − | Mbtps2 | 5189 |
| X | 154006000 | 154007200 | − | Yy2 | 5190 |
| X | 154309400 | 154310400 | − | Cnksr2 | 5191 |
| X | 154377000 | 154378000 | − | Cnksr2 | 5192 |
| X | 154602400 | 154603400 | + | int | 5193 |
| X | 154631200 | 154632200 | + | int | 5194 |
| X | 154995200 | 154997000 | + | int | 5195 |
| X | 155565600 | 155566600 | + | int | 5196 |
| X | 155995400 | 155996600 | + | A830080D01Rik | 5197 |
| X | 156445800 | 156447000 | + | Map3k15 | 5198 |
| X | 160932800 | 160934000 | + | Asb9 | 5199 |
| X | 161048200 | 161049400 | + | int | 5200 |
| X | 161197000 | 161198600 | + | int | 5201 |
| X | 161216400 | 161217600 | + | int | 5202 |
| X | 161525400 | 161527000 | + | int | 5203 |
| X | 161677200 | 161678200 | − | Glra2 | 5204 |
| X | 161935600 | 161936600 | + | int | 5205 |
| X | 162035800 | 162037200 | + | int | 5206 |
| X | 162218000 | 162219200 | + | int | 5207 |
| X | 162243800 | 162245200 | + | int | 5208 |
| X | 162312000 | 162313200 | + | int | 5209 |
| X | 162365200 | 162366200 | + | int | 5210 |
| X | 162705600 | 162706600 | + | Gpm6b | 5211 |
| X | 163272000 | 163273400 | + | int | 5212 |
| X | 164877200 | 164878200 | − | Frmpd4 | 5213 |
| X | 164946000 | 164947200 | − | Frmpd4 | 5214 |
| X | 165025400 | 165026400 | + | int | 5215 |
| X | 165887600 | 165888600 | + | int | 5216 |
| X | 166426600 | 166428200 | + | Mid1 | 5217 |
| X | 166426600 | 166428200 | + | Mid1 | 5218 |
| X | 166429800 | 166433600 | + | int | 5219 |
| X | 166440000 | 166441200 | + | int | 5220 |
| X | 166442600 | 166443600 | + | int | 5221 |
| X | 166445400 | 166446400 | + | int | 5222 |
| X | 166500600 | 166501800 | + | int | 5223 |
| X | 166507400 | 166509200 | + | int | 5224 |
| X | 166585800 | 166587600 | + | int | 5225 |
| X | 166597200 | 166598200 | + | int | 5226 |
| X | 166600600 | 166601600 | + | int | 5227 |
| X | 166611600 | 166612600 | + | int | 5228 |
| X | 166628200 | 166631800 | + | int | 5229 |

TABLE 2

| chromosome | start | stop | strand | nearest gene | ID |
|---|---|---|---|---|---|
| 1 | 62925 | 63859 | + | int | 5230 |
| 1 | 1269141 | 1270483 | + | TAS1R3 | 5231 |
| 1 | 1718247 | 1720713 | − | GNB1 | 5232 |
| 1 | 2361248 | 2362574 | + | int | 5233 |
| 1 | 2429859 | 2431920 | + | PLCH2 | 5234 |
| 1 | 4580506 | 4581081 | + | int | 5235 |
| 1 | 5407372 | 5409386 | + | int | 5236 |
| 1 | 6100618 | 6101819 | + | KCNAB2 | 5237 |
| 1 | 6100618 | 6101819 | + | KCNAB2 | 5238 |
| 1 | 6100618 | 6101819 | + | KCNAB2 | 5239 |
| 1 | 6697907 | 6698543 | − | DNAJC11 | 5240 |
| 1 | 7681658 | 7682868 | + | CAMTA1 | 5241 |
| 1 | 8130448 | 8131247 | + | int | 5242 |
| 1 | 8395005 | 8395834 | + | SLC45A1 | 5243 |
| 1 | 9833148 | 9839195 | − | CLSTN1 | 5244 |
| 1 | 10238942 | 10239998 | + | UBE4B | 5245 |
| 1 | 12017859 | 12018961 | + | PLOD1 | 5246 |
| 1 | 14013613 | 14014205 | + | int | 5247 |
| 1 | 15649180 | 15650322 | + | FHAD1 | 5248 |
| 1 | 16372322 | 16374449 | + | CLCNKB | 5249 |
| 1 | 17260007 | 17260794 | + | CROCC | 5250 |
| 1 | 17901418 | 17902508 | + | ARHGEF10L | 5251 |
| 1 | 18632407 | 18633383 | + | IGSF21 | 5252 |
| 1 | 19934590 | 19935124 | + | C1orf151-NBL1 | 5253 |
| 1 | 19934590 | 19935124 | + | MINOS1 | 5254 |
| 1 | 20102316 | 20106014 | − | TMCO4 | 5255 |
| 1 | 23743330 | 23743706 | − | TCEA3 | 5256 |
| 1 | 26099805 | 26100375 | + | MAN1C1 | 5257 |
| 1 | 26139767 | 26140679 | + | SEPN1 | 5258 |
| 1 | 27226401 | 27226983 | − | GPATCH3 | 5259 |
| 1 | 31836876 | 31837408 | + | ZCCHC17 | 5260 |
| 1 | 32138278 | 32139327 | − | COL16A1 | 5261 |
| 1 | 32799624 | 32801606 | − | MARCKSL1 | 5262 |
| 1 | 33086613 | 33087181 | + | int | 5263 |
| 1 | 34635784 | 34636297 | + | C1orf94 | 5264 |
| 1 | 36027860 | 36028433 | + | NCDN | 5265 |
| 1 | 39134892 | 39135954 | + | int | 5266 |
| 1 | 41316882 | 41317594 | + | int | 5267 |
| 1 | 49259352 | 49260498 | − | AGBL4 | 5268 |
| 1 | 58877152 | 58878087 | + | int | 5269 |
| 1 | 59465285 | 59466321 | + | int | 5270 |
| 1 | 59564184 | 59565067 | + | int | 5271 |
| 1 | 64095094 | 64095217 | + | PGM1 | 5272 |
| 1 | 64095094 | 64095217 | + | PGM1 | 5273 |
| 1 | 64095094 | 64095217 | + | PGM1 | 5274 |
| 1 | 64125220 | 64125793 | + | PGM1 | 5275 |
| 1 | 64125220 | 64125793 | + | PGM1 | 5276 |
| 1 | 64125220 | 64125793 | + | PGM1 | 5277 |
| 1 | 64500904 | 64503088 | + | ROR1 | 5278 |
| 1 | 64500904 | 64503088 | + | ROR1 | 5279 |
| 1 | 65138531 | 65139380 | + | CACHD1 | 5280 |
| 1 | 69286915 | 69287593 | + | int | 5281 |
| 1 | 69412404 | 69412973 | + | int | 5282 |
| 1 | 70254124 | 70254724 | + | LRRC7 | 5283 |
| 1 | 73423014 | 73423184 | + | int | 5284 |
| 1 | 73520373 | 73521415 | + | int | 5285 |
| 1 | 73592323 | 73592596 | + | int | 5286 |
| 1 | 73870884 | 73872562 | + | int | 5287 |
| 1 | 75139852 | 75140620 | + | int | 5288 |
| 1 | 76773961 | 76775053 | + | ST6GALNAC3 | 5289 |
| 1 | 76773961 | 76775053 | + | ST6GALNAC3 | 5290 |
| 1 | 77165462 | 77166393 | + | int | 5291 |
| 1 | 77166073 | 77166699 | + | int | 5292 |
| 1 | 77366563 | 77367973 | + | ST6GALNAC5 | 5293 |
| 1 | 77594763 | 77595396 | − | PIGK | 5294 |
| 1 | 78561337 | 78562144 | + | GIPC2 | 5295 |
| 1 | 81163829 | 81164857 | + | int | 5296 |
| 1 | 81513625 | 81514317 | + | int | 5297 |
| 1 | 82338448 | 82339381 | + | LPHN2 | 5298 |
| 1 | 82553856 | 82554077 | + | int | 5299 |
| 1 | 83190610 | 83193264 | + | int | 5300 |
| 1 | 83501804 | 83502175 | + | int | 5301 |
| 1 | 83988311 | 83988698 | + | int | 5302 |
| 1 | 86621339 | 86622361 | − | COL24A1 | 5303 |
| 1 | 87104398 | 87105427 | + | CLCA3P | 5304 |
| 1 | 87665649 | 87666451 | + | int | 5305 |
| 1 | 89237196 | 89238345 | + | PKN2 | 5306 |
| 1 | 95713423 | 95713921 | + | int | 5307 |
| 1 | 96035938 | 96036972 | + | int | 5308 |
| 1 | 96575052 | 96575735 | + | int | 5309 |
| 1 | 98005281 | 98005499 | − | DPYD | 5310 |
| 1 | 98100045 | 98101075 | − | DPYD | 5311 |
| 1 | 98116801 | 98117768 | − | DPYD | 5312 |
| 1 | 98248130 | 98248310 | − | DPYD | 5313 |
| 1 | 98248130 | 98248310 | − | DPYD | 5314 |
| 1 | 99597966 | 99598085 | + | LOC100129620 | 5315 |
| 1 | 101074590 | 101075887 | + | int | 5316 |
| 1 | 102655747 | 102656554 | + | int | 5317 |
| 1 | 102785851 | 102786365 | + | int | 5318 |
| 1 | 103042793 | 103043087 | + | int | 5319 |
| 1 | 103189222 | 103189483 | + | int | 5320 |
| 1 | 103916327 | 103916671 | + | int | 5321 |
| 1 | 103968461 | 103969172 | + | int | 5322 |
| 1 | 104574457 | 104574923 | + | int | 5323 |
| 1 | 104811182 | 104811635 | + | int | 5324 |
| 1 | 106837670 | 106838525 | + | int | 5325 |
| 1 | 108854727 | 108855041 | + | int | 5326 |
| 1 | 109322026 | 109322782 | + | STXBP3 | 5327 |
| 1 | 109352245 | 109352551 | + | int | 5328 |
| 1 | 110223508 | 110223826 | + | GSTM2 | 5329 |
| 1 | 110824486 | 110826036 | + | int | 5330 |
| 1 | 112959896 | 112960298 | + | CTTNBP2NL | 5331 |
| 1 | 113132382 | 113133165 | − | ST7L | 5332 |
| 1 | 113132382 | 113133165 | − | ST7L | 5333 |
| 1 | 113676496 | 113677232 | + | int | 5334 |
| 1 | 113983467 | 113983910 | + | MAGI3 | 5335 |
| 1 | 117010815 | 117011456 | + | int | 5336 |
| 1 | 117249110 | 117250402 | + | int | 5337 |
| 1 | 117866547 | 117867704 | + | int | 5338 |
| 1 | 118953136 | 118953963 | + | int | 5339 |
| 1 | 118965396 | 118966501 | + | int | 5340 |
| 1 | 119803349 | 119804254 | + | int | 5341 |
| 1 | 120185631 | 120186892 | − | ZNF697 | 5342 |
| 1 | 120263786 | 120279827 | + | PHGDH | 5343 |
| 1 | 143898151 | 143899226 | − | FAM72D | 5344 |
| 1 | 145693257 | 145693705 | + | int | 5345 |
| 1 | 150744176 | 150744317 | + | int | 5346 |
| 1 | 150776415 | 150777080 | − | CTSK | 5347 |
| 1 | 151134323 | 151138465 | + | TNFAIP8L2- | 5348 |
| | | | | SCNM1 | |
| 1 | 151134323 | 151138465 | − | LYSMD1 | 5349 |
| 1 | 151134323 | 151138465 | − | LYSMD1 | 5350 |
| 1 | 152079633 | 152080708 | − | TCHH | 5351 |
| 1 | 156125160 | 156127864 | + | SEMA4A | 5352 |
| 1 | 156125160 | 156127864 | + | SEMA4A | 5353 |
| 1 | 156125160 | 156127864 | + | SEMA4A | 5354 |
| 1 | 157840185 | 157841465 | + | int | 5355 |
| 1 | 160492621 | 160493124 | − | SLAMF6 | 5356 |
| 1 | 161811876 | 161812052 | + | ATF6 | 5357 |
| 1 | 162824071 | 162825118 | − | C1orf110 | 5358 |
| 1 | 164237773 | 164238041 | + | int | 5359 |
| 1 | 165178317 | 165180116 | − | LMX1A | 5360 |
| 1 | 165178317 | 165180116 | − | LMX1A | 5361 |
| 1 | 166171383 | 166172403 | + | int | 5362 |
| 1 | 166245049 | 166246428 | + | int | 5363 |
| 1 | 167025391 | 167026778 | − | GPA33 | 5364 |
| 1 | 167267423 | 167267720 | + | POU2F1 | 5365 |
| 1 | 167267423 | 167267720 | + | POU2F1 | 5366 |
| 1 | 167887316 | 167889902 | − | MPC2 | 5367 |
| 1 | 167887316 | 167889902 | − | MPC2 | 5368 |
| 1 | 168169442 | 168169675 | + | TIPRL | 5369 |
| 1 | 170129256 | 170130490 | + | METTL11B | 5370 |
| 1 | 170788689 | 170789084 | + | int | 5371 |
| 1 | 175946714 | 175947029 | − | RFWD2 | 5372 |
| 1 | 178229080 | 178229672 | + | RASAL2 | 5373 |
| 1 | 181668542 | 181668658 | + | CACNA1E | 5374 |
| 1 | 182092214 | 182094219 | + | int | 5375 |
| 1 | 182960047 | 182960566 | + | int | 5376 |
| 1 | 185136994 | 185137381 | + | SWT1 | 5377 |
| 1 | 185136994 | 185137381 | + | SWT1 | 5378 |
| 1 | 186044972 | 186046518 | + | HMCN1 | 5379 |
| 1 | 186044972 | 186046518 | − | MIR548F1 | 5380 |
| 1 | 186323457 | 186324486 | − | MIR548F1 | 5381 |
| 1 | 186323457 | 186324486 | − | TPR | 5382 |
| 1 | 187007776 | 187008767 | + | int | 5383 |
| 1 | 188410834 | 188411230 | + | int | 5384 |
| 1 | 189781599 | 189782057 | + | int | 5385 |
| 1 | 191827120 | 191827308 | + | int | 5386 |
| 1 | 192104764 | 192107246 | + | int | 5387 |
| 1 | 193836227 | 193837382 | + | int | 5388 |
| 1 | 194277443 | 194278906 | + | int | 5389 |
| 1 | 194435095 | 194435736 | + | int | 5390 |
| 1 | 194689780 | 194690347 | + | int | 5391 |
| 1 | 194851222 | 194851407 | + | int | 5392 |
| 1 | 195401643 | 195401978 | + | int | 5393 |
| 1 | 195685711 | 195685935 | + | int | 5394 |
| 1 | 196646415 | 196646853 | + | CFH | 5395 |
| 1 | 196646415 | 196646853 | + | CFH | 5396 |
| 1 | 196646422 | 196646853 | + | CFH | 5397 |
| 1 | 196646422 | 196646853 | + | CFH | 5398 |
| 1 | 196651723 | 196652124 | + | CFH | 5399 |
| 1 | 196651723 | 196652124 | + | CFH | 5400 |
| 1 | 197297556 | 197298144 | + | CRB1 | 5401 |
| 1 | 197297556 | 197298144 | + | CRB1 | 5402 |
| 1 | 197871872 | 197872822 | + | C1orf53 | 5403 |
| 1 | 197910575 | 197911360 | + | int | 5404 |
| 1 | 199493175 | 199494058 | + | int | 5405 |
| 1 | 199730342 | 199731309 | + | int | 5406 |
| 1 | 199922816 | 199924442 | + | int | 5407 |
| 1 | 200047960 | 200049194 | + | NR5A2 | 5408 |
| 1 | 202512555 | 202513359 | + | PPP1R12B | 5409 |
| 1 | 202512555 | 202513359 | + | PPP1R12B | 5410 |
| 1 | 202512555 | 202513359 | + | PPP1R12B | 5411 |
| 1 | 202636522 | 202637973 | − | SYT2 | 5412 |
| 1 | 202934995 | 202936351 | − | CYB5R1 | 5413 |
| 1 | 203613813 | 203614514 | + | ATP2B4 | 5414 |
| 1 | 204839101 | 204840275 | + | NFASC | 5415 |
| 1 | 204839101 | 204840275 | + | NFASC | 5416 |
| 1 | 208169087 | 208169565 | + | int | 5417 |
| 1 | 209938164 | 209940648 | + | TRAF3IP3 | 5418 |
| 1 | 211380408 | 211381367 | + | int | 5419 |
| 1 | 212442971 | 212443782 | + | int | 5420 |
| 1 | 212617571 | 212618300 | + | NENF | 5421 |
| 1 | 212672920 | 212673672 | + | int | 5422 |
| 1 | 212844920 | 212845584 | + | int | 5423 |
| 1 | 213141900 | 213143218 | + | VASH2 | 5424 |
| 1 | 213167017 | 213168128 | − | ANGEL2 | 5425 |
| 1 | 213859018 | 213860672 | + | int | 5426 |
| 1 | 215089799 | 215090913 | + | int | 5427 |
| 1 | 216737579 | 216738597 | − | ESRRG | 5428 |
| 1 | 216737579 | 216738597 | − | ESRRG | 5429 |
| 1 | 216737579 | 216738597 | − | ESRRG | 5430 |
| 1 | 216737579 | 216738597 | − | ESRRG | 5431 |
| 1 | 216737579 | 216738597 | − | ESRRG | 5432 |
| 1 | 216737579 | 216738597 | − | ESRRG | 5433 |
| 1 | 216737579 | 216738597 | − | ESRRG | 5434 |
| 1 | 216737579 | 216738597 | − | ESRRG | 5435 |
| 1 | 216773033 | 216774789 | − | ESRRG | 5436 |
| 1 | 216773033 | 216774789 | − | ESRRG | 5437 |
| 1 | 216773033 | 216774789 | − | ESRRG | 5438 |
| 1 | 216773033 | 216774789 | − | ESRRG | 5439 |
| 1 | 216773033 | 216774789 | − | ESRRG | 5440 |
| 1 | 216773033 | 216774789 | − | ESRRG | 5441 |
| 1 | 216773033 | 216774789 | − | ESRRG | 5442 |
| 1 | 216773033 | 216774789 | − | ESRRG | 5443 |
| 1 | 220426919 | 220427424 | − | RAB3GAP2 | 5444 |
| 1 | 221020266 | 221020413 | + | int | 5445 |
| 1 | 222405247 | 222405962 | + | int | 5446 |
| 1 | 223254506 | 223254968 | + | int | 5447 |
| 1 | 223516993 | 223518250 | − | SUSD4 | 5448 |
| 1 | 223516993 | 223518250 | − | SUSD4 | 5449 |
| 1 | 223686495 | 223687136 | + | int | 5450 |
| 1 | 224861212 | 224862414 | + | CNIH3 | 5451 |
| 1 | 228502050 | 228503198 | + | OBSCN | 5452 |
| 1 | 228502050 | 228503198 | + | OBSCN | 5453 |
| 1 | 230886293 | 230886636 | + | CAPN9 | 5454 |
| 1 | 230886293 | 230886636 | + | CAPN9 | 5455 |
| 1 | 231701116 | 231701910 | + | TSNAX | 5456 |
| 1 | 231701116 | 231701910 | + | TSNAX-DISC1 | 5457 |
| 1 | 231701116 | 231701910 | + | TSNAX-DISC1 | 5458 |
| 1 | 231701116 | 231701910 | + | TSNAX-DISC1 | 5459 |
| 1 | 231701116 | 231701910 | + | TSNAX-DISC1 | 5460 |
| 1 | 233178374 | 233181335 | − | PCNXL2 | 5461 |
| 1 | 234657062 | 234658610 | + | int | 5462 |
| 1 | 236647030 | 236648184 | + | EDARADD | 5463 |
| 1 | 236647030 | 236648184 | + | EDARADD | 5464 |
| 1 | 236647192 | 236648123 | + | EDARADD | 5465 |
| 1 | 236647192 | 236648123 | + | EDARADD | 5466 |
| 1 | 240676903 | 240679934 | − | GREM2 | 5467 |
| 1 | 240946576 | 240948759 | − | RGS7 | 5468 |
| 1 | 243780378 | 243780722 | − | AKT3 | 5469 |
| 1 | 243780378 | 243780722 | − | AKT3 | 5470 |
| 1 | 243780378 | 243780722 | − | AKT3 | 5471 |
| 1 | 244106774 | 244107910 | + | LOC339529 | 5472 |
| 1 | 244534540 | 244535400 | + | C1orf100 | 5473 |
| 1 | 245244002 | 245245639 | + | EFCAB2 | 5474 |
| 1 | 245244002 | 245245639 | + | EFCAB2 | 5475 |
| 1 | 245244002 | 245245639 | + | EFCAB2 | 5476 |
| 1 | 245244002 | 245245639 | + | EFCAB2 | 5477 |
| 1 | 247782966 | 247783842 | + | int | 5478 |
| 1 | 247938064 | 247939521 | + | int | 5479 |
| 2 | 2810598 | 2811358 | + | int | 5480 |
| 2 | 3097980 | 3099705 | + | int | 5481 |
| 2 | 4118569 | 4119615 | + | int | 5482 |
| 2 | 5756085 | 5756909 | + | int | 5483 |
| 2 | 6510814 | 6511877 | + | int | 5484 |
| 2 | 7592590 | 7593545 | + | int | 5485 |
| 2 | 9328189 | 9328480 | + | int | 5486 |
| 2 | 9340151 | 9340763 | + | int | 5487 |
| 2 | 9346016 | 9347428 | + | ASAP2 | 5488 |
| 2 | 9346179 | 9346415 | + | int | 5489 |
| 2 | 9346692 | 9347428 | + | ASAP2 | 5490 |
| 2 | 9352889 | 9353704 | + | ASAP2 | 5491 |
| 2 | 10544645 | 10545182 | + | HPCAL1 | 5492 |
| 2 | 10544645 | 10545182 | + | HPCAL1 | 5493 |
| 2 | 10544645 | 10545182 | + | HPCAL1 | 5494 |
| 2 | 10544645 | 10545182 | + | HPCAL1 | 5495 |
| 2 | 10544645 | 10545182 | + | HPCAL1 | 5496 |
| 2 | 10549344 | 10550855 | + | HPCAL1 | 5497 |
| 2 | 10549344 | 10550855 | + | HPCAL1 | 5498 |
| 2 | 10549344 | 10550855 | + | HPCAL1 | 5499 |
| 2 | 10549344 | 10550855 | + | HPCAL1 | 5500 |
| 2 | 10549344 | 10550855 | + | HPCAL1 | 5501 |
| 2 | 10550855 | 10551118 | + | HPCAL1 | 5502 |
| 2 | 10550855 | 10551118 | + | HPCAL1 | 5503 |
| 2 | 10550855 | 10551118 | + | HPCAL1 | 5504 |
| 2 | 10550855 | 10551118 | + | HPCAL1 | 5505 |
| 2 | 10550855 | 10551118 | + | HPCAL1 | 5506 |
| 2 | 10562894 | 10563470 | + | HPCAL1 | 5507 |
| 2 | 10562894 | 10563470 | + | HPCAL1 | 5508 |
| 2 | 10562894 | 10563470 | + | HPCAL1 | 5509 |
| 2 | 10562894 | 10563470 | + | HPCAL1 | 5510 |
| 2 | 10562894 | 10563470 | + | HPCAL1 | 5511 |
| 2 | 11102933 | 11103733 | + | int | 5512 |
| 2 | 11936082 | 11938813 | + | LPIN1 | 5513 |
| 2 | 11936082 | 11938813 | + | LPIN1 | 5514 |
| 2 | 11936082 | 11938813 | + | LPIN1 | 5515 |
| 2 | 13283814 | 13284133 | + | int | 5516 |
| 2 | 13706520 | 13706897 | + | int | 5517 |
| 2 | 13975980 | 13976272 | + | int | 5518 |
| 2 | 14746121 | 14747130 | + | int | 5519 |
| 2 | 18962915 | 18963945 | + | int | 5520 |
| 2 | 19314511 | 19315248 | + | int | 5521 |
| 2 | 21099734 | 21100233 | + | int | 5522 |
| 2 | 22974095 | 22975110 | + | int | 5523 |
| 2 | 23556578 | 23557580 | + | int | 5524 |
| 2 | 35254552 | 35254696 | + | int | 5525 |
| 2 | 35428638 | 35428996 | + | int | 5526 |
| 2 | 35675351 | 35675774 | + | int | 5527 |
| 2 | 42290524 | 42291636 | + | int | 5528 |
| 2 | 44145147 | 44145525 | − | LRPPRC | 5529 |
| 2 | 44461058 | 44461202 | + | PPM1B | 5530 |
| 2 | 50304232 | 50304673 | − | NRXN1 | 5531 |
| 2 | 50304232 | 50304673 | − | NRXN1 | 5532 |
| 2 | 50541257 | 50541432 | − | NRXN1 | 5533 |
| 2 | 50541257 | 50541432 | − | NRXN1 | 5534 |
| 2 | 51346766 | 51347485 | + | int | 5535 |
| 2 | 51808093 | 51809454 | + | int | 5536 |
| 2 | 52052761 | 52053236 | + | int | 5537 |
| 2 | 52431854 | 52432217 | + | int | 5538 |
| 2 | 52824373 | 52825346 | + | int | 5539 |
| 2 | 52963260 | 52963505 | + | int | 5540 |
| 2 | 52990864 | 52991399 | + | int | 5541 |
| 2 | 55561419 | 55562426 | − | CCDC88A | 5542 |
| 2 | 56671889 | 56672074 | + | int | 5543 |
| 2 | 57675062 | 57675364 | + | int | 5544 |
| 2 | 57934140 | 57934515 | + | int | 5545 |
| 2 | 58386832 | 58386900 | + | VRK2 | 5546 |
| 2 | 58386832 | 58386900 | + | VRK2 | 5547 |
| 2 | 58386832 | 58386900 | − | FANCL | 5548 |
| 2 | 59251560 | 59252700 | + | FLJ30838 | 5549 |
| 2 | 59480213 | 59480707 | + | int | 5550 |
| 2 | 64052417 | 64052566 | + | int | 5551 |
| 2 | 66036593 | 66037591 | + | int | 5552 |
| 2 | 68347533 | 68348523 | + | int | 5553 |
| 2 | 68482198 | 68483520 | + | int | 5554 |
| 2 | 71234325 | 71235610 | + | int | 5555 |
| 2 | 74041965 | 74042614 | + | C2orf78 | 5556 |
| 2 | 75548626 | 75550042 | + | int | 5557 |
| 2 | 79249325 | 79250397 | + | int | 5558 |
| 2 | 79911946 | 79913406 | + | CTNNA2 | 5559 |
| 2 | 81206364 | 81207077 | + | int | 5560 |
| 2 | 82457717 | 82458506 | + | int | 5561 |
| 2 | 83089000 | 83090081 | + | int | 5562 |
| 2 | 83157658 | 83158275 | + | int | 5563 |
| 2 | 83749237 | 83750029 | + | int | 5564 |
| 2 | 85568396 | 85569005 | + | int | 5565 |
| 2 | 85858114 | 85860609 | + | USP39 | 5566 |
| 2 | 85858114 | 85860609 | + | USP39 | 5567 |
| 2 | 85858114 | 85860609 | + | USP39 | 5568 |
| 2 | 89952644 | 89953446 | + | int | 5569 |
| 2 | 97503172 | 97504334 | − | ANKRD23 | 5570 |
| 2 | 103294629 | 103295231 | + | SLC9A2 | 5571 |
| 2 | 106271853 | 106272184 | + | int | 5572 |
| 2 | 109300752 | 109301535 | + | LIMS1 | 5573 |
| 2 | 109300752 | 109301535 | + | LIMS1 | 5574 |
| 2 | 109300752 | 109301535 | + | LIMS1 | 5575 |
| 2 | 109300752 | 109301535 | + | LIMS1 | 5576 |
| 2 | 109300752 | 109301535 | + | LIMS1 | 5577 |
| 2 | 109300752 | 109301535 | + | LIMS1 | 5578 |
| 2 | 109872967 | 109874062 | + | SH3RF3 | 5579 |
| 2 | 110922133 | 110922802 | − | NPHP1 | 5580 |
| 2 | 113790622 | 113791455 | − | IL36B | 5581 |
| 2 | 113790622 | 113791455 | − | IL36B | 5582 |
| 2 | 115787274 | 115787902 | + | DPP10 | 5583 |
| 2 | 115787274 | 115787902 | + | DPP10 | 5584 |
| 2 | 116237740 | 116238632 | + | DPP10 | 5585 |
| 2 | 116237740 | 116238632 | + | DPP10 | 5586 |
| 2 | 116237740 | 116238632 | + | DPP10 | 5587 |
| 2 | 116237740 | 116238632 | + | DPP10 | 5588 |
| 2 | 116237740 | 116238632 | + | DPP10 | 5589 |
| 2 | 119914332 | 119915339 | − | C1QL2 | 5590 |
| 2 | 120464856 | 120466170 | + | int | 5591 |
| 2 | 121229781 | 121230149 | + | int | 5592 |
| 2 | 121856871 | 121857681 | + | int | 5593 |
| 2 | 123333041 | 123333382 | + | int | 5594 |
| 2 | 124122162 | 124122541 | + | int | 5595 |
| 2 | 125594590 | 125595688 | + | CNTNAP5 | 5596 |
| 2 | 126310898 | 126311093 | + | int | 5597 |
| 2 | 128183334 | 128183945 | + | PROC | 5598 |
| 2 | 129986006 | 129986499 | + | int | 5599 |
| 2 | 133317407 | 133318361 | + | GPR39 | 5600 |
| 2 | 135015861 | 135017307 | + | MGAT5 | 5601 |
| 2 | 137200000 | 137201169 | + | int | 5602 |
| 2 | 137369230 | 137370544 | + | int | 5603 |
| 2 | 137408409 | 137409442 | + | int | 5604 |
| 2 | 137813826 | 137814843 | + | THSD7B | 5605 |
| 2 | 138601734 | 138602206 | + | int | 5606 |
| 2 | 138604738 | 138605115 | + | int | 5607 |
| 2 | 139068918 | 139069725 | + | int | 5608 |
| 2 | 139542443 | 139543930 | + | int | 5609 |
| 2 | 140381445 | 140381635 | + | int | 5610 |
| 2 | 140388868 | 140389051 | + | int | 5611 |
| 2 | 141013697 | 141014027 | − | LRP1B | 5612 |
| 2 | 142309438 | 142310442 | − | LRP1B | 5613 |
| 2 | 142948108 | 142949384 | + | int | 5614 |
| 2 | 143687830 | 143697550 | + | KYNU | 5615 |
| 2 | 143687830 | 143697550 | + | KYNU | 5616 |
| 2 | 144226232 | 144226525 | + | ARHGAP15 | 5617 |
| 2 | 145161563 | 145162567 | − | ZEB2 | 5618 |
| 2 | 145599465 | 145599724 | + | DKFZp686O1327 | 5619 |
| 2 | 146423248 | 146423689 | + | int | 5620 |
| 2 | 146741340 | 146742451 | + | int | 5621 |
| 2 | 147443378 | 147443576 | + | int | 5622 |
| 2 | 147444957 | 147445159 | + | int | 5623 |
| 2 | 148794804 | 148794912 | + | MBD5 | 5624 |
| 2 | 150069506 | 150071120 | + | LYPD6B | 5625 |
| 2 | 150117925 | 150118988 | + | int | 5626 |
| 2 | 150478452 | 150479578 | + | int | 5627 |
| 2 | 152041455 | 152041721 | + | int | 5628 |
| 2 | 152302857 | 152308349 | + | RIF1 | 5629 |
| 2 | 152302857 | 152308349 | + | RIF1 | 5630 |
| 2 | 152302857 | 152308349 | + | RIF1 | 5631 |
| 2 | 154817715 | 154818597 | + | GALNT13 | 5632 |
| 2 | 155089140 | 155089662 | + | GALNT13 | 5633 |
| 2 | 155193356 | 155194698 | + | GALNT13 | 5634 |
| 2 | 155431237 | 155431831 | + | int | 5635 |
| 2 | 156238769 | 156240111 | + | int | 5636 |
| 2 | 156250920 | 156251954 | + | int | 5637 |
| 2 | 156548285 | 156548624 | + | int | 5638 |
| 2 | 157009105 | 157009874 | + | int | 5639 |
| 2 | 159068206 | 159068537 | + | CCDC148-AS1 | 5640 |
| 2 | 159068206 | 159068537 | − | CCDC148 | 5641 |
| 2 | 162548507 | 162550522 | + | SLC4A10 | 5642 |
| 2 | 163288479 | 163288689 | − | KCNH7 | 5643 |
| 2 | 163288479 | 163288689 | − | KCNH7 | 5644 |
| 2 | 165210977 | 165211163 | + | int | 5645 |
| 2 | 167876237 | 167877007 | + | XIRP2 | 5646 |
| 2 | 173447088 | 173447754 | + | PDK1 | 5647 |
| 2 | 176109892 | 176110285 | + | int | 5648 |
| 2 | 176243267 | 176244205 | + | int | 5649 |
| 2 | 178357696 | 178359652 | + | AGPS | 5650 |
| 2 | 178478339 | 178480169 | − | TTC30A | 5651 |
| 2 | 180491667 | 180493751 | − | ZNF385B | 5652 |
| 2 | 180491667 | 180493751 | − | ZNF385B | 5653 |
| 2 | 182852303 | 182853323 | + | PPP1R1C | 5654 |
| 2 | 182852303 | 182853323 | + | PPP1R1C | 5655 |
| 2 | 182852303 | 182853323 | + | PPP1R1C | 5656 |
| 2 | 182928092 | 182929303 | + | PPP1R1C | 5657 |
| 2 | 182928092 | 182929303 | + | PPP1R1C | 5658 |
| 2 | 182928092 | 182929303 | + | PPP1R1C | 5659 |
| 2 | 183339335 | 183340323 | − | PDE1A | 5660 |
| 2 | 183339335 | 183340323 | − | PDE1A | 5661 |
| 2 | 183339335 | 183340323 | − | PDE1A | 5662 |
| 2 | 184541138 | 184541317 | + | int | 5663 |
| 2 | 185105199 | 185118081 | + | int | 5664 |
| 2 | 186574480 | 186574603 | + | int | 5665 |
| 2 | 187147103 | 187147455 | + | int | 5666 |
| 2 | 187273468 | 187273674 | + | int | 5667 |
| 2 | 188255210 | 188256285 | − | CALCRL | 5668 |
| 2 | 189239230 | 189239675 | + | GULP1 | 5669 |
| 2 | 189239230 | 189239675 | + | GULP1 | 5670 |
| 2 | 189394197 | 189394417 | + | GULP1 | 5671 |
| 2 | 189394197 | 189394417 | + | GULP1 | 5672 |
| 2 | 189542964 | 189543137 | + | int | 5673 |
| 2 | 189625512 | 189625736 | − | DIRC1 | 5674 |
| 2 | 191330309 | 191331603 | + | MFSD6 | 5675 |
| 2 | 192035996 | 192037063 | + | int | 5676 |
| 2 | 192445075 | 192446271 | + | int | 5677 |
| 2 | 192836519 | 192837456 | − | TMEFF2 | 5678 |
| 2 | 193236472 | 193238217 | + | int | 5679 |
| 2 | 194173030 | 194173208 | + | int | 5680 |
| 2 | 194250243 | 194250794 | + | int | 5681 |
| 2 | 194383914 | 194384083 | + | int | 5682 |
| 2 | 194672979 | 194676448 | + | int | 5683 |
| 2 | 196544751 | 196545745 | + | SLC39A10 | 5684 |
| 2 | 196544751 | 196545745 | + | SLC39A10 | 5685 |
| 2 | 197490364 | 197490538 | + | int | 5686 |
| 2 | 198677554 | 198678591 | + | PLCL1 | 5687 |
| 2 | 198730263 | 198731013 | + | PLCL1 | 5688 |
| 2 | 198939852 | 198940319 | + | PLCL1 | 5689 |
| 2 | 198941100 | 198942643 | + | PLCL1 | 5690 |
| 2 | 199726478 | 199727540 | + | int | 5691 |
| 2 | 199914387 | 199915415 | + | int | 5692 |
| 2 | 200122933 | 200123341 | + | int | 5693 |
| 2 | 200793375 | 200794537 | − | TYW5 | 5694 |
| 2 | 201254283 | 201255419 | + | SPATS2L | 5695 |
| 2 | 201254283 | 201255419 | + | SPATS2L | 5696 |
| 2 | 201254283 | 201255419 | + | SPATS2L | 5697 |
| 2 | 202153346 | 202154489 | − | ALS2CR12 | 5698 |
| 2 | 203192385 | 203193078 | + | int | 5699 |
| 2 | 204480554 | 204482602 | + | int | 5700 |
| 2 | 205210904 | 205211598 | + | int | 5701 |
| 2 | 205274226 | 205274570 | + | int | 5702 |
| 2 | 205635310 | 205636545 | + | PARD3B | 5703 |
| 2 | 205700911 | 205701997 | + | PARD3B | 5704 |
| 2 | 206571574 | 206572979 | + | NRP2 | 5705 |
| 2 | 206571574 | 206572979 | + | NRP2 | 5706 |
| 2 | 206571574 | 206572979 | + | NRP2 | 5707 |
| 2 | 208152713 | 208153445 | + | int | 5708 |
| 2 | 208992505 | 208993362 | + | LOC100507443 | 5709 |
| 2 | 208992505 | 208993362 | − | CRYGC | 5710 |
| 2 | 209025449 | 209026387 | − | CRYGA | 5711 |
| 2 | 209198113 | 209199374 | + | PIKFYVE | 5712 |
| 2 | 209324597 | 209324920 | + | PTH2R | 5713 |
| 2 | 209324597 | 209324920 | + | PTH2R | 5714 |
| 2 | 209489030 | 209489367 | + | int | 5715 |
| 2 | 209631625 | 209632424 | + | int | 5716 |
| 2 | 210687800 | 210690141 | + | UNC80 | 5717 |
| 2 | 211071336 | 211072365 | − | ACADL | 5718 |
| 2 | 211425536 | 211426849 | + | CPS1 | 5719 |
| 2 | 211425536 | 211426849 | + | CPS1 | 5720 |
| 2 | 212533415 | 212534157 | − | ERBB4 | 5721 |
| 2 | 212874613 | 212875039 | − | ERBB4 | 5722 |
| 2 | 213733502 | 213734831 | + | int | 5723 |
| 2 | 213901967 | 213903759 | − | IKZF2 | 5724 |
| 2 | 213901967 | 213903759 | − | IKZF2 | 5725 |
| 2 | 214171815 | 214172885 | + | SPAG16 | 5726 |
| 2 | 214171815 | 214172885 | + | SPAG16 | 5727 |
| 2 | 215176504 | 215177745 | + | SPAG16 | 5728 |
| 2 | 215278372 | 215279366 | + | VWC2L | 5729 |
| 2 | 216338512 | 216339428 | + | int | 5730 |
| 2 | 216776090 | 216777748 | + | int | 5731 |
| 2 | 217252676 | 217252970 | + | int | 5732 |
| 2 | 218165767 | 218166744 | − | DIRC3 | 5733 |
| 2 | 219210629 | 219212174 | + | PNKD | 5734 |
| 2 | 219210629 | 219212174 | + | PNKD | 5735 |
| 2 | 219508639 | 219509630 | − | ZNF142 | 5736 |
| 2 | 219508639 | 219509630 | − | ZNF142 | 5737 |
| 2 | 220138448 | 220139221 | + | int | 5738 |
| 2 | 220420971 | 220422007 | − | OBSL1 | 5739 |
| 2 | 220420971 | 220422007 | − | OBSL1 | 5740 |
| 2 | 220755792 | 220757252 | + | int | 5741 |
| 2 | 224433759 | 224434706 | + | int | 5742 |
| 2 | 224554453 | 224556042 | + | int | 5743 |
| 2 | 225087562 | 225087969 | + | int | 5744 |
| 2 | 225580234 | 225581498 | + | int | 5745 |
| 2 | 226093155 | 226094921 | + | int | 5746 |
| 2 | 226119816 | 226121048 | + | int | 5747 |
| 2 | 226189783 | 226190710 | + | int | 5748 |
| 2 | 227199754 | 227200707 | + | int | 5749 |
| 2 | 231042483 | 231046216 | − | SP110 | 5750 |
| 2 | 231042483 | 231046216 | − | SP110 | 5751 |
| 2 | 231042483 | 231046216 | − | SP110 | 5752 |
| 2 | 231043570 | 231045358 | − | SP110 | 5753 |
| 2 | 231043570 | 231045358 | − | SP110 | 5754 |
| 2 | 231043570 | 231045358 | − | SP110 | 5755 |
| 2 | 231162063 | 231162923 | + | SP140 | 5756 |
| 2 | 231261661 | 231262267 | + | SP140L | 5757 |
| 2 | 231762081 | 231763222 | + | LOC151484 | 5758 |
| 2 | 233244030 | 233245076 | + | ALPP | 5759 |
| 2 | 233749691 | 233750619 | − | NGEF | 5760 |
| 2 | 233749691 | 233750619 | − | NGEF | 5761 |
| 2 | 234863536 | 234865126 | + | TRPM8 | 5762 |
| 2 | 235791909 | 235793743 | + | int | 5763 |
| 2 | 236832390 | 236834045 | + | AGAP1 | 5764 |
| 2 | 238671959 | 238673144 | + | LRRFIP1 | 5765 |
| 2 | 238671959 | 238673144 | + | LRRFIP1 | 5766 |
| 2 | 238671959 | 238673144 | + | LRRFIP1 | 5767 |
| 2 | 239552766 | 239553597 | + | int | 5768 |
| 2 | 242611901 | 242612850 | + | ATG4B | 5769 |
| 3 | 369467 | 370389 | + | CHL1 | 5770 |
| 3 | 369467 | 370389 | + | CHL1 | 5771 |
| 3 | 1142838 | 1143425 | + | CNTN6 | 5772 |
| 3 | 1191697 | 1192301 | + | CNTN6 | 5773 |
| 3 | 1584010 | 1584367 | + | int | 5774 |
| 3 | 1790124 | 1790622 | + | int | 5775 |
| 3 | 2972138 | 2972732 | + | CNTN4 | 5776 |
| 3 | 2972138 | 2972732 | + | CNTN4 | 5777 |
| 3 | 2972138 | 2972732 | + | CNTN4 | 5778 |
| 3 | 4305880 | 4306520 | + | int | 5779 |
| 3 | 6174316 | 6175356 | + | int | 5780 |
| 3 | 7965975 | 7966107 | + | int | 5781 |
| 3 | 8669599 | 8671324 | − | SSUH2 | 5782 |
| 3 | 8669599 | 8671324 | − | SSUH2 | 5783 |
| 3 | 8755326 | 8755990 | + | int | 5784 |
| 3 | 10568656 | 10569747 | + | int | 5785 |
| 3 | 10666051 | 10668167 | + | int | 5786 |
| 3 | 10857688 | 10858728 | + | SLC6A11 | 5787 |
| 3 | 17164083 | 17164806 | + | int | 5788 |
| 3 | 17725273 | 17727004 | − | TBC1D5 | 5789 |
| 3 | 17725273 | 17727004 | − | TBC1D5 | 5790 |
| 3 | 17725273 | 17727004 | − | TBC1D5 | 5791 |
| 3 | 18484658 | 18485677 | + | int | 5792 |
| 3 | 19947103 | 19947911 | − | EFHB | 5793 |
| 3 | 25124953 | 25125773 | + | int | 5794 |
| 3 | 26750878 | 26752096 | + | LRRC3B | 5795 |
| 3 | 30810212 | 30810710 | − | GADL1 | 5796 |
| 3 | 34223484 | 34224719 | + | int | 5797 |
| 3 | 34717729 | 34718306 | + | int | 5798 |
| 3 | 35741884 | 35742883 | + | ARPP21 | 5799 |
| 3 | 35741884 | 35742883 | + | ARPP21 | 5800 |
| 3 | 35741884 | 35742883 | + | ARPP21 | 5801 |
| 3 | 35977977 | 35978520 | + | int | 5802 |
| 3 | 36756415 | 36759679 | − | DCLK3 | 5803 |
| 3 | 38316851 | 38317850 | + | SLC22A13 | 5804 |
| 3 | 45584309 | 45590931 | + | LARS2 | 5805 |
| 3 | 47039680 | 47040780 | + | NBEAL2 | 5806 |
| 3 | 52073787 | 52076080 | + | int | 5807 |
| 3 | 52354256 | 52354739 | + | DNAH1 | 5808 |
| 3 | 52366568 | 52367323 | + | DNAH1 | 5809 |
| 3 | 54821639 | 54823145 | + | CACNA2D3 | 5810 |
| 3 | 56121755 | 56122952 | − | ERC2 | 5811 |
| 3 | 56144313 | 56145837 | − | ERC2 | 5812 |
| 3 | 57505308 | 57505750 | − | DNAH12 | 5813 |
| 3 | 57505308 | 57505750 | − | DNAH12 | 5814 |
| 3 | 57505392 | 57505743 | − | DNAH12 | 5815 |
| 3 | 57505392 | 57505743 | − | DNAH12 | 5816 |
| 3 | 58279339 | 58280206 | + | ABHD6 | 5817 |
| 3 | 59867692 | 59868631 | − | FHIT | 5818 |
| 3 | 60919162 | 60920259 | − | FHIT | 5819 |
| 3 | 61415667 | 61416535 | + | int | 5820 |
| 3 | 63609433 | 63609578 | + | int | 5821 |
| 3 | 64518768 | 64519826 | − | ADAMTS9 | 5822 |
| 3 | 69058781 | 69061952 | − | EOGT | 5823 |
| 3 | 72881775 | 72883135 | − | SHQ1 | 5824 |
| 3 | 73953672 | 73953794 | + | int | 5825 |
| 3 | 76060734 | 76061384 | + | int | 5826 |
| 3 | 76324635 | 76325304 | + | int | 5827 |
| 3 | 76534917 | 76535520 | + | int | 5828 |
| 3 | 76948927 | 76950857 | + | int | 5829 |
| 3 | 77207697 | 77208918 | + | ROBO2 | 5830 |
| 3 | 77207697 | 77208918 | + | ROBO2 | 5831 |
| 3 | 77563334 | 77563671 | + | ROBO2 | 5832 |
| 3 | 77563334 | 77563671 | + | ROBO2 | 5833 |
| 3 | 79129363 | 79129530 | − | ROBO1 | 5834 |
| 3 | 79215067 | 79215682 | − | ROBO1 | 5835 |
| 3 | 80493613 | 80493738 | + | int | 5836 |
| 3 | 81889478 | 81889701 | + | int | 5837 |
| 3 | 82108050 | 82108552 | + | int | 5838 |
| 3 | 82189867 | 82190050 | + | int | 5839 |
| 3 | 82828454 | 82828799 | + | int | 5840 |
| 3 | 83858400 | 83864623 | + | int | 5841 |
| 3 | 84358138 | 84362406 | + | int | 5842 |
| 3 | 84604635 | 84605364 | + | int | 5843 |
| 3 | 84775944 | 84777411 | − | LOC440970 | 5844 |
| 3 | 85921104 | 85923642 | + | CADM2 | 5845 |
| 3 | 85921104 | 85923642 | + | CADM2 | 5846 |
| 3 | 85921104 | 85923642 | + | CADM2 | 5847 |
| 3 | 86415135 | 86416846 | + | int | 5848 |
| 3 | 86507426 | 86507864 | + | int | 5849 |
| 3 | 86605944 | 86606152 | + | int | 5850 |
| 3 | 86938329 | 86938554 | + | int | 5851 |
| 3 | 87484963 | 87485773 | + | int | 5852 |
| 3 | 89832148 | 89833522 | + | int | 5853 |
| 3 | 89994810 | 89995585 | + | int | 5854 |
| 3 | 94456458 | 94456636 | + | int | 5855 |
| 3 | 95354985 | 95355794 | + | int | 5856 |
| 3 | 96563175 | 96563845 | + | EPHA6 | 5857 |
| 3 | 97732561 | 97735527 | − | GABRR3 | 5858 |
| 3 | 97849283 | 97849575 | + | int | 5859 |
| 3 | 99340486 | 99340678 | − | MIR548G | 5860 |
| 3 | 100466697 | 100468228 | + | TFG | 5861 |
| 3 | 100466697 | 100468228 | + | TFG | 5862 |
| 3 | 100466697 | 100468228 | + | TFG | 5863 |
| 3 | 100466697 | 100468228 | − | ABI3BP | 5864 |
| 3 | 100698838 | 100699036 | − | ABI3BP | 5865 |
| 3 | 102374828 | 102375669 | + | int | 5866 |
| 3 | 102825230 | 102825493 | + | int | 5867 |
| 3 | 103925344 | 103926775 | − | MIR548A3 | 5868 |
| 3 | 104486562 | 104487618 | + | int | 5869 |
| 3 | 104526494 | 104526628 | + | int | 5870 |
| 3 | 110100888 | 110101192 | + | int | 5871 |
| 3 | 110651084 | 110651851 | + | int | 5872 |
| 3 | 112542201 | 112547747 | − | CD200R1L | 5873 |
| 3 | 114818651 | 114819646 | − | ZBTB20 | 5874 |
| 3 | 115656637 | 115657345 | − | LSAMP | 5875 |
| 3 | 115846202 | 115846743 | − | LSAMP | 5876 |
| 3 | 116433994 | 116434326 | + | LSAMP-AS3 | 5877 |
| 3 | 117451995 | 117452677 | + | int | 5878 |
| 3 | 117486866 | 117487329 | + | int | 5879 |
| 3 | 119243285 | 119243471 | − | CD80 | 5880 |
| 3 | 120626292 | 120627524 | + | STXBP5L | 5881 |
| 3 | 121043228 | 121043470 | + | STXBP5L | 5882 |
| 3 | 128864455 | 128864920 | − | ISY1 | 5883 |
| 3 | 128864455 | 128864920 | − | ISY1-RAB43 | 5884 |
| 3 | 128992972 | 128994199 | + | COPG1 | 5885 |
| 3 | 130240798 | 130242042 | + | int | 5886 |
| 3 | 130648421 | 130649630 | + | ATP2C1 | 5887 |
| 3 | 130648421 | 130649630 | + | ATP2C1 | 5888 |
| 3 | 130648421 | 130649630 | + | ATP2C1 | 5889 |
| 3 | 130648421 | 130649630 | + | ATP2C1 | 5890 |
| 3 | 130648421 | 130649630 | + | ATP2C1 | 5891 |
| 3 | 130648421 | 130649630 | + | ATP2C1 | 5892 |
| 3 | 130648421 | 130649630 | + | ATP2C1 | 5893 |
| 3 | 130648421 | 130649630 | + | ATP2C1 | 5894 |
| 3 | 130648421 | 130649630 | + | ATP2C1 | 5895 |
| 3 | 133952856 | 133953046 | − | RYK | 5896 |
| 3 | 136775331 | 136783671 | + | int | 5897 |
| 3 | 137913554 | 137916532 | + | ARMC8 | 5898 |
| 3 | 137913554 | 137916532 | + | ARMC8 | 5899 |
| 3 | 141021073 | 141022577 | + | int | 5900 |
| 3 | 147011230 | 147013250 | + | int | 5901 |
| 3 | 147060248 | 147060407 | + | int | 5902 |
| 3 | 147622213 | 147622804 | + | int | 5903 |
| 3 | 147657106 | 147658272 | + | int | 5904 |
| 3 | 149846007 | 149849544 | + | int | 5905 |
| 3 | 151023568 | 151024627 | + | MED12L | 5906 |
| 3 | 151023568 | 151024627 | − | GPR87 | 5907 |
| 3 | 151110510 | 151111585 | + | MED12L | 5908 |
| 3 | 151733960 | 151734169 | + | int | 5909 |
| 3 | 152987165 | 152987814 | + | int | 5910 |
| 3 | 154030763 | 154032240 | − | DHX36 | 5911 |
| 3 | 155021162 | 155022635 | + | int | 5912 |
| 3 | 155900802 | 155901558 | + | KCNAB1 | 5913 |
| 3 | 155900802 | 155901558 | + | KCNAB1 | 5914 |
| 3 | 156070927 | 156072891 | + | KCNAB1 | 5915 |
| 3 | 156070927 | 156072891 | + | KCNAB1 | 5916 |
| 3 | 156070927 | 156072891 | + | KCNAB1 | 5917 |
| 3 | 157890491 | 157890656 | + | RSRC1 | 5918 |
| 3 | 158541781 | 158543920 | + | MFSD1 | 5919 |
| 3 | 160000453 | 160000857 | − | IFT80 | 5920 |
| 3 | 160000453 | 160000857 | − | IFT80 | 5921 |
| 3 | 160019350 | 160020098 | − | IFT80 | 5922 |
| 3 | 160019350 | 160020098 | − | IFT80 | 5923 |
| 3 | 164134187 | 164135386 | + | int | 5924 |
| 3 | 164288733 | 164289181 | + | int | 5925 |
| 3 | 166723584 | 166724347 | + | int | 5926 |
| 3 | 167061593 | 167062677 | − | ZBBX | 5927 |
| 3 | 167061593 | 167062677 | − | ZBBX | 5928 |
| 3 | 167963509 | 167964355 | + | int | 5929 |
| 3 | 168269460 | 168270355 | + | EGFEM1P | 5930 |
| 3 | 168269460 | 168270355 | + | MIR551B | 5931 |
| 3 | 169312074 | 169312786 | − | MECOM | 5932 |
| 3 | 169672092 | 169672385 | − | LOC100128164 | 5933 |
| 3 | 169672092 | 169672385 | − | LOC100128164 | 5934 |
| 3 | 170843257 | 170843799 | − | TNIK | 5935 |
| 3 | 173154797 | 173154921 | + | NLGN1 | 5936 |
| 3 | 173718296 | 173718842 | + | NLGN1 | 5937 |
| 3 | 174051829 | 174052381 | + | int | 5938 |
| 3 | 175032931 | 175033323 | + | NAALADL2 | 5939 |
| 3 | 175196776 | 175197501 | + | NAALADL2 | 5940 |
| 3 | 175376261 | 175376483 | + | NAALADL2 | 5941 |
| 3 | 177351002 | 177351120 | + | LINC00578 | 5942 |
| 3 | 180472626 | 180474146 | + | int | 5943 |
| 3 | 182414253 | 182414630 | + | int | 5944 |
| 3 | 185634515 | 185634600 | − | TRA2B | 5945 |
| 3 | 186174540 | 186175828 | − | LOC253573 | 5946 |
| 3 | 186177408 | 186178135 | − | LOC253573 | 5947 |
| 3 | 189091168 | 189107739 | + | int | 5948 |
| 3 | 189615359 | 189615893 | + | int | 5949 |
| 3 | 190659343 | 190660312 | + | int | 5950 |
| 3 | 193225814 | 193228235 | − | ATP13A4 | 5951 |
| 3 | 195890381 | 195891114 | + | int | 5952 |
| 3 | 197786953 | 197787168 | − | ANKRD18DP | 5953 |
| 4 | 3726360 | 3727717 | + | int | 5954 |
| 4 | 11068562 | 11069327 | + | int | 5955 |
| 4 | 12223643 | 12224378 | + | int | 5956 |
| 4 | 14708233 | 14709800 | + | int | 5957 |
| 4 | 18882136 | 18882563 | + | int | 5958 |
| 4 | 19110835 | 19111011 | + | int | 5959 |
| 4 | 19121730 | 19122480 | + | int | 5960 |
| 4 | 20155237 | 20165097 | + | int | 5961 |
| 4 | 21799419 | 21799737 | − | KCNIP4 | 5962 |
| 4 | 22021113 | 22021348 | + | int | 5963 |
| 4 | 24092707 | 24093761 | + | int | 5964 |
| 4 | 24946496 | 24947701 | − | CCDC149 | 5965 |
| 4 | 25672323 | 25673674 | + | SLC34A2 | 5966 |
| 4 | 25672323 | 25673674 | + | SLC34A2 | 5967 |
| 4 | 26576884 | 26577056 | + | int | 5968 |
| 4 | 26579517 | 26580003 | + | int | 5969 |
| 4 | 27477816 | 27478545 | + | int | 5970 |
| 4 | 27727434 | 27728076 | + | int | 5971 |
| 4 | 31024543 | 31025020 | + | PCDH7 | 5972 |
| 4 | 31570854 | 31571228 | + | int | 5973 |
| 4 | 31594090 | 31594583 | + | int | 5974 |
| 4 | 31698682 | 31698955 | + | int | 5975 |
| 4 | 31789866 | 31791096 | + | int | 5976 |
| 4 | 33615851 | 33616017 | + | int | 5977 |
| 4 | 33925485 | 33925835 | + | int | 5978 |
| 4 | 33936264 | 33936881 | + | int | 5979 |
| 4 | 34016819 | 34017250 | + | int | 5980 |
| 4 | 34419085 | 34419220 | + | int | 5981 |
| 4 | 34645492 | 34646486 | + | int | 5982 |
| 4 | 34799012 | 34800237 | + | int | 5983 |
| 4 | 35670626 | 35671038 | + | int | 5984 |
| 4 | 35817287 | 35817974 | + | int | 5985 |
| 4 | 43845222 | 43845527 | + | int | 5986 |
| 4 | 44695727 | 44696750 | + | GUF1 | 5987 |
| 4 | 44763427 | 44763853 | + | int | 5988 |
| 4 | 45152470 | 45154466 | + | int | 5989 |
| 4 | 45869197 | 45869870 | + | int | 5990 |
| 4 | 46038810 | 46040363 | − | GABRG1 | 5991 |
| 4 | 46170405 | 46170780 | + | int | 5992 |
| 4 | 46942286 | 46942820 | − | GABRA4 | 5993 |
| 4 | 46942286 | 46942820 | − | GABRA4 | 5994 |
| 4 | 53373212 | 53374069 | + | int | 5995 |
| 4 | 59316508 | 59317238 | + | int | 5996 |
| 4 | 60067890 | 60068135 | + | int | 5997 |
| 4 | 61206721 | 61206986 | + | int | 5998 |
| 4 | 62121450 | 62121720 | + | int | 5999 |
| 4 | 62356403 | 62356914 | + | int | 6000 |
| 4 | 63747718 | 63748216 | + | int | 6001 |
| 4 | 64186604 | 64187014 | + | int | 6002 |
| 4 | 66316865 | 66317249 | − | EPHA5 | 6003 |
| 4 | 66584759 | 66585047 | + | int | 6004 |
| 4 | 67273325 | 67273668 | + | int | 6005 |
| 4 | 67945635 | 67946097 | + | int | 6006 |
| 4 | 68704433 | 68704723 | − | TMPRSS11D | 6007 |
| 4 | 68995491 | 68996406 | − | TMPRSS11F | 6008 |
| 4 | 73364119 | 73364727 | − | ADAMTS3 | 6009 |
| 4 | 75404438 | 75405434 | + | int | 6010 |
| 4 | 77806896 | 77807763 | + | int | 6011 |
| 4 | 78662832 | 78663497 | − | CNOT6L | 6012 |
| 4 | 79140677 | 79141665 | + | FRAS1 | 6013 |
| 4 | 79140677 | 79141665 | + | FRAS1 | 6014 |
| 4 | 80511717 | 80512773 | + | int | 6015 |
| 4 | 81535936 | 81536130 | + | C4orf22 | 6016 |
| 4 | 81773361 | 81774713 | + | C4orf22 | 6017 |
| 4 | 81842538 | 81843466 | + | C4orf22 | 6018 |
| 4 | 83349485 | 83350593 | − | HNRPDL | 6019 |
| 4 | 85591547 | 85592635 | − | WDFY3 | 6020 |
| 4 | 86680606 | 86681382 | + | ARHGAP24 | 6021 |
| 4 | 88161470 | 88161839 | + | int | 6022 |
| 4 | 89677104 | 89677726 | − | FAM13A | 6023 |
| 4 | 89677104 | 89677726 | − | FAM13A | 6024 |
| 4 | 90238707 | 90238946 | + | int | 6025 |
| 4 | 93816871 | 93818414 | + | GRID2 | 6026 |
| 4 | 94341135 | 94341588 | + | GRID2 | 6027 |
| 4 | 95202783 | 95203599 | + | SMARCAD1 | 6028 |
| 4 | 95202783 | 95203599 | + | SMARCAD1 | 6029 |
| 4 | 95202783 | 95203599 | + | SMARCAD1 | 6030 |
| 4 | 95202783 | 95203599 | + | SMARCAD1 | 6031 |
| 4 | 96551660 | 96552445 | + | int | 6032 |
| 4 | 96581689 | 96592565 | + | int | 6033 |
| 4 | 97146043 | 97147095 | + | int | 6034 |
| 4 | 97207706 | 97208296 | + | int | 6035 |
| 4 | 98111116 | 98111824 | + | int | 6036 |
| 4 | 98217602 | 98219633 | + | int | 6037 |
| 4 | 98603427 | 98603725 | − | STPG2 | 6038 |
| 4 | 100357798 | 100358134 | + | int | 6039 |
| 4 | 100522534 | 100522879 | + | MTTP | 6040 |
| 4 | 101389135 | 101389693 | − | EMCN | 6041 |
| 4 | 101578110 | 101579096 | + | int | 6042 |
| 4 | 102468058 | 102468412 | + | int | 6043 |
| 4 | 102901568 | 102903311 | + | BANK1 | 6044 |
| 4 | 102901568 | 102903311 | + | BANK1 | 6045 |
| 4 | 104545444 | 104545951 | − | TACR3 | 6046 |
| 4 | 105148699 | 105149825 | + | int | 6047 |
| 4 | 105508056 | 105508696 | + | int | 6048 |
| 4 | 108038995 | 108040585 | + | int | 6049 |
| 4 | 110637991 | 110638854 | − | PLA2G12A | 6050 |
| 4 | 112325783 | 112326377 | + | int | 6051 |
| 4 | 114281415 | 114282287 | + | ANK2 | 6052 |
| 4 | 114281415 | 114282287 | + | ANK2 | 6053 |
| 4 | 117124496 | 117128503 | + | int | 6054 |
| 4 | 119972273 | 119973555 | + | SYNPO2 | 6055 |
| 4 | 120939601 | 120940313 | + | int | 6056 |
| 4 | 122383369 | 122383737 | + | int | 6057 |
| 4 | 122506756 | 122507163 | + | int | 6058 |
| 4 | 124223481 | 124225405 | + | SPATA5 | 6059 |
| 4 | 125330401 | 125330595 | + | int | 6060 |
| 4 | 126112110 | 126114626 | + | int | 6061 |
| 4 | 126507320 | 126508297 | + | int | 6062 |
| 4 | 130746537 | 130747438 | + | int | 6063 |
| 4 | 131131938 | 131132367 | + | int | 6064 |
| 4 | 131234894 | 131235716 | + | int | 6065 |
| 4 | 131481315 | 131481788 | + | int | 6066 |
| 4 | 131506117 | 131506298 | + | int | 6067 |
| 4 | 133098056 | 133098319 | + | int | 6068 |
| 4 | 134272116 | 134272261 | + | int | 6069 |
| 4 | 135514665 | 135515217 | + | int | 6070 |
| 4 | 136898188 | 136898411 | + | int | 6071 |
| 4 | 138212610 | 138213490 | + | int | 6072 |
| 4 | 138926778 | 138927123 | + | int | 6073 |
| 4 | 139778622 | 139779613 | + | int | 6074 |
| 4 | 141530634 | 141531471 | + | int | 6075 |
| 4 | 141858842 | 141858977 | − | RNF150 | 6076 |
| 4 | 142267120 | 142267711 | + | int | 6077 |
| 4 | 144270396 | 144271082 | + | GAB1 | 6078 |
| 4 | 145658288 | 145659343 | + | HHIP | 6079 |
| 4 | 151186669 | 151188014 | − | LRBA | 6080 |
| 4 | 151186669 | 151188014 | − | LRBA | 6081 |
| 4 | 151246639 | 151247842 | − | LRBA | 6082 |
| 4 | 151246639 | 151247842 | − | LRBA | 6083 |
| 4 | 151319353 | 151320288 | − | LRBA | 6084 |
| 4 | 151319353 | 151320288 | − | LRBA | 6085 |
| 4 | 151493790 | 151494775 | − | LRBA | 6086 |
| 4 | 151493790 | 151494775 | − | LRBA | 6087 |
| 4 | 156135079 | 156136079 | + | NPY2R | 6088 |
| 4 | 157515550 | 157516135 | + | int | 6089 |
| 4 | 157594758 | 157595214 | + | int | 6090 |
| 4 | 157992506 | 157992681 | + | int | 6091 |
| 4 | 158440797 | 158442429 | + | int | 6092 |
| 4 | 158492373 | 158493060 | + | int | 6093 |
| 4 | 158831481 | 158831846 | + | int | 6094 |
| 4 | 160690327 | 160690459 | + | int | 6095 |
| 4 | 160873266 | 160873477 | + | int | 6096 |
| 4 | 161889618 | 161889841 | + | int | 6097 |
| 4 | 161972140 | 161973436 | + | int | 6098 |
| 4 | 162372826 | 162373138 | − | FSTL5 | 6099 |
| 4 | 163622822 | 163623378 | + | int | 6100 |
| 4 | 164492435 | 164493172 | − | 1-Mar | 6101 |
| 4 | 164492435 | 164493172 | − | 1-Mar | 6102 |
| 4 | 164570641 | 164571035 | − | 1-Mar | 6103 |
| 4 | 164817095 | 164817215 | − | 1-Mar | 6104 |
| 4 | 165431764 | 165432125 | + | MIR5684 | 6105 |
| 4 | 166433580 | 166434390 | + | int | 6106 |
| 4 | 167833206 | 167834349 | − | SPOCK3 | 6107 |
| 4 | 167833206 | 167834349 | − | SPOCK3 | 6108 |
| 4 | 167833206 | 167834349 | − | SPOCK3 | 6109 |
| 4 | 171887430 | 171887634 | + | int | 6110 |
| 4 | 173473395 | 173473878 | + | GALNTL6 | 6111 |
| 4 | 173603422 | 173603679 | + | GALNTL6 | 6112 |
| 4 | 174669261 | 174670436 | + | int | 6113 |
| 4 | 175147672 | 175148266 | + | int | 6114 |
| 4 | 178607327 | 178607800 | + | int | 6115 |
| 4 | 179009095 | 179009829 | + | int | 6116 |
| 4 | 179642030 | 179643289 | + | int | 6117 |
| 4 | 179863872 | 179864287 | + | int | 6118 |
| 4 | 180255132 | 180256172 | + | int | 6119 |
| 4 | 181147106 | 181149133 | + | int | 6120 |
| 4 | 181383123 | 181384058 | + | int | 6121 |
| 4 | 181631512 | 181631734 | + | int | 6122 |
| 4 | 182046126 | 182046318 | − | LINC00290 | 6123 |
| 4 | 184367288 | 184368518 | + | CDKN2AIP | 6124 |
| 4 | 186361423 | 186362490 | + | C4orf47 | 6125 |
| 4 | 189544909 | 189545927 | + | int | 6126 |
| 4 | 190511057 | 190511859 | + | int | 6127 |
| 4 | 190525107 | 190525700 | + | int | 6128 |
| 5 | 411433 | 412096 | + | AHRR | 6129 |
| 5 | 453307 | 454174 | + | EXOC3 | 6130 |
| 5 | 1906893 | 1908059 | + | int | 6131 |
| 5 | 4018006 | 4018930 | + | int | 6132 |
| 5 | 6313910 | 6314411 | − | FLJ33360 | 6133 |
| 5 | 7516963 | 7518645 | + | ADCY2 | 6134 |
| 5 | 9572077 | 9573744 | + | int | 6135 |
| 5 | 11044699 | 11047082 | − | CTNND2 | 6136 |
| 5 | 13178318 | 13178939 | + | int | 6137 |
| 5 | 15141964 | 15142123 | + | int | 6138 |
| 5 | 17420046 | 17420628 | + | int | 6139 |
| 5 | 17830923 | 17831607 | + | int | 6140 |
| 5 | 17972845 | 17973635 | + | int | 6141 |
| 5 | 20514854 | 20515129 | + | int | 6142 |
| 5 | 21595895 | 21596175 | + | int | 6143 |
| 5 | 21772786 | 21773019 | − | CDH12 | 6144 |
| 5 | 22531091 | 22531411 | − | CDH12 | 6145 |
| 5 | 25496389 | 25496795 | + | int | 6146 |
| 5 | 26120632 | 26120980 | + | int | 6147 |
| 5 | 26860950 | 26861518 | + | int | 6148 |
| 5 | 27061454 | 27061982 | + | int | 6149 |
| 5 | 27132803 | 27133513 | + | int | 6150 |
| 5 | 27569230 | 27569775 | + | int | 6151 |
| 5 | 27676221 | 27677734 | + | int | 6152 |
| 5 | 28279056 | 28279277 | + | int | 6153 |
| 5 | 30172894 | 30173205 | + | int | 6154 |
| 5 | 30230066 | 30231197 | + | int | 6155 |
| 5 | 30830653 | 30831722 | + | int | 6156 |
| 5 | 30879436 | 30880235 | + | int | 6157 |
| 5 | 33684753 | 33686101 | − | ADAMTS12 | 6158 |
| 5 | 36099950 | 36100810 | + | int | 6159 |
| 5 | 39030408 | 39030844 | − | RICTOR | 6160 |
| 5 | 43503148 | 43504020 | − | C5orf34 | 6161 |
| 5 | 45822554 | 45823478 | + | int | 6162 |
| 5 | 50338851 | 50339645 | + | int | 6163 |
| 5 | 50468587 | 50469575 | + | int | 6164 |
| 5 | 50483347 | 50484719 | + | int | 6165 |
| 5 | 50911059 | 50911267 | + | int | 6166 |
| 5 | 51838282 | 51839276 | + | int | 6167 |
| 5 | 51966084 | 51966605 | + | int | 6168 |
| 5 | 53217798 | 53218863 | − | ARL15 | 6169 |
| 5 | 54917724 | 54919608 | + | int | 6170 |
| 5 | 56011663 | 56012151 | + | int | 6171 |
| 5 | 56019306 | 56019744 | + | int | 6172 |
| 5 | 56880706 | 56880979 | + | int | 6173 |
| 5 | 57317829 | 57320117 | + | int | 6174 |
| 5 | 63052514 | 63053062 | + | int | 6175 |
| 5 | 63509631 | 63510635 | + | RNF180 | 6176 |
| 5 | 63509631 | 63510635 | + | RNF180 | 6177 |
| 5 | 64771488 | 64772763 | − | ADAMTS6 | 6178 |
| 5 | 65349341 | 65350556 | + | ERBB2IP | 6179 |
| 5 | 65837460 | 65838272 | + | int | 6180 |
| 5 | 66911068 | 66911295 | + | int | 6181 |
| 5 | 66915127 | 66916241 | + | int | 6182 |
| 5 | 66982379 | 66982668 | + | int | 6183 |
| 5 | 67203372 | 67203700 | + | int | 6184 |
| 5 | 67256648 | 67258010 | + | int | 6185 |
| 5 | 67857742 | 67859165 | + | int | 6186 |
| 5 | 68252836 | 68254350 | + | int | 6187 |
| 5 | 71670152 | 71671501 | + | int | 6188 |
| 5 | 71744261 | 71744980 | − | ZNF366 | 6189 |
| 5 | 72842187 | 72842527 | + | int | 6190 |
| 5 | 73538121 | 73539483 | + | int | 6191 |
| 5 | 75430744 | 75432026 | + | SV2C | 6192 |
| 5 | 76822777 | 76823026 | + | int | 6193 |
| 5 | 77261105 | 77262142 | + | int | 6194 |
| 5 | 78416020 | 78417241 | + | BHMT | 6195 |
| 5 | 79901394 | 79903150 | + | int | 6196 |
| 5 | 80278050 | 80279336 | + | RASGRF2 | 6197 |
| 5 | 80825216 | 80826536 | − | SSBP2 | 6198 |
| 5 | 81393616 | 81394578 | + | ATG10 | 6199 |
| 5 | 81765799 | 81767125 | + | int | 6200 |
| 5 | 82807677 | 82808817 | + | VCAN | 6201 |
| 5 | 83088790 | 83095726 | + | int | 6202 |
| 5 | 83113440 | 83114000 | + | int | 6203 |
| 5 | 84023816 | 84023947 | + | int | 6204 |
| 5 | 84082996 | 84083080 | + | int | 6205 |
| 5 | 85074184 | 85074222 | + | int | 6206 |
| 5 | 87058343 | 87059178 | + | int | 6207 |
| 5 | 88187917 | 88188944 | − | MEF2C | 6208 |
| 5 | 88934373 | 88942142 | + | int | 6209 |
| 5 | 89132925 | 89133124 | + | int | 6210 |
| 5 | 89225299 | 89226347 | + | int | 6211 |
| 5 | 89376695 | 89376839 | + | int | 6212 |
| 5 | 89989443 | 89990618 | + | GPR98 | 6213 |
| 5 | 90282532 | 90282826 | + | GPR98 | 6214 |
| 5 | 91073753 | 91074087 | + | int | 6215 |
| 5 | 91542452 | 91543184 | + | int | 6216 |
| 5 | 91787258 | 91788275 | + | int | 6217 |
| 5 | 91803099 | 91804206 | + | int | 6218 |
| 5 | 92196517 | 92197877 | + | int | 6219 |
| 5 | 92424157 | 92425156 | + | int | 6220 |
| 5 | 93148073 | 93148250 | − | FAM172A | 6221 |
| 5 | 93157353 | 93158502 | − | FAM172A | 6222 |
| 5 | 94704021 | 94704778 | + | int | 6223 |
| 5 | 96861937 | 96862117 | + | int | 6224 |
| 5 | 101155716 | 101156156 | + | int | 6225 |
| 5 | 101368727 | 101368996 | + | int | 6226 |
| 5 | 101833101 | 101834884 | − | SLCO6A1 | 6227 |
| 5 | 102630082 | 102630942 | + | int | 6228 |
| 5 | 102911939 | 102912400 | + | int | 6229 |
| 5 | 104098799 | 104099937 | + | int | 6230 |
| 5 | 104482189 | 104482575 | + | int | 6231 |
| 5 | 105012219 | 105013079 | + | int | 6232 |
| 5 | 105753671 | 105754512 | + | int | 6233 |
| 5 | 105773841 | 105774132 | + | int | 6234 |
| 5 | 105852087 | 105853141 | + | int | 6235 |
| 5 | 106058786 | 106059840 | + | int | 6236 |
| 5 | 106058810 | 106059975 | + | int | 6237 |
| 5 | 106087317 | 106087701 | + | int | 6238 |
| 5 | 106087407 | 106087704 | + | int | 6239 |
| 5 | 106280823 | 106282105 | + | int | 6240 |
| 5 | 106390641 | 106390975 | + | int | 6241 |
| 5 | 106551347 | 106551976 | + | int | 6242 |
| 5 | 106605900 | 106607005 | + | int | 6243 |
| 5 | 107650786 | 107651848 | − | FBXL17 | 6244 |
| 5 | 110074053 | 110075318 | + | SLC25A46 | 6245 |
| 5 | 111058996 | 111061057 | + | STARD4-AS1 | 6246 |
| 5 | 112178785 | 112179788 | + | APC | 6247 |
| 5 | 112178785 | 112179788 | + | APC | 6248 |
| 5 | 114719801 | 114721081 | + | int | 6249 |
| 5 | 114910063 | 114910705 | + | int | 6250 |
| 5 | 115342692 | 115346410 | + | AQPEP | 6251 |
| 5 | 115491746 | 115492090 | + | COMMD10 | 6252 |
| 5 | 116440826 | 116442186 | + | int | 6253 |
| 5 | 116821795 | 116822803 | + | LOC728342 | 6254 |
| 5 | 118087362 | 118087897 | + | int | 6255 |
| 5 | 118309256 | 118309932 | − | DTWD2 | 6256 |
| 5 | 118309259 | 118310144 | − | DTWD2 | 6257 |
| 5 | 118508723 | 118509727 | + | DMXL1 | 6258 |
| 5 | 120454161 | 120455363 | + | int | 6259 |
| 5 | 122781552 | 122781963 | + | int | 6260 |
| 5 | 123397311 | 123398649 | + | int | 6261 |
| 5 | 123787358 | 123788028 | + | int | 6262 |
| 5 | 127904166 | 127904464 | + | int | 6263 |
| 5 | 127929084 | 127929388 | + | int | 6264 |
| 5 | 132800154 | 132801650 | − | FSTL4 | 6265 |
| 5 | 135007719 | 135008512 | + | int | 6266 |
| 5 | 135750534 | 135751104 | + | int | 6267 |
| 5 | 136323127 | 136324434 | − | SPOCK1 | 6268 |
| 5 | 137012247 | 137013645 | − | KLHL3 | 6269 |
| 5 | 137012247 | 137013645 | − | KLHL3 | 6270 |
| 5 | 137012247 | 137013645 | − | KLHL3 | 6271 |
| 5 | 140222373 | 140223634 | + | PCDHA1 | 6272 |
| 5 | 140222373 | 140223634 | + | PCDHA2 | 6273 |
| 5 | 140222373 | 140223634 | + | PCDHA3 | 6274 |
| 5 | 140222373 | 140223634 | + | PCDHA4 | 6275 |
| 5 | 140222373 | 140223634 | + | PCDHA5 | 6276 |
| 5 | 140222373 | 140223634 | + | PCDHA6 | 6277 |
| 5 | 140222373 | 140223634 | + | PCDHA7 | 6278 |
| 5 | 140222373 | 140223634 | + | PCDHA8 | 6279 |
| 5 | 140222373 | 140223634 | + | PCDHA8 | 6280 |
| 5 | 140236607 | 140237807 | + | PCDHA1 | 6281 |
| 5 | 140236607 | 140237807 | + | PCDHA10 | 6282 |
| 5 | 140236607 | 140237807 | + | PCDHA10 | 6283 |
| 5 | 140236607 | 140237807 | + | PCDHA2 | 6284 |
| 5 | 140236607 | 140237807 | + | PCDHA3 | 6285 |
| 5 | 140236607 | 140237807 | + | PCDHA4 | 6286 |
| 5 | 140236607 | 140237807 | + | PCDHA5 | 6287 |
| 5 | 140236607 | 140237807 | + | PCDHA6 | 6288 |
| 5 | 140236607 | 140237807 | + | PCDHA7 | 6289 |
| 5 | 140236607 | 140237807 | + | PCDHA8 | 6290 |
| 5 | 140236607 | 140237807 | + | PCDHA9 | 6291 |
| 5 | 144450811 | 144451311 | + | int | 6292 |
| 5 | 151804497 | 151806489 | + | int | 6293 |
| 5 | 155011820 | 155014741 | + | int | 6294 |
| 5 | 156108713 | 156108973 | + | SGCD | 6295 |
| 5 | 156108713 | 156108973 | + | SGCD | 6296 |
| 5 | 158745744 | 158747561 | − | IL12B | 6297 |
| 5 | 161912249 | 161913221 | + | int | 6298 |
| 5 | 162962055 | 162963075 | + | int | 6299 |
| 5 | 163703405 | 163703693 | + | int | 6300 |
| 5 | 164063088 | 164063377 | + | int | 6301 |
| 5 | 165133042 | 165133408 | + | int | 6302 |
| 5 | 165655579 | 165656142 | + | int | 6303 |
| 5 | 165901279 | 165901958 | + | int | 6304 |
| 5 | 166375282 | 166375678 | + | int | 6305 |
| 5 | 166384112 | 166385138 | + | int | 6306 |
| 5 | 170178588 | 170180080 | + | int | 6307 |
| 5 | 170240080 | 170241014 | + | GABRP | 6308 |
| 5 | 171466866 | 171467431 | + | int | 6309 |
| 5 | 176070640 | 176073229 | + | EIF4E1B | 6310 |
| 5 | 176520076 | 176521245 | + | FGFR4 | 6311 |
| 5 | 176520076 | 176521245 | + | FGFR4 | 6312 |
| 5 | 177842520 | 177844546 | − | COL23A1 | 6313 |
| 5 | 178564397 | 178565175 | − | ADAMTS2 | 6314 |
| 6 | 2520487 | 2520856 | + | int | 6315 |
| 6 | 3118828 | 3119624 | + | BPHL | 6316 |
| 6 | 6094103 | 6094375 | + | int | 6317 |
| 6 | 9674785 | 9676246 | + | int | 6318 |
| 6 | 11135676 | 11136822 | + | SMIM13 | 6319 |
| 6 | 12067594 | 12068713 | + | HIVEP1 | 6320 |
| 6 | 12097435 | 12098009 | + | HIVEP1 | 6321 |
| 6 | 13466203 | 13467364 | − | GFOD1 | 6322 |
| 6 | 13466203 | 13467364 | − | GFOD1 | 6323 |
| 6 | 15400236 | 15401199 | + | JARID2 | 6324 |
| 6 | 15400236 | 15401199 | + | JARID2 | 6325 |
| 6 | 16541776 | 16542879 | − | ATXN1 | 6326 |
| 6 | 19097736 | 19098409 | + | int | 6327 |
| 6 | 22040821 | 22041084 | + | LINC00340 | 6328 |
| 6 | 22337437 | 22337704 | + | int | 6329 |
| 6 | 22921651 | 22921966 | + | int | 6330 |
| 6 | 23957942 | 23958133 | + | int | 6331 |
| 6 | 27049476 | 27050681 | + | int | 6332 |
| 6 | 29039338 | 29040221 | + | LOC100129636 | 6333 |
| 6 | 29384984 | 29386188 | + | int | 6334 |
| 6 | 29394489 | 29395508 | − | OR11A1 | 6335 |
| 6 | 31629879 | 31632196 | − | GPANK1 | 6336 |
| 6 | 31629879 | 31632196 | − | GPANK1 | 6337 |
| 6 | 31629879 | 31632196 | − | GPANK1 | 6338 |
| 6 | 31629879 | 31632196 | − | GPANK1 | 6339 |
| 6 | 31750591 | 31753588 | − | VARS | 6340 |
| 6 | 31982825 | 31983597 | + | C4A | 6341 |
| 6 | 31982825 | 31983597 | + | C4B | 6342 |
| 6 | 31982825 | 31983597 | + | C4B_2 | 6343 |
| 6 | 36178162 | 36179684 | + | BRPF3 | 6344 |
| 6 | 36754621 | 36755101 | − | CPNE5 | 6345 |
| 6 | 46986943 | 46987898 | − | GPR110 | 6346 |
| 6 | 46986943 | 46987898 | − | GPR110 | 6347 |
| 6 | 48224935 | 48225228 | + | int | 6348 |
| 6 | 48793707 | 48794243 | + | int | 6349 |
| 6 | 50465564 | 50465751 | + | int | 6350 |
| 6 | 50704310 | 50705508 | + | TFAP2D | 6351 |
| 6 | 51539606 | 51540553 | − | PKHD1 | 6352 |
| 6 | 51932830 | 51933819 | − | PKHD1 | 6353 |
| 6 | 51932830 | 51933819 | − | PKHD1 | 6354 |
| 6 | 52276662 | 52277693 | + | int | 6355 |
| 6 | 53977828 | 53978358 | + | MLIP | 6356 |
| 6 | 54800250 | 54801181 | + | FAM83B | 6357 |
| 6 | 55624063 | 55624331 | − | BMP5 | 6358 |
| 6 | 57760418 | 57761081 | + | int | 6359 |
| 6 | 62512319 | 62512619 | − | KHDRBS2 | 6360 |
| 6 | 62685593 | 62686584 | − | KHDRBS2 | 6361 |
| 6 | 63374229 | 63375189 | + | int | 6362 |
| 6 | 63542718 | 63543134 | + | int | 6363 |
| 6 | 64871769 | 64872505 | − | EYS | 6364 |
| 6 | 65091474 | 65091480 | − | EYS | 6365 |
| 6 | 65139189 | 65140321 | − | EYS | 6366 |
| 6 | 66906946 | 66907548 | + | int | 6367 |
| 6 | 67654542 | 67654664 | + | int | 6368 |
| 6 | 67788915 | 67789199 | + | int | 6369 |
| 6 | 67790340 | 67790936 | + | int | 6370 |
| 6 | 67840178 | 67840414 | + | int | 6371 |
| 6 | 68424057 | 68424552 | + | int | 6372 |
| 6 | 69516636 | 69517061 | + | BAI3 | 6373 |
| 6 | 69563411 | 69564161 | + | BAI3 | 6374 |
| 6 | 69723191 | 69723985 | + | BAI3 | 6375 |
| 6 | 70131859 | 70132988 | + | int | 6376 |
| 6 | 70198613 | 70198951 | + | int | 6377 |
| 6 | 70763026 | 70763514 | + | COL19A1 | 6378 |
| 6 | 72557316 | 72558341 | + | int | 6379 |
| 6 | 72730048 | 72730256 | + | RIMS1 | 6380 |
| 6 | 75911482 | 75912465 | − | COL12A1 | 6381 |
| 6 | 76976715 | 76977316 | + | int | 6382 |
| 6 | 81567340 | 81568024 | + | int | 6383 |
| 6 | 84429341 | 84430387 | + | int | 6384 |
| 6 | 85892527 | 85892999 | + | int | 6385 |
| 6 | 88659936 | 88660338 | + | int | 6386 |
| 6 | 89112651 | 89113864 | + | int | 6387 |
| 6 | 90341842 | 90343216 | + | ANKRD6 | 6388 |
| 6 | 90341842 | 90343216 | + | ANKRD6 | 6389 |
| 6 | 90341842 | 90343216 | + | ANKRD6 | 6390 |
| 6 | 90341842 | 90343216 | − | LYRM2 | 6391 |
| 6 | 90341842 | 90343216 | − | LYRM2 | 6392 |
| 6 | 91264712 | 91266590 | − | MAP3K7 | 6393 |
| 6 | 92537279 | 92538089 | + | int | 6394 |
| 6 | 93565693 | 93568772 | + | int | 6395 |
| 6 | 93572345 | 93572558 | + | int | 6396 |
| 6 | 94012062 | 94012891 | − | EPHA7 | 6397 |
| 6 | 94126138 | 94127416 | − | EPHA7 | 6398 |
| 6 | 95958786 | 95959277 | + | int | 6399 |
| 6 | 96650823 | 96651990 | + | FUT9 | 6400 |
| 6 | 98147862 | 98148282 | + | int | 6401 |
| 6 | 98664881 | 98665155 | + | int | 6402 |
| 6 | 98881434 | 98881924 | + | int | 6403 |
| 6 | 99243221 | 99244290 | + | int | 6404 |
| 6 | 100738133 | 100738409 | + | int | 6405 |
| 6 | 100837981 | 100839404 | − | SIM1 | 6406 |
| 6 | 101021760 | 101021948 | − | ASCC3 | 6407 |
| 6 | 102074220 | 102074802 | + | GRIK2 | 6408 |
| 6 | 102080679 | 102083061 | + | GRIK2 | 6409 |
| 6 | 102110512 | 102111866 | + | GRIK2 | 6410 |
| 6 | 102265421 | 102266300 | + | GRIK2 | 6411 |
| 6 | 102513725 | 102514741 | + | GRIK2 | 6412 |
| 6 | 103017837 | 103017999 | + | int | 6413 |
| 6 | 103162056 | 103162688 | + | int | 6414 |
| 6 | 103855190 | 103855311 | + | int | 6415 |
| 6 | 104171488 | 104172492 | + | int | 6416 |
| 6 | 105388366 | 105389856 | − | LINC00577 | 6417 |
| 6 | 110664137 | 110664247 | − | METTL24 | 6418 |
| 6 | 111587075 | 111588093 | + | KIAA1919 | 6419 |
| 6 | 113142189 | 113142318 | + | int | 6420 |
| 6 | 113337202 | 113337395 | + | int | 6421 |
| 6 | 114384949 | 114385489 | + | int | 6422 |
| 6 | 115151091 | 115151645 | + | int | 6423 |
| 6 | 116062270 | 116062540 | + | int | 6424 |
| 6 | 118556982 | 118558192 | + | SLC35F1 | 6425 |
| 6 | 120711284 | 120711618 | + | int | 6426 |
| 6 | 120869251 | 120869795 | + | int | 6427 |
| 6 | 121547809 | 121548098 | − | C6orf170 | 6428 |
| 6 | 121992616 | 121992780 | + | int | 6429 |
| 6 | 122371062 | 122371835 | + | int | 6430 |
| 6 | 122540242 | 122540652 | + | int | 6431 |
| 6 | 122595057 | 122595450 | + | int | 6432 |
| 6 | 123723730 | 123723936 | − | TRDN | 6433 |
| 6 | 123723730 | 123723936 | − | TRDN | 6434 |
| 6 | 124162774 | 124163111 | + | NKAIN2 | 6435 |
| 6 | 124678438 | 124678894 | + | NKAIN2 | 6436 |
| 6 | 124772563 | 124772926 | + | NKAIN2 | 6437 |
| 6 | 124832365 | 124832598 | + | NKAIN2 | 6438 |
| 6 | 126760449 | 126761337 | + | int | 6439 |
| 6 | 127352019 | 127354264 | + | int | 6440 |
| 6 | 127420885 | 127421098 | + | int | 6441 |
| 6 | 129425614 | 129427003 | + | LAMA2 | 6442 |
| 6 | 130761534 | 130762542 | + | TMEM200A | 6443 |
| 6 | 130761534 | 130762542 | + | TMEM200A | 6444 |
| 6 | 130761534 | 130762542 | + | TMEM200A | 6445 |
| 6 | 132469883 | 132470161 | + | LOC100507254 | 6446 |
| 6 | 132815708 | 132816930 | − | STX7 | 6447 |
| 6 | 132921228 | 132921423 | + | int | 6448 |
| 6 | 133153743 | 133154243 | + | int | 6449 |
| 6 | 133731456 | 133732666 | + | EYA4 | 6450 |
| 6 | 136857975 | 136858418 | − | MAP7 | 6451 |
| 6 | 140134428 | 140134887 | + | LOC100132735 | 6452 |
| 6 | 140643216 | 140644851 | + | int | 6453 |
| 6 | 140646470 | 140664490 | + | int | 6454 |
| 6 | 140982791 | 140983126 | + | int | 6455 |
| 6 | 141004989 | 141005589 | + | MIR4465 | 6456 |
| 6 | 141140157 | 141140638 | + | int | 6457 |
| 6 | 141653382 | 141653715 | + | int | 6458 |
| 6 | 141674150 | 141674486 | + | int | 6459 |
| 6 | 141754905 | 141756527 | + | int | 6460 |
| 6 | 142038274 | 142038529 | + | int | 6461 |
| 6 | 145381863 | 145382238 | + | int | 6462 |
| 6 | 145897384 | 145897588 | + | int | 6463 |
| 6 | 147228176 | 147228848 | − | STXBP5-AS1 | 6464 |
| 6 | 151365907 | 151367099 | + | MTHFD1L | 6465 |
| 6 | 151365907 | 151367099 | + | MTHFD1L | 6466 |
| 6 | 152237896 | 152238905 | + | ESR1 | 6467 |
| 6 | 152237896 | 152238905 | + | ESR1 | 6468 |
| 6 | 152237896 | 152238905 | + | ESR1 | 6469 |
| 6 | 152237896 | 152238905 | + | ESR1 | 6470 |
| 6 | 153631840 | 153632691 | + | int | 6471 |
| 6 | 156692994 | 156693562 | + | int | 6472 |
| 6 | 157396844 | 157397403 | + | ARID1B | 6473 |
| 6 | 158921439 | 158922875 | + | TULP4 | 6474 |
| 6 | 158932957 | 158935524 | + | int | 6475 |
| 6 | 159026914 | 159028296 | + | TMEM181 | 6476 |
| 6 | 159045270 | 159046532 | + | TMEM181 | 6477 |
| 6 | 159085235 | 159085754 | + | SYTL3 | 6478 |
| 6 | 159085235 | 159085754 | + | SYTL3 | 6479 |
| 6 | 159139724 | 159141869 | + | SYTL3 | 6480 |
| 6 | 159370777 | 159374306 | + | int | 6481 |
| 6 | 162624080 | 162624905 | − | PARK2 | 6482 |
| 6 | 163846824 | 163847276 | + | QKI | 6483 |
| 6 | 164347628 | 164349243 | + | int | 6484 |
| 6 | 166342574 | 166343292 | − | LINC00473 | 6485 |
| 6 | 167570865 | 167571929 | − | GPR31 | 6486 |
| 6 | 167570973 | 167571929 | − | GPR31 | 6487 |
| 6 | 167723956 | 167725135 | + | UNC93A | 6488 |
| 6 | 167744131 | 167753631 | + | TTLL2 | 6489 |
| 6 | 167744131 | 167753684 | + | TTLL2 | 6490 |
| 6 | 168366073 | 168367094 | + | MLLT4 | 6491 |
| 6 | 170160499 | 170166728 | + | C6orf70 | 6492 |
| 6 | 170160658 | 170166697 | + | C6orf70 | 6493 |
| 7 | 8950599 | 8950793 | + | int | 6494 |
| 7 | 8965227 | 8965681 | + | int | 6495 |
| 7 | 9157021 | 9157914 | + | int | 6496 |
| 7 | 9185161 | 9186225 | + | int | 6497 |
| 7 | 10281343 | 10283294 | + | int | 6498 |
| 7 | 10458497 | 10459160 | + | int | 6499 |
| 7 | 10837165 | 10838117 | + | int | 6500 |
| 7 | 11514737 | 11515808 | − | THSD7A | 6501 |
| 7 | 14412888 | 14413905 | − | DGKB | 6502 |
| 7 | 14412888 | 14413905 | − | DGKB | 6503 |
| 7 | 14822694 | 14823340 | − | DGKB | 6504 |
| 7 | 14822694 | 14823340 | − | DGKB | 6505 |
| 7 | 15539458 | 15540002 | − | AGMO | 6506 |
| 7 | 15651764 | 15652620 | − | MEOX2 | 6507 |
| 7 | 17471730 | 17472041 | + | int | 6508 |
| 7 | 17815327 | 17815847 | + | int | 6509 |
| 7 | 18874694 | 18876199 | + | HDAC9 | 6510 |
| 7 | 18874694 | 18876199 | + | HDAC9 | 6511 |
| 7 | 18874694 | 18876199 | + | HDAC9 | 6512 |
| 7 | 19820501 | 19825293 | + | int | 6513 |
| 7 | 20068358 | 20068772 | + | int | 6514 |
| 7 | 20104434 | 20105810 | + | int | 6515 |
| 7 | 20148512 | 20149240 | + | int | 6516 |
| 7 | 21179439 | 21180389 | + | int | 6517 |
| 7 | 21412363 | 21414161 | + | int | 6518 |
| 7 | 23512974 | 23514838 | + | int | 6519 |
| 7 | 25600507 | 25600864 | + | int | 6520 |
| 7 | 25804458 | 25805684 | + | int | 6521 |
| 7 | 26231795 | 26236097 | − | HNRNPA2B1 | 6522 |
| 7 | 26593528 | 26594726 | + | int | 6523 |
| 7 | 29385891 | 29386887 | + | CHN2 | 6524 |
| 7 | 29909724 | 29911079 | + | WIPF3 | 6525 |
| 7 | 31682480 | 31683976 | + | CCDC129 | 6526 |
| 7 | 31682480 | 31683976 | + | CCDC129 | 6527 |
| 7 | 31682480 | 31683976 | + | CCDC129 | 6528 |
| 7 | 31682480 | 31683976 | + | CCDC129 | 6529 |
| 7 | 31961290 | 31961850 | − | PDE1C | 6530 |
| 7 | 31961290 | 31961850 | − | PDE1C | 6531 |
| 7 | 31961290 | 31961850 | − | PDE1C | 6532 |
| 7 | 31961290 | 31961850 | − | PDE1C | 6533 |
| 7 | 31961290 | 31961850 | − | PDE1C | 6534 |
| 7 | 35522088 | 35522888 | + | int | 6535 |
| 7 | 37768761 | 37769858 | + | int | 6536 |
| 7 | 38449340 | 38449488 | − | AMPH | 6537 |
| 7 | 39180263 | 39181373 | + | POU6F2 | 6538 |
| 7 | 41245499 | 41245615 | + | int | 6539 |
| 7 | 42433062 | 42435724 | + | int | 6540 |
| 7 | 44507439 | 44507962 | − | NUDCD3 | 6541 |
| 7 | 48074760 | 48076312 | + | C7orf57 | 6542 |
| 7 | 50122472 | 50122918 | − | ZPBP | 6543 |
| 7 | 51417478 | 51418591 | + | int | 6544 |
| 7 | 53998338 | 53998630 | + | int | 6545 |
| 7 | 54087664 | 54087985 | + | int | 6546 |
| 7 | 54122728 | 54123050 | + | int | 6547 |
| 7 | 54613953 | 54614746 | + | VSTM2A | 6548 |
| 7 | 54710344 | 54711645 | + | int | 6549 |
| 7 | 65705217 | 65706321 | + | TPST1 | 6550 |
| 7 | 66927614 | 66928652 | + | int | 6551 |
| 7 | 66949150 | 66949865 | + | int | 6552 |
| 7 | 73096550 | 73097720 | − | DNAJC30 | 6553 |
| 7 | 73399859 | 73400514 | + | int | 6554 |
| 7 | 79999579 | 79999916 | + | int | 6555 |
| 7 | 80412150 | 80413593 | − | SEMA3C | 6556 |
| 7 | 81866949 | 81867718 | − | CACNA2D1 | 6557 |
| 7 | 83590260 | 83591305 | − | SEMA3A | 6558 |
| 7 | 83660027 | 83661507 | − | SEMA3A | 6559 |
| 7 | 83913220 | 83914205 | + | int | 6560 |
| 7 | 85272859 | 85273621 | + | int | 6561 |
| 7 | 85556776 | 85556905 | + | int | 6562 |
| 7 | 87154148 | 87159767 | − | ABCB1 | 6563 |
| 7 | 87671866 | 87671986 | + | ADAM22 | 6564 |
| 7 | 87671866 | 87671986 | + | ADAM22 | 6565 |
| 7 | 89285815 | 89285949 | + | int | 6566 |
| 7 | 91241010 | 91241798 | + | int | 6567 |
| 7 | 91275858 | 91280740 | + | int | 6568 |
| 7 | 92138296 | 92139078 | − | PEX1 | 6569 |
| 7 | 92462386 | 92466442 | − | CDK6 | 6570 |
| 7 | 92462386 | 92466442 | − | CDK6 | 6571 |
| 7 | 92462416 | 92466470 | − | CDK6 | 6572 |
| 7 | 92462416 | 92466470 | − | CDK6 | 6573 |
| 7 | 92542306 | 92544684 | + | int | 6574 |
| 7 | 92673061 | 92674580 | + | int | 6575 |
| 7 | 92932201 | 92933112 | + | CCDC132 | 6576 |
| 7 | 93051369 | 93051566 | + | int | 6577 |
| 7 | 94138044 | 94139428 | + | CASD1 | 6578 |
| 7 | 94147971 | 94149219 | + | CASD1 | 6579 |
| 7 | 94528029 | 94528246 | + | int | 6580 |
| 7 | 95401670 | 95402755 | + | DYNC1I1 | 6581 |
| 7 | 98237302 | 98237443 | + | int | 6582 |
| 7 | 99765826 | 99767163 | − | GAL3ST4 | 6583 |
| 7 | 100309077 | 100309558 | + | int | 6584 |
| 7 | 102950795 | 102951024 | + | PMPCB | 6585 |
| 7 | 103324542 | 103325289 | − | RELN | 6586 |
| 7 | 104377292 | 104378198 | + | LHFPL3 | 6587 |
| 7 | 107820262 | 107821052 | − | NRCAM | 6588 |
| 7 | 107820262 | 107821052 | − | NRCAM | 6589 |
| 7 | 107964420 | 107965575 | − | NRCAM | 6590 |
| 7 | 109863976 | 109865022 | + | int | 6591 |
| 7 | 110251763 | 110251913 | + | int | 6592 |
| 7 | 110521959 | 110523007 | − | IMMP2L | 6593 |
| 7 | 110521959 | 110523007 | − | IMMP2L | 6594 |
| 7 | 110829829 | 110830881 | − | IMMP2L | 6595 |
| 7 | 110829829 | 110830881 | − | IMMP2L | 6596 |
| 7 | 112788413 | 112789377 | + | int | 6597 |
| 7 | 113105258 | 113105763 | + | int | 6598 |
| 7 | 114349206 | 114349885 | + | int | 6599 |
| 7 | 114875910 | 114876802 | + | int | 6600 |
| 7 | 115520995 | 115522169 | + | int | 6601 |
| 7 | 116825349 | 116828438 | + | ST7 | 6602 |
| 7 | 116825349 | 116828438 | + | ST7 | 6603 |
| 7 | 116825349 | 116828438 | + | ST7-OT3 | 6604 |
| 7 | 117651642 | 117652244 | + | int | 6605 |
| 7 | 119556816 | 119557483 | + | int | 6606 |
| 7 | 119935871 | 119936432 | + | KCND2 | 6607 |
| 7 | 119980649 | 119981229 | + | KCND2 | 6608 |
| 7 | 120929056 | 120936009 | + | CPED1 | 6609 |
| 7 | 121038776 | 121038879 | + | int | 6610 |
| 7 | 121281549 | 121282063 | + | int | 6611 |
| 7 | 121316315 | 121317100 | + | int | 6612 |
| 7 | 122624654 | 122625029 | + | int | 6613 |
| 7 | 123771455 | 123772651 | + | int | 6614 |
| 7 | 126986838 | 126988191 | + | int | 6615 |
| 7 | 127353470 | 127354435 | + | SND1 | 6616 |
| 7 | 131153643 | 131155888 | + | MKLN1 | 6617 |
| 7 | 131153643 | 131155888 | + | MKLN1 | 6618 |
| 7 | 131834785 | 131835762 | − | PLXNA4 | 6619 |
| 7 | 133017614 | 133017817 | + | EXOC4 | 6620 |
| 7 | 133017614 | 133017817 | + | EXOC4 | 6621 |
| 7 | 133079833 | 133080477 | + | EXOC4 | 6622 |
| 7 | 133079833 | 133080477 | + | EXOC4 | 6623 |
| 7 | 133643548 | 133643738 | + | EXOC4 | 6624 |
| 7 | 134019530 | 134021757 | + | int | 6625 |
| 7 | 135492681 | 135493702 | + | int | 6626 |
| 7 | 136025700 | 136026358 | + | int | 6627 |
| 7 | 137574879 | 137576026 | − | CREB3L2 | 6628 |
| 7 | 139790678 | 139791489 | − | JHDM1D | 6629 |
| 7 | 142229269 | 142229616 | + | int | 6630 |
| 7 | 143185504 | 143185552 | + | EPHA1-AS1 | 6631 |
| 7 | 143657071 | 143657964 | + | OR2F1 | 6632 |
| 7 | 143793594 | 143794281 | + | int | 6633 |
| 7 | 144680390 | 144681438 | + | int | 6634 |
| 7 | 144841967 | 144842466 | + | int | 6635 |
| 7 | 145586081 | 145586752 | + | int | 6636 |
| 7 | 145725000 | 145725133 | + | int | 6637 |
| 7 | 145964896 | 145965109 | + | CNTNAP2 | 6638 |
| 7 | 146409513 | 146409987 | + | CNTNAP2 | 6639 |
| 7 | 146748920 | 146749238 | + | CNTNAP2 | 6640 |
| 7 | 146820722 | 146822585 | + | CNTNAP2 | 6641 |
| 7 | 146876800 | 146877428 | + | CNTNAP2 | 6642 |
| 7 | 155100398 | 155101502 | + | INSIG1 | 6643 |
| 7 | 155246818 | 155247783 | + | int | 6644 |
| 7 | 157373664 | 157373878 | − | PTPRN2 | 6645 |
| 8 | 1999985 | 2001093 | + | MYOM2 | 6646 |
| 8 | 2375326 | 2376050 | + | int | 6647 |
| 8 | 3263003 | 3264138 | − | CSMD1 | 6648 |
| 8 | 3854632 | 3855716 | − | CSMD1 | 6649 |
| 8 | 5560623 | 5561792 | + | int | 6650 |
| 8 | 5715205 | 5716404 | + | int | 6651 |
| 8 | 6068728 | 6069191 | + | int | 6652 |
| 8 | 8739509 | 8741622 | − | MFHAS1 | 6653 |
| 8 | 10772178 | 10773492 | − | XKR6 | 6654 |
| 8 | 14921694 | 14922871 | − | SGCZ | 6655 |
| 8 | 15373524 | 15373989 | + | int | 6656 |
| 8 | 21016360 | 21017295 | + | int | 6657 |
| 8 | 21762162 | 21763736 | + | int | 6658 |
| 8 | 27114630 | 27115730 | − | STMN4 | 6659 |
| 8 | 28625074 | 28625978 | − | INTS9 | 6660 |
| 8 | 28625074 | 28625978 | − | INTS9 | 6661 |
| 8 | 29544755 | 29545677 | + | int | 6662 |
| 8 | 31461424 | 31464559 | + | int | 6663 |
| 8 | 33255494 | 33255714 | − | FUT10 | 6664 |
| 8 | 34170578 | 34172316 | + | int | 6665 |
| 8 | 34357556 | 34358603 | + | int | 6666 |
| 8 | 34423884 | 34424691 | + | int | 6667 |
| 8 | 48105418 | 48106013 | + | int | 6668 |
| 8 | 49430852 | 49431514 | + | int | 6669 |
| 8 | 53173292 | 53173953 | − | ST18 | 6670 |
| 8 | 54718087 | 54718219 | − | ATP6V1H | 6671 |
| 8 | 54718087 | 54718219 | − | ATP6V1H | 6672 |
| 8 | 54957845 | 54958899 | + | int | 6673 |
| 8 | 55729007 | 55729258 | + | int | 6674 |
| 8 | 57066292 | 57066450 | + | int | 6675 |
| 8 | 61633964 | 61634857 | + | CHD7 | 6676 |
| 8 | 62491097 | 62492180 | − | ASPH | 6677 |
| 8 | 62491097 | 62492180 | − | ASPH | 6678 |
| 8 | 63618060 | 63626064 | + | NKAIN3 | 6679 |
| 8 | 64820715 | 64823755 | + | int | 6680 |
| 8 | 67384008 | 67385042 | + | int | 6681 |
| 8 | 67543965 | 67545285 | − | VCPIP1 | 6682 |
| 8 | 70364610 | 70365255 | + | int | 6683 |
| 8 | 75830795 | 75831517 | + | int | 6684 |
| 8 | 76989862 | 76990217 | + | int | 6685 |
| 8 | 77799090 | 77799477 | + | int | 6686 |
| 8 | 78118735 | 78119254 | + | int | 6687 |
| 8 | 78484257 | 78485519 | + | int | 6688 |
| 8 | 79993707 | 79994804 | + | int | 6689 |
| 8 | 81166642 | 81169331 | + | int | 6690 |
| 8 | 81470419 | 81470793 | + | int | 6691 |
| 8 | 82838201 | 82838397 | + | int | 6692 |
| 8 | 83215521 | 83218133 | + | int | 6693 |
| 8 | 83401018 | 83401517 | + | int | 6694 |
| 8 | 83437945 | 83438297 | + | int | 6695 |
| 8 | 84168099 | 84168233 | + | int | 6696 |
| 8 | 85366877 | 85367506 | + | RALYL | 6697 |
| 8 | 85366877 | 85367506 | + | RALYL | 6698 |
| 8 | 85366877 | 85367506 | + | RALYL | 6699 |
| 8 | 86084700 | 86085502 | + | int | 6700 |
| 8 | 86902338 | 86902845 | + | int | 6701 |
| 8 | 88636214 | 88637052 | + | int | 6702 |
| 8 | 88993718 | 88994704 | + | int | 6703 |
| 8 | 89227250 | 89227746 | − | MMP16 | 6704 |
| 8 | 89560106 | 89560773 | + | int | 6705 |
| 8 | 90238565 | 90238973 | + | int | 6706 |
| 8 | 90293015 | 90293388 | + | int | 6707 |
| 8 | 90492310 | 90493228 | + | int | 6708 |
| 8 | 90582702 | 90583056 | + | int | 6709 |
| 8 | 91771384 | 91774733 | + | int | 6710 |
| 8 | 92097106 | 92098484 | + | OTUD6B | 6711 |
| 8 | 92326915 | 92327384 | + | SLC26A7 | 6712 |
| 8 | 92326915 | 92327384 | + | SLC26A7 | 6713 |
| 8 | 93728953 | 93729178 | − | FLJ46284 | 6714 |
| 8 | 93890889 | 93891005 | + | int | 6715 |
| 8 | 97312337 | 97312728 | + | PTDSS1 | 6716 |
| 8 | 97974138 | 97974487 | + | CPQ | 6717 |
| 8 | 98072420 | 98073343 | + | CPQ | 6718 |
| 8 | 98114249 | 98115224 | + | CPQ | 6719 |
| 8 | 102568853 | 102569784 | + | GRHL2 | 6720 |
| 8 | 104897371 | 104898807 | + | RIMS2 | 6721 |
| 8 | 104897371 | 104898807 | + | RIMS2 | 6722 |
| 8 | 104917218 | 104917848 | + | RIMS2 | 6723 |
| 8 | 104917218 | 104917848 | + | RIMS2 | 6724 |
| 8 | 106134096 | 106134778 | + | int | 6725 |
| 8 | 106450489 | 106454147 | + | ZFPM2 | 6726 |
| 8 | 106563713 | 106564941 | + | ZFPM2 | 6727 |
| 8 | 107216842 | 107217414 | + | int | 6728 |
| 8 | 109553309 | 109553685 | + | int | 6729 |
| 8 | 110518363 | 110518727 | + | PKHD1L1 | 6730 |
| 8 | 110636542 | 110637312 | − | SYBU | 6731 |
| 8 | 110636542 | 110637312 | − | SYBU | 6732 |
| 8 | 110636542 | 110637312 | − | SYBU | 6733 |
| 8 | 110636542 | 110637312 | − | SYBU | 6734 |
| 8 | 110636542 | 110637312 | − | SYBU | 6735 |
| 8 | 110636542 | 110637312 | − | SYBU | 6736 |
| 8 | 111213981 | 111215585 | + | int | 6737 |
| 8 | 112824040 | 112824228 | + | int | 6738 |
| 8 | 112942537 | 112942862 | + | int | 6739 |
| 8 | 113155124 | 113155381 | + | int | 6740 |
| 8 | 113789235 | 113789703 | − | CSMD3 | 6741 |
| 8 | 113789235 | 113789703 | − | CSMD3 | 6742 |
| 8 | 114808001 | 114810295 | + | int | 6743 |
| 8 | 114945451 | 114945920 | + | int | 6744 |
| 8 | 114945945 | 114946382 | + | int | 6745 |
| 8 | 114989625 | 115001762 | + | int | 6746 |
| 8 | 115880641 | 115881390 | + | int | 6747 |
| 8 | 116175349 | 116175618 | + | int | 6748 |
| 8 | 116598956 | 116599981 | − | TRPS1 | 6749 |
| 8 | 116631205 | 116632609 | − | TRPS1 | 6750 |
| 8 | 116783876 | 116785167 | + | int | 6751 |
| 8 | 116899782 | 116901024 | + | int | 6752 |
| 8 | 118445882 | 118446273 | + | int | 6753 |
| 8 | 119305892 | 119307108 | − | SAMD12 | 6754 |
| 8 | 119657830 | 119659599 | + | SAMD12-AS1 | 6755 |
| 8 | 120450727 | 120450954 | + | int | 6756 |
| 8 | 122468700 | 122468847 | + | int | 6757 |
| 8 | 122479498 | 122480632 | + | int | 6758 |
| 8 | 124664080 | 124665080 | − | KLHL38 | 6759 |
| 8 | 124952253 | 124955429 | + | FER1L6 | 6760 |
| 8 | 128911760 | 128913191 | + | PVT1 | 6761 |
| 8 | 129483636 | 129484329 | + | int | 6762 |
| 8 | 129497669 | 129497997 | + | int | 6763 |
| 8 | 135422187 | 135422557 | + | int | 6764 |
| 8 | 136284944 | 136286046 | + | LOC286094 | 6765 |
| 8 | 137050481 | 137051433 | + | int | 6766 |
| 8 | 137189535 | 137190834 | + | int | 6767 |
| 8 | 137598203 | 137598757 | + | int | 6768 |
| 8 | 137632256 | 137633435 | + | int | 6769 |
| 8 | 142169638 | 142171148 | + | DENND3 | 6770 |
| 8 | 144620207 | 144623604 | − | ZC3H3 | 6771 |
| 8 | 146067824 | 146068567 | + | ZNF7 | 6772 |
| 9 | 5928164 | 5928637 | − | KIAA2026 | 6773 |
| 9 | 6071795 | 6072372 | + | int | 6774 |
| 9 | 7150464 | 7151261 | + | KDM4C | 6775 |
| 9 | 7150464 | 7151261 | + | KDM4C | 6776 |
| 9 | 7604507 | 7605196 | + | int | 6777 |
| 9 | 7638897 | 7639112 | + | int | 6778 |
| 9 | 8297792 | 8298396 | + | int | 6779 |
| 9 | 9222421 | 9223630 | − | PTPRD | 6780 |
| 9 | 10101155 | 10101561 | − | PTPRD | 6781 |
| 9 | 10130213 | 10131254 | − | PTPRD | 6782 |
| 9 | 10326964 | 10327935 | − | PTPRD | 6783 |
| 9 | 10660977 | 10662112 | + | int | 6784 |
| 9 | 10918241 | 10918539 | + | int | 6785 |
| 9 | 11025215 | 11025459 | + | int | 6786 |
| 9 | 12408382 | 12408652 | + | int | 6787 |
| 9 | 12563721 | 12563988 | + | int | 6788 |
| 9 | 13986155 | 13987338 | + | int | 6789 |
| 9 | 14108578 | 14109672 | − | NFIB | 6790 |
| 9 | 14108578 | 14109672 | − | NFIB | 6791 |
| 9 | 14541678 | 14542558 | + | int | 6792 |
| 9 | 14618529 | 14619528 | − | ZDHHC21 | 6793 |
| 9 | 14920807 | 14922429 | + | int | 6794 |
| 9 | 14920871 | 14922346 | + | int | 6795 |
| 9 | 15980676 | 15980801 | + | int | 6796 |
| 9 | 16759558 | 16761363 | − | BNC2 | 6797 |
| 9 | 18192783 | 18199554 | + | int | 6798 |
| 9 | 23744656 | 23745342 | − | ELAVL2 | 6799 |
| 9 | 23744656 | 23745342 | − | ELAVL2 | 6800 |
| 9 | 23744656 | 23745342 | − | ELAVL2 | 6801 |
| 9 | 23833799 | 23834847 | + | int | 6802 |
| 9 | 24502290 | 24503236 | + | int | 6803 |
| 9 | 25224161 | 25224349 | + | int | 6804 |
| 9 | 25236338 | 25236629 | + | int | 6805 |
| 9 | 25270684 | 25271490 | + | int | 6806 |
| 9 | 26207682 | 26208198 | + | int | 6807 |
| 9 | 26617222 | 26618488 | + | int | 6808 |
| 9 | 27876619 | 27876958 | + | int | 6809 |
| 9 | 28385187 | 28386101 | − | LINGO2 | 6810 |
| 9 | 28385187 | 28386101 | − | LINGO2 | 6811 |
| 9 | 28704581 | 28705677 | − | LINGO2 | 6812 |
| 9 | 28704581 | 28705677 | − | LINGO2 | 6813 |
| 9 | 28845733 | 28846128 | − | LINGO2 | 6814 |
| 9 | 29327750 | 29329960 | + | int | 6815 |
| 9 | 29962475 | 29963172 | + | int | 6816 |
| 9 | 30170421 | 30170708 | + | int | 6817 |
| 9 | 31074583 | 31074932 | + | int | 6818 |
| 9 | 31319195 | 31319532 | + | int | 6819 |
| 9 | 33466218 | 33467263 | − | NOL6 | 6820 |
| 9 | 34824039 | 34824234 | + | int | 6821 |
| 9 | 34824039 | 34824340 | + | int | 6822 |
| 9 | 36669391 | 36671229 | + | MELK | 6823 |
| 9 | 39071521 | 39071998 | + | int | 6824 |
| 9 | 40382480 | 40383308 | + | int | 6825 |
| 9 | 72174788 | 72175275 | − | APBA1 | 6826 |
| 9 | 73375900 | 73376053 | − | TRPM3 | 6827 |
| 9 | 73375900 | 73376053 | − | TRPM3 | 6828 |
| 9 | 73711649 | 73712164 | − | TRPM3 | 6829 |
| 9 | 73880240 | 73880972 | + | int | 6830 |
| 9 | 76282658 | 76283420 | + | int | 6831 |
| 9 | 77107896 | 77109846 | + | int | 6832 |
| 9 | 79095438 | 79102451 | + | GCNT1 | 6833 |
| 9 | 79095438 | 79102451 | + | GCNT1 | 6834 |
| 9 | 79095438 | 79102451 | + | GCNT1 | 6835 |
| 9 | 81247236 | 81248295 | + | int | 6836 |
| 9 | 82089997 | 82090139 | + | int | 6837 |
| 9 | 82749531 | 82750556 | + | int | 6838 |
| 9 | 90498319 | 90499210 | + | SPATA31E1 | 6839 |
| 9 | 91433664 | 91434485 | + | int | 6840 |
| 9 | 93600731 | 93604821 | + | SYK | 6841 |
| 9 | 93600731 | 93604821 | + | SYK | 6842 |
| 9 | 93600731 | 93604821 | + | SYK | 6843 |
| 9 | 95040963 | 95041848 | − | IARS | 6844 |
| 9 | 96434994 | 96435177 | + | PHF2 | 6845 |
| 9 | 101881980 | 101882161 | + | TGFBR1 | 6846 |
| 9 | 104575436 | 104576474 | + | int | 6847 |
| 9 | 104886441 | 104887080 | + | int | 6848 |
| 9 | 105147410 | 105148878 | + | int | 6849 |
| 9 | 106649826 | 106650020 | + | int | 6850 |
| 9 | 107893809 | 107895195 | + | int | 6851 |
| 9 | 108117713 | 108118905 | + | SLC44A1 | 6852 |
| 9 | 118271459 | 118272553 | + | int | 6853 |
| 9 | 118877211 | 118877407 | + | int | 6854 |
| 9 | 119354947 | 119356093 | − | ASTN2 | 6855 |
| 9 | 119354947 | 119356093 | − | ASTN2 | 6856 |
| 9 | 119354947 | 119356093 | − | ASTN2 | 6857 |
| 9 | 120926323 | 120927669 | + | int | 6858 |
| 9 | 121027876 | 121028794 | + | int | 6859 |
| 9 | 121299424 | 121300110 | + | int | 6860 |
| 9 | 121425459 | 121425679 | + | int | 6861 |
| 9 | 121721610 | 121722428 | + | int | 6862 |
| 9 | 122424480 | 122425480 | + | int | 6863 |
| 9 | 124890779 | 124892173 | + | int | 6864 |
| 9 | 125485962 | 125489020 | + | OR1L4 | 6865 |
| 9 | 125511751 | 125512961 | + | OR1L6 | 6866 |
| 9 | 126241138 | 126243210 | − | DENND1A | 6867 |
| 9 | 126241138 | 126243210 | − | DENND1A | 6868 |
| 9 | 129172153 | 129173670 | + | MVB12B | 6869 |
| 9 | 129172153 | 129173670 | − | NRON | 6870 |
| 9 | 132589966 | 132597019 | − | C9orf78 | 6871 |
| 9 | 135680331 | 135681076 | − | AK8 | 6872 |
| 9 | 137409871 | 137410859 | + | int | 6873 |
| 9 | 138803540 | 138804020 | + | int | 6874 |
| 9 | 138881183 | 138882179 | + | int | 6875 |
| 9 | 139411757 | 139412842 | − | NOTCH1 | 6876 |
| 9 | 139478798 | 139479357 | + | int | 6877 |
| 9 | 139917794 | 139918987 | − | ABCA2 | 6878 |
| 9 | 139917794 | 139918987 | − | ABCA2 | 6879 |
| 10 | 2347129 | 2347305 | − | LINC00701 | 6880 |
| 10 | 4154653 | 4155841 | + | int | 6881 |
| 10 | 4649960 | 4650199 | + | int | 6882 |
| 10 | 7986728 | 7992109 | + | TAF3 | 6883 |
| 10 | 10267333 | 10267492 | + | int | 6884 |
| 10 | 10372681 | 10373039 | + | int | 6885 |
| 10 | 11456276 | 11457244 | + | int | 6886 |
| 10 | 11657799 | 11661007 | + | int | 6887 |
| 10 | 12781791 | 12783013 | + | CAMK1D | 6888 |
| 10 | 12781791 | 12783013 | + | CAMK1D | 6889 |
| 10 | 13057582 | 13058723 | + | int | 6890 |
| 10 | 16270745 | 16271460 | + | int | 6891 |
| 10 | 17191022 | 17191828 | − | TRDMT1 | 6892 |
| 10 | 17769104 | 17769920 | + | int | 6893 |
| 10 | 20224126 | 20224604 | + | PLXDC2 | 6894 |
| 10 | 24922013 | 24922695 | − | ARHGAP21 | 6895 |
| 10 | 27388862 | 27389105 | − | ANKRD26 | 6896 |
| 10 | 28286558 | 28288263 | − | ARMC4 | 6897 |
| 10 | 29063010 | 29064250 | + | int | 6898 |
| 10 | 30524996 | 30525626 | + | int | 6899 |
| 10 | 32760883 | 32761130 | + | CCDC7 | 6900 |
| 10 | 33112468 | 33113343 | + | C10orf68 | 6901 |
| 10 | 36831348 | 36831770 | + | int | 6902 |
| 10 | 43492194 | 43493689 | + | MIR5100 | 6903 |
| 10 | 44285047 | 44285872 | − | HNRNPA3P1 | 6904 |
| 10 | 44669621 | 44670144 | + | int | 6905 |
| 10 | 45498422 | 45499693 | + | ZNF22 | 6906 |
| 10 | 49371264 | 49371972 | − | FRMPD2 | 6907 |
| 10 | 49371264 | 49371972 | − | FRMPD2 | 6908 |
| 10 | 49371264 | 49371972 | − | FRMPD2P1 | 6909 |
| 10 | 50189248 | 50190543 | + | WDFY4 | 6910 |
| 10 | 52067017 | 52071177 | − | SGMS1 | 6911 |
| 10 | 52103243 | 52103708 | − | SGMS1 | 6912 |
| 10 | 52267340 | 52268825 | − | SGMS1 | 6913 |
| 10 | 57275444 | 57276858 | + | int | 6914 |
| 10 | 57430573 | 57431225 | + | int | 6915 |
| 10 | 58798440 | 58799788 | + | int | 6916 |
| 10 | 58959274 | 58959997 | + | int | 6917 |
| 10 | 62682651 | 62689467 | − | RHOBTB1 | 6918 |
| 10 | 62682651 | 62689467 | − | RHOBTB1 | 6919 |
| 10 | 62682651 | 62689467 | − | RHOBTB1 | 6920 |
| 10 | 62870773 | 62871204 | + | int | 6921 |
| 10 | 63487670 | 63488701 | + | C10orf107 | 6922 |
| 10 | 63510339 | 63511068 | + | C10orf107 | 6923 |
| 10 | 65968884 | 65969030 | + | int | 6924 |
| 10 | 67679295 | 67680268 | − | CTNNA3 | 6925 |
| 10 | 67679295 | 67680268 | − | CTNNA3 | 6926 |
| 10 | 72099273 | 72100708 | − | LRRC20 | 6927 |
| 10 | 72099273 | 72100708 | − | LRRC20 | 6928 |
| 10 | 77172579 | 77172893 | + | int | 6929 |
| 10 | 77251007 | 77252240 | + | int | 6930 |
| 10 | 79613241 | 79615028 | − | DLG5 | 6931 |
| 10 | 80022208 | 80023149 | + | int | 6932 |
| 10 | 81631284 | 81631796 | + | int | 6933 |
| 10 | 83366360 | 83366956 | + | int | 6934 |
| 10 | 83491653 | 83492041 | + | int | 6935 |
| 10 | 83508923 | 83509334 | + | int | 6936 |
| 10 | 84024359 | 84027789 | + | NRG3 | 6937 |
| 10 | 84024359 | 84027789 | + | NRG3 | 6938 |
| 10 | 84646496 | 84647508 | + | NRG3 | 6939 |
| 10 | 84646496 | 84647508 | + | NRG3 | 6940 |
| 10 | 85481394 | 85481788 | + | int | 6941 |
| 10 | 85961836 | 85962831 | + | CDHR1 | 6942 |
| 10 | 85961836 | 85962831 | + | CDHR1 | 6943 |
| 10 | 86282547 | 86284456 | + | int | 6944 |
| 10 | 86309333 | 86310291 | + | int | 6945 |
| 10 | 87746572 | 87748079 | − | GRID1 | 6946 |
| 10 | 92005324 | 92006715 | + | int | 6947 |
| 10 | 92498583 | 92499216 | + | int | 6948 |
| 10 | 96802606 | 96803445 | − | CYP2C8 | 6949 |
| 10 | 96805002 | 96805262 | − | CYP2C8 | 6950 |
| 10 | 98446331 | 98447583 | − | PIK3AP1 | 6951 |
| 10 | 101578833 | 101579392 | + | ABCC2 | 6952 |
| 10 | 102472319 | 102473835 | + | int | 6953 |
| 10 | 107734141 | 107735267 | + | int | 6954 |
| 10 | 110245953 | 110246443 | + | int | 6955 |
| 10 | 112140940 | 112141352 | + | int | 6956 |
| 10 | 114380143 | 114381730 | + | VTI1A | 6957 |
| 10 | 114549798 | 114550603 | + | VTI1A | 6958 |
| 10 | 116708357 | 116708999 | + | TRUB1 | 6959 |
| 10 | 118131041 | 118132139 | + | CCDC172 | 6960 |
| 10 | 119712529 | 119713526 | + | int | 6961 |
| 10 | 120629973 | 120630906 | + | int | 6962 |
| 10 | 124007831 | 124009237 | + | TACC2 | 6963 |
| 10 | 124007831 | 124009237 | + | TACC2 | 6964 |
| 10 | 124106820 | 124108589 | + | int | 6965 |
| 10 | 124751354 | 124752355 | − | IKZF5 | 6966 |
| 10 | 124751354 | 124752355 | − | IKZF5 | 6967 |
| 10 | 125103900 | 125105084 | + | int | 6968 |
| 10 | 125664006 | 125664537 | + | int | 6969 |
| 10 | 126857840 | 126858092 | + | int | 6970 |
| 10 | 127355404 | 127356418 | − | TEX36 | 6971 |
| 10 | 132625678 | 132626199 | + | int | 6972 |
| 11 | 711054 | 713375 | + | EPS8L2 | 6973 |
| 11 | 1016985 | 1018532 | − | MUC6 | 6974 |
| 11 | 1215407 | 1216872 | + | int | 6975 |
| 11 | 1480169 | 1481163 | + | BRSK2 | 6976 |
| 11 | 1480169 | 1481163 | + | BRSK2 | 6977 |
| 11 | 1480169 | 1481163 | + | BRSK2 | 6978 |
| 11 | 3124474 | 3125652 | − | OSBPL5 | 6979 |
| 11 | 4681664 | 4682529 | + | int | 6980 |
| 11 | 4682529 | 4683072 | + | int | 6981 |
| 11 | 4682532 | 4683074 | + | int | 6982 |
| 11 | 4824313 | 4825542 | − | OR52R1 | 6983 |
| 11 | 4824622 | 4825843 | − | OR52R1 | 6984 |
| 11 | 5220970 | 5221870 | − | OR51V1 | 6985 |
| 11 | 5322224 | 5323227 | − | OR51B4 | 6986 |
| 11 | 5443392 | 5444381 | + | OR51Q1 | 6987 |
| 11 | 5443392 | 5444381 | − | OR51B5 | 6988 |
| 11 | 5443392 | 5444381 | − | OR51B5 | 6989 |
| 11 | 5988758 | 5989719 | − | OR56A5 | 6990 |
| 11 | 6424184 | 6425409 | − | APBB1 | 6991 |
| 11 | 6424184 | 6425409 | − | APBB1 | 6992 |
| 11 | 6424184 | 6425409 | − | APBB1 | 6993 |
| 11 | 6424184 | 6425409 | − | APBB1 | 6994 |
| 11 | 6424184 | 6425409 | − | APBB1 | 6995 |
| 11 | 6424184 | 6425409 | − | APBB1 | 6996 |
| 11 | 6424184 | 6425409 | − | APBB1 | 6997 |
| 11 | 6632075 | 6633308 | + | ILK | 6998 |
| 11 | 6632075 | 6633308 | + | ILK | 6999 |
| 11 | 6632075 | 6633308 | − | TAF10 | 7000 |
| 11 | 6814846 | 6817215 | − | OR6A2 | 7001 |
| 11 | 7817722 | 7818706 | − | OR5P2 | 7002 |
| 11 | 7869800 | 7871301 | + | OR5E1P | 7003 |
| 11 | 8230799 | 8231431 | + | int | 7004 |
| 11 | 8237344 | 8238026 | + | int | 7005 |
| 11 | 8804861 | 8810696 | − | ST5 | 7006 |
| 11 | 8804861 | 8810696 | − | ST5 | 7007 |
| 11 | 8804861 | 8810696 | − | ST5 | 7008 |
| 11 | 10718385 | 10719371 | + | int | 7009 |
| 11 | 17032956 | 17033337 | − | PLEKHA7 | 7010 |
| 11 | 17411919 | 17412831 | + | int | 7011 |
| 11 | 17840917 | 17842597 | − | SERGEF | 7012 |
| 11 | 18908107 | 18909344 | + | int | 7013 |
| 11 | 21050814 | 21051005 | + | NELL1 | 7014 |
| 11 | 21207748 | 21208037 | + | NELL1 | 7015 |
| 11 | 21592065 | 21592716 | + | NELL1 | 7016 |
| 11 | 21746092 | 21746302 | + | int | 7017 |
| 11 | 23099956 | 23100201 | + | int | 7018 |
| 11 | 24524244 | 24524611 | + | LUZP2 | 7019 |
| 11 | 26528965 | 26529143 | + | ANO3 | 7020 |
| 11 | 28005399 | 28005531 | + | int | 7021 |
| 11 | 28830987 | 28831170 | + | int | 7022 |
| 11 | 28831403 | 28831681 | + | int | 7023 |
| 11 | 29002713 | 29004094 | + | int | 7024 |
| 11 | 29171726 | 29172654 | + | int | 7025 |
| 11 | 29292424 | 29293643 | + | int | 7026 |
| 11 | 31804948 | 31805525 | + | ELP4 | 7027 |
| 11 | 35569092 | 35570672 | + | int | 7028 |
| 11 | 35613353 | 35615106 | + | int | 7029 |
| 11 | 36946631 | 36947523 | + | int | 7030 |
| 11 | 39385843 | 39386023 | + | int | 7031 |
| 11 | 39442253 | 39442473 | + | int | 7032 |
| 11 | 39492621 | 39493316 | + | int | 7033 |
| 11 | 39511582 | 39512068 | + | int | 7034 |
| 11 | 40029492 | 40030963 | + | int | 7035 |
| 11 | 40219360 | 40220605 | − | LRRC4C | 7036 |
| 11 | 40219360 | 40220605 | − | LRRC4C | 7037 |
| 11 | 41102732 | 41103073 | − | LRRC4C | 7038 |
| 11 | 41496762 | 41498264 | + | int | 7039 |
| 11 | 44038068 | 44039672 | + | int | 7040 |
| 11 | 44522951 | 44523741 | + | int | 7041 |
| 11 | 48181355 | 48182443 | + | PTPRJ | 7042 |
| 11 | 48453262 | 48455080 | + | int | 7043 |
| 11 | 49971827 | 49972751 | + | int | 7044 |
| 11 | 55339114 | 55340764 | + | OR4C16 | 7045 |
| 11 | 55339512 | 55340328 | + | OR4C16 | 7046 |
| 11 | 55440592 | 55441798 | + | int | 7047 |
| 11 | 55715647 | 55716399 | + | int | 7048 |
| 11 | 55735035 | 55735861 | − | OR10AG1 | 7049 |
| 11 | 55926812 | 55927951 | − | OR8K5 | 7050 |
| 11 | 55926951 | 55927957 | − | OR8K5 | 7051 |
| 11 | 56085500 | 56085718 | + | int | 7052 |
| 11 | 56085794 | 56085843 | + | OR8K3 | 7053 |
| 11 | 56400672 | 56401589 | + | OR8U8 | 7054 |
| 11 | 56408881 | 56410178 | + | OR8U8 | 7055 |
| 11 | 56408881 | 56410178 | − | OR5AP2 | 7056 |
| 11 | 56408977 | 56410221 | + | OR8U8 | 7057 |
| 11 | 56408977 | 56410221 | − | OR5AP2 | 7058 |
| 11 | 56466985 | 56468688 | + | OR8U8 | 7059 |
| 11 | 56466985 | 56468688 | + | OR9G1 | 7060 |
| 11 | 56466985 | 56468688 | + | OR9G9 | 7061 |
| 11 | 56467779 | 56468902 | + | OR8U8 | 7062 |
| 11 | 56467779 | 56468902 | + | OR9G1 | 7063 |
| 11 | 56467779 | 56468902 | + | OR9G9 | 7064 |
| 11 | 56517800 | 56517934 | + | int | 7065 |
| 11 | 56858191 | 56859228 | + | int | 7066 |
| 11 | 58000244 | 58001485 | + | int | 7067 |
| 11 | 58174247 | 58174937 | + | int | 7068 |
| 11 | 58206796 | 58207934 | − | OR5B12 | 7069 |
| 11 | 58206827 | 58207848 | − | OR5B12 | 7070 |
| 11 | 62140847 | 62142008 | + | ASRGL1 | 7071 |
| 11 | 63149547 | 63149769 | + | SLC22A9 | 7072 |
| 11 | 63149547 | 63149769 | − | MIR3680-1 | 7073 |
| 11 | 63149547 | 63149769 | − | MIR3680-2 | 7074 |
| 11 | 65622271 | 65625648 | − | CFL1 | 7075 |
| 11 | 74424204 | 74425324 | − | CHRDL2 | 7076 |
| 11 | 75430586 | 75431738 | + | MOGAT2 | 7077 |
| 11 | 75511099 | 75512755 | + | DGAT2 | 7078 |
| 11 | 76817372 | 76818689 | + | CAPN5 | 7079 |
| 11 | 88294764 | 88295276 | − | GRM5 | 7080 |
| 11 | 88294764 | 88295276 | − | GRM5 | 7081 |
| 11 | 90581540 | 90581920 | + | int | 7082 |
| 11 | 91060667 | 91061683 | + | int | 7083 |
| 11 | 96746091 | 96746286 | + | int | 7084 |
| 11 | 97231722 | 97232546 | + | int | 7085 |
| 11 | 98979718 | 98980130 | + | CNTN5 | 7086 |
| 11 | 98979718 | 98980130 | + | CNTN5 | 7087 |
| 11 | 99160095 | 99161529 | + | CNTN5 | 7088 |
| 11 | 99160095 | 99161529 | + | CNTN5 | 7089 |
| 11 | 99244906 | 99249008 | + | CNTN5 | 7090 |
| 11 | 99244906 | 99249008 | + | CNTN5 | 7091 |
| 11 | 100265374 | 100266792 | + | int | 7092 |
| 11 | 104331409 | 104332086 | + | int | 7093 |
| 11 | 104719467 | 104719653 | + | int | 7094 |
| 11 | 106882192 | 106883610 | − | GUCY1A2 | 7095 |
| 11 | 109689671 | 109690969 | + | int | 7096 |
| 11 | 111148009 | 111148762 | + | C11orf53 | 7097 |
| 11 | 113669381 | 113670177 | − | USP28 | 7098 |
| 11 | 115045559 | 115046543 | − | CADM1 | 7099 |
| 11 | 115240456 | 115241596 | − | CADM1 | 7100 |
| 11 | 118523450 | 118524750 | + | PHLDB1 | 7101 |
| 11 | 118523450 | 118524750 | + | PHLDB1 | 7102 |
| 11 | 118635819 | 118637987 | − | DDX6 | 7103 |
| 11 | 118635819 | 118637987 | − | DDX6 | 7104 |
| 11 | 119764364 | 119766191 | + | int | 7105 |
| 11 | 121318732 | 121319036 | + | int | 7106 |
| 11 | 123207926 | 123214588 | + | int | 7107 |
| 11 | 123908500 | 123909973 | − | OR10G7 | 7108 |
| 11 | 123964346 | 123965339 | + | int | 7109 |
| 11 | 123964349 | 123965340 | + | int | 7110 |
| 11 | 123975756 | 123976763 | + | int | 7111 |
| 11 | 124085364 | 124086446 | + | int | 7112 |
| 11 | 124095497 | 124096319 | + | OR8G2 | 7113 |
| 11 | 124119317 | 124119462 | + | int | 7114 |
| 11 | 124120315 | 124120853 | + | OR8G1 | 7115 |
| 11 | 124120315 | 124120853 | + | OR8G1 | 7116 |
| 11 | 124179579 | 124180877 | − | OR8D1 | 7117 |
| 11 | 124179597 | 124180820 | − | OR8D1 | 7118 |
| 11 | 124248947 | 124249256 | + | int | 7119 |
| 11 | 126511203 | 126512248 | − | KIRREL3 | 7120 |
| 11 | 126511203 | 126512248 | − | KIRREL3 | 7121 |
| 11 | 127810978 | 127811672 | + | int | 7122 |
| 11 | 128558967 | 128560049 | + | FLI1 | 7123 |
| 11 | 129308823 | 129310121 | + | BARX2 | 7124 |
| 11 | 130668795 | 130672104 | + | int | 7125 |
| 11 | 132518337 | 132519425 | − | OPCML | 7126 |
| 11 | 132518337 | 132519425 | − | OPCML | 7127 |
| 11 | 133271587 | 133272968 | − | OPCML | 7128 |
| 12 | 374618 | 375558 | + | int | 7129 |
| 12 | 1397266 | 1397936 | + | ERC1 | 7130 |
| 12 | 1900098 | 1900772 | + | int | 7131 |
| 12 | 1908829 | 1909238 | − | CACNA2D4 | 7132 |
| 12 | 2282575 | 2283539 | + | CACNA1C | 7133 |
| 12 | 3331196 | 3332486 | + | TSPAN9 | 7134 |
| 12 | 6672645 | 6677088 | − | NOP2 | 7135 |
| 12 | 6775804 | 6776423 | − | ZNF384 | 7136 |
| 12 | 6775804 | 6776423 | − | ZNF384 | 7137 |
| 12 | 8925889 | 8927004 | + | RIMKLB | 7138 |
| 12 | 11421933 | 11422377 | − | PRB3 | 7139 |
| 12 | 11548287 | 11548569 | − | PRB2 | 7140 |
| 12 | 11954602 | 11955731 | + | ETV6 | 7141 |
| 12 | 11954602 | 11955731 | − | RNU6-19 | 7142 |
| 12 | 15336305 | 15337474 | − | RERG | 7143 |
| 12 | 15785463 | 15787437 | − | EPS8 | 7144 |
| 12 | 15847939 | 15848578 | − | EPS8 | 7145 |
| 12 | 16187562 | 16188428 | + | DERA | 7146 |
| 12 | 16934331 | 16934880 | + | int | 7147 |
| 12 | 17479042 | 17480525 | + | int | 7148 |
| 12 | 17835975 | 17836505 | + | int | 7149 |
| 12 | 20565410 | 20566743 | + | PDE3A | 7150 |
| 12 | 20849462 | 20850260 | + | SLCO1C1 | 7151 |
| 12 | 20849462 | 20850260 | + | SLCO1C1 | 7152 |
| 12 | 25156994 | 25157874 | + | int | 7153 |
| 12 | 25781674 | 25782265 | − | IFLTD1 | 7154 |
| 12 | 25981000 | 25991734 | + | int | 7155 |
| 12 | 26256631 | 26257722 | + | int | 7156 |
| 12 | 27006478 | 27006889 | + | int | 7157 |
| 12 | 40668151 | 40668283 | + | LRRK2 | 7158 |
| 12 | 40668294 | 40668873 | + | LRRK2 | 7159 |
| 12 | 45697822 | 45698736 | + | ANO6 | 7160 |
| 12 | 45697822 | 45698736 | + | ANO6 | 7161 |
| 12 | 45697822 | 45698736 | + | ANO6 | 7162 |
| 12 | 48123221 | 48123790 | + | int | 7163 |
| 12 | 49444259 | 49445316 | − | MLL2 | 7164 |
| 12 | 50523409 | 50524804 | − | CERS5 | 7165 |
| 12 | 51385683 | 51387065 | − | SLC11A2 | 7166 |
| 12 | 51385683 | 51387065 | − | SLC11A2 | 7167 |
| 12 | 51385683 | 51387065 | − | SLC11A2 | 7168 |
| 12 | 51385683 | 51387065 | − | SLC11A2 | 7169 |
| 12 | 51385683 | 51387065 | − | SLC11A2 | 7170 |
| 12 | 51914864 | 51915978 | + | int | 7171 |
| 12 | 54323904 | 54325045 | + | int | 7172 |
| 12 | 54675210 | 54677020 | + | HNRNPA1 | 7173 |
| 12 | 54675210 | 54677020 | + | HNRNPA1P10 | 7174 |
| 12 | 55430890 | 55431927 | + | int | 7175 |
| 12 | 55552448 | 55553523 | + | int | 7176 |
| 12 | 55736329 | 55737557 | + | int | 7177 |
| 12 | 55845958 | 55846967 | + | OR6C2 | 7178 |
| 12 | 55868620 | 55870221 | + | int | 7179 |
| 12 | 57908394 | 57909439 | + | MARS | 7180 |
| 12 | 57977166 | 57978074 | + | KIF5A | 7181 |
| 12 | 58759397 | 58760854 | + | int | 7182 |
| 12 | 62403089 | 62405746 | − | FAM19A2 | 7183 |
| 12 | 64842591 | 64843447 | + | int | 7184 |
| 12 | 68428391 | 68429086 | + | int | 7185 |
| 12 | 68709684 | 68710623 | − | MDM1 | 7186 |
| 12 | 68782509 | 68783065 | + | int | 7187 |
| 12 | 70367271 | 70368213 | + | int | 7188 |
| 12 | 71181851 | 71182909 | − | PTPRR | 7189 |
| 12 | 71181851 | 71182909 | − | PTPRR | 7190 |
| 12 | 71629180 | 71630354 | + | int | 7191 |
| 12 | 72651386 | 72652128 | − | TRHDE-AS1 | 7192 |
| 12 | 73004905 | 73005378 | + | TRHDE | 7193 |
| 12 | 73500021 | 73500391 | + | int | 7194 |
| 12 | 74129067 | 74130604 | + | int | 7195 |
| 12 | 74315268 | 74316634 | + | int | 7196 |
| 12 | 75309590 | 75311564 | + | int | 7197 |
| 12 | 75666669 | 75666987 | + | int | 7198 |
| 12 | 75718709 | 75719304 | − | CAPS2 | 7199 |
| 12 | 79293608 | 79294470 | + | SYT1 | 7200 |
| 12 | 79293608 | 79294470 | + | SYT1 | 7201 |
| 12 | 79385857 | 79386839 | + | SYT1 | 7202 |
| 12 | 79385857 | 79386839 | + | SYT1 | 7203 |
| 12 | 80499114 | 80499244 | + | int | 7204 |
| 12 | 81006831 | 81007904 | + | PTPRQ | 7205 |
| 12 | 81072819 | 81073817 | + | PTPRQ | 7206 |
| 12 | 81085700 | 81086232 | + | int | 7207 |
| 12 | 81539061 | 81539691 | + | ACSS3 | 7208 |
| 12 | 81829504 | 81831925 | − | PPFIA2 | 7209 |
| 12 | 81829504 | 81831925 | − | PPFIA2 | 7210 |
| 12 | 81829504 | 81831925 | − | PPFIA2 | 7211 |
| 12 | 81829504 | 81831925 | − | PPFIA2 | 7212 |
| 12 | 81829504 | 81831925 | − | PPFIA2 | 7213 |
| 12 | 82009270 | 82009941 | − | PPFIA2 | 7214 |
| 12 | 82009270 | 82009941 | − | PPFIA2 | 7215 |
| 12 | 82009270 | 82009941 | − | PPFIA2 | 7216 |
| 12 | 82323124 | 82323508 | + | int | 7217 |
| 12 | 82527850 | 82528164 | + | int | 7218 |
| 12 | 82803811 | 82803966 | + | METTL25 | 7219 |
| 12 | 83594536 | 83595256 | + | int | 7220 |
| 12 | 83628756 | 83628956 | + | int | 7221 |
| 12 | 84071027 | 84071439 | + | int | 7222 |
| 12 | 85304134 | 85306088 | − | SLC6A15 | 7223 |
| 12 | 85304134 | 85306088 | − | SLC6A15 | 7224 |
| 12 | 85977106 | 85977447 | + | int | 7225 |
| 12 | 86477137 | 86477346 | − | MGAT4C | 7226 |
| 12 | 86653836 | 86654824 | − | MGAT4C | 7227 |
| 12 | 86815805 | 86817114 | − | MGAT4C | 7228 |
| 12 | 87135296 | 87135814 | − | MGAT4C | 7229 |
| 12 | 87746550 | 87747635 | + | int | 7230 |
| 12 | 87890187 | 87890679 | + | int | 7231 |
| 12 | 88010466 | 88010616 | + | int | 7232 |
| 12 | 88559806 | 88560213 | + | TMTC3 | 7233 |
| 12 | 89650101 | 89650370 | + | int | 7234 |
| 12 | 89984136 | 89985076 | − | ATP2B1 | 7235 |
| 12 | 90064149 | 90065323 | + | int | 7236 |
| 12 | 90563794 | 90564547 | + | int | 7237 |
| 12 | 90714260 | 90715809 | + | int | 7238 |
| 12 | 91545328 | 91545734 | − | DCN | 7239 |
| 12 | 91545328 | 91545734 | − | DCN | 7240 |
| 12 | 91545328 | 91545734 | − | DCN | 7241 |
| 12 | 91770097 | 91770351 | + | int | 7242 |
| 12 | 91949660 | 91957325 | + | int | 7243 |
| 12 | 92251859 | 92252215 | + | int | 7244 |
| 12 | 96148945 | 96149960 | − | NTN4 | 7245 |
| 12 | 96199120 | 96200274 | + | int | 7246 |
| 12 | 96455122 | 96456142 | + | int | 7247 |
| 12 | 97015759 | 97017244 | + | int | 7248 |
| 12 | 98161083 | 98161913 | + | int | 7249 |
| 12 | 99578910 | 99586295 | − | ANKS1B | 7250 |
| 12 | 100402747 | 100403647 | + | int | 7251 |
| 12 | 102130685 | 102131063 | − | SYCP3 | 7252 |
| 12 | 102130704 | 102130897 | − | SYCP3 | 7253 |
| 12 | 103644136 | 103644549 | + | int | 7254 |
| 12 | 108144971 | 108145971 | − | PRDM4 | 7255 |
| 12 | 108145343 | 108150744 | − | PRDM4 | 7256 |
| 12 | 109522715 | 109523983 | + | USP30 | 7257 |
| 12 | 112186033 | 112186441 | + | ACAD10 | 7258 |
| 12 | 119376190 | 119376892 | + | int | 7259 |
| 12 | 119877396 | 119877664 | + | CCDC60 | 7260 |
| 12 | 125237562 | 125238169 | + | int | 7261 |
| 12 | 126070020 | 126070699 | + | TMEM132B | 7262 |
| 12 | 126440694 | 126441255 | + | int | 7263 |
| 12 | 126607925 | 126608832 | + | int | 7264 |
| 12 | 129100432 | 129101097 | + | TMEM132C | 7265 |
| 12 | 131613283 | 131613388 | + | GPR133 | 7266 |
| 12 | 131613329 | 131613362 | + | GPR133 | 7267 |
| 12 | 131613387 | 131614053 | + | GPR133 | 7268 |
| 12 | 131613389 | 131614079 | + | GPR133 | 7269 |
| 12 | 131613484 | 131614080 | + | GPR133 | 7270 |
| 13 | 20980913 | 20981177 | − | CRYL1 | 7271 |
| 13 | 23335912 | 23336173 | + | int | 7272 |
| 13 | 23773422 | 23778020 | + | SGCG | 7273 |
| 13 | 26912376 | 26912657 | + | CDK8 | 7274 |
| 13 | 27890781 | 27891369 | + | int | 7275 |
| 13 | 28239821 | 28240459 | + | POLR1D | 7276 |
| 13 | 28239821 | 28240459 | + | POLR1D | 7277 |
| 13 | 30091602 | 30092707 | − | SLC7A1 | 7278 |
| 13 | 35267726 | 35268309 | + | int | 7279 |
| 13 | 35814847 | 35815028 | + | NBEA | 7280 |
| 13 | 40642821 | 40643628 | + | int | 7281 |
| 13 | 41705527 | 41706976 | − | KBTBD6 | 7282 |
| 13 | 42613923 | 42615093 | + | DGKH | 7283 |
| 13 | 42614017 | 42615455 | + | DGKH | 7284 |
| 13 | 42614164 | 42615605 | + | DGKH | 7285 |
| 13 | 42614388 | 42615766 | + | DGKH | 7286 |
| 13 | 42622072 | 42623184 | + | DGKH | 7287 |
| 13 | 42622072 | 42623184 | + | DGKH | 7288 |
| 13 | 42622241 | 42623352 | + | DGKH | 7289 |
| 13 | 42622241 | 42623352 | + | DGKH | 7290 |
| 13 | 42626151 | 42626981 | + | DGKH | 7291 |
| 13 | 42626151 | 42626981 | + | DGKH | 7292 |
| 13 | 42626320 | 42627000 | + | DGKH | 7293 |
| 13 | 42626320 | 42627000 | + | DGKH | 7294 |
| 13 | 45112317 | 45112432 | − | TSC22D1 | 7295 |
| 13 | 49088807 | 49089621 | − | RCBTB2 | 7296 |
| 13 | 49532168 | 49532797 | + | int | 7297 |
| 13 | 50305619 | 50306401 | − | KPNA3 | 7298 |
| 13 | 53930508 | 53931109 | + | int | 7299 |
| 13 | 54292910 | 54293143 | + | int | 7300 |
| 13 | 54616935 | 54617633 | + | int | 7301 |
| 13 | 54629210 | 54629955 | + | int | 7302 |
| 13 | 56393559 | 56407212 | + | int | 7303 |
| 13 | 56710705 | 56711643 | + | int | 7304 |
| 13 | 56925111 | 56925323 | + | int | 7305 |
| 13 | 56986536 | 56987402 | + | int | 7306 |
| 13 | 57566469 | 57571334 | + | int | 7307 |
| 13 | 57792569 | 57795406 | + | int | 7308 |
| 13 | 57989560 | 57990251 | + | int | 7309 |
| 13 | 58399739 | 58400159 | + | int | 7310 |
| 13 | 58429208 | 58430730 | + | int | 7311 |
| 13 | 58565060 | 58565245 | + | int | 7312 |
| 13 | 59165798 | 59166399 | + | int | 7313 |
| 13 | 59449435 | 59449693 | + | int | 7314 |
| 13 | 60519049 | 60520004 | − | DIAPH3 | 7315 |
| 13 | 60519049 | 60520004 | − | DIAPH3 | 7316 |
| 13 | 60519049 | 60520004 | − | DIAPH3 | 7317 |
| 13 | 60519049 | 60520004 | − | DIAPH3 | 7318 |
| 13 | 60519049 | 60520004 | − | DIAPH3 | 7319 |
| 13 | 61751552 | 61752024 | + | int | 7320 |
| 13 | 62682314 | 62682683 | + | int | 7321 |
| 13 | 63121628 | 63122166 | + | int | 7322 |
| 13 | 63281109 | 63281493 | + | int | 7323 |
| 13 | 64813998 | 64815168 | + | int | 7324 |
| 13 | 65802987 | 65803533 | + | int | 7325 |
| 13 | 67550990 | 67552060 | + | PCDH9-AS3 | 7326 |
| 13 | 67550990 | 67552060 | − | PCDH9 | 7327 |
| 13 | 67779136 | 67780928 | − | PCDH9 | 7328 |
| 13 | 68235970 | 68236101 | + | int | 7329 |
| 13 | 68295275 | 68296146 | + | int | 7330 |
| 13 | 71439679 | 71440163 | + | int | 7331 |
| 13 | 71731561 | 71732645 | + | LINC00348 | 7332 |
| 13 | 72494869 | 72495441 | + | int | 7333 |
| 13 | 72778389 | 72779538 | + | int | 7334 |
| 13 | 73425149 | 73427762 | + | PIBF1 | 7335 |
| 13 | 73929102 | 73929623 | + | int | 7336 |
| 13 | 74268504 | 74269675 | − | KLF12 | 7337 |
| 13 | 75021746 | 75022309 | + | int | 7338 |
| 13 | 77147178 | 77147784 | + | int | 7339 |
| 13 | 77369756 | 77370634 | + | int | 7340 |
| 13 | 77614040 | 77614780 | + | int | 7341 |
| 13 | 77979741 | 77979889 | + | int | 7342 |
| 13 | 78965615 | 78965801 | + | POU4F1-AS1 | 7343 |
| 13 | 79410846 | 79412086 | − | LINC00331 | 7344 |
| 13 | 81124799 | 81125088 | + | int | 7345 |
| 13 | 81694921 | 81695116 | + | int | 7346 |
| 13 | 82661431 | 82662673 | + | int | 7347 |
| 13 | 86545002 | 86545637 | + | int | 7348 |
| 13 | 88322712 | 88323739 | − | MIR4500HG | 7349 |
| 13 | 88827211 | 88827417 | + | int | 7350 |
| 13 | 89822111 | 89822899 | + | int | 7351 |
| 13 | 90707140 | 90707343 | + | int | 7352 |
| 13 | 91146867 | 91150622 | + | int | 7353 |
| 13 | 91588985 | 91589885 | + | int | 7354 |
| 13 | 91740858 | 91741979 | + | int | 7355 |
| 13 | 92270027 | 92271500 | + | GPC5 | 7356 |
| 13 | 93766554 | 93768253 | + | int | 7357 |
| 13 | 93774227 | 93774829 | + | int | 7358 |
| 13 | 95396023 | 95396630 | + | int | 7359 |
| 13 | 95772357 | 95774351 | − | ABCC4 | 7360 |
| 13 | 95772357 | 95774351 | − | ABCC4 | 7361 |
| 13 | 96542281 | 96542908 | − | UGGT2 | 7362 |
| 13 | 96892159 | 96893200 | + | HS6ST3 | 7363 |
| 13 | 97442953 | 97443609 | + | HS6ST3 | 7364 |
| 13 | 97592975 | 97593494 | + | int | 7365 |
| 13 | 98193307 | 98194302 | + | int | 7366 |
| 13 | 100246541 | 100246742 | + | int | 7367 |
| 13 | 103421855 | 103422048 | − | TEX30 | 7368 |
| 13 | 103501400 | 103501613 | + | BIVM-ERCC5 | 7369 |
| 13 | 103501400 | 103501613 | + | ERCC5 | 7370 |
| 13 | 104076697 | 104077748 | + | int | 7371 |
| 13 | 104416125 | 104416436 | + | int | 7372 |
| 13 | 105515903 | 105516785 | + | int | 7373 |
| 13 | 105619767 | 105619966 | + | int | 7374 |
| 13 | 106028974 | 106030002 | + | int | 7375 |
| 13 | 111329316 | 111329482 | − | CARS2 | 7376 |
| 13 | 112141304 | 112142073 | + | int | 7377 |
| 13 | 114101240 | 114101554 | − | ADPRHL1 | 7378 |
| 13 | 114101240 | 114101554 | − | ADPRHL1 | 7379 |
| 14 | 20482440 | 20483341 | − | OR4K14 | 7380 |
| 14 | 22670374 | 22671700 | + | int | 7381 |
| 14 | 25976704 | 25977813 | + | int | 7382 |
| 14 | 26070247 | 26071473 | + | int | 7383 |
| 14 | 26101080 | 26102304 | + | int | 7384 |
| 14 | 26171509 | 26171674 | + | int | 7385 |
| 14 | 26315308 | 26316353 | + | int | 7386 |
| 14 | 26319011 | 26319629 | + | int | 7387 |
| 14 | 27204263 | 27205881 | + | int | 7388 |
| 14 | 27569754 | 27570130 | + | int | 7389 |
| 14 | 28689459 | 28689973 | + | int | 7390 |
| 14 | 29095523 | 29095855 | + | int | 7391 |
| 14 | 29284345 | 29285041 | + | int | 7392 |
| 14 | 29662165 | 29662457 | + | int | 7393 |
| 14 | 29814627 | 29816017 | + | int | 7394 |
| 14 | 29837989 | 29838162 | + | int | 7395 |
| 14 | 30885297 | 30887111 | + | int | 7396 |
| 14 | 32238545 | 32238660 | + | NUBPL | 7397 |
| 14 | 32238545 | 32238660 | + | NUBPL | 7398 |
| 14 | 32238545 | 32238660 | + | NUBPL | 7399 |
| 14 | 32968103 | 32968377 | + | AKAP6 | 7400 |
| 14 | 33083275 | 33084539 | + | AKAP6 | 7401 |
| 14 | 33645276 | 33645702 | + | NPAS3 | 7402 |
| 14 | 36350158 | 36350485 | + | int | 7403 |
| 14 | 38035486 | 38036844 | + | int | 7404 |
| 14 | 40840334 | 40840825 | + | int | 7405 |
| 14 | 40864055 | 40864611 | + | int | 7406 |
| 14 | 41080976 | 41081198 | + | int | 7407 |
| 14 | 42140306 | 42140586 | + | LRFN5 | 7408 |
| 14 | 46414472 | 46415288 | + | int | 7409 |
| 14 | 46835370 | 46835891 | + | int | 7410 |
| 14 | 47120131 | 47121054 | − | RPL10L | 7411 |
| 14 | 47979567 | 47980588 | − | MDGA2 | 7412 |
| 14 | 51610214 | 51611542 | + | int | 7413 |
| 14 | 56356992 | 56357605 | + | int | 7414 |
| 14 | 60150964 | 60151340 | − | RTN1 | 7415 |
| 14 | 60749887 | 60759227 | + | PPM1A | 7416 |
| 14 | 60749887 | 60759227 | + | PPM1A | 7417 |
| 14 | 60749887 | 60759227 | + | PPM1A | 7418 |
| 14 | 62919513 | 62919890 | + | int | 7419 |
| 14 | 65519369 | 65520335 | + | CHURC1-FNTB | 7420 |
| 14 | 65519369 | 65520335 | + | FNTB | 7421 |
| 14 | 65519369 | 65520335 | − | MAX | 7422 |
| 14 | 68758590 | 68760395 | + | RAD51B | 7423 |
| 14 | 68758590 | 68760395 | + | RAD51B | 7424 |
| 14 | 68758590 | 68760395 | + | RAD51B | 7425 |
| 14 | 70351970 | 70352878 | + | SMOC1 | 7426 |
| 14 | 70351996 | 70352879 | + | SMOC1 | 7427 |
| 14 | 70352055 | 70352880 | + | SMOC1 | 7428 |
| 14 | 75085798 | 75086733 | + | int | 7429 |
| 14 | 77491612 | 77492679 | − | IRF2BPL | 7430 |
| 14 | 78243570 | 78243776 | + | int | 7431 |
| 14 | 78423604 | 78425164 | + | int | 7432 |
| 14 | 79099730 | 79100770 | + | NRXN3 | 7433 |
| 14 | 79099730 | 79100770 | + | NRXN3 | 7434 |
| 14 | 80163612 | 80164605 | + | NRXN3 | 7435 |
| 14 | 80163612 | 80164605 | + | NRXN3 | 7436 |
| 14 | 80163612 | 80164605 | + | NRXN3 | 7437 |
| 14 | 80744712 | 80745223 | + | DIO2-AS1 | 7438 |
| 14 | 82441033 | 82442912 | + | int | 7439 |
| 14 | 84104776 | 84111812 | + | int | 7440 |
| 14 | 84717988 | 84719684 | + | int | 7441 |
| 14 | 85590289 | 85591139 | + | int | 7442 |
| 14 | 86907608 | 86907820 | + | int | 7443 |
| 14 | 87878997 | 87879497 | + | int | 7444 |
| 14 | 90666271 | 90667487 | + | int | 7445 |
| 14 | 91070886 | 91071366 | − | TTC7B | 7446 |
| 14 | 92198679 | 92199007 | + | int | 7447 |
| 14 | 92278449 | 92278663 | − | TC2N | 7448 |
| 14 | 92278449 | 92278663 | − | TC2N | 7449 |
| 14 | 94854470 | 94855581 | − | SERPINA1 | 7450 |
| 14 | 94854470 | 94855581 | − | SERPINA1 | 7451 |
| 14 | 94978456 | 94979357 | − | SERPINA12 | 7452 |
| 14 | 95192580 | 95193442 | + | int | 7453 |
| 14 | 96755688 | 96756350 | − | ATG2B | 7454 |
| 14 | 97417304 | 97418117 | + | int | 7455 |
| 14 | 97548718 | 97550227 | + | int | 7456 |
| 14 | 97550739 | 97550881 | + | int | 7457 |
| 14 | 98858092 | 98859016 | + | int | 7458 |
| 14 | 99638892 | 99639913 | − | BCL11B | 7459 |
| 14 | 101250334 | 101252301 | + | int | 7460 |
| 14 | 101794698 | 101795549 | + | int | 7461 |
| 14 | 102232365 | 102233352 | + | PPP2R5C | 7462 |
| 14 | 103407235 | 103408765 | − | CDC42BPB | 7463 |
| 14 | 106966939 | 106967768 | + | int | 7464 |
| 14 | 106966960 | 106967744 | + | int | 7465 |
| 14 | 107183321 | 107183993 | + | int | 7466 |
| 15 | 20177954 | 20178692 | + | int | 7467 |
| 15 | 25749853 | 25750007 | + | int | 7468 |
| 15 | 26326506 | 26326984 | + | int | 7469 |
| 15 | 26343558 | 26344266 | + | int | 7470 |
| 15 | 29134553 | 29135302 | + | int | 7471 |
| 15 | 31015477 | 31015790 | + | LOC100288637 | 7472 |
| 15 | 31015477 | 31015790 | + | LOC100288637 | 7473 |
| 15 | 31973925 | 31975181 | + | int | 7474 |
| 15 | 35829748 | 35830618 | − | ATPBD4 | 7475 |
| 15 | 35829748 | 35830618 | − | ATPBD4 | 7476 |
| 15 | 35879193 | 35880116 | + | ATPBD4-AS1 | 7477 |
| 15 | 36180943 | 36181768 | + | int | 7478 |
| 15 | 36463100 | 36463418 | + | int | 7479 |
| 15 | 38750173 | 38751114 | + | FAM98B | 7480 |
| 15 | 38750173 | 38751114 | + | FAM98B | 7481 |
| 15 | 40328870 | 40331152 | − | SRP14 | 7482 |
| 15 | 42152715 | 42154897 | − | SPTBN5 | 7483 |
| 15 | 44408727 | 44409383 | − | FRMD5 | 7484 |
| 15 | 44413538 | 44413856 | − | FRMD5 | 7485 |
| 15 | 45116509 | 45117617 | + | int | 7486 |
| 15 | 49299937 | 49300862 | − | SECISBP2L | 7487 |
| 15 | 49611805 | 49612915 | + | GALK2 | 7488 |
| 15 | 49611805 | 49612915 | + | GALK2 | 7489 |
| 15 | 49926436 | 49928736 | + | DTWD1 | 7490 |
| 15 | 51365122 | 51366001 | − | TNFAIP8L3 | 7491 |
| 15 | 52387467 | 52387979 | + | int | 7492 |
| 15 | 63837324 | 63837594 | + | USP3 | 7493 |
| 15 | 67530526 | 67531552 | − | AAGAB | 7494 |
| 15 | 67530526 | 67531552 | − | AAGAB | 7495 |
| 15 | 69693507 | 69695505 | + | PAQR5 | 7496 |
| 15 | 69693507 | 69695505 | + | PAQR5 | 7497 |
| 15 | 70222909 | 70224083 | + | int | 7498 |
| 15 | 71633383 | 71634085 | + | THSD4 | 7499 |
| 15 | 73614585 | 73615797 | − | HCN4 | 7500 |
| 15 | 77420728 | 77422180 | − | PEAK1 | 7501 |
| 15 | 79858010 | 79863368 | + | int | 7502 |
| 15 | 82458398 | 82458791 | − | EFTUD1 | 7503 |
| 15 | 83542461 | 83547028 | − | HOMER2 | 7504 |
| 15 | 86101677 | 86101856 | + | AKAP13 | 7505 |
| 15 | 87196176 | 87197425 | + | AGBL1 | 7506 |
| 15 | 89147798 | 89148922 | + | int | 7507 |
| 15 | 94198990 | 94199233 | + | int | 7508 |
| 15 | 95248130 | 95248682 | + | int | 7509 |
| 15 | 98106249 | 98106383 | + | int | 7510 |
| 15 | 98907573 | 98908013 | + | int | 7511 |
| 15 | 100174178 | 100174943 | + | MEF2A | 7512 |
| 15 | 100174178 | 100174943 | + | MEF2A | 7513 |
| 15 | 101681695 | 101682273 | + | int | 7514 |
| 16 | 3777637 | 3778311 | − | CREBBP | 7515 |
| 16 | 3860547 | 3861185 | − | CREBBP | 7516 |
| 16 | 4003558 | 4004509 | + | int | 7517 |
| 16 | 5806501 | 5808259 | + | int | 7518 |
| 16 | 7951973 | 7954593 | + | int | 7519 |
| 16 | 9545918 | 9549063 | + | int | 7520 |
| 16 | 11854238 | 11854984 | − | ZC3H7A | 7521 |
| 16 | 12186573 | 12187029 | + | SNX29 | 7522 |
| 16 | 14114790 | 14116975 | + | int | 7523 |
| 16 | 15901518 | 15902083 | − | MYH11 | 7524 |
| 16 | 20812489 | 20812926 | − | ERI2 | 7525 |
| 16 | 20812489 | 20812926 | − | ERI2 | 7526 |
| 16 | 22583663 | 22585454 | + | LOC653786 | 7527 |
| 16 | 23867700 | 23869009 | + | PRKCB | 7528 |
| 16 | 24919223 | 24919539 | + | SLC5A11 | 7529 |
| 16 | 24919223 | 24919539 | + | SLC5A11 | 7530 |
| 16 | 26043212 | 26044231 | + | HS3ST4 | 7531 |
| 16 | 28847837 | 28848553 | + | ATXN2L | 7532 |
| 16 | 31193831 | 31202834 | + | FUS | 7533 |
| 16 | 34321732 | 34322241 | + | int | 7534 |
| 16 | 49166239 | 49166759 | + | int | 7535 |
| 16 | 49991921 | 49992229 | + | int | 7536 |
| 16 | 50416571 | 50417300 | + | int | 7537 |
| 16 | 53102081 | 53102710 | + | CHD9 | 7538 |
| 16 | 53357930 | 53358940 | + | CHD9 | 7539 |
| 16 | 55410370 | 55411287 | + | int | 7540 |
| 16 | 61113099 | 61114193 | + | int | 7541 |
| 16 | 61411936 | 61412884 | + | int | 7542 |
| 16 | 61649332 | 61649639 | + | int | 7543 |
| 16 | 61771187 | 61772008 | − | CDH8 | 7544 |
| 16 | 62329454 | 62329606 | + | int | 7545 |
| 16 | 62596491 | 62598253 | + | int | 7546 |
| 16 | 62782215 | 62782862 | + | int | 7547 |
| 16 | 63074439 | 63075192 | + | int | 7548 |
| 16 | 63554338 | 63554941 | + | int | 7549 |
| 16 | 64074455 | 64075328 | + | int | 7550 |
| 16 | 64185662 | 64186628 | + | int | 7551 |
| 16 | 64981492 | 64982597 | − | CDH11 | 7552 |
| 16 | 65022085 | 65022350 | − | CDH11 | 7553 |
| 16 | 65022085 | 65022418 | − | CDH11 | 7554 |
| 16 | 65022085 | 65022553 | − | CDH11 | 7555 |
| 16 | 65037974 | 65039575 | − | CDH11 | 7556 |
| 16 | 65038354 | 65039527 | − | CDH11 | 7557 |
| 16 | 65040965 | 65041519 | − | CDH11 | 7558 |
| 16 | 66390836 | 66392394 | + | int | 7559 |
| 16 | 66390879 | 66392450 | + | int | 7560 |
| 16 | 68224505 | 68225686 | + | NFATC3 | 7561 |
| 16 | 73266538 | 73267495 | + | int | 7562 |
| 16 | 73424807 | 73425864 | + | LOC100506172 | 7563 |
| 16 | 76569230 | 76570525 | + | CNTNAP4 | 7564 |
| 16 | 76569230 | 76570525 | + | CNTNAP4 | 7565 |
| 16 | 76900682 | 76901425 | + | int | 7566 |
| 16 | 77254302 | 77255232 | + | int | 7567 |
| 16 | 86430292 | 86431049 | + | int | 7568 |
| 16 | 90072762 | 90073576 | − | DBNDD1 | 7569 |
| 16 | 90072762 | 90073576 | − | DBNDD1 | 7570 |
| 17 | 648284 | 649363 | − | GEMIN4 | 7571 |
| 17 | 3119030 | 3120438 | + | OR1A1 | 7572 |
| 17 | 4927384 | 4927994 | + | KIF1C | 7573 |
| 17 | 18743147 | 18743272 | + | int | 7574 |
| 17 | 26655417 | 26658999 | + | TMEM97 | 7575 |
| 17 | 26655417 | 26658999 | − | IFT20 | 7576 |
| 17 | 40066053 | 40067045 | − | ACLY | 7577 |
| 17 | 44913020 | 44914255 | + | int | 7578 |
| 17 | 47500645 | 47502239 | + | int | 7579 |
| 17 | 48009704 | 48010998 | + | int | 7580 |
| 17 | 50378718 | 50379222 | + | int | 7581 |
| 17 | 50679664 | 50680024 | + | int | 7582 |
| 17 | 50865875 | 50867108 | + | int | 7583 |
| 17 | 51221272 | 51225296 | + | int | 7584 |
| 17 | 51372480 | 51372981 | + | int | 7585 |
| 17 | 51408103 | 51409018 | + | int | 7586 |
| 17 | 53225809 | 53227153 | + | STXBP4 | 7587 |
| 17 | 58951818 | 58952165 | + | BCAS3 | 7588 |
| 17 | 59838596 | 59838965 | − | BRIP1 | 7589 |
| 17 | 63274321 | 63275310 | + | int | 7590 |
| 17 | 63444295 | 63445350 | + | int | 7591 |
| 17 | 63822244 | 63824007 | − | CEP112 | 7592 |
| 17 | 63822244 | 63824007 | − | CEP112 | 7593 |
| 17 | 63822244 | 63824007 | − | CEP112 | 7594 |
| 17 | 64971195 | 64972375 | + | CACNG4 | 7595 |
| 17 | 71012225 | 71013388 | − | SLC39A11 | 7596 |
| 17 | 74140710 | 74141949 | + | RNF157-AS1 | 7597 |
| 17 | 74140710 | 74141949 | − | RNF157 | 7598 |
| 17 | 76967150 | 76968150 | − | LGALS3BP | 7599 |
| 17 | 77355604 | 77356228 | − | RBFOX3 | 7600 |
| 17 | 79477100 | 79477997 | − | ACTG1 | 7601 |
| 17 | 79477594 | 79479387 | − | ACTG1 | 7602 |
| 17 | 79845711 | 79849340 | − | ALYREF | 7603 |
| 18 | 1052905 | 1053398 | + | int | 7604 |
| 18 | 1071540 | 1072282 | + | int | 7605 |
| 18 | 1581074 | 1581354 | + | int | 7606 |
| 18 | 3305890 | 3306089 | + | int | 7607 |
| 18 | 6462115 | 6463126 | + | int | 7608 |
| 18 | 8481941 | 8483862 | + | int | 7609 |
| 18 | 8856769 | 8856944 | + | int | 7610 |
| 18 | 11246524 | 11247623 | + | int | 7611 |
| 18 | 11377525 | 11377838 | + | int | 7612 |
| 18 | 12484622 | 12486276 | − | SPIRE1 | 7613 |
| 18 | 12484622 | 12486276 | − | SPIRE1 | 7614 |
| 18 | 14090515 | 14091003 | − | ZNF519 | 7615 |
| 18 | 19989388 | 19989602 | + | int | 7616 |
| 18 | 20427208 | 20428243 | + | int | 7617 |
| 18 | 20555715 | 20556172 | + | RBBP8 | 7618 |
| 18 | 20555715 | 20556172 | + | RBBP8 | 7619 |
| 18 | 24720669 | 24721706 | − | CHST9 | 7620 |
| 18 | 26645111 | 26645342 | + | int | 7621 |
| 18 | 26721697 | 26721832 | + | int | 7622 |
| 18 | 27837549 | 27837873 | + | int | 7623 |
| 18 | 31996446 | 31997204 | + | int | 7624 |
| 18 | 34119073 | 34120102 | + | FHOD3 | 7625 |
| 18 | 35893150 | 35894133 | + | int | 7626 |
| 18 | 38564856 | 38565888 | + | int | 7627 |
| 18 | 40557831 | 40559027 | − | RIT2 | 7628 |
| 18 | 41775117 | 41775379 | + | int | 7629 |
| 18 | 44347544 | 44349152 | + | int | 7630 |
| 18 | 44554564 | 44554941 | + | KATNAL2 | 7631 |
| 18 | 44554564 | 44554941 | − | TCEB3C | 7632 |
| 18 | 44554564 | 44554941 | − | TCEB3CL | 7633 |
| 18 | 44800545 | 44801552 | + | int | 7634 |
| 18 | 47910107 | 47911752 | + | SKA1 | 7635 |
| 18 | 49012986 | 49014020 | + | LOC100287225 | 7636 |
| 18 | 49103135 | 49104542 | + | int | 7637 |
| 18 | 49405143 | 49405387 | + | int | 7638 |
| 18 | 50014395 | 50014584 | + | DCC | 7639 |
| 18 | 50616576 | 50620507 | + | DCC | 7640 |
| 18 | 50661077 | 50662327 | + | DCC | 7641 |
| 18 | 51819574 | 51820616 | + | POLI | 7642 |
| 18 | 52508757 | 52509497 | + | RAB27B | 7643 |
| 18 | 52515568 | 52517133 | + | RAB27B | 7644 |
| 18 | 58632817 | 58633449 | + | int | 7645 |
| 18 | 61885360 | 61885748 | + | LOC284294 | 7646 |
| 18 | 61885360 | 61885748 | − | LOC400654 | 7647 |
| 18 | 62395091 | 62395599 | + | int | 7648 |
| 18 | 62396091 | 62396352 | + | int | 7649 |
| 18 | 62972025 | 62974700 | + | int | 7650 |
| 18 | 63420149 | 63421308 | + | CDH7 | 7651 |
| 18 | 63420149 | 63421308 | + | CDH7 | 7652 |
| 18 | 63685707 | 63686273 | + | int | 7653 |
| 18 | 63969826 | 63970700 | + | int | 7654 |
| 18 | 64741770 | 64742261 | + | int | 7655 |
| 18 | 67991779 | 67992891 | + | SOCS6 | 7656 |
| 18 | 68264043 | 68264252 | + | int | 7657 |
| 18 | 69027365 | 69027650 | + | int | 7658 |
| 18 | 69156760 | 69156963 | + | int | 7659 |
| 18 | 69646243 | 69646631 | + | int | 7660 |
| 18 | 70416939 | 70418146 | − | NETO1 | 7661 |
| 18 | 70416939 | 70418146 | − | NETO1 | 7662 |
| 18 | 70818053 | 70818823 | + | int | 7663 |
| 18 | 73575332 | 73576450 | + | int | 7664 |
| 18 | 75705179 | 75706233 | + | int | 7665 |
| 19 | 808382 | 812221 | + | PTBP1 | 7666 |
| 19 | 1434738 | 1435344 | + | DAZAP1 | 7667 |
| 19 | 3976139 | 3977980 | − | EEF2 | 7668 |
| 19 | 3981940 | 3984157 | − | EEF2 | 7669 |
| 19 | 3981940 | 3984157 | − | SNORD37 | 7670 |
| 19 | 5648723 | 5649686 | + | SAFB | 7671 |
| 19 | 7122616 | 7123629 | − | INSR | 7672 |
| 19 | 8548041 | 8551144 | + | HNRNPM | 7673 |
| 19 | 9314887 | 9315905 | + | int | 7674 |
| 19 | 10148083 | 10148739 | + | int | 7675 |
| 19 | 11226715 | 11227746 | + | LDLR | 7676 |
| 19 | 12575001 | 12576141 | − | ZNF709 | 7677 |
| 19 | 13004923 | 13005057 | + | GCDH | 7678 |
| 19 | 13355257 | 13356430 | − | CACNA1A | 7679 |
| 19 | 14224504 | 14225581 | − | PRKACA | 7680 |
| 19 | 14224504 | 14225581 | − | PRKACA | 7681 |
| 19 | 17831696 | 17835329 | + | MAP1S | 7682 |
| 19 | 19243047 | 19244084 | − | TMEM161A | 7683 |
| 19 | 20235972 | 20236367 | + | int | 7684 |
| 19 | 23543102 | 23544593 | − | ZNF91 | 7685 |
| 19 | 29647756 | 29648765 | + | int | 7686 |
| 19 | 30033329 | 30034267 | + | VSTM2B | 7687 |
| 19 | 30693247 | 30693882 | + | int | 7688 |
| 19 | 30807465 | 30809236 | + | int | 7689 |
| 19 | 31324522 | 31326134 | + | int | 7690 |
| 19 | 32874922 | 32875805 | + | ZNF507 | 7691 |
| 19 | 33851181 | 33852185 | + | int | 7692 |
| 19 | 36053644 | 36055854 | − | ATP4A | 7693 |
| 19 | 38572484 | 38573487 | + | SIPA1L3 | 7694 |
| 19 | 38741426 | 38742270 | − | PPP1R14A | 7695 |
| 19 | 38846546 | 38847639 | + | CATSPERG | 7696 |
| 19 | 40353893 | 40354724 | − | FCGBP | 7697 |
| 19 | 44133138 | 44133438 | − | CADM4 | 7698 |
| 19 | 45777965 | 45778215 | + | MARK4 | 7699 |
| 19 | 46076848 | 46078346 | − | OPA3 | 7700 |
| 19 | 46076848 | 46078346 | − | OPA3 | 7701 |
| 19 | 51745522 | 51746010 | + | int | 7702 |
| 19 | 52725379 | 52729655 | + | PPP2R1A | 7703 |
| 19 | 53762106 | 53762789 | + | VN1R2 | 7704 |
| 19 | 56614283 | 56614595 | − | ZNF787 | 7705 |
| 19 | 57059163 | 57065178 | + | ZFP28 | 7706 |
| 19 | 57742888 | 57743489 | + | AURKC | 7707 |
| 19 | 57742888 | 57743489 | + | AURKC | 7708 |
| 19 | 57746881 | 57746957 | + | AURKC | 7709 |
| 19 | 57746881 | 57746957 | + | AURKC | 7710 |
| 20 | 1794799 | 1795473 | + | int | 7711 |
| 20 | 4610035 | 4610188 | + | int | 7712 |
| 20 | 5273335 | 5273619 | + | int | 7713 |
| 20 | 6922025 | 6923054 | + | int | 7714 |
| 20 | 9810959 | 9812678 | − | PAK7 | 7715 |
| 20 | 10382259 | 10382495 | + | int | 7716 |
| 20 | 12743475 | 12745331 | + | int | 7717 |
| 20 | 13971215 | 13971566 | − | SEL1L2 | 7718 |
| 20 | 13971215 | 13971566 | − | SEL1L2 | 7719 |
| 20 | 14522634 | 14522964 | + | MACROD2 | 7720 |
| 20 | 14821735 | 14822136 | + | MACROD2 | 7721 |
| 20 | 15688887 | 15689943 | + | MACROD2 | 7722 |
| 20 | 15688887 | 15689943 | + | MACROD2 | 7723 |
| 20 | 15714267 | 15715365 | + | MACROD2 | 7724 |
| 20 | 15714267 | 15715365 | + | MACROD2 | 7725 |
| 20 | 15812792 | 15813406 | + | MACROD2 | 7726 |
| 20 | 15812792 | 15813406 | + | MACROD2 | 7727 |
| 20 | 15908010 | 15908716 | + | MACROD2 | 7728 |
| 20 | 15908010 | 15908716 | + | MACROD2 | 7729 |
| 20 | 16034166 | 16036752 | + | int | 7730 |
| 20 | 16075545 | 16077098 | + | int | 7731 |
| 20 | 34794955 | 34796226 | + | EPB41L1 | 7732 |
| 20 | 34794955 | 34796226 | + | EPB41L1 | 7733 |
| 20 | 34794955 | 34796226 | + | EPB41L1 | 7734 |
| 20 | 35169481 | 35170743 | + | MYL9 | 7735 |
| 20 | 35220909 | 35222342 | + | TGIF2 | 7736 |
| 20 | 35220909 | 35222342 | + | TGIF2 | 7737 |
| 20 | 35220909 | 35222342 | + | TGIF2 | 7738 |
| 20 | 35220909 | 35222342 | + | TGIF2-C20orf24 | 7739 |
| 20 | 36966086 | 36968583 | + | int | 7740 |
| 20 | 38527690 | 38528659 | + | int | 7741 |
| 20 | 39033077 | 39034400 | + | int | 7742 |
| 20 | 39051779 | 39052903 | + | int | 7743 |
| 20 | 40980853 | 40981120 | − | PTPRT | 7744 |
| 20 | 42189157 | 42193085 | + | SGK2 | 7745 |
| 20 | 42468950 | 42469641 | + | int | 7746 |
| 20 | 42603140 | 42604667 | + | TOX2 | 7747 |
| 20 | 42603140 | 42604667 | + | TOX2 | 7748 |
| 20 | 42603140 | 42604667 | + | TOX2 | 7749 |
| 20 | 47835955 | 47836086 | + | DDX27 | 7750 |
| 20 | 50221345 | 50221575 | − | ATP9A | 7751 |
| 20 | 51184085 | 51184858 | + | int | 7752 |
| 20 | 54201207 | 54202083 | + | int | 7753 |
| 20 | 58747666 | 58749127 | + | LOC284757 | 7754 |
| 20 | 59933176 | 59934452 | + | CDH4 | 7755 |
| 21 | 15334187 | 15334995 | − | ANKRD20A11P | 7756 |
| 21 | 15981652 | 15984172 | − | LOC388813 | 7757 |
| 21 | 18210087 | 18210427 | + | int | 7758 |
| 21 | 18514413 | 18515002 | + | int | 7759 |
| 21 | 20626286 | 20626552 | + | int | 7760 |
| 21 | 21385991 | 21386184 | + | int | 7761 |
| 21 | 22321486 | 22322112 | + | int | 7762 |
| 21 | 22372068 | 22373107 | + | NCAM2 | 7763 |
| 21 | 22384873 | 22389111 | + | NCAM2 | 7764 |
| 21 | 22853240 | 22853893 | + | NCAM2 | 7765 |
| 21 | 23232576 | 23233181 | + | int | 7766 |
| 21 | 23822478 | 23823170 | + | int | 7767 |
| 21 | 24235322 | 24236395 | + | int | 7768 |
| 21 | 24248094 | 24251423 | + | int | 7769 |
| 21 | 24599957 | 24601569 | + | int | 7770 |
| 21 | 25831267 | 25831570 | + | int | 7771 |
| 21 | 28678630 | 28679302 | − | MIR5009 | 7772 |
| 21 | 30718420 | 30718469 | + | BACH1 | 7773 |
| 21 | 30718420 | 30718469 | + | BACH1 | 7774 |
| 21 | 30718420 | 30718469 | + | BACH1 | 7775 |
| 21 | 31303528 | 31305871 | − | GRIK1 | 7776 |
| 21 | 31303528 | 31305871 | − | GRIK1 | 7777 |
| 21 | 32558396 | 32559526 | − | TIAM1 | 7778 |
| 21 | 33211830 | 33214376 | + | int | 7779 |
| 21 | 33336530 | 33337378 | + | HUNK | 7780 |
| 21 | 34090993 | 34092191 | − | SYNJ1 | 7781 |
| 21 | 34090993 | 34092191 | − | SYNJ1 | 7782 |
| 21 | 36604577 | 36605470 | + | int | 7783 |
| 21 | 37080660 | 37081727 | + | int | 7784 |
| 21 | 37550745 | 37551588 | + | DOPEY2 | 7785 |
| 21 | 38057290 | 38058248 | + | int | 7786 |
| 21 | 43827956 | 43828865 | + | UBASH3A | 7787 |
| 21 | 44093265 | 44094840 | + | PDE9A | 7788 |
| 22 | 17597226 | 17598024 | − | CECR6 | 7789 |
| 22 | 17597226 | 17598024 | − | CECR6 | 7790 |
| 22 | 25625156 | 25625641 | + | CRYBB2 | 7791 |
| 22 | 28110878 | 28111435 | + | int | 7792 |
| 22 | 28441394 | 28442214 | − | TTC28 | 7793 |
| 22 | 30860717 | 30861972 | − | SEC14L3 | 7794 |
| 22 | 31368966 | 31369980 | + | TUG1 | 7795 |
| 22 | 32007428 | 32009387 | + | SFI1 | 7796 |
| 22 | 32010539 | 32011949 | + | SFI1 | 7797 |
| 22 | 32015854 | 32017269 | − | PISD | 7798 |
| 22 | 32016919 | 32021691 | − | PISD | 7799 |
| 22 | 32020968 | 32022116 | − | PISD | 7800 |
| 22 | 32021094 | 32022116 | − | PISD | 7801 |
| 22 | 35726444 | 35743966 | + | MIR3909 | 7802 |
| 22 | 35726444 | 35743966 | + | TOM1 | 7803 |
| 22 | 35726444 | 35743966 | + | TOM1 | 7804 |
| 22 | 39118496 | 39119525 | + | GTPBP1 | 7805 |
| 22 | 39901918 | 39902480 | + | SMCR7L | 7806 |
| 22 | 43650725 | 43651812 | − | SCUBE1 | 7807 |
| 22 | 44389170 | 44389660 | + | SAMM50 | 7808 |
| 22 | 44680418 | 44681632 | − | KIAA1644 | 7809 |
| 22 | 45993179 | 45996119 | + | FBLN1 | 7810 |
| 22 | 46545814 | 46546921 | + | PPARA | 7811 |
| 22 | 48813172 | 48814314 | + | int | 7812 |
| 22 | 49407925 | 49408917 | + | int | 7813 |
| X | 9934910 | 9937295 | + | LOC100288814 | 7814 |
| X | 10264411 | 10264759 | + | int | 7815 |
| X | 10415590 | 10417999 | − | MID1 | 7816 |
| X | 10415590 | 10417999 | − | MID1 | 7817 |
| X | 10415590 | 10417999 | − | MID1 | 7818 |
| X | 10415590 | 10417999 | − | MID1 | 7819 |
| X | 11030814 | 11030960 | + | int | 7820 |
| X | 11902065 | 11902197 | + | int | 7821 |
| X | 13926576 | 13926873 | − | GPM6B | 7822 |
| X | 14212954 | 14213202 | + | int | 7823 |
| X | 14257984 | 14258249 | + | int | 7824 |
| X | 14272823 | 14273312 | + | int | 7825 |
| X | 14286751 | 14287277 | + | int | 7826 |
| X | 15122623 | 15123118 | + | int | 7827 |
| X | 19497752 | 19500958 | − | MAP3K15 | 7828 |
| X | 19970782 | 19971984 | − | CXorf23 | 7829 |
| X | 21250338 | 21250931 | + | int | 7830 |
| X | 21515891 | 21516185 | + | CNKSR2 | 7831 |
| X | 21515891 | 21516185 | + | CNKSR2 | 7832 |
| X | 21608334 | 21609541 | + | CNKSR2 | 7833 |
| X | 21608334 | 21609541 | + | CNKSR2 | 7834 |
| X | 21874178 | 21875284 | + | MBTPS2 | 7835 |
| X | 21874178 | 21875284 | + | YY2 | 7836 |
| X | 22004525 | 22005076 | + | SMS | 7837 |
| X | 22642669 | 22642967 | − | LOC100873065 | 7838 |
| X | 23295821 | 23297129 | − | LOC100873065 | 7839 |
| X | 25197622 | 25199016 | + | int | 7840 |
| X | 25206553 | 25206758 | + | int | 7841 |
| X | 25290002 | 25290276 | + | int | 7842 |
| X | 25847000 | 25847274 | + | int | 7843 |
| X | 26240374 | 26240598 | + | int | 7844 |
| X | 26481233 | 26481621 | + | int | 7845 |
| X | 26572162 | 26572503 | + | int | 7846 |
| X | 26588583 | 26588998 | + | int | 7847 |
| X | 26620366 | 26621051 | + | int | 7848 |
| X | 27159453 | 27159616 | + | int | 7849 |
| X | 27167913 | 27168489 | + | int | 7850 |
| X | 27702721 | 27702987 | + | int | 7851 |
| X | 28083965 | 28084620 | + | int | 7852 |
| X | 28358168 | 28358480 | + | int | 7853 |
| X | 28394648 | 28394858 | + | int | 7854 |
| X | 28678728 | 28679453 | + | IL1RAPL1 | 7855 |
| X | 28862453 | 28862819 | + | IL1RAPL1 | 7856 |
| X | 28971968 | 28972200 | + | IL1RAPL1 | 7857 |
| X | 29248448 | 29249457 | + | IL1RAPL1 | 7858 |
| X | 29515852 | 29516435 | + | IL1RAPL1 | 7859 |
| X | 29599098 | 29599648 | + | IL1RAPL1 | 7860 |
| X | 29902162 | 29902359 | + | IL1RAPL1 | 7861 |
| X | 29960513 | 29961512 | + | IL1RAPL1 | 7862 |
| X | 30077862 | 30078134 | + | int | 7863 |
| X | 30151514 | 30151725 | + | int | 7864 |
| X | 30577392 | 30578440 | − | CXorf21 | 7865 |
| X | 30878218 | 30878495 | − | TAB3 | 7866 |
| X | 31742976 | 31743175 | − | DMD | 7867 |
| X | 31742976 | 31743175 | − | DMD | 7868 |
| X | 31742976 | 31743175 | − | DMD | 7869 |
| X | 31742976 | 31743175 | − | DMD | 7870 |
| X | 31742976 | 31743175 | − | DMD | 7871 |
| X | 31742976 | 31743175 | − | DMD | 7872 |
| X | 31742976 | 31743175 | − | DMD | 7873 |
| X | 31779912 | 31780938 | − | DMD | 7874 |
| X | 31779912 | 31780938 | − | DMD | 7875 |
| X | 31779912 | 31780938 | − | DMD | 7876 |
| X | 31779912 | 31780938 | − | DMD | 7877 |
| X | 31779912 | 31780938 | − | DMD | 7878 |
| X | 31779912 | 31780938 | − | DMD | 7879 |
| X | 31779912 | 31780938 | − | DMD | 7880 |
| X | 31814625 | 31815882 | − | DMD | 7881 |
| X | 31814625 | 31815882 | − | DMD | 7882 |
| X | 31814625 | 31815882 | − | DMD | 7883 |
| X | 31814625 | 31815882 | − | DMD | 7884 |
| X | 31814625 | 31815882 | − | DMD | 7885 |
| X | 31814625 | 31815882 | − | DMD | 7886 |
| X | 31814625 | 31815882 | − | DMD | 7887 |
| X | 32079093 | 32079565 | − | DMD | 7888 |
| X | 32079093 | 32079565 | − | DMD | 7889 |
| X | 32079093 | 32079565 | − | DMD | 7890 |
| X | 32079093 | 32079565 | − | DMD | 7891 |
| X | 32079093 | 32079565 | − | DMD | 7892 |
| X | 32079093 | 32079565 | − | DMD | 7893 |
| X | 32079093 | 32079565 | − | DMD | 7894 |
| X | 32215822 | 32216035 | − | DMD | 7895 |
| X | 32215822 | 32216035 | − | DMD | 7896 |
| X | 32215822 | 32216035 | − | DMD | 7897 |
| X | 32215822 | 32216035 | − | DMD | 7898 |
| X | 32215822 | 32216035 | − | DMD | 7899 |
| X | 32215822 | 32216035 | − | DMD | 7900 |
| X | 33360377 | 33361355 | + | int | 7901 |
| X | 34294496 | 34294814 | + | int | 7902 |
| X | 34725273 | 34725625 | + | int | 7903 |
| X | 35142638 | 35143065 | + | int | 7904 |
| X | 35876281 | 35877441 | + | int | 7905 |
| X | 36108384 | 36109383 | + | CHDC2 | 7906 |
| X | 36270733 | 36270936 | + | CXorf30 | 7907 |
| X | 37351254 | 37351413 | + | int | 7908 |
| X | 37351268 | 37352029 | + | int | 7909 |
| X | 39646155 | 39647467 | + | int | 7910 |
| X | 39646161 | 39646855 | + | int | 7911 |
| X | 39646188 | 39647467 | + | int | 7912 |
| X | 39646189 | 39647096 | + | int | 7913 |
| X | 39646194 | 39647289 | + | int | 7914 |
| X | 39646262 | 39647260 | + | int | 7915 |
| X | 39646304 | 39647295 | + | int | 7916 |
| X | 39646313 | 39647316 | + | int | 7917 |
| X | 39647261 | 39647467 | + | int | 7918 |
| X | 40364073 | 40364857 | + | int | 7919 |
| X | 42233257 | 42233587 | + | int | 7920 |
| X | 42325918 | 42326436 | + | int | 7921 |
| X | 43597321 | 43598978 | + | MAOA | 7922 |
| X | 43702090 | 43702328 | − | MAOB | 7923 |
| X | 43864258 | 43864430 | + | int | 7924 |
| X | 44887718 | 44888894 | + | KDM6A | 7925 |
| X | 46298977 | 46299956 | + | int | 7926 |
| X | 48758329 | 48759800 | + | PQBP1 | 7927 |
| X | 48758329 | 48759800 | + | PQBP1 | 7928 |
| X | 48758329 | 48759800 | + | PQBP1 | 7929 |
| X | 48758329 | 48759800 | + | PQBP1 | 7930 |
| X | 48758329 | 48759800 | + | PQBP1 | 7931 |
| X | 48972038 | 48972646 | − | GPKOW | 7932 |
| X | 50090293 | 50091312 | + | CCNB3 | 7933 |
| X | 50226433 | 50227480 | + | int | 7934 |
| X | 50328272 | 50329225 | + | int | 7935 |
| X | 50438504 | 50439227 | − | SHROOM4 | 7936 |
| X | 53676775 | 53677571 | − | HUWE1 | 7937 |
| X | 54423586 | 54424379 | + | int | 7938 |
| X | 55481010 | 55482493 | + | int | 7939 |
| X | 55743869 | 55744936 | + | RRAGB | 7940 |
| X | 56772420 | 56772721 | + | LOC550643 | 7941 |
| X | 57145012 | 57146007 | + | int | 7942 |
| X | 57146997 | 57147804 | − | SPIN2B | 7943 |
| X | 57160737 | 57161075 | + | int | 7944 |
| X | 62877290 | 62877823 | − | ARHGEF9 | 7945 |
| X | 62877290 | 62877823 | − | ARHGEF9 | 7946 |
| X | 64738869 | 64739880 | − | LAS1L | 7947 |
| X | 64876292 | 64877641 | + | int | 7948 |
| X | 65482480 | 65482639 | + | HEPH | 7949 |
| X | 65482480 | 65482639 | + | HEPH | 7950 |
| X | 65482480 | 65482639 | + | HEPH | 7951 |
| X | 65841797 | 65842951 | − | EDA2R | 7952 |
| X | 65841797 | 65842951 | − | EDA2R | 7953 |
| X | 67937357 | 67938369 | + | STARD8 | 7954 |
| X | 67937357 | 67938369 | + | STARD8 | 7955 |
| X | 73039824 | 73041018 | + | TSIX | 7956 |
| X | 73039824 | 73041018 | − | XIST | 7957 |
| X | 73045856 | 73047100 | + | TSIX | 7958 |
| X | 73045856 | 73047100 | − | XIST | 7959 |
| X | 73047936 | 73051881 | + | TSIX | 7960 |
| X | 73047936 | 73051881 | − | XIST | 7961 |
| X | 73061761 | 73069426 | − | XIST | 7962 |
| X | 74362435 | 74362959 | − | ABCB7 | 7963 |
| X | 76709050 | 76710645 | + | FGF16 | 7964 |
| X | 77154565 | 77156019 | + | COX7B | 7965 |
| X | 80185099 | 80186175 | + | int | 7966 |
| X | 80423600 | 80425100 | − | HMGN5 | 7967 |
| X | 80850986 | 80851228 | + | int | 7968 |
| X | 82581201 | 82581857 | + | int | 7969 |
| X | 83695691 | 83696634 | − | HDX | 7970 |
| X | 84036908 | 84037115 | + | int | 7971 |
| X | 84340906 | 84342140 | + | APOOL | 7972 |
| X | 84413785 | 84414294 | + | int | 7973 |
| X | 85137686 | 85138537 | − | CHM | 7974 |
| X | 85509235 | 85510253 | + | DACH2 | 7975 |
| X | 85777493 | 85778402 | + | DACH2 | 7976 |
| X | 85777493 | 85778402 | + | DACH2 | 7977 |
| X | 86245525 | 86245871 | + | int | 7978 |
| X | 87768045 | 87768592 | + | int | 7979 |
| X | 87968468 | 87968864 | + | int | 7980 |
| X | 88905456 | 88905826 | + | int | 7981 |
| X | 90001252 | 90001613 | + | int | 7982 |
| X | 90356767 | 90357363 | + | int | 7983 |
| X | 90892493 | 90894503 | + | int | 7984 |
| X | 91104025 | 91104829 | + | PCDH11X | 7985 |
| X | 91104025 | 91104829 | + | PCDH11X | 7986 |
| X | 91104025 | 91104829 | + | PCDH11X | 7987 |
| X | 91104025 | 91104829 | + | PCDH11X | 7988 |
| X | 91151438 | 91151761 | + | PCDH11X | 7989 |
| X | 91151438 | 91151761 | + | PCDH11X | 7990 |
| X | 91609285 | 91610819 | + | PCDH11X | 7991 |
| X | 91609285 | 91610819 | + | PCDH11X | 7992 |
| X | 91753066 | 91753211 | + | PCDH11X | 7993 |
| X | 91753066 | 91753211 | + | PCDH11X | 7994 |
| X | 91873066 | 91874187 | + | PCDH11X | 7995 |
| X | 91873066 | 91874187 | + | PCDH11X | 7996 |
| X | 92619153 | 92619359 | + | int | 7997 |
| X | 92634463 | 92635183 | + | int | 7998 |
| X | 92719720 | 92720152 | + | int | 7999 |
| X | 93042701 | 93042895 | + | int | 8000 |
| X | 93167355 | 93167689 | + | int | 8001 |
| X | 93340437 | 93342023 | + | int | 8002 |
| X | 93367568 | 93368003 | + | int | 8003 |
| X | 93503858 | 93505137 | + | int | 8004 |
| X | 94635217 | 94636016 | + | int | 8005 |
| X | 94898720 | 94899994 | + | int | 8006 |
| X | 95440587 | 95441564 | + | int | 8007 |
| X | 95582132 | 95584420 | + | int | 8008 |
| X | 95625497 | 95625945 | + | int | 8009 |
| X | 95762608 | 95762833 | + | int | 8010 |
| X | 95820455 | 95821003 | + | int | 8011 |
| X | 95827245 | 95827520 | + | int | 8012 |
| X | 96139196 | 96140183 | + | DIAPH2 | 8013 |
| X | 96139196 | 96140183 | + | DIAPH2 | 8014 |
| X | 96139196 | 96140183 | + | RPA4 | 8015 |
| X | 96815904 | 96816839 | + | DIAPH2 | 8016 |
| X | 97106256 | 97107180 | + | int | 8017 |
| X | 97348775 | 97349005 | + | int | 8018 |
| X | 98961900 | 98962360 | − | LOC442459 | 8019 |
| X | 99284617 | 99285306 | + | int | 8020 |
| X | 99446643 | 99447162 | + | int | 8021 |
| X | 99671924 | 99673128 | + | int | 8022 |
| X | 100536707 | 100538583 | − | TAF7L | 8023 |
| X | 100536707 | 100538583 | − | TAF7L | 8024 |
| X | 100852649 | 100853543 | + | int | 8025 |
| X | 101693886 | 101694181 | − | NXF2 | 8026 |
| X | 101693886 | 101694181 | − | NXF2B | 8027 |
| X | 102893114 | 102894204 | + | int | 8028 |
| X | 103776328 | 103777486 | + | int | 8029 |
| X | 104050454 | 104050934 | + | IL1RAPL2 | 8030 |
| X | 104472642 | 104472919 | + | IL1RAPL2 | 8031 |
| X | 104624474 | 104625323 | + | IL1RAPL2 | 8032 |
| X | 106335488 | 106335876 | − | RBM41 | 8033 |
| X | 106335488 | 106335876 | − | RBM41 | 8034 |
| X | 107570697 | 107571014 | − | COL4A6 | 8035 |
| X | 107570697 | 107571014 | − | COL4A6 | 8036 |
| X | 107708231 | 107708502 | + | COL4A5 | 8037 |
| X | 108366501 | 108366665 | + | int | 8038 |
| X | 108718159 | 108719385 | − | GUCY2F | 8039 |
| X | 109315230 | 109325750 | + | MIR3978 | 8040 |
| X | 109315230 | 109325750 | + | TMEM164 | 8041 |
| X | 109315230 | 109325750 | + | TMEM164 | 8042 |
| X | 110365709 | 110366682 | + | PAK3 | 8043 |
| X | 110365709 | 110366682 | + | PAK3 | 8044 |
| X | 110365709 | 110366682 | + | PAK3 | 8045 |
| X | 111782882 | 111783313 | + | int | 8046 |
| X | 112186828 | 112187205 | + | int | 8047 |
| X | 112602488 | 112602681 | + | int | 8048 |
| X | 113276081 | 113276547 | + | int | 8049 |
| X | 114470606 | 114471218 | + | int | 8050 |
| X | 114738890 | 114739141 | + | int | 8051 |
| X | 114738964 | 114739202 | + | int | 8052 |
| X | 117592321 | 117592492 | + | int | 8053 |
| X | 119551635 | 119552955 | + | int | 8054 |
| X | 119672193 | 119672398 | − | CUL4B | 8055 |
| X | 119672193 | 119672398 | − | CUL4B | 8056 |
| X | 119959609 | 119959719 | + | int | 8057 |
| X | 120169044 | 120169222 | + | int | 8058 |
| X | 121313608 | 121314372 | + | int | 8059 |
| X | 121582736 | 121583021 | + | int | 8060 |
| X | 121609260 | 121609550 | + | int | 8061 |
| X | 122116557 | 122117342 | + | int | 8062 |
| X | 122131352 | 122132305 | + | int | 8063 |
| X | 122695776 | 122697082 | + | int | 8064 |
| X | 123232773 | 123233853 | + | STAG2 | 8065 |
| X | 123232773 | 123233853 | + | STAG2 | 8066 |
| X | 123466765 | 123467484 | + | int | 8067 |
| X | 123734094 | 123734446 | − | TENM1 | 8068 |
| X | 123744756 | 123745226 | − | TENM1 | 8069 |
| X | 124054674 | 124054814 | − | TENM1 | 8070 |
| X | 124088523 | 124088880 | − | TENM1 | 8071 |
| X | 124128924 | 124130224 | + | int | 8072 |
| X | 124262222 | 124262524 | + | int | 8073 |
| X | 124532618 | 124532901 | + | int | 8074 |
| X | 124577309 | 124577532 | + | int | 8075 |
| X | 124829887 | 124830540 | + | int | 8076 |
| X | 125893677 | 125895415 | + | int | 8077 |
| X | 125949897 | 125950777 | + | int | 8078 |
| X | 126115054 | 126116196 | + | int | 8079 |
| X | 126126125 | 126126406 | + | int | 8080 |
| X | 126248266 | 126248419 | + | int | 8081 |
| X | 126604249 | 126604423 | + | int | 8082 |
| X | 127107252 | 127107295 | + | int | 8083 |
| X | 128165254 | 128166228 | + | int | 8084 |
| X | 128656784 | 128657781 | − | SMARCA1 | 8085 |
| X | 128944653 | 128945690 | − | ZDHHC9 | 8086 |
| X | 128944653 | 128945690 | − | ZDHHC9 | 8087 |
| X | 129058978 | 129059787 | + | UTP14A | 8088 |
| X | 129726268 | 129726444 | + | int | 8089 |
| X | 130284543 | 130284674 | + | int | 8090 |
| X | 130349150 | 130349381 | + | int | 8091 |
| X | 130398188 | 130399134 | + | int | 8092 |
| X | 130632183 | 130633584 | + | int | 8093 |
| X | 130657289 | 130658369 | + | int | 8094 |
| X | 130718850 | 130719181 | + | int | 8095 |
| X | 135955684 | 135956845 | − | RBMX | 8096 |
| X | 135955684 | 135956845 | − | RBMX | 8097 |
| X | 137052113 | 137052688 | + | int | 8098 |
| X | 139058614 | 139066883 | + | int | 8099 |
| X | 140069151 | 140069693 | + | int | 8100 |
| X | 140384152 | 140384535 | + | int | 8101 |
| X | 140394522 | 140394787 | + | int | 8102 |
| X | 140578209 | 140578373 | + | int | 8103 |
| X | 141327955 | 141328628 | + | int | 8104 |
| X | 141594281 | 141594444 | + | int | 8105 |
| X | 141683617 | 141683931 | + | int | 8106 |
| X | 142167954 | 142168237 | + | int | 8107 |
| X | 142177472 | 142178161 | + | int | 8108 |
| X | 142399415 | 142399705 | + | int | 8109 |
| X | 142721260 | 142722234 | − | SLITRK4 | 8110 |
| X | 142721260 | 142722234 | − | SLITRK4 | 8111 |
| X | 142721260 | 142722234 | − | SLITRK4 | 8112 |
| X | 142744096 | 142745259 | + | int | 8113 |
| X | 143212388 | 143212810 | + | int | 8114 |
| X | 143405020 | 143405595 | + | int | 8115 |
| X | 144067963 | 144069446 | + | int | 8116 |
| X | 144295143 | 144295652 | + | int | 8117 |
| X | 144302247 | 144302770 | + | int | 8118 |
| X | 144355024 | 144355622 | + | int | 8119 |
| X | 144836473 | 144836729 | + | int | 8120 |
| X | 145365447 | 145365618 | + | int | 8121 |
| X | 145763732 | 145769741 | + | int | 8122 |
| X | 145895795 | 145896128 | − | CXorf51A | 8123 |
| X | 145895795 | 145896128 | − | CXorf51B | 8124 |
| X | 147369284 | 147370961 | + | int | 8125 |
| X | 147448127 | 147448492 | + | int | 8126 |
| X | 149924816 | 149928481 | + | MTMR1 | 8127 |
| X | 150161957 | 150162473 | + | int | 8128 |
| X | 152227043 | 152228672 | + | PNMA3 | 8129 |
| X | 152388832 | 152393903 | + | int | 8130 |
| X | 152388836 | 152393446 | + | int | 8131 |
| X | 152388881 | 152393726 | + | int | 8132 |
| X | 152395514 | 152396836 | + | int | 8133 |
| X | 152395546 | 152396836 | + | int | 8134 |
| X | 152535880 | 152536127 | + | int | 8135 |
| X | 152663383 | 152664056 | + | int | 8136 |
| X | 153613453 | 153613876 | + | int | 8137 |
| Un_gl000216 | 138945 | 140026 | + | int | 8138 |

TABLE 4
PRC2 target genes in the Q1 quartile.
Q1 EZH2 Peak genes

| | | | |
|---|---|---|---|
| Tbc1d30 | Snord37 | Obscn | Hdgfl1 |
| Rassf3 | Dapk3 | Gjc2 | Fam50b |
| Agap2 | Tjp3 | Srebf1 | Phactr1 |
| Lrp1 | Pip5k1c | Mapk7 | Nhlrc1 |
| Gpr6 | Tbxa2r | Slc5a10 | Bicd2 |
| 9030612E09Rik | Gipc3 | Fam83g | Cltb |
| Bend3 | Tle2 | F930015N05Rik | Slc34a1 |
| 1700021F05Rik | Ckap4 | Ntn1 | Pfn3 |
| Msl3l2 | Btbd11 | A030009H04Rik | Pcbd2 |
| 4933403O03Rik | Ascl1 | Wscd1 | Pitx1 |
| Dux | Naglu | Pitpnm3 | Neurog1 |
| Spock2 | Hsd17b1 | Atp2a3 | Zap70 |
| Chst3 | Sost | Camkk1 | Irx1 |
| Cdh23 | Fam171a2 | Fcrlb | Irx2 |
| Dnc5b | Adam11 | Vangl2 | Inpp4a |
| Lrrc20 | Wnt9b | Kcnj9 | Nkd2 |
| Tysnd1 | Wnt3 | Vsig8 | Gpr150 |
| Tspan15 | Ace | Dph1 | Pou3f3 |
| Slc16a9 | Cacng4 | Rtn4rl1 | Colg |
| Rtdr1 | Kif19a | Olfr418-ps1 | Gprin2 |
| Gnaz | Btbd17 | Serpinf2 | Syt15 |
| Bcr | Gprc5c | Wdr81 | Rem2 |
| Adora2a | Cd300a | Olfr433 | Slc22a17 |
| Pcnt | Tmem104 | Olfr420 | Efs |
| Col6a2 | Grin2c | Tmem132e | D830015G02Rik |
| Col6a1 | Otop2 | Gas212 | Jph4 |
| Lrrc3 | Ush1g | Tbx2 | Ltb4r1 |
| Pfkl | Ube2o | Mpo | Gm5801 |
| Mier2 | Sept9 | Akap1 | Lats2 |
| Hcn2 | C1qtnf1 | Trim25 | Mir124a-1 |
| BC005764 | D11Bwg0517e | Nog | Fam160b2 |
| Grin3b | Cbx4 | G0s2 | Epb4.9 |
| ORF61 | Nptx1 | Phospho1 | Pcdh8 |
| Hmha1 | Bahcc1 | Abi3 | Oit1 |
| Sbno2 | Aspscr1 | Osbpl7 | Krt81 |
| Dos | Fasn | Srcin1 | Soat2 |
| 2310011J03Rik | Otx1 | E130012A19Rik | Ppp1r1a |
| Pcsk4 | C1ql2 | Igfbp4 | Eif2c2 |
| Reep6 | Pisd-ps1 | Krt27 | Slc45a4 |
| Plk5 | Pisd-ps3 | Ccdc88c | Gpr20 |
| Mex3d | Sfi1 | Hhipl1 | Ptp4a3 |
| Mbd3 | Il9r | Begain | Bai1 |
| Onecut3 | Tlx3 | Amn | Mapk15 |
| Fam108a | Tmcc2 | Akt1 | Scrib |
| Ap3d1 | Etnk2 | Jag2 | Plec |
| Amh | Syt2 | Mta1 | Scrt1 |
| Lingo3 | C1qtnf2 | E2f6 | Ncf4 |
| 3110056O03Rik | Msc | Actn1 | Card10 |
| Timm13 | Col23a1 | Gdf7 | Galr3 |
| Lmnb2 | Shroom1 | Gm1995 | Ankrd54 |
| Diras1 | Ankrd43 | Gm7104 | Pla2g6 |
| Thop1 | Sept8 | Gpr137b | Sun2 |
| Eef2 | | Hist1h2aa | Pdgfb |

TABLE 5
PRC2 target genes in the Q1 quartile.

| | | | |
|---|---|---|---|
| Cacnali | Rasal3 | 2810459M11Rik | Elmo2 |
| Fam83f | H2-K1 | Nfatc1 | Prex1 |
| Zc3h7b | Tnxb | Ecel1 | Ddx27 |
| A4galt | H2-Q2 | Dagla | Ube2v1 |
| Scube1 | H2-Q6 | Syt7 | Ptpn1 |
| Parvb | H2-Q7 | Lrrc10b | Fam65c |
| Prr5 | Dhx16 | Olfr1494 | Mocs3 |
| Wnt7b | Trim15 | Foxb2 | 2410001C21Rik |
| Celsr1 | Trim10 | Gbx2 | 9030418K01Rik |
| Cerk | Olfr94 | Espnl | Lama5 |
| Trabd | Olfr95 | Traf3ip1 | Bhlhe23 |
| 1300018J18Rik | Tns1 | Twist2 | Grin1 |
| Sbf1 | Slc11a1 | Sfrp5 | Bmyc |
| Shank3 | Ctdsp1 | Pold4 | Lhx3 |
| H1fnt | Tmem151b | Pax2 | Fam163b |
| Mll2 | Slc35b2 | Lzts2 | Brd3 |
| Prph | Mrps18a | Lbx1 | St6galnac6 |
| Kcnh3 | Tjap1 | Trim8 | Fpgs |
| Nckap5l | Ttbk1 | Neurl1a | Fam125b |
| Aqp2 | Klc4 | Dusp28 | Crb2 |
| Zc3h7a | Cul7 | Peli3 | Lhx2 |
| Nde1 | Guca1a | Gpam | Nr5a1 |
| Scarf2 | Tcfeb | Gm962 | Evx2 |
| Slc25a1 | B430306N03Rik | Sipa1 | Hoxd11 |
| Rtn4r | Cdk5r2 | Map3k11 | Hoxd4 |
| Zdhhc8 | Ihh | Ltbp3 | Rtn4rl2 |
| Tbx1 | Speg | Trub1 | C1qtnf4 |
| Sept5 | Plin5 | Frmd8 | Alx4 |
| Gp5 | Lrg1 | Csf2ra | Gm13889 |
| Adcy5 | Sema6b | Nrxn2 | Syt6 |
| Zdhhc23 | Dpp9 | Plcb3 | Ppm1j |
| Glis2 | Ptprs | Pak6 | Wnt2b |
| Coro7 | Znrf4 | Bahd1 | Kcna3 |
| Krtap11-1 | Nrtn | Itpka | Kcna2 |
| Rcan1 | Slc25a23 | Ltk | Kcnc4 |
| Clic6 | Crb3 | Mtap1a | Alx3 |
| Setd4 | Dennd1c | Bambi-ps1 | Neurog2 |
| Hlcs | Emilin2 | Eid1 | Gm5712 |
| Ripk4 | Gm10190 | Kcnip3 | Spry1 |
| Dnase1l2 | Sft2d1 | Foxa2 | Pear1 |
| E4f1 | Abcg5 | Sstr4 | Ntrk1 |
| Caskin1 | Gm12166 | Tspyl3 | Bcan |
| Tmem8 | Prr18 | 8430427H17Rik | Hapln2 |
| Grm4 | Six3 | Necab3 | Iqgap3 |
| Uhrf1bp1 | Six2 | 1700003F12Rik | Mef2d |
| Anks1 | Ttc7 | Fam83c | Smg5 |
| Fance | Fam53c | 9830001H06Rik | Paqr6 |
| Lhfpl5 | Pura | Vstm2l | Adar |
| Brpf3 | Pcdhb6 | Adig | C2cd4d |
| Cdkn1a | Pcdhb11 | Slc32a1 | Sema6c |
| Mdga1 | Pcdhb12 | Ppp1r16b | Ttc22 |
| Pisd-ps2 | Pcdhb15 | Lpin3 | Glis1 |
| Abcg1 | Pcdhb17 | Emilin3 | Dmrta2 |
| Tmprss3 | Spry4 | L3mbtl | Foxd2 |
| Cbs | St8sia5 | Cdh22 | Dmbx1 |

TABLE 4
PRC2 target genes in the Q1 quartile.

| | | | |
|---|---|---|---|
| Faah | Wscd2 | Ankrd56 | Jph3 |
| Ptch2 | Cmklr1 | Iffo1 | Zfpm1 |
| Edn2 | Msi1 | Tnfrsf1a | Mvd |
| Foxo6 | Pxn | Fkbp4 | Rnf166 |
| Cited4 | Gcn1l1 | Flnc | Ctu2 |
| Bmp8a | Ksr2 | Smo | Trappc2l |
| Epha10 | Nos1 | Mir182 | Cbfa2t3 |
| Rspo1 | Lhx5 | Klf14 | Cdh15 |
| Trappc3 | Plbd2 | Podxl | Afg3l1 |
| Trim62 | Ddx54 | Zfp783 | Acta1 |
| Nkain1 | Dtx1 | Sspo | Galnt2 |
| Matn1 | Adam1b | AI854703 | Pgbd5 |
| Ptpru | Sh2b3 | Evx1 | Ttc13 |
| BC013712 | Cux2 | 1200009O22Rik | Trim67 |
| Ahdc1 | Camkk2 | Dlx6 | Sipa1l2 |
| 1810019J16Rik | Hip1r | Dlx6as | BC021891 |
| Aim1l | Dnahc10 | Slc4a5 | Cln8 |
| Nipal3 | Ncor2 | Tet3 | Kbtbd11 |
| Zfp46 | Gpr133 | Atp6v1b1 | Ank1 |
| Ephb2 | Trim50 | Fbxo41 | Zfp358 |
| Rap1gap | Nsun5 | Egr4 | 2310057J16Rik |
| Fam43b | Ywhag | Gpr27 | Hand2 |
| Aldh4a1 | Alkbh4 | Klhl35 | Cilp2 |
| Tas1r2 | Mblac1 | Phox2a | Homer3 |
| Rcc2 | 3110082I17Rik | Rbmxl2 | Gdf1 |
| Padi2 | Uncx | Doc2a | Lass1 |
| Mfap2 | Ints1 | Qprt | Upf1 |
| Epha2 | Elfn1 | Utf1 | Crtc1 |
| Fam131c | Ttyh3 | Mrgpre | Klhl26 |
| 9030409G11Rik | Radi1 | Fgf3 | Ssbp4 |
| Lrrc38 | Fbxl18 | Rtn2 | Kcnn1 |
| Casz1 | Zfp316 | Apoe | Myo9b |
| Dnajc11 | Grid2ip | Zfp575 | Use1 |
| Klhl21 | Gsx1 | Lypd4 | Nr2f6 |
| Zbtb48 | Kcnh2 | Dmrtc2 | Gtpbp3 |
| Espn | Atg9b | Tmem145 | Fam129c |
| Icmt | Agap3 | Il28a | Unc13a |
| Nphp4 | Gbx1 | Fbxo27 | B3gnt3 |
| Megf6 | En2 | Lrfn3 | Ap1m1 |
| Arhgef16 | Shh | Scn1b | Rasd2 |
| Prdm16 | Mnx1 | A430110N23Rik | Ptger1 |
| Ttc34 | Fam59b | Il4i1 | Lphn1 |
| Hes5 | Kcnk3 | Olfr1344 | 1700067K01Rik |
| Pank4 | Khk | Mesp1 | Rfx1 |
| Plch2 | Cad | Cdh5 | Podnl1 |
| Morn1 | Slc30a3 | Plekhg4 | Cacna1a |
| Cntfr | Sh3bp2 | Zfhx3 | Zfp423 |
| N28178 | Adra2c | Ctrb1 | Adcy7 |
| Coro2a | Hmx1 | Pkd1l2 | Cpne2 |
| Col15a1 | Htra3 | 4933407C03Rik | Ccdc102a |
| Rgs3 | Sh3tc1 | Plcg2 | Grm2 |
| Gdf6 | Nkx3-2 | Adad2 | Cacna2d2 |
| Foxd3 | Slc34a2 | Foxl1 | Ifrd2 |
| Tpst2 | Phox2b | Sox1 | Bsn |
| Asphd2 | Shisa3 | Zcchc14 | Klhdc8b |

TABLE 4
PRC2 target genes in the Q1 quartile.

Ccdc71
Als2cl
2900079G21Rik
Trim71
Scn5a
Csrnp1
Kbtbd5
Hhatl
Fut4
Olfm2
S1pr5
BC018242
Acp5
Thy1
Abcg4
Pml
Skor1
C2cd4b
Bcl2l10
Paqr9
Sox14
Tsix
Gprasp2
Bex1
AU022751
Arx

TABLE 5
List of 100 genes with highest ATRX coverage
in MEFs, with coverage values shown.

| | |
|---|---|
| Mir715 | 1427.217121 |
| Pisd-ps1 | 321.1430928 |
| Pisd-ps3 | 321.1430928 |
| Dux | 220.4590578 |
| Sfi1 | 111.6833128 |
| Pisd-ps2 | 100.8392507 |
| 4933403O03Rik | 88.03649585 |
| Snord37 | 78.55112237 |
| Eef2 | 45.82187363 |
| Mir1934 | 36.56676001 |
| Gm1995 | 34.14755288 |
| Mir145 | 33.63285725 |
| Mir877 | 32.59314041 |
| H2-t9 | 32.47932573 |
| Mir1982 | 32.40379644 |
| Snora7a | 32.16285132 |
| Mir134 | 32.00243155 |
| Dnase2a | 31.92076681 |
| Bat4 | 31.74818509 |
| Aurkaip1 | 31.46729226 |
| Mir143 | 31.41370728 |
| Scarna17 | 31.2303471 |
| Olfr365 | 30.6681264 |
| Terc | 30.51142834 |
| 4930488L21Rik | 30.38138664 |
| Mir298 | 30.35580191 |
| Pard6a | 29.84551403 |
| 1700054O13Rik | 29.52449212 |
| Snord95 | 29.34471052 |
| Mirlet7c-2 | 29.06906983 |
| Gm12597 | 28.73073046 |
| Mir93 | 28.60961314 |
| Olfr462 | 28.56831114 |
| Bat4 | 28.00932619 |
| Mir425 | 27.90401618 |
| Olfr763 | 27.68198477 |
| Rpl12 | 27.58824136 |
| Hspb9 | 27.54512301 |
| Mir1224 | 27.18980525 |
| Snora21 | 26.9340377 |
| Rps4y2 | 26.26254014 |
| Snord88a | 26.18382286 |
| St6galnac1 | 25.92017977 |
| Krtap31-1 | 25.7416135 |
| Mir468 | 25.68406615 |
| Snord1c | 25.5375116 |
| Pard6a | 25.48566693 |
| Snora61 | 25.06915187 |
| Cldn9 | 25.00241027 |
| Snord88c | 24.9854221 |
| Rnasek | 24.96003138 |
| Olfr26 | 24.77737128 |
| Spryd4 | 24.69324204 |
| Ifna14 | 24.48191929 |
| Snordes | 24.05824418 |
| Ndufb7 | 23.9501058 |
| Mir106b | 23.93319632 |
| Snora5c | 23.9055501 |
| Xist | 23.76041272 |
| Olfr100 | 23.69857639 |
| Mir1188 | 23.68868089 |
| 2310011J03Rik | 23.6447976 |
| Olfr140 | 23.64007538 |
| Tnp2 | 23.50529828 |
| Mir135a-1 | 23.42776706 |
| Mir1-2 | 23.34378638 |
| Gm4659 | 23.30237694 |
| Olfr139 | 23.27140709 |
| Olfr933 | 23.22500646 |
| Mir1969 | 23.19153252 |
| Hist1h1t | 23.05395088 |
| Mir138-2 | 23.00525604 |
| Hspa1a | 23.0032577 |
| Olfr978 | 22.94140336 |
| Mir370 | 22.89847339 |
| 1700018L02Rik | 22.733325 |
| Commd5 | 22.27677301 |
| Vmn1r218 | 22.22145048 |
| Ifna5 | 22.18357068 |
| Mir328 | 22.1366194 |
| Nudt8 | 22.00195785 |
| 1700045I19Rik | 21.67868162 |
| Mir1940 | 21.58958981 |
| Dlx6as | 21.49819505 |
| Mir491 | 21.42686978 |
| Ankrd58 | 21.38735791 |
| Hspa1b | 21.13227414 |
| Mir24-1 | 21.07739882 |
| Cited4 | 21.05289999 |
| Sh3bgrl3 | 20.84861008 |
| Ddx28 | 20.80936906 |
| Mir1-2-as | 20.75111717 |
| Mir720 | 20.69910252 |
| Sprr4 | 20.66268889 |
| Rpl36al | 20.66174897 |
| H2-Q8 | 20.64605333 |
| Olfr1342 | 20.64542986 |
| Oxct2a | 20.64440179 |
| Krtap31-2 | 20.62911256 |
| Mir1968 | 20.60677877 |

TABLE 6
Primer sequences and Antibodies used in this study.
ChIP Primers (5′ to 3′)

| | Forward | Reverse |
|---|---|---|
| Jarid 1C | CGTGCATCGCCGGTCCATCCGGTAA | CGCTGCCACCGCCATCTTGGTTTGTC |
| URA | CGGTTCTTCCGTGGTTTCTC | GGTAAGTCCACCATACACAC |
| URF | CTCGACAGCCCAATCTTTGTT | ACCAACACTTCCACTTAGCC |
| dRE | CCCAATAGGTCCAGAATGTC | TTTTGGTCCTTTTAAATCTC |

qRT PCR Primers (5′ to 3′)

| | Forward | Reverse |
|---|---|---|
| Tubulin | CTCGCCTCCGCCATCCACCC | CTTGCCAGCTCCTGTCTCAC |
| Parp12 | CAGAATGACCCTTCACTTTTGCCA | GCTTGTGCCAAACTTGCACTCT |
| Rnf19b | CGA GTG CAG CGA GCG GCT CAA | GCA ACT GGC ACA GCC ATA GGC |
| Osbpl11 | GGCCACAGCAGTGACCCCGAACA | CCCGGTGACAAGGTTGGTGTA |
| Spock2 | AGCAGCAGGCATGCCTAAGCAGCAAGC | AGGAAGAGGTCTCCACTAGTGTCCAGC |
| Zc3h11a | GACGATTTCTGTGGCTGAGTGG | GACGGAATGGGCAGCTGTCACC |
| GAPDH | ATGAATACGGCTACAGCAACAGG | CTCTTGCTCAGTGTCCTTGCTG |
| Tsix | GGTAACAATTTTCCCGCCATGTG | GGAAATAAACGGAACGCAGTACC |
| Xist Ex 1-3 | GCTGGTTCGTCTATCTTGTGGG | CAGAGTAGCGAGGACTTGAAGAG |

Antibodies

| Name | Company | Catalog number |
|---|---|---|
| H3K27me3 | Active Motif | 61017 |
| H3K27me3 | Abcam | 6002 |
| EZH2 | BD Pharmingen | 612667 |
| EZH2 | Cell Signaling | 5246S |
| FLAG-M2 | Sigma | F1804 |
| CTCF | Cell Signaling | 3418 |
| ATRX | Santa Cruz Biotech | sc15408 |
| PARP-1 | BD Pharmingen | 556362 |

Immunoprecipitation Reagents

| Name | Company | Catalog number |
|---|---|---|
| M2 agarose | Sigma | A2220 |
| M2 peptide | Sigma | F3290 |
| HA agarose | Sigma | A2095 |
| HA peptide | Sigma | I2149 |

ATRX shRNAs

| Name | Sequence | Source |
|---|---|---|
| shAT RX-1 | CCTTCTAACTACCAGCAGATT | BROAD RNAi Consortium |
| shATRX-2 | CCTGTCACTTTCACCTCTCAA | BROAD RNAi Consortium |

### OTHER EMBODIMENTS

[0308] It is to be understood that while the invention has been described in conjunction with the detailed description thereof, the foregoing description is intended to illustrate and not limit the scope of the invention, which is defined by the scope of the appended claims. Other aspects, advantages, and modifications are within the scope of the following claims.

1. A method of preparing a library of nuclear ribonucleic acids (nRNAs) that specifically bind ATRX, the method comprising:
(a) contacting a sample containing nRNAs with (i) ATRX protein and (ii) a ATRX binding agent, under conditions sufficient to form complexes between the nRNA, ATRX protein and the ATRX binding agent, and
(b) isolating the complexes.

2. The method of claim 1, further comprising:
(c) synthesizing cDNA complementary to the nRNA, and
(d) selecting cDNAs that (i) have RPKM above a desired threshold or (ii) are enriched compared to a control library, or both (i) and (ii).

3. A method of preparing a plurality of cDNAs complementary to a pool of nuclear ribonucleic acids (nRNAs), the method comprising:
(a) providing a sample comprising nRNAs bound to nuclear proteins;
(b) contacting the sample with an agent, preferably an antibody, that binds specifically to ATRX protein, under conditions sufficient to form complexes between the agent and ATRX proteins, such that the nRNAs remain bound to the ATRX proteins;
(c) isolating the complexes;
(d) synthesizing DNA complementary to the nRNAs to provide an initial population of cDNAs;
(e) optionally PCR-amplifying the cDNAs using strand-specific primers;
purifying the initial population of cDNAs to obtain a purified population of cDNAs that are at least about 20 nucleotides (nt) in length;
(f) sequencing at least part of substantially all of the purified population of cDNAs; comparing the high-confidence sequences to a reference genome, and selecting those sequences that have a high degree of identity to sequences in the reference genome; and
(g) selecting those cDNAs that have (i) reads per kilobase per million reads (RPKM) above a desired threshold, and (ii) are enriched as compared to a control library;
thereby preparing the library of cDNAs.

4. The method of claim 1, wherein the agent is an antibody and isolating the complexes comprises immunoprecipitating the complexes.

5. The method of claim 1, wherein the cDNAs are synthesized using strand-specific adaptors.

6. The method of claim 1, further comprising sequencing substantially all of the cDNAs.

7. A library of cDNAs complementary to a pool of nuclear ribonucleic acids (nRNAs) prepared by the method of claim 1.

8. The library of claim 7, wherein each of the cDNAs is linked to an individually addressable bead or area on a substrate.

9. (canceled)

10. The method of claim 1, wherein the sample is a cell-free sample.

11. The method of claim 1, wherein the sample comprises a cell expressing the nRNA and ATRX.

12. (canceled)

13. The method of claim 1, further comprising isolating nRNA-ATRX complexes from the sample.

14. The method of claim 13, further comprising isolating unbound ATRX from the sample.

15. The method of claim 14, wherein isolating nRNA-ATRX complexes and unbound ATRX from the sample comprises contacting the sample with an anti-ATRX antibody, and isolating nRNA-ATRX-antibody complexes and unbound ATRX.

16. The method of claim 15, further comprising:
(a) selecting a compound that disrupts binding of the RNA to ATRX;
(b) contacting a tumor cell with the compound;
(c) measuring proliferation, survival, or invasiveness of the tumor cell in the presence and absence of the compound; and
(d) identifying as a candidate therapeutic compound a compound that inhibits proliferation, affects survival of the tumor cell.

17. (canceled)

18. (canceled)

19. (canceled)

20. A method of increasing expression of a selected gene listed in Tables 1, 2, 3, 4 or 5, in a cell, the method comprising contacting the cell with a nucleic acid triplex-forming oligonucleotide (TFO) that binds specifically to an ATRX localization sequence or binding site associated with the selected gene.

21. The method of claim 20, wherein the selected gene is DMD, and the TFO targets a sequence within SEQ ID NOs.7867-7900.

22. The method of claim 20, wherein the selected gene is XIST, and the TFO targets a sequence within SEQ ID NOs.7957, 7959, 7961, or 7962.

23. (canceled)

24. A method of treating a subject who has Rett Syndrome, the method comprising administering to the subject a therapeutically effective amount of a TFO that targets a sequence within SEQ ID NOs. 7957, 7959, 7961, or 7962.

25. The method of claim 20, wherein the TFO comprises one or more of DNA, RNA, PNA, HNA, MNA, ANA, LNA, CAN, INA, CeNA, TNA, (2′-NH)-TNA, (3′-NH)-TNA, alpha-L-Ribo-LNA, alpha-L-Xylo-LNA, beta-D-Ribo-LNA, beta-D-Xylo-LNA, [3.2.1]-LNA, Bicyclo-DNA, 6-Amino-Bicyclo-DNA, 5-epi-Bicyclo-DNA, alpha-Bicyclo-DNA, Tricyclo-DNA, Bicyclo[4.3.0]-DNA, Bicyclo[3.2.1]-DNA, Bicyclo[4.3.0]amide-DNA, beta-D-Ribopyranosyl-NA, alpha-L-Lyxopyranosyl-NA, 2′-R-RNA, 2′-OR-RNA, 2′-AE-RNA, alpha-L-RNA, and beta-D-RNA.

26. (canceled)

The application's sequence listing, which the Patent Office published only in electronic form, follows.

SEQUENCE LISTING (8138 sequences)

SEQ ID NO: 1 - DNA, 1600 bp, mus musculus
acaagtagaccaatggaatagaattgaagatccagaaatgaacccaagtgctgggattaaaggcgtgtgccaccatgcccggctaaatggtttctcaatataaaaaagtatacactgcttactagtgatgcaggtaaggtcctgcttttctgatgattacttggaattgtgcacacatgcatacacacacacatatataatttagcaaaatgattcatgtgaaattttatttcatttgttcaatagtccctttcttaatttctaacagtcttgatcttatcaaacatttgttgacaagtaaatttatttttaatctcttcaaatccacgaatcattttacatattgttagctagagaaagttttaattcacttaggcagtcaatcatattgatttaaaagtgatgcaaagatcactatgcaatctataggttatattctaatttgcatgcatatatatgtatatatgatacataaatattaaatttcaataaagtggcatgaattattctaattattgttgatagtatgtatgcatgtatgtatatatttgtgtgtgtgtgtgtgtgtgtgtatgtgtatgcttgaagaatactatctgctggagttttctgagcattattttaatattatttacttcataatgttttgtgagaaacaagaaaaagcaaaatatttactcttgtcttcctttatctgtgatttgttttgttttgttttttattttttgagacagggtttttctgtgtagccctggctgtcctggaattcactctgaagaacaggctgtactcaaactcagaaatctgcctgcctctgcctcccaagtgctgggattaaaggcatgtgccaccactgtccagctttatctttgaatatccaacatttccaagataatccatgatctctctagggattcattgtaaagcttactctgagttcttccagtattgtgtgcttatctgtttccggaagtctctacacctttgtttccaatgtcttgatcattacttcaatgcaatgatatactaatttaaatatgtcttgatatttcataagcaagctctggtcttctaattattcactgaagcaaattattatggagtatttagatccaaagtactggttcagtaccagttttttcctcttttggcaatgtgattttggctaacttatcagactctgttcctcagtctctttatctgaaaactcactgtcttggtgttttctgtatcagagttttatagataataaaactatcttcttactaaaagattatatctaacaaagaattcttactaagctttatgtgtgtctacagcaaaccaatagccaacatcaaagtaagtggtgagaagcttgaagcaatcccactataatcagggacttgacaaggctgtccactctcgccctacctattcaacattgtacttgaagtcctagccagagcaattagacaacaaaaggagatcaaggggatacaaattggaaaggaagaaggcaaaatatcactttttgcagatgatatgatagtatatataagtgaccctaaaaattccaccagagaactcctaagcctgataaacagattcaatgaagtag

SEQ ID NO: 2 - DNA, 1000 bp, mus musculus
gactgggagagaaaacccacacctatattcttaaagaacttaaaaatatctgataggagaaaaggcagtcactatagcagtagtgtgccaaagtactataatttacagatccacctcaaatcttagacaatgccttttcaacctcattttaaacattgtaaaacagggaagttcaagtcagaaagagtgctcaaaagacaccattaactagaaaaagtagacagtgagcttcaaacattgtatgtgcaaaatcacactatgttaacccaggctacatgtgaacacatctgaaccaaagtgggaccagaaggttccgtcccgatttctgtgacaattcctagcaggatttaacctggagtctgtagagcctgtggagttgagatcagccagttcaaagtgatgacacgtggagagctgacatagcagaaaaatatcataaacttgggatttatttaggaaagactttcagagtcaactcaatccttgcaaacaccatacagtaactttgagtaatgtattgtttagaaagtgtctcctgacagggtcagaagaccccagaagacaatggagcctgtggctacacattgtgccttttgaagtattgtgtttgccgggcaggcaaaaagtattaagtggacgagtatgcctcctgctcctttgctgaaaattcctcttcatgggacccagccctagaccacaggatcccagcaagctttcccatccatcttcacaatttggctgcatatgaaacactatgagggtaaaatttggatgactacaaagtgtcagttccaaagaaagtttcatgtgactcacacaatggctcctgatcatggagccagatccaattagacattccaggaattttgccccaaatctgtgcatgttaaaatgaagagcagcaagggtgatttttatgatcccatagctggacaatgctaccacaatatttctcagtagagtctcaggactacaggctgagagaagtctattgtcctgc

SEQ ID NO: 3 - DNA, 1200 bp, mus musculus
ggtgggcctggaggcctcccagctgatgtcatccacaatagaccaggttactgactctcactgttagccaggagccagctctgagcaccctctggacaaggttgcctctctgtgggggcgaacagatcagatagagctgccaggcccttcttttgtgtcctgtggacagaataagtgggtgggcaattgccctactcccaaacaggccagatctcaccagctctagggtgggtggcctgtggagacctgctttgttgcatctctatagcgtgtaattttaaaagatccctacttgcctggtgactcgcgaggctgccaccagtctctcactctcactcagcttcgctaatggccagttggccattttcccctggagctgtgattgctcccccatcccctcatggctagctttgtcaaactgtcgccaacaactgccccaatggatagaaaacaccagttttattatcttaaaactagacagataactcaatggctgggtgaagaatttcctgccccaatcttatcaactagctccctcaatcttgcctggccttctgcccacagcagaagctataaactctgtgagccccaagacctacatgtctacagcatcctactcgctccaaagcctggttcaaattctgctttcttctttctttcttctgcctgggacctacaacttcaatctttttcccttcacccaacaattagcttctgcctcctttattgacacaatcaagaatcaattagggaaccaatacctctcactccacatctctgggaagagaaccatgtgatctcttggatggatcttactggacagtttgccctgtggcatgtattctctgagggctgcagcagagttgtctagccccagattagttaccacagtgacagagaatgccagaactcattcccaagggcctgagtggggtttgctgtcatatcaagcaggccttgaattggtaactgtggtccacctggctaggacattccctcaggttttgtttgttttaagacaggttctctctacgtaattcttactgttctggaacttatgatgtagaccagatagacctttaactcacagagctcctccatgcctctgcctttacttctgccccctgagcaatgtgattaaaggcaagtgccactacacccagcttaccttgttcttaaagacctgtctggttctaagaa

SEQ ID NO: 4 - DNA, 1200 bp, mus musculus
ttagcaggaaataatttaatgtctcttattttctcatgttttctattttattgaaaatattttattagcatatatgtatacatacttattctgatgtagtttttaaaataatatgcatactgacccccacagcctgaaagtctcccagaagttctgctgcactcaagaaataggtaagagaccctctcaaagaagcacaacagctgggagctctgaggagaacaggggactcaggacacatcctactccctgaactccatccaccgttccagcctgtgccttccatcagggaaaaccaccagattgtctgttcctctaaagaccccacagtctgaaggccttccaggagttatgtagcatacagggcaacaagtaagggatccttccaaacaaccactgaagctgggaaccccaaggagcctggcagactctggaaccatccgttccccgccaccaaacatcacccgcatttccagacttcccctaggtcagctcaccagcgtgtctcctcttctaatgactccacagtctgaagacatccctggagaacagctacacacagaacaactgcttggctgctcagctgaagacccaacaattcgaaagcctcctaggatatgtgctgcacacaggacaacagatcatcagctagtatgctccccataagaccccacagtctggcggcctcccaggagataaactacatgatgggcaaaagatgagaaaggtgtcagcctctctgaagaccctatagtctgaaggcttcacagaagatctgctacagccagggccacagtccttccaggagacctgcagcaacttaggggcacgggaggcaagctccaaacagagacacctaggccagctaacatcagagataacaagatggtgagaggcaagcacaaaactataagcaatagaaaccaatatactttgatatcataagtacccagttctcccaatacagcaagccctgtttatatcaaaacaccttaaaatcaggatgctgatctaaaatcctatctcatgaaggtatcagagtgctttcagggagatataaataatttcctgaaagaatttcaggaaaacacaggtaaagaggtagaatcacttaaagtgaaaacagataaaccccttaaataaatatagaaaaacaagattgaacaggtgaaggaattgaacaaaacagaccccaaacta

SEQ ID NO: 5 - DNA, 1000 bp, mus musculus
gtacctcgctcaaccttcttttcccctatccctgacactatattctaacccccactttttctttcctccacccctgacactattgtaacccccattttccctacccccacaccagacacattattgtatcacctgctagcattctatctaagctctgccccacagttacctggcaacagccaggtatgcctgactcactataaaggggctgcttgcctcctcctctctctcttgctctctcttgctctttcttttgccttcctgctcttgctctctcattcccttcccctctccctttctcctcatgctcatatcccacctttacttctcatctctctgtctctctgactctgtctctgactctgtctctgtctgtctctgtctctctgtctctctgttctgtctctctctctctctctctttctctctctctctctctctgcctctactactgtcttgactcccctcccatgccctgaataaactctattctatactataccattctgtggctggctctcagggggaagggatgcctcagcattggcctgctgaggcactcactctccctatacctcaccacatagccttaaaaacatatcctccctttatctttttataaacacataacccccagtattcccttcccccacccctgaaattctgttgtaccccagccttcacttcccccacacctgacaccctattgtacactgccaatcttctcacccctgacactctattgtactcccccactcttcccttcccccaccgctgacacactattgtatcctcccagtcttcccatcccccaccctgacactgaattgtactctcctactcttcccttcacccaccctgacactcaattgtaccctctcacattccatactctgctttctgctttcttgtcacttttctcttatttgccccctcctcctggcaactctttttcactgtcttgttcctgctttctcatttcacgacctatacgcacata

SEQ ID NO: 6 - DNA, 1400 bp, mus musculus
tgtaaaggaagaagagtgaacacaggactcttaaaatacttcaatgtcagcatgagttagtaagggtagaattgaaaacacaagtagagagaagtgggcatgtcctgaacatacttgggacacataccctagatacacatacccttttgtatctcctaaaagtgcagttaaaaatagatatagctcactctgtgtgctctgggaactatactctagtcctctgtagaggtaaccattcctcttgactgctgagtatctctctctccagtaaccaatatcacatatgtatctactcaccttctgcttcttgcaatgaaataccacttatgtgatttgttgttttccatgttagagattgtccagttaaggctaagttgggttcactagttcatttattacttttgtgttgctgagcccaacatacctcaaataaaatctttcagtacaattattttatactggctgggcattgtaagccagcccgtggcctacatgaaccgggtatttctggaaggcaggctggggctgaaagagacttagactgcgagaaaagataatgaagccaagacaaatgttctgatcaaggcccacgattttactcagaaactgtgcttataaagggggaaggcctatcctccctactccccacctccagtccattcttggtgtctggagccagcctgcaggtgttgtacaggataggatgtgcctccggaatatctcaggggcctctcagcaggtagcagtaccttggaggagagcagcggcacgtgacagaacaatagagccatataggtcggaaggctccaccataggtaatctccttcttagtggcagcaaggtcaaagtctggatcagcctgcttcaaggctgagggaggctacagctggtaagagtttcagtccactacgttgtgtaggcatggcagtaagtgtgtgtggagaggctgaaatcaaggtctggactcacttaaagcttcaaaggtccacccctgagtacctcaactcacctaacactaagagccaagagaaaaaaaataaaacaaaacactgaaaatcagtcagtggggaacattctagattaggaccagaacatgtaccctttcctgtcctgaatgtacatcagccattttattcaagggtagcactctcttcatactacccttctttgctttcagtggctaataatatttccatggtgcctctatgtacgactttagccttatggagacctcccttgaaagctgctgttattcattttaatggaagtttttttttaatcttttttctgtttttcttttattgaaaaattgatttttcatacaatatattctgactatggattcttctctcccaaattctccaagatcttcctcccttgccctcccatcccatccaaat

SEQ ID NO: 7 - DNA, 1400 bp, mus musculus
ccagtgtcaagtcgtaacatttgggcttactttggaatgatcttctatattgaaagaaggatataataatacaatcatgagaaaatgcattgggagagaaaatttggtgtgatatgattaccttggaatggaactagccatgagaagaaaaaagtattttaacttaattttaatctgctaaaaaattcataacctatttaaaaattcttaaactattgagaaactttattgggtgttttcatctttaatgtagttatcactaggaattttaaataactaccatatgtcagttatccaaatattttttctcttacatattttattaagttctaacttttaccactacaggggtttattcttttgtgtcaaaaagtgtttctggccgggcatggtggcgcacgcctttaatcccagcactcgggaggcaggggaaggcggatttctgactttgaggccagcctggtctacatagtgagttccaggacagccagggctacacagagaaaccctgcctcgaaaaaccaaaaaaaaaaaaaaaaatgtgtttctgtttctggttttaaatacttgaagttgacagcttacccttttgtgattctgcctgtctggttttgatataggtaggagactttgtgatggtttgaagaagaactgtcccccagaggttccatccctagttgctggtgctatctgaaggttacatcgaggggcaggctagccgcaagaagtacatcactgtggtcaggccatgagagttcacagccttgctccactcccagtttgctttcactgcttcaagctgtggttgagttgtgacctctcagcttccagccaccaagcccactgattgcttcaatgccttctcagcaagatgtgactctgtttgtttgtttgtttgtttgtttgtttgtttgtttgagacagggtctctctacatagcttgcctgaccaggctagcctcaaactcacaaagattagcctgcctctgcctcccaagtgctaggattacagatgtgtgccactatgcttcaatagactcttaaccatctagaatagtaagtcaaagtaagctctttttttttctataaattgattttggttgctgttgtatcacagcaacaaaaaagcaaccaatgcagagatgtgtaacaaaaatactgcaatttctaacatccattcttgcagatttaccctaacttcaggtttgatatttatttcatctgctttattttggggaaaaaaatccattccatgtttaattaattgtgtcataaataacagaattttgccagcttttgcagtaggtcttaagttactttttagaaataaatgtatggggctggagagatggctcagtggttaagagcactgactgctcttctgaaggtcctgagttcaat

SEQ ID NO: 8 - DNA, 1000 bp, mus musculus
ataatacatgcaaaggatctcagtttgatccttggtgtggaaggtggttgtgttagttagggtttccattgctatgaagagacaccatggccaaggcaactcttataagggacaacatttaattggggctggcttataggttcagaggttcaatgaccaggcagacaaagtgagggagaagaagccaggagttctacatcttgaactgaaggcaggcaggtagaagactgacttccaggctgctaaaaggagagtctcaaagcccaaccccaaagtgacatacttcctccaaaaaggccacacttcctaatagtaccactccctgggccaagcatattcaaacaaccacagtggcagaggagggaatcaattaccataacttggtctctgcctctcacatgtgttctgaccctccagaaaatgaataagtaaacaaacaaacaacaaacaaagatgcaacaaaaatatttttaaaaagatttgataggttggactaataaaattaaactcttatgtttcaaaggacatcacagagagtgtgaaaaacagcctacaggtaggggaattattcagaagtcatatgtcaggtaaagaatttgtacatagaatatagaaagatctacatgggaacttcatgggttccttgtagtctgggcaggtgccctgatcagaccttgggcatgaactccaaattaagtcccacaacacccagaagaagctcgacccccaggtgctctaacacacccaggatcataagatcagagatgccctaagcaggccttgggcatgaactccgcagccagtcccacaacacctaaaagaagctccactcccaggcgctctaacatgtccaggaccataggatcctacgagcttggtcactccaggatctcagggtcccagaggcaacttggctctcaggagctctgacacaccaggatctcaggatcacaggatcccagaatcacaggatcacagagacagcttgactctgaggagt

SEQ ID NO: 9 - DNA, 1000 bp, mus musculus; identical to SEQ ID NO: 8

SEQ ID NO: 10 - DNA, 1200 bp, mus musculus
atacctatgtaacattaatttttaaaccttatttattttattttgtaaagatttatttattttttatttatgagtacactgcagctgtcttcagacacacctgaagagggcatcggatcccattacagatggttgtgagccaccgtgtggttgctgggaattgaacttaggacctctggcagagcagccagtgctcttaactgctgagccatctctccagccctaaaccttatttttaatgatggttcactttaatctcccttgtagcccaccacccagcagaggtggtgagaaaaaagaatacgagggaagtggacctgcttagaaaggttctttggagcagcttccagctatgttgtctggaaattggcagtttagttcacaggttagcaggcagcagcagcttgatccacttgcaatcacttcaaaggtacaccagcagtccttcagtagagctgggttagcaacagccttgacctgacctagcaaagacagctaggcctcagcctctgcttgagtcagcaggagggaccatccaggagactgctctcagctgtgccttctcagggaagcaaagatgggaggttcacaagtgttacacaactagttgtaccagcaagctaactgtctctgtcattcggtggactcctatttataccctccaaacatcacatgtccttgatgtgccttgcctcagcatgggtcttgcctcaccatgtacattcaatccctgagtctgcagaagtggcaagagactgcagcacaccaccagaagttttttggtgcatttctctctatggattcctgaaaaatgcagctcaactatgcagtgtaaggtggaccaatacatgcaagttgttagcaaagaatccttcatcatatgtcctttcatctgcttgctttagcagaacatcctgtctcttgtgtctgctttagcaaaatgttccttcatgagtctgctttagccttttacacctgtgtccactttaatgaaatgttccttcacatgttagctccagcaaaacaccatcctactgactttccaaagaaccatcaagtttctacttaatagctatatccaaagtggaattttaagtaatggggttatgcaaattttacaatgaatcgccagtcagttttctaagccactttatgactcttcaacaaggtatgagaattccatttgttctagtttcttga

SEQ ID NO: 11 - DNA, 1600 bp, mus musculus
cacagggctcccaatggaggagctagagaaagtacccaaggagctaaagggatcttcaaccctataggtggaacaacattatgaactaaccagtacccctgagctcttgactctagctgcatatgtatcaaaagatggcctagtcggccatcactggaaagagaggcccattggacacgcagactttgtgtgccccggtacaggggaacgccagggccaaagggggggagtgggtgggtaggggagtgggggtgggtgggtaagggggacttttggtatagcattggaaatgtaaatgagctaaatacctaataaaaaatggaaaaaaaaaaaaaaaaaaaaaaaaagaagctgggtcaatgccatttttactttcactttagatgtagttgaacccatatcgtttaaattccctctgtctctatatctaagattcttaatgcttcgtccctttttttccaggaacctgacaggcctgtgctttctttacttacctttgcttaacaacacaatgagttccccgtatgggccaccaattgccacagtctctgcttgctgcagtctccaacctgcagagacaagaatgacatggacaccaagacaggttcacacagcttccttctttacttggggcaagggctattcttacacagtagcagcaacagaattcatctcgctccatgccacctcatccaatcagaatcacacatgctccatgcatgaattgggcaggagttcaggtcggtcacaggctgacatgtctggatcatgaagaataatctaacttggcaggcagattacgcatgcagtttcactgggcatgttcgggcaaggcagtaaatatgtggggttcatggagcctggcaatgggccagagtgccatcttggcccatgtggccgcttctgtttcctcagagtgaaagactggaaaacaatactccaagcaaaaggtccgaagaaacaagctggagtagccattctaatatcgaataaaattgacttccaacccaaagttatcaaaaaaagacaaggaggggcacttcatactcatcaaaggtaaaatctaccaagatgaactctcaattctaaatatctatgctctaaatacaagggtagccacattcttttagtaaagctcaacgcacacattgcacctcacacagtaatagtgggagacttcaacaccccactctcaccaatggacaggtcctggaaacagaaactaaacagagacacatggatactaacagaagttatgaaacaaatggatttagttgatatctacagaacattttatcctaaaacaaaaggatataccttcttatcagcgccacatggtacctcttccaaaattgaccatataattggtcacaaaacaggcctccacagatacaaaattattgaaattatccaatgcatcctatctgatcaccacagattaaggctgatcttcaataacaacataaataatagaaagccaacattcacggggaaactgaactatactcaatgattccttggtcaaggatgaaataaagaaagaaattaaagactttttagagtttaatgaaaatgaagccacaacatacccaaacttatg

SEQ ID NO: 12 - DNA, 1400 bp, mus musculus
cagcttctactaaattgtgccactgctgatgatttgtgtttggtatcctgatactcctgaactggactgctggagtcctgacaatagagattgaaatcacgccaaagaactacttctaaacagattcagatccacatcctcttgtcttatttaccatcttttgtcccctacctttggacggtaggctagaagggggccaaagcatttaagaatcctttgtaaagtggggtttaaaaaacctaagcctacagaccaccatagattagaactttatatcaacaacaatagaaagttcacaagtacatggaaactcaaaagcaaattaaaaataagttaaaagagaaattaaggaattttaaacttttttgaattgaattaaaatgaaaagaacaacatccaagcttttaggacacaatgaaagtggttccacgaataccaaagtgtagacactttgccccttcttagaattgggaacaaaacacccatggaaggagttaaagagacagagacaaagtttggagctgagacaaatggatgaaccatctagagactgccatacccggggatccatcctataatcagcctccaaaccctgacaccattgcacacactagcaagattttgctgaaaggaccctgatatagctgtctcttgtgaggctatgccggggcctagcaaacacagacgtggatgcccacagtcagctattggatggatcacagggcccccagtggaggagctagggaatgtacccaaggagctaaagggatctgcaaccctataggtggaacaacaatatgaactaaccagtacctcctgagctcgtgtctctagctgcatatgtatcagaagatggcctaatcggccatcaatggaaagagaggcccattggtcttgcaaacttcatatgcctcagtacaggggaatgctaaggccaagagatgggagtgggtgggtagggaagttggggggggagggtacgggggacttttgggatagcattggaaatgtaaatgaagaaaatacctaattttttaaaaagtggttctaagaggcaaggtagttagcactaagtatctacattaaatatatatatatatacacacacacacacacacacacattgatgagagtaacatgctagtaacataacaccaacatctagaagaaataacatctaaaaggattagatggcaagaaataatcaaacccagggatgaaatcaataaaatacacacacacaaaatcaaaaatcaatgaaacaaagatgtcgttctctgagaaattgataggacggacaatttcttagtcaaattcactaaatgaaagagagataaaatccaaattaataaaattagggatgaagggagacataacaacatgctccctggaaatccagt

SEQ ID NO: 13 - DNA, 1000 bp, mus musculus
ttcctttctttcgcctttgattgtgtttttctgtaactctttaagggacttttttctttcctctttaagggattctagttgtttacctgtgttttcctgtatttctttaaggaagttatttatgaccttcttaaagtcctctatcatcatcatgagaagtgatattagatctgattcttgcttttcccatgtgatggtgtatccaggacttgccatggtttgagaattgggttctgatgatgccaagtttctgttgtttgtgttcttatgcttgcctcccactatctgattatctctagtgttacctgccctgattatgtgtgactggagcctgtccttcctgtgatcctggttgtgtcagaactcctcagagttcagctgtttctgtgatcctgtgattctgggatctggtgatcctgaattcctgggtatgtcagatctcctagaagtcaagctgcatgtgggatcctgagatccttggtgtgaccaagttcctgggatcctgagatcctgagattctgtgatcctgtggtcctgtacatgttagagtgctttggggtaatgggactggctgtcgagttagcccccaaggtctccacacggaacctctgatcctatgattctggatgtattagatatcctgggagtggagcttccactgggtgttttggtactggctgtggagttcatgtctgcggtctactcaggttacctgctcagacttgaagaaacctgtgccattggttgggtggagttaatggacctgggtgcctgggtcccattaattaagtgagttaattccagtgttgggacagatgttgtgtgctcctcacctctgatcctatgatcctgggagtgttaaagatcctgtgagtggatcttgctctgggggttgtgggactggttatggagtttgtgcccaaggtctgttctggacactggctcagactggaaggaaactgtgccactgtttgtgtggagttcccattttcacaatctt

SEQ ID NO: 14 - DNA, 1000 bp, mus musculus
cagttgtattgtactttcctcttatcagactccctgcctgggtatgtgtgggagatggaaactagtgccttcttttttattgtgttttgttttgttttgttttgttttgttttgttttgttttgttttgttttgttttgttttgttttttgagacaggatttctctgtatagccctggctcctggaactcactttgtagaccaggctggcctcgaactcagaattctgcctgcctctgcctcctgagtgctgggattaaaggcatgtgccatagtgccttctttaaactgctagttgtgacaaccttaaacagacagcagacagcacatgctgaactatgtgcagacccaagatgagcattgaattatgggacatagtcacatccaagacaccctcaattataccatttcttatttttgcctcaattcctgggagttgttccaatatagcctctggtcatgttctctgttcagcaaagtgtaaggaaaacattgtgtgatctctggaattgctgcctgctttacagtgttcaagtagtttatttggacggtttttctttttctcacctccttaaaagtcagagtcagcatcaagcatgcagagcactgctttgttgtcactttcaatcctcggatagtcagtgttggccaacaagcttgcatactttgctcaggctgccttgaccctgccctttctcatccatcctgccttcactgttgttccaaatgctaacaatttagctgtggagacacttactgaaaacacattaatgaaactagtacaaactgcggaagactgtctaagagactctgtggcttgtcaaattatggctagaaggcaacctgaactcaaattacctagaaaatgcatagaaaatgtggtaacttttctaaattatatcataccaggcctgtgttgtctccgaagaaaaccagcttatgactgattgatcttaatctctctctctctctctctctctctctctctctccctccctccc

SEQ ID NO: 15 - DNA, 1000 bp, mus musculus
agaggggattatatttgaccagggtaaggggtaactccagcttaaattaggagtgagtgttcatgtctggaggggagaggggccttctgtgggagatttaggtgacacagctctatatgatgaaggcttcaccccacagcaggtcttgatgagagagacagtccttgcttgtccaaacagtttattctttgttcatcgtgggaaatgggtgcatactatttactcagataaatatttatgtggggtgtcatgaccacatgctccaggataggaactggggagagcgggaactgggtcgggagtagatgaaatgccttccattttcagatatgagaaccagggtttctgaatctgctcaaccttcccagtttttgtctggtgacacagttccacttgccccacagagaaacttgaacttccttcccatttacatcccaggacatgaccatcagtgctccaccaccacacacctgacacaataacaaaaaagaaaggcattacacatgtactccatgtctggccttagtgggagagaacccagactgaaaacaagcaaatgacccagagatcatttcctggccccatggagaggcagagtggcaaagcaaatgcatctgcagtatataacacacaaactcattagagttcattttaaagaattggttacatgattttgttttctatatttagctggccttggaattccctggcttgagaaatcagatgggtgaacttcatttttcctcctgtcctccagttgcaatgttccagtcttatccttagccctgtagcatcacatgtgctgtcgctttccctccttctgtgcccccattcctaggggaacctgcaggtcttttatgcattcactattctttcccaacacccttcctttgcctcagggtctaacacccagaggcactctctgccttgagctctgcttgtctgcggatcaggtagtatatcttcattcttctttctgtctccccagttccaattcacc

SEQ ID NO: 16 - DNA, 1200 bp, mus musculus
atggttgatttgggtctggaatagtcagccagctacaggtaaagggttgacatacttatcatcagggatcatagattaagggaagtgaccaacactattgagacaatggacctatgagctgtattatactttagattgaactgtctcatgtgttgaaagcttatttcccactcatgccttaccaccatagcattcctcaatactggaacatcagtccttcacaggaacaagagcctcttctcccattgatgccagaaaaggccatcctctgctacaactgcagctggaagcgtgggttcctccatgtgtattctttggttgttggtttggtccctgggagctctggggaaaaaggggttgtcctggttggttaatattgttcttcctatagggttgcaaagcccttcttctttagttcttctcctacttcctccattgaggtccctgtgcttagtccgatggttggctgcaaccctccacatttctatctgaaagtctctggtagagcctctcaggagacatccatataaggctcctgtcagaaagcacttcttagaaaccaggaaagaggttgacatttgaaatgttaataaataaagtaaccaataaagattaaaataaaaaggaatctgcatcccattaaaaaaaacaacaaccacaaaaaaaagaagcttagttcccagtgtatcaatatttaaagttaccaatattaaaaaaggggtatgatcacatgtgctctgatttcattagatttgttttcagaattttgaaaatttaatgtttcattagatgttggtggctgtatgtgggaactaaaggggggtgggggaaatagggaagggaagatagcccacatccggccagaattcctcctgtgctctgggccagtggacatggaagggctgccagacactttccacacttggcgcctggtgggcatctcagccactgaccccactcggtggggagggggtggacaaggggcagccccagaaaccaggggccctggggcaacaaccttggcaccagggttatgggagagagggaagtgggagagagattgctatgcaggtgacagtcctaagttgttgggagccgcgcccacattcgccgttacaagatggcgctgacagctgtgttctaagtggtaaacaaataatctgcgcatgtgccgaggctggttctccactccatgtgctc

SEQ ID NO: 17 - DNA, 1000 bp, mus musculus
ctctcatttgccgattctttggaccacccagtcctgctggcacagagggcagccattattctgtttcacccacaaggacatgcagcaggtgtggaaggagtggttacactctcctctccccagaccacgacacagtcctcttgcttgtttttagcttgacatctaagataggcatccatcacctggaccctgcagatggcataggtatcacactcaaggtcccagctccacatggctaccgcattccacttcttgagggagaacatcttgtagcctcccaactcggagcctgcgctcccggagaagaaaggacgcagggttcctcgccgtcctccataacggccatggcggcagtgcagaacccatcgtttttaaatagggttaattgattctctggagtctaacttcttgagttctttgtatatatttgatattagttagcctatgtaatgatttatgtataaaaatatttatctaatctataaactataattagccttacattagctacatttatttttacctttaatacaagattaaaataaacaagccaattactaatacttaaacatattgggttttggtattgaaagtatatatatatatgtgtgtgtgtgtgtgtgtgtgtgtgtgtgtgtgtgcgcgcgtgtatgtgtgtgtaataaatattatatgtatattttgtattaaaatttgagttactcttggcacaaataaaaatacaaataaaagtgcaaaggcagtctctctaactaatatcaaatatatacaaagaactcaagaagttagactccagagaatcaattaaccctatttaaaaacgatgggttctgcactgccgccatggccgttatggaggacggcgaggaaccctgcgtcctttcttctccgggagcgcaggctccgagttgggaggctacaagatgttctccctcaagaagtggaatgcggtagccatgtggagtgggaccttgagtgtgatacctatgccatctgcagg

SEQ ID NO: 18 - DNA, 1000 bp, mus musculus
tattcagttcttccaaaataaaatatcaactaaaataattttaaaatatttggtgaagaagtttgatttcctctcagaaaatgtattaactgaaactagacttgacatctcagtagatacagtgtaattggacttcccatttcaaagcatgatacaactcaaaggtaatgaagaccattgatacctatgggaagatacataaagaatatgactttatgactgtggtttgaatacagtgtttccctacagacttgtttttgaatgtttgaaccttagtagatggcacaatagtagaggttctagaaaccttgccagcaagattttgatgaaggaaccctgttatagctgtccctgtactggggcatataaagtttgtaagaccaaggggcctctcttcccaatgatggccaactgggccatcttctgctacatatgcagctagaaacacaagctctggggttactggttagttcatattgttgttccacctatagggtagcagaccccttcagcttcttgggtactctctctagctcctcatttggaggccctgtgttccatcctatagatgactgtgagcatccacttctgtatttgccaggcactggcataccctcacaagagacagctatatcaggatcctttcagcaaaatcctgctggcatatgcaatagtgtttgcgtttggtggctgattatgggatggatccccaggtggggcagttctttatggtctatcctttggtctcagctccaaactttgtacctgtaactccttccatgggtattttgttccctattctaaggaggaatgaagtatccatgcattggtcttcctttttcttgaaccttattcttatgataaagccacaaaggtaattcactaaaaaaaggattatgtttttagctaatgctaatatagtatttgtctgaggggaaggaccaggtccagctcctaacctttgctactacaatatgttatggtctatttcccttgatgc

SEQ ID NO: 19 - DNA, 1000 bp, mus musculus
acattatgagctaaccagtaccccggagctcttgactctagctgcatatatatcaaaagatggcctagtcggccatcactggaaagagaggcccattggacttgcaaactttatatgccccagtacaggggaataccagggccaaaaagggggagtgggtgggcaggggagtgggggtgggtggatatgggggacttttggtatagcattggaaatgtaaatgagttaaatacctaataaaaaatggaaaaaaaaaaaagaaaatacccaataaaaataaattaattaataggaaaaaaatcttattcacagaaacaaaggagcagcctgggataggagtcttacagtttccctctatgcctggacctgatcctctgccacagggatccacacccaaatagtcctgggagagagctaccctcccaggagtgcagacaagcctgtgagcacaggtaagaccaccacttctgcttaaagggacctactcacccagaaccctcaggatacaggaactgaggagcaacttgtgacaagagcattccagtttctgtccacacccagaactgatcctatgtcacagtgctccatacccaaacccaattaccaccaggagaggacttgtctctcaagagtgccaacatatctgtgaacacaggtaagcccaccagttctgttcaagttcctgagccaggaggaaccctcccagagccatcaggacacaggaaccaaggataagatcatactggattttatctgcaccccagagctgacaacgtgccacatgtctccatacctaaatacaacccagagagaactggtttcccatgagtactgacacacaggcttgcaggaaggaaaagccaaagtcaaagacagcatgactagctaacaccagagaaaaacagatgtcaaaaagcaagggcaagaacacaagcaacaggaacaaaggttacttggcatcatcagaacccagttctcccaccacaatgagccctggata

SEQ ID NO: 20 - DNA, 1000 bp, mus musculus
ggaaataagggggaagtatcagatactggaggggacagcagaaaggtacagagggtcaagaaattgaataaaaatatgtagcagtggaggatgaggaactaggggtagcaactggaggattgcagacaccagaggaagagagatgctcccaggactcaaggaggatgactttatgtgcagagatggggagatagaacctgtagagaccacctccagtagataggcatggcttccaggtgaaggatggggccacccacatatctcaaaggttttaacccagaaatgtttctgtccaaaggaaagacagggacacaaaatggagcagagatagatggaatggccatccaggaacagccctacctagggatccatcccatctgcagacactaagccccaacactattactgttgccaagaagcacttgctgacataaacctggtgtggctgttctttgggaggttctgctagcaactgaccaatgcagatgtggatgcttggggccaaccatcagattgagctcagggaccctggtggggaagctggtggaaggactgtaggagcagagggggactgcaacactagaggaagaacatagctggcctgaccacccagtgctcccagggactagaccaccaactaaggagtgtagagggagggatccgtggttccagatacatatgtagcagaggctggccttgtctgacattaatgggacgggaggcctttggacctgtggagacttgatgccccagcatagggggatgctggagagatggggccagagagggtgggtaggtgggggagcaccctcatagaggcaaagagaggggggagaaggcagatgggaatggggaggggtgttgtggagaggtaaccgggaagtggaatatcatttgcgatataaacgaatggaatggttgagaaaaagaaaaggaaaggaaaggaaaggaaaggaaaggaaaggaaaggaaaggaaaggaaaggaaaggaaaggaaagg

SEQ ID NO: 21 - DNA, 1200 bp, mus musculus
caaagatcttcacaggtctccaaagaaaatgatgggacactcagactctatttggatgtgataacactagccatgggccatatccactgcaaatgcattgcctgttgccaggacctggcccaaactgtggataagcaggacattacagagttgattgccccactttgcatagatgaagtaaggtcagtcccacaagttcctcctctgttgggcattgggctatacacagacagtctggtctccagttgagctgagatgttgaacccggagatctggtggtgttaattcacctacatgggatggaaggagttctctcatgtctcctggactctgggtcctgtcgaagttaccaccccctcagcccccagaagagaagcatggctagcagtcaagaagacaatgtcccaagcttctggccttcaggctaaactcctcctcagttacctagcaacggtagagataacagcacactataaggagggctgcttggccccctcctcactctcttactcctctttctccccttactctcttctatcatctcctctctcctttcactctcttcctctctctctccctcttactctctagcctttcttttctctctcgtccccccccccccatctcttctcttggccatggctggtctctctctctctcttctaccttttctctttccccctgcctttctacaataaagcttgaaaatcatagactgtctctgttcatcaaggccagctatgcttactctcgcctgtgtaggaacctttctccctctgccctctcccggggctacagggtatcatcccaggggtccccagttggggtctgcacctgtccaccccctgtcgagtggggtcagtggcttagatgcccactggggccaaatggatctgcctgcccagagcataggaggaactctggccagatgtggactatcctcccttccccctccccccaccccccatctcctctcaccccccccctctttagttcacacactcctccagaagaaagcctctcagaacttctgggcctgggattgaagactcactgccttagggcctataaccacaacaaacccatggagaccacaggagtctgctgttgtgactgtcaagtaatgggcaactctctgtcattttaactttttctttttctttcttttttttttttttctctcttttcttttttcagaga

SEQ ID NO: 22 - DNA, 1400 bp, mus musculus
attttcattattttatttctcagtatgcaaataaatatgacttatcaattggtattatttgagtctgacttaaaattattggccaccacctcctgtagccagacaggtaccccagtggagtgatagagacatcaatcctcctataaaacttttaacccaaaagttatctcatctacaagaaatgcaagcatgggggatggagcagagactgagggaatggccaaccaataaccagcccaaattgagacccatcccatgggcaagcaccaatgcctaacactgttaatgatactctactatgcttgcacacaggagcaagttgtcctctaacaggtttcacccagcaactgactcagacagatgcagacacccacagccaaacagtggatagagtttggggactcttatggaagaataggaggtaggatttcaggtccctagggggataggaactctacaaaaagaccaacaaagtcaactaacctggatctctgggactctcagagtctgaaccaccaaccaaagaacatatatgagctaaacccaggcctccctgctcatatgtagcagatgtgcagcttggcctccatgtggatctggaacactggaaaaggggctatctcaaaagctgttgcctgtacatgggatttgttctggtagctgggctgccttgtctgacctcagtgggggaggaagtgccaagacttgcagagacttgaaatgtcaaggtgggggatactcatgggtccctgactcgctcagaggagaaggggatgcgggatggggaggggagggattgtgactgaggtgaccgggaggggggcagtgaattagtaaaaaaaaaaaaaaatttaaaatttaaaaaatgattggccacgttggatgtgagaatgtgtgccggtggacctttaggtgggatagcatacacctgaaacgccactccccacaaggcaaccagggatcctgttctaaacaacgataaagcaacaaaaatagacattgaatgaaagaagtaaaagggaagagttaaaggacaaaaataaaggagaagagaggaaaagaaacgaagactgtaaacacattaggagacagacaccaggagatcacagtatctcctggctgcactcggctgcatgtggggtgcatgcctgccttggctgtagagctgtggccagggaggggaatcagaacaaaaagctatctaaagtagataacgcctgggataagttgggcatgactgagctttatctagttgggagtccgggagttgagggcattttaggaagaatagatcattttaccaaagcaggacatgagtgagattaaagggaataaggccagtataacaagctatgaaagggttttctctttatatgccccagtacaggggaatgccaggg

SEQ ID NO: 23 - DNA, 1000 bp, mus musculus
ctagagttacaggtttgtttacttggttttcttggcaagggagggagaatgaaaagaatgacattgaagagtccatatgctcttctcatgctccgcgcatggagttatgacagacgacaatgctttcacttacgtcacacatctctaatttacttatgagctaaacactaattcattctaagttgagccacgtcactgtgatttattgtcacatgccacaataagcatgttttgctctcttgtcccttctgcaggaagggctgtgttgagttgggcattgtttgtatagtgctggacacagctgcagggtgtttttacgtgttcaatgaagtaattctgttctcagaaagctcagacaagtacagtatcaaaacagaaagtgtgtgcccaaacactgctttcctggcccctgcaaccccgaaggaagattaatggttgtttggattggaagttgtaccctaatgaagcatgttacccctggggaaaggggtctgagtaggataactgttcacctccaggtcaacactgcacaggctatgattcctgatgcctgcaaccccaacccagacagctgccattaagtgcctggtcctctgggagccattggcacacaaggccattcccatcaaaatggcctggggaagaaggtctcctaagcacagccacagtgaatggaggggaattaggtcttgaggccccagctgaattgatggcagctgctttgggagggcctggtttcttctgctattattcctctgcttttcaacaccactcactctcagattaaatgcagtgtcccttcaaatagcaatgagtgcttgagacgtcccatgtggcgtccctcaggaggctacacccaggacagctaacttcaatcctccattctttatggctttaaatattgaattttaattactttccaatccgtagatttttttttataccttggaaactaaaatactcaagagaaaaggaaaacagcctagaatcccattaccca

SEQ ID NO: 24 - DNA, 1400 bp, mus musculus
ccaataaacacctgaaacatagtttaaggggtggaagatgaaatggctagataggcttgttctttagtttctgagtgaccattcccttggagctaattgtatactactcataatacttggcagtgtcttgtttccttcaacttgagcaattgttcattaccagccttctggacatacactacctttaactgcctggacttcgggtcatcaactcaaacttggtatggttacaaaatggattactgaagaaaaatatttacagtattacttcagtattcagtgaacactgcaaatagaactgaatagctttaagttacagttatgttacttctagggctaaaaaaccatttttacttgagatcacaagctattgtgctgccctgacatagcacagtggtatcacaatggtaaaaatgcatctacactcacataaaatacacaaataatgtttaaaacaaactctctcaaaatttaccccaaaccactaataatctcattcaactgatttgaaatatgttcaagaattctgatgaattctcaaacctgttttttgtttggttgtttgtctgtattttctatcaagggagaacccaaacttttctttatacccaattaagtttctaaccctaaataccactacggtcactagagacaatgaagtattgtcagagattaagtccatcttctaacattcacatgtgcataatttacacgaaattcaagtatttaatagagagataaaattagtctctagccaggcatggtatagtatgccttctagtcccaacacttgggagacggaggcaggcagatctctttttaaggccagcctggtctatagagtgggctccaggccagccaaggctacatagtagtaagaccatgtctggaaaaaacaaaacttgtttctgatactcctactttgagatcctgccagttattaacttaaaataccaagccacagaagagcatctgttaaagcagggtgattatataatttatttgacacagtacattttctgcttattgagcagtttttgtgtacttaaaccaggaaaaaaaattgagaagagtatctcagtggctgactaagccaaaataatagtggttagtggaggggttgggggggcattaaagcacagctaattgttaagaatttggctatcttacttcatgcaaaattagtatatgaaagttatatattttcctggaactttaatataaatgaatgagataaaatatttcaaagtatgatgtgataaacactaacccaggtgtgtgtggtggtgtacattatcttaaactcagctccactttaaaaacatctagattctcccttccttccacattcaacaaagtggactttcagtatgtagactcacttaaagatactatcacag

SEQ ID NO: 25 - DNA, 1000 bp, mus musculus
aacagacaatttgttactgttgctcattaggatgaggatatctaggcaaggatgatgcaccctgaaattagggtagggtatacagtgagtattttctatatcaccatattctagcaatgacagtcagcaggagtgtgataacaactggtcagcattgtttccctacatatggacagagacaaacactggaaaggatgtctgatactggctgaacttggagtggtggagcttctgaagtatcttacctaagtctaagtggtagactaggcatgctagtccaggagcaacacaaacctacaaatcctcatgtgaggtgaggctcatcactccccctgatacccattttcagctctaacagtggtatacccctatgtacagagtaaggcaaggtaacaatagggaaccatactgcttgttccatgttcaacagatggtaaggtactcatgtacttgcccatgagtgaaagtaccaacaagaaaacatgacatgtgctggagatgcatggtcaactgaacacacccccagtcctagcagtgttagaatccttcatgcaactgtccacactctagatcctagagcataactatgttcacctttcttttgttgagtatagaacccttcagtctttagtgtgctaaaacacctcttccttctaatatgcagcacggcatgggcatggacgcttgaataacaatatctctattgagctgagttggattgtgaagctacaatcctctgcatactgtggcagactgtttctgggattacaggaatggagactcacagatttctaactctcaagagaacatgaatttggacaaaagttgcttctcaatatgttggcttatggcagaatttaggtttcagagaatggcaaaaggacagtgtaagttcttactccaatgcaatgttaccatacctccttgctaaccccaactggattacaactctatggcaaatgtgaaatttcccagtagccaagatcatcgctgccccacc

SEQ ID NO: 26 - DNA, 1000 bp, mus musculus
aggttttctatctccagcattgactcactttgggttttctttattgtgtctacttccctttttatgtcttggatggttttattcaatcccattacctgtttggtcatgttttcctgcaattctttaaggaatttttgtgtttcctttttaaggtcttctacctgtttagctgtgttctgtatttctttaagtgagttattaaagttcttcttgatgtcctctatgcttttaaacccgggtcttgctttttgggtgtgttggggtgcccaggaccaggttgggtggtagtgctgcgttctgatgatggtgagtggtcttgatttctgttagtaggatccttatgtttgcctttcaccatctggtaatctctgatgctagttatagttgtctctggttagagcttgttcctcaggtgactctgttagcctctatcagcagaccagagagactagctctctccttagtttcagtggtcagagttttctctgcaggcaagctctcttcttgcagggaaggtgcccagatatctggtgtttgaacccgcctctgggcagaagttgtgttccactcaccagaggtcttaggatcctgtgggggatcctgtgtgggtccttgcgggtgtctggataatctgtgtgcaaggcacactggtgctggattggaccggaagggacttgtgcccctgatcaggctgggttatctgcttccctagtaaatgcatctcaggtcccgcacgattggattggatcatacgctgtgttccactcaccagaggtcttaggatccaatgggggattctgtgtgggtccttgcaggtgtcttgagactcgcgggcaaggcaccccagtgctggagtggaccgaaagggacttgtgctgagtgtctattaacttattgctccaagagcatcatagatcctccaatcagctgcaatatgatttttttaaaaattacttagtaatgttagtactacctgtgagtatatgtgtatggaggaatc

SEQ ID NO: 27 - DNA, 1000 bp, mus musculus
ttctgactggtgtgaggtggaatctcagggttgttttgatttgcatttccctgatgattaaggatgttgaacattttttcaggtgtttctctgccattcggtattcctcaggtgagaattctttgttcagttctgagccccattttttaatggggttatttgattttctgaagtccaccttcttgagttctttatatatgttggatattagtcccctatctgagaccatgttctgtatcaccctttcaatatatgcatcttaaaactgacagtgtgttgaccatttgacaagcaatcctgattgctcactgtagtgttttctgttcccttctctatccttttagcactgagaaataaacccagagcctcacacatgtgcacgtgctaggaaagtgcttcaacataaagctatatctgctgtatccactttggcaacttttatgccagatttctcagtcatatttttccagaatggcaatgaggtgggaggctgtatactatcttctgaataaatacaggtgtactggctggtttcgggtgtcaacttgacacagctggagttatagagaaaggagcttcagttggggaaatgcctccacgagatccagctgtaaggcattttctcaattagtgatcaagggggaaaggccccttgtgggtgggaccatctctgggctggtagtcttgggttctataagaaagcagtctgaaaaagccagtaaagaatatccctccatggcctctgcatcagctcctgctttctgacctgcctgagatccagtcctgacttccttggtgatgaacagcagtatggaagtgtaagctgaataaaccctttcctccccaacttgcttcttggtcatgatgtttgtgcaggaatagaaaccctgactaagataacaggtgacacttaatttcacaatgatacctatgtaactagctcctatactattcaagaaggcaaatcatgtgaccattcagcccatgaatgctttctata

SEQ ID NO: 28 - DNA, 1000 bp, mus musculus
tggcgttcccctgtactggggcatataaagtttgcctgaccaatgggcctctctttccagtgatggccgactaggccatcttttgatacatatgcagctagagtcaagagctctggggtactttaatctgcactttcatccagagcccaaagatgggccctctcatactcttgccttttttacttttacaaagttgaatgctttatattttcttaaactcaattagataaagatattttcatgcaatggtgttgtgtacttagaacatatctcctcatttcccatccttggccagtccagattgtctttgtggccatccacacctttccatcctcggtgccaacccctgggattcaagtttttacaaccagaaacactcagtgcttgggacagctggtctctctagatcagcttatacactgtacctcaccttacttgaggccatagctcgaatctaggcagaaagtacttgggaggtcaccagctctgttgccttaaatagtgaggatgtgagagccaccagagacccctgtctgctggctccgcaattcccttgattttcaagagtggtaaacagggctgtagacatggctgagcagttaagagcactggctgctctttcagagaatctaggttcaactcccagaacccacatggcagcttacaaacgtaattccagtgccaggaaatctggcatccatgagcaggtataaggcatatgctacaactacatacatgcaggcagatactcatatatatgaataaaattttaaattaaagcattaaagataaggcaggcgatggcggtgcatgcctttagtcccagggatcagaaggcaacagcaggcaaatctctgtgagtttgaaacagcttggcctacataatgagttccaaaacagccaaaactacacagagaaatcctgtctcaaagagaaaaccaaacaacaacaacaacaacgtgatatgatacaaagtcaggggtaaatttggatataatca

SEQ ID NO: 29 - DNA, 1000 bp, mus musculus
tccacccacctgcttcctgggttcctggactgttcgttcaaagaaagttaccctgacccaccctgactgttgctggaactcactatgcaaatgtgctattgttagagtctcacagaaaactgtcttgactttgcacttcctcgtgactcttaactggtaattttggtattttccaacaacgccctccctaccccttgagttgtggtttcttcctttaaatacccccttacccagctacttgaggtgccatggtcctctatctgtgcatggtgcatgactgtgggcccgagagcactcttgaaataaaagtcctcttgcagtttgcatcaagactgtttcttgtgaataatttggggtgtcacctctcctgagtcagaatgtgggggagccctcacattgtgggtcattcatttggtgtgttggctgtgaacatgaccacccctcaaaccggagaactgacttggaggtgtggggatgccctctggaatgtgtgcgtgctggccagtgtctctgttctgagtgtctgttttctgttttctgaaacaaacataggcttgtcctttgtttctgaagcacggcacagcctgagtttggatccatctgaatttattctgatcagcctgagtttggtttctctggttttggtcatcctggtggaaggggcgaaggtgtttgtagatgatgtggttttctgaaatgcacacactttgtatttgcagctgtcctctcgggctggaaggactgaaggactgtggtcggcaggtgtgctaggaggaccacaggctgcccctctgggggacaccctgggaagtgagaagagccagggacgcctggtagtctccagagattggtcagagggaccgagttctgatgttgaagcggaagcttccccctctgaagtctaattcttttgtctgcttgtggaggacaagaaagggccgcatgtgtctggatatgttgttttctgttttgtgtgtttttgtgtatgtgtttagagcta

SEQ ID NO: 30 - DNA, 1200 bp, mus musculus
gaagctcaaaagaataagcgtgtgatctaattcacatctacttatttcccatagaggggttgtttttaaacacaataattgggatgcatgcatgcatgaatttatagaagatacaaaagcatgcataaaaacaatttttaacttatctttgggatattgattgtcaattttatttaaaatgatggtatgcaatagatcgattattgatattctgtaataaccaaattaattgctgtttggaacaaggaacagacactttgtcaggttcctaagacacaatttttgttataggttttctaaaatacctggatatatcttataattctttattagcactacagtagttttactaggatgctgaaactgtgctttgaggtgagcaccacctcagccccgcccatgtgccttgttgtggttctgccgtcctgggccccatacccaccaggcacctgggggtgcgtttgccatcgtccttctcagccccggctgagcagaacctctgtcacttgccatcatggtgtgtggagccactctgaaaaggactctggatttcaacctgctgctgagccctgcatctcggtgcgtgcctttaatggcgccacctttgattgcctctgccacttcccctgaagaaaggtgtttgtgtgctgagcagggccagggccctgtctgccatggggcctgccgccactgctattgacagcgtgctgctgcgatgtcaagtggcagctccgtggccctggccctggccctggcaggggaacaccctgagtcttagcgcaaaaaatatggctaccccggcagggacgggaggagtctcatggggcaatggcgagcaaggccctctcctgagttcgctacaaagccgcccgcccactttctggcggcctcccatgtcaccacgttcagggaaagctgcgtgcccaaaggccccgggagccaaagaatacagaaaataaagggggtaggaagtcacaacaggcaaagtacccagaagttacctgacatgaaacaaaggaatgacttcaaaaggattaacaggaaccagataaatgtttacagtaaggataaagcggctctgcttagggtcagcttaatgacagctaaggttttaaaacttcccttgagaggcattagctaataaaatactttccacttagaaaacaatatacactgaaatattcaaactcttagcttctt

SEQ ID NO: 31 - DNA, 1000 bp, mus musculus
tctcttccccctccctgcacccctccatttccaaagggtgtccccaccccacatcccaccagacttccccactccctggggcctcaagtctctggagcattaggtgtggcttctctcactgaggccagaccaggcagtcttctgttgtacatgtgttgggaaggggatgcatcatatcagctggtatatgctgcctggttggtggctccgtgtctgagagatctcgggagttcaggttagttgagactgctggtcttcctatggggtcaccctcctcctcagcttctttaagcttttccctaatttaatcacaggggtccctgatttctgtccattgtttgggtgtaaatatctacatctgactctttctgcttcttgtttagtcttttagagggcagtcatgacaggtccctttttgtgagcactccatagctccagtaatagtgtcaggccttggggcctctttttgagctggatcccaatttgggccggtcactaaacctccttccccccagtatcttttccatttttgtccctgcagttcttttagtcagaaacaattctaggtcagagtttttgactgtgggatggcaacctcatccctccacttaatgttctgtgtttctataacaagccaaagggcccaagtgaggatgcctcaatcccacttgtgtgggagaggggacagggagggaaagggggaacatgatcaggtgttggtgtgtttgagggaataggactgaagccctcagggccagtaaaatgaatgaaaacatgcaacctcgggaggtaggaggtgggggaccctctagaatgtatcagagacctgggaggtgaaagactctcaggtctcaaagggaaccttagatgaaatgccctactgtggggagagggaacttgtaaagttgatcagtatattcttaaggatacaaagaaattagaagaaagaaacatgtttggatgaaagtgtgacaaactggtaagtatggctgctgttgac

SEQ ID NO: 32 - DNA, 1000 bp, mus musculus
acagaatagtaatagagttatagaataaagatacagtatttaataaagcacagagatttataaattaaaataatgcataaagagttaatgaaggacaagtcccttccagtcagcactagcaccaggtcacctagggttcagagtctgcggatacccccaagtttccttgaggactcgccacaagatcttaggatcattggtgagctgagcacaacatcggttccaatccaatcgtgtgggacctgagtcagcagtaaggaagaagaaaaccggcctgaccaggggcacaattcccttctggttggcaccagcactgggtcacctagggtgcggaatgggcggatacccccacagtccccagaggactctccatgtgatcttaggatcactggtgagtggaacacaacatcagttccaattcaattttgacgggcctatgacagcaggaacaaggacaccagagcccttcctgaccagaggcttgggttccttttgatcagttctggtttaccttggttttgaacagactagacagttccatggtcctcaaaggagataccacttccaggcactgtaacaggtccaggatcttaggacaacagaatcccaggataacagtagctgggtcacaccagtatttcagggtctcagaggagcttgattgccaagaactctgacaaacccagaatctcaggttcacaggagcccacaatcaaaggatcacagagaaagctggactcacaagagtcctgaatcaaccgggattataggaaggacaggctccaatgagatatattgagggcagcaagcacttgagataataagatggcaggagacaagcttaagaaaagaaggaacagaaactaaggttacttggcatcatcagaatcaacccctcccaccatagcaagtgctggatacaccatcacaccagaaaagcaagacaaggatctaaagtcacttctcatgatgatgatggaggactttaagaaggaaatac

SEQ ID NO: 33 - DNA, 1000 bp, mus musculus
tcttgtgtttgtcttttgccatatggttatctctggtgttcgatcgtccttctgtctctgcctggagctttttccaactgtgggtttgtaagcctgtgtcagcactgctgggagaacaactctctcctggctagacccatgcacagtgtgctgtggaacagcctcagctccctgttgtagtgagagttgtttccaactgccagtttagtggccatgtagagatattgtttgaattagaccattagaccaggacaccccagtaggtagggacaaggcagcatagacaaacccaaagatgagaatagggttattaactacctctaccagtttcatgaggatactattaataaccagagaggctgacagccaggccagaccaccaggtcatcacatggtgtgataggggctggtgccctgagtgacggagagcagttcatccaggcctgggatttctcagcagtgagaaaggacccatcttagaggagagatgaaatctcacctaagagaaaacgtccaagaatgagggtcagtgaaaacactgaatgcctccatcctcaaaggcagcataggggtaggtttgagctcaagaactttgccctgggaccatttactctaaccagtgtggggagggaacttaccagttctctgaaaattggtctatcgagtcttggctcttcatgtggtagcagggggctgcaaacctgcacaatttataaatctgagtctcagcaccaaatgctgggtttataaactaacaaaggggaaagaaaatatgtttagtggaggtgtagtcaggtatgggggaagggggtgcctctgtgggcccctgctgaagcatcccttccccctgatagagtttattcagggtatggggaggggagttgagagagtaggagagagggagagagagagagagagagagagagagagaagaggtctgctatgagcatgtgggtggggggaggtgaatggagagagaggggtgaaggggtgagaggac

SEQ ID NO: 34 - DNA, 1400 bp, mus musculus
ttcctcttatggtcttctacctgtttagcagggttttcctgtaattccttgagggatttttgtgcttcctctttaaagagcttctacctttttagcagtgttcttcagtatttctttaagcaagttattaatgcccttcttaaaatcctctactagcatcataaaatatgattttaaatttgtatcttgtttttcaggtgtgtttgggtatccatgactcgttgtggtgggcataatgggttctgattatgcccagtagtcttggtttctgttagtaagattcttatgtttgcctttcaccatctggtaatctttggtgttagatgttctagctgtctctggctggagctcatccttcctgtgattctttagcctctgtcagcactccttgaagagtaactctctactgagtctcaggtgttagagcactctctgcatgcaagctctcctcttgcagggaaggttcacagaagtctggagctcagatccacctcctgagtcctagggtcagagctgtctccggaggctgactctcctttgtcagggaaggtgcccagtggtctgtgtctcagctctgcctccttgctgaggatgaaggcccaaaaggaccctgtccaagaagcgctgttgcttctgcatcccacgtgctctcttgcatagactggtctcattgatcccaagattctgggtgtgctaggcactgcctttgtcatttgtccctgttccttctagttcaagaccctctggattttttggaacagatgctgagttccactcactggtgatctgaagatcctgggtgtgctagagtgcctttagcgtggagaatcctcttggagaccttgggactctcagccgagatcttgcccaagatagcgtgggggtggagccaccagaacaaaccccagctgctggtcaggcaggtgtcctttgtccctgttcctgctagcacaagaccctctgggttttttggaacagatattacattccgttcactagtggtctcaagatcctggttgtgctagtgttcctgcagagtggagagtcctctggggaccttgggaccctctaccaggttcatgcccaagatggcgcaggggtgacttgaattttttaatcatacaagtttttttacttggttagagttattctaaaatattttaaatttactttaggtattgtgaaaggtgttatttctctggtttctttcttagtacatttgttgtttgtatattgatgaattacttttttgagttaattttgtatgcagctacttcgctaaaggtgttaatcatctgtgtgttgtctagtagaatttttagtgtctcttgtatatagtatcatatcatctccaaataatgatactttgacttattttccaatttgtatcttttacatat

SEQ ID NO: 35 - DNA, 1000 bp, mus musculus
acaaatcttagggggtatagctttaaactattgtttggaaacacacatgtagttttaccaaattaaatacttaaatagattaaatagatcctggtggtggtatgtgttccttgctaccgactccagtgttctgggttcctgaatgaaacacacacacacacacacacacacacacacacacacacacacacacatacatacacacagagacacacagcctttatattttgatatgcctaaaacagctcaatggctgggcaacttcctcacctccatctagctaatacccctctcatattcttgagttattacttgctaaatctatactccatttacccccaaccccggacccagccatggggccttcttgggctgggatcccccagctcctatccttccttctgtctctaaatcataaaagtctggcctctgtctgccctgccaaactattggctgcgggcaactttatttgccaatcagaaccaacttggggcagggtccctcagtgttttatatgaataagtgcagattctcatgctaacaatttgggggacccaaattaacataatataaacatcattaggccaaacctgctacacacacatatttttattttattaaagtaagacaacaagactcccctgagcccagtagccccaccagtctgtgatgcttgtcttggctctttggtgctgcactggggaggcagaagtaggtagaggtacaatttcatgaccaggctggtctacagtgcatatgcatttgcaaagcatccaaatggtactacattttcttgaatacagtaaatcaacattgcgattatagtattatctaatatatagccatattctaaatttcaaattcaaaaaataggacaatacagaacattttcagtacctcagtactgattctaagtgattcaagatttctttatggttcagagatgtttagttaaatactgaaattgatgaaacaccaacagagattctcattctgtatc

SEQ ID NO: 36 - DNA, 1000 bp, mus musculus
agcacaatggagagagggagaactgcacacttgagggtaataaggaacagcttaatgtaagtagccaatgatgccacgtgggaccacggtggggttctgacctatgctgccactgagaaccatgcctgagtccatgtccctgcagcagcagagatctgttacccaaaaggcagggaacatgtctgtggtctgggctggtgcctgagggctgtgtggaactgaccccatccctcacctaggcatcttgggaaagctggctccaccactcatttcctgtgtggtgtagagaaaggaaatgagtggtggagcaggctcacctctacccctaccactaaggacaataaaaaggaattctcccttctttccagctccagcattagggagagtagaccctacatctccaatggtagcagagtagagctgaccttagtggtaggggtagaggtgagcctgcctgagggcatgagcatgggagagctttgactctgccacttctctgtagtacaatagcatgggcaaaggggagatacatccctccttgcctcttgccacctacagcaggttggagagatggctttgtggtcattagagtaggagaacatgccctgtacttcacctggacatcacagtctgatgatgggggttggcgtgggggagtcatggtgtgacctggccctgagggtgtgagcatgggagaactgatcccacaacttatctccagagtgtcagtgtgggcaaaagagagatgcccacttcctctcactatctttggcagacaggagatctggctcagggtcatgagaatgggacaactggctatgtctctggctggctgcaacactcagaagagcatctcacctgtgtctcacctgtgtagagctggccatggacatgaggattattggtgagctgatcctgagggcatgagagcaaaggagctggtgggcctctcaggctcagatccagggctttggacagagtcatttcaatgatcatttgc

SEQ ID NO: 37 - DNA, 1000 bp, mus musculus
ccagagtcaaaactaaatacagaagaatgccagaaaattaatcacttaaacagaagttcctctagtttaactttatacacgagatgcaaacaaccactctaagatagcatagtgggcatttttcaggctcttagctggaagcatatactaatgtcatacaagcatgggcctgatccccatgaaagcagaggcagctgattgaaaagcagttagaaatgaacatgaacatctgaacaagagctataagcatttatagtaataagattatcacaaacatttaaacacttctttctgactttgagacatgggttattaaagttataagaattaacaaaccattgtccccagtcttgactaagatcagagcccatagacttccaaagacttcagtttaagctgcataagcagattctaaggcagagtgcctgtgatcacactcatcattgaaaaatacactacatggttgcctgcttgtttatatggtcattttctgtttcctgctcctcagtgcaggctttatggcaaaccttaacctgtcttctcagtgctacagagagaccacacatgatacaaatcaacatttcagaaagtgtttgtaaaacactacagtagggactaggatgatggctcggtcagaaaagtgcttgtcagttgagcatgcatttagagttcaaaattccagcatccacataaagaagctgcatatggaagctgttaccagttgtctcaacactgggcaggcagggtctgctgcatccttagatttctctggctaatgaggctagctgaattagggagaaagacactcaacattaaactcatgctgacatatacatgtgcatctatgagggccatttatacttgaacattcattcacacatatacacacaaaacatgcaagcacattcataaacagcaaaataaaattaatcaagttgtacttagtagcttgagctatttgcccttccacctttctggtcttgataagacttaacattta

SEQ ID NO: 38 - DNA, 1200 bp, mus musculus
atgtatatgaaatacttgaaatttgagaagcacagttaaaatttaccttatataatttaattatcttgtgtacattagtttttattgtctaggaagtttgagaactactaattcaaagtaactacagagttggaaaaatagctcattagtaaagtacttgatggaaaagcatgaaaacatgagttctgatctctagagccaacataaaatgtgatgtgtggtagcacatgcctatactttcagtgctgaagggtggagggcagcaagaccctaagcattcactggccatcgagtctactggaatcagtgagctctatactcagtgagtagctttgcctcacaaataaatcagagaagtaatttagaaagacatcacaacattgatttacacacaccaacacaggaatacatacaggaatcgatatggaacacaatgtgtaattgcaatttgtcgagatgtgagtgttcatttgcagtaagcaagaaagttttattttgaaagaattgcaaagaagttttaaagtaattaatagaaattaccatgcgggtcaccttgggtgtgaactcattggacagtcccacactccccagaggactctccacacgatcttaggatcactggtgagtggaacacaacgtctgttccaaaccaattgtgtcaggcctgtgatagcaggagcaaggacacggttgccctgcctgaccagccactaaggttccttctgattggtgctggtataccttgatttcttacacaacagacagccccacggtccccagaggagaaaccacttccaggtgctgtaacacatccaggatcttaggatcccaggatctcaggaaatcaggagtttggtcacatcaggatctcaaggtttcagaggaagcttgactgccaagaactctgacacactcagaatctcaggttcacaggagccctgactcacaggatcacagagaaagctggactctgaggagtcctgaaacaaccaggattataggaagaacaggctccaatcagatatatagagggcagcaagcatttgagataatcagatggcaggagggaggcttaagaagagaagcaacagaaatcaaggttactgggcatcatcagaaccaaactctcccaacatagcaagtccgggatacaccatcataccagaaaaacaagacatggatctaaagtcacttctcatg

SEQ ID NO: 39 - DNA, 1000 bp, mus musculus
tgagagtacccatcacaggtcctgaaagataaagaagaaggcccttctttaaggcccttctctggagtgtgtcctttatgtggctggaaagaaggcattctccatttgctgaccccaggcttgttgtccacaaggcatgtcttcaggaggatgctcccaatgactccagcccttcatcccatggtcagcacagtacttgacgaaaagtagatgggctggtggggtgagatgggggttaggagaggtatagccactggacacatgtaacccagctactgttgagctgagtgccacaggaagccatgtaaaatggatgggtcttgtagctctgattggaggagcatccactggctatagatgctggagtgaatgacggaggcagatgtgggacaccagctccacccacaggcagaaaggcaagacaaggcttcattggctatgtttgtggtatgggatttgtgctaatgagcgcatgaacctgcaggcagaagagtatcctgagtagaaatgcagacaggctcagctagtgctacaaggctagagtgacctgagttccttggttctagtgagagttggaagcaggagccaaggtgagctcagaggctcttggctcttttgagagcgcaggaacaatagggactctcaagacttcagtctgtctgtgtgccatttcagtggcacaatgttccactaactagtggtgtggggcctgctttgagctgaacccagcagcagtggaatgctgcatgagctatgctcttggacacaggtcagccgatccatccaggaaaacaaccctatagactataaaggcagatctcagtgctgtcgagccgcacacatgaccacatggttcccagcaattcactgccataatagcagcctcaaatggatatccttggtctctttgatctcaactgaggccttctgggcaagatgcacagactgtgtgccacatggtatgatgggaagcaacatcaagagaggtgaggctgcaatc

SEQ ID NO: 40 - DNA, 1200 bp, mus musculus
tatacggagaagatgttccaacatgtaataacgatgcatgctcctctatgttcatcacagccttatttataatagccaggagctggaaagaaccaagatgtccctcaatagaggagtggatatagaaatcgtggtacatttatacaatggagtactactcggttattaaaaattgaatttatgaaatttttaggcaaatggatggaactagaaaatatcatcctgagtgaggtaaccaaatcacaaaagaaaacacatggtatacactcactgataagtggatattagcccagaagcttggaatacctaagatacaattcacaaaccacatgaaactcaagaaaaagggagatcaaagtgtggatagttcaatccttcttagaagggggaacaaaatacccatggaaggtgttacagagacaaagtgtggagcagagactgaaggaatgcccatccagagactgccccacctggggatccatcccatatacaatcaccaaaccaagacacttttgtgcatggcaacaagtgcttagtgacagaagcctgttatagctgcctctgaagaggctccaccagtgcctgacaaatacagaggtggatcctcatagcctaccattggactgagcacaatgaaggagctagagaaaggacccaaggagatgatggggttagcagacccatatgaggaacaacaatataaactaatcagtacctctagagctcccagggactaaaccaccaaccaaagagtacacatggtgtggctcatggcttcagctgcatatgtagcagaggatggcctaattggccatcaatgggaggagagcatcttgatcctgtgaaggctctatgtctcagtgtaggggaatgccagggccaggaagcaggtgtgggtgggttggtgaggagggggagaggtaggagatagggggtttttggaggggaaaccaggaaaggggacaacatttgaaatgtaaataaagtaaatatctaatttttaaaatagaaaagaagaactaagggaaatagggaaatgaaaattttaggaactcaaagaggaagcttagagacaagcctcaccaatgggatacaggaggtgaaagagagaatctcaggtgaaaaaagataaaagaaatggatacctcagtggaagaaaacattatatctaaaatactcccagtacaaaatatctgggaa

SEQ ID NO: 41 - DNA, 1000 bp, mus musculus
ctagtgtcatcagagagaaaggtacctcaattgagaaaaatgcttcttagacaagcatgtgaggcattttcttaattagtgattcatggaggagcttccagcccactgtggatggttcaatccctgggctgctgatcatgggttctataagaaagtagactgagcaagcaagaaggagcaagccactaaacagtgctcctccatggtgtctgcatcaactcctgcctccaggttcctgccctgttttagtgactgtcctgacttcaatgatgaccaccactttggaagcataaactacttaatatgtcctttcctctccaagttgctttgatcatggtgtttgatcaccacaatgataaccttaactaggacagaagctaagcagtaatttgttattctgctctaaactccccagcaggtgtgtgtgccttctctacatctgcacaaatgttttggatttcggaagacaaacacatgcagccttactttaaatatgctttaaatagtgcaatgactaggcatttccaaatgtccctatggctagcatattctcccctctgatattcctgaaatttactttctaaaatctatactctatctctgctacccaagactcaatttggggagttgcccctggggccactctaccctgttttggggggttattcttgggggggctggttttttttgggttatttttttgttttgtttacgtattttatgctttctctcctacagctctcaggcttgatctttctgctcgctgtcccctgccccatcctggcaattcggtttcctccctctcctgcatttcttgtcctggaaatctaaaagtcctgcctctgtcttcctgaccagccattggccaccagaaactttattttccaatcagaggcaactgggggcagggaccctcagcagagatgtgcagcttccgatgtgatttggggagacaaattaacacaaataacattagaaccaatccacaacatctcatcct

SEQ ID NO: 42 - DNA, 1400 bp, mus musculus
caaatgccaccatgtctattatgaaatcatctctagtatttcaattatattttggatttattttttaaatttcttattggagtttgtgtgtgtgtacctttgtattgtgtgtttttaatgtatgtatgtccacatgcacgaaggtacccttggaaaccaaaagatgttgtatcctgtggaactagaattataggcagttttgaattacctgatgaaggtcctagaaacccagctattgtcatctgcaagagcaacaagcactcttaattgctgtgttgcctcaatagctccatttcctcttattttgaattaaatgacctgtccttccatgtagcctcaccagcatctattagtcttctatacttttctccttaaacaatgagaaccaaaaccaactttcatttagtcagctctaagtatcctttgcattttgaaaacttctcttactacatagtttctgtcttttttttttttttttttttttgaacagggtttctctgagtagccctggctgccctggaactcactctgcagaacaggctggcctcgaacccagaaatcaacctgactctacctcccaaattctgggattaaaggtgtgtgccaccaccactccgcacagcattgtttcttttctttttctttttcttttttttttttcaagatgtcatcactttgcatttattttgtaccttgccattatggtattaaggtcatttgtgttcattgtctctgaggaggtagacatactaatattttatgcaggtcagtactcttcccagttctcatctgtagtaacttaaagttgatcatggaaagagtccttatttttttcttttttcttttttttaaaattaatttttattagatattttcttcatttacatttcaaattcaaatgctattctgaaagtcccctataccctcccctgtcctgctccccaacccacccactccctcttcctgttcctggcattcccctgtactggggcatataatcttcgcaagaccaagggcctctcctcccattgatggcctactaggccattctccactacatatggaactagagacacgagctctgggggatactggttagttcatattgttgttcctcctatagggttgcagtaccctttacttcctggggtacattctctagctctttcattggacagcattgtttcttaatgatttctgatgagaattacccaaaacagtatttaaaaccagattcctgctatctatttgtgctttaaaagtgaaccagccctttataggctcatgccccaagcttgaattactatttgggaacactatggagccttcaggattgaaacatctcttgagatagcaggtcagtggtaggacatggagtttaaagttttatagtgatgtcc

SEQ ID NO: 43 - DNA, 1800 bp, mus musculus
agcctgcttccctatgtaccgcagtctcgagttccgcgcgattggattggggcaggcactgtgatccactcaccagaggtcttagggtcccgtggggagtcctgtgtggacccttgcgggtgttgggcaagactctgctggcaaggtagcccggggctcgagtcacgagtcgagcggaagggacttgtgccccagatcaggcccgggtagcctgcttccctatgtaccgcagtctcgagttccgcgcgattggattggggcaggcactgtgatccactcaccagaggtcttagggtcccgtggggagtcccgtgtggacccttgcgggtgttgggcaagactctgctggcaaggtcttgttttctctttttactcctcttcatttcaatattttaatcagttttgtggtgagggaaggtatgtgtgtatagatgaggagaaacagaatgctacacaatttcatctgtgcttgaaacttgtgcaagcaacttcctactcacagagaatgttaatgtatatgtgaagctcttggtctcagtctttgatccattgcttattttcactcttgcaatagggaagcatatgaaaaactcacatctttacaattgtcttagttagggttttactgctgtgaacagacaccatgaccaaggcaactctttttttttttttttttttttccgagacagagtttctctgtatagccctggctgtcctggaactcactttgtaaaccaggctggccttaaactcagaaatctgcctgcctctacctcccgaatgttgggattaaaggcatgagccaccacacttggcttccaaggcaactcttataaggacaacagttaattagggtttgcttacaggttcagagtttcagtccattatcatcaatgtagaaacatggcagtgtctgagcaggcatggtgcaggaggagctgagagttctacatcttcatctgaagtctgcaagtggaagactgacttctaggcagctagggtgagggtcttatagcccacacccacagggacctactccaatagggccacaccttctaataatgcccctccctgggccgagcatatacaaaccatcacaatgttttctaggttttgtttttctttcttcattttaaaacttctgcttttcaaaggctgtatctctgataatggactgttcaaacacttaatttctgattattttctatttcttacatttatcaaaaggcataggtctttaatcaaatcatagattttattgaaatatcagaatcttataactgtctaaatttaacaataaggaaaatcattgagttcagaatgaaatctttctaagaacaggatttgcttcttaattattatattttaaaatagacaacgcatgcacatgatataaaatccaaatattacaagagggtatatgctctgtttcaagacagtcacttcctttcacagaagaaaacaagcacaatttgttcttctgcttcattccaagaatatactttatttttaaacaaaattacagtattctatgacatgaagttgtgccttatgttttagtacttagtcttaatggttattctttttcctagtagatatgagttgttggttctttcaaccattgatgacattacattgagtaaacacattacaacttatttttattttttaattatttcttttatttttgcactattcccctcttccctttatgccttccaaaccctcccatattcttttccttgctgcctttcaaatccatggcattatttttcactaattgttttttacagacaagta

SEQ ID NO: 44 - DNA, 1200 bp, mus musculus
tttgcctaaaaacatttttttatgtgtgggggtatacacctgtatccctctccttccctctgtgctccccacccccaacatgtgcatgtgtgtgcattggaggaggccagaggtaaatgtctggtttcttcctttctcactttacaacttaggttttctactttttttataaattaataattttattcatttacatttcaaataatatcccccttcctggttacccctatacaactcttccatctcatcctccctcctccacttcacctttgcctctatgagggtgctccccaacccacctatccttattgctctaacatccccctacactgggacatcaagcctccacagaaccaagggcctcccctcccactgatgccagataaggacatcttctgctacatatgtatctggagccatgggtccctccatgtgcattctttggttagtggtttagttcctgggagctctttgtggtctggttagttgatgttgttcttcctatggggttgcaatccccttcatctccttcagtccttctcctagcttttccattggggttctcaggctcagtctgatggttggctgtatctgcatctgtattggtcaggtgctggtaatatctatcagggaaaagttatcaggcaagcacttcttggcatcagcagtagtgtcatggtttggtgtctgcagatgagatggatccctaggtaggatggtctctggataggcttttcttcagtctcgcttccagttttttggatctgtatctgtttctcctgtctcagccattccagctggaagagttcaggtgtatggcaccatgctgtgaattttacatggatcctgagaatctaaactcaagtccttaagctctcatgagaggcactttaacaactcagccatttgtccaagaccctactttaaaatattttgattttcacttcggttcattattttcattatgaagctccttggtaaggttttgaattttacataattaacttcttattagcagacaaaatgtcactttccttatgacatactttccttatgatgtacgttccttatgacatacttagcttttccttgtgatgtacttagtttttattggtccacttcttccaccaacgctccctattgtttcactgctcctactccccctttctacccttctatcctcaacattcttctttctac

SEQ ID NO: 45 - DNA, 1000 bp, mus musculus
atgaatgaagcagaggcaggctaacctctgaactggaggccagcacagtctacagtgaaagttcctggacagccaggacaacacagagaaaccctggcttgaaaaacaacaacaacaacaacaacaacaacaacaacaacaacaacaacaccacaaaaaacactgataccagaacaatggaggcagaaatggtagacctctgagagtttctagccagcctgatctatgcagtaagaccctcctcaccccctaccccgtcccgcccctcaagtaaacaaaacctgtctagttcaagctgccttactgtcacatgaaataatcctgtttttgttttttataagttaggaattcatgtagacctgactgaccttgaactcctgatcttccagtctccaaacaaccccctggcttatctgttgtttttgaggcagcatctggtctcgtagcccagattggtaacacactcgcagtaatcctgcctccacttcttgagtgcaccacaatgcctgttctttcttttggctgtttttattttgaaatatgggctggctacatagctaaagccggtctagaactcatcaatccttctgtctccctaaagcagtcaagacaggtgcagcaaccatgccctctctatcactactacatgaacagcaacaccagcatcccctgaacccagagtcttgaacctcctgtactcctggctccactgcctagaatgcagccaaccccatagcaggtgctcaggtgcacacaggtgcagcacaaatgaataaaatgaatgaaagaacctgcacgaccaagaaaggcgaagcatttgcttcccaagtatctttgataacattctctccttcccccaaagcaagtcccagagagtagtgcaaataccagcaccctgaccccaaggcgcccactccccactgcgccagccacaggcacagggggccagtgctcctcacctggtctacgcagccctctggtggaatttttagggtcactt

SEQ ID NO: 46 - DNA, 1000 bp, mus musculus
tcttcttatgaaaatcttcattctcatctctacctattatccttagggttggtcttctcattgtgtcctggatttccttgatttttgagttaggatctttttgcattttgcagttttttttttttttaattattgtgtccaggttttctgtggaatcttcagcacttgcaatagtctcttccatctcttttattctgttgctgatgcttgcatttatggttcctgatttttttcctaggatttctatctccagggttgtctccttttgggttttctttattgtttctacttccatttttagatcttggatacttttgttcaatcccatcacctgtttggttgtgttttccagtaattctttaagggatttttgtgcttcctctttaaggacttctacctgtttagcagtcttctcctgtacttttttaagtgagttattaatgcccttcttaaaatcctctattagcatcatgagatacgattttaaatctgaatcttgcttttccaggactcactgtggtaggaggattgggttctgatggtgctgagtggtcttggtttgtgttagtaagattcttatgtatggctttcgccatctggtaatctctggtgttagatattctagctgactctggctggagcttgttgctcctgtgattctgttagtctctgtcagcactcctaggagtccaactctcccctgaatcccagtggtcagcgcactctctgcaggcaagctctctgcgagctctcctctgcagactggtctctgagagacctgagattcaggatggtgctctcatctgagtcctggggtcagagccctccctggaggctgactttcttctggcagggaaggtgtgcagaagactgggtctcagctctacctcctagctgaggatgaaggccgaagtgaccctgtccaagaagctctgttgcttctgcaacctgcatgctctcctgtgtgaactggtctctgagagacccaggatataagatg

SEQ ID NO: 47 - DNA, 1000 bp, mus musculus
attctgtgtattattatttgccccttcaaaccaacattttatccatgatataccaggagaagaaaagtattgccacaatcttaacaaaggcaattgcccaaattctaccagtaagtcatattaaggatccacctttgcagccaaatgggaactctcattttttctaaaatgaaaattctaccttaatgtcttcagaattcatccacaatggctaagagatgtgttggcttgttcatgtcccaccaactgattttgtatgaaatgtgtacagttaatcaatgctaatgttttcagttggccaaaaggcaaaataataatggtgatagttgttaaagcacaaatatgcaaaattatagggctgaagagctgctaagcaggcatggttcttaattataacagagaatatatggtcactgttttcaaaaactctccacacagctagccagacctcctggttcaatccccagtggctgaaggtaaaatcccatagtcctggtctagaatcatgtctgaatagccttgcattgttctctcccatagatgtttttctctcctgctttcctcagttggagaaggtttagttccgagtaatgattttctttcacacttgtttttgtcttttccttcccccactttgccaaatggcctcatctgccagtcacaatttttgtggtccacaattctgatcacttttaaatgaaacccatgctggctttggtaatcataatgtcatttacaatttaccactaaacacgtttattcagttagtagcacacgggagaaagagaactccatatgaactcaccgtgaaagacataatctgattatttcctcatgaaaatccaggcaggggtgcttgtaagaggggcttgagagaagatggaaagaaggcaaggcctggccacagctgactttgataatcaatgtgaacagataactgatacagcctgtcagggcaaccacccagtcaccccagggcattcttctcaaaaaggcaaga

SEQ ID NO: 48 - DNA, 1000 bp, mus musculus
ataaaataaaataaaataaaatggatgtgttgtatttaataaatatgtaggactaaaatgaagaaacttgttattccatgactgtgatcataaaaaggacagagaaatgttgggtgaattcaaatattcttcctcaccaactactttaaccagtctctggaagaaaaaggacaagctccacagtactcatttctcataggctgcatccggactcagaaagacttagaggcttaaccacactggactacttgctgagtgccagtcctaagaggctaagccccagacccttgcggattctccatatctccaaggatccctccactataaaaatgtttatgcctatgagtctccatcccaagagatgtatgaccacagataaggccagccttttcatccagcccatcagaactgcaaaccatagcagaatcatagaagcctgaggcaggataaccaagataacatgcttcctaaaaagtgttggttaagtgcatgaggttttccatttgtgggtacatttggataagttgcaaccccctcctttacccattttctcaatagtaacacaagggtaatatagctattctttagctcaaagaggtaaatgttagaattatatgccaaaaactcaacaaggatgtaactttcatgttgctgtctgtggctgtatccatcagtatggatgcttctttacacccactctcaaacacatcaggtaactaactgtttaaagacaagaaaggcaagggtcagaattcagttccagtaggatagattgcctagagtacgaataacatttgtcccacattgtagaagatggtcactttcttttttggaaagggagatttttgctgtttctaaaatctgaatctacctcacagacacattttaggcagttttgtgactgtatcccaacctagacaatgggtgctctcttaaaatagccaacctgctacacaattgcaagtccacaatttcatgggactttgaaattttcagtgtt

SEQ ID NO: 49 - DNA, 1200 bp, mus musculus
aaattaccatgtctttgggtggcacgatgctgtaagtgtatctcatgtctcattcatgtaaacgcgagcgttattccaggcagagccaactttttctcaaagacagctaaagaaatatatgtcctgtatactgtttcttggaatctggttctgatataagaataatgccatagcttggctattggggctgtttgccttcagcgaacaccactggcagtcactcccaccatttacaatgagcagaatgctttgggttctgtacacagcccagtacccactctctgggctcccaagcatctctctccagagcagggcacctttgcatttgggaaggctttctttccaccaggatgggatgagatgtgcatcatcctctcagagacacagagttagagagggcgttctgctatatcttgagtaatttctttgttttcttccacatttctaatgccatgttcctattattacagactctcctaggcatcagggggagcagggtccccaaaccacagacaggcctgcttacctatcctctgttactgtggtccccaggtctacaggagaaccctaccgtgcctttttctttcccatctcaattcccaactgttttgtgtctcgtcccacaaaaagtatgccaaaaggatactttgctgtgcaagccccaagacttgagttcaatccccagaacccatgttattaaaaatgggtactgtattgtacacttgtaatcccagtgctgggcacagggcggggcgggggggggggtgtggagacaggaggacccctaggcttcctggccagtcaccctagttagcaatctccaaactacagagagatcctgtttcaaaatgaagtagccagctctgaggttgtcccctggctttcacatgcctgagcatgcacaattgtgtgtgtgctcgcacatacatgcgtgtactattgtgttgcactatccatgggaagctgtgaataaatgtctgctggccccagttagggaactcaagacaaatgaaagtacagatagcacacaaagtgtttaattcccagcacccttgtggtggctcctaatgacctgtaactccagttccaaggaatctggtgccctcttctggcctcctcaggaactgtacactcatggcacacagacattcctataagcaaaaacccatacatggggaaaaaaaaccaacaacaacaaca

SEQ ID NO: 50 - DNA, 1200 bp, mus musculus
caagtataaaataaccccataatacacctaatttcatatttaaacatacatgcatagttttagcaaacttttctcatctgggatgagcatcttccctccaagtgccaaagaccacataacaaaagtatcaatacagacacgagaaagatgtcttttcacttgttttgtctaagagactcccaaagcatacagtctattactgttgcctgtagttacctccctaggggaggaagttagttccttttgctgatgacaccatgaactctgtaaatcctgagctggaactgccctgaatgtcccctccctgatgactagatttcttggtatcagaaggtactatgtgagcttctacaagagggaagcaaccaattgtcctatccaactgtgattcctatgaagtgcatctacaaaacaataactgttggtaccggagtagcccacacaccttagtagtaagcaacagctctctaattggactgacattctgttaaacaagaagaaaaatcatttctgctagtggaaacctagctaactatgcactgctaatgaagccatggtcactgtaggagaatctatagttaataatttggtaaaccaacctattctctaacaatataaacttaattatgtacacccacagattagaatagtcttcacctttcatcaaggagacttctctttgcaacagagtttactgcagaaaactacaaccaatcaaaatgaagaactctagagcctggtcccagtggatacatctacaaaacactcttgcgtcctagactcagggcattgcagaaaaggtggtaataagagtgtcagaatcagagaatcaggagttttctgtgaggttgtgtctcctagtaatatcacacgctccacccatagatggtcattaacatgactgcccaaacgtgagctgaacaaggacaacaccaatggacagcacaaaggggatggagaaaagcccaggaagcctcaaccctagacatagaggtgtaggcaactgaagaaatctaggaatggaagaggtggtcttccccacagaagagcacaccagttggttgtttagggccaaatggtcagccctgaaaatgtacatacaagtaatgttatatgtactgtgcaggtaatattgaggaatacacacacacacacacacacacacacacacacacacacacacacacacacatatatata

SEQ ID NO: 51 - DNA, 1000 bp, mus musculus
ttttaatgactaagatttaaaagatctagcacagatgtgtggctttggtcccctgagccccattgtctagctctggttttgcttctcagttcagaggagcatatgggacaccaagaatatcccgccttcccaaggaaacctttggggtcccaaaactaagcagcttggaaccctgctagaccaatccgatcctagttggatctgctcttatttggtctactagcaacagcctgtagaggtgagttgtatgtgatcctctgagccccattttctagctctgggcttgctcttctgtaaggagggcacttgaggggtcccaagagcagcctgcttccctgtggaaaccttggcagattccaagactaaccagctcagaaccttgctccaccaatcctaccatagtcagctgcaccagccattccagttgggtccaactggggaatagtctgaataatagggaccaccaggaacacagcatgcagagtggggtctgcctgaggcacagccagcagagtcttgtaccttgacttccattgcctggcccatggcttctcccaccttcatgagaagtcctgctgccatccagccaacaccaggaaaaaccagatgcttaaagggcaacattagaacacaatcaacaggacccaaaacaatatggcaccactagagcccaggtatcctgaaagaacgaaccttgcatgctaatgaagctgaagaacaagaagcagttcctaaatccaatcttataatgatgatagaggcctttaagaggacattagtaaatcccttaatgaaataaagaaatgcatattcatacaggtagaggcattaacagaggaagcaaataaatatagagaaatacaagaaaatacaatcaaacaggtgaaggacatgaataaaattgtctaagacctgaaaagggaaaaagaagcaatgaggaaaacacaaactgaggcaatcccaaagatggaaaacctaggaaagagaacaggaactacag

SEQ ID NO: 52 - DNA, 1000 bp, mus musculus
gcagatagtgaaaaccaattgaagagccttatgctgagcactcagaaaactcgacctctgccctaaggatacctagcttctcacaggctgcttccagcccatccctaagcaggactggggcaccaagactggtgtgttcctagtagaaagtatccaagttcataggacgcacaacactggatccgtaggtctctagcatccttgacaaacctcctttagtctatacacagtaattgtagactttttttcctacccttccttccactatggacctgagttgtcactaaggaatagcccacacagcacattaaccctaataaaatccttttatctaattttgtatcagctttgtaggaactccaatgaccccattctgatgagttagttattctgggaagccctgcagaaaggaccagacaaggttccctggtgagaaaggaaaatacttcccaagggaggaagagagcagggagaaaattctgccatcctaaagggtcttttgcagaatgtactcagaattgtcgctacagtcacctttgtaatatgcaaagcagtaagaccctcaaggggactcagtctctatgaaactctgtgagcactgttgtagttatcctaaaagctagttagactcatgccagcaaggcctttttaacaaacagagcaacccattagaaagcaaagggaaagatgtctgttagaaagacggagggaaaaataaaaatgtctgtcattcatttgcatatattattagagatgcagtaaagtcataggtaggaggtgagggagaccaggaagaggagggacagcctgaaagagagtggcttccctgccacagaaaggactttactgtacaaaggcagcctgggaacagaggaactgagacatggtacagaagaagctgaggggccaagggcttggacttacagcctagatacctgaacagctgaagatgtgttctacctccaaaacactacctaagagttttaaatagtaaaactca

SEQ ID NO: 53 - DNA, 1000 bp, mus musculus
agtgtaccatcatgctatcctatgtggctttgtccctctgaacctatggtatatcaaagggcagagaggattactattttgctgtgtgataagtagttattaagtaataagtttgtcacaggtgccctgctagaagacagagacacaggaaagtttctagttaaagctgcctaccactcagggaggacacaagaagccatttttgtaaggcagtgaggacaaccaagcataggttacctgaaaacatgtagagaatgtgtctgtctttgacagggatttagggaaagagtactaaaagaagtgatgccccggttgagttttcacaagtagaggggcatccttacactgaagggaggttaagtggtgggatagtaagaagccctggatgatgtcaggtacaaggcagaggctacacacatcacacggatgtgtgctgcattgcggagtgaccagctgatgagcttcacctcttggcttcatctgtgcatcttccttattcagatccttgataggaacaagccctatagtgggtaagtcctcacgcttgcaagtgtttgatttgacaatgtaatctgcagtcttaatatggaagatgagcagagataataactgtctgggatgcaaagatttagctcatgctggagaggcaaagatagactttgagaaagtccctatttggttaggtaggaggagataaagatgatctctcgggattagttaaagagggcagaacagggagaatcgggagtgaatataacatggattctaggaaaacacaaatgaaatttacatatcacaaatctcttgtgttctcaatctgcatctaaattttggatgctttatgttgttgttgttttagttcattaagagaaaagataaaggattatgtgatgaaaggctggaaatgtttggcaggaatgtactgtatcttcagtctacagttggaggtaaaatgctgtgggttttgacaaacaagtattaaaaagcaatttattctttc

SEQ ID NO: 54 - DNA, 1200 bp, mus musculus
cagatgatatgatagtatatataagtgatcctaaaaattccactagagaactcctaaacctgataaacagcttcaatgaagtagctggatataaaattaactcaaacaagtcaatggcctttctctacacataggataaactggctgagaaagaaattagggaaacaacacccctcacaatagccacaaataagataaaataccttggtgtgactctaactatggaagtgaaagatctatattataagaacttcaagtctctgaagaaagaaattaaagaagatctcagaagatggaaagatctcccatgcacatgaattggcagtatctgtatgaccccctttcggggacccccaatctaatctcgggagagagagcacacccaaaaaaacacaagattccttcttgctgcaaacacacaaggcagtttaatggtggagctccgggtcaaaacgcatctcacataggagacagtggatttgaccccaaatctcgaaacctaggggtttttatggggtaaaagtcttaggggtggggaattcagcatagagacacactattggcttattcaaacatcagcagaaagattacatgtcagcaaaagaatacgtgcaggtcagggtgtcagggttctgtgagttgttgactcggttcagatagccctgttatgtcctcacattcctctttatctttatggtcaagctgttcccaggaatgctttaactacggggcatggccgggtttgttttttttttttttttttttttttttttgttctcagccccaggcatcctctaggctcacaaacaaccagcaatttctgagtactttatatgacttacaggtcttaaaatttcatctttctttcagatcatatatagtaaaaatggctatcttgccaaaagcaatctacagattcaatgcaatccccatcaaaattccaactcaattcttcaatgaattagaaagggcaatttgcaaattcatctgcaataacaaaaaacctaggatagcaaaaaaactcttctcaatgataaaagaacctctggtggaatcaacatgcctgacttcaactgtactacagagcaattgtgataaaaactgcatggtactggtatagcaacagacaagtagaccaatggaatagaattgaagacccagaaatgaacccacacacctatggtcacttgatctttgaca

SEQ ID NO: 55 - DNA, 1000 bp, mus musculus
tctttgaactttgccttttaaaaacaagtgtcaagctacccagctatgcaactgcatctgttttctaggctgagagatgaaggctgtgcctctctaatcccaatgatgagattgatcatggtgtgtcccacagaggccccaggatatctggagccacatgtcagcttactaggacagttgcatgggtcaggtgcagtctccaaagaaccacactgcaaggccatcatcgccacctaattttcaatttgcaaaaccctaagaagttggcatgagagtaaattatagttcatgttttcataatatcttgatgaagcaatgtaatcaaaaagttattttcatgcttttgaaaaacaagcagtgtgtctagtgtatacatcaagaggacttcactacactcggaaatcaagaaaatacagagcatcacaagaaggtccacaataccgaggaagaagaaatcaagcatagcttgtagagactctccttaaatcatatagactttttcctccaagctttctttccccaacttactccatcatcccagcctgaaacaccagtaggcagtccctgggaacctaccagccacactaggcaggatgcaaaaggctagctgccattcctgacctcttgtccctctcctccaaatctccccagttttatacccagctctgtagcaaaccacccaactctgtctccccactcctcccacatctccagtaatcttctcctccaaactttctgcctccaactcattgctttatcccacctcccaacttcagtaggcattcactgggaatcagccaggcaagcctgcaagagtaataggtagggcagcaaagcaagtaggcatgcttcaaatcttcacttactctgctaacctccatatacaaactcccagtctcattcccagttctgtagcagactacctgtgccctctagtcattctgtgatgccattccctggggactaagcagatactgatgaaattccctgctttcctctc

SEQ ID NO: 56 - DNA, 1200 bp, mus musculus
tctttctttatttttttctatttctattttgagatcctggatgggtttgttcaatctcttcacctgtttggttgtgtttttctgtacttctttaagggagttttgtgtttcctctttaagggcttccagctatttacctgtgttctcctgtatttctttaagggagttatttatgtccttcttaaagtcctctatcatcatcatgagatgtgatttcaaataagagtcttgattttctggtgttttgtggtttccagggtgtgctatggtgtggcaactgggttctgatgatgtcaagtagccttggtttctgttgcttatgttcttatcctttccttttgccatctgtttatctctggtgttagctggtcttgccttctttgattgtggcttgtccttcctgtaagcctgtgtgtcagtactcctgggagatcagttatctttgggaggaattaggatatggagagctgtagcacaggatcagctcctgggtgcacactgagatgggaaggatcctgtccctgactgtttcttgaaggtgtctgtgtcctgttggctctgggatgatcactcttaggccaaaaatttgagcagaagtggtggtcttacctgtgctcataggtttgtcagtactcctgggaggccagctctcgcccagtggtatttgggtatggagagctgtggcacagggtcagttccatgcacagagggaaactggaaggatcctgtcactggctgttcattgaaggttcctgtgtcctgttggctctgggctggtccctctttggccaggaatttgagcagaagtgctggtcttacctatgctcacaggcttattggcactcctggaagaccagctttctcttggcggtatttgggtatggaatgctgtgactgaactttatttttaatattaaaacagagaagtttttaaaataacaactgaaagcacattccaagttatctacaaggcactgctgtacctacagtgtgaccccttctgctactcatgatgtccagtttaacacacagaggacctcaagattctgtgaagtcttgcagctgtcaaaacagaaagcagaaactatgggtcagaggacatactccaaagtcaatttatgcatttacagtcttcctagcctaaagcattatctcataactttgtcaaaagttcaactttctacatttcattttctttaa

SEQ ID NO: 57 - DNA, 1400 bp, mus musculus
taggatgagcaacaacatcaagtaacctaatctctcagagctcccagggaataaactaccaaccaaagagtttacatggttggactcatggctcctgctactatgttgcagaggattgccttcttttgcaccaatgcgagggtaggtgcttggtcctgtggaggcttattgacccaaggaagggggatgcttgaagagtgaggcaggagtaagtgggtgggagggagagtaccctcttagaggcaaaggggaagggggatggaacgggggaggttgcagaggggagactggaaagggggacaatatttgaaatgtaaacaaataaaataatcaataataaaaaaatattcttaacttctcaaagccgttgccattttaccttcatgtcaatgaaggttagacacgtttaaaaatggtaacaaggcttcatttgatactatcaagtaaatagcctggcacggtgctttacaggctatgttatgaagaactgagtgtcaaatatgtcataattccatactttctcatattcagaaagcctaatttgatgtaatcttggctccacagctgcaatgattttccctgttagccccatgcccctaaacatttgaactcctttattatactggtaggtattatgtaatgaaagtagtttcaaatgaccgtaacataacaagacgtttactgctgctgaattgaaataccaggctcagcagatgaacaggttgcctagcaactgatactgcaagctccagtgactgctcatgcccactgagactgacaagggatccatcaccggttgcctgtaccttgctatttaagcaattctgagagtgagaccaaagatcctagaaggaaatgtgtgtgattaaacataaaatttgtggcatctatctctcctttttcatatctggcattcagattgcctttatagttagaaatacagtcagaaagttttctccctgaatttcttggactaaaaggggatgagaggaccatagagaatagagcaagtagaaaaactaatatttgaagagaataaaatacaaaatgaacttactgtaggtttttgacttcctgttttgtgtcagggtacaatttagtttgtctgagtcatagctcatacacacgtgactaggcatgtccaaaaatgtttaccttagaataaaacgaccatgaaatgcttcctgaatatctacacaggtggagtccccacgctccgctcactgttacatatgaaatcgccgccgtgtgtcacgctccaattcccaagcctcacagcactcagatttggagcaagagctttcttgtcactgagaatgagaccttttaaatggtctaagtaattaactcttacgaaataatcattctccatgttattccttattcgttagagctttcaa

SEQ ID NO: 58 - DNA, 1200 bp, mus musculus
atagtaatttaaaatcttcaaaatgtcttatagtccccaggatatgtctagggattggtttactgtgaattctgtgtctgtagaggaagtcatttgttagtgagttcatatgcttgctcaggtgctccctcagagcttgtaaacattatgcgtgatcacttacaatcgggaataataatgatgcaaataaaagttgtttgctcaggagctgaacaaggatgatagcaacaaaaatgccaaactagatgccagaaagccatgagacttcaaacttacacaaagaagaagaaaaatctacacagagagccataggcagctgagcaaagctgggagcaggacgggtgctcctccccagggaatgacacaccaattgccagtgctagatgaccagccctgaaaacatacatataagttacagtcaaatacatatatgcatgtagtaacaattaaagaataaaggagataatgaattcaaaggagagcagggagggctatacaagaagatttggagaagaaaagtaattaagttataatcttaaaaataaacagaagagcttctgaggcagcccccttttcgggctccagacatccagacaccttcccggccagaggataggtgtctgcccagcccgggagctctttgcctcagcatccgcagcggacatcttggtttgggactccactgaaagtgctctgcacaggtgagagtgtgcactacagaagctatcagcttctgggacaggtcctattttgggccttcatctttggccaggagggaggtccgaatgccagatatctgtgcaccttccctgtaagaggagagcttgcctgcagacagtgctctgaccactaaaactcagaggagagaactagtctcccaggtctgctgatagaggctaacagaatcacgagaggaacaatctctaaccagagacaactaaattaactaactccagagattaccagatggcgaaaggtaaacgaaagactcttaccaacagaaaccaagaccactcaccatcatcagaacccagcactcccaccttgcacagtccagggcaccccaacacaactgaaaagctagacctggatttaaaagcatatctcatgatgatggtagaggacatcaagaaagactttaataactcactcaaagaaaaacaggagaacactgctaaacagatagaagatgttaaagag

SEQ ID NO: 59 - DNA, 1200 bp, mus musculus
tcccatttctccttgttttcttcatcaagaaggttgctaactatttgaaagaagttctgtaaattaaatcagataagaagtttagtatcctctttgagaatgtactttgtgaaaaacccatctggaacaattctgttatatgactgtttgcagcattgctttacatcccgacacagtcttcatctttatgaccaatacagatgtggatgcttgcagccatccatcaaactgagcatggagtccccaatggaggagttaggggaaggactgaaggagctgaaggggttcataacccataggaagaacaatatcaaccaaccagacccccccccccccagaactcccagggactaaaccaccaaccaagagcacacatggagggacccatggctccagctgcatgtgtagcaggagattgtcttatctggcatcaatgggaggggatgccctggatcctgtggaggctcaatgacccagcataggggaatgctatggcgctgaggcagggatgggtcagtgggaaggcactctcatagaagcagagaggggtgggataggagttttgcagagggaaactgggaaggaggataacatttgaaatgtaaataaataaaataaccaatacaaaagaagtctcctcagcatcataattcctcaaacctgcatcccagtagcagccagaacaggtaagacactttttgttcacaatgacttgtcccattatcacctctactaccatctgtaatgtcatctgagagttattctttacaaatgttttattccttctctaaagaggtcacttggcacttgtctattacaagttatcttgtgaactgcaaaccaggactgctatctcactgtttatcttaggagtgtagttagagaaggacaatgggcaagcctgacctaggctcctcaggtgaagacttcctctgtcttttcctatttatggtatttttgcttttcagctaaccattgaaaagtgtaaagaaacatttaaatgttctggcaaaaagaacatgtacttttaaaatcacttgtttggatctctgacatctttttgaaggggtcaacatgtaacatgtatgatcttttaaaaagttccaaatcctttccagcatcctcagtgctaatggcaaaagacctcttgggttttaagtcttcatctagaattatgcaaatgatggtctgttttttatt

SEQ ID NO: 60 - DNA, 1000 bp, mus musculus
ttcaacctgaaaagatgcaaaataaatagacaagccaattccagaatttgatgagtcctgaccagagatctacaaagacttcccaacaccaggaaacaaacctgtacacatggggattgatcaaaaaattgaaaaatatttagatgagtgttgaaataataaatatagtggttggctcaggattaagaaaataaaagatatgcacatgactgggtataaaaaaataaatttccctttgcacacatgtttgtggatatcagtggttcctggtactagaataagaataaaatcatagctttcacatttgttatcacctttacatttatttaaacttaaatgagcattatagaaaccattctgcatgatttcaatcattattgcttaattttagcctggctttctacagaatttattcataaatcttagcatggataaaatagaactcaagttaacaaatagcagagcaggtcctaaatgtacctccaacaaaatatatgcgattaagatgaattctatgactgcttaaaatcaacatattgaaaaaaatcattgaaaactttgggctgagatgtaactcagaaaaatacatgtcccatatgcataaagccctaggtttggtccctaacaactgagctgagtgtgttggcatatttatacaatctgagcatttaggatgggaaaaagtatctgaaagttatggtaactcttggtttaatgaggtctagcctagcctgggatatgaaaatacctctgtacatgtgagcacgcgcatgcgggcacgcacaaacacacacacacacacacacacacacacacacacacacacacactcacaaacacaaacaggggtgaggagaaaagggaggagagggagagagatagagacagaaagacagagggagagacagagaggagacagacacagaaagagatagagagaaaataaatcaagaataaaaataaatgtatgattttagcccatttccccattgctgatggt

SEQ ID NO: 61 - DNA, 1000 bp, mus musculus
ataaaagagacactgcagtcaagactgcaatcccagagacataatcattatcttgcattatctgggaccaaaattgggctttatctgagtaaaatatattgtactgggtacataaattttcttagttctattactttgtctaaagtgtacatttaaatgttcaaaaggtgtgctgcaaatataatctttgtattatatttatgtatgtaacctttctagagctttctcactaagtaatcaataccacccaacaaacatattttaatacaaacctaagggttatgaaatgaagcaaatactgttgcattatgctatgtttaggtattggtccccatgtttaaacaagactatatggggcccagggtatgaaaatgtggtggtttgaatgtgcttggcccagggagtggcactattcggaggtttggccttgttggagtgggtatggccttgttagaagaagtgtgtcacggtggaagtggagtattcgaacctccacttaaccacatgggggtcagtcttctcatatttgcctttgcatcatgagatgtagaactttcagctcctccaatgcctgcctggacactgccatgcttctaaccatgatgatactgaactgaacctcagaacctgtaagccagcaccaattaaatgttttcatttataacagtgaaaaaaagaagcaaatactgttatgtattagtaagaatgctatctataacagtttaaaataataacaaatgaaaatagaccataagcttatttattatgtttctatatatcaatgtgtgtgtgtgtgtgtgtgtgtgcacatgtgtgccatgaaagcatgtgtcacagtacacacatgaaggccagatgacaagctgcaggagtgagttgtctctttctgtcatgtgagtgcttttaggagtcattattaaaccattcttaaccagggttactttaaattatggcatactccatgaagcaaatatcatgttaataattaggaagtataaat

SEQ ID NO: 62 - DNA, 1200 bp, mus musculus
ttatcaatccagtatcatctcttcctctcctcctagtatggccgcaagcaaatcctccctccattccaccttccccttctcttttgagaaccagaagctcccttctgggtttcagcccttccactacctttcccacaacacacatcaagtttcgggaggtcgaggtgcatcctcttccactgaggcttgatgtctggcagtctgtgggaggctgcaataggctcagggaaagccgttgctctagttgttggggggttgggggggaggtctgcatgatgtccaagctcatgtactacaaatgtgcaggagacctaggtacaagtcatgtttgctcattggttgatgatacagtctctgggagcaaccaagggtccaggttagttaactctgttggttttcttgtagagtccctgtcctcttctgtctattcccttaatccttctcctaactctttcttaatactccctgagctccacttaatatttggctgtgagtctctgcatctctttccataggctgctgctgcaagcctgcccctggctcaaatggacctgggtacacctgggaggcagactggagcttaaagagagagaactagatggtagagagaaaaatggagctaagtcaaggttcctgatcaaagctcaaatgtttaatagaaaactgtgcttataaaggggggaggcccatccccgcccctgcttttccattcttggagtctggaaccagctgcaggtgacaggtgcaggatagggtgtagtctcctgaatagctcaagggcctctcagcaggtagcagtgtcttgaaggagaacagcagctgtggctgaacaatagagtcatctaggcaggaaggctccaccctaggtaatctctttagtggcagcaaggtcaaagtctggatcagcctgtttcaggctgggtgagttacaggctgcattgtggagcctcccagaggacaggtatgctagtttcctgtctgtaaacataatagagtatcattaatagcatcacagaatagttcttgatcatgaactagttctcaatatgggagagtcattggttggccattccctcgatctctgttctttctttgtccctgcatctcttgtaggcaagaaacatttgaagttgaaggtttggtggatggtttgctgtccttattcctcaactgggatgctgccacttcaggatccttatg

SEQ ID NO: 63 - DNA, 1000 bp, mus musculus
tctctttgcctctgcaatcaagctctcccaataaatgtgtgcagaaggattgtgttgcagcgtcattcttgctggcaagccagggcacgtgaaagagcacacaagaggtgctaatcactcctcttttgtagcagcagttaattaacagtcaacagacactgctcatgaccagatgttctctagatgtcctttgcagccttggcacctaaaacaaaccaatctttcaaaagtcaacttcccatgaacctctttttcttccttcaatcttttctttatttacatttcaaatgttatcccctttcctagtttccccttcaaaaatccttatctcctcccacctccccctgctccccaactcatccactcctgcttcctggccctggcattctgctattctggggcatagaaccttcacagaaccaaggacctctcctcccattgatgaccaactaggccatcctctgcaacatatgcatctagagccatgagtccaaccatgtgtttttttcttacccaatcacaaggcttagaacccctgcttgtgttttgtttgtttatttgttttgttttccacctttaaaaaaccccttctcttagacttctgggttgctctcctatccatcaagaaagtttgtggcccaagctctcaagcttgaataaagactctcatgtgcttgcattggagttgtggttcctcatgatctctttggggtttttgcaatctgggcctaacatatgcatgtctgtacactatgtatgtgcctgatgctggaggaaggcagaagaaggtgacagatctcctccaactggagttatagatggctgtgaagcaccaattgagtgctaggaattgatcttgtgtcccgtcaaaaagcagtatgttatcttaactgctgagctattgttctactcagacagttgtccatagatccattatgtttttttagtgagtgttgtttctatacacacactggtggtcctcacttccaggtttaaattg

SEQ ID NO: 64 - DNA, 1000 bp, mus musculus
gcttctatctctttagcactgttctcctgtatttctttaagtgagttattaatgcccttcttaaaatcttctatcaccatcatgagatatgattttaaatctgcattttgctttttgggtgtgttggggtatccaggactcgtgttgtgcatactgggttctggtgttgcccagtgttcttggtttctgttcttaagattattatatttgacttttgccatctggaaatctctggtgtttatgttcaagctgtctctggttggagcttgatctgcctgtgattctgttagcctctgtcagcactcctgggagtccaactctcacctcagttccagtggtcagagcactctccacaggcaagctctcctcttgcagggcaggtgtccagtagtctggaactctgatccacctactgagttctggggtcagaaccctccctggaggccagctctcctttggcaaggaatgtgcccaggggtctgggtctcagctccacctcctggctggggatgaaggcccaactgaaccctgaccaagaagctctgttgcttctatctcccacatgctctcaggtgatcaggaggtcctgggtgtgctaggtgtcctatggggtggagagtcctctggtgtcctagatgcccttggcccccaatctgaatatattgcacaatatataagatattgtgggggtggggatggtcatggaatagatacaacatgaaagcaaaaccaggaaagagatgggagacaaatacagaccagaaagtgagagttgggggatgggcattggttatgggagctggagaacagaagagtaaccacagtgtatgcacggagcacatgtaacccattgctatatatgccaattcaaaagcaaaaacaaaggtgattacaaacagataagcaaatctggagttttagcacaggaaaatttcaggtttattcattggtttatatacatttgcatatggttacaattcatgtccttggttataactga

SEQ ID NO: 65 - DNA, 1600 bp, mus musculus
ctgatattaccacaaattaagtaccagacagtctaaaataggctcccaggaggaggaaaaaaaagaagccttccttggaccctggccccaggcagaagtaaggccaagatgaccaacagcatggcaccatgggtcccagtcaaggagctagccggagatgaccaccagtctggtgctgggggacagggggaacagatcatgctgaagatgacccctgcccaccaccataatacacatgaaacttaaaacttccaaaaacattcctgaggtgaccctagacaccctgtgacccttagtgccactaagatgagcaagtaagtagtggagtagtggaagaggaaaaaaaaaaaaacagaaatatgtgggcacaataaagagacacaaaactggagattcaagggtagtaaggaacagcctgatgtgagtagctggtgatgtcactttggaccaattgtagggtcctggcctggagatcatgtctgtgtctgtgcctctgaagcattaggaggtctcttaccatcaaatgccaagtggaaatctctggactgggctgtggtgtggatatactccgatgtgtctgaggtctctgcagaactaactttacctatcacctgggcatcatgggagtgctggccctagggatatgaaagcaggagagctaactttgtccatagtagcttcagtacttgggagagtggtccctgaaacttgcatgcgttgcagagtagatctgaccctgatagtggtggcagggtaagctggctccaagggtgtgcaagtaagagaactggacaaaagcttttctgccattcaagggcaggggatagatattctctcccactcttgctctttgccatctatagtaccctgaagagatggccctgaggtcatgaaagcagattcagccccgcccctcacctattgaagcactaaggagagtggacccagtgtaccttgcttgggtagcacagtagagatgacactatttgcatgggttgctggtgagctggccccaagggaatgagaatgggatatccaaacggctgaccagctcagacacctctcagggccagattaagaactttgaattagcctaccccaacatctaccacattgaagaactgttggagtgcatgaaggcactgctcatacagatccaaattatagtatctccatcaaacaggacaacaataggatgtctgagaggggtctcagtgtcatttcagtatggatagagaagcaggacccagaggtctcattctaatccaaatagccattgcaatgaaatttgcaaacaaagaaatatgtgcaaaagtgtatactgtgagacacactgagataaactacagcttctgcaataatttgttttttttttttaagttgggtgaggtattgtgacggtggagagaaaatatgatggggggagatgagtaggactggggtatatgatgtgaaattcccgaagaaccaataaaaaagctttaagaataaggagaaggaggaggaagaggatgggggaaggaagaggaagagagggaagggggaggaagaggggagaaggggagggggagggggaggaggaggaggaggagaagaccag

SEQ ID NO: 66 - DNA, 1000 bp, mus musculus
attcctctagaacagtgactctcagccttcctaatgctgtgatcctagaatacagtgcctcatgctgtggtgacacctaaccataaaattcttttgcttgctacttcttaactgtaattttgctactgctatgattgtaatccaactatctgggcttaggtgatccttgtaaaaggattcattgacctccaaaagtttttgcaacttgcaggttgagaacaactgaaggctctttctttactttcttttctctttacactgaaagtcggcttgttttgtttggggctcactgtgaggtgatgcttcaagtgttaaataacaggctggcgttagtaatgtggcaatctatgaatcagcacatctgtgttcatgctgatgagttcatgttcatgctcatgagttgaaactcatactttgtctagaatgaagttgatctgttcgtttaagatccctcaaagaagcaagaacaatataagtatagcaacttatttttatctctcttacagtgtacactgactgcatactctatatttcttcacagaaattctcaaaaattcccattcattagtgtggtggcttgaataagaatgactttctaaagcacatgtatttgaatgcatagggaatggcattttgaggtttgggagatgttgaagtagctgtgtccttgttggaaaaagtatgtcattggggggttggctttgtgccaaaggcactcactacctgtttgtagatcataatttacctcccagctatttctccagcaccatgcatgcctgctgccatggtctcagccatgataatcatggaccaagcctctctaactgtaagcttccagttgaatgtctttttttataagcattgcattagtcatggtgtgtcttcacagtaatagaatagtaactaagacaattaacttatcataattgattttcttaatagttaaccccaaatccaaacattactaattattcatttccacctattcccttttgactgc

SEQ ID NO: 67 - DNA, 1400 bp, mus musculus
ctacttgaacttttgtatatttatttattactggtaacaacattctaggaactaataaataccatgctaggtaggaggtagtttaacacactaaaaacttcttgacaacatgctacatactaggcagcagatgttggtaaaggagatggttcaagaataccagagaatttgggactacctatccaaaagtaaccctcctaggagggggcatatatgagcttacacttgtcttctgtcatctcacagagaggtggttttttatttgtttgtttcttttgttttgctttagaagtatactactctgtcataagaaatgttgtatcctaagtattattttgtcatttctcttggttatatcagaaataacaccatttgtggaggagagcctttgaataacaatagaagtcactgtgtttgtaagaagtctatgtctgataaaatgctgtgttactcacctagttttcatagtggaactactgaagggtgtgtgtgtgtgtgtgtgtgtgtgtgtgtgtgtgtgtgtgtgtgtgtgaataggctagtaccacataatatatagcaactctaacttaaactgattcagttaacctgctgaagtggaaatttctcatttcttttaacaacacagttgtgtcacttgatatctttctggaagctgccttgggagaggatgcgatgttttgcagaaaacagacacttggggaggggtgcatgatatttaaaagaatataaatggaacgtcacaaacagtgaaaggatgctcttgcattgcagctccgtgcagagcttcacttctctgctggtgcttgctggtatttgctggtcgctgctggtcctgacttcatagagagaaagacaccaaagacatttttgtggtattcgggctgattctggccacttctttgactattgctgatttggtggagccttgcagtttctattgtattaagctgccatagctgattcatgtttggtgtttgctattgatctggactgctggtatcttgacaatgaagagtggaattagcctaaaaaactactcctaaacaggtccacaatcccctttttttattaaccttctttctcctctacctctggctagaatggaggttgaagtatttaagaaccctaagtaaactaagttttaaaaagtctaagactataatgatagcattgttttgttgagttcagtcttgttagaacaaatggttgaagagccaaaaattgaatccagagttatcctgtatccttaaactggagttcaaaactacctacaaattgaaggaactgggacaatacacagtctgtaaactaatattttacatgtgatggaaaaactgggagcaagaagaacacagccacatcttcaaaataacataaagttataagttgcatgaaag

SEQ ID NO: 68 - DNA, 1000 bp, mus musculus
aaagtaaggtgggaacaagaggagtaggagattaggtggagcaaagatgtataaagatacaactggtactgggtcatctcagggataagctagaaaccaaatgcaatgaatactcccaagaatctataaaggtgatcctacggcaattagtaatggaaatatggagcctgaaatgccatcttctgtgttcatgcaagactccaagtggagggattgaaactctaactcagcccctaaaccttcaacctacaacttgtcctatctacagcatatactgtggtacaggtggtacagaaattgtgggagtggctaactaataactggttcaattagaaacccatgtcacaaaaggggtcccatccttgacattgccatgagggccaagacccagatgatggaaaagccggagacttaggatagaatcaaataagacaaaaggaaagtcactaaaattatttctaatgatatcgtgttatactcatcgttgatgcttagtccagttatcatcagagagggttcatccaacaactgacagaaactgattcagagaactatttccaaacattagggagtcaggaagtcatgaggaggaggtgaggaaggacagtaggggccagggagattaggaacatcataggacaaaacacaaaagcagttatcctagtctcagagaggatcacagagacggaatggacaaacagggatcctgcatcggtctgacctaggacctctgcatgtatattacagatgtgtagcatgggtttcttgtgggactgctcacagtgggagcaggggcaatctctgtttcttttctctgcttactactactgagatgcctcttccagctttaatatgaaggaggtgcctagtcccattacagcttgctacgccctatttggtttatatccataggaagcctgtccatttctgaagataaaaggaggattagatagggaaaggagataaggtaaaggttctaggagaggaagaagaagagaaa

SEQ ID NO: 69 - DNA, 1400 bp, mus musculus
ttttagatagaaaattgacaactaattttttaattaaaaacatcattagtatggaaaagctaagagtacactgatatttttttgcttagttttcttttaaacaagtttattttgtttgcttagttttcttttaaacaagcagcccttcatgaatattcatacatacatacagtttgatatatttgtaaaaccaaaatttgctaattaaatgaatacatttgttgggcatcataaagcatatggaaagagcaagaactcctatttatatattacttaacaaacttattgacataacgatgcgtgttttaatataactcctgggtatataggctagagaagctggccagagacatggaagattatctgtgtttcctatgtctgcttctatgtaacctcccccctcagcctgaaatcgggcagatcaggtttgactgttagcataaggagagcatcggtggtggagcctgccaccctatcattctgccactcccactgcgactaccttgccacctagctgttttggagccagcacgtggtcacctgaaactggactccaaggatgatttggggggaatgggccccttccccttcttcataacccagtgtcttggaaatagtaaaattgatccttgatcagactgatgtcttggttccactctttctctcgctgcctagttccctcttttctttcagattccaagatgcctcccaggctagaacccagacatgtgagccgctggtcagactcaacagattggcgaaccaactcgggactgggaaatggcagaggacatttggaagaagcactgctggtttggagctccatggaagaagaaaataaataaggaaaattcgtactggagaaggttggtacaggttaagatgaaacggagctaaaccttcacgctaatttcacttaggttaagcagtgaaattctcaggatctaggaataacaggcagttagccgcagcttgcagaagccgcttttttaggcgtgagaaaagaaagggtttaataaaagggatttaataatcaggcagatggcagcagtcagaaactgcatcaggcagcaggaaaatgtcccagaagcagagagaaatttcaggggtgccctgctttgtactctctgggccttacagcagaagttctctgccctctttgtgttttggtctgaggtcttgtctaatgtctgttgcaccaatctgttcacatgttcaattcatgtatgttcatgtccagtctgaatgaatgaattttctatgttttatgttggataataaagatggctaaaactttatctggtggttcatcaaagctgagagtggccacatgctttaaccaagaaacagacacacagcagtagggcccctgctggagaaactgttcttaaaagagagag

SEQ ID NO: 70 - DNA, 1000 bp, mus musculus
gggcttcattacattcaggaaagaagtaatcaggcaaaccctcgcgagaaacatcatagctaacatactatgaaaccctcctttttgtccctgactctctaaggcaagggctattgaacagtttcttatttgaaaggaaaactattaggttttattacagaattcaaaaggatatacaccagttttatttgatctttttggctgagaaaatataactgtttctgtaaaatgttcaatcatgttccttgttcacagcaccagacaagagtcagaagagactatcacaggatctgtcccagcaagtaaaggaacagccaagttagtatatacttctctcttggaaatcccaacattcataataaaagagaaagaaaaaaccaatataggtagcttaccagaactatctgaattccatctagcatttaactgagcatacaaaaagtattcatgtgtctactaactgatatctattagaccgggaaaagacctttgaagtattacaaatgataaaatgagatgattatgtaaaggtactaaatatgaatagcaaaaaaaaaaaaaaataaggatgcttccttgttgacagcaggagtaacaggctttctgagggataaatcccctactgggctgtccaatatcaagtgatcagccctgacatcattactgccctataaatgaccccacaagtagctaaaagaatcagatgcagatatttgcacccaaccaatggacagaagcagctgatccctgttgttgaattagggaaaggctgaaagaagctgaggaggagggcggccctttaggaggacaagcagtctcaatcaatctggacccccgaggtctctcaaacattggatcaccaaaaaggcagcatacaccagctgaaataagccccccaacatatatacagtagaggactccctggtctgtgttcattcagagatgatgcacctagccctcaagagactggtggccccagggagtttagaggtaaggtgga

SEQ ID NO: 71 - DNA, 1200 bp, mus musculus
acgactcaatcccacttgggaaagagaagaaaacaatcataagtggggagcggggggaggaattgggagggaaagtggacagggtgggagaaggagtagggggtagaagagggaaacctcatctggtattgagtgagcaaaatggactaaagccctgagggccagaagaaagaatgtaaacaggaaacctcaggaaataggactctgggggtacctcccaagatgcaccagagacctgggaggttagagactcctggaactcaaaggaagttgccttagatgaactgcccatcagtagggagagggaacttatagtgcccacctccagcaggaagacaggacatcaagtgagggatggtggttgacatcccacagtcacatctctgacccataattgttcctgtctgaaagaaattacaggtatagaaatggagaagagcctgtggaaaagaaggtccagtgacaggcccaaagtgggatacatctcaaggggaggtcccaaggcctgacactattactgatggtatggagagctcacaaaaaagggatctatcatgactgccctccaaaagacccaacaagcaggtgaaagagccaaatgcagaaatttccacccagccaagggacagaagcagctggtccctgttgctgaattagggaaggctgaaagaagctgaggagaagatcgatcttgcaggacgacaagcaatctcagttaatctagacccctgagatatctcaaacagtgaaccaccaaacagatagcatacatcagctgatttgagatccgcaacacatgaaaagtagagaacttctgggtctgtgttcattcagagatgatgcacctaaccctcaagagactagaggctccagggagtttagaggtcaggaatggtgggagtgggggcatccatgtggagactgggttgggtagggaggaggtgtaagaaatggaacagacagaggttagatgggtggatgattaatggactatggggtgtattataaaatttaagaaaaggaaaagaatattcacaaatgaaagaaaaagaaacataactttagaaggaaaagaaacttacagaacaccaaatagattgctccagaaaataaagattttgccccataagaaaaatgctaaacatgaagaacaagtgaagaatattaatgctgcatgataaaaaaagccaagtaacttac

SEQ ID NO: 72 - DNA, 1800 bp, mus musculus
gtgctaaaagtgataataaacatagagcaaatacttaaatagagatttgaaaaaatggagacaggtaatatataggaagaaactaaaataagaacagtaaatatgtgtaaccacaccccacagctgctggctgccatgaaattatatctattaaaaaaaaaaagcaaaacgttcacaggaatgaggagtgcatatgaatttacaaaactttacagaacatttaatattgctagaagtctgcaattagcaatgggattaagtatggttataatcataggtagtctttctatgtctcagcattagtggtctattatagattgggggtcataattcaagattatgcttcactatgcacttgtatatgcatacatctgtatatccgaatagtaagttgtataagtcattataatattcattgaatacagcctatatcagtcttcagattctaagttttgctaataatttcaaaaatattttttaattttttaaaattaaaataagatagtatgcattttccctctttctaccctgtctaacccttccaatgtatctgtcctatctctcaaattcattgcttgcattttttgttacattctgttaaagcaaattgttagataagtattgtgactaatgaaagctctcaaccccaattaaaacttaactgccttccccttggaacttggagaactctgtcgaagaagggaggacgacttgtgggattcaggtgttcacagatctcatatgggttcacaaagactgaagtcccagttcctgcataagtctgtgataggtcctctgcatatgtattgtggttgtgtagcatggtattgtctgtgtgactcctaacagtggagtagggatgtctctgacattgtctcctgccctagggacccatctcctcctactgggttgactcacccacccttgatatgagggtttgagcctacctttatcttgtcatgctgtgtttggcttacaacactggcaggcctgctcttttctgaagggaagggaagaggagcagatcttgaagagagcgaacatagaggagactgggagaaaaggaggaaggagaaactgtggttgctatgtaacagatgaaagaggtataaataagtaaaaaaagaaagaactaaagaacaaaagagggagatacagaaagaaaatggtacaaatctaaaagttgagcactgagtcaccagtggaggagctagagaaaggacacaaggagctgaaatggtttgcagcctcataggaggaacaacaatatgaactaaccagtaccaccacagctcccagggactaaaccaccaaccaaagggtacacatggagggacccattttactctcacaaaaacagatatgtagaccaagggaaaatagaagccatagcaacacatatacatccccagaatcatgtcattaataacaaaatgtgggaaatagactctttaaaaactaaactgtgaatcttgaaaaagaagataaaaatgtgccaaattgtaattgctgaaagttgtaatgtaattcaagattgtagaccttgaatttgctgagaaggattcagtagagatggctcagcacttaatgtttactctttgttcagaggacaaagtttgtgttagatgactcacagtttttatttttccaaatccagtatccaatatgttcaggcacctgaagttatgtacacacacacacacacacacacacacacacacactcacaagtatgataataatacatctttgaaaaaggcactactataagaaaagaggtaaaaatcctttaagctatggg

SEQ ID NO: 73 - DNA, 1000 bp, mus musculus
tccacccacgcacccacccacccacccacttctgtctttctgccctggcatttgccttcactggcgcccaaagaccttttgtctcactgatgtacaaggccgtcctatgccacatatgcagccagagccacgtgtcactccatgtgtagtctttggttggtgatccagtccccaggagtttcatcttttgaagcagtatttaaattcagtcagaaagtgattggttactacaattatgctcatgtatattgtaccaattgacatgtctcattaagttagttattgctttagttctcagggttcccagctagggaagattcatgctttttattttttaacaatttttattagatatttttttcttttgcatttcaaatgctaccctgaaagtcccctatagcctcgccaagccacactccccaacccacgctctcttgcttccaggccttggtgatcccctgtactggggcatatcaagtttgcaagaccaaggggcctctcttccagagctctgggggtactggttagttcatattattgttcctcttataggattgcagaccccttcagctccttgggtactttctctagctcctccattgggggccctgtgttccattcaatagatgattgtgagcatccacttctgtatttgccaggcactggcatagcctcacaagagagagctatattagggtcctgtcagcaaaatcttgctggcatatgcaataatgtctgtgtttggtggctgattatgggatggatccctgagtggggcagtctctggatggtccatccttccatccatgtaaaaggtgagttctgattgacatattataagaaatatatgatttgattatccctaagtatagcagtgattaaatatgtcatgttgaaagagaaataatcagaataactcagtactcatggagactatagcattacttttctatgcaaagtagtgttgtgatagcctatttgattttcaatagatttgtta

SEQ ID NO: 74 - DNA, 1200 bp, mus musculus
atatttattaagttcttcattctacctttgagctctgtaataccaaatattttatacttgtatgttcatatactacattagacatgtctttgctaattctcatacattgaaagcctctaagggattatataatgaaaacacctgtctgtaattgtagcttggctcagcccaagcttacacctttatctaatagaattctgattattgtaaacaagattgaagaaagtcaaacataggtcaagaggcagagcaaacaaccatttgacagagagtgaacataagaaaaatacagacgttgaggaactcaaggggatatacagcgagatgcacaggaggtagaatggagagacattaagattgggaggatttataagacagtggattagaagaactgttttgttttgttttgttgttgttgttgttttctttctggtatgtcagttgaggaggaagggtcagttgggtgttttctctgcctctcagccagcaggattctccccccccccacacacacacaccacactcacacatacatacaatacaatacaatacaatacaatacaatacaatacaatgcaacttaggatcaagtagaatgtagtaaatggattaatatccctcagcatatttttattacaaatatgattctagtggtgtctttaactgtggcctagtagatagatattctctgctataatatatattgagatagatatatgggcagatatagatgtgttgggaggtgagctcatgtgtctgtttgtctgtctgtctgtctgtctgtctctctctctctctgtctgtgtgtgtgtgtgtgtgagagagagagagagagagagagagagagagaggattctcagaaatcttgtgtgcttacatatgaaccatataagtaaactacttttcagatagcacatgcataatctggagcaaataacatttataaaatggtacaaacagaaaaatgattttcaagatagggaagtagaatgattaatctcttttgattgggtgtttcttttatttttaggggagagaaaaatcacattactttctgatttcatatttttaataaaacaaaaacaatccatttcacttccaggtgtgtgtgtgtgtgtgtgtgtttagaaataattggttatatcagaggatatgttagagtcttcaacattaatgtcctctgtgccaaagagatttacc

SEQ ID NO: 75 - DNA, 1000 bp, mus musculus
agtagggaaattacatttatcaattattaagaaatgattttatggtgggggtaacaacatcatgaggtgtggtgtaatacaactgcattgaagggtagaagcattaggaagggtgagaacccctgttttctgacaaatcaactgtgagggttgacagcaaaagggatttctgatgacaatacttgtccaatgatacaaatctctctctctctttctctctctctctctctcactctctctctctcacactcaaacacagacacacacacacacacacacacacacacagacacacacatacaccacacaaaataaaatttgaaaattggcaaatatctagctagcaacaggatagatggaaacttgagttttctttcctgtatatgtaggaaaattatgaattgatgacttgcattgaactgtatttttgggcaactggatgtggaatagaggaggatgctcacagacaaccatcgtactgagtatggggatcccaatggaggggttagagaaaggactgaagtagctgaagaggtttttatctacataggaagaacaacaatatcaaccaaccagaacccctagagctcccagggtccaaatcatcaaccaagaagtgcacacagagggacccatggatccagccacaaaagtagcagaggatggccttgtagggcatcaatgggaggaaaggctcttggtcctgtgaaggctcaatgccccagtgtaggggaatgccagggtgaggaggtaggaataggtaggtaggtgggaaagcaccctcatagaagcagggagagggggatgggatagggtatttctggaggggaaaccaggaaaggggataatatttgaaatgtagataaatataatatccaattttttaaaagaaggaagcagaactccaactgagggttttatttctgaaatgactcatgcctgcctctatattcttaacaatactagagataaaataagaagaaactattctcagattttt

SEQ ID NO: 76 - DNA, 1000 bp, mus musculus
aacctaggagttgtgacaatataatacttacttgtttttatggatagctaactttacttagcatgttttcatccatttgcaagcagggaaccttagttaatacacactgtgtgaagtcaacttaagcattaagaacaaaagttaattaactattaagataaaactgatagagttatggatataaaaaaagtttgataacaatcccattattagaatgagtagcttatgtataaatcaagggtggaatattatatgctacaaagtgaaaaaattcagttttgagaaatctacaattatgacatttattttttattggttattttatttacttacatttcaaatgttatcctccttcccagtttcccacacacatatcctacaccattctcctttccctttcttctatgtgggtgctcccccccccacacacacacacacattcctgcctcacaccctgtcctaaaatcccccttgttggggcatcaagtctccacaggaccaaaggcctatcttccattgatgtctgacaaagccatcctctactacacattctgttggagtcatgggtccctccatgtgtactctttgcttgatggttaagtccctgggagctctgggggatcggtttggttgatattgttgttcttccaaacctcttcagcttgttcagtctttcccataactcttcctttggagtcaccatgctcaagctgatgtttgcctgtaagcatccacatctgtattgggtagggtctggcaaagcctcccagcgaacagttgtatcaggctcctgtcagcaagcacttcttgccatcaacaagagtgtctgagtttggtgtctgtatatggttacagttttaagtaacaagtcaaatattccctaacaggagtccttgatattaaagagttatattatactttgcatctaattccccatgaataagaaattaaaagtacagcactaacaaaatgtatgtctattgctatcatgtcttaatat

SEQ ID NO: 77 - DNA, 1200 bp, mus musculus
ttttttttttttttttttttttttttttttttttggtttatgagacagggtttctctgtatagccctggctctcctggaactcactttgtagaccaggctggccttgaactcagaaatctgcctgtctctgcctaaaatgccttttacattaaggcagttgtgtatattttgggggacttctctagaataaaataattaaaacatgaagataaaaatcacagctgatgataatatttgtagattaatgtgaacttgtgaactctctttgcaggtctggagcctgggtatcctggtctatctccccagcagagggcagcacaaagtctaccttcttcatcttccatattaatctgcaaatccctctctacgttgttatcctttctggggtcggactcagggaaaacaccatcatcttcatcttcatcagtgtcctcttcactccactggaccctagctgcggtgtctcgggccctctgcttcagagctgctcttgcagtaagcaaaaacttttcctccttatccctggagatgagagatggctccacagtcatccaccataccttcagagcctcaaagacgcccctgggtcagcacaccatcttccccagtcttcctcctcgtccccatcactgttctgaattggtgctggacacttcttacctcgagcctgagcagctactgtgaataactcttcaagcaatgttttgaccccaggagacttatttggtttagagacttcacgagaccctgccctcttcttggctgctctgtttcaggcactacttcacagccttttgaaattctcatcactagctgcaggcaaaaatctgagcagtttggtctcttcacctttctggttttgggccttttggcctgacccatgtgtctccttcttcctaggatttaacttgtgcccagtgttaactgaaggctcagcttgcctggacctggttgaggcagacccagtacctccagccaaggcctgtgccacgtggtcttgaggaagagctgggattacattctttagtattataatcagcgcccttgagacaaatttaagctggtcttattattttaaggaaaactacataggacatatgttctctgtggaagtgatattatgtcagtcacatatgataagtgccaaacaatcaaagtcacagtttccagtgatagggctcactttaaagctaaaggtt

SEQ ID NO: 78 - DNA, 1000 bp, mus musculus
atgttttaatgagaattaaattaacaaactacataatactggagtaggttataacttaaaatacttaactagtccattagcagagtgtttctataagaatgggttagtctggaaagccctaaagtccttctggaaacagtaagacacaggcttagtaaatctttacagcatcagataccagtcaaaaccaaataagtaactctgaatactatggttatatacctataccaataccaatacattgtctataataagtagaaaacaagactgacctaactgctttttgatgacaacaaccaggatcagattcttctggctaagcaactagtcttcagcttatattttttatttccaactctataaaattctcaactgtacacagttttctccccaaaacagggtagtttctgattgttattgctatttcatataattttgagacaacttgttataaatagacaaaatatccatatagtacacaaagtcagattttgaaaatggcttgttaatattagcaaacatatgcaatgtattatctacaatatgctagtataattaaaatctgttgtactataatgtaggatcaaaactctttatcaggaatgtctctagaaaatcatttgttcagtttaccaaggtgttgatatgaacttctgtgtttgaggagggtgtatctgcccaagtagagggctagatcccatccaggacctggtacagggaggtgagtgggaggagtttgtgggttccacagaaggtagggagagatgggaggggaggatcctgctcatgatctgttgtagtggtagggactatcctcaaaattgggtctaggggaaaagggagatacttcttgataaaatagatgcatataatatgtgtgtgtgtgtgtgtgtgtgtgtgtgtgtgtgtgtgtgtgtgagaaaacaaatagttaaaatccataaaaccattttctaaaataaatttaagaaatatttcatcaagataaagcctttgttat

SEQ ID NO: 79 - DNA, 1200 bp, mus musculus
tatgaaatgaacaatgaggacaataatatgtatcacaatgaagatgaggaaaacttcatgaagcctcaactctacacaaagtactctgggtatataaggacagaagtcatcatcacatatattctagcatgatgaatctgcgccatttaaagagaatgccaagtttatcctatgcattgcattgttttttgcaaatgctgtgattttatttatttatttatttattcataaaaataattactatatttatttataaaccaaatgtcccaatcccacccccaccccctgattcccctcacagagttcttcacccccatcttccttcctctctgagaaattgctctctcctctttcctggtacagtattacctacctaattaggtgtatcttctcccactgaggacaaactaagcagtcctcttccacatatgtggcagtggcctcaggccagcctgtgtatgctcttggttggtgacttagtctctgggagctcccaggggtccagattaattgatactgctggtattcctatattggttgccattcactcacctctttcaatccttcccctaactcttccatagaggtctatgacctcagtctgatgattagctttaagtttctgcagctgtctcagtcggctctgggtagagtctctcagaggacagccatgctaggctcctgtctgcaagctcaacatggcatcagtaatagtgtcaggatttagaatcatcccatgtgatggatcctacattgagccagtcactggatggctcatcctttagtctctgctccatttttggtcctttatttccttttgacaggaacaattcttagccaaaaatttgaaggtgtccctgtccctccactggggaccctgtctaactactggaggtggtctcatcaggttcaatctccctactgtttggcatttcagctaacaggtttcacccccattgagtcctgggagcaatggtttacagctatcactctaacatgccgtagaatctgggctccatattagaaacgtttggagcactgatctatcaagattaaccagtaatattaatgcagaattggtgtgtttgaaggaaatgcaagttttcaaagctcaaaacttttctatgcatccactattagaaatggcaaatggggaggcattagaaggtgatttgcaaattcttactaccacggcttaaa

SEQ ID NO: 80 - DNA, 1400 bp, mus musculus
atggagtgagaaggactatggctggagttggaaagtagataagaatgggagttaggatagaattacactttaattttaaaaactaataaaaatagaaaaaataaaataacctacaaaggagttttatttaaaggtcatggtactttctgtagttttcagataatttcttcggtggttatctatgacttaacttatttctagtgtttaaagaacctgtcaaaaaatttaaatactctgctacataagtgtcagggcctttgggccagactgtttatgctctttattggatagcttagtttctagggtactttcagcaggtctaggttagttgacattgttgttcttcctatggggacgtcattcctattcagttcctttaattcttcccctaactcatctgtaggggttcctgacctcagcccaatgcttggctgtgagtatctgcctgtgtctcagtcagctgttggtagagactctccaaggacagtcatgctaggttactgtcttcaagcacatcattgcatcagtaataatgtcagggattggtgcctgcccatgcctaatcctgaagagacttgatgccctagaatggggagtcacgcagggggcaccatctcagaggctaaggggagggggatgagggaaataactcagtgagtgggaatgggggagaaacatttgggttgtgaataaacgaaaaataataataaaaagtgaacctggcctgagtatcaactgcagacatcttggttccaggactccgccacagtattctgcacaggtgagagtgtggactacagaagctaacagcttctgggacaggcaggatccacagagcttctgaggcagcccccttttcgggccccagacatccggacaccttcctggtcagagaataggtgtctgcctgcccaggagcactttgcctgagtatctgcatcggatatcttggttcctggactctgacacagtattctgcacaagtgagagtgtggactacagaaactaacagcttctgtggcaggctgaagcaacacagtttctgggataggtcctgcttttgggcttattcttcggccaggagggaggtccaaacaccagacatctgtgcacctttcttgtagagttctctgaccactgaaactcagaggagagatctagtctcacaggtctgctgataaaggctaacagaaccatgagaagaacaatatctaaccagagacaactaaatcaactaactccagagattaccagacggccaaaggtaaacataaggatcttactaacagaaaacaagaccactcagcatcatcagaacccagcactcccacctcacccagtacagggcaccccaacacacccgaaaagctaagctgggatttaaaagcatatctcatgat

SEQ ID NO: 81 - DNA, 1000 bp, mus musculus
gtttctctagcctcattggctctttcctccccccaacccccatcctcttctatagagttatctgagccctgcagaagacagagaggtttgttggacatatctcatagaattgtgagttacaagatgtaactgtccctgtcttagtcaggaaaagaaacatcatgactaaaaagcaagttggggaggaaagagtttattcatcttacactttccatattgctgttgatcactaaaggatgtcaggactgtaactcaagcaggtcaggagctaacgcagaggctattccaagcttttttccccaccggcaagaacacgctcaggacaacctgaatcttctgcggcaaagctgttattgcttacttatcaggagggaagaccccgaaccgggaaaatggtgctgcttatatagcccgcagtgtgacgtttcagcacctgatgtggcgtgacagctcctgattctttgctcgcccatcaccccattactacgtcgcgagatgggcagtgactaggcgtgagttcactcttgcacttgcacataaggcttgtttactagttacgcgcagtggaagccatcaccatcttataatggcgattgcttgcagcacgcatgcaattgctcgcagcatggctctccacaagaggccatggagtgattttacttactagcttgctttccctggtttgctcagcttgctttcttatacaacccaagactaccagcccagtgatgcaaccacccacaaggggccctgcgtgccttgttggctaattgagaaaatgccttacagctgcatctcataaaggcatttccttacctgaaactcctttctctgtgattactccagcttttgtcaagtggacataaaaaaccagccagtacatgtccctatattcctctcttattcatttactattctagccatgaactttggcaacattgatatttgaactgaccctataattttatccttatctggggtaacttatacttgtaatacc

SEQ ID NO: 82 - DNA, 1000 bp, mus musculus
aaagagaagtttgaataaaaatattttaaaacaatgatatacatagaattttttcatcttttcaaaaatttttattagatattgtctttatttacatttcaaatgttatcccctttcctagtttacccactgaaaacccaatattcccttacccctatccctgctcaccaacccacccactccctcttcctggccctggcattctcctgtattggggcatagaaccttcacaggaccaagggactcttctcccattgatgaccaactatgccaacctctactacatatacaactagagccatgagtggcatcatgtgttttcttcagttggtggtttggtccaagggagctctggagatactggttagttcatattgttgttcctctatggggctacaaaccccttcagctccttgcgtactttctctagttccttcattagtgaccctgtgctccatccaatggatgactgtgagcatccacttctgtatttgtcaggcactagcagagattcgcaggtgacagctttcttgggttcatgtcagcaagctcttgttggcatctgaaatagtgtttgggtttgatggttgtttatgggttggaaccccatgtgggtcagtctctagatggtcattccttctgtctctgcttcacactttgcccctgtaactcattccatgggttcccccttctaagaaggatcgaagggtcttccttcttcttcagtttcaagtgtcttacaaaatttaccttgagtatccccaacttgttagctaatatacacttattagtgaatgaatatcatgtgtgattttcttttatttcttcttcttcttcttcttcttcttcttcttcttcttcttcttcttcttcttcttcttcttctttctcctcctcctcctcctcttcctcctccttctcctccttcttcttctttttggattgggttatctcactcaagatgatatcctacagacctatccatttgtctaagaatttc

SEQ ID NO: 83 - DNA, 1600 bp, mus musculus
gtaaacaatattaaattgcatgttaaaaattattttatttgtcattattttacttgccccttatcagctctaacctacagaactggtatgttataattaaaaataataggtaatttttttaatttttaatttttattttttgggtttttgagacagggtttctttgtatactctggctgtcctggaactcactatgtagaccaggctggtctcaaattcagaaatccatatgcctctgcctcccgagtgctgggattaaaggcatgcaccaccatgccgagcagattattttattttgacaggacaaactttgaacttctggtgtgttggaagaatagaaaatactgttttaaaaataagtacattgtacatgcaaaatgcagagtaatttgaaaacaatcacttatttttgtatccatttgaacaaagaagtcagaataatattaacaacaaaatcattgaaattacataattttcttgaaagctgttaaaaatgaggggcttctctcttagaattgggaacaaaacacccatggaaggagtttcagagacaaagtttggagctgagacgaaacaatggaacatctagagactaccacacccggggatccatccaataatcagcctccaaactctgacaacattgtatacgccagcaagattttgctgaaaggaccctgatatagctgtctcttgtgaggctatgccagtgcctggcaaacacagaagtggaacagtcagctattggatggaacacagggcccccaatggaggagctagagaaagctccccaaggagctggaggggtctgcaaccctataggtggaacaacaatttgaactaaccagtacccccagagcttgtgtctctagctgcatatgtagcagacgatggcctagttggccatcattgggaagagaggccccttggtcttgcaaactttatatgccccagtgcaggagaacgccagggccaagaagtgggaatgggtaggtaggggaacagggtgtaggggagggtatgggggacttttgggatagcattgtaaatgtaaatgaagaaaatacctaattaaaacatgggggtctaaatgtctaaggggagagagagtgggtacctaggctgaaattactggaaaaccattagagtagaagcaaaataaaataaatcatttaatcactttatgaaaaagagaaaatgtttgttgctaacaaaaggtccacatattttgttaatctttgtcttaaccaccagcaaccatgtcaataaaaatatgtcagtggaataatgattttacttctagttgaattaaaacaaagaaagtcatgtaaaaatccaattcagctttattctgcaaacatattcatccaatcatcaaaatgtccatttgaaaaaaagagtatcttttttttaaaggtactctgtatacatagaaatataaaaaattagtacagggaaaatttaacctattttctttgcgaaaggagaattttaaagtgctgtcttcataagaacacaaaatgaactgataacgacgcattaggaacttgtagtattagtttaatcccgcctcatgttgcctgagaatttgtctatagct

SEQ ID NO: 84 - DNA, 1200 bp, mus musculus
aaccagactcctggcagaagttgtgttccactcactagaggtcttaggatctcgtgtggaatcctgtgtgggcccttgcgggtgtcaggcgactccgctggcaaggtagcccagggctcgagtggagcggaagggacttgtgccccagatcaagcccgggtagcctgcttccctatgtactgcagtctcaggttccgcgcgattggattggggaaggcgctgtgttccactcaccagaggtcttaggatcccgtggggagtcccgtgtgggcccttgcgggtgttgggcaagactctgctggcaaggtagcccggggctcgagtcgagcggaagggagaatagattcttttatgctctgtctacagcgtgagcaaagcccatgtgatgttggtagccaggagtagtgcttcatactgcttgtgacttgtgtgagagagaagcaggtggaaccaaaagtactgatggaggactcaggcaggccctgccgtggttctgcttcagttagagcaagaaagctcatctattcagctgtgtgtggccacatagctcatgctgcctcccacatgacctcagtgtgtatcctatacttctgctagcttgacagccctcatatatactcaatcaatcctgtaccttccagagaattccctattccatccatgtgctggttcctgtattgacattctattctgtctttgtcctgtcacagtgcaagatatgaacagtgccttcatagggtgagtattgactcctctgatcctggtgacattcctaaccgcaatcctccacacagaggcacatgtggtcttccaggcaggtaagctgacacctaggttgtttttggatcacgaattttgccttcacacaatccctcccactctcctcttgctttcctacaagatgtagagaatggagtgagggcagcatctccgggaaccacccagtacaccacactaggccactgtactgatcttctgccctgtactgttgttcagtaaatggtgatctcattctgaggttgacagagggcgtggcattcacagcactaagggtcacagaggcaaggatgtggctatacgagcctcattcattagagacactttagtaaagctcaaagcatacattgcacctcacacaataatagtgggagacttcaacacaccactttcttcaaaggacagatcgtggaaacagaaact

SEQ ID NO: 85 - DNA, 1600 bp, mus musculus
actgctcttgataacttgagattgagtttaccaagggaataagagagggtattggagaggtgatgatattaagacatgtgatccacatatgtgcatgccctggtggaatccatcatgctgctcaatggatatgcattaatttaaaagaggacttttactgctattaattaacatttccattctttttagtttaaactttccatataggttttctgtgaccatcctggcacacattgtggataaaattatcagtcaaacaggacaaatacacagtacacatgcacattctctttatgtgataacacatggagttaggctgtaatatttttatacattaaaatatgtctctgtgcatatatatatatggaaattactatgcaatctcactttttttattaaatgttttccttatttacatttaaaaagttatccgctaccctggtttcccctacaaaaagcccctagcccctagcccatccccctgcttcccaaccaacccactcccacttcctcgtccttgaaattccctacactggggcatcgagccttcacaggactgagggcctctcctcccattgatgaccaacaaggccatcctctgctacatatgcagctggatccatgagtcccttcatgtgtacacatgtttggtggtttagccctggaagctctgggggtactggtttgttcatattgttgttcctcctatggggctgcaaaccccttcatttccttgggtcctttctccagctcctccattggggaccctgtgctgagtccaatggttagctgtaagcatccacctctgtatttctcaggaactggcagagcctctcaggagacagttctatcaagctcctgtcagaaagcaatagttggcatccacagtagaatctgggtttggtgactgtctatgggatggatccccaggtggggaaggctctgtatggcctttccttcagtctatgtgtgggaagccacatgtgccgttgcagggtggcactggctaccgctggccaccacacatacataggcagtaaagatttttgccaagatgaggttttgagaattaaccactcagatgagagacatgttaaccaatcagatgagagacatgttaaccaatcagatgagagacatactaaccaatcagatgagggaagttaaccaatcagatgagagagaagttaaccaatcagatgtgagacgtgcaaatgaggtggtaagcataacccatgcataaccaatctgggtgtgaggcacgcctctcctaggcctatataagcagcaccggttctgggcttgggggtctcttcgcctctgcaatcaagctctcccaataaatgtgtgcagaaggatcctgttgcagcatcattcttgctggtgagtcagggcgtgtgcaagatctatgctctgaactttgtctttgtatctcctaccttgggtattttgttccctcttctaagaagaatcaaagtatccatactttggtgttccttcttcttgaacttcatgtggtgtgtgaattttattttgagtattttgagcttctggactaatatccacttatcagtaagatcataccatctgtgttcttttg

SEQ ID NO: 86 - DNA, 1000 bp, mus musculus
tcagaaaacaactttatgaatcaggaagaagtatggagagagaaacagctagaactggaggcacttgaaggtgagtgaaaacttcctgcaatctctgagggcgaccctagtgaaaactcctagtaatggaggatatacagtctgacctggtcatcttttgtagccaggcaaggcttccagcggtgggacttagttacttttaggttgtattattggctgaagaggtcctgtggggatccctacacaacccagactgctcgccctcgggaacctgactgtgggacgccactgcccaggacaacatccactcagatcactgaacttcattttccttatgtgaattctgacttctagtccccaaacagtaagtgttcattaggagatgagcaatggcagttaccccagagtgtcagagtctgcctgtctaggcaacaaggtaactatactggagagctcaggatgccctggagtccctgacaatgagcacacaaaggggaattgaaatgaagctcctgtgttccttagcatgactcttatccctctctggactaataatatagacatgtcatgaaatggggttcgcttttgtgtagagtctattggctagtgagaatggaagaaatcagatattttataaaatcaacattgatacattaaaaaaaaaaactatttcctgcttccttatttaaggagatttgaggtccatgaatactaagtgacctcaagggaaggttctttcctaactagttcctcctgctttcctttatatgggagaaggaacagcaggtgacaaaggtagacttctcattagggctggaatccacagatagatagagcaggcgaggctcaaatttaagaaaatctttctatataaacttcaagcaacactttctgaaaatccatgtaagccaaaatatgtaaagtttaacgagaaacaaaagaaaatcagataaaaggaaataaaatattcgtagtaatatagattgtaaaccatcttcct

SEQ ID NO: 87 - DNA, 1600 bp, mus musculus
acttattttgtgaaccatatttcctctttgctcctactctctctccccgctttacttctgatagattgccctgaatttcatccagaattttcagccctgccttaaccgcttgataacatgtgaaaaggaacaaaaaggctcctaacactagagaaagttcaaggccaaacataccttgtaaagctatttcccactttacttctgatagactgtcttgaatttcgttagaaagttcaaggccaggcgtaccttgtaaagctattccccactttacttctgatagactgtcttgaatttcgttagaaagttcaagaccagacttaccttgtaaagctatacttatgggtaccctgttccccagctgaagagttctgaattcacgcagttgaatccttctcaacagtctgtgttacgggaacacttcattaccaccgttccccagctgaagagttctgaatccacaccggatccttctcaacagtctgttttaccggaacctttatgaccgtgacccgcagttctggttccggaatgagggatcttccttgcaccggtgatggtaaccgtcccgggttttctcatcccaggatttctcatcccgggttttctcgtctcgggtttcagcaccaactcttacacgcgttctcgcgaccggccaggaagaacgcagcaaaccggaatcttctgcggcaaaactttattgcttacatcttcaggagcaagagtgcaagagagcaagagcgagggcaagagcgcaagagcgcaagagctttattgcttacatcttcaggagcaagaagcaagagccagagagagaatggcgaaaccccgtcccttttaaggagaattattctccgcctaggacgtattactccctgattggctgcagcccatcggccgagttgtcgtcatggggaaggcagagcacatggggtgaactactcttggcacatgcgcagattatttgtttaccacttagaacacaggatgtcagcaccatcttgcaacggcgaatgtgagggcggctccccacagaattgaataaaaccatccaagacataaaaagggaagtaggcacaataaagaaaacccaaagtgaggcaacactggagatagaaaccctaggaaagaaatctggaaacatagatgccagcatcagcaatagaatacaagagaggaaagagagaatcccaggtgcagatgttccatagagaacatctgcacaacaatcaaagaaaatacaaaacgcaaaaagatcctaactaaaaacatccaggaaatccaggaaacaatgagaagaccaaacctacggataataggagttgatgagaatgaagattttcaacttaaagggccagcaaatatcaacaaaattatagaagaaaacttcccaaacctaaagaatgacatgcccatgaacatacaagaagcctacagaactccaaatagactggaccagaaaagaaattcctcccgacacataataatcagaacaacaaatgtactaaataaagatagaatattaaaagcagtaagagagaaaggtcaagtaacatataaaggcaggcctattagaattacaccagacttttcactagag

SEQ ID NO: 88 - DNA, 1000 bp, mus musculus
tcaaatgctatctgaaagttccctataccctcccccgaccctgctccctacccatccattcccacttcttggccctggcgttcccctgtactggggcatatcaagtttgcaataccaaggggcctctcttcccactgatggccgactaggccatcttctgttacatatgcagctagagatatgagctctgggattactggttagttcataatgttgctctacctatagggttgcagaccccttcagctccttggggagctcctccactgggggccctgtgttccatcctgtagatgactgtgagcatccacttctgtattagccaggcactggcacagcctcacttgagacagctatatcagggtcctttcagcaaaatcttgctggcttatgcaatagtgtctgggtttctttatttacatttcaaatgtcatcccccttcctagtttcccttctgaaaattccctctctcctctcccctcccactgctcaccaacccatccactcccattcctggccctggcattcccctatactggggcatagacccttcactggaccaaaggcctctcctcccattgatgaccgactaggccatcctctgctacatatgcagctagagccacaaatcctaccatgtgttttctttgattggtggtttagtcccaaggagctctgagggtactggttagttcatattgatattcgttctatggggcttcagaccctttcagctccttcggtactttctctagctccttcattgggaaccctgtgctccatccaatggatgactgtgagcatccacttctgtatttgacagacactagcagagcctctcaggagacagctatatcaggctcctgtcagcaagctcttgttggaatctgccattgtgtctgggtttggtggttgtttatgggacggatccccaagtgaggcagtctctggatggtcattccttcagtctctgctccaaactaagtaagatccagaagta

SEQ ID NO: 89 - DNA, 1200 bp, mus musculus
tggctcagaaacttagaatgcccaagacacaatttgcaaaatatatgaggctcaagaagaaggaagaccaaagtgtggatacttcgtccctccttagaatggggaacaaaatacccatggaaggagttatagagacaaagtttggagcttagagggaaggaaagaccatccagagactgccccacccggggatccataccataagcagccaccaaaagcagacactattgcatatgccagcaagatttagctgacatgaccctattatagctgtctcttgtgaggttgtaccagtgcctggcaaatacagaggtggatgctcacagtcatctcttggatggagcacagggaccccaatggaggagctggagacagtacccaaggagctgaaggggtctgcaaccctatagaaggaacagcaatatgaactaacctgtactccctgagctcttgtttctagctgcatatgtagcagcagatgggctattcggccatcactgggaagagaggcccttggtcttacaaagattatatgccccactacaggggaatgccagggccaggaagcaggagtgggtggattggggagcagggcagggggagggtataggggacttttgggttagcatttgaaatgtaaatgaagaaaatacctaattaaaaaaaagtcttgggtcagtatttgttcttctgtttgtttgttttgtttttgtttttgttttgagactgggtttctctgtgtaccttggctgtcctggaactcactctgtagaccaggctggccttgatctcagaaattcacctgcctctgcctctgcctccaagcgctgggattaaaggcatgcgccaccacgcccagctagttttgttcttaacattccagctccccttctgattgcaacagtagcattacgatcatccatgactcattttcttcatagagtcattctccaaatagaacttaattcatctcaactacctattatttaagattgattttgacttcaaaacaatatcaggcaacaagctacttgtcagttggaatttaaaacttagagaagttaagtataaaaatcatttacatgtgatactacatgcaatttataattgaacatacataattatgtgatttatatgccaggaatgccatgcactggtgaataagtatatattggacagttgaagtgcggatatttatta

SEQ ID NO: 90 - DNA, 1000 bp, mus musculus
tgaccaaaagcacaaccacactaacaagagtagagaggttagcatgggaaccatacattctgataaggcagaattttattttgttagaaatggtatctgtggtaactagctagaggcctgggatgggagaagatacagacagtctatggggtgaacttagattagattcctgacagatggagatatggagactgagatgggcacctctggtagccagacaggatttctaggggaggaaacaggacatcactctacccacaagatcttcaaccccaaatttgtcttgcctacaagatgtgtagaaataacgttggaccagagaatgaaagaacagaaaaccaatgactgcccgaacttgagactcatcctgtttgagagagccaacccctgacactattaatgatgctctactatacttgagacaggaacctagaataaatgtctcctgagagtcctcttccagcagtggatgcaaacagatgtggagacattcagctaagcatcaagtggagtacaggaagtcttgtggaagaataggtgatagagggaggggtcaaggacaccacaggaagatccacagagtcaattaaattaggaccatgggggctcacagagcctggggcaccaaccagggagcatgcaggatctgaaccaagaccccctacatatttatggcaaatatgctgtatggtattcatctggttcccctagcaatagaaataataggggtgtctcagtctttgttccctatctttggattccctgtgccacttggactgattggttgggcatcagtgggaaatgtgcctaaacctgttgggttgtctgctcaggggtcaggtggtactcaagggtgggtttctcttctctgaatagagaagagtgctgtaattggaatgtaaagtgaataaaaaacaaagagagacatagaaagacagagagagagagagagaagaaaggaaagaaggaagggaggaaatgaatgacagatgagcacatg

SEQ ID NO: 91 - DNA, 1400 bp, mus musculus
ttaaaacgaaagtaatcacaattgattcagtcataacctttatgaatattaaacaagataatgcaggcaaaaggtgattaaaatgagaaagcagtgtagaaacttactttttaaatttatcatagtagaaaaacaatggatgactttctgaggaaaaaattgtgttagatatagtaatatgtcttttttgtttggatatataacctttcctcccttcatattttcccatatatgcctccctcatctacttcaagttcattgattctattttcactaattgttactttattcctaaatagcaccttgccaacccatataatgttcattttagtatgtctttgatgcatatattttgaacatagaatacatgccctggtacagtaaatgcaaatgatacacaaccctgtcgtatatatcataccttttaatcagttcatttcttttgtatgcactataacataaatggttgtcatggttgttaatttatttctgagccaacattatctcttcttcatttagcacagtagtttattcaactttcctagtgctgcaaaccttttatacagttatacatgttgtggtggaccccagcaacaaaattacttccattcccacctcataactgtgatagttgtcatgtaaatatctgtggttttcaatggtcttttgcaacccctgtgaaagagtcacttgaacccaaaggagtggcagcccacaggtggagaacgactgctagtacctttgccaacagcatttgtctgaaatgactgaatgaaattgagcagaaaagcacaccaggcaaatgcagccaggacacatttctaatccatgtgtaccgtttaaatatctgttccaccctgaccctgctacgtctgtaattttgtaatttctgctctgtaatccacttctctcgtccctgtgttcttcattgttttctctcttttacgtatgcaacatagaagcttgctgctaaatctagagcctttgaagtttcttctttaaaaattaacatggctatttccttccatttgagtgtcttctcaaatcttacatgggtagcaaatacttcaatttcaaatctaaagtaacttccttggttgccttctatcaggaaatactgttgtgacaggtccataacatcactgataactctatccaaaagagtgactcattgacctttccctctttcccaatttatttctcttatagatatttatagaatttagatcttatataagaagatagggaggaagatgataggtaggtgatagatcaatatgtagatgggtgaatagatagatagatagatagatagatagatagatagatagatagataaatagatagatagatagatagatagaagatagatggctagatagatagatagatgatagata

SEQ ID NO: 92 - DNA, 1000 bp, mus musculus
tcaagatagcaaatgcactattccctaatctactgaaaataacaataagtcacttttaaagtattgtcctggatgtgtcagagcatgtagcccctttaggtttctttgtttatatctacaccccaactttattgcctgatgtcataattttgttcatagaaggtatacaagaattcttatatgccacatacaaagtgaaaatatcgtaatatgtgaaagtactgtcttcatggtgctgtcttctgcattgtcagacaaacttaggtgttttaaatataatcaaatactcctatgctgctagtctcaccagacaagattgaaagaccactgaacccaagtggcaaattggagcaaacgttatttgtctataaaggctgcctcattctaaggtctacagggttcaagagatcagcactggacatggggaaggtgtgaatttcacaactcaggagtagagaatttggcagacaaataagcagcactacagaagcagaacataaacatatccagaaggtcataaaaaaaaaaatccctgaaacaaagagatggttaccatttcctggaagaaacagtacagaaacatttgtagttcaggttcaaggaagttgtactaaatgtagttcatatttaaatgtttaaatatgcttggcccacagagtggagctgtttggaattgtggcctcatttgagtaggagtggccttgtgtgagggtaggctttgagtccctcctcccagctgcctgggagactgtcagaattttccagattgcctttggatcaagatgtagaactcttggctctgtctctagcactgtatctacctagatgctgtcatgcttcttgccatgatgatagtggactgaacctttgaccctataagccagccccaattaaatgttgcccctataagtgttgctttggtcatagtctcttctcagcaatggaaacctaagacagtagggtataacctagtcatcgatgaacagaaatttaatcataa

SEQ ID NO: 93 - DNA, 1600 bp, mus musculus
gagttatttttgtccattatatagtcctccatcatcatcatgagagatgactttggatctatatattgcttttctggtgtgatggtgtattcaggactcgctatggtgggagagttgggttctgatgatgctaagtatccttggtttctgtgacttctgttcttatgattgcatcctgccatatgattatgtcaagtgctccctgccctcaatatatctgattaaagactgtccttcctgaaaccctggttgactcagaactcctcagagtccagctttctctgtgatcctgtgattccaggatactgtgatcctgagattctgggtgtgttagagtccttgccagtcaaccttcctctgagaccctgagatcctggtatgaccaaaatcctgggctcctgggctcctaagatcctgggcatgttacagcgcctgtaagtggtgcctcctctaaggtccatggtgctgtccactgagttccaaaccaaggtagaccagcactggaaggaactggagccgctgtttggatggggctcctgtgtccctcctcctgctggccccagacactcccagttgtgttggaacagatgttgtgttccactcaccagtgatcctaagatcctggaggcatgctagtgcacctggggtttggagagtcctctgtgatggtggaactgtctgccaagtttgtgcccaaggtggcccatagctggccctgataagaaagaatccaagctgctggttgggcaggtttcctgtatccctgctcctgttggctccaggccctcaggattgtgttggaagagatgctgtgttccactcaccagtgatcctaaaatcctgggcatggtagggcacctggggaggggcggtggagagtcatctcagtactgtgggaacatccttcaagttctcgtacaatgtggtccgccactttgagcttttaaagagatttttgaaattataaagatttttgaaattttaatgtgtttttaatattagaaactttgaaactgtagaaacttttaaaagttgaaagattttatattgtagcagttatatcttgtgtgtagtatgagatcttagggacaaaccagaaagggaagtttgttgtttaacagtgatgatgtatttatgtgtcaagctgacaaggtgtcaattgtgttggttgaacttgacagaagcttaagttactagagaaaaggaaacttcacctgagaaaatgctgccatccaattggcctataaacaaatctgtggggcattttcttgataaatgattgataagaaagatctcaggctatgggaagtggtgccatcctgggaaaggtggtcctatgatacaaaacaaagcaactgaacaagccaggaggagcaagccagtacgcagtgtttctctatgatcagtgctttatttcctgcccccagattccttacttgagttccttccctgtcttcactcagtggtggattgtgattataagctaaaatgaactcttcacccttagccccaagttgcttttggtcacagtattttatcacaacaaaagaaacccgaagacacagggcttcccatgaaaaagaaagtagtagtatatcct

SEQ ID NO: 94 - DNA, 1400 bp, mus musculus
ttataaatacatagcatatatatacacataccatatatatgtatatgtgcatatgtatagtaattgttttcatgctaagatatatagaataattcccctttaaagtatacggacaatgagttttaccattgacatatgacatagcctaaatataaaacgtttcaagtttctataagcttagactttatttccattgctgagtgtaaattgaaagcaaaagtctgagttctttcagtaacacaaggtttttttctaataaaagcatacagctaacaaaatgtacaggagaggcttattatgcatccaaagtgcgttagaaaatgtgagtctgggccacagcatctgggggagccatcttgggtccgggattccgcatagactagtctgtgcaggggagagtgtggactgcagaagctaacagcttctggctcaagtggaagccacagagcttctgggacagaccccatttcaggctccagacatccaggcaccttccctgccagaggagaggtgtctgccccgcccaggagggctttgccacagcatctaggggagtcatcttgggttcccagattccaccaagactggtctgcacaggtgagagtgtggactgcagaggctaacagcttctgggacagacagaagccacagagcttctggggcagaccatgtttcaggctccagacacctgggcaccttccctgccagaggagaagtgtacaccccacccaggagggcttcaccacagcatctgggggtgccatcttggctcccagatcccaccgagactattctgcacaggtgagagtgtggactacagaagctacacagattctgggacaagccatgtttctggccttcatcttctgccaggaggcaggtccgaacaacaaatatctgtccaccttccctgcaagaggagagcttgcctgcagagtgctctcatcactgaaactcaggagagatctagtcttccaggtctgctgatagaggctaacagaatcctgagaggaacaagctctaaccagagacaactataacaactaaatcgagagattaccatatggtgaaaggcaaacataagaattttactaacagaaaccaagaccactcaccatcatcagaacccagcactcccacctcagccagacctgggtactccaacacacccaaaaagctagacccgaatttaaaagcatatctcatgatgattgtatagaacatcaaggaggactttaataacttacttaaagaaatacaggagaacgctgctaaagagttacaagtccttaaagaaaaacaggaaaacacaacaaagagttggaagtccttaaagaaaaacaggaaaacacatccaaacaagtgatggaaatgaacaaaaccatactggacctaaaaag

SEQ ID NO: 95 - DNA, 1000 bp, mus musculus
acttgttaattgaatggccagctgaatcatgcttaatatttaagtcttggggcaactctctgttgatgtgtaaatgagattttagaagtctcagatcagctaagaataggtgtaacttccaagttcagatatgtggagagccgtgccccaagcaatcgcgtgtgtgctgccagtaatctctttggagagccgtgccgcgagcaatcgccattataagatggcgctggcctccactgtgcctaactagtaaacaagccttgtacgcaggtgcgagagtgaacttactcctagtcactcccattggggtgtaatagtggggtgatgggcgaacaacgaatcaggagctgtcacaccatatcaggtgctgaaacgtcatgctgtgggctctaaaagtggcgccattttcccagttcggggtcttcctgaagaagtaagcaataaagcttttgccacggaagattccggtttgttgcgtctttcttgccggtcgagtgggacgcaatacagatacaagctttctgtagctagaagatgcttgctccaattgttagaagtctgtggacggctccctggtttctacaaggtagtccttgggtgccaggggctgaagtcacagtgggagtggatgggaatcactggaggtggggcataggacaccataccatcttcaggtggatgtgagttgggtggaaatcaggctggaatattctaactacaattggaagcacaggatatcatgttctctcttggtgtcctggtgaatgggatggctggtgaatgggtatattggctctaggagttcctacttggggtctggctcacaggactgcacatagtccccaggagcaggacagtgggtagagtggctgatgggtgattaaacatctatgaggggcccttccaaggcctggtccacgggatgcctgtgttcccttggtagtgtggttgttgaggtgactggtgcataggcataaagactgactctttgggggttcctaat

SEQ ID NO: 96 - DNA, 1000 bp, mus musculus
ttgaactcatgagaactttgccaaattgtctgatgctctgcataaagctgactattgtgtgggagtttggtctgcccccatttgtcagctccattcttccaggtcccactgcctctagaacagtattagtaagatagtgataaaatgcttgaagaattgtaatgattcagtttcacagggtccagtgaatggttgcttggcctcatcactggggccagtggtgaagcggaccatcaggatgtcagtgtgaagttctgtctccctcatggtgtctgggtgacaaagagagtaacaggaaaagacagggtcccaatatctcctataccaggcctaaccctacgtcacttcagacactagctgtgaatttaagggtacacagatttcagcagattcttagaaaatcattgctctgcgttaaaggaaaaatggctggatatctaagaaggtctgtctgctacttgctgtcattcagactttctctcctctgtctagtcttagtgaaaatgaatggtcaatcatgtggcccctctggtacagatgtgtagcaagggtaggggtcaactggcagaaggtgccatgtgagggtgctgagaatgtgggcacaaaaacatgagcaactgtatgtaggtacttatgacagcttgagacaggaagttcaatgccaagttaaatactgtcaactcagagactgacagggctccactatgttcaatagatttgcacaaagacctctaatcgttcccaaagcttattttcaagatggctatttgtaccttgcctccttgaaacctggaggcttttcacataggattctttgctccataagtggcacttattgatcacctattgtgtatctggcgtctctgaagcttcttgacaatggcacactgtaacagcactttcaggtcgggtttcctagtccaattttaaaggttccaccttgaggtttagctcacctttcttatatatgatcaaaagcacagagggagccagtggataa

SEQ ID NO: 97 - DNA, 1200 bp, mus musculus
agttttaaacagttgtaatagaactatggtttttgtatctgtgtgttcactactattagggaagagatagatttttgtttgtattgtatcctggactattacggtacttccaacccaccacccacctaggatcccttataatttgctcagattcgtagattaccgtgtcttcaaccaatacttggatctcattttcagggctgctgacctaataccattaggactgttagaaaggtctcactgtagccctggctggtctcgagcttacctgtcggtcaggcaggccctgaactcaggactcagaagcagacccatcagtactggaattaaagttgtgcatcaccacacgcagcagacatcatgactttaaaaatgtgtagtgattctaagcacaactgaagttgagaagtgtggctttcttaatttgtccatcaaggggcaaagatagagatcccaaaccaggcaggccccctttgtgcatgcaaatgcatgtgcgcacgtgcgagcacacatggcacttggtaccatgtcatgctgtcagttgggaaggtgatggtcttagtctttgcagttggtttctactgtgtagcccaatatctggcctcctcccagtccccatgaggcaaccaggctgaggtgaatagagtcagtttaatgagaaaacattgatctgtataaaaaggtgctttgtgtgtcagctaagtgtcctcatttctgaggaattgtcatattgagtaggcttgaatgtctgtgttgcccacggcaccagtgtcaaggtgcacgctggctggcatgacagggcagggcctgccccatggaaagatacatgcccctttggagggaacacttagtcaggttatacttagtcaggttcttcaagtcgtcgtcataacaatggccataggctgccaaaattaatcaaaaaataactgctgcaaaatgggcatcagctggggctgttcaagaggccttcaccttttgcccttcactcagccttcagtgggggccctgcccgcagtacaggtttacaccagtgaaactggaaacagctgggagagaaagcagccacccgggagcctgtgtgaagtcctctttacactaccagctggcatgggaccagagagggatgtatactgttggcattgtcccaaagcaaggtgcaggactcctcagtgtgtagggcctacagagcctagtccc

SEQ ID NO: 98 - DNA, 1000 bp, mus musculus
acccactgagggaagagcgacccgcaagggatgaaatctctgaaggaaacgaatccaccttccctggaagtcatcaatcacattctctgagcccctcccccctccatgcttggtagtgactggcttgatcttgagaagttcctgtatagcagccacagctgcggttcggttcacaagtgccatgtctttcggtcatgaagacaatgccagtacagcctttctgttcttgcatctagcacccatggtgtcgggggaggcagttatcatttctcccccagactgggagttttggaggctgaatctgtgccctactagccttcatagatcttcatagactgcggctcagaatttctcaccagaagagactaagaggattgcgattgatataaaatgcctattaacaatcatattgcctactgttacagatgacagagctagatatgcacggaataagggatagctcaatgaaaggagcaatagggccaagtcatactgggaacactacaagggcaatattttgtttttttgtttttcgagacagggtttctctgtaagccctggctgtcctagagatcactttgtagaccaggctggcctcgaactcagaaatccgcctgcctctggctcccaagtgctgggattaaaggcgtgcgccaccacgcccggcaaatatgaggttgattgaccacttttcccttttttagcttttttttttgtccatgtggttgctgggatttgaactcaggacctttggaagagcaatcggtgctcttaaccactaacctatctctccagccccaatattttttaatgacacgggagttaagatattcaactagagcttcctaaaatatgaaagctctagttagactgctcttttgttgtggacattgtcacactaaacccagtgacgcacacctgagtcagatatttttgtgaaactgaggagagttggacactgctctatacaagctttgtaggtgtactgcgattctctaga

SEQ ID NO: 99 - DNA, 1600 bp, mus musculus
tattatcagtaggtttggtcttctcattgtgtcctggatttcctggatgttttgagttaggatctttttgtgttttgtattttctttgattgttgtgccgatgttctctatggaatcttctgcatctaagattctctcttccatctcttgtattctgttgctgatgcttgcctctatggttccagatttctttcctagggtttctatctccagagttgcctcactttgggttttctttactgtgtctacttccctttttaggtcttggatggttttattcaattccattacctgtttggtcgtgttttcttgcaattctttaaggaatttttgtgtttcctctttgtgttctacctgtttagctgtgttctactgtatttctttgagttattaaagtccttcttgatgtcctctaccatcatcataagatatgcttttaaattgggtcttgtttttcgggtgtgttgtggtgcctaggtggggtgggagtgctgtgttctgatgatggtgagtggtctagatttctgttagtaagattcttatgtttgcctttcaccatctggtaatctctgaagctagttgttatagttgtctctggttagagcttgttcctcaggtgactctgttagcctcttagcagacctgggagactagctctctccttagtttcagtggtcagtgtattctctgcaggcaagctctcctcttgcagggaaggtgcccagatatctggtgtttgaaccttcctcctggcagaagttgtgttccactcaccagaggtcttaagatccctggagggtcctgtgaggaccttgagggtgtccagaaactctgcacacaaggcaccctggtgctggagtggaccggaagggacttgtgcccctgatcaggctgggttatctgcttcactagttaatgcagtctcaggtcccgcatgattggattggagcagatgctgtgttccactcaccagaggtcttaggatcccgtgggggaatcctgtgtgggtccttgagggtgtctggagactctgcaggcaaggcagcctggtgctggagtagaccggaagggatttttgcccctgatcccacattgcatttttaaatgattttcctaggtataatcacttatatttaagagttgaaacatacatatagtatgttacagcaaaaaataaccttaaatttgcatatgcatacaaaaatcaagccattgtaaatatatttggcttgttgatgttctttggtataaaggtagattcaataattttccttttatccctatattcctgttttttatttgtatccttttcccccctttctccctcatactaggtataagagaaagaaggatagaggtaagaaaaaaggagaaacagaaacccatgaatctaacctcctttactttgtttcttccctgatcatgatcattaatgacttgtgtccaacccccttaaatgatgacagagttctatcacccatcaaatgaccaaaactcatccaccccatattttgggaatggggtgtcattctctcaaaattgtttcctgatctcttggagatattctcttttggggaaccttaagaaaactggaatattg

SEQ ID NO: 100 - DNA, 1000 bp, mus musculus
aaatcattgccataaacagaacgcctcatgattgcaggacaacaattgagtagagtgatgtatcatgtgatgttgtgcacacagaggtggatggtaagcatgagtgtcttttggtttgggagaggcatatcatctgaggttgcttaagggatttatattattggtctagtgagatgggtctgttgttaagagcacatttcactcttgtagaggacctaggttcaatttctcacactcacatcaggcggatcacagccctagaggaatgaggatcctctgtcgcagcctcctggggactccactcacgtgcgcatgctttaccctcctctactacacacacacacacacacacacacacacacacatactacatagaacataaataaagtttcctatttttaagagaggctggaaagctgtcttgtatagaatagcatcaaatggcattgccccaggctcctcttcctttaaataaagctgggagtttttctgtggatgaagaaacgccaccagcagatacgcatgggcagacacagtgtgagtatcctgtccccgggtagtgtaaagaacaaaaggaagtggacgatagagcttgtaccccatagtataaatgtatgtggtctggccagcttctaccgctgcagggggagcatgggagcaatatagtaatgaggagaagccatcagatcatcctgattatgcatagaagagctgccaaagtttttcaactttgcatgattaaaaaaaaaaaagtcaacaaactaatgatagactattccctaaccaaccccccaaacaacttgatcaatagagaatggctagcagctgctccactacaagcagaagacaaaggtggccaccctcaacactcagccaacatcgccagtgccctgccagacggaaaagaaagaacacaaatttaaattgaacaatagaattatccttttggaagactaattcccaaatagctagcttatgctctctctctctctctctctct

SEQ ID NO: 101 - DNA, 1000 bp, mus musculus
gatgtatcttggcatttgaattttcataatgctccattgtgattaaataaccttgaagctgctgatagatagattagttgttcccactgtgatagataggttgttctcagtatatcagaaactaacgttcaagggcattttcccatgcatgcactaatgaagggcctgcatcctcaaaagaccctagcttcattacttcacttattttctggttttgtgtttccatgatttgggaagagaagatgatctctttaccccatgaatatgccacccacctcataaatattcatagaaatgtctaaagcgtatatgttagccctacagtgctgctaactcactttttaatgttttttatttttaatcattttattcatttacattttaaatgatatctcctttcccagttaactctccacaactcccccatcccacccccacccccacccccaccacctttgcctctgtgagggagctcctccacccactcacccactcctgcctcactgctctagcatcctcctacactgggacatcaaacatcccaaagaaccaacggcctcccctcccattgattccagataaggccatcctctggtatatatgtgtctggagccatcggtccctccatgtatactctttgggggtttagtctctgggagctcggagtggtctggttagttggtattgttctttctacggggttgcaatccccttcagctccttcagtccctcccctagctcttccattggggtcaccaggcttgtctgatggttgcctgtgagtatctgcatctgtattggtcctgtgctggcagagcctctcagggaacggccataccaggctcctgtcagcaagtgcttcttagcatcagtgatagtgtcatggtttgccgcctcacttttgagtcaccccagtctccccacttctttggagtgcttccttgctttgctgtatcagctttctttaaactgtgtcttgcaactggtatatttgcttcca

SEQ ID NO: 102 - DNA, 1200 bp, mus musculus
cagtaatttatttccaaaaggtatttttaatttaacctaaaattcgagagaataagagtaacaaattatttccttgattatttaaacatctgaatatatatatatatgtatatacatatgttttgtaggagttatgactgaatgcatggcctctaaacaagtcatatttatagtatttaagaaatatttacgcttctgcccagtcttttctgctggggcagactcctagctcatctgctcccgtgaagacaccatattctgacctgtcctagaggacccactgcactcagagcagttggtaagacacccccactccccccacgttcaagagctgccactgggagcctagtggacttggactcaggacccatcacccaccaacaccctcccaccccccagcttcttccaattaccacttcccttccatcccttccgcctggtcctttctgctggggcagactcttggatagtcggctccagtgaaaataccatatcctaacccatcctagcggacccactgcactcagagcagctgaggatcagctgcactcggagcaactggacagcaacttgagtgatccactgaagacccaacagtctgaaggcctcctaggagatctactgcagcaaggacaacagatcagcagcttctttacccctgtgaaggcccccagttggaaggccccacaagtggtctgctacagccagggccacaggcctactgggagaaccgatgcaacccagagacaaaagaggcagactccagacggtcacacagaccaacaaacactaaggatatccagatggtgaaaaacaagtacaagacatacaacaaaagccaatatatgcgggcatcatcacaaccctaccacagcaagccctgaatacactaacataactgaaaatcaggaaatctgtcctaaaatactatctcatgaagataatagtcctttaaggaggatatcaatagctcacttaaagaaatacaggaaaatacagttaaacaggtgaaggaattgaataaagcgatctaagacctaaaagtggaagtagaaacactaaagaaaacacaaatgaaggcaaacctggaagtgaaaaacctaggagagaggtcaggaattactgatgtaaatatcaccaacagaatacaagagatagaagagagaatctcaggtgtagaagataccatagaaaagattg

SEQ ID NO: 103 - DNA, 1000 bp, mus musculus
caaaagtgattgattgtatagacacttttgatggcagtgtagcaagcagaaatggaccaagtatgagtagctgtccagagtagaactgagactgcagaaggcttgctctaagctggatcctggacctgatcactcatgtctgagacctaccatcactatcatctcctttcatgtgggctgctggaacattcttttttttttttttttgttatatggattttcatacttcttctttcttgtattagatattttctttatatacatttcaaatgctatcctgaaagttccctataccctcccctactgctgtaacattcttaaaactactctccttgcagttgatttttacatgtctcctaaggcccgaagtcattctggaaactgctcagatgtgtatattgtatatcagcttccatacccaagtgccccacccctgcgcccaccacagggaactgtgtagacgtggctctgccctaggcgtttgtatttgctgcgtctcgtctcccttctgtaactagagtgctaaactcataactactctcctgacctattatttcttggcacttaatgtgtcaattcttttaggatatgtgcatctcagacataggggtgcatttgtcttgctcacaaatacaatgtttaatgtatctccgtagggtcttggatttacttttacatgggagctctttaacatatagggatggagatacacacacacacacacacacacacacacacacacacacacacacacatattgtcaacttggcatggcatgagagtcatcaagagtcaattgagaaaattcctttggaagaccaagcaagactatagggcttttcctaattagccattaatgggagagggcccagccaattgtggatggtgccacccctgggcttgtgtcctgggttctataagcaggcaagctgagtaagccatgaggagcaagcagctaagcagctcctgtacccaagttcctgctctcttggagtcgctg

SEQ ID NO: 104 - DNA, 1000 bp, mus musculus
tggccttgttggaggaagtgtgtctgggtagggggtagggggagaggaagggggactttgaggtttcaaaaatccattctaatcccagagtcccccctctctctgtgcctactgatctgctgatcggatcaggatgcagttctcagttacttccccagcaccatgtctggctgcattcagccatgctccctgacatgataacagactgaactggaactaggcctctaattaaacgttttcttttgtaagagttgccttggttgttatgcctctccacatcaagaaaacaatgtctgagacagatacatttcaggacatgcaactggtggtcaaaattgcctctggggtttcagccttccagtctatcgattcaagtagacagagatcatctctttctagttgtaggaaaatgcactcatcttattgtccttaatttggtccacatttccattcaggaatgaatcgtcatgaacagatcacagtgctgtcattgttcagtcctggacgtcttttagggtcctagctgtcaggaaggaggaagagggtagctcttctgtgaaggacacccaggctgatgacatgtctggaatgtttctttgctgaggcaggagtggtggcaggaagaaaatgcaataaataacgatgcaaaactaaatgaagaatgaatgttatgtaaaagccccaagacagaaaatatcagtttaaaatgctgaccgacccaaagtgggatccagctcatgcggaggtcccaaggtctgacactagtactgaggctatgaagtgctcacaaaaagggacctagcatgactgtcctctgaaagacccaacaagcagctgaaagagtcagaggcagatacttgcacccaaccaatggacagaagcagctgaactatgttgttaaattaggaaaggctgaaagaagctgaggagaagggctaccctgtaggagaatcggcaggcctcagtctggacccctgagatctcccaaacactggaccac

SEQ ID NO: 105 - DNA, 1000 bp, mus musculus
gtccgagaatgaattggaatttaccagctcagtctctgccaacatggagaccaccaaagtgaacgggagtctggaagccaagtacaaatgatggaccgagtgtggactaacatttacagagaagtggaacacagacaacaccctgagctctgagatcaccgtggaagaccaccttgcttgtggactgaagctgacctttgattcatcttttttgcctaacactggggaaaaagatgctaatatcaagactgatacaagagggagcttatcaacctgggctgtgatgtggactttgacatcgctgaacttttcatccggggtgctctctggtgcttggctatgagggttggctggctggctaccagatgaattttgagacctcgaagttccaagtaacccagagcaactttgcaattggctacaagatggaagaattccagcttcgtactaatgtgaacgagggaacagagtttggtggctccatttaccagaaggtgaacaagaaatttgagactgctgtcaatctcgcctgaactgaaggaaacattaacactccctttggaatagcagccaagtatcaggtcgaccctgatgcctgctttttgaccaaagtgaacagctccagccttgggtacaatcagaccctaaaaccgggtatcaatctgacgctgtcagccctactggatggcaagaacatcaatacaggcagccacaagcttggtttaggactgcaatttcaagcataaatgaatttagtgtaccttttaatgttgtatgttggagatgcgggagttgataaatatcacgttagacctccaggctaagaatgactcggctttaaggtgtttaccatttcagaggtactgcagaaaccccattccagaaagggtcctttttagctgtaggcgtgggttgggaggagcctctatagagatgccaggctgcaagtggaatctgggaacctgtggaccctttgtaaatctgtatccagtccccagat

SEQ ID NO: 106 - DNA, 1200 bp, mus musculus
acaacccaatatcagcccttcctttcctcccagtacctcctcatacaagtccttcccctattccaccttacttttgagtaggggaagcccctctctggtattatacccctccctgccgctacctgctgggactaggcacatcctatcccactgagggcaaacaatgctgtccatttagcagtgtgtatccacaggcagctaagcagcaggctcagggacaatccttgttccagttgttgggggacctgcatgagggaccaagcttgggagaccaagctcctcatctgatatatgtgtgcaggggcctaggtccagcctgtgctcagtcttttggagcccccaagagtctagattagttgactctgttggttttcctgtagagtccttggcctcttcaggttcctcaatcttcctcccaactcttttgtaagaagctccatctaatgtttgggtgtgagtctctgcatctttcctttgactgttgggtggaacctcttagaggacagttatgctaggttcctgtctacaagcataatggaatatcaataatagtgtcagggattgattcttgcccatgggatgggtctcagtttggggcagtcattggttggccattccctcagcctttgttctgtcttcaaccttgcacatcttgtaggtagggcacattttgtgcttaaggctttgtgggtttgttgttgcccttatcctcacactggggttcctgtctggctacaggaagtgaacacttcaggatctatattccccactgctagcaatctcagctagagtgacccccatagaccctcttgggtctctccccatccaagatctctgatttgtgctagagattgcccttccccgagttgatctcagttctctctcccctgctctccctacatatggtccccgtcccgctcccctcccaattcctttttccatccagttccctccttctatcaaccttgatatttctattcactttatgtgaaagatgtatatgctgtgatttgcttggtatgaaagaagacaaaagctgttcagtgtattaaaatgtcctgccttgtaggtataattgatgcatatatgtttcctgtgactgatataagaaaatgccaaaggctgggtaataaaaacaatagcaatttatttccttccaagttgtgggcctcgaatcctagcatagatatccacgtatcc

SEQ ID NO: 107 - DNA, 1200 bp, mus musculus
ataatattttatgtttgttgtataaatgtctcacaacctcattgaaaattgtatacattagtgtgtcagatacaggtttctgaatgcttctttttgaatgaaggagaatctgaatgaaaattgacttattacaatatacaaatcgatgcttttcatacttagaaaatgggatgtatgctatattccatgaaaattttattttagttcctattattattattattattattatttatctttttctaacagtctagtcatgatccccctcctggtctgtcctctgactgttccttatcccatgcctccttccttgtctccaagggaaatctcaccactcccctaaccccatctcatcagaattccccactccctgaggcctcaagtctcttgggggctaggtgtgtcttctccactgagaccagactaggcagtcctctgccatatatgagtcaggggcctcatatcagttagtgtatgctgcctggttggtggcccaatgtccgaagaatcaagggatccaggtcagttgagactgctggtcttcttatgaggctatccacctcctcagcttcctttggtccctcctcagttcaaccacaaagtcctatgaccattggttgggtgcaaatatctgcatctgtcactttcagctgcttgttgggcctttcacagggcagtcttgctaggttcctatctgcaagcacactaccagaactgatcaaaaggaacacgagcctctggtcaggaagggctctgttgtccttgttcctgctgtcacaggcctgtcacaattggattggaaaggatgttgtgttccactcaccagttatcctaagatcctgtggagagtcttcttaggcaccatgggggtgtcagccaactctgtgcccaaggtgaccccgcatttttcttatttgtctttgtaagaagattgcaggatttatttttacttttttttttgttgttgttgctctttttatttattatttacatgctaatctctccattggaagttttgtctggttataggagatggccagttcaggttccatatccctcattgcaaggaggatagggttacctttatagattcctgggtgtatgcattatcctagatatctagcttgtgtcagagattctcccccacccagtttgctttccctctgttctcttaccatatcaaccttgtccccatcccca

SEQ ID NO: 108 - DNA, 1200 bp, mus musculus
tggccttttctttgaagtacaaaatgtatcactttttaagttttagaaagtctataggatatgtttttgaaaaccttaaagtcacaacaataaactgaagcattagtattaggattttacaatacaaaaatataatgctttttcaggagtgtaccatgtacttaaattatagatacatgcttctgtccagtactttctgctagtgcaggctcttagctgttctaatccagtgaagataccataccctgacacatgttagaggacctgctaaactcaaagtatttggtaagaacactgcctctctccagactcccagagctgctgcttgagccccgtggacttgggacttaacacccaccaaaaccctccccaacgccccctcgaataccacttcccttttgtcccttctgccccttttgctccaccctttctgctgaggccgactcttagctggtctgctccagtgaagacatcatatcttgacccatcctagaggacccactgcactcagagcagtagaggatccactacactcagaataattgagaatcagctgtactcagagcagttggacaacagcttgactgctccactgaacacccaacagtctgaaggcctcccagaagatctactgcagccagggcaacagatcagcagcttctctgaccctgtgaagagcccccagttggaaggccccacaggtggtctgctacagccaaggctacagacctaccaggatatctgaagcatgccagggacaaaagaggcagactccatacagtctccctgcccaaaaaacaccagggatatccagatgaagaaaggcaaacacaagaacataagcaagagaagccaatatacgtggacatcatgagaacacagttctcccaccattgcaagtcctgaatataacagcatatctgaacatcaggaagcagacataatcctatctcatgaagataatagagtcctttaaggaagatatcactaactctctgaaagaaatacaggaaaacacaggtaaacaggttaaggaattgagtgaaataatccaagacctaaaagtggaagtaaaaacaataaagaaaacaaaaaatggaggcaaacctggaaatggaaagcctaggaaagaggtcaggaattacagatgtaagtatcaccaactgaatacaagagatagaagaaagaatgtcagatgta

SEQ ID NO: 109 - DNA, 1000 bp, mus musculus
cctcagtcccacttgggagggataagaaagcaatcacaagtgtggagggagtaagggtggtgcctgagagggaaagtgggcagacatggggtgaggtagtgtggggaagaggggaatctgatctggtattgggtgagggaaaaggactgaagccctgagggccagcagaaagaataggagcaggcaacctcaggagataggaagttgatgggaccctccagaacgcaccagagacctgcgaggtgagagactctcaggactcaaaggtggggactttgaatgaaataccagggagagggaacttatatagcctacctccagaaggaagaaagggtatcaaatgagggagagggaagccatcccacagtcacagctctgacccataattgttcctgactgaaagaattacagggatggaaatggagaggagcctgaggaaaagaagttccaggacaggcctaaagctagatcctcctcaaggggaggtcccaaggcctgacactattattaaggctatggagcactcacaaaaaggaacctagcatgactgcactctggaagatccaacaagtagctgaaagcatcagatgcagatatttgcagccaaccaatggacagaaacagctgacccctgttgttgaattaggaagggctaaaagaagctgaggagaagggtgatcctgtaggaggaccaccagtctcaattaatctggacccctgagatctctcaaacacgggacaactaaacaggtaacatgcagcagctgatataaggtccccaattcacatacaatagaggactgcagggtctgtgttcattcagagatgatgcacctaaccttcaagagactggatggaccagggagtttagaggtcaggtggcatggggatggggacatccacatggagacatgggggtggggagtaggtatgggatgtggagcactcagagggtggacaggggtagggaatacaatatggagtataaaaattcattaat

SEQ ID NO: 110 - DNA, 1000 bp, mus musculus
tccttaagttccttaagattattttaagagagcaacagaaaatagagccaagacagcaatagtggttttttaatttaattttagttatttatgagaatgcagtcaagttatgttgcatatagtttaaaaaatatgctagctctttctcaagagctctgccttagctccctcaacctcttgcacctagctcctccaagctgccaatggccaccctggctctgtcctttcttctttccacatggaaaacaccagacagccttaatgttttaaactgtccagatattccaatggcttggcaaagaatgtacttctccatccttcttggcctcttcccatagcagaggctacaaactataggttccctgagatcttcatgcctgctgcttcctgtgctccgccacctactctgcctcttccctcttattcacttctcttcctcatgggatctagaagttccaactgttttcctttgcccagcaattggctttcctcttctttattgacacaatcaagatccaattagggaatcaatacctcctcctacaaattatctattaagaatgctacagaacctaggaatattagaagattttccacatacacactccaaaaatgaagagcaaatcctaactagaaatatatggcagtattgatcactgacaatattggaagcacagattgaggatatcaacaaatagctttattttggtaataatccaggggttgctggagaaagaaaactttttcctataagttgaaaattggttaagcatataaatagtccaaggggaaattacaatgaagtgcagcagagtaaaattagagtctgtgacaatgaaacatggaagaatattaagaagaaatctgtgagaaatcaatgatttgcataccagaatgttgtgctgagtttgagaaaggagagtgcatatcacatgcaacttgaaatgatctcactgtgataggattaagtggtttgaaggaatgataaaattcaatatga

SEQ ID NO: 111 - DNA, 1200 bp, mus musculus
ctctacatccattcctacaactcccagagaaagcctaactcccaggtgctctgaaatgcccaggatgacagaagaggctacaacatctgccccaacacccagagtaactgggtccctgaggatccagggatacaggaacctctatccagccagtgacacgggttccttccggcctgaaactgtgccctgagtagacattgggcgctggctctttaccaactcatataacacccagaggaagcctgactctcagatgccatgaaatgcccggggtcacagaaatacaggatcacagaggaagctcaactcccaggagatcggacactcccaggagcactggagttctgacacactcaagaacacagttgaggccacaacacctttcccaacacccagcataactgggacacccacaggaaccagggaaacacaaacccatgcccagccagaggcacaggtttattccagcttgcaactgtgcccaaagtaaatccagggcactggctccccatgcacccctgcaacacccagagaaagcttgacccccagagttatgacaaaacagtatctcaggagcttgatcacatcaggatttcaggattccagaggaagcttgactcccaagagctctgacacataaagaatcacaggatcccagtgatagctggactctgagcagttctgaaaaaacaaggatcacaggaaggaaaggcttcagtcagagacagcaagggcaggtagcagtagagataaccagatggcaagaggcaaacacaagaacataaacaattgaaaccaaggctacttggcatcaacagaacccagttctccaactacaccaagtcttggatactcgatcacaccagaaaaccaagatttggatttaaagtcacacctcatggtgatgatagaaaactttaagaaggacatacataacttccataaataaatacaaaagaaatacagaggtaaacaggtagaaacacttaaagaggaaaaacaaaaatccattaaagaattacaggaaaacacaaccaaaatggtaaaggaattgaacaaaaccatccaggattgataaaagaaaatagaaccaataaaaaaatcaaaaaaggagacaaccatggagattgaaaacctaggagagagaacaagagacatacatacaagcatcacaaacagaatacaagagatagaagagag

SEQ ID NO: 112 - DNA, 1200 bp, mus musculus
tctatgcctaagattctctcttctatctcttctattctgttagtgatgcctgatctctttcctaagtgcccatctcccaagttgcctccctttgtgttttctttattgtttctatttccatttttagttctattccttcccctgcttgattgcattttcctgtatttctttaagcaatttatttctttcttcgatatggctttctgtttgccagtgttctcctgtatttctttaagggagttctttatattctccttaaaagcctctatcatcttcatgagatgggattttagggcagtatctcacttttcatgggtattagggttgccaagacttgttgtggtaggaaaactgggttctgatggtgtcaaattgcattgggttctgtcacttatgatcttgtgtttgcctctggccacctggttctctctggtgttaactggcctgactgtctctgactggaactggcctccttgaaggcaggtagagccctgtgacctaagttagagctggtctccttggaggcaggcagtgttgccctcttgtgcctcttgttagagcaagcctcctgtgtccctggttactatgaccttcggtgcccctggttactgcaaacttcctgtacccttggttactatggaccacctgggaggcttgcacggtgtagtgattgggcatgtatagggctactactctggcctggggtagggggaatggaatagaaggtaggtggagtctagggtggttgtaaggttagatttcatgtctgttgggttgtgtgggtgtcccagctagtgtgggtacttgggtgaaattctcacctgtgtctttggtcacttcagacctcctgagaagcattcaggctacagcatttgaacaggtattgggcgggctgctgatctggcccaagtaaagaagtgtgctaaaaggaaagtctggtgaattgtttttatagcttattttatttaatttgttttgtgtttttaagttttatatgtatttaataaaataataaaaattgttttattatatccaatatcagataatgtgaaatatgtctgtatatgaatccataatgatctctttatctaaaattcctaattgtagtaaaaattattaaaaatatgcacacatatgttcaagtgactatttttaggtgagggaagaaagaatggtcaaggtttcagaactgcccaacat

SEQ ID NO: 113 - DNA, 1600 bp, mus musculus
agcgcagaggaaatccaggcaagccatttccatctgccctggggcctgtctctacaactctgacacactccctgagggggaaaaaaatcaggtgtccactagtgtagggacttatatcttcatcttctattcaattctattgatcaacatagctgtttttaattcaatatcatgctgttcttattaccatggtgcttgaattcaacttgagatcagaacagtgatactactaaccattcttttattattcaggattgttttagctattctgagttttttgtgttcccatataaagctgaaaattttccattcaagttctttgtagaataatgttggaattttgatgggattgctttgaatctttacattactttgataggaatgtcattttactatgttaatcctaccattccacaagcctggaacatctttcaatcttctgatatcttcttcattgactttcttcaatgttggagccggcctgtggctctcatgtccgggttcgagcctgggaggcaactggagctgaaaaagaagagcgaatctaggtgggttgagaaataatggaaccaagacacgctagtctgttcaaggttccaatgtttaattaaaaagtctgctcttataaagagggaaacccatcccctatcacgccaagtttcttgatgttgtcagcacagccttttagcagcaattcgccagattcacaggttgtagttaactctggaaagtcttggagaaccagttcagcctcacggcagatggcaggcaatatcacatcaaaagaaactatttgagtcagagaagcagcacggcaggtggccctgcctcagtggcatacagtctgaaccagcctgcctaggctgaaggaggttacatttccccccctttaaataatattaaataaaactggactgaggcataaattttatttttgctctatagtcctgcctgggagttatggtggctggcagctgtgcctgtcttaggatctcagattttcccaaaccatccaattccatcttggaggctacatgcagctagtttgtgttatatttcacacaaacatggctctgtggtgtgttatcaacagccacggccttttggcatgtacatctgtcttagattgatatggctcagaaatctggttgcccgtcattgactaaccagcccttatagcacaccttattcccaattcagacaaagaccacaatatgtacttagaatgcttcttggtgaagattaataactgccacctgcgctgttagaggcaaggctttacacctgctgcagttaggctgaacagcgtggctgacctgcttaagaaacaaaggtggggcagtgaaaagcaacagtataaaagcttctttggagaagtccaggtactccattcagttgcaaattaacaatgaccaagctagatctgagctcccagtgtgaaggagctggccttgagaatcacagaaaggctgtgatcttcctgggagaggaagctgtgctccaaattaactttgttaggtaaataagaatatttagctatctttaatatgaatctctaacactggagttattactagaccagtctaagattgagttagaa

SEQ ID NO: 114 - DNA, 1000 bp, mus musculus
ctttgtggctaggggtggaataaattgcactttttctaacatgtggtgcttctcgctttctagtatgtcgaagttcaccttcattatcaggatcaagttcttggtgtccatggccaagctcatgaccactgtgctcaggaagatgcgcatgaggatggccagggctatgtacacggtcaagtttgtgaacccggttatgctcatattgttcactgtgatcatggttggggaggaaacctggtgtattaacctccgagttttctttcttcctcttccctttttctttcctcctgaccttcactgacttcacttcagactgctcttgtgttttattggtctctggtgaagggctgtgaccgggctccccatgctcactgtgagcaacggagtcattatgaacgtgacgagtagtgttgtgatccaggtgatgatgcaaacgatggcgatgatggaagcggtgattgcggtcatgcaggtgtttatcatcagctttgatgggcagttcagctgcctctttctctggatcacatttgtggtttctttttgatgtcacactggttgtagtatgattttctgcatttaaatgattgtgaaaatgctggtgggtatgcgaatggaaatgctttccctcttgcactgccagaatgtctaagtgagaaacatgatcatggccaaggtcctcgtgattaatctcaacgactttgatctctccaaggcccaagtttgttaaaagtttctccagaccaaaaaatgataatcttccattttcaccataacggtcaaaaagtttttcaatatagtactttttttcattttcagcatcctgcactgaaaatttgcttgactctgactctgtcatcccacgatgatgtctgtgaagctcctcagggccatggtcatggtcttcatggcagtggttgcaatgatggaaaataaatgtcagtaaacagatgaggcaaaactttgtgtgtatatgcaccttcatttctacttttcctac

SEQ ID NO: 115 - DNA, 1000 bp, mus musculus
cccaaaagatttggtctctcactctctagggccgaggtctccaaagcctctcactctccacattgcctagttgtggagttctttcttaatagttctttgaccagtttgcagttggaccaaggtgggaaataaactgacatcatagtgaccaggatgtagcagagtgttggggctggcctgcggctctcatgtccgggttcgagcctgggaggcatcttagaactggaagagaagagggaatctaggcaggctgagaaataacggaaccaagacaactagtctgctcaaggttcaaatttttaatggcggacacgctttataaaggagaggggaaaacccattcccgccaaatcatccttggagcccagctgcaggtgaccacatgtagtctcctgaatagctaggccgactcccagcaggtagcagtagcagcaatagctgaacaatagagtgatccagggaggcatgctccaccctaagtaatctccttagtggcaagcaaagtcaagatctggctcagcctgcttcaggctgtgggaggctacagcagagttttccttgattacctcctattttttttccctgtttacatgccggtgtgggattgcctcttttctggacaaggtaaaggtattgtagatgctaccagacactgttgaaactctccttgtatatatttctcatcttgctttctggaagtcatctagccagatgctgttgaaactgtccttgccttcttttttgttgtttttttgtttgttttgttttgttttggttggttggttggttggttggttttttgttttttgttttttgttttttttaattaggtatttatttcatttacatttccaatgctatcccaaaagtcccccacctgctcccccacccactcccccacccacccactcccacttcttggccctggccttcccctgcactgaggcagataaagtttgcatgaccagtgggcctctctttccactgatggctgactagg

SEQ ID NO: 116 - DNA, 1000 bp, mus musculus
ggtttaaaaatagtgaaatataatttattcatgaagattgtttttatttaaaaaaaaacaggatagaatataaagatagatactaatctgaacagcttgcaggagttgcatgctgccactggagcccaactgtctatctttgggcttgctactcagtagggaggagccattcagaactcctgaatgtcctgtttctctgtggaaaccaacagggaccccaaaactatccagcttggaactctgccctaccaaactccttgccagctgatctctccaagacagagcctgaagaagtgagttgcatatggttcctggagctccattgtctagctctgggatcatgtctgagtccagaggagccttgagggacccaaagaacatcctttttccccatggacaacttctggggcaccaaactagtcatcttggaactgtgtcccaacaatcccattccagacatgtctgcccaccatctcagctggtatgcatgggaaacaggttcagaagtgagttgtacatggtccaggtctcctgagctacattgtctatatctaggttctccccttaagtccagaggattcttgaaagaactcaagagccttttcctacactatggaggtctgcagagaccccaagaactaacaacttgggatgtttactcaccaatcccatgccattggggtcttcctaagacatagccagcagagtcttgtactttaacctccattgtctggcccatggcttctctcaccttcctgagaaggcctgctgccatcaggatcatccagttaacaacagggaaaaccagatgcctaaagaacagcacaaaaatacaataaacaagaactaggacaatatggtaccaccagaggtcagctatcccattacaacaaaccctggatatcctaatgaaactcaagcacaagaacataaaatccaatcttataaggatggtagaggcctttaaagaggacatgaataagtctctaaagaaaataca

SEQ ID NO: 117 - DNA, 1000 bp, mus musculus
atttcctggttttccctcaaggaacaccctatctcatccctctcccacttcttctattagggtgtttccccacccacccacccactcccacctccctgacctgccattaccctacactagcgcatcaagccttcatggtagcaagggcttctcctcccactgatgcctgacaaggccatgctctgcacataggcagctggagccatgggtccctctttgtctgctctttggttggcggtttagtccctgggatctctgaggcgtctggttggttaatgctgttgttcttcctatcgggttgcaaacccctttaggtccttcagtcttttctctaactcctccattgagaaacccatgttcagtccagctgttggctgtgagcatctgcctctgtatttgtcagactctggcagatcttctcaggagacagctatattggctcatggcagcaagcaccttttggcatccacaatagtgtctgggtttggtgactatatatggggaagtctctggatggcctttcctgtaggctctgctccatacttcttctctgtatttccttctatgagtattttgttcccccttctaaaaagtactgaagtatccacactttggtcttccttcttcttgagcttcatttggtctatgaattgtatcttgggtattctgaacttttggactcatttccacttattagtgagtccataccatgtttgttcttttgtgattgggttacctcactcaggatgatattttctagttccatccatttcttctaatgcaacaatggctgcgtatgaacaaaaactccaagaatctagtagttgtttagttcacgaatctggatatcttagttggtcttcagtgtacattggaatcttgaagcctctaatgccagtgaagcaaaggactggaccaccaaccaggcagtgtacactagcggatatgaggccctcaacacacatacagcagtagactgcagggtctgtgttctatcaga

SEQ ID NO: 118 - DNA, 1800 bp, mus musculus
aagtatactgttaaattgttttcctccattggcagcttacagagaattttctgaaactatggaagtagaattaaaaaaaaaattgatgcgatctcatccctggacaaagaagtacaggtaattattaacacctagaaaaaataattaccctgtccccaaaatgagcccccttttggttgtccagtgccccattttagttggtcaacctcaaaaccatatacacagaaaacaataaccttggaaggttgtatataatacacacacacacacacagatacttataaacatacacacagacacatataaacacacacacacacacagagagagagagagagagagagagagagagagagagagagagagagagaaaccaaaaaaaaaaggctatgaatttaagagtgggggggtgcctcagggtgccacaggagtgttttaagaaagagagaatatctggaaggtactggaaggagagaagaacgtgttatgtgattctgtgtacatcccactttctatttccttgctgggtgttttgacttgaagaaatcttgaatgttcaaaaatagttcaatgagatcattcacttaataattttttgccctcatttttctgtataaaaattaacgacatttcctctattttattgtggtagggtaacattgaccaagaacaaaagtttatgagtcttagtaaactgagttgagtcctaaatctatgtctacaatgaaatgctgtctcagattttccccagtacaatgattcttatagatgtttaaaagtccacagagcctagctgacacagaaccaacatcctctgctagagttccatcttccctctggtctgttcctccacacaaccatatcagctggccccatctctcccacatcccacagccttccaatctctctgaaggtctgctgtaactagggacacagtgcttccagttccatcttcatctgcaagtgggagagagcctgtccctggaaccaaaatcctgcctggcccacaggagatctgcaaaaagcaggaacacaggaggactgcccttagcagggacacaggatgatgtttctaaccagggacaaaggagatatgctctaatcagggacacaggaggacaggagacctctcaaaccagagacagaattgccaggagccaagctctaacccaagtcacacagctcaaccagccaaggaggcctgttccagtcagagacacacaggttaggtaacaagagagaaaaccagatcttgagaggcaaatactagaagccaataaactcataagtaacagaagcaattcaacacaatcagagcccaattcttcaaaaagagcaagcctgggatactgtaacacacctgaaaagcaagattctgacctacaatctgatttcataaggatgatagaactctttaaggaggatatcaataactcccataaagaaatataggaggactcaagcaccggggtaccatgccagcggagtcgcccggcacccacaagggcccacacaggattccccacgggatcctaagacctctagtgagtggaacacaacttctgcaaggagtcctgttcgaacaccagatatctgggtaccttccctgcaagaagagagcttgcctgcagagaatactctgcccactcaaactaaggagagagctagcctcccaggtctgcttatagaggctaacagagtcacctgaagaacaagctcttacagagacagctataacagctagcttcagagattaccagatggcaaaaggcaaatgtaagaatcctactaacagaaatc

SEQ ID NO: 119 - DNA, 1000 bp, mus musculus
aggttcatagttttgtgagacttatgatcactttttttgtttgtttgtttttgagacagggtttctctgtgtagtcctggctgtcctggaactcactctgtagaccaggctggactcgaactaagaaatccccctgcctctacctcccaagtgctgggattaaaggtgtatgccaccactgcccaactgagcatttatagctttttatagtaatatgaagcaaatgcagtggggtgaaattaacaacttaatgcagcttcagtttttcagtctgtaccataagtatgggatctttttacaattaaggtattacagtaaagttttatgtagctatcaatagcattgactagagcctgtaatggtgggggtgggagctatgagagccattttgctaacaattcaaaattatataagctatttttggcaatgaggttctgtttggtagcatattataaaagtaacttttgttccccagatataattatcatctagaaggcttactcctgaataaaccagaattctagctggtttgctttgcttttctggcataaaccactctccaaattgactgattcaaattatcctctcttggactattattgggtagttctgctcagaaaaaaaactgcctctgaactacacaaactgactcctctgaaatcatctgaactccactgtattgcctgaactccactgaactgcactcactgaactgtcctcctcttcctcactgttctttaagtagtctctctttctcctcagagtttggtgtatcctatctttgactcagtctgccaaaactttttctgactcagctctttgtctgttccacaattagacatcattttgggggaatatagttgtgtgctaaagtcctgtctaatttgaggaccaggcctgtgttagcagtagttatgaagcatctcactgagtcccaaccaacaaccctgcctgtgtcccaagaggccagcactaacccaacacacataacaatcacaac

SEQ ID NO: 120 - DNA, 1200 bp, mus musculus
tccatctctagcttatattcttctatatacaaccctataagtttgggccagtccgggtaatacagggaaactatgatagttaatcttgcttgaaatcttggcaagatttgtattcaccaaagactataaattctccatacattatctagattagattacctgaggtggaaagatctacccaaatgtaagcagttcattttttaatatttccattaagttgtcttgtatgaggcatttggtctcaacaatgagaaaagtaactaacacagaccactctgtggtggtttgaaatagaaagtaccacatagctcctatatttgattgctttgtccctagctgcggatttgttttattgtgggaaggattattagatgtggccttgttggagaacatgtatcactctggtgcgtgttttgaagtttcagaagtgcatttcaggtccaaccttgctctttgtgactacaatttgaagattgggacctaagctttcagctagagctccaataccatggttcttggcagaattgctatatagtaatcatctgaaattgtaaccaagccctcaattagatgctttcttttataagtctcattgttttgtttgtttggttggttggttttgtttgtttgtttggttggtttttggcaatagaaaatgtggtgaagctgggcagtggtggcacatgcctttaatcccagcacttctgagttccaggccagcctggtctacagagtgagttccaggacagccagggctgcacagagaaaccctgattcacaaaagccaaagaaagaaagaaagaaagagagagagagagagagagagagagagagagagagagagagagagagagagagagaatctgtagtgtaaagtggatctaaaatgtcagtgctggtgacaatttctaaaaagggctctgacctggtataaagaagcctagaggcagacatttgctcaacagaaaagcagattttataaggtgaccaatttctgcctcccagtaacctcccttagtcacctcaaaagtcaactacctaaggtcagggaatctagttactgatcaatctgaacagtccatttcatctcaaaacccctgccctgatgacattctcataaaaccataaagtcagcttgtttttttgtttggttttttttttcgtatttttgcttctccatattccatgagagataacgtt

SEQ ID NO: 121 - DNA, 1200 bp, mus musculus
gagaatattattgaatagaagcttgtgataatgatgctatagtgctgagaaaatagttttagtctacaacacagcaagacagaagtaggactggatatagacatggcaggagtgtatggagattgtcaggttatgggtcctgaatctgctccaccacatggcttgtcgcctcctggaggaaggacacaggaattttgactatgcttagcccatggctaggtgtgggcaggaggaaggagatctggctggccttggcttgaaggtggtggtgggcttgagtttggcttggcagccatggctgggagcacacaaagggaaattagacagcagctttataggcataggccttctccatggctcccatagcagattatgatgaaaagaggcagtccatggttttttttttttttttttttttttgttttgtttttattggatattttctttatttacatctcaaacattatcccctttcctggtttcccctccaaaaaatacccttcccctaccccctgtccctgctccccccactcaccaacccacccactcctgcttcctgaccctggcattcccccacactgggagatagagccttcataggacaaagggcctctcccccattgatgtccgactaggcaatcctctgctgcatatgcagctggagccatgagtcctaccatgtgtgctctttggttgatggtttagtccctgggagctctgagggtactggttagctatgttgattgctggctgtgttgagctttgagatttagtcactgaatgtaatggagtcctttatcagccaacatacacagaggatgttgaggagttcccaacaacacaagcaccagggggcacccaaggaccatggacagagaatgtggtcatgtgataggcagctactgtgtttgattctgtgtcatgaggaatgtgctattgttttagaagtgggggaaaaccccagaagcatcatgggatgcagcgatttgtccgtgttctgctggtcgcagagatcagacatgctgaggaacatgatttgctgaccactgagccagtgctctggtgtctacccttctgctttccccaggctgatgatggttgcacacgagcctcccgtgcaggtttctttttttttttttttttttttctttccattttttattaggtatttagctcatttacatttccaatgctatacca

SEQ ID NO: 122 - DNA, 1000 bp, mus musculus
ggataaatgagtgtctttgtggtggatagtcaatgggcaaggcaggcaatagtgatctgccaaaggactcgggaactcctgtcaaaagagacctctgaggtgagattacccgactatagccatgtggtcctctgcttgccagtttttttttttttaacattttttattagatatattcttcattacaattcaaatgctatttccgaaagtcccttataccttccctccgccctgctccccaacttgcccactcccacttcctggtcctggcattccccagtattggggcatatgatctttgcaagaccaagggcctcttcttccaatgatggctgactaggccatcttctgttacatatgcagctggagacacaagctcaggaggtactggttagttcatatttttgttccacctacagggttgcagaccccttcagacccttgggtgctttttgttgctcttctattgggggccctgtgcttcatccaatagatgactatgagcatctacttttatatttgccaggctctggcatagcctcacaagagacagctatattggggttatgtcagcaaaatcttgctggcatatgcaatagtgtctgcatttggtggttggttatggtatggatccccagatgaggtagtctttggatagtccttccttctgtctcagcttcaaactttgtctgtgtaatatcttccatgggaattttgttccccattttaaggaggaatgaagtatctacacttgtcgacctacttcttgattttcatgtgttttgcaaattttatcttgggtattgtgtgcatctgtctgtcatttcatccaacgctttgcccacctgtgactagagacccattccacgcagacaaaggggcccagagggtctgtgttagggtattctaagtttctgggctaatatccacttatcagtgagtgcatatcatgtgagttcttttgtgattgggttacctcactcaggatgatatcctccag

SEQ ID NO: 123 - DNA, 1400 bp, mus musculus
gggcattgtgaagtgtcctaaacgataaccctttgtatctttactccattctcctgagagaaaggataagatttttagatttgttttttcatgtaataactgcaactcttactatggtttgcttgctgttttatatggtgtaatgagcatgctttaaagtaaatgtactttccaagtgttttccatacccaatggctccagatggatcaaatttttgtctgtgttttactttaaactatctttaatgcaatctcaaaagtgttatgtagaaagctttacatttctaggcctgaaaagtaaacacacatacgtcccatggggcaatgttagaaaattacatattctaagtgtcaattctcatgctgtcaagttcagccacttttcaaaatatagcatatgttcttttctagttaaaaaaaaatactgacattaaagtcgtgtcagagttttcaaaaagatatcatgaaaaaaagcctagataattcagttctttggcaaaaaagaatgataaatgactcatgctgaaaagtgggcagttatatcacataagaagataatgactaaaagctttccaaatagctgcctgactacagccaagaaggtggtcggcatgctggtttagcagaatgcagggctgattgccagtctttttttgagcaaagcagctattcatttcacctgcaaaatctgtggttcacactgacattacacaaaatgaaaaacaaggcagtggctatttttagggtcagataatagagaggtaaagtaaaataaaggcacctttcctacatggagacataacctttcttccacattgtctttatgtgtgcatgtgtttgtgtataatttttgttgaaattgcattgtaaaaatggaatgtagttctcagtaatactactattaccactttgtgtaagagtatagatttaacaaacacagttgtattattttgaatgcatgagtacatatatctaaaattattttcactttaaccaatcctacataatactagctgtcaatccaatataaaaccaaaattcattaattgtgaaagaataaaaccagaaatgtttagtcaaaatcaattataatagatctctatgcatacctatgtatacctctgtaacaaattcatacactcaaatacaaacatatgaacagtataaaaattgatacacatacatacgtacccacatatacagacagcatataagttataacataagacaaagataaagaaatatggaaaacacattctatgtatttatgtgaacacaaatactaatcaataatgctgaatataaatgagttataattaaaactaattaaatgtggatattatcaagtagaaattgctcatcctggtaatagaaatattacaaagtgtatataaaagtgaa

SEQ ID NO: 124 - DNA, 1200 bp, mus musculus
aactagaaaaaaaaaagtatcctaaagtatcctaaaaaaagtatatttgcttttgtgtggagattaaatggatatcaaaactattacatgtagacccgcaaagcttaggtgtaggttaagggcctagtgggtatacaaacagagcttattaggaaagaaatagaatagatagttatagatgtgtgtgagaattggaagagaaggatcatcagagatggattagggagaaaatattgggagagacaattaaaattagggccatttaatggtttgattggaaaagaaatagactaattactgtgcatgacaactctagctattgcccacataaagatttcatccctagccaggcaatggtggtgcatgcctttaatccccgcacttgggaggcagagtcaggcagatttctgagttcaaggccagccgggtctgaagagtgagttccaggagagccagagctatacagagaaaagctgtctcaaaaaaaaaaaaaaaaaaaaaaaaaaaaaaaaaaaaaaaaaagaggaacagggacacaggaaacctgccctaccagctgctggggttcattctggttggcgccagccccaggccaccttgggcaggaaatcggcagaaggtccaatggtccctagaggactctccatgctgcaagcgccctatcatatccaggatccaagggtcattgctctgggttaaagacaaagcttcctagaaaagcaagaagaaggaattataagaattgttgcttggcatttgaatgatggcatcttagttagagttgtagtttctttttaaaaatttatttttgactctgtgcaccttccctgccagaggacagttggcctccagggagggcactgacccgtggactcaggtgagagcacaatcttgtatcccaggtctctcagagaccagtccactcaggagagcatgtgggccacaaaagcaacccagcttctaggacagggtcccttcaggccttcatcttcagccaagtagcaaagctgatctccatacctctgtgcaccttccctgcaagaggagagcttgcctggaaagagtgctctgaccattttgacttaggagagagtttgactcccaggagtgctgacagaggctaacagaatcacaggaggaacaagcaacagccagagacagctcaatcatctaacaccagagattaccagatggtgagag

SEQ ID NO: 125 - DNA, 1000 bp, mus musculus
agccccaaagctcaaaatgaccgggatacaatccacaaaccattttcagcttaggaagaaaacaggccatggtatgggtgcttcagtcctgcatagtctggggaacaggatgattctggagatggagggaaacagtgttgggagggacataatagggagagggcaagggggtcaagtcaaggtactagagggttcagaggacattacagagggtcaagaaatcaaataaaaaaatgtagcagtggtgaatgaggaactggggttatgcaaaggagggtgcaagaagccagggaagcaagtggttcccaggacccagtagggatgactttagtggaaatgcacagcaaacatgaggtagaacctgtagagaccatctccagtagataggcacggtccccagtctaaggatgtgggcacccaccgatcctaaagtttttaatccagaagtgtttctgtccaaagggaagacagggagaaaaatggaggagcctgaagaaaagactctctggagactgcccacctggaaatccaccctatctgtaaacaccaaataggacattgttgctgttgtcaagaggagtttgctggcaagaacttggtgtggctgtcccatgggagtttcagccaaccattagactaagtaccaggacccctatgggggagctggcagaagcactggaggggctgaagggaactgcaaccctataggaaaaacaatgttgactgcctagactaccacatgctcccagggtctagaccaccaaccaagaagtatatagggagagatccatggctccaggtagccatgtagcagaggatgaacttgtctgacatcagtgagaggtgaggacctttgtcctgtggaggtttgatgctctagtgcagtgggaatttaatggtggggcaggaatgattgggtaggtggaggagctctctcatagaggcaaaggggaggcaatgggatagggaggttctggaggggtacccaagaagggggata

SEQ ID NO: 126 - DNA, 1200 bp, mus musculus
agttactgtaagattcaaacatccatattctcgtgtcacatacatttttttttgtattgggcacaaataataaacaagtaagtagaaacatgaaatataaagtagtaaatctattattaaatgcgtaaagcaaggtaaaaataatagaaagataagatcagtgtctatattagataatggaaattccctcatttctcctgcaggaatttctattctatgtgacaaacaataataaccttggttaaaaatggtttacattctagctgttctccaggataatgctatttttttaattattaggttagatttctttatttgtatttcgaatgttatcccctttcctggtttcccctccaaaaaacccctatcccatccccgcttccactgctcatcaacccacgcactcccatttccctgccctggcattccactaccccgagcatctagcctttacaggaccaagggcctctcctcccattgatgcccaacaagaccatcctctactacatatgcagctggaaccatgggttcctccttccatgtgttcaatttggttggtattttagtcctacggggctctggggttggttctctggttggttcacattgttgttcatcctataagactacagacctcttcagctccttggatcttttctctagtggggaccctgtgctaagtacaatggttgactgagagcatccacatcagtatttgttaggcactggcacatcctctcaggagatagctttatcaggctcctgtcagcaagcacttgttggcatccacaataatttttgggtttggtgactgtgtatggaatagaaccccaggtgaggcagtctctggatggactttctttcagtctctgctccacactttgtctctgtatctcctcccatgatattttgatgccccttctaaggatcagagtatccacactttggtcttccctcttcttgagtttcagttggtctgtgaattgtatcttgggtattttgagcttctgggctaatatccacatatcagtgagtgcataccatgtgtgttcttttgggattgggttacctcactcaggatgaagtattttagttccatccatttgcctaagaatttcatgaaatcattgtttttaatagctgcatagtactccattgtgtaattgtaccccattttctgtatccattcctttgttgagg

SEQ ID NO: 127 - DNA, 1000 bp, mus musculus
tactttgggattctgaatggcaagacaccagtaagaaaactgccactttaaatgctcagactggtaatctagactggggtagtaacatgcttctgggagaaagtccatatgagggccaggctaatcagattggttttctcgttggaatttacacacagatcgtggcggctgcccatcgtgcttggggacagttaccggttacagcggatgttggtgggagtttagccagcattcggcattgttctgatgagccttaccagaactttgtggataggctattaatagcagctagtagaatccttggaaaatctgacacgggaagttctttcgttatgcaattggcttatgagaatgctaacgcaatgtgtcacgccactatccagccgcacaaagtacaagcagatttagcaggatatgtctgtctttgtgcagaaatcaggccgtcatataatcagggtttggctttcagcgctgcttcgaaagggaccaccatacaagcaatgttctcacagaaacaagggaataatgcatgttttaactgtgaaagtttgggtcattttaaaagtgattgtcctaagaacaaaggtgctgagagtgggcaagcaggccttgccacaggaattttgtccccggtgcagaaagggcaaccactgggctaaggtgtgcaaatccaagccaggcacactgggccttctggtgccaggaaatgagaggaggggtcagccccaggtcctgacttactcacagaaaacagcttatggggctacaaacctgctgcccagccaaagagatcagtttttgaacttgtcagggcaaaaccaagaggtgcaggattggtcctctgttccaccacccatgcagtattaaccccagaaatgggagtccaaactctggcaactggagtctttggaccgttacctgtagaaacttgtggatttcttttaggatgaagcagttctattgtaaaaggcctgaagatttatccaggtgttataaataa

SEQ ID NO: 128 - DNA, 1000 bp, mus musculus
ccacttggcagcaaatactggtgacagaaaagtgtcacagtcaagaaataaccagctaagccaacatattcatttcattagtcatcttactgttcttccatagtaaaatcataggcagaacaatctctagtatttgaccagtatttctgaaacagacatatttattagaatagtaaacaaaattcccttgaaaacaaaactcaaaagttaacattgtttatggatgtatatttaagttttggattctggaacattaaggggcagagaaaacaaagaagaaaactgagataaaatcgagatttacttctttgttgttgttgttgttgttggttttgtttatatttttcaagacagggtttctctgtgtagccctggctgtcctggaactcactttgtagaccaggctggccttgaactcagaaatctgcctgtgtctgcctccccagtgctgggattaaaggtgtgtgccaacatgcccagcaaggaaggattacttcttaaaatgacctgtttctggcaaagacacagggaaaagagaatgctaatgtccatttacatctatttgcttagctatgtgatcaggtatctaaacttaacaactgctgacataccatcagcaaggttctccatatcacttagacttttcctctagaaaactaagcactgacttgaagcaaaagtgcgttattgaagtcacaataaaaggaaaatacttaaaaacaatgaagccaaactatgttccctgtggaccaaagtccattagattttgcttatcatttaccatgatgtagctaggtgaatccaccagattaacctctttatatgcccttctcaatccatgtccagtctaatctgggtactactacttatgcgacccccaaaaattacatgttttcccctagacacacacatcatacacatcccaccaacactatcaaaccacatacaccatattcaaatgtccattacactgttatctttgacattctggctagggtaa

SEQ ID NO: 129 - DNA, 1400 bp, mus musculus
gaaaagtaccatgttatttaaataattttataaataaattagtattagaattgtagttacaggagtttgaggatatcagagggaagagaattggtagtaataggtagtccttatgttatagtttaatacaagaaattctagtaatctactgcagagtaggatgattacaaaattgtatatatgtatttatcataaagaatagttttgaataatattttctgataaattataagtattcagaaaactgtttagttttcctttatttaaaaattacttttaaaatatctatatgaagtagaattaataatatgttccataatgccaggaaatcattggaaggaaacaaaaatttactttcattaattaatttccaaaattagtttatggaatttagatatagtctctgatctacaaagacattatagtttaatgcatgcataaccagaattaggatttatagccagaaattagcttgagggattaactcaccagttttaagaacagtgaaatgcccaatgagttttatttgtaaaaccaccatattggctaggaagtgggggcacagacctttaatcccagcacttggggacagaggcagggggatttctgagttcgaggacagcctggtctacagattgagttccaggacagccagggatacacagagaaaccctgtctcacaaaaaaacaaaacaaagcaaaacaactcaccatattaatactgaaaaagtaatagactaccccgactaaaagtacacaaatatatataaatgggacctttcaaactcagcctttaacttttctcatttaacctgtaaacacacacacacacacacacacacacacacacacacacacacaattaaataggtaaatccatgaacattttaattttgttaaaactaagtttatgatcaatactgcttctctcataaaacttactttaaactagtagaaaagcttaaatactacaaagaagaaaaagtcacttttaattgtagatccttgtcttcaagtcattttaataaaatgattgcttttattattactaagattcaaaacatgtcaggaaatagcatttatcctactttgtatttaataaactcacagaaagggaaaaggtctacactgaatagttaaatcaactgtcatattacacaaccattatttatttatttagtgtaggagatattaatagaactacagacatattagaacaataatattcccagcacattaataatgcaaatgactcatggaggttaattacatctaagatgaacaagtttcgttcaaagtgatctttctctagatgcccactccacctccgtaagaaactgttcttaagatctaccccttgtcttctaaaaaccatcctatatatgggcctataatcttta

SEQ ID NO: 130 - DNA, 1000 bp, mus musculus
ctttcctttttttagttttttaattagatattttcttcatttacatttcaagtgctatacccaaagttccctataccctccctctgccctgctcccaaacccacccactcctgcttcttggccctggcattcccctctactggggcatatgattttcacaagaccaagggcctctcctcccattgatggccaactaggccatcctctggtacatatgcaaatagagacacagctcttggggatactggttagttcatattgttcttcttatagggtttcagacccctttagttccttgggtactttctctagctcctgcattgggggccctgtgttccatccaatagatggctgtgagcatccacttctgtatttgccaggtactggcatagccttacaagagagagctttatcagtgccctgtcagtaaaagctttctggcatatgcaattgtgtctgggtttagtggttgtatattggatggatcccagggtggggtagtctctggatggtccttccttctgtctcagctcagaactttgtctctgtaactccttccagaagtattttgttctccattctaagaaggaatgaagtatctacacattggtcttccttcttcttgagtttcatgtgttttgcaaattgtatcttgggtattctaagattctggactaataaccgcttatcaatgagtccatatcatgtgtgttcttttgtgattgagttacctcattcaggataatatcctccagatccatcaatttgcctaagaatttcaggaacccattgtttttaattgctgagtagataaacaggttatgtgcaaatctttatttgagagtttttaaatggtttcattagcaatactaggtttaaggttttttttttttttctttaacttgttttgtattagaatatttctggctcatcaaaaatatttgggatgtttcttttgcttcaatttttaaaaatagtttaaaaaagaatgactgtcgat

SEQ ID NO: 131 - DNA, 1000 bp, mus musculus
gcattttccctcacacggtggctcatctgggttcaagatagaaaggtacagaggcaaaacatgggtttgccagagggtaccacaaaggctttggggattggaagcatggggctggcatgctagtgaactgccagtgggaacctagcaagctaggtggagatattatggagtgcttagtcagagtctctatgagataaaaacaggtcagacattgccagccagtacatgattggcccggccacttgggcagaggcacaagtgtgggaatgtggcagttctattttttcaatacttccggcaacagataggagcctgttgtcctctgaaaggctctacccagcagctgattcagaaagatacagacatgtacagccaaagagtgaatggagcttggggactcttatggaagaataggatgaagaattgtgggttccaaaggggatagaaattcaacaggaagaaaaaacagaatcaactaatctggacccttgggctcttggagttttatccaccattcatagaaaatacaggggccagacctagacttccctgcacatatatagaggatgtgcagctttgtcttcatgatggtgctcaacaactggaatggggtctatcccaaaatctgctgcctctatgtgggatatgttttcctagctgggctgttttgtttggtctcagtgggagacttgaagtgccagggtggagggataccaatgtctttacctgctcagaggagaaggggatgaggaatgggagacacggggtgggggtgagattgtagatggggatgatcaggaggcggggcagtgggcaggatataaagtgaataattaaaaaataaaattatatttaataataaatatatcctgcattaatatcactaaaattttacttaatcaaaatgaatttccttactgactttattttaattatttgcagattagttttacatttctgcttcatgactgactagaattcaggaagcttggaggtatac

SEQ ID NO: 132 - DNA, 1200 bp, mus musculus
tttttttgtttgtttgtttgttttgttttttgttttttttgagagcacagaggtgttccagagatagccaacgttgcaccttgtgctgtggctggacttggtaatgtgtaagagttacccaggtggtactggttttgaaggcatgaacgggtcacacagagcagctgaggctcggtaccatgagaggccatggaaggccattagtgaagatgcagcctcatttgcaattaatggcccaggactgaaggggccatgcagttttttggagatgccagtaccacgagatgacccccaagagcagcagcactggagttcaggcatctggagcctagagaatgatgtgtgtgctacaaagggcatggctggagaagtgaccgaagcccttggaggagcccagaaaatcgtgacttggatcccagacactggacagttggagcttgattttgcttttcattgtgactgtgccctgatatgtttccctctggaagggagttttttttagtgaagcccacagttaagagacttttaactgtaaagactttggattttaagagagattgaaattttaagaatttgtaaagactgtgggacttttaaaattatttagatcttggggatgaaaaagaaactaagggttgaggcttaccagtcatgtgtttttgtgtcaaggtgacaaggggtcaattgtactggctagttttgtgtcaacttgacacagctagagttatcacagagaaaggagcttcagttgaggaaatgcctccacgagatccaactgtaaggcattttctccattagtgaccaaaggagaaaggccccttgtgggtgggaccatctctgggctggtaatcttggttctataacatagcaggctgagcaagccaggagaagcaagccagtaatgaacatccctccaaggcctctgcatcagttcctgcttcttgatctgcttgacttccagtcttgacttccttggtgataaacagcagtatggaagtataagctgaataaaccctttcctccccaaattgcttcttggtcatgatgtttgtgcagaagtagaaaccccatctaagacatcttattgacagtatcctttgccttacataagtttttcaattttatgaggtctcatctgtctatttttgatcttagagcctgagccattgattttctattcaggaaaatttcctctgttca

SEQ ID NO: 133 - DNA, 1600 bp, mus musculus
acaattggttattttaacttctttgtatatgttgtgtagagccacatttctctatttcagagaatttttcatttgggatgtaatgttttgtagactcatttaatttattatttcattaaaatctaagtttctccattttgggcaggtggtctcacagctgtttattgatcaatgtgtgccattgaaaccatcccctattgctctatgtttaatctgtgataatctgtcactttatatcaaccagtatctgttttataaaactggtttcacttgtgttagaaacacatatatttagtattgttgatttctcaaggtggattttctttgactcagtataaagtgactttgtttttttctcttctgagtggattttattggatatttaccttatcagatattagaaaatgatgccccagctctctagttacattttcttggctttgttgtcatgaattcatttagccttcttttacagtgaagtggcttagttgtccatcaagtgtgttaaatatagtagcttatgttggcagctgtgccttgggatataaaatacatggttccatagtcttatgaatttttgtatttctgtttttaatttaatttttaatttttaaattatttttagaaattaataatttttattaagaacattttattagatattttctttatttacattttaaatgttatccttttcctgatttcccttctgaaaccccctccccctcctcccttccccattccctagatcaccaacccacccactccagctcctggccctgccattcccctatactggggcacagaaccttcacaggaccaggggcctttcctcccattgatgaccaactaggccattctctgctaatcatggagctagagccatgagtcccaccatgtgctttctttggttggtggcttagtcccagggacctctaggggtactggttagtacatattgttgttcctcctatagggctgcaaaccccttcagtttcttgggtcctttctccagctctttcattgaggaacttatgcaccattcaatggatggttgtgacaatccacttctgtatttgtcagacagtggcaaaacttctccgggacagctatatgaggctcctgtcagcaagcatttctgttgagaagttaaatatgttctgataggtggtctttggtatttatctctaaaacatttcagtacattttctgttctgtgttctttagtcttttaactatactatggcatatgtagaattaccattttcctcttatctatttgtaaactacatgtctttcttcgtcatgtggcatcagccttcagtatgttgagaaaataatatttactgtaaaatctcaatgcctgccccatgactaacttcttctaggaagactcaaatcactaatattccatgtccctcccaaataattcttgcagcagataccaattattcaaatacctgagcttctagtgcagtttatatttacatcaaaagagtgaagaaaaaacttacaaatttaattattaataatatatattaaatgcccatcataacaaaatgctgttttgcttgatacgttttccctttgaaaaactaaa

SEQ ID NO: 134 - DNA, 1400 bp, mus musculus
agtacccccagagctcccagggactaaaacaccaaccaaagggtacacatggagggaaccttgtctctagccggatatgtagcagaggatggccttgtgggacatcatgagagggaaggtccttggtcttgtgaaagctccttgccccagtgtaggggaatgccaggacagggaagtgggagtgtgtcagttagtaagcaaagggagggggaattggatagggcaattttcggaagggaagtgtttggaattaagatgtaggggaaggagggggagggaaagaatgcccctgtcctgccagagttcctcctatgctctgggtagacagactctgaaaggcttccagctgctttccactcggccttgggtggccatcaaagccactgaccccacttgatgggggaggggagtatacaaggggcagcccctgataccaggggcccttgccccggggatatgagagagagggcagaaggagagaggctcccaggcaggtgagagaccttagttctggccttgactagagcacaggaaggccttccattgggagattagaaatgtctcattaagagaaagcctttgttcaagcacagtgggccttgataaacagagacagtctatggttttagagctttattgtagaaagtcagggggaaagagagaagagggaaagagggagagaccagccatggccaagaagagagaagggggaaaggaagaaagaaagagaagaaagagagaagaaaggctagagtaagagcgagaggacaagagggagagagagtaatagagtgagaggagagagtgaggagaagttagaaagtgaggtggcttcaagcagcccctcttatggtgggctgttatcttactgttgctaggcaactgggaggagtttagcctgaaagtcagaagcttgggacattgtctatgtgactactagccacacttctcctgtgggggctgtgggagtggtaactttgatagaagccaagattccaggagacatgagggaaagcctatcaccccatgtaggtgaattatcaccattcaggttctactggggttcagaccttaactcgactggagaccagactgtctgtgcatagcccaatgccccacagggaaatgagaaaaggtgataaaatttgcaatgtaaataaagaaaacatctaatatataacaaaactttcccttgacatagttaataagcaatattgagaattatttatacaattctatttcatactgtatttttgctatttattctgtagccatatatatacatatacatatatatatgtatgtatgtatgtatgtatatatatcctttgtttagtttataagcatcagatagacattatagaaacctacaactgttcaaaatttacagaataaatgat

SEQ ID NO: 135 - DNA, 1000 bp, mus musculus
gggcaagatcctacacagctaaattattggttgtgtgtgcagttgaacaaggaatagatttgacttttaatctggaatgaactacaatgtagaaatgaaggatacacttttgatccaaattttgaggctagaaggcacagtcttttgacagggaacttgaaaagtggccaataagaaggtctcacccacacttcaggtcagtgccagctcctggccaccttgggcacaaaatctgcagatggcctctaggtccccagaggactctttccacaatcttaggatcactggtgagtggaacacaacatctgttccaaaccactcatgacaggcctgtgacagcaggagcaaggacacgggaaccctgcctgaccagcatctcgggttccttctgatcagtgctggtataccttggtttcaaatgcaccagagagatacactgtccccagaggagacaccactttaggcactgtaacatgcccaggatcttaagattctgaatcccaggaaagtaggagcttggtcataaaaggatctcagggtttcagaggaagcttaactacaaagaactgtgacacacccagaatctaaggttcacaggagcccagaatcacaggatcacagagaaagctggactctgaggagtcctgaatcaacctgtattatgggaaggacagactccaatcatatatattaagaaaagcaagtacttgaaataatcagatggcagagagaaagcataagaacagaagcaaggttacttggcatcatcagaaccaaactctccctcaatagcaagtcctagatacaccatcataccagaaaagcaaaatatggacctaaagtcacttctcatgatgatgatggaggattttaagacagaaataaataactcacttaaagaaatacaggaaaacacaggtaaatagctagaagcccttaaagaggaaacataaatatcccttaaagagttacaggaaaacagtaccaaacaggtgaaaga

SEQ ID NO: 136 - DNA, 1400 bp, mus musculus
catttccatatataatctacttataaaacatataaataatcaaattcatatgcgtattgaataaaagtcagaggactatgacataattatgataagagctgagttttctactgtgttatattttagtttgattttgctcatttggataatgttgtacatagcaattatatgaactagaatttataggtattaattatgaaatatgattgtttaggttttgtctgatgtctaaaatatggatttgccattaataatactctcttcaacaacaccaacctgtatgtataagaactgtggaacttactatatattctaccaatgggagagttgtgaagaaaaacataaatataataaggtgagtctgctgtgcaggagagagtgcagactgcagaagctacacagcttctgggacagacagaagcaacacagcttttgggacagatccccatttcgggctccagacatccaggcaccttccccgccagagaagaggtgactgcctggtagggctatgactgcctgagcaggtgagagagccatcttgtgtcccaggtccattggagaccagtctgcgcaggtcagctcgctgactgcagaggcaagacatcttctggaacaggacctgtttcaggccttcatcttcagccaggaggcaggtctgaatgtcagacctttgtgcacctttcctataagaggagagcttgcctacagagagtactctgaccaatgagactcaagagagatctagactcccaggacagctgacagaggctaacagaataaaaagaggaaccagctccaaccagagacaactataacaactgacaccagagattaccagatggcaaaaggcaaaaataagaatcttactaacagaaaccaataccactcaccatcatcagaagccaggactcccaactcagccagtctcagataccccaacacaaccaaaaaacaagacttgaatcatatctgatgatgctgatagaggactttaagaagggcattaataactcacttaaataaatacaggagctgagcttggtagcgcaggtcttaaatcccagaactctggaggcagaggcaggcgtatttctgagtttgaggacagcctggtctacaaagtgagttccacgacagccagggctatacagaaaaaccctgtcgcgaaaaacaaacaaacaaacaaacaaacaaacaaacaagaaaagaaggaaggaaggaaggaaggaaggaaggaaggaaggaaggaaagaaagaaagaaagaaagaaagaaagaaagaaagaaagaaagaaagaaagaaaaagaaatacaggagaacactgctaaagaggtagaagtccttaaaaaattacaagaaaacacaaccaaacagatgatggaattgaacaaaaccaa

SEQ ID NO: 137 - DNA, 1000 bp, mus musculus
tccatggagtgcacaaagacaacccatctggaaaaaaataccctttgagatagcccccattccagttgatcagaaccattatgaaaaccaagttgcacatttgctacatatgtgtgaggggcctaggttcagcctatgtatgctctttgattggtggatcagtctctgagagccacaaaagtccaggttagtagacactgcttgtcttcctgtgaagttcctatcaacataggggctacaattcttcctcctcttcttccataagtgtcctaaacctttatctactgtttgcctgtgagtctctgcatccttctgactcagctgatgggtggagcctctcatagtacagctatgctacactcctatctgcaagtataacagagtatcactaatagtgcttgcccatggaatggatctctagttgagtcaattactatttggttattccctcagtctctgctccatcttctgtccctgcatttcttgtagacagggtaaattttgagtcaaaaatgttgtgtgagggtcagtgtccctgttgttccactgtggatcctctatctctgccatgccttcctggttacttggttgcttcatgcttctctgcactgagtcgggtttggctggaccaacaagaggtcaactagcctgcgaggagttcatctcagcttcaggtggcacttcaggaagtcagaattcttcctagttgttacagcttttaagacagaaggcttagatgatggagtagttctcacacacctttaattcttccagaaaggattcttatatacagttttggggtgggaaagggtctgaccaaagatacttctcattggtttggtctgaaatctttgggggaaactttattcgcatgcaggagggcttagtgctgcccctacttgactgatggccacatacttctctgtggagggctctgggatgctgtcgttataacaagagtcagtggctcaggaggcatggttgaataccttccatcccg

SEQ ID NO: 138 - DNA, 1200 bp, mus musculus
gacagctgctatgtctcatctttccctattcccaccagatacacatctagactggtaaaaacctacacattcctaactctggatctgttagtgaaaatcaaaagctcagaaaaccattttgtgcaataggacccttatctgagccagcctttagaaggaatgcaaacctctagccaacctttgttcccaaactattctgaacatgcttgagatgtcttccctactgttccaagcagccttttttatgccaagactttccacactctactgtctaccttatcagtcttggtatctgacccaaattgtaggaagatcatcagtctcaactaactgggaccccagggagctcagcaacatacacggactggtctgaggctcccaacatatagatagcagaggactgcctagcctcagtgagagaagaagcactgaatcctcgagagacttgagaccccagggaaaaggaagggcctgggaggacccatcctccctcatccttccctcccactccttccctctcaccccctccctgttatggggaagaaagaatgggatgaggaactgtggggtgggggactgataggaggtcaatagctggaatgtaaaaatataataaagtaagataaaataaaataaacaattaatttttagcttcagggcgaccagaacaaggatggttttgagaggaaagctgctgaaattcagacacagcaatagggagcttctccagtggctatgctccatacaactgggctcattgaaaagatgttggcttgactgaaaatgtagactagggaagctgacaacataagaggaagagcaagaaccagaagacttactgagggatgatacccattggcaagatctggaaacccaggaagtgaagaagcagaagccttctgcaaaggctaggcttacaacaggggctcagtgtcaggcacatgtgccaaaaatcaaaggatccttctctgttctttactctttcctaatcacttgcatacctcatactaccaaacattaaaaacattaaattaaacattaagatattcgtgtctacatgacataagccacaggactggaaaagatacagtgagtttctatgaaagacaaacctaacatggtaataatacattttttaataacatgcagtactttttaaattgcaaatggaataagatatgtcaactgataagaactttt

SEQ ID NO: 139 - DNA, 1000 bp, mus musculus
acttttcatattactttttaattttgtgtatatgcatcaggtaaggtatatgcaattgtaaatgtaggtacctaaaaagtccagtcgaatgagtcagaatctggagttagaggaggtggggggaggtctgagccacctaacatgagtgctggaaaccaatttggggtcttcttggagagctgtgaatgctattaaccactattggagagccatctcttcacccaatattacttcctgtttgatgagccaaatcaatctctctctctctctctctctctctctctctctctctctctttgtgtgtgtgtgtgtgtgtgtgtgtgtgtgtgtgtgtgtgtgtgtgcatgtgtgtgtgtcacacacacacacgttgagacagaaagcagccagcatttgcctcagtgcaagtcctggcgcagagtttagcagcaacagcacctctagcaccagcacaaccaacactccttccctctggcacagttgtctcctgtccttgaacaaagcagaaaattaatgtccttaaggtgataagacacacacacacacacacacacacacacacacacacacacacaccacccttaaactaagggaaagagaaaaccaagcattcccagcagtcgaaaagagacataacagctgtggccaacttgtaacaacagggaagaatgcactggtcattgataaagggaagagttatttcttcccaggtcaaaggtttctgtccaaatgtatggtccctccttgctgtctgaacaaacgttaactgtttgaaggaaagcattctttaccccttacccaatcacataatgccaagacttgaaagtcccaagttctgcatttcccctatataaacccggagcccctagacctggcaattgcatttctaatctgctgagcaaggaggattgcatccaggcttcgaacttgaataaacagactctcatgtgcttccattggcattgtggtccctggcagtcttctggggttcttgtgcact

SEQ ID NO: 140 - DNA, 1000 bp, mus musculus
ttctttccttcttgtgaattatatcttcttttcatacacaatagttaatgtagcacgtagcttctactaccctgctttaagctcctggcagatcattctgccagcccccctcctgtgattcccttggatctgtgatgaaagacacacacacacacacacacacacacacacacacacacacacacacacactaacttctttttcacatgtgtttagctcaatggctgggcacatctaagcctccctaccactaatgtgcccttaccttcactgccagctcaacacctctaaatctgccctctaacatagttgctcagttacatttagtcctagctcaacaccttgaaatctgccctcaatttagttactcggtaacctttagttctagctcaacaactttaaatctgtccttaacctagctgcccaggtactttttccttgctcagcaccctaaatctgccctcagcttagttgtgtttctaatctcctgtctgctactccaggccaagtcggagaagcggccaatggccacttcccatgagatcttacatggctggctgctctctccccctctgaagcatggaggatcctttgtttccctttttgtctctcctaatcttcgagagtaacctagaaatcccacctcttcttcccagccattggccataagcatctttattgattgatcaagaatgagttggggaacaggaccttcagggttcacatgagcatccctgatcaaagcaacagaagcactccctacaagttaagaaaatagggaatctttagaaagattttcttactccatagcccatcctaccctctaaccaagagcttcctgcctcagcctctgcactgctaggattgtgcgcatgcatcaccacacacaatctttgaatatgatttttaaatttagtttcagtttattaacttgtgtagtgtatgcaacaatctaaataatagccattttttgtccctactttacacctggagcacttga

SEQ ID NO: 141 - DNA, 1000 bp, mus musculus
ggtgtatggctttgttggaggatgtatgtcactgagggcaagctttgatgttttgaaagcccgtgccattccaggcagctctctccctgcctcctgcctgtaggtcagatgtgagttcacagcttctgctcaagtgtcatgcctacctgctgccatgttccccaccatgatgctctgatcctctgaattcgtgagccctaaattaagtactttcttttatataagttaccttggtcgtggcattttgtcacagcaatagaacagtaaccagggcagtctccctctctagcatgtactggtcacagactaatgattctcttgccttaatatccaaagcactcgaatcataagtgttaccacctcctaaagctgtttctttcatttacaacacatgaatgggtcatgcacaatcttcatctaagatatattcataatagagctatttttctcccttcctacccacgtccgagacttagacaatgtcgatcacctaagctgtaattctgatttcctgtttgtctgctgttctctctgagtcccctcattaattcattttctatgctggtaagatctgctagatacttccccactgcccttgaaatccaaacaatgttcctcctcctgatatgtagatatctgatcagagaggatcttggtcgacctcttcatcttccttttgtatccttctcctgttcctatctctccttctacccctccttcccctgactttctctgctctgacagagtaccttgtttctttgccccactttctctatcaggggcactcccttgactctttagctggccagctcttcagagctgttccttatgacacctgaccccacctgactgaaatagatttctaggcccactgttacgtatctgaacatgctgggctacccctctgacatttcaacctggcatattgagtttgggggggttgtttgtttgtttgttttattcatttatttattttgtctgttacctgtctcactgtcgt

SEQ ID NO: 142 - DNA, 1200 bp, mus musculus
atctataataataacttcaggaaatagcaaaatcaagtaatgtacatttctacttaataaagtggaatgagtaatatcattatttaattatgtattccagaaaagtgctctgagctagaaaaagccaatgtgatttcttcaaagatggcactactggagaaatgcaatttttacttaattttcctaccaaagctctttgtgtattttttattgttttaatttcatttgcaaaaaaaaaaatccttgtgatgtctaaatccttgtgactctctgcctcctccctccctcccccctccatccctcctccccctctcctccccctctcctccccccttctgcaatatgtaacctacaaaaatgcatttcacctagcatctggatcctaaaggcagcttcctgtgtctgtccatgtacttctgtgttagagcagacagtgaaaaagacacaggaatcagcagacttattaccacactgctgctgtctcagacgcagaacggagtggccaggttgagagctgcttctatgatcccttcatctgatcaacttcagatctctcatgatcaatcaagtgttcccaaatctcaaatgagctgttaatctcacctctcaccaggactgcaaaactcgatgttgtagtgtttgtatgagagcccgctgacctctctgttcacaatggatgtcgattttcaattagaataagccttaaccatcttttccagccactgaaggcaggcctgtctgtcggtctgcagctttggtcaatcaacccctgggattccatggtattgtctttattctcctcaaaatgtgtttcacaggaataggttggcattcacggtggacgctgtggagagaaatcaaggggttgtgcatagcctggtactgtgatgctgttggtattgacactcgcttgtgccttgtgtctggctctctgggcagaagtggagtcacaggctgtctcctcactcctggtctgaagttctaagattattttttgttacgagtttatgatttttccaattctaaaaaagaaaggaaaaactttttaaattccagatatcttattaaacacctttatgattattcccacttaggagcacatttttatctgacctccgaccatcgttagcatacagtgggtccccatgaatggcaaaacatgtacagctagtaacacaattctgggatctaatctttaat

SEQ ID NO: 143 - DNA, 1000 bp, mus musculus
agcaatggggaagaaaggtgcatttctgtttatttttttagatttatttctgttggagaaccctgctagtatggtcacagtccaccatatctggatagctctccaagcctggagcaaactagactccttttgtcagccgggggcttccctttctctacctggccttggtgcagattgtctctgagcactgatgcctgaccttacttggaagatgactctgtgcagagctccctgcaagtgctgcatgagtcagcacacaaggcctgctttttccttctacccatatgataatcagatactgcattctgatcaatcagccctttccatgagtactcttaagagcccttgtacaccctacccctggaacaataaagcagagctgtttcactggagctgacttctggagtcagaacttctgtcatacttacacccaaggaaccctgctcaccgcttctgctccctccatcattggtggccattggtggccattggtggctattggtggccattggtggccattgatggccaatgacccccaaggaaagggagacccacagttttttttttattttatgtgcatgggagttttgcctgcccatatgtatgcttaccatgtgtgtgcctggtacctgtggaggtcaagagaggaggctggaccttagaactgcagttacagatggttgtgagacaccatgtgggtgctgggaaccaaacctaggtcctctgcaagaacaagtgctcttaaccacctagccttctaaccagccacacactttaatttttcataaagacagagtcctagtatataacatgtgttgcactgggtatctttttgcttcagcttatcaactttaggattaaaggcatgtaccactacaactaccttccttccttcctccctccctcctcctttcttatgtaatggtgttaaagattaaacccagggccacttatagctagacaagtattctatcactgagcaatttgtttgcctgacaaa

SEQ ID NO: 144 - DNA, 1200 bp, mus musculus
aaccacttgacaaaagccacatgacaagaggagagaactgacttctataagttgtcctctcactcagactgaaccttagtgttctgtcgtcagctgagcaacatggtttcacaaaaattacagacaaaaaaaaaatcttaagtttaaaatgaggggaaaaaatagtgtgaaatgggtcattcctctgcaaagtgatggagatagaaacatttttgtccaagagaggcatccccgtaacctggatggaggaggtactgagcttggcaacctcctttggctgagcaggatgtgctagacgagtcctcgaggactcctgaaacttggtgcttctgttggctgaaaaatgatgtaaagtcttgaattacatggtaagtattttcatgttggttgtgatttccacttgatgatagcagattgaagtgggtggggtggattgctgccagtccaagggagaaaagctagactgggcatagcattatgtaggattcaaaaatcgactgcaagccaactttttccagtctccattcttgtaagccagcacgcggtctctcctaaggtgagatttcagagatgcatataatgtttgccatctggagaggggtgtgcttgtcatctagaaactgtgtaagtgtgcacttgaagttctttcctgagatgaacacagagagcattctggggaacagaggtcagcttcactggacaagaatagaaggtcattccagctgggaatgtgctgacggccactctgcccaaagcctgtccccctcaagaggattccagggaaagaaagggttccctgtcagccggaacactgagaactccctcagagtcttttgctttgatggtgtctagaattccagccaccctaaagccacggatctgtcctttcttgctgcaggtcagcctttctccgtagcttgcatggctccagtgtcactagccacagaacttcggagtcaccagacattcttgaagccatttcctaccaaacctgtggctataatttcactgttttccacaccactttcttttacattgaaggtcttggaccagctcactgcttcccactctctggcaggaaaatgaagcacagatcttgttgacacttcaagcaggccagagccaacttttgattcttgtgctactactactttttttaaaaagtctctctctctctctctctctctctctctctctctc

SEQ ID NO: 145 - DNA, 1400 bp, mus musculus
tgggactctttggtcttcactgaaaccaaccagcttagttgctatgaattaatttaccattacttcattcccttggttccaaagtcacaacagatagtgtgctagatcaaaaagagtcccataaagagaaaaatgagaatagtcagaacaacttactctgttgctctaaaaaaggatcgtcagacatcaaataccgataataacatagtatcccacacgtttgtggtgatctcacaacacaagtacttgataagtggtggcattatcattactttaaaaagtgtgtgtgttggggggtgatccaagaaatgttttattctctgacaaaaactttattccaggattcccgagggaccctcttagatttgtgatttcaaatgtcccccacagtccacatgtggcagctctggtccccagatgggtgtgctattggaatgcagtggaaaaactggcaggcactgttctgggaggctgtgggcttggctggtggaggggagctactggtaggtctttgaaggttatagctggccctgtgtcagtcgcaccctctgattctcaagtcaccaagctgtaaatgaggagccacagcacaaagctcctgcctcactgacaagccaccgcccttccctttccccccacaacccccgccataacagagtgcactgcctaaaactgtgagaggaaaaatgaaccctcctccctttaagttgccatgtgaggtattttgtcagagcagtgaggaaaacaactaagacaggggtcatgtacttgacggggatattgggaccccacccctctccctgttctctgctttttggccaccacgaggtgagaggctttctttcaccacacattccatactacaatgtcctccccaacctcaagcccagagacacaaggccaagttaacctggaatgaagtcatagcccagacatttcttcctccttttaaatcttgtctctagtattttgttacagccatggtaagctagacacacttaatgactgaaaattatttcagcaaaacccaagaatcccttgagtgtttgaacaggatatttaaactataatatattcccctttataaaggctgaatgtgaatgtatttggtgacatcaaataaggtcacacaagtgggtcctaatccaatgtctggtatctttagaagaggggaagagagaatgaagggacagatagtggaagaaggcaagccaaagagtgaccctaagaaaagctaaccctggaagcacttttatgttagacttttagcttcaaaaactttgaagaaaaacaaatacccgaagctgtcctgtcgctagtattttgttagggtagctatgaagccagcgcatttactccaagtttgttaataaaaaggaagttattgtgtatttacgagg

SEQ ID NO: 146 - DNA, 1400 bp, mus musculus; identical to SEQ ID NO: 145

SEQ ID NO: 147 - DNA, 1400 bp, mus musculus
gaaatgataaggaaataccctacttgttctttgtataaccaaactccattacctgcaggaagtaaccctaaaggttctcagagaaatgaaatttggcaaatgaatatatttcattttatagattttggtaccggaaatatgtgcaccttatgatagacacatagtcaggatcccaatgggtaactggtttgagctctgaaagggctgattatgttattgtccatttattagaagttatagtaattaggggtatacctagacaaattcagactaacaatgctctggcatatgtctctaataaaataaaaaaatttgcattgtaatataaagcatattataggtatacaacacaatccatcaggacaagcagttactgaaagatccaattgtactttgaaagaaatgcttctgatcccttgaagacaccacaacctgaaggcatcccaggagttcctctgcatgcagggcaactgaccacacagtgtgaaagcctccctggcaacagcttgactgctcctctgaagccccaacaggctgaaggcctcccagaagatcttctgcagccagggcaacaaataagcagcttctttacccctctgaagacttcacagtttgaaggcctcccagaaggcctcccagaaaagccactgcagccagggcaacaggtcaccagtgtacataaccctctgaagaccccacagtctgaaggtcccacaggaggtaagctacagccagggccacaggcataccaggagacctgaaggaacccaggtacacaagaggcaggctccaggcagagacacccagactagtaaatgccagggataaacagatggtgagaggcaagcccaagatgataggcaattgaaaccaatatactttggcatcatcagaacccagttctctcaccacagcaagccttggatacaataacacatctgaaaatcaggaagctgatctaaaatcttatctcaagaggacaatagagtcctttaaggatgatataaataactcactgaaagaaatagaagaaaatgcaggtaaacaggtagaagctctttaagaagaaaaaaagaaatcccttaaagaaatacagaaaaacacaattaaacaggtgaaggaattgaacaaagtgttccaagacctcaaagtagaagtagagacaataaagaaaagacaaatggaggtaaaaattgaaatggaaaacctaggaaagagatcaggaatgacacatgtaagcatcacaaacaaattataagagacagaagaggaaatctcaggtgtataggataccttagaagatattaacacaactgtcaatgaaaattcaaaacataaaaatctcctgacccaaaatattcaagaaatgtaggaaacagtgaaaagaccaaatctaagaa

SEQ ID NO: 148 - DNA, 1000 bp, mus musculus
gaggaggaggaggaggaggagaagaagaagaagaagaagaagaagaggaagaagaagaagaagaagaagaagaagaagaagaagaacaacaacaacaacaacaacaacaagaacaagaaaaagaacaagaacaaggggctggtgagatggctcagtgggtaaaagcacccgactgctcttccgaaggtccgaagttcggatcccagcaaccacatggtggctcacaaccatccgtaatgagatctgatgccctcttctagtgtgtctgaagacagctacagtgtacttacatatgataaataaataaatctttaaaaaaaaaaaaaaaaaagaacaagaacaagaagaacaagaagaagtatttacaaacaagtgttttcgatccagggctagagaaactactcatgcagaggaacagagactagaacccagtatccattaaataaaaatcagaaagaacgcaaggaaaatggcttaaagatgcaactcagaaaatttggggaggggctggtgagatggctcagcggttaagagcaaaaatccctgatgaacataggctcttaagacatttgcaaacagaatagagacacacatcaaacataccatgactaagttggctttattcatgatagttccacaaatttaagtcaataaatataataagcctcataaatggactttaaggcaaaaatcacatgatcatctcaaaagatgcagaaaaagactttgacaaaatccaatgtactttcatgataaaagtcctaaaatggtctagagggagcatacttcaaaaataaaagaatctatatacacgaaaaccagccgggcggtggtggtgcacgcctttgatcccagcacttgggaggcagaggcaggtggatttctgagttcaaggccagcatggtctacagagtgagttccaggacagccagagctacacagagaaaccctgtctcgaaaaacaacaacaacaacaacaacaacaacaacaacaacaaca

SEQ ID NO: 149 - DNA, 1000 bp, mus musculus
caaagccactgaccccactcgatggcgggtggacaaggggcagcccccactaccaggggccctggggcgacacctttggccccagggttacaggagagagggcagaggaagagaggttcccacgcaggcaagagtccttagtccgttccatggctggagcacaggaaggccttccattgggagattacaaacggctcaataggagaaagcctatcccatcttctaagcacagtgggccttgatgaacagaaacaatctatggttttagagcttttttgtaggaaggcaggggggaagagagaaggtaagagagagagggagactggccatggccaagaggagagaagggggaaaaggagagagagagagagagagagagagagagagagagagaaggctagagtaagagggagagagtaagaggttaggttagagagagagagcacgaggagaggatgaggagagagagttaagagtgagagtaaggaaagtaaaagcttaagagagtgaggagagagaatgagagagtgaggtgggaccaagcaccccctcttatagtgggcttgtattatcttgctgttgctaggtaactgggagtagtctagcctgaaggtcagaagcttgggacattgtctacgtgactactagccacagcttttcctgtgggggttatgggggtggtaacttcgacaagagccaggagtccaggagacatgagggaacgcctactgtcccatataggtgggaattaccaccacctggtaccggggttccatacctcagcttgactagagaccagactccattgtcccacatccactatggacaccaacatggaggtttctcacaaaattgggaatcgatctacttcaagatccagctataccactcttgggcatatacccaaaagactctccatcctaccacaaggatatttgctcaactgtgttcaccttggctttattaataatagccagaaactggaaacaagttagatgtc

SEQ ID NO: 150 - DNA, 1400 bp, mus musculus
ttaaggacttttccctgtttagcagtgttctcctgtatttctttaagtgagttattaatgcccttcttaaaatcttttaccaccaccatgagatattattttaaatccgagtcttgcttttcgggtgtgttgtggtatccaggactcactgtggtgggcgtactgggttctgatgatgctcagtggtcttggtttctgttaataagattcttacatttgcctttcgccatctggtaatctctggtgttagatgatcgagctgtctctggctgtagcttgttcttcctgtgattctgttaacctttgtcagcactcctgggagtccaactctcacctgagtcccaatggtcagagcactctctgcaggcaagctctcctcttgcagggcaggtgtccagaagtctggagctctgatctacctcctgagtcctggggtcagagccatccctgtaggctgactttcctctggcaaggaaggtgcccaggggtttgggtctcagctctgcctcctggctgaggatgaaggcctgaggggaccctgtccaagaagctctgttgcttctgttgcccacgtgttctcccgtgttcaagaggtcctgggtgtgctaggagtcctgcgcagtggagagtcgtaaagagtcctctgaggcccttgactccctaggccaagttcatgccgaagatggcagggttggccccgactggaaagaatcccagcctctgattgggcatggttcctttgtccctgtttctgctggcacaggacccccctagattctttggagctgattttgcattccactcaccatgatcccaaggtccctgttgtgctaggggtcctgtggcatgtagagtcctttggggcccttggcaccctctactgggttcatgaggaagatggtggggctggccccaacccgaatggatcccagcctctggtagggcggggttcttttgtctctgttcctgctggcataagaccctcctcaattctttagagctaatgttgcattccactcacccttgctcctgaggtgatcccaaggtcttgcggtgtggagagtactctggagccctcagcggcctcctccaggttcaggcggaagatctatttgggttttagacttacagatcaagctgttttcccccgaagatagtattcgcaggaacagcttaaaaactttaaatgatttaaaaaaatttttaggtgatattaattggcttcacccctatttaaagcttactacaggggaattgaaacctttatttgatattctgaaagagagttctgatcctacctcccctagatctttaaccttagaagggtttctggccttacaagtagaaagagctattgaagaacaatttgttacttatatagattactctttgcctttaca

SEQ ID NO: 151 - DNA, 1000 bp, mus musculus
gaaatgactcaatacagctgcatcaacaacatcccctccgacttctcacacgggtaacaggtcacagaagctaggaatctggagcatcccgcacagccttcagtcagctctgctggtctctgcctctcctaagctgttgatctggtctcagagtcttctttgcatcttggctctattgtctctgagatggatgctcagttattttttattcactctggcagggatgagtctagtgaatctggtcagtttcagggatttcctgaagctgttttgtttaccttcctgctcaaggagcttctgtacaggatagaatgcttcaatctcagaggaaactgttacttaacaacatggaacaaggaaaacccatcccaactgatctgtagacattgtataagaataagtgctgtgtatgatactgttagagtaatttttgaagagactctgtccagcttgagctgtttgccaaacatggttttggaaggcctcacccttctcccccattaccttgccaaaacttaaattacattcctgaagctagccaccaagctctagtccattatttgatcacctcctcctcctgaggctgactactaatgttcagctatcaaagtactgcagtccagaaatcaatagccccttttggctcacctacttaacatccccaaataaaattaaattcctcatcctaacacagggtttacccttttctctttataaaccgccagtttcttttgtaccatgtctgcctcttttctatccagaagcagtcctttgtcccctctgtaacaaatatccctcctcttctctcccatattctcttccccttctctttcattctctatctcctgtctttgtctcttattccctgccttttgtccctctggggcaaataaacttcctttgtgctaagaatttgaatttgggggttctgagcctatattgatcttttataattttgccagtattattgtgaagattaatgccatagtcattaagattg

SEQ ID NO: 152 - DNA, 1000 bp, mus musculus
aacactttatgcttacctgggaccagcattatattgtggaaccagacccaaccttgtagtgggcattttttcctaagcctaagttatcttagaccaaagcaggtgaaaagcctgtgtggttaaggcccacacactctttagcctaagggctggtgatgagtgtgatattcaggtatacactgaggtcagaaggagccatggtttccagggcttagaactggctagggccaggcttcatccaagggcatttatataagaagaatgactcatccttcttccttccagtctatcttgagtgttgggttgatgcacatgtgcaccatgatgtctctctccctagggatgtacctcataaagtacagtccagtcagcatccctcaactaatagtttgctatttattgatcatgaataaatttgggaaaggggatagcgagtctgttgtaagggaatggaaccttttgctacccctagaggttttcatagaagatgcaaaatcattttagctttggcaaagcccagtgttaaggcattttggagttattgattctgtaccataattaaatagtatatatttaaaaattctattaataattaaatagtttcattttcttttttataaaattgacaaaatacagtaatatcttgaataagttatcctactgagaaattttctataataatagaaagtacttatatgatatttattctttatgatttttattctggcatcattttgagcacttaatgtgcattaagtaacttagatatcacagtaagcatatggaagtgttattattatcaagatcagtgtttatagatgagatgttaaatgacttttctgtggtctcacataactaacaaatgcagagccaggtaaagtttatacttttacagagactccccccgccccgccccccgccacctctgcttcctaagtgctggaactagtggtatgtgccattacctctgactgtttcaactctttatgctatatgctcc

SEQ ID NO: 153 - DNA, 1600 bp, mus musculus
tgtctgaaaattacctgttatcctgatttcataaaggatgacttgggtggacatagtggtatatgactacagtatcaacatttgggatgctgaagcaggaggattgagttgagagctcatggcctgcctgagagagagagagagagagagagagagagagagagagagagagagagaaagagagagagagagaaagagagagagagagcgctactataaagcattgttagtagtgagaactttggagccatcgaatttgagcaacacttacccattctgataaacaggcccaatctgataaacaggcccaaacttctccatgtatcctatggtaacaacaggtactgtctaccttgcagcactgctcagggatgctccaggtgcgtggtccccactctttcactgctcttctgaaggcagagcttacacacctccttagaggccttgttattgatcagctctgggacttccgtggctctttctgtctttattcagtacattaccttatggtgcagcagacacatgccagagtctgtcaagagagccagatggttaaagacgacaaagggcatctgtagttctgtggatcttctagaggggatgtagattagggtaaccgagaatacttatgatcaaggtaaaccacgaggaagttaaaacatagagccctgtggcagacggtcctgaggtggtcgacttctgggctgagatgatgaggaaaggggctgctttgctaccatcgaagacatagtttgatagaaggaactggaagtgtaatggcagaggtgggaatacacatgagcagggaatggagagacagagagtcaggggagggaggtgatagatcttttctcagtcctgttgctcttacggcctttcccatggctcgtgtgttctcctggaacatggcctgcatgggatcatgagttgagaagggaataagtctaaggcctctttcccaagcacttgaggtgtttgttggcatattacgttttattatggttggaagctcaggaccagggattttatgtcatgtctttagcctcttagaaatctctactaacagttttgactaaaacgaaagcccaaatacagattgaagcattaagcaaactaagtatcacacttcaaatgatgcatattaatgctttagctcctacagattaataaatgagcaaacatgaggagtgaggcaggaattttaagataaggttgctaaaaaacatcttgagcatttgtttttttttttttttttttttttttttttattaggtatttagctcatttacatttccaatgctataccaaaagtcccccttacccacccacccccactcccctacccacccactccccccctttggccctggcgttcccctgtaccggggcacacaaagtctgcgtgtccaatgggcctctctttccagtgatggccgactaggccatcttttgatacatatgcagctagagtcaagagctcaggggtactggttagttcataatgttgttccacctataggattgaagttccctttagctccttgggtactttctctagctcctccattgggagccctgtgatccatccattagctgactg

SEQ ID NO: 154 - DNA, 1200 bp, mus musculus
accaaggtcagccagaattcctgtgtcctgctgtgtaggggtctcttggggaagggcataatcatatctcagtctccaagcccacttggttcttggcgtctcttatttggagtcatgcaggcctctgataaattttgaatgtagtgcatttgagaatgaggcagacgtctctccatcctggaagagcaggactgatagccacaatccattcctcagaggatgctgaataattttcagatgacctttcttggcatctccctgcttttggtgtatcagcagctggataactgaaaaggtcatgttgactgaatatggcatggacatgcccttgacagttatgtatactgtgagggttgagagaggaggggagcagtaagactgaagtaagaatcaagcccctggaaggcagttcgtaacaggagcatgcacgtgacaggaaattgaactgagactagaaagccagttggctaggaatgtttcaccataaactgtggggcaatgggctatgcaccgacagtctggtctccagtccagctgaggtcttgaaccctggtgggatccgatgggtggtaatttccacctacatgggacagaaggcgttctctcatgtctcctggaaacctggctcctgtcgaagttaccatccccacagccctcacaagagaggcatgtggttagcagtcacttaggcaatgtcccaagcttctagcattctggctagactcctccccacagttacctagcaacagcaagatagtagcccactataagaggggctgcttgtcccctcctcactctctttaagctttcttactctctaactctccccacccctctctctttaccttctcacccctctctctctaaacttttacctctcttactctctagcctttcttctctctctgtccccccttctctcctcatggccatggtcggcctctccctctctctttctaccttctatcctttctccctaactttctacaataaagctctaaaaccatagactgtctctgttcatcaaggtctgccgtgtttgaatgatggggtaggctttctcttaactagccaaggctaacctccagacaaaaggccttcctacactgcagcaacggaccagactaaggactctcacctgcgtgggaaccacccatcaccgtctcccattgccttctcttcccttatctccagggccta

SEQ ID NO: 155 - DNA, 1400 bp, mus musculus
gaggagaaaccttcagtggatttcattaaatggattttatttaatactgaaatgtggaattcaacacagccatacaacttaatttagaagggcacctagatgcgtaatcattgggcattgcctttgctcctgttgatttggaacgtagtacagaatgaatgtgttgtctagggacaatatagtgttcagctgcttagtaactccacttggagaaccacgagggaaaggttcatggaccctgagccaaactctagcttcttgacactggttgagtatataagacttagttccactacatgcaatgtgggctgcatgttttgaggagtgacccatgtgtgctagacatgtcctgcaacactgtagtaagtgattggagttttaatgggaaagtaattctggaagttttaatttggaatcagtgctctaatatagagttgtgacctcccttgacttgaaatgtgaaggctaccgggtggcagtgattcctcttccttcccttgcctttacagtgttgtgtgaagagttgggcctgtgtgggagaattaaggtttcctcttgatggtttgatcgccaaacattaatgtgtgctagtgtatgcataagaactgaattccaaaagtgatgtggagaaagccagcgttcttaccatgctgttgtggcctgttgctctagtcttgcttggccactctactcttccatgttgtactgtagcatcctggtctctgcccccagcacaggaccatggtgactgcttttctctcctcagttcttagttcttagcatttttcatggctccagtttggtctttgccatcctgaatggaatataaattcttttcttgttaacatcagcaacaacatagtaactgctgaatctagtgaactatatagatccattttaacagcactttcttcaggccatggcatttgtgagggctttaacatttttttttttattcttcttccccctctattcttcctcttcttctttttcctcttcctgaccattgttgtacatctctctttactcagcatctgaattgaatctgtgggcttagtccatatctcaatgttattagtttatgggagctcccagctccaaagcctatttgacagttactagcccttgaagataactttcctctgtagcttcatttagatcatccacagtcatctaaaaatccaagctagcccaaagtaaaaaccttctctttaatgttaatttcactgtattctataattcatgcagtgatgtttatatttacctctcattcaagcttgaaacccataacttgtcttacatcaagaaaatgactggttattttacctctgttttcttcaataaaagtcccatggcatttatctctgtgtatgggtgtgggtggaaagagaggtggaggc

SEQ ID NO: 156 - DNA, 1000 bp, mus musculus
ctaagttcatactctaaacattctagtcttggatgttcctggtgtttcaacagtgcctcatacccacctagatccataacttagaacacctccctccttcccatgctacagaaggcccagtattcagttcccatggatacagatactgctaggttaagtaccaattctaccctgcactggtgccgtgcatgtctactgtgtatcattcctgatctctcaaggttttcatctttcctggttcagtttcctgttgtgatagccactgctgtgtatttcagaattttagttgttatgtatatggtggaatttctctgagtattatgctcatgaagaatgtaacatgcaatggtgtattcttagtgtcacaaatgtccacggattcagtgacacttctaacctaagactctttacaagatcactgagttaaggttaagaatattagtttcctgagagaggtgttttctactagaaatccatttacccatccacatgtcctccagcccatgggtgaagccagtcatataaagtctttcaagtgttgcttttaacacgttctaataaacagcctgtgcttaaatgataaatcagaaaatattgcatatcatcacagtgaattattacctaacatgtcacagagacattattgagtgcacaaaacagcatccatgtagagtttgggcacttaggtgctccccaccatgggaactaattgtgtgtggctatttcaaactttgctcaaccacagtgaaaggagctggagaggctcggttgctagggcaggtgaagcagaatgacagaaggtaggcatcttgggggctattttgagaaggtgacactttctttcagtgacaccaagactgtggtggaatatacagcaactgcctccttggcacaaatatttgaaatgtttaatgcattctgatatttgctcaaagcatattaaggagctatgtgacaaatttccagttatacatgaacttttgtgatggctcggttcact

SEQ ID NO: 157 - DNA, 1800 bp, mus musculus
ttgcttctttatgtggatcatctatactatatacaacctgcatagttagatgagatggcccagatgtgaacctcagagagccctttgatatctccggaaagatagatctgtctatggggaaaacttactagacttaattttacaattgtacgctaataaaaatccgattttagctttctgggtaacttgattttgtcaccattttcctatttagaaatacagaattaactcagcaatagctgctaagcataaatcatgaacttcctaataacaaagtgtgccaactctagatgtagcatgtccattccaaggagaaacaatgacttttatttgcgttcaggccagggaaaataattcagtttaaagacctttgttcagaactcatctaagaagccagtaacatgtgtaatgctactgctaggggttagatattggaggatccttagagcttgctggcaccccggtcttgccatatcagtgagcttcaagttcagtgagagactctgtgtcaaaaaataaagtggaaagaaatagaaaaagatacccagtgtatactggctggttctgtgtttcaacttgacacaagctggagttatcacaaagaaaggagcctctcttgaggaaatgcctccatgagattcagctgtaaggcactttctccattagtgatcaggggtgagagggcccattgtggggttcaacgggttaccggcgcctgccggcgtagggtaggcacaagctgagccagtcagtgtagcgcgcgtgcagccccgggcatgtaagggcatcacagacctgttattgctcaatctcaggtggctgaacgccacttgtccctctaagaatttgagggacaccgaccgctcgggggtcgtgtaactagttagcatgccagagtctcattcgttatcggaattaaccagacaaatcgctccaccaactaagaatggccatgcaccaccacccacggaatcgagaaagagctatcaatctgtcaatcctgtccgtgtccgggccgggtgaggtttctagtcttgggttctataagaaagcaagctgaacaagccaggagaagcaggccagtaagtaacatccctccatggcctctgcatcagctcctgcttcctgacctgtttgagttccagtcctgacttcctttggtgttgaacagcaatgtggaagtgtaaactaaataaaccctttcctccccaagtgcttcttgatcatgatgtttgtgcaggaatagaaaccccgactaagacacccggcaatgacctctgccttccaccatttaagtgtgaatgtatgtgagtatgtgtatgtgcatgtatgtgtgtgtgtgtgtgagtgtgtgtatgtgtgtgagcatgtgtcagtgtgagtatttgtgtatgtatgaatgtgtgtgtgtatgtgtgaatgtgtgagtgtgtgttgtgtatgtgagtgtatgtgagtatatgtgggtgtggggggtgtgtgtagggtatatgtgtgagtgtatgaatgtcagtgtgagtgagtgtgtgtgtatgtgagtatgcatgagtgtgtgagtatgtaggatatgtgtgagtgtatgtgagtgtgtatagggtgtgaggtgtgtgtgagtgtttgagtgtgtgtatgtgagtgcatgtgtgtgtgtgtgaatgtgtgtaagcatgtgtatgtgagtatctgtgagtatgtatgatatttgtgtgtgagtgtatatgtgagtatgtgtgtgtgagtttgtgtgtgtgtctgtgagtgcatgtgtgactatgggtgtgtgtctgtgaatgtgtgtag

SEQ ID NO: 158 - DNA, 1200 bp, mus musculus
attattccataaccgactgcattatacccacttcttctgttgggttcctagaggaaatccttaaaaagttctcccttttgttgatcatcttagctgtctatacgcctttatgtccataaaagacctttggaatatagtgtgatactctcatttcatttatacagtgtccaagcacctataagtataaggtgaatttaagccacaaggatttaacatcaagtcccagcattttagtggggaaatacagcagcctagagcttaagaaggaatgtctgaaacgatcttgtagctcattcagaggccttcggagaaacacaaattaaggagtaaggagtccgtgctctcatctgtgattcccatgctaactgtgtgggcctaaccattctgagccatcacctggtactcagaagtcattttagtggctcctgctaggtttaagacacccactgatttgtacctttcaagcaaggttaacaccaaagtgccagcctgtgagttcctcctgacccatctgtttcccagcactggaggaaggagtcacattgacagtcccaaattctgtcataacctgcctttcacctacctgaactgcctctcctaccccataactccacagatttaactttttataggcatgagatatgccttgttattagattttttgcaaatgttcatatagctgctacaaaagaatgaaaaattagctttgttgactgtctcttggtatttcataattctgaaattatgagtaaataatgtattcatatgctgaggcaaatagggtcgtgggaagctaatgttttgaacacaatgtacaaagctacagatctgtctcccctctgactactcagcctcctctcgggcagttgctgtcactgggctatgtacctagcagagctcattctatgtaagcatagagtatacagtgtataaatggcagcatagtttttatgttattggataaattctatgctgtcataactgcctgactccttagcttcatatttttatcatattttgccatcttcccattgactattactttgatttgcatccatgtctgtatatagtaaatggcacattgttttgctgggagaaaactgttaagccctgaatcagctggaagaatgggctataatgactaatatggtcactaccactgtaatctccatttctgtagcagagcctaattatgtcctt

SEQ ID NO: 159 - DNA, 1000 bp, mus musculus
aacagcacaggtgagccatgtggcttcacatagcacgtaggcagcatctaagaacttgagtgtgcaactgcctctccaaccatcttgtggcggtttcaggtggccttttaggtctttcaaccttgagagttcatgatacagaacaccccctacccctaaccctactcctacccttcctcttccctcttccatctttatcatttgttatgaactgatcaacattcacatcccttaccagtctggaaagcttacttgactttctgtcaatatcattcccttgccatctgtgtattaataaatacattgtagtattgagtcttaacggccttaaatcatatagcccatggagataaatctacctaacctactccatggcaacagagactaagggattcatacatgatcatgagagcctggccaggaacctctgtcagccctgactccttctctagaggtatcccagactcactgcctgccatgtacttgaatgtgggtattttctcctcattgctttctttgtatccctaccttactaaaaacatagaatgaatgctgagaggagtgatatttgtgaagtccttgcagttttcttcctaactggatgccagtactaatgacattaagcacccagatgaaacacccgttcatttagggtggagaagccaacataaatacagtaacatataaatgagcacagccatttcagaccacgacagcagctttgacaacgacacatcaggtgtgttttggtgggacggaggtagagaggtgactattttacatgaggatgtcccaagagctctttgagaggtcatgtgagaactgaaagaaagttgatgggatagaaacaaccaggtaaagatccgagaatcctgcatttaaaaaaggcaaaagtatgtgcttcaaatgcacagagggaatgagtttggaaaaccggtagccatcgtgggcctgagggtgatgggcagagggaatggaaacaaaggccagagggtgcccc

SEQ ID NO: 160 - DNA, 1000 bp, mus musculus; identical to SEQ ID NO: 159

SEQ ID NO: 161 - DNA, 1200 bp, mus musculus
gagccttcactagtgttgggggtcagtctttagtaggcagagactaagcatcacattgatgatgtccatactttatgccagctgccatgaaatgccttggaggaaaccctagaaggggtttcctcccagaaggggaaggaagtaatatcaggaagtagagggagacagggatctgggagggagagaggagggggagaggaaaagggggtccggttcagatatgggagtagatgggggagattttcaaaggaagtgtgtagcggtgggtgagggggaactgggcatagccactagaaagttccagatgccagggacccaagaggttcccaggacccagcagcgaggacattagacaaaatactcaacaaagggaagatagaacctgtagagatcctatccagtggatagacacagcccctggttgatggatgagccaccctcctacctcaaaaatattaattcagaattcctcttatcaaaaggaaatgcagggacaaagaggagcagagactgaggaaaggccatccagagactgccctacctagggatccatcccatctgcatacaccaaacccagacactattgctgattccaagaagagcttgctgacaggagcctggtatagctgtcccttgataggctctgccagagccttaccaatacagatgctgatgctcacaaccaaacattggactgagcatagggatcccaatgggggaggtagggcaaggactgaaggagctgaaggggtttgcaaccccacaggaagaacaacaatatcaaccaaccagacacctcaaagtgcccagggactaaaccaccaaccaaaaagtacacatggagggacccatggctccagctgcatatgtagcaaaggatggccttgttgggcatcgggcatcactaggaggagaaccccttgttcctgtggaggctcgatgacccagggtaggggaaaactagggcgctgaggcaggagtgggtgggcaggtgggggagcaccctcatagaggcaggggaggggatagggggtttgtagaagggaaactggggagggtgataatatttgaaacgtaaataattaaaataaccaataaaaaatgaaaaaaaagagtatgtaacatttctgagatgagctggaaatttttaaaaaattatgaaaaggattttcaatatcttaaaaaatataagactgggga

SEQ ID NO: 162 - DNA, 1000 bp, mus musculus
tcctctcctctccctcccctttttccttttctccttttcttttctttttcttctcttttctttcttttctttctcgtcgtactgagtcctgcctctctggggtacccaggaacctgggaggggtcagggcaaagtccgaatcagggagtccacaatgattcctggtcttctctctggcgtaccatcccagggagtcaggaactggtctgcggtctttgcttctcctcagggcatctttgtgacaagcaggagaggggagatggagccccacatgagcagaattcagtctgattaggagtgaggggctggagaggaggcagccttcttctggagtcttaggcatggctccttagtcaaaggccttcttcttgggtgatccttaatggagcagctttctgagacaatccttgcttgttttttattgctttatttgatggtggatgtaaatgcgtacactttattcgggatgaccaaggggttatataccttttgggggcaggatatccaggaagggaagctcattggctgaaggctcaaggctatctagacacctcattaacatgaagaagaattccaagtgttatgctatgtgactgactgtctggtcttctcagtggggtgtagtggttacatgttgtagagcaggtacagagacaggtagggaatggctccattcctgccaccaaatctctgagattcctggtttgagctcattcagccttaaattcttatgcctgtctggtagtgcattcccacatgtcctacattctaacgtttttcctcctttcttgtggttcttctatttctctccctacctgggacccctggctgggatcagaagtccagccttcctgtctcccctgcccagtcataggctgatcatcattttattaacctatcagagataattggaggatattctttacataacattgacacaggagatagttcaacaatcaatacaaagctagtgttcatactgtaaccagatctctgggca

SEQ ID NO: 163 - DNA, 1000 bp, mus musculus; identical to SEQ ID NO: 162

SEQ ID NO: 164 - DNA, 1000 bp, mus musculus
tcagcaccaggagcagtttgttacctacaatgtttgctttttgttgctgttgtgttcaggaacgtcagactcatacatgttggaattggcagatgaaatttctgaagtttcctcatttgtggttgtggttaacatcttctgcctgtaaaaggaatgatggtcactatatcacgaaacctcgacaggtagaggcgatgggggtatttgctggcaggtaggtaggagaattcggctttcttcctgcttgaggaagcatcctctctcatcactgtaattggcttacatttggtgaaatgtggtgtttgggatatcacatttccaatggaaattgatgcaatgggtaacttatcttctaggttagtggtttgggaaggcccttcagggaatggtgatggtgactggcaactagtctcaacagaagccagaatcagagtgctaaaacccactgaactctgaaaaacaatcctcagtcgtgggacaaagcagctcagaacccactaacaatttacctgtgttttacacaaaacagacacacaggagaaaaggctagatatgaaaagtctacctccacaatgtgtgtccaggtccagaagtttacctcctcccagagatcaggacggtgacctgacctatcagtcacttgaacaaccttctgctctcaaaagcaacccagccaaggacccctgagggaagatcccatacctgaggcagttattttcttctgtcggggtctttatgttgtacttatgcttttcttcagcttcagcaagctttgtctggagcaatttctctagatttgccacaatagttttctagaagataaatttgaatagctgacttccccagagcccctgggacatagctcctgggcagaacagcagttctccaggttcctctccagcccggctctcagtctaaccaggacttgcctgtctctcgagttctttctggcatttgtaaaggtttgtgttcagggtctccagaacagtagcttgtgccc

SEQ ID NO: 165 - DNA, 1400 bp, mus musculus
aggctttcccatatagccgaggtgtgtgctgagccagactatctaggcttctaagtacactgtgatattcccacaatgacaaaatcaaacagaggctcttttctcagaaaatcaactcatgggttcatttctagcgttgcttcctcggttagcccttccgaccaccttcctttctttcttttttctttttttggtttttcgagacagggtttctctgtacagccctggctgtcctggaactcactctgtagaccaggctggcctcgaactcagaaatccgcccgcctctgccttccaagtgctgggattaaaggcgtgtgccaccactgcccggcttcgaccacctttctaacatcacctgcattcctctacctaaagcttttcagcatgtagttatttatttacccagctatgtccacctcttcctgtagattgtgaagttccagaaggctttccgggatttaattcagtatgagaggtgctggagaggtagcccagttggcaaagtgcctgctcagcagaggcggccagcatcgtgacctgaggaactacgtaccgggctctcagcttttccattgtgaagacagtctttgttggactacccagaccatatcgggtaaagcagcctaacaaatcctgttttggcatatggtcattctatggggtctactagagagccctagctgccgtcataggtaccagggaagtacatggcagtaatgttgcacaggagagaaagacggtttctattgcttctggcccctcccttcctgggaaactggaaagaagctgccagacttgaaggcacttgcttctactcatcttggaaacacttaaaactatgtctaatgctgcactcctagaatataaattcaggcaaatagcctaggagagtcaaaatcacgactttaagctcatttgaagaaggtgagggggaaggaataaaagaaaagggaggaaggaagaaagaaagaagaaattgtagttatgacctaaccacagtcaaaaatctctttggcttccattggtctggtatgaatgggaggctttaatcttcagaactttgtgcgtgtgcggccaagcagaggaagggaaaatcaggcacgaagccattgaacacaatcacatacttgctagccttcctcaagttcagacctctgcttgaaggttcaccccactggttctaggaggcccaggctagcatgagaaatcagtgggaaaatgttctttcagatgtcaagtcccagcttctatcagacagatgaatagagccacaggcatggacaggcaggcaggcccttttgttggctatgtgagcggttccaagttttcttcttcaatgttccttagaccaaatgctaatatattctgtcctaaaacatggtgcatagaattaaggg

SEQ ID NO: 166 - DNA, 1200 bp, mus musculus
agacaactcttataaaggaaaacatttaactggggctggcttacagcttcagaggttagtcttactctcttcatggtgggaagcatgacagtatccagacagacagggtgctggagaaggagccaagagttctacatcttgatccacaggcagcaaggaggagattggatatatttcatactgggtgtagcttgagcatttaagacctcaaggccctgccttcccagtgacacacttcctctaataaggccagacctttaataaggccacaacccccaatagtgccactccctatggtcaagcattcaaatacatgaatctgtgggggccaaacctatccaaaccaccacagggtggtagctgtactggtcagcatgccagttctcccttatccataccaccagggtgagctcttcagcactgctctggctctgccacccaatgctgccattgcaggaggcagggtcagctctcctgttcttatacccctggggctggctcacccccacccatgccttcagagccagctccactctgttgccaagtcaaaattcagggctcacttttcccaagtgctgcagctggtgaggggcaggaccagctcaccctctctcctgaccttggagtcacctctcctcttgtcctgggaggttgagggcggagggcatatccctcaaccccaggccatctcatagcgtaggagtggcagggttgggtctccctcgctcttaccctcaggctgactcacctgtgttctctccacacatgaggagcagggagggcatcacccaagtcacctcaaggcagagagtggtggggcagctctcttgccctcagggacagtacacttgcacccccaccatgagggtcagctctgttgtgctgtccaggcccagatgcagggcctgctttcccaagtgctgttgatggtgaggggcagggctaattctaccacgcttattatgctgtggacagctttcccaactgctggattcagctctcctacactcttgccctagggctggcctactcacatctttgccaccagggccagctccactttactgcctggggaaggctcaggacttgctttccctagtgctctataggtgagaggtgttgccagctctccagagccctgcagtcagtgaaggacagctccaattctgcacgggcgtgtctgtcccatccaagaacatc

SEQ ID NO: 167 - DNA, 1000 bp, mus musculus
attagaacttggaacatcgaggcagagttctctctgtgctgacagccatgctctgagagtaagaggagggctaggtggctgctgagtgattggagtcctagctgcttgggagaatggggaggctgctgatgcgggcagttaaaataattgtccactgacgcaaacacaacttaagtctgcgcacgaacaccgagtgtcaaaaatctgccgagctggcatatggctcagtggtaaaagcatttgctgtcaagcttgacaactgagttcaagtcctgggacccacattctggaagaaaccagaatataactacaaaaaaagtaaaactgtctatatagttaagtcttcttccttcctggagaaggtagctgcccacatggaaggctgaggacacaaggttgtggggatggtccagggcagaagtgtttgtatctcatgtaaggcagttagaagaacaaatatgcaaaggagcgaggtgttcaggtaacacaaaagaaaaagtgagtcgccatggtctgtaggcttgggtagaagagaggccagtcagggattggagttatcacaaatggagaagtcaaggaaacacagatctaagtagaccccagctgtaagggaagttctggagaggggtgctcaagatctcagagtgggacagtcgcagctactatggagggattggggtagaaagtccttgctgaggcagctggagtgagtgaggtggaactgagaatattatggaggtctgatgctgagactagtcgaactttatatgcagtggctacatttcttccacttaattagttcctggttattacctcagatagattgcaattaacgatggtgagctctaggagtgtgggtcttctttcaaagataggcatgggacagcctcccttgatagcgcagaggggaaccagggcttcaggagaactagctcacagaggaggctgaagagaggctgccatgtgggaggatctgggacgaagtcaatgcctttgaaga

SEQ ID NO: 168 - DNA, 1200 bp, mus musculus
gttgtgggatgtgggaatgaggggcagggaagactgaataggtaaaacacagcgaacatttaggatagtgaacctatttgacatggcacttttatcatacacattaagatgcatgtgttcggtttatagaccttcctaagagaaacacagagcctcaacgtcttagttagggttttactgctatgaacagacaccatgaccaaggcaacttttataaggacagcatttaattggggcttgttcacaggttcagaggttcagtccgttatcatcaagctaggggtacggcagcatccaggcagacatggtgtaggaagagatgagagtactacatcttgttccagctctggaggcaaacaagacaggcttccagggagctagggtgaggtcttaaagcccaagcccatgatgacacacttcctccaacaaggccacacctcctgatagtgccactccctgggtcaaacctattcaaaccatcacactcagtaaatttaaaagtcactgtttagtcactggggtacccaggaaggaaaaccagaaggggattcgaaccactgcactgaaaacctccggattccatgttgccagcatcgccttgccagcgtctggcttctatagtgccacttagcttccggccagaacgaaccagtgcagaacctggccggatgcaccaggtcctgtctctgaaaccctcactctacacctggtcactgttgccaaaatccggttcctcccagctgcttcttcataaactcaacctaaagccaagagcagctgctgccccagggctcccccaactgctccttgtggtcccctctccaatcagggcctcagccatggacagccgctcagatcaaactcaatgagacgtgagactcagttaattacccccatgctagctccctccttcttccctgctgggagcttgcagagggctgtgttgccagggccatactactcaggatagagttgattaaccaaattagccatgcactttgcctgtgcacatttacttcccactgtttgctctctcgtcgttttagggcttgtaaacatataccaaagacagccgcctttgacatggttctacacctcaaggacacaagtacatcatgtgtttatatatcaggaaaggtctgcaagatatcacattaacccatggatacagctacctccaggagaaaaataaaaaagggg

SEQ ID NO: 169 - DNA, 1200 bp, mus musculus
tcactggtctggactcaggcttctgctacactatcagtactggatcctcactgggacccttctcaggtattccgttgttgccctgtgtcatgatggagatcctgcagctttggttctggaggaccaggtcctttacatgctccagcagttcatagatagggtggatgtcgggatgggccaactcaaagccctggatctaggcctgagtggtaggtgaactggtgtgcccaacacttaggttcatgccattggagccagctctccagcacccacatcacctgggccagctatccagcactgcctaggcaagggatggaaccaactcactcattcttatgccctcagggctagcttttcaactctgcccaggtgagcaggcagagacagctctccctagatctagtatgctactagggcaaggtggaggctgctctccagagtgctatatcagatgagggtggggccagctcttcatagccctcagatattaacatggccccaagcagaagcccagactggggatatctacataccctttggcagtaaaagatatcttactccctcactaccgtagggtcactgacccagatatggcactcaggcgcagcatgggccagggcctcatcatggcctcagatggtgtcacaagctactcacatcaggctgttcctcactaccttcaactctccagttctatctttcttcagtgtccacacaccattctgcctctctttctcttccatctctctaacacttacgtgctcatcttagtggtgccagaagcctatgggtttctggggtcatctcaggagtgccatgtcctgtctgagccacttggcactgagctgaggttccctcccttcttagtattctaataacattgttattttgctcttgactacttcctacggatcccaactttcaccatttgatgttgtctttaatcctgtgtttttcaattaacatactgttcaagacagacatcagtaactaaatttgctgtttttactcaagtgagaacactggatgataatagtaagctgagaagtgcctacctcttaaagcaatgacttggacagttttggggattaacgccaagtttggatgctataatagtaagaatttcaaatttgcaagtcataagataaaaggcttacttctcattttgcattttattaatgcgtaggctacttaatagga

SEQ ID NO: 170 - DNA, 1000 bp, mus musculus
ctcaaacagtcccctctcattaagctcattaacagatatggcatatcaagtagcagatttgcaaagcatgtaagggagagatttgtgcaggaattccaagtctgactacttgaagaaagtgctccgctcagatgtacgtctagcttctggatcttggcagacagaaccagctagcacctctgctccttccaccatccctcccacacgcgtctgccctgatgggtacttagttccctgttaaaggtctcgggacttgttttgccattgaccaagatgtgttttaaaaaaattaatcgcttatggagttttggcaaacagcagcctgagctgtgctttttctaacaaataacttgcagattgtcatgtttctcttgggaaagggaaaaaacatccaatcagaacagaattgaaatgatataaattaggctcattgtttagcaaatcgctggctttaggtaagaattgtggataagaatagcctgggccctctcaaggatcagagcaggcatgtgtgcctgcatgaagaaaccaggcctttctttgttaggatcctttctgcaatggctattaaagtaattacagtaatttatagatttttttccccttccatttcaaaacgggttccatttttcctcttttgtcttgagatcctcagttggaaaaacgtctgtgtgtgagcatgtgctgtagcactgtatcgcctgtggatcatctgcctccacgctgatgaggtgtgatgctcacagaagtctagagatggtttggcagctctgcagacaggaaacactggtccttggaagtgctaagtatactgtataatcatataccataatggttaattatgattttccgtgaaggcattaaaattttctgtgttcaatttaaagatacactatttctgatgtcttaaaacttaccccttcaaaacaatggattttatggttatactttgttgtagttttatgtcagggatgcctgggtataagaactataatacttt

SEQ ID NO: 171 - DNA, 1000 bp, mus musculus
acagaaaaatctatctagtaaatatctcaaggaccacataatagataaaacaattacatgtatttctacaatattttaagtttttgcagaaggcaacaggattatatatgacattgaaagtattagcttgttcccatatttgtgcttgtataatgaagacatgtaaagaaaatacattttgaaattatttcagagaaattgaattataagtaactttttgttaataaaaattttcaaaagtatcatatatgtatgtagtacatcccggttacaaccctacactctttcccccttgatcccttgctattctgccccctcccttcctttaaaagtatcattcccagattcaatttgtgactttttgtttgattatatgttccacataagtgtaaccagagcagacattgggaccatggatttggaaccattcatgagagcctgacacgttcaccagcagatacacaactaggaacaatgactccctctcccgaaaatggccagttgccagtagttcagctgtagatagcacttatgaacctcttcctcatcttcagccattgctcaaatgttgtgtgggcctgtcttgctgatgcctatatgttgaagtgaaacatacttcctatttttcctctagcagttttaagaacattttggcatatttattactttatatgctttagaaaatcttaaaactacaaccagttctgtgccctttgaaattcaagacctctacaacctccttcctctgattttctattaggcatttgatacccagtgagatgtttcaccttcaataacaagaggtatttaattagcatccagtagtgtatgattggactccccgatgtgacatagtttcatatgaattattataatgcagtatacatactggtgatgatgaagttattcagtaaagttctataattattagaactgtatcagaatcttcactttcctctctaattttagatggtagattgtttaagttttacttttacaa

SEQ ID NO: 172 - DNA, 1400 bp, mus musculus
taatgtcttctccatgctatggggtccccacatatgtgtggtgtgtgtgtgtgtgtggtgtggtatgtatgtggtatgtgtatgtgtgtggtcatcacaatatggtgaccagccagccagctgatccatacacaccacaagtgacctgcttacggcttccagagaaataagtcctttaagtacggttcaacccagactgtttccggctaccttggagacttcctgcaacctgcctctcttcttatagaagcgtgtgcactttctagacatattccctcatggtccactaagactcagcctaacagcaccctatattcctgggtgctacttccgtgcccagcaaacggggtattttaacacatgcatttccactgtgcagcgaggccagggctgtgacttgcattcctgaccgggtctggctttgctctgagagccaccacagtgtttcaggatgtatatcgggacacagcatccaagtggcactttgagaggaggaaacagttccagctgactggccaccaagggccacattcagaatctccaccctggcgtggctacagccccttcctgcttggaccttagtgtggaactgttatttccacagcccggtgcttaccagacagtagtgacagtttgcccctggagctctctgtaacttaaaacgccaagagaacaggatccaaactctgactgccacatctgccacctgctcccaaagtgcctctgtcctggaattcctcgtagcacatttttcagacaggtcctgtgtcttccaggccttgtgacagaggctaggggaatagtaaaatgatggggatcctatccccagaaactcagatgaactttgacctgatgactgactccctggcgcctggcaagcttctcccagcaggcttccatttttcggacagatggggaggcttttatttctctcttacaattggctccttcgggaggcagaggtagtgagctccttcccagagggagctgtcatctcagccaagtggagggatgctggcagcacaccaggggcttaggatggctatcagttaccttatgcccctagttggtcccaagaggtgaagagatgagctccgtgcccatttagaaggtgaggcaaaccaaggcaggacagcatgatagaccccggccagcatgagacaacttagcaagtcttagctctatcaggtttcactttcaccatcagagtttgagttgctgttactgctgccagtgaggagagagtggtctatgggcccttgttaccgacttagtactccggcgtcattacggaacgcttgcaaggggctcttgaagttgaagctaaagaatgaggattctatagtcataaaaagaagctgacggtcatgctgaaaagagccagtcccaagccttcaact

SEQ ID NO: 173 - DNA, 1400 bp, mus musculus; identical to SEQ ID NO: 172

SEQ ID NO: 174 - DNA, 1000 bp, mus musculus
agggccctgacccaccaccccagacagcagagagggctgcaggttgctctttaataatcacgtacactggggagagggagaggaagcgagttatacgagctgccgctgctgctgcttggtggcggccttgttggccaggtccttggccttctctgtagctgccagtgcggtctcctttgctttctctttggcctctttggctgtctcaacaagggttttggaaggggcctcaccttgtagcttggccaggatgtattcaaagcccttcattgtcttggtcacattgcttttgaaccgagcaagaccaaattcctggctggacagctctggagacgccaaataagctagaggcttcccgacggatttcggtccagccgctattgtcagagttcacacagtaaatgcatcgttcctccaccaccatcagctgggcatggttgatgttccaggtgaaggtggtcatggtctgattctgggggtccacaatagagtcctccaggatgtacacagagtgagcaacattggcaggaaacagtcactctgcccaacgtggcatcctgttggtcttggtcaggagtctccgggacagtagcttctggtcaggggtcacctcccggtgcactatgtcttctgttaagacatgtttgctatagggattcgggtaccgttgccagaaggcagcgaacaattggtcccaggaacttcggagcacgctctggcccaggaaatactttaccatcgtcccaacccgggcgggctcagcacccgtgcagcatccgagggtggggggaacatggctaggcggacgccagccaggctcgcagctcaatcaccgaggcgctgcacccagatccctaccgccgccatcaggggttataagaggtcctgattctctgccattcggtattcctcaggtgagaattctttgttcagttctgagtcccgttttttaatggggttatttgattttctgaagtccaccttcttgagttctttatat

SEQ ID NO: 175 - DNA, 1400 bp, mus musculus
attaaactgtgtatagtggagtatcagcaacaaaccctgaactgttactgaccttgcagcacagatgaacatcacagccacaatactgaacaaaagaagcttctgtgtggttataaagaagacaaactatgtttatgatgtcagaagttaggataggagcaaagggaaacctagagactataatatcttccatttcttcatatagataaaataagactactgtctggtttcactctctaaaagttgctctagctatacactatgttatatgcactttttctataagagttacacttccttaaaacacagttaaaagtaggtaaaaatatcctcggtattgcacatagttcaaggtgtctctcacactctctacaggggagcaggggcctccatgtcctttggagactagcattaataagccttacctttctaggaagaatcctcattgtctcagacagttgtggtgaaagaacagataaaagaacagatgccttctgcgatctacctgtgagcatcctcagagtaaagtgggtactacaaaagtgatttcacagagttaagaaggctgggatccattcaggttagagccagccctgccatcttctgcatgaacccggccgagggcatctagggcaccagaggactttccacgccgcaggacccctagcacacccaggacctcctgatcacctgagagcatgtggatgatagaagcaacagagcttcttggtcagtgtcctatcgggccttcatcctcagccaggaggcagagctgagacccagacccctgggcacattccttgccagagaagagttggcctacaaggagatttctgaccccagaactcaggaggtggatcagagctccagactgctggacacctgccctgaaagaggagagcttgcctgcagagtgttatgaccagtggaacacaggagagagatggactcccaggagtgctgacagaggctaaaagaatcacaggaggatcaagctccaaccagagacagcttgaacattgacatcagagatttccagatggcgaaaggcaaacataagaatcttactaatagaaaccaagaacactaggcatcatcagaacccagtacgcccaccacaacgagtcctggatatcccaagacacccaaaaagcaagacgcggatttacaatcatatctcatgatggtggtagaagattttaagaagggcattaataactcacttaaagaaataccggaaaacactgctaaacaggtagaagcgcttaaagaggaagcacaaaaattcctcaaggaactacaggagaatactgctaaacaagtagaagcccttaaagaggaaaaacaaaaatccctcaaggaattacaggagaacactgctaaacaggtagaagtcctta

SEQ ID NO: 176 - DNA, 1000 bp, mus musculus
taggctctttgtcaaaattggactccaatcacttcctagattagaagacaactttgccatattatttttcaaggttgtcagctaactgcttcctctccaatagccttcttattgaagtgtctttagcttgacctgacctttcattgtgaaataagcttacccccccacccccatggtatactctccctccatcaggtataccctccccaccaagtataccctccccaccacaccaggtataccctccctccacctgaacctttttctttttttttttttttctggtaatgctagggaccgagcccaggaccttgtgcacactgaataaaagctctatcactgaggtacatacatatatctccagccacctaagacttattcaaaattaacacaattgaaaagttcatgaacaccctaacttctccattctcaactcaaccttttatagggagagtttacaggtgggtggatttgcacacaatgaaagaataacagaagtcagggtttgccaacaatacagactaaatactttattaggttccaaaatgagaaaatggtagcgttaacctattttagtataaatctaccaccctccgcaaagagcccgccttagcatctacagagccccagtcctggaagcgccggtactcttgaggcctcagcagatactggcggcctcggtagttaggcatctcatagagaacccagcagccttccagcacttgcagcgagcgcacctcactgaggtggaagcgatcctggatgcaggagcaatcctcgctcagctccatcatgacacctttgtgatcttctttctcatacagccgcattctgtgggaacctgcctgcttgggtcacacagagaaagataggaaaaagcaattgagtctcttccagaactcacccaagcaaaacaatgggtgagtgtggtcgactgaggtaggaggctgttggtgtaagatctgagcctgtgatattttggagagctatgcatcagtgg

SEQ ID NO: 177 - DNA, 1000 bp, mus musculus; identical to SEQ ID NO: 176

SEQ ID NO: 178 - DNA, 1600 bp, mus musculus
tgtgcagaagacaactttgggtatagatatttgcctttcccattgcttgaagagtctcttgtttattgcagctcacaaaaggctatttggcttatgaacttctttggattctgcttctgtgtcccatctgactgtgggcacaccggtggtacaaatgtgtgctgctgcttctggctttatgcttgttctgggaatcaaagctctgctcctcaggtttgtgcagcaagtgctttattcagtgaacgtctttccagcccctatggcatcttttctagactactgtcttgtgaaatagcagctaccccctctagcagccctttgtctttagtggtgtagccataggcaggcgttacattttctaccttctctgggttctaaatggctgtttatgtttgtctttcctcccgtctgcagacccagaggtcaccaaggtatgcaccgtcccataagtactgcttcctgactggaaggaagtgagtcaatatttgaaacctctttcagggttaagttccccaggataccacttaatagggtttagatattgaagataagcaagagccacttagtgccaggaacacaggttgattatttattgcatatatgggctgtaacaagcaaaaggaggcttagtacaaatccatgacccgtctcagagagccgaccttggcatccatggcgccccagtcgtggtagcgcctgtagtctccaggcctgagcaggtattggcggcctcggtagttgggcatctcatagaggacccagcagccctccagcacgtgcatggagtagatctcatggaggcggaagcgatcgtggatgcaggaacagtcgtccatgagctcagacacaaggccccggtagtcatctctctcataaagccttatcctgtgagagctggtctgttgttaggaagacagaagaggaaaaacaatgatttacacacggtgtcgcagcctgcttgccccgtcccaaaacacagctttcgggcgaatctgtcaagtgttcgtcttccctaagcctactccgtgtgctgttgttgtaacaaattaggagatgcactaacataaagttgacctgaccagtgaactcttgtgaaggaaacgaacacggaaaggcagggagtgaaagcacttactgcccgtgtaaccaaatcctaccaagcttattttttttttccattttttattaggtatttaactcatttacatttccaatgctataccaaaagtcccccatatccacccacccccactcccctgcccacccactccccctttttggccctggtattcccctgtactggggcatataaagtttgcaagtccaatgggcctctctttccagtgatggccgactaggccatcttttgatatatatgcagctagagtcaagagctccggggtactggttagctcataatgttgttccacctatagggttgcagatccctttagctccttggctactttctctagctcctccattgggagccctatgatccatccattagctgactgtgagcatccacttctgtgtttgctgggccccggcatagtctcacaagagacagctacatctgcgtcctttcaataaaatcttg

SEQ ID NO: 179 - DNA, 1000 bp, mus musculus
ggccaccagtacacacgcagagccaacgctgagccctgcggtcactctatccaccatgattatcaccagtatttctcttataaccagatggtggcatctttcaggtaagaaggcaaaaggatcgtgtgtattatcacattccttatagatagaacacttccactcttgggttgaatttgggcatatatgtcctcccctatctctaaacctacaaatgcagagggctatactttaagagcttttagtgttagttaccctttatgccaagaactaggtagtattattgttctgttataagcaaggataataatcttgtatatttcatccatggagcagtcaagtgattgatttttctgcttcctgactcactcttgaccattgttttggcatctgcaagtctgagatttttgttgagaaattaccatgaagatcctaagatacttctaacaaagctaaaattccaagttcaaggaataaatactcactgttgcagtatcaaatgtgagaacgccttaagtgctgtcctcagaaactactaatactactacttcattgctctaggcatgccattcttttgttttagcaggatgttaccacagtaactctggacagacccccttagccttattcctgtagccagctcttagctctgttcagcagtcaaaaatgtgagcctgttccaggaaaatcagctgttccttatgctgctgtagaaattccaaaggtatctggtttgcaagtagaggccagaatccagtttctggcttacaaacccttacatactcttacatactctggttgctcagggcctgtgttctcacctcctactgctcacagtcactctgctgaggtctctctggctctggcctgccttctgctgtgccaggtaggtgcctacctgggagccttgtacttatccttccttctctcagctgcttgtccctcagatacctacctgtttccttacttaccagcactctctctttagatcttcatgctt

SEQ ID NO: 180 - DNA, 1000 bp, mus musculus
agtttcttttttttttccatcttaggtgttgggaacttagtgctggagacaggtggatttaccaggctccgatcttagctgctattggggtaagttgtaaagtttgtgtagcttcaatgaatagtaaatgaacaaatgaagttgctactaaaacttgggcaagtttgcttgttgctttactgtacagtaggttgaggatgttttacatgtgctgcgatagctaggagaagcagggctggggttcagacccttatttgtggctgacactgagactggtgcagaaagtgcttgctgttctatgaatcggggtaaccgggtaaccccaggagacagttctgaggctcaattatggatgttatgactttaaaaaaattatttaaacttttttttttcttacagtccagactttatccccctcctggtctaccctctgactgttccacattccatacctcctcaactcccccatctatatgaggatgttcccacccccaaccccaccccagtaaacctccccactttctggggcctccagtcttttgagggttagtggcatcttctctgactgagtccagaccctctgctgtatttgtgttgggggcctcatatcagctactgtatgtggcctggttggtggctcagtgtctgagagatctcaggggccaggttagttgagactgctggtcttataggtttgccctcctcctcagcttcttccagctcttccctaatgcaaccataggggtcagcagcttctgtccattggtttggtgtaaatatctgcatctgactcttttcaggtgcttgttgggtctttaggagggcagtcatgataggcccccttttgtgtgcaagccatgacattagtaatagtgtcagaccttgggaccttcccttgagctggatcccaatttgggcctgccgctggacccccttttcctcaggctcatctccattgttatccctgcagttctttcagacaggaacaattcagagagtt

SEQ ID NO: 181 - DNA, 1600 bp, mus musculus
ccatgcctgacctaaagctttactacagagcaattgttataaaaactgcatggtactggtatagtgacagacaagtagaccaatggaatagaattgaagacccagaaatgaacccacacacctatggtcacttgatcttcgacaagggagctaaagccatccaatggaagaaagacagcattttcaacaaatggtgctggcacaactggttgttatcatgtagaagaatgcgaatcaacccattcctctcaccttgtactaaggtcaaatctaagtggatcaaggaacttcacataaaaccagagacactgaaacttatagaggagaaagtcggaaaagtctcgaagatatgggcacagggaaaaaattcctgaacagaacagcaatggcttgtgctgtaagatcgaggattgacaaatgggacctcatgaaactacaaagcttctgcaaggcaaaagacactgtcaataagacaaagagaccaccaacagattgggaaaggatctttacctatcttaaatcagataggggactaatatccaatatatataaagaactcaagagggtggactccagaaaatcaaataacccccttaaaagatggggctcagagctgaacaaagaattctcacctgaggaatacagaaaggctgagaaacacctgaaaaaatgttcaacatccttaatcatcagagaaatgcaaatcaaaacaaccctgagattccatctcacaccagtcagaatggctaagataaaaaattcatttgacaggagatgctcgcgtggatgtggagaaagaggaacactcctccactgttggtgggattgcaagcttgtacaaccactctggaaatcagtctggcggttcctcagaaaattggacatcactagaaagagaggcccattggtcaggcaaactttatatgctccagtacaggggaatgccagggccaaaaaatgggaatgggtgggtaggggagtgggggggggggagggggtgggggacttttgggatagcattggaaatgtaattgaagaaaatacgtaataaaaaaaagtctacttctttgggagttagatttattatttatactgtacaactttttcaatttcatttagtttagttaacttctcatcttaaaatttgctcatagcattacttatttaaattataaacaagtgaaggatctgtaatgatttctgaaataagtaaaaaaaaatgcatttatttacattgtgaagaaagccagaatgattttcaaaatattgacacatcatggatctttggggaaaaataactttagtcaggaatgtcaaagagtgtcaaatgtttgaatataaacccacttaaaagtcaaacatgatatttttagacatacttttagacatatttttagacagttttagataaaaatctcatgctgggattatgcttatatcttgtttgtgcatgctagccaacatctattactgagttacatctttgtcccaacatgtgctttttttttgacaaaaatttaaattatgtaataggactgtttgatttgtcgtaattcgaaagtttaaaatactgcatatagtaattttcactggctctgaa

SEQ ID NO: 182 - DNA, 1000 bp, mus musculus
catgaaacttgagtctgtcttttggtcttcacacttcctttgttctccttgataatatgcatcaaggactccagatcagaaggtctcaaatctcagcttaaggccagctgtcatcactggacacttgataaaaacaagattcaaggcctcatcccatctcctgagtccagatctctggggataaggcctgggaactgatgttttatccaggcactgaagaaggcattctgatattaaactgaaatatgaaagtcactgccttggacattattttagaacagtagttaagaatcaatgcaacaagtgaatacctgggctagctaaatgtttaagagcacacgctgctcttgcagaagatctgggttcaattcccaggactcacaactgtcagctcacacccatctgctactttatttccagaatgctttcttctggactctgcaggctctgctttgtatacttaggcatgcacatatacacagaaaatatatttttaaaatatatgtattttataaagaagtggacatcttttacattgatcacacagagacaaatagcttcttttgtattacagaaattctcttttttattaacctttcaaagcaatattgaaagattatttctaagtgtttccattttactaggtcaaccttgttaatttcacaactagcacaaaatttatgacatattggctcattaagtcccccttactcatccatagtcaaactgtgcaatgctaatgactacatttgttttcctgtccctctaacatgttaattcttctacctctcctaatttatgtaggaaggtttgctattgtttgcttgcttcttttaatgttagccaattatgcccaattgcaacatggaagagaaatctctttctgtgtttaaaaggaagacgttcctctaggtctctttagagattcagcctctgtagtgtggctttacctgcagaaatagtctctcaagttcacttcttttttcatttctgacttatc

SEQ ID NO: 183 - DNA, 1000 bp, mus musculus
tcttatctcagtttaaaagtatctttggacacctacttccctggtttgctcatgtcacatgttgctgcccttagggaagatggtggtgaagccatggctttacatatggctgctagggtatgtggtataactgtccagcagtcatgaatgaactgggttacctgaaagggaggctggaaatgaaaaaggacgggggagtgggggggggcaatacaaagtttctgatcaaggctcaaagtttaatattcagtactgtatttatttatagagatcccacagaccctatcctttgtttcagctggattatgttgcaaagcaagctcaggggggcagtctactgtaggagattgcaggtgcagcaaggcagaagactccatctaggtcattaaggtccaactgtggcaaacatttaaggtctatttagcctactcaaggctgagggaagggcacaatgaggctgccctgaaccaaaatcgtggtgaagctacgactccaccttcctcagcccatagtaactagtcatgtgtttatatcccagtatgaaatcatgtcacatgatttaagattatctatgactttgaactagatccaataatctataaactgataatcctgttttagatcctggactttaaaaacatgcctgggtcagagaagagtgagcaatagctcatttttattgctagcgatagactaaaacagtataaaaatagcagtagaacagtatgcaacaacttcaaaattatccatacttaaataacatttgaactccaattatattagatccaatgggcagaaaaccaattagtgaattgaagttaggtggctgattacaagagaaaagaacaacatttgttcacacattcaagacaagtcagaaaggagcatacaatgactatgtactagcagagacatagggagttagacagacattttaaattgtcatttgtaaatttgaatagactttataacattgaaattttgtcatcatataaagaat

SEQ ID NO: 184 - DNA, 1600 bp, mus musculus
aatctggtattaccaggagcacagggaatcaagagagaaaggaaatgctaatttccatttctttattgacctctagcctataagaccttaaagtatcatttaataactcggatttctgcctgtagcttggtacagctttcttcacatctctggtaaaaggtcatccaaaggcctaaaaaaataaagcctgaatggatgtgtacaaagagttttcagaactggaaaagcttttaaagagtgtatgataattttaaaacatgtataaatcagccttccaaagaaccctcaccagagtgacctttcccagggtgctactgcatcgagctgcagtgctcctgaggtacccagaggcagtcaacaaaggagactggtgaggacagaatctaacctgtctaactaagtcaccactcaagatcctaatcggcaaaaagtggctctgagggacagcagtgacatctgcataaagattagactttggttttctcttacggtggacatgatatgttgtgaactacctcacacaatatctctattagaaaagcattgttatgattctgtttctaaagaggagagagttttaaatattaacagtttccccaagattacatagctattaattattgaagctgcaatttggatccaaactaaaaatcatttttttcccttagcaaatacataattatagaatgttctttgaattcaggatgactcttcaaagatgtcaccaggggatgcaaagtgactttcaagccccttacttctttgggctctgactagccactggagaaagaatgccttcaggcaaacagtatggagttggatggttaatagagacagctttacccccaggagtggcattccgttgaggcaggttagcaaccaccattgctatcagctcatcgaagaaatgtttcactcctgaaatgtggctctctgagccccaagtgcatctgctaccagaacttgcagatgagaaaagcttgaccagttggacaatggaaagaaggagaaactccagcataccatgttaaggtgcatggtaatgtccttagaagccactagccttttcataccttacccgcattacagtattctttctacatttgtcaacctgacagtgtgactagtgggaaatcatccctcatgattgcagagtaatttctttccactatttcatgtagtctgtatgcaaaacgtatgcgataggaaaaaaaaaaaagacaaccacaaagagactaatttgtgcaactgtcttgtatcacccaaagcaactagaattctggctctgtgatgcacatgctggctgaatgcagccagaaggagcatggaaactccagctatgcaaagacaacaaccctcccactgtgggctcagcatcattcctcagtaacgcttgttcatctatggaaagaattcaagttccttttgggggacccctgttttccactcacaaaacacaaaaggaacaaaagatagccaagttcataattcacctcaggagggcttcctagtgaacctcaagaggagagccaagctgaatgtgaagttctatacattctactttgcttgtgcttattacatatactacgatatgatggaa

SEQ ID NO: 185 - DNA, 1200 bp, mus musculus
tgacaagctaaacaggaaaagtgggctgataatccaaagcagttcataactgacacttcattctgcactttgcctgaggtgacctcaactgtcagggcttagtcatcctccagtccccccctgagactccaatgctgtctcttctcctcttttatgagacaagatctcactaagcagacagcctgaacctgttctgtagcccaggctggcctagagtttaaaatccctctgcttcagcctccagagtacaggggtgtgcctccatgcccagatcacccacattgcctgatacaatctggacctactggattccacaaagtgactcactcgcagaacatgtccgtcccaccccatactcctgcccaacaatgaatgtcaacatatcccctacttcaacaaatgctttaataaactatgctgccatccgcttcccagtcaacgtggtgctgttctttctggcccacgtttactgttccagtctgcttccttccttttctactattgccactaactcccctcccggctctcctcagggcttgtacaaggatctaagacagctctcacaacaactgcatccataatccatcagctgcccagaggggctgctctatacggcagtgtgatccttccaaggtcacaccccaacatctttcaacagctagcttcaagatacactctgaaccctttgagcaggcataaaaactcctcacaaacagatggcagctcacccctcctgcctcttctctcatcctattttgcctctgtttcctgcccttgggtcagctctactgaagccctcgtctcacacatcccagtgccttccagacccatgtgtatttgaaaatcacgtttccgcccctatggaggccccttctaactctaacaatgcaaatcctacgcaccttggactaagctcaggtatcacatcatctagaattcttgccagtcttccacactgagctaagcactcctaatgtaccgtcaattccaggctcagacaagctgctttgtttattcaacatcgaaaccagggcctgcacagaccaggtacagatggtaccactgagtctgcgtatcacagcacttaggtagctgcttcctaaagttgatttgaatgatatcagtgattcaagacaatctataaaaggaaattttctaggatacaagatatactatctctaattcttaagagattcataa

SEQ ID NO: 186 - DNA, 1200 bp, mus musculus
tttctgtacaatacttaggggtaaggattggggtaggggtaagcttattgtacatagtcaaggtttgctgttttattagacttttactacatacatgttggggatggatttcatccatggtagtacaaatatttcaatgaaaaattaagttcaagtcccaagtagttattgtctaattggctcagagaagaggtcactttgtgtgcttttgatgcacagttttcctgtggtcaggaggtggcttctcttttctattcccatgtatgttatccatactttgtttattttcttgaagcacagattctttagcttactactgacggtgctttgaccatttgcgcatctttgcatacctaacttttggaaaagctaggagagagagtagtgagtgagactccaggaggcagaatttctggaagcaggggctcttagttcggatcatggtttgcttcccctaaggctgagccctatggacctccttgccttatcactgttctgctgtgggtcagaagctatggattctggttaagacaagttctgagggtcaaacctggtcttgactcatgtttccttggcttcttctcgaggcttcctttgcccatcattgagcatggtttttagtggttaagaggcgaaatgaggttcagctgctgaggaaatggggctcattcctctgcctgtatgtctctattagagcatcctggcatttctgacttgttaggattgagagctgcagtatggctgtcagtactccttttggaatgagatgaagacggagctctctgtcaatgttcagatggaggacagacagaccttgatgtcactagtatttcccagcatctttacaatgactgggctacttgccagccaaacaaacaggctcaaacttgctgtgacattgcattcatgagtaaagacaaagttaaaacctgaatgtgcttttgaggtcatttcctttcgttattcttttctaaacaccatttgagaagctttcaaatttctcaaggaagttggtgggtggtgaaattgtcattagttaatcaataggtttagtggcaaatttgaccatttcacctatgtcagaccatactaatttataaatataagtaaaagttagctaatactctcaaattcagaaccatttgtcctataccatatgcatagtcagagcttgttaaaaaatacacttatgaagatctg

SEQ ID NO: 187 - DNA, 1400 bp, mus musculus
tgtgaggactgccattcacctcccagagcagggaagacaaagcttactttgaataatgaaatggaagcagaagccatacgtaagaggatgagaactgaacattccagcctcctcttgtcatactgccagtaggaacactacatgtagaagtgaggatgctgtaaattcagagcttatggtcataacaaggggtgactccttttgaatagttttaagactttcagagtatggtccataaaaaataaatatatatttttctgagagaaaatactaggataagattattatacaatcacaacttcgatgaactataacagctgctttacattttgtaaagatgtttaaaagctcttatactttggttatgagcttagcctttaatggctgagccatctctccagcctaaccctaaccctgaaaacgggacggggtgggggtggggggataggatcaggtatgggaggggatggggaagatgtacgaaaggtttcagaaaattgaacagagttgtatagcactgggggatggggaactaaaggtagccaccagaaagtcccagaagacaagaaagcaagaggctcccagaactcaacagggatgacattaactgaaatgctcaacaaagaggagcgagaacctctatagaccatatacagaggttaggcacagcccccggttaagggatggggccacccacccatctcaaatatattaacccagaattgctcccgtctaaaggaaatacaaggacaaagagtggagcagagactgaaggaaaggccatccagagactaccccacctggggaaccatcccatatgtatccaccaaacccagacactattgctgatgccacgaagtgcttgctgacaggagcctgatatagctgtctcctgagaggctctgccagatcctgacaaatacagaggcagatgcacacagccaaccatgggactgagcatacggaacccagtggaggagttaagggaaggactgaaggagctgaagggttttgtaaccccataggaagaacaacaatagcaaccaaccagactccccagagccccttaggactacaagaccaactatagagtacacatgactccagctgcatatatagcagaggatgcccttatctggcaacaatgggaggggaggcccttagttctgtgaatgcttgatgccccagtgtaggggaatgccagcgtggtgaagtaggagtgggagggtgggtgggggaacaccgtcatagaagcaggggaaaaggggacaggatagggggtttgcagagaacaaaccaggaaaggggataacatttgaaatgtaaataaataaaataaccaataaaaattaaaaaaaaatgtttaaaagctcagtccacccatttagctccttttcttc

SEQ ID NO: 188 - DNA, 1600 bp, mus musculus
agataatataagtgcagtagtgatttatggagtcctgaaaccagaacaaaacaatacactcaaacccctaaatccaagaagctgtagattctttaaaaaagaaattcatgtattagaaagtgataaattcataaaattaatagagaatcagaatatgaaggacttaacatattattcattttttagatgatgtacctttgaataaatgtatagatcaaacagatgttataagtgaaaaataaagttaaatgtatactatagtttgtattgaatatgttctaaaacttatgatattaatgacatggtccctaactcacggtatcatttgaaaacagtagacactaaaaaagtgagggctgcggggacagtttctagtactaggagggtactcctcttgaggatgatttgatcctgacctcttttttttattagatattttcttcatttacatttcaaatgctatcccaaaagtcccctataccctccctctgccctgctcccctacccacatactaccacttcttggccctggcattcccctgtactggggcatataacatttgctagaccacagggcctctcttcccaatgatggccatctaggccatcttctgctacatatgcagctagagacacaagctctgggggtactgattagttcatatttttgttccacctatagggttgcagacccctccagctccttgggtacttgctctagctcctccattgggggccttgtgttccatccaatagctgactgtgagcatccacttctgtgtttgccaggcactggcatagtctcacatgagacaactatatcagggtcctttcagcaaaatcttgctggcatatggaatcgtgtatgcatttggtggctgatcatgggatggacccccgcatggggaagtctctgtatggtccatccttttgtcttagctccaaactttgcatctgcaactccttccatggatattttattccctattctagggaggaatgaaagatccacaaattggtctttcttcttgatttttttgtgtttttggaaattgtatcttgggtattctaggtttctgggctaatacccacttatgacctctttctgtatttaacttctcttcaatgtctcatcagattttctcacccatattctccatgctgtggatgctagctggcaacatgcccatggttaacagaaccaatcactccatggccaaaacgttcaaagctgcatgccagaatcaacttttaaccttacatatttatcattttacagatatgttttacggtaacagaaagctaatgaacacatagataacataataagcggttgtgagtaaaaatgggaaaggcatttagtcatgcattttttatctatagaaattattttctgaattttatgatgaataccaatggatggctgacaattttatgtgattctgtttatatttcttcaatttgaatactaaaatatacataatttaataaatttaagaatattttacctttgagggttattctttctgtatacccaccattgctggcttatgctatcaaaattggcttatgctataataatttattttattatttcttt

SEQ ID NO: 189 - DNA, 1200 bp, mus musculus
cttcctaatttggtgaaaaataggatgaaatattgaaaaatgcatattgtatgggggtactcttattacagaagatgataaattaaatgtttagttctctttaataaagctggatagagtagtgtaaatataaataatgttttaacttctgtagtggtatttatttgtgatttcaataggctcctatacaaccttttgctttgtgttttttttttttaagcacatatatttaatacaggggacatataaatttagcttacctggaatactatatttttatactcatgttataacctttaaacttaaagtgtaaagttttcgtttattaagtaacctcagacatgaacagcatactaagacaatggctcagacacacaggacgagtactggcatttggatccccagatcctgggtccgttcaggatgaatgtaatggctagcctgttattttatcctcgtgtgaatgtggaggatccctgggacaaacaggatgggagcaagctttgactgagactttagcttagagctggtgagaagaatctgctgttatatattaaggtacacactccacaggaaaagaatttggtttgctactatcttaaataaagtaaggtagaggaacaatggggaacaactctatactttgttcatcaacctcaggccacgggcctctgacaccacagacacaggcactgatcccacatacacctgcccacacatgtgtatgcacatacatgccacatacatattgcaacatacatatgcaggaatggaaaacaccctgaacaattataaaacaaaaaagccagtatggtaagttttatggaaaaataaaagatgaatttattctggttaagttgtctgaaaacagtaaaactgaaggctcagaagaatatctatggctatatatatgtgtgtatgtatatatgtgtgtgtgtgtgtgtgtgtgtgtatgtgtgtatgtgtgtgtgtgtgtgtatatatatatatatttacatacaatataatcctcagtcttatagaacactgttattgatggaatttggataaggatttcttttaagaattaataatttcatttattcattaaaatatgaacataagactatctttgctaatggatacttttttttcaaatttttacatgtactcgctaactttcttttattagaagacatacataagttcatattatatgaa

SEQ ID NO: 190 - DNA, 1000 bp, mus musculus
acatcgcttgtctaatgaaatattctatttcttcgtttggtcatagacattttttattttaattctaattttttcattgtatttttatatgtgtggtgttttgccttcacaaagtctatggatttatggactttaagtaggtgttgggaattgaaccttggatctctggaatagcaaccaaagctcttaagcacggagccttctctccagctctaattttgctttgtaatcatccatcataaacctaaacaacttttcattacttccattcacttatctttaatatcttcaatcaggtgtctctgttaagaataaattttttcagctgtggtgttttgaatagctttggcccccatagattcatgtgttgaagagttggccatagggagtggaattattaagttgtgtggccttattggagtaggtgtggcctttttggaggaaatgtgtcactgtgtaggtgggctttgagggcttttgtggtcaagctctgcccactgtggaattagcatcatcgggtatccttggatcaaggtgtagaattcttggatactctaatgccatgtctgcatgcttcttgccaggatgataatggatttaacctctcatacaataatccagcccagatgaaatgatttagtttatgagttgcctttgtcatgatgtatcttcacaacaatgaaagccctaagacactaaccatgaagtgttctttaagaggtagctcctcggttagtatgtttatcttgccagcacacacggtaatgcccagggtagcattaaagcctcactgtcttctcctaggtcatcatgagacttcagtgttaaggtgcttatttgtcatattactaattactcaaagataatgaaaagtatcctttcccctccctaaccgattgttcttccactgaagacagaggttgagtatcatgcaccttttaatcctcataaaccatagccagagctgaaatcttcactctaacttggactctagtggttt

SEQ ID NO: 191 - DNA, 1000 bp, mus musculus
aatgtattgataccaacacataaatgaactttttaattaataattttattcctttacatttcaaatgatatcccccttcctggttactcctccacaatcctccccctccaagttattccctctttcctctcccctttgcctctatgtgggtgctcctccacccactctcccactcctgcctcacttctagcatccccctatgctggggcattaagcctccacaggaccaagagcatcccctcccattgatgtcagataaggccatcctctgctacatgtgtctggagccttagatccctccatgtagattctttagttggtggtttagtctctggaagctctaggtggtttggctagttgatatcgttcttcttgtggggttgtaatcccctctagctccttcagttctctccctagttcttccattggtgtccctggactcagtctaatagttggctgtaactgcatctgtatcggtaaggctctggtataaccttttagggaacagccatgtcaggttcctgtcagctagcaagtcttggcatcagcaatagtgtctgggcttggtgtctgcagatgggacagacccctaggtgggccagtctctaatggcctttccttcagcatctgttccatttttttaaatgcctctctcctctttctcatgccagaaatcagatcactgagaccctccaatgtgggacagtgaaaggcagcctggtgacccagcagattaattcgcaagagatagaaggcctgtttgccatgctcccagacaccagcttcctgacacagggccccagctccataattctgtgcccatcagtcacacaggccaacacctcaagcttctggtattttgtctggactccacccccacaggtacctggcaacagccaggtatgctcctccccacaattacctggtaacagccaagtaggctggcccactctaaaaggtgctgtttaccccctccccacctctcttactctcctgctcc

SEQ ID NO: 192 - DNA, 1000 bp, mus musculus
tggctgcaagttcaaggttcaaccagtgtgagggtggggcttagaactgcagtagacttagtgggagacactactagagtcattgaaggccactgaaagggttgcaggtttcaacttgtagctacggagtgacccctaaaaagcatggacgaggaagtgaaatgccaggtttacctttgctgaagttctctccttgtgctgtagaggagagcgtggcccaggagtgaagaggcaaagcagaagtacagaaaacaaccgccagggtcctactggttgatgctgaaagggcctgcacctggctcaccggaacaaggcacccagagcggatctcgcttatttgtaaggaggaatcaacagctctggtgggatggaaagggaaaagggtaggaggaaataggaagggggaaagctaagcttccttagatgccaatagagcatcagtcaggactattggaaaatgattcttaaacagatgactacaaccacaggaccaccaatggtttggaattgggacaaaggagcctgggaggaaatgaggctgctgatgctaagtgggtgttttccataatcgcagatgtttctctagtactccactgcagctttgtaaagtgttcaagcaccacaggggttggcaggctaacttctggcatctgatggggatctgggcagagctgagatactgtagcatcacagtgactggagcctacacaccccctctccttgctcctcccatctcccaggattctatggttcacaaagggaaactttacagttcccccacagacatagaatgccctggctattctgtccacattagcctcccctacctgatttgtgaagcatttgtactggcaagtgtgtggttgagctgcaagaccttcagggaaaattaaagtttaaacgacaaggtcctcggaaaggccctgagaatttttctcattttcatttatttttacataaataaatcagcagaagtggacatctgaatgcaatacattaa

SEQ ID NO: 193 - DNA, 1200 bp, mus musculus
atgggaaggaaggggtccaagctgacataacaaatgcgtttacactaaagtgaaacaaaattagctccatgagatgaaaatgtaccactaaagaaacttctcatgaatattgtttttctagaaatgtacaggaaggttcaaagtagcacaaccacttctacctgtaagacagggttgcatgtgctgataaagttaggatttgttgtataaagaagtaggaggtgaagtagatagtagtggttattaccataggtgggaaaagaggagtttgttttggtcaactttgacagattgtcatagtagctggggcgagccaaagtcgcttttatctggtggtcacaaccttctgtcagggaaaagcaacagaatagtatcccctctcctctgtgcagagggcagagacactggggtgtcattatcagggctggatgggtggactcaggaactccacggttatgcaaagtatgtgtgcaactgatactgttggtgtgattatcagtgtgatccagttctatcaaccacccccagaaaggaaaggagggggcgagggtggggaaagttcacacttgggagatgacctagaaaataggccaggtgctggcctaagatcagtttcaaacagtgctgttcataggaaacctgcaggacaattaatactacctttaaaacacactgtcaccataaatacgagttgtactagttggcatcctataatctagtgtgattatcttattgaccactggatctgagctttaaagaatgaagtcttttgggctgaaaccggctccgttggcaaagtactcagaagcaataggatctgagctcagatccctggtatccctgtaataagccaggaatggcagtgcatgtctgtaagcacaatgctgcggactggtgtgatggaagaaacaagtgaatgccctggacacgctgcctagccagttgatcctaagcagtgacctcaggtcccagtgcatacgtatatttacacacacacacacacacacacacacacacacacacacactcacacacacacacctacagaagagagaaaaacagaatgagttgtatttgacatagtcaatacactgtttcatatgagggttataattagagcaattgacattatatctttagcaatatagacaaaggttgacctttccatgcaagccagattaatacgtcagaaattttgag

SEQ ID NO: 194 - DNA, 1000 bp, mus musculus
gggagcaagagggctagagagaaagcaagacaagcaagagagagaggattggccaagcagcctcttttatagtgggctgggctaccttgctgttgcagggtaactgtggggaggagcatacctggctatgggcaggtaactgtgggggtggagtctggacagactacatgactgatggccacagaatggagctgggtccttgtgtcatatgtttgggagcatggcagatgggctttccatctcttgcagattaatctgatgggtctccagggtttgaacctagctcaaccagaaaacaggctacctttcatggtcccacgcctgttagccattattattaattttttttttgagcaattgtcaacattttttttaatttaaaattttacttcaccttgccacttcttttagtgtcagagcaactactggcaatgagaatctgtcttcaattttgcacaaggattgtgaaagggactattcagaagtatggggatccttcttcctcaatgcatttctatattaatatcctttacattctatgtaacatttctagctaagaaagagaaataggaaataagtatactactgagtttttgtaggcctcctttcccaacaatcagtaaatgaactagtgatttctgaataatgacttgaagacagtggtgggtttatagttgtagctttcttgtcactgtgacagaatgcttgctgcaaataacctaggtgggaactgtcaaatatggaagggaaggcatggtggaacagctcacataatggtgggaaagaagcagagtttatccctactttcaaggggccaggccagataaagccctctaggacatgcttctggtgacctctggctttaattcaggtccctacttccaaagtaccatcccctcttgacaatctactcatccatcttgtatagttttattctgttagtgaatagactatttattaggacagaggccttatcattttgctgtccctggaaacaccc

SEQ ID NO: 195 - DNA, 1200 bp, mus musculus
gaatgaaagaatatgaatcagaaaggtaactaatctcctctatattctaaagccattttcttagctctctcctcttaaattaacatttaaaatactctccattaattagatgaattcataatgcaacgatagaaaataatattatcttcacttcctgaggctgaaaatattgactcagtctcagtcttctttgtctacatggcagacttggcagtggcattagtaggaccctattttcatagtcactagcattttttaattagaaagaataaaatataaagtaatatcatatgaaaagcaataatatcgacccaaccatgtaggtttaaaatataaaatgataagtttacaagcataatcatatttccatactcattcaatgaattattcaaagaaaaagaaaatatgttttgcctagattttagaatgtgaatcattttttcataaaaatgatcatgtttaatgacgtgagtcacatcttttaagagctgtgataaatatcctacatggaaactgacaataacaagtcagaatctcctaaattaaaaacaaaagaaaacccctccctgggagcattagtaatctttagagatgcattacctcttggtttatgacctaaagaatgctgttcaaagcttaccttgtgtgctaaggtgtcctttggcttcatgtagagatatggatagctcattataaccttttaataacttgaacacaaatggcattggagtgaataattttcatcctgagtcattttggccctactagttcaacgccaagcaaattaatcacccgagtgctcatgttgcacacagagatacttatacactgactcataagctccccagcctgctgggttgcactgattttatcaccacatgaatctggtaccaaggcactgggtgatcacccgcctgtctttatactatgatattgatttgtacttattttttccaagtatcatttagctgctctgagacatgaagtcttgtagcgtaattagcactccacttctctatcattgcatttcttgtcttcttggagacagatgctctaggtcatgtctattgagcagaatctgctgacaaagggtttacattagggttattgctatgaaagcaaagtagaaaatggaaactactcgatttctctcccaagccaaaacaaacaaacaaaaatcacttggaatgaaacagtagt

SEQ ID NO: 196 - DNA, 1200 bp, mus musculus; identical to SEQ ID NO: 195

SEQ ID NO: 197 - DNA, 1000 bp, mus musculus
aaagttcctttgcttttagaatttaatgcttgaccctaatttcttgttttttatgcaagttactataacatctacattctattactgactcatctagttcaaagaaaactagggatgtaatttcaaatatccatgagctatataccagtaactacttgcaatcaccctttaaggctcaataaaactacttcttacaatgtacaaagagccagaccattgaaactcaaaggcaaattacaacctgaaggccccaaaataaaataactccataaattaactttattgaaacatatattgccaaagtccactattcaaactttacaataaagtataggcagttggatgaacttagttgatttgaagtctcagtgtcttccaaattgaatccatacaaatgatttaaaagcatgggcttaactgcatctttattatcttttatatgtcaaattatcttttaaatatttattttcagcccacccctcttgcattcccatggaaggagctgagtgtgtttaatattaggagaacatccagaagtctgtgaggagggggatggctcttcatattcatgaagcttgcatacttctattggtcatccctggattggtcacctctgctgccatcagtcacgaagactatcctgctgatgaaggtgaccaggcttccagtaatgacaatctgatctttgatgactatcgagggaaagggtgtgtggatgacagcggctttgtatacaagttgggagaacggtttttcccggggcattccaactgtccgtgtgtctgtgccctagatggacctgtctgtgaccagccagaatgccctaaaattcatccgaaatgtacaaaggtggaacacaatggatgctgtcccgaatgtaaagaagtgaaaaacttttgtgaatatcatgggaaaaattacaaaatcttggaggaatttaaggtatgagttaccctccatatttattgaattctaattttcactataacatgcttagcaa

SEQ ID NO: 198 - DNA, 1000 bp, mus musculus
ttactctttcctcctaccctctctcatctccttcttgcccctccacccctcctccccaacttgtccctctcccagatgctcaagttttggtttagtttaatcagaggtgtccctgtgaccacaggattggcacttgctgttgttatcaaaagggacacaacagaaggtaatgactccctcattttctttgtctgttcaaaggaaataattgaacagtaagggctcctcctgaatctgtgcccagctatggatggctccattcttgtgcagatccagtacagccagccagagctgttgagagttcatgtttacatgactgtggattgtcgaaaagatggcattttgcagttggctacctgttatttgcaaatgtcaaggagtgtgaagacaatttctagctacctggtgcttttagtctagtaaataacttccgctcagctttcatggtgacaaatatcagacactggatcgtttactttatctagttctccagaaaatgcaagcgtgctctgcatcattgggcggccaggaaatcggtctattaacctgtcaaactcagtggaggtcacaagggacaccgagcagagggactggattgaggtggtttactgcagagacaggtaagtaggaatccccccagcatcctttgtgaagagggaggaatgagagggtcctgggagggcttaaagatggaaatacccatacacggtcagtggctcacaagcctgtttcctgccatggactttaaagtatttgacctcaggcttcgtgtaggtggctggcctctggcaaagattgccttacctgagctctgatgtaaaggttgggccaggtggctagctagctgccacaataaaggagataaagaaattttccaacttgaagtgtgagctcttgtggccagggaagcgcttcgttggtgaatgtagataatgaatgagacacggtctgacaaagcagtagaaatactttgtttctggactttctttgatggtttggt

SEQ ID NO: 199 - DNA, 1600 bp, mus musculus
ttccctgtttgcagaattttaaatgaagtgttaccataaagaaggcacaaattacttaatccacacccaagagccagtctcattaatttacaaccacacctcttaggtcacatcatggtcattaattatacctagaggatgtcgcaacaacagacactcctagtatgccctgaaatgttttcctgtccttttcagtgtattctgtcctgggtcttagaatacactgaccttcgtcagccctgtctactttgttcccctttgttggaaggcatgaaaaggcatcctgaggtgggtaccattaaatcagaatcactcaagctcactcttcctgactgtggacagcagcttaggaaatgcagcccttccatctctacctactcatgatatctccgctcttctttgggagtgcctctgacctggcatcctcattacagtcagcctcacacctcaggtaaagaaggaaagaaactccagaaactgggattccctagccacacagaagacagccaatggtagaggcatttggggaccgaaggcagctctggttcttgtaactactgtccctggaaaggtgattttacagcagccactgctgtcaagtggagataaatttcctataataagaattgcagcagcagaccaatatgatacttgggttcgtctggaagagccatccagggatattccagccttacagttgtatcagttcaagcagaagttgacgtctccacctcccagaggacagctttcatcttttaatcacttttacaagccacagaggtcatgaagaccataagatagctgaggccattgccaggtaccctgtgagcgactgaccactaagggactggggcacttctctgggtctgtttttctctctggcttttttccccagcctttctgtcgatgagatgcagtaggactgaaaccctaactggcacattgcctaggtgctgatgttggaatcttgaggggcattgagtaatccactctccccctaacttcagcatccatcaaaaaaggaggcgacttcgcttcccccatgcagtgctcatgcagagtgactcacctaccagaagagagatgctgcccagcacacagcatgaatgcctctcttcatacagccaaaatggtgacatttctgagtcctcatgcagtctgaaacggaacaagaaaaacttgaattgattgttgcctgctttttccgtatggaccagagacataaatcattccatgtgtcaaactctgcccttctccctgatttagtaatcactgccgtattgacttgggagatcgcgactagacatcagtatctcccatgggaaccagatggatcacttatttaattcacctaagactttggagtgctacgttccattaattcaacaacaatcatttttaaatgaatggttctaagctgacgtcttgagataatgagcttgatagagatacaatggaacaagagacgattctcagttttgatttaactttattgttttgctaaccactcccataagaaaaaaaatttcaaattctcaatgctctcaagcttcagacatatttttgtcaccatgtttactcggaaaagagagcaagtctc

SEQ ID NO: 200 - DNA, 1200 bp, mus musculus
aataaactaagtacccagagtgcttggtgtggtaccttgcacactgcaagcacacaagaagaagtaagcgctgttatcaaatacagaatatttacacactccttgcttacttagaagataggaaaatgccgggcagtggtggcgcacacctttaatcccagcacttgggaggcagaggcaggcggatttctgagtttgaggccagcctgatctacagaatgagttccaggacagccaggctacacagagaaaccctgtctcgaaaaacaaaaccaaaaaccaaaccaaaccaaaccaaaacaaacaacccccccccccccaaaaaaaggaaaaggataggaagatgtgactattagggcttaaaaggaaaggcaaaagatccacccttaaatccatcattttaactactgggcatccacaaagggccaggtcctaaaagtcaggtatgagtagctattcctttctttttattaataataataattattattgattatgagtttcatatcatgtacccctatcccactcatctctcatcccctcatatctgcccttttcccttacaatgttccctcaaattaacatacatacatacacacacacacacaccagcaacaaactcaaataataggaaacatctcatggtggaagccatagtacatcacagtgcgtcccacagtagatccctctgtccgcacatcttcacttgtaagtgttcattgcaatgagtcactgatctggcttctgtgacaccataaatattggatgctcattgagacttccagttatcctgctattgccctgtgccctggagatcctgcagcttaggaccagcaggcttggctctttcatgtgtcccaaccctttgcagatgatatagatttgggggcgggccaactcaaagccccgcttctgggcctgggggcatagctgaattggtcagcctgctggctatcccttatctgcaccaccagggcttgttctccagcatttctctggctaggccacccagtgccactgtcatcaagaggaaggatcagccctcctgctgtcatgcccttgggactgactcaccccacaccacacctccagggccagctccactgtgctgcccaggcaaggcatgggcccatgaatgactattctttagactcatgaaaaatttgatataatctaatcacgttttaccttattgtgaca

SEQ ID NO: 201 - DNA, 1000 bp, mus musculus
atactcacatgtccaagggcagatggttgtgctgggaaaggcaactggaaaaccaaattgaactactaaaggaaagatggctcaaggctcagcttttcctgtgaagtgtcaagtgaattcagcattcatgaaagtttccagagctggttggactccagagagccccagggtgtgcccctgtcacctctgtactctggccagagcatggattgccctctgactctggtctggccatagtacaataccacagagaggcccatatccctgtcttaatctgctcagctcagagatgccccttccacactgcccctaagggcatcagccaatacactgccaggaaatgtaggcaccaggcaacatagttcaaagagatagggagggcagatgccaggggtggaggtgggggtggggttaaaaaggtcctgcccttgagggtggagcactagagaagcatgggagcaggacagagactagctggggccccttcagaaaggtcactctcttcttccttcctcccaagttaccacctgcattcaaacagaaaccagcttacctatgttccccagactgtgcccaggcacaccgcagcaggctcgtcagagatcctttcactcagcttcatcttttattaaagacaacaatgaatcaggagaagtggggttcacacgggcactctggattagccagagcttgggaatcagccttgtgggctctagtcttccccccaaacccccaacaaataccgttgccgcactactttgactaggctgaactcgttggctgtggacattccaactcccacctaaacccacggccacacccttcctacttgcccttaattttgcttgaggccagcacctatactggttcacattactcctctgtttaagaagtccttttactgagcatttctgtgaaaccacaggcagtaggcaggttcttcctgccaaagggaacttcccagtgatgggacgtccatcctcacatccagtgtgtctga

SEQ ID NO: 202 - DNA, 1200 bp, mus musculus
ctatcttcaccccctttcctctctgagtcattaaaggctgactttcttccagcctggtactcatccggctctttgcagtttgccaaaaaccttcattcccacgtcatttcccactggatcccagggccctcttgttgtcagtgtgcagatagcagaggtctgggaataggaagctccagtgagtggcagcttccaggacctcaggcctggccataccccactgctcatccccctccagatctgcttgtcctctggtctcaggtcaagggccctttgtggccacaggagcactatggtcgttttgcaagcacaccttaggtgagttagccaggagccacatctttctgtgtcagagccttccactgggctgtgcagtgccctctgttgttcctctgagatgcccctgcctcagtttcccctctcatttggcttcggctgccctctccaggcacagcctttggaactcactctagcaataccaccggactagttagccttcccggccccaagacactcgcagtttcatgcctttgtgcctttcgctcatgcggtttcttcagctggaatgccttcccgctcctgccgcctcctctgcctggcaaacacctgttagcctctcccaggcccctcccccaggaaggcacccttcacccctctcttccaggctacctctgcacctgtaaatgcttctctcgtggcacctatcacaccgtactttacttgtttacatgtttgtctccccttctagactgtgaatccttaagggcatggactgtatcttatgcatctctgtatttctgcgcctagcacggtgcctggcacacagtaggcgctcaataaatgttgaatgaatgatttaaccaaggtctgagctctcaatggcttatctatgctgcccatgggtaacaacagcagagaatctgctcactgtttcctgactccattccgggtcccacaactcagggtacttcgtgggaaaagctctggacaggaaaggctccaagggcaccagaacaacccagaaaaaatgcctccacatgctccttccacagcccctgtgctttgggttcagagtttgcgatgtgtgtacctgggtccttatcccagcttgagacacacaggataccactagccacagaccagccaggaagagcactcagtggacacaaccttggctccagcttgtctcttctgttctgt

SEQ ID NO: 203 - DNA, 1200 bp, mus musculus; identical to SEQ ID NO: 202

SEQ ID NO: 204 - DNA, 1000 bp, mus musculus
gcaggggctctcggcgaccttggcaccccgatttggagtgcagagttagggctttttcccggcgagtgataaaaggacagtgtgggcagcggaaggctcttccttctccctggatcacgaccatttgtacccggccctccaacaccaacgcttctgcttgttctttgtcctgtctcctcatggccttaagtagcgactctgactcaggaaatggaggcaacggtacagtctcagcagtcagagctgccttgaatgtattaggtgcttcttcagaaattaggggatttctgggaggctcagaggctagcttctccacaacgggctcttcttcagcaaccaaggcaggcgtctcaatactgtcaaagctggacagtgctggctcttctagtccacctggtctttctgttcccaatggtcctgagggatccagaggcctgaactccacagtggctgtttcggtgagctcctcaaggggtagtggctcagtctcaggttctagctctactctcagggcctccaagtgtagtgtgcagccaccctcttccacctcccccaggctggggctgtcaacctgatcatcctcttggggagcctcaatgccatcttgtcttttggggctggcctcctcatttgtctctggcagggcctggtccatattggagttagccacaatttcatgttcacggtcttctctctcaggctgggcagacagctggcttgaaggtcctgagtctgaaggaggtgccaggcactgcctagccccctccaactcttggctagcattgcagaactgccaaacctggtcccctggcatgtagccatggaccttacgcttgtggaagaagagtgtggtattgctaaaggtacggtagtcacagagggcgcagtgaaactcacggagatgggtgtgcttgcagttctcatggctcaggagggcctgcttgtggcggctctgatagctacaatagcggcaggggtagagtggggcaggtgtgccagg

SEQ ID NO: 205 - DNA, 1200 bp, mus musculus
ttgatctggcttacacctccaatctggtccatcattgaaggagactgagacaggaatcccaacatgaacctggaggcaggagctgatgcagaggccatggaggagtagttgactggcttgctccccatggcttgctcaccctgctttcttacagaaccctgcacgaccagcccagggggtggccccacccacagtgggctggcctctccctcatgagtcactaagaaaagcgctctacaggcttgcccgcaacctggttttatggagacttttgtccatctgaggctccctcctctctggtgactctagattctggtaagttgacgtgggctcaggcagcacaccaggtgactccaggtttcgtcaagttgacactgaaaaccaaccagcactctggacaagctgaagcatccccaggataccttatattatcttgtttaaacctaaaatgcatgtagccattatacctcctgtaagtcccatggggacaagttctgctgctcaccactctattattggcaccccaaatgttgcctgctatattagtcagtcagcacttgttaaggaagtgttacatgtacgcctattttataattgtggaaatgaggctttgtgcagctctgtgtcttgcccaaggttacctcgctagtaaatggagggagcaggatccaaacccaggcaagtctgagcagaaacgggtgctctggcttcttctgatcactgctcctcttgtccatggtggagccagactctgcctcttctggcctgccaggtgcccaatgcctagacagtgactcaggcgccttgagggcagggagggggtgacgcctgacaaattctctgtcctgactctgggatagaggacatcaaggcagcagatgagacagggcctcagccaggatagagactcccttggggacaatctttgggctgccactgaccctgggaagaatctcacaatatcttacaggaggtgtggcaagaacctgggacaggccatcaggaggactaagaagaaagtaagtgacctgccaattgggctgtgtttccagatagataggcacggtgctcttctctgtctggtgtacagagacaaccagcccaccctggttgtctctgtggctatgtcctcctccagttatgtggcatagctagtacacacatccccaagctcccactggcgtgcactgacaggcctgg

SEQ ID NO: 206 - DNA, 1000 bp, mus musculus
gcccgcacatcctgcagccgccgcaagaacagcagctctgtctctggaagggaagatgagagatcatggagcccagaggttgaaggctagctcacttctaggccatggttgtgaggggttagctacagggaacagagcattttatgctcagtcacactgaacctcgaacgtggagcctggcacttgtgtcagcagctccggctcgcgcggtcacggtccctgcgtctttgagttggcagcctcggatgatcaaggtgcggcttgaaccattctggaccatttccaactgtggccctgcagtgataaccgctccgttgcgtagccaggtgacttcggcatctggtggtgaaacctcacactggaatgtggcatcgtccccctcatggactgtcagaggcgtcagttcagagaccagcttcactggcgggagctctggaaggaggggtgaggcagtgacctggatacctctttctccctctgtctctctccactaccaacccccaccctgatccccctacaggatgcaagctctcattctcccaccaattacaacagcttgagtgaggccctattgtgtgttggttgtgggggttctcccaaagaccaggatgccaaatcctggccacacttagtaagctccttgaaatcccagcctggcacctcttcccaagtctctagtaccaatacattatttactatgggcccagttacaacatttaatggtcatagcaacctatctgccatcccatttcagtgctggggctcaggggaataaaatggcctcgcaaatgtcacccaagtcccagagagccaagtctgagttacaccctggacaagttgactctagagtcctccttttaatccactgggctatacatcctgctatgctagggtgctggaaaaaaggaagatgccctcttacagtgacagtcatgaacgcattggtgggaaccatagagagcagttgggtgaggtataggagatgaaaagggtccagagg

SEQ ID NO: 207 - DNA, 1400 bp, mus musculus
aggcctcctcttcaaggagtctagctaagatgtcctcacagcacgaagttccaggatggtgataatggaaattaccacttctcttgatgcttcatatctaagtccccagacataacttatgcacagtttctatgggtggaacataagctctgactcctaatggaagtcaaagatccatggcaggggctgaagaggtgactcagaggttagtgctggctatttttccaaaggtcttgagttcaattcccagcaatcacatggtggctcagaaccatctagaatgagatctggtgcctcttcttgtgctcagtcatacatgcaaacagaacactatatacataacaaatgaatcttttaaaaatggcaaatggagatgagggtcttgtagctggcaatctgtcttgggaagtatctgactgactgtgcgggatggagatttgtgttggaattccatggatgcagaaaaggtatttaaagatgctggaagagaagagagggagacacattcactccagtcagcttgctcctgagttgggctgaggccacccatccatcctcattaccaagttcctccccagctactgacctcttgtgaattctatctcgctcctagcttcctgggtgcacacccatgaggggaccatgtctggctttgtggccagtgttaccctgaatggaagccctagacactggacagcgctgaagcctgagggtgggtttctttttgatggacacaatgagagaccttctaagatattgcctagaagacagaggctagaatattcatgtattaccaatgtttacgaagcaaatgattttgaatatctattcttaaagtctgaccagagcctgacccaatgaccaaccttggttaaatgatagttttttcctcccaaaagaatatacaggttagacccaaagaggacagaaaagcagagggcatgggaagcaaatgcttactgagggccaaggttgagcgctgacttcatgtgtacatgctcattttatgagatggggaaatcacagctcagaaagtttcagcatcttcaccgagatcacacagctaacaaaggtgaaaggatttctgtgcctactgggttttaattttgacataaaactttaaagtgtgccaaggatttttcccaaagaggtggagacctgcagtggtgtttgttattcaagagttcacactctgcttacaccttcaatccctcccttgtattccttaatggtagttgatgtctactagggggatggggagagcgagtttcgttgggagtaaagccacctgtaagctgcctgtgctccagtagatggccccatccatgtgcatatgggcagtgctaatactaattgacctcaaagatgtgctggggcgggagagttagggtggaggagct

SEQ ID NO: 208 - DNA, 1200 bp, mus musculus
aagagtgtggtagcatgtgcaggacctgtccaggttcaagtcagatgggatctgagcagagagaaggaagtgaacataacaaagcagccatctacaactgatatctccttgcaaaagaaaaattaggagtcttccactagcagacttcagatgaagatgtagaactctcagctctgcctgcaccatgtctgcctagatgttgccttgctcccaccttgatgataatggactgaacctctgagcctgattcagcttagctgcatttaaaaggaacaagaggaaactaaagctggcagaaagggtggaaacagactccagccagttgaagagaaaaagacaatcaagtgtaaaggaaaaggactcgggcattttggacacagtgggtgctgtggtcctcgatcacaaagggaatgttgctgctgctgtctccagtgcaggcttggccttgaaacatccatcgagagttgggagggctgctctttatgaatgtggctcctgggctgaaaatactggagctcataattcctattccacagcttctttgtggtacataaaaaatcttgctgtatgccttccagtttccatctgtgcctggagctgatcctgtgctgtgccacagcgctccatactcaaatcctactgggagagagctggtctcccaggagtgctgacacacctctgagcacaggtaagaccaccacttctgcacaaattcctggcccaagagggaccttccaagagccatcaggacacaggaaccaaggaacaacaggggacaggatccttccagtttctgtctgtgacctggagctgaccttgtgccacagctctccatacccaaattccaccaggagagagctgctctcccaggagtgctgacacacaggcttataggagggacaagccacagcaagaccaactaacaccagagataaccagatagcttgaggcaagggcaagaacataagcagcagaaaccaaggttacttggcatcatcagaacccagttttctcaccacagcaagccctggatatcccaacacactggagaagcaagactatgatttaaaatcacacctcatgataatgatagaggactttaagaagggactgtattcccttaaagaaatacaggagagggctggagagatggctcagtggttaagagcacagactgagcttctagaggtcctgagttca

SEQ ID NO: 209 - DNA, 1200 bp, mus musculus
ttttttttttttttttgctcagagatggaagaataaatactatctcagacaccctatactgtaccacagacttacagggctcatgtgtgaaccctgccacaaagatttcactatgtggcagtctgtcctatgcaaatgtcaccgtattaacagattgttcattctaaagagggacttccatgctctctgaattaaacattgttcaagaggtttttcctgaagcatcaagctgtttcttcctgttattcaattgagaaaaaaaagggagggaattattattattgtcattgttgtttttgctttctagcccaaagcttcaaaattccctctacaatccttcctaagccgatatgctgaactccatcatgacaatattcctctctctggtaccaaattctcttcttgtttgccctgtggcaaaacagggaccagacccaccttggggagaaaaggatatatttaacttacacttctacatcatggggtgggggtggtgagagtcaaggcaggaactaacatgggaaactggagacagaactgaagcagagaccacggagaaacactgttaaggcttactggtgtgcttctccggcttgctgggctccctttctcatgcagtccacggccacctagagacataccatccacagaggcctgggccctcccctctcatcaacaatcaagaaaacgccccacagacctgcccacaagccactctgatggaggcagttgtccattagcattcctgacttcctggcatatagctttgtgtcaagttgacagaaactaactctgacagctaacttatcaaaaggccaactgtggcatttggcctctttctcctgtgttcccctgaccagcgttcccctgaccagcgtgaagtatgaagtatcggcttcttgacaaacttaaacttgtacttgaatagcctagagctcccagtgaggtgagcagaggaggtgccatgccttcctagttttgttacagagtattgcattctttgtcattagcttggtcagcggcaaagacgtgttttcttcctatatatactagtttctgtgtttcctttctcattttaaaccagcttgacttttctcaaggattgcatatggaagagtaagctttactcaaatacttaaaaatgagatgcagccagaacacaagcccctttgggatgccccagaagttagctctcattga

SEQ ID NO: 210 - DNA, 1200 bp, mus musculus
gcatgtaccaccactgcccagcatctgttcttttctaatgagaaaaaaaaggagtggatatggtagggagaagagaggaggtactggtagtagtagtagagggaggggaaacaataatagagatttttttttgtttgtatgagaaaaaatgttttcaaataaaaggaaaaaaaaaagaatacccctgcacaacagtacagcagccttgctgaaggtgaggcttgagataatagtgttcaacagaagtgggaaaaacaagggtccttcattcgtaggctcatttgggtatgtccactttgtcactccaggttccagaaatgtttcctgagagattccctccaaacgtgttttatatagcttaaaataattcaggtttgaattgcttagtgagacatgatttcaccacattttgccctcagttactactcttctgccttggccctgtggatgcagggactgtggtggttgggactggagggctaaacatttcaccctccagcagaagcccttcccagctccttaatagtccccgattcaaaaggtaagatgaaccctaactcttaataaagaattgaatgtttttcagaatcttccagaaaatacttccctgtcccaactcccacgcatatatttgaccctgcatagcaacctggtaccctgtagctagaacaccctttgacctccatggctgaattcatgctgttctcatatagttttgttcctcatggctgatggccacaatgatatccagtctgtgttcctgaattttccctttttatagggtatcacttacatttaattggaagcccaccatacccaagtgtaacctttccttaacctattacatcttcaagtatctcattcccaaagatgttcacagcccaagacactgaggtcaggacatactgggagttggagggtgtactgcctagttttgtgtcaacttgacacagctggagttatcacagaaaaaggagcttcagttgaggaaatgcctccatgaaatacaactgtaagacattttctcaattagtgatcaagggggaaaggccccttgtgggtgggaccatctctgggctgctagtcttggttctctaagagaacaggctgagcaagccaggggaaacaagccagtaaagaacatccctctatggcctctgcatcagctcctgcttcctgacctgcttgaattccagtcct

SEQ ID NO: 211 - DNA, 1000 bp, mus musculus
tgaataccatgtttccagggctgggtggggaaggccacttagaggcaggagatgtaagacaaaagcatcacgcttttgtctttgctcagcaattcacagggcacagccaagcaccaaggctcccactgcctctttcccggtctgcctttcctcttccttcatattcctagtaaccacacagtcttcaaacattagagtacatgcttaaacacaaaaaacaaagaagacaatggtcaggaaaaatcccaagtcatatgatttcttgccacatctgaagcatagttaaataataccatgaagttctacacgaggatcccttctcagaaaccccatgattcgccattgggaggaaggttcttgcgagagaaaataaatgctaaggacaggaagtatgtaagagaaacatggagacagtatgatagaaaaggctttgtcagatatactggcccacgcctacagcctgtgtgcctcccaggaggtctgcagaaatcaaagacaggtaagaatctagcccaatacccaagccagctgacacaaccatcgggcccagctgacttgagacccacctccccagacccaaagctccacccttcttccagcctgcttcctacctggaccagatctgaggccagatacccacctacatgctacagcctgtttgcctctttggtggtccacagtaaccaaatacagagagcccagctgacactggaccaacctgccctgcaaagctccaccttcgttctggtccactttccacttgggtcagatcagtaggctgatactctccgacacctcacagcctgcctgcttcccaggaggtccgaagtaaccaggaacacaggatgcctgctctaaccaaagacacaagaggcccaccccaaccagagacagcactgcctgccttcaaggaggccagctctagtcagagacatccaggccagttaacaccagagataatcagatggtaataaggatcataagccacagaacccaatgc

SEQ ID NO: 212 - DNA, 1200 bp, mus musculus
ctgcagaaagacaagagatagtgcctgtcatttgttgcataatgccaggcactacttattgttgcaaatagttgtcatcagcacagaggcaggtactacagtatttccaggtggataagattaagaactttaataaggagttcagagtcaagtgaacttgactgagcaacagatctccaagaatcatatttgtctgattttgatccatatgctaagacatttataaagctatttgagcttaataagtgagctcaccaatcaacatgcacatccattgttctgctttgaagaatttatatagttaaaatcgaattgagaaaactattctgaatgtgacggatttttacacctctgttcttatctctcctggtatactcagaagtcatttttttttttattgtcaaaacatataccttgaagaacctaaaggaaattttgactagggattcaaaattattctactaggaggaagcaaacactgcaaacacgaaatgatgatgttgttggagtagcccaacaaatcagtgatttgggagattcttggaaaggtcagcatagcccagaagagccacatctgttcggtaccttgatgttcctgcacagctggtgcagattcgatgggaacatcaccagaaagggtccccagagactggtcacacgcggctgcttcttccctttcatcttctgattctctccctgagctagatgctgtctgcctaactgaagtcagcctctcacagagggcatggttctcactctctagtctgttgatttctgcccgaatttcctggataacccgcacgagtcggatgctagcttccattgctgattttcccagaccaactttttcttgagtcaaatacacaacctacacagtgggcaggatcagcctgcctataaatggtacatgtcacttgaacaatggagctcatgtctctaccgtctttcagcacctgggttagactgcccagggaaggaaaagaagtccatcacttattcatcctgggttttgttttccggaacagtacattcctatctttcatttcatgtcaatcaacagacatagaatactgtttgtgtctgagtgaagagaatattccaaaaatttccagtaaagggcagggcttcttgttttcatcattcatccaccatcatgcttgccatttagtcttttctgttgccacatccggtatcaaatat

SEQ ID NO: 213 - DNA, 1600 bp, mus musculus
gcaggaattaatttaaaagccatctctatagaagaactaagataaaagtgacagttgtagtggtgcacaccttctaggtcagtattaaagagaatagaacaagaagattttgaatttgaagccaatgtaagatacttagcaatgccctgtctgaaacaatagcaacaactaagatatgaacctgcctggaaacttcattcctttagccaaactattcaaactactctccattgtcttatgttgaacatcaggataattatgcccagatggcagatatgataggaaaggagggtgacacataaatatgtgacagatataaagatcatgttcaaaagtgggcaccctacatgtagatgtaggcagttacttaatttatgtggagtaaacaagcaaacaagtaagcaaaatatgaggcttacgttgaaaaatatttcacctcatggaaacaagaaagattaaaggggaaataacctgttagctcttgagtgacatgatcatttgactggtttaaaaactaagagtcgccttccggtcaagcgtcagcctcaggccaccttgagcatgaactccacagactgtcccatagtccccacaggaatctccacatcccaggcaccctagcacacccagaaacttaggattactggtgagtcaaacgcaacatctgttccgaaacagctgtgaggggcctttgccagcaggagcagggacacaggaaacctgcataaccagcagctcaggttccttcctgtctgtgctttgaacacaggggacagcctcaaggtcccctagaggaggtaccccttccaggtgatgcaacatgcctaggatcttaggattccaggatcccaggatcccaggggattggtcacaccaggatctcagggtctcagcggaagcttgactgccaagaactctgacacacccagaatctcaggttcacaggatctcagaataacaggatcacagagaaaactggactctgaggagttctgaatccagctggattacaggaaggacaggctccattcagatataatgagggcagtgaacacttgagataatcagatggcaggaggcaagcataagaacagaagcaacagaaaccaaggttacttggcatcatcaaaaccaaactctcacactataacaagtcctggatacaccatcacaccacaaaagcaagatatggatctaaagtcacttctcatgatgatgatagaggactataagaaggaaattaataatcccttaaagaaatacaggagaacacatcgaatcaggtgaaagaaatgaaaaaaaaaaaaaaaccaaaacattgagaatctaaaaatggaaatagaaacaaaaaaatcacaaagagagaccactctggaaatagaaaacctaggaaataaatcaggagccattgattcacgcataatcaacaagatacaagagatagaagagagaatctcaggtgcagaagataccatagaaaacattgatacaacaatcaaagaaaatgcgaaatgaaaaaaagatcctaacacaaaaagcatccaggaaatccaggacacaatgggaagaccaaacctaaggataataggtatagatgaga

SEQ ID NO: 214 - DNA, 1000 bp, mus musculus
gccgctttcgatcaagattctgaaatggagtcaatggattgaatcaaaaggatctctgatcttaggtgaaagaattaactttctcatgagacatctttaattagaagctatcatttcttgccagtgtgagcacaacccacgttcccccagacaatgaatgctaaaagcactcctcacaatgggctgctcagagtcatctcctttattttcgaatcatattaaggttttgaatgtattctgaaatgtgtttatcattagttttgagttattggattctttagataattatattctctgtctttgcaagaaaactacatatatttaatttgattttgaattgtttttacgaatcaggttctaataaactgtttccatagttagctcatatatcctactgtatggattttaacctggctgggctggtgttctgcatgtgtataaactgagagatggctgctttctggaaaacgaggtgccaagggcaagcagagagagcagcctttctctcatttctgtgcaagcacgttaactgttacttctgctgccctgagagtggtctctcagctcttaacgtgcccagggctttgtatatctcctggtctcagttcaggttctttctgggaatctttcctgagagagattcctgtccccattattattcttgaacatgtcttcctcccttattcaagactgcttcattgatgaagacccttatagtattggaagagaccagttggagcagccaaatgtgcttatcacgtgaacttgaaaagaacccctcaaaagagtgcagcatatcctgagtaccatcagacacagatgtttactataacacagaacaactttgactacgactcaggaaggcataagccgtaaggggctatgggaaaccttaaaagcatgcagctttctctgcctgttagaggacaagaaagtcagaggcctttctttggacatcacactacatgttgattctggctttaaattggagagaggtaag

SEQ ID NO: 215 - DNA, 1000 bp, mus musculus
taaatactcatatacattattgacagagcgtttggtcatagataatataaaatgtccagtttccagcgtggttgttgatgaggctcagagaaaagactctaaagttatgatgggaaattaccatgccattcatcatcatacacattcacctcacactttctgagtctcctatacaaagtcagttctctgccaagggcatggaagagcgaggaacaggatgttaggaagggctgacagcgctgttttagcctgacaggcagatttacaacaggagaatgaatgtaccacttgtataagaaggccatgcggcactgctaatgcacaagttggcagtacatcaacatctctatcgtcctcatattcatgaagcagagaacggaaatggcacactgcttgtaccggcgaataaccaaagtgaacgccctacggctgccattcactgtgtccttccaaaagcatttttctactgagctcttcccagagatttagggtttgcttagacaggtcttatgacgccacgtgataggtcattcttctgttctgaggagcttggagaagatctaatgcctgacctaagctttgaaccccaaatggggaacgccttttagaccaagtattggactgtagagacagcttagaggttaagagcacttcccactcttgcagaggacctcagttccttacctcgcacacaagttgggtaacttacaactgcctgtaacccaggatccagggagatttgatgcctcggattcctcatgggcacatagccatacacaaacatacaattaaaaataaaataaatctttaaaaatagaatgtgttgtaggaaattctataacagaaaaaggataaatcctctaagttagacaatactaaaacagttatagttatatgcacagaaattttcttctcagattctcatcctatacaccctatacatcctatacatagaacattgatgggaggatgtgggtttctagaaaatgaagctgagttg

SEQ ID NO: 216 - DNA, 1000 bp, mus musculus
cttcaatccttttttttcctgtccagtcattatttccctcccagtccaccctttgacagttcctcatcccattcctcctcccctgtcttcaagaggatacaacccccactccccaccccataaggcctccctcctccttggggccccaagtctcttgagggttagttgcatcttctcttactgaggtcaggccaggcagtcctctgctgtctctctgtcagaggtctttatcagctagtgtatgctgcctggttagtggttcagtgtctgagaaatctcaggggtccggattagttgagtctggtgtctccttgctcctcagcttcttccagcctttccctaattcaaccacagggattcccaacttcagtcccttggttgaggttaaatatctgcatctgtctcagtcagctgcttgttgggtttcttggcgggcagccatgctagactcctgactataagcacaccatagcatcagtaatagtgtcagtccttgtcctccccttgagatgaatcctaagttgagccagtcactagacatcctttccctcagtcttttctccatttttgtcctgcagttcttttagacaggaacaattctgggtcagagcttttgactgtgggatagcaatcccatacttccacttgatgccctttctttctactggaggtggactctacaagttccctctccccactgttgggcatctcatctaaggtccctcccttttgaatcctgagaatctctcatctcccatctctggtacattgtagagggtcctccccacctcccacacccagatgttatatatttccattcattcttctggcccccagaggtttattcctgtcccaccaccaccaccacaatacctaattatcttccccctttcccctccctgtcctttctcctacccaggtttctccctttctctgccccccccctcccccgtgattgctttcttttccctcccaaatgggattgatacatctccatgaa

SEQ ID NO: 217 - DNA, 1200 bp, mus musculus
ttctttctaattgctgagtagtactccattgtgtaaatgtaccacattctctgtatccattcctctgttgaggggcatctgggttctttccagcttctggctattataaataaggctgctatgaacctagtgaagcatgtgtccttcttatcccccatctggtccaccctccgactgttccacatcccatacctccttcccctgccctgctcatctccatgaggatgtccccactcccccacccctgacttcaacagatctccccactccctggagcctccagaatcttggaggttaggtgcatcttctctgactgaacccagacccagcagtcctctgctgtgtatgtgttgtgggggcctcatatcagctggagtatgctgccttgttggtggtccagtgtctgagagatctcagggttctaggttaattgagactgctggtcctcttactgggtctccctcctcctcagcttcttcaatgttttccttaatttaaccacagtggtcagctgcttctgtccattggttgggtgcaaatatctccatctgactcagctgcttgttggttctttcagagggcagccatgatagcctcatttttgtgagtgctccatagcctaagtatagtgtcaggccttggggcgtccccttgatttggatcccactttgggcctgttgctggacctctttttcctcaggctcttctccatctttgtccctgcagttctgtcagacaggaacaattatgggtcagagttttttactttggaatggcaaccccatccttgacttgatgccctgtcttcctgtaggatgtgggcttgagaagttccttctccccaatgtaggtcatttcatctatggtccctccctttgattcctgagagtcttccatctcccaggtctctggtacattccgaagggttcccccacctcctacctcccaaggttgcctgtttccattctttctgatgaccctttagtccttttcctccacccaatacctgatcacgacccccctttttccctccctgtcccctttcctacccatgtccctccctccccatcctgtgattgctttcttctccctccaaagtcgaattgaggcatcctcacttatttctattggttcatttctcattttttatcattattgtatcttgaacatgctagcattgtgtttgcatattaatgaaga

SEQ ID NO: 218 - DNA, 1000 bp, mus musculus
agcctcacttgcaaatgttcattgcagtgagtcactggtctggttcaagatctctcgtttctgtgacatcatcaatattggatcctcattgggaatccttccagttctcctgtcgttgccccgtgtcatggagatcctacagctttggaacagcagaactgtccctttcacatgtcctacaccccaaccattcagagatgatacagattttgaggtggtttgagccttggttcttggcctgggtgatagcagagctggttagctgatgggctctctctcccttatccacactatcaggacacgctctccagcactgctctggctgggccacctaggtcacctttcctgctctcatgcctttggggttggcttacttggtgtccccactagcagaatcagctagctatagccaatgagggcccagaattagctctcccactctcatgcctgtgggataaggaggatctctcctgactacagggaaaagagagggcacaaccctcaaacccacatcacctcacaccggaggagtggtagggccagctcattcactctctggacctagtgtctactaacttgaacctcatccaccaggtccagctctggtatgtgctgcccaagcaaggtgcagggtccattctcctgaatgctgcagctgatgaggtgtacagctagctctccggaggagatcatgaccttgtaggcagctttcccaagtgccagaggtgaaggggtgagagcccacattctcccacactcatgttctgaagacctgcttccagggccaatgccactgtgctgtcggggcctagtacaggttctgctttccagcaagtgctgccaagggtgagagacaggggcagctcagctgtttttcctggacatccaggtggtccccagtggcttcccagactaggagcatctccatgttctctagtgataatgtgaaccacagacattgccacagactcagacatggccctcattgtcatcttgagct

SEQ ID NO: 219 - DNA, 1400 bp, mus musculus
ctgactcaataacatttaagtctctattccctgggatatgacctagaggtaagtagtgcaagaaaggacatgagtgatccaggattactgcctggagatgtttctgaggtcagcatggacctggattactttctgccgtcatccatcaacccatcctgtgagagtgctagccactgccacttggtgttgttgagaacagttttcttgatatcaagcaaaggtctgtctgtgaagaactgttgaagaatgttttctccttcccagtcctaaaaatagctgtatttctcataagttactggctttgttctatatcctatgagtgatgtgagttgtaaaattgatcttgtttcctttttgacatgcagggttatgaaactcaatcccagagcaggtccacgacctgtatcttctcaaacatttgcagagcagcctagggcccaagaagcaaggactagttctcaggatgttgcctcagttgacctgcatatcctgccaacaaacagctatgtcagaagttcgtctaagtgtctctagctgcatatgtatcaaaagatggcctagttagccatcactggtaagagaggcccattggtcatgcaaactttatatgccccagtacaggggaatgccagggccaaaaagtgtgagtgggtgggtagtggagtggggggggtatgggggactttggggatagcattggaaatgtaaatgaggaaaatacctaataaaaatattaaaaaagaaaaaaagatggaagatactgtgaactaaactgaatgtctcttaatccatggtttccttactaatgtgtgttattatcttgcagtattctatttttattttacattacattcatttgttcatttatgtgcacagccatgtgccagagcacacacgtggaagccagaggactacttgcagtggctactgctcacccacaatctgacttccaaggatcaaacttgggttgttaagcttggtgacaagcaactctacctgctgaaccatttcatcaacaatttcatgtgattttttaatgaagccagtctttcacttgaagagcacaattaagaaaagtttctaaaggtatatgaacctgtctgctgctggtatttgtgtaatgtttacaggtttatttgttttacgaaatggttagatgataagagatagtgaagagaaagggaggaaggaaggaaggaaggaaggaaggaaagaagaaaggaaggaagggaggaaggaagggagggagagagggagggagggagggaggaaggaaggggagggaccaagaagtggtgaggggaggagtgatgggtttctgcttttatataagccatttaatagccataaaactaggggaatggtaacatgttgcctatgtgcttttgttctacaactat

SEQ ID NO: 220 - DNA, 1200 bp, mus musculus
cagaaataaaaatacacacaggaattatggcaggaagaaatctataattttttctgggaaacggagttgatgaaacttgtaaaaagcttctagaatagaaatcgatttcaagcatatgaccaggcactgaaaccatacaaaagttttcagtgcttttgatggaatctagaaaataaaatcctcctatcccttccagtcagcgccagcaccaggtcaccttgtgcacagagttggtggacacccccaaagtcccctagaggactctccattccatctctagaccactggtgagtggaacacaacttctgttccaatccaatcctgcgggacctgagacagcattagggaagcagaaaagccggcctgaccaggatcacaaatcccttccggtcaacaccagcactgggtcacctggacacagagtaagcagacatccctaaggtccctagaggacagcttctgaggcagaccccatttctggttccagacatctgggcaccttctcctgccataggagaggggtcagccctgcccaggagggctttgctggagcacctgggggcgccatcttggttcttggatccctctgagactagtctgcacgggtgagagtgtggactacagaagctaacagcttctgagacaggccctgttttgggccttcatcttctgccaggaggcaggtctgaacgccagatatctgtgcaccttccctgtaggaggagagcttgcctacagagagtgctctgaccactgaaactcagaagagagatctagtctcccagttctgctgatagaggctaacagaatcaccgagaggtacaagctctaaccagagacaactataaaaactaactccagagattaccagatggcaaaaggcaaacataagaatcttactaacagaaaccaagaccactcatcatcatcagaacgcagcactcccaactcacccagccctgggcaccctaacacccgaaaagctagacccagatttaaaagtatatctcatgatgatggtagaggacagcaagaaggactttaataactcacttaaagaaatacaggagaacactgctaaagagttacaagtccttatggaaaaacaggaaaacacaaccaaacacgtagaagtccttaaagaaaaacaggaaaacacatccaaacaggtgatgaaaatgaacaaaaccatactagacc

SEQ ID NO: 221 - DNA, 1000 bp, mus musculus
tgctgcagtttccacctgtgtccttagcttcatgtgcctcgcctctccttagctcctcgggttctaatgctcagccacgtctcctctgcaacccaccctccaatcgcgctctgctccttctttggaacttccattttatataacaggctccatacgccacagacctggggcttcagcctgcctttgtcttatctctcaccttccaaatccatcccatcgtcagtcctatagatactcactttaagtttattcaaatttttcctgctccagtaaggtccatcaaatataccaaatagggtgttggtaattttttaatggtcatatacgaggaagtattgaaggctgccactcagctccattgagatccttaaagcagagggggaaagaacaggagctgaccaccacaatggactgtttctgaaagtcccctctccctaaatcctgatagatgggaaatgtaactgtcacttggcacagatgtgtgtgaatttcaagcttaaaagctctgtacattctgattggggtcacaggtcagctcccgatcactgttctgtatccccgatcaatcaatagatgcttgattacaataagttttttgttgtggccatagacctggtgtttgagttgtgttggatctaagcagactttgccgtaactcttctcttcaaagcagaggctaataaacagtcagcattactgtcaagaaagtgctgaccccccttcccctccaggacaagggagcaaaggaaacaatgtctgaaaaccttacatcctggtgaggattaatgttgccagcttgacaggcattgtagccacctaggagatgaggtacatctgtgaggccttatgtgcctctgggtgtgtctgtgaggggttattttgattcatttaattaaagtgggagccccaatctctaagtgagagcatcatccttcaggctgggtgggtcctggattgagtagagaagggctgagcttgaactgatcctcctgttcccatc

SEQ ID NO: 222 - DNA, 1400 bp, mus musculus
tcaagctaagagtcaattgaaacatttgtgaaagggttttaaaaatagctcttggtagttcctgcttccttcccctcagggagagttcatgcagggctgtctcttggagacagaggaaagtgctgtaaatgagtgttgagtttgaggttggtgtaagagaagaacattaattaattaattactttgggaagatggagccaggagtgttatgctgtgggaggaggagcttccaggaccgaagggcgtggatctaaagagccccaaaggatgcccagcttagaaggagccaggctggcattcaggctagcatgtggactggtttgtcccatcacccatctccagtatcctttcaaaaacagtacagtagatgagaatctggagccagaggcagactcttggctctgtggtttcctagaaggaccactgaggttgcagtgcagttacccaatttgagtaggaggtttgctgctatcagatcctaatttgagggagaagcagagtcacagggaaccctgaactactgttataaaccccgtggggtgggcagattagcacagtgtggggatctatggttctctgtctccatggaaacatctttgctaattctctatagtaagtaaagaagtcggatgtcctgaatatgcttgcaacagataaaggggcagtgggggcttggggtgctgtgagcagcaagttcacttgcagggtcaggccacgagcatcaccccctcttttgcctgttgcaggtaccccttgtatcccaaatgcaatgggcctttagttctgaggacttctaaagccatgaacctgaccagaaagggcagtctgctggtgagttctcactggtgcttggcttagcctcctttgcccatttcagtacaagatggagcctgaggggcagcctgtgtgtgactcctcagcagtagccagccctagtctaaggagctgcaacagctggtgtaggccctcattagcgtgagcaaacagccgggagcctgtaagtaagcaattaaagataaaaaagaatttccttatgtgaaggagcttctatggaggaagcctgataaggaaggggagagatgggatggaaaaaacctaattagcaatccaaagagcagcttgtggatgcttccagaacacagggggaaatgctaaggtgatggctacacctgagaaggtggcatgtccagggatgacccgtggaccaagggcctgggtgagggggaagggctgaagtagggtggctggagacgtcccagacagatcaagaccatcaagaattgcatcattcattccaacaaaaagaaggcaagcatcatccacttaatagatggggtgagtggctcagacatggggagagtgaggaaccctgacagtgacagggagctggccctgggatg

SEQ ID NO: 223 - DNA, 1200 bp, mus musculus
aagctggcaactcaaccaactgggttgaatacttgctcagtcctgtgagaagtcaagactagcatgttatactacccttcccaggggctatgaaaatatgctgtgactgagtagtgcctgtctctactaatggttgctggcactgggtctctcctacagaggctactgcgcatgatagcctgatacctcctgctgggcaatggcctaccttctctcagggactgagaactactacaaagcagttttccctggcatctggcttagaactttgaaaccctcttgagggtttagttggtgccttaagtttgctgagccacatttgggttacagatcagctaagactggcagcaccattgtaatgctaggaacatcactgtcacacacttggctgttgggtctatttgcagtatgataataacacccctattttttttaaatggaaagcacataccagtgctaatcctttgaccttcaacacacacctggatagggcagtttgctcactgcagagaacagtccccagaaaggaactctagaccttcctggataatggtcaggattgaagtagggagggagctacaggtgacacatagacctactctgaaactcaggcttctgttctggtacccagggcttccagtctaattctggttccttctatggaaattctttgccttattttcaggccctgatggcctggaactgggtgagaaaaggaaatggtctgaatgaaagatgagtgaagtggaaatttgtgatttctttggagactcagttgtgtgatgtcatgtttttctggaagctctcttctgagaggatgttttgttgaagcagacatgtgagaggacgctttgcagagaatagacatatggtgtctttctggacgctgtcttgtgaagaaggggcatgtgatgttttgctggagcagatccttgagaggtcacatgatatttggaaagaatttaagtataacccaacagacagtggataacgctcttgcattggttagccttgctttccttgtcaatcttcacttgtcacaaagtgatttcatagagaaaaatgcaccaaagaacttctcatgatattctggtggcttctgaccccttctgcagcctcctgcagattgaccagcagagactcgtggtttcttctggatcgagcctctgctgccgatccatgtttggtgttctgctagtg

SEQ ID NO: 224 - DNA, 1000 bp, mus musculus
ccaactgcttcaagttcccacctagacttttctgcaatgatggcaggttctgcaaatcactgggggtgctcttctatgttccatgccttcatggaacacggatactctcccagcccccagtagcagagagcacctcactgctttgcaagttccagtccttccggttggtttctcttagtcagcactataactgccactgtgtgctcccaccaccaccaccacctcttcctcatagtcacccagaagaaatcctatcttcctgctccctctgtgttccacacccataggtaccaccttaaataagtattgctttcacaaggaaatcccccccaactcccaaccctcctcctcccctcctccccccttctcacccctcccactccacccccacccccacccgccccagtccaggggcaggagcatagataggtctctggacttggcttgccccagggacttctcttcaaggctctttcagacttttggtcaattgtctgtgtgccttctgtttactttgtgggtggcactggaggtcagaagtggatcagtcttgttttctgttttgtgtctggctaccttgtgcctctgtttatacctaaacaactaacaaatcaggacagtggccaggacactatgaatgcccataccagggcctatgctgccctctgctggacggtccttgtactgcgcattgcgtggattgtttatctgggaccttatgcagaggcttgattggtcagggtaaatccatgcccttgcccatcatgctgtcatttgattgtcatgatggaactcaagaaaaaggtaaaagactcagaggagctaaaatccacttaggtgcttctgaatgcttttttttttcctttacaatgaaaaagcgaatattcccagatgcctctttagtctttttttatgaaacacttaaggaagcaggagcccagatccatgctgactgttgtcctcttctttcaccccagaggaatctcctcttgctctggga

SEQ ID NO: 225 - DNA, 1000 bp, mus musculus
tggggccatttgttcacatcttactgatccaagaaagcagagacacaggaagtggggtcagcctatgaacctcaaggctcatcccccagtgactcacttcctccagctaggttctacctcccaaaggttccataacatcccaaaacaccacaatcaactggagatccagtgttcaaagcctttggcatgagcctctggcatacattttacaaccaaataatagcatgctgtcatggcttccataggtatatagtcatctgataatgcaaatgcatccagcccaagttttaaaatccccagtgtcctaacagtttaaacattacccaaatagtccaaagtctcttctgagactaaagtcaatctcttatgttaatccctattaaatcaaaaggggtatccacttctttccagcatacaatggcacagaacacacagttccattactaaaggaaggaataagcacaatcaggaaatatcaaaccaaattaagactgaaatctaacagggcaaatgcaaaaacaccctgtgggtccacgttccgcatttgggactgatgacctcatctgtgctcccgtacataggcttgattagccctggccctccagctctgttgactgaagccattgtagttcctcatctgggccatttccacccagtgactgcagcttgccttggcaaacttcctggatttctgatctccattgtaatataggcttcacctttacagcttcatgcacagcagactcggatatcccatgaagagaatatggcctggtgttagtgtgtaaaggaatgtgttaggggtttctttttttttaaataatttttattaggtattttcctcatttacatttccgatgctatcccaaatgtcccccataccctcccccccccacacacactcccctacccacacactcccaatttttggccctggcattcccctgcatataaagtttgcaagtccaatgggctgctctttccattgatggccaactag

SEQ ID NO: 226 - DNA, 1400 bp, mus musculus
acatggaatgcagaagcagaaggatcaggagttcaagttcagccttggctatatagggagtccaaggctagcctgggctaaagtgagacatatcttagaagtaagattaatgctggtgatgataaaacaaatttaagcaactgtcatttgactgtttgaatgaataatcagatcttatactcactcaaatcttctctttcagcagagaacacagaacttgcatcgttccccagctgaccctagtgtaagtactgactcctagctacaatccctgaaaggccccgtctcattggtgctttgcctgtgacttggttgcctctcccttaaagagactcaactctcaatttaggtatgctgtatgagtgaagtgccatcattaccagacctgtcccacaaccaaggcaggaggagccacactgggtgtttgggtcagaaacatcctactacatggccagcatgggttctcatatcctcatttaccctagaggtgggagatagagttctagatcactggggtccctggtacaaaacctgacatggcagtgggcctggctggctttggatgaagggtaagaacaaatacaggaggagacaacatttgcaaagggcagtgtatggaatgaaaacatcctagcttgtatccagtgtgcaggaagaactcaggaggccgggcctcctgtgcaagttctagttctgggcctctccttgtcctgcagaaagttgcctacagactgagtgggttttcacagaaaccctggggccagtctgaagagagccatgggggtccactgctgatcggaagcaaaaccatcacactgagcaaatcactgttttttctatgtccgcttggctggtgtttggttataggcaaaccatcctaacacctaaggtcctgtccattctctgcttgccagtatccttggactttgtggatcttgctagaacaaagaaacattttaaataagcttaaaagttagtgttcagaagacaaagagctgggtgcatttgggaagtgagaggtttgatgcaggataggtttgtcgtgtatggagcatgttataaatggtagagacaaagagaagatcagggtacagtaggaacatggcccagagtttagcaggatgagtttgagctgtatccagggagccctagaagagacatggctgggcattaaaacacaagaagctgaggagagaagagacaccatgaagctgaggacacaggtggaaactgcagcaggagagtgactccgatcatctggacagactgtagataaggatggaaaactgaggaattccatcctttgcatgtggaggaggagaaggaccagcgaagtaaagtggtccagcagtcaggtgatacagcaaaccaccaagactgatgcagaaggaccgacttct

SEQ ID NO: 227 - DNA, 1200 bp, mus musculus
tttttagaactttgactcaaggttttgctaagttactcacaccactgtggaactcattgtataggttaggctgaccttgaacttgtgagcctctgagtgactgaggttacaggcctagaccaccaggaccatttcataataaaatgtggtttataagctttcaaacttgtggaaatatagaaaggataagacccctcagctgcccccatatacttagcccactccttgggctcaatcttccttatattatttatttttaattttaaggcatggtctcttggtcttttttattatgttgtccaggctgaccggaaacttgctatgtaaacctgcctggacttggacttacaatagagatccatctgcctctgcctcccaagtacagggattaaaggtgtacaataccatacctgggtctttcttattgtctacaaaatatttattgggcgcgtgcgtgtgggtaagagcactgactgttcttccaaatgtcctgagttcaaatcccagcaaccacactgtggctcacaatcacccataatgagatctgacaccctcttctggagcgtctgaagacagctacagtatacctatttataataataaataaacctttgggccagatcgagcagggactgagcagggttgactggagtgagtggggccaaccgtagcgagcagaagtcctaaattcaattcccaacaaccacatgaagactcacagccacctgtacagctacagtgtgctcacatacattaaaaaaaatacataagtctttaaaaagaacatatttatttttattcttttgtgttcacctattctgcctgcatctctgtgtgcatagcacttatgtgtctggtgcccatggaggccagaaaggaacactgaatcatcacatggaactggagttacagatgttcgtgagctcttgcgttggtgctgggaactgaacttgggtcctctgccagagtagcaagcactctcaccccaccgagccatctcttcagcccctctacacatctaaaacaattaaatatattgtttatctacttatgagctgtgtgtgtatctttgtattgtgtgggcatatttgtatgagtcaggtgctgtgcatatggagaagtaagagaccaaatgtggctagttggtttcttcttcagtttcagatgatgatctgagtcacagggatggaactcagacta

SEQ ID NO: 228 - DNA, 1000 bp, mus musculus
ggaaggatttattctgactcacagttcaaaggtaatcaaggcagaaaaggaagagtggaagacaccaaccccagctatggtggtaggaatatggggccatttgttcacatcttactgatccaagaaagcagagacacaggaagtggggtcagcctatgaacctcaaggctcatcccccagtgactcacttcctccagctaggttctacctcccaaaggttccataacatcccaaaacaccacaatcaactggagatccagtgttcaaagcctttggcatgagctgttggcagacattttacaaccaaataatagcatgcggtcatggcttccataggtatatggtcatctgataatgcaaatgcatccagcccaagttttaaaatttccagtgtcctaacagtttaaacattacccaaatagtccaaagtctcttctgagactaaagtcaatctcttatgttaatccctattaaatcaaaaggggtatccacatctttccagcatacaatggcacagaacaaacagttccattactaaaggaaggaataagcacagtcaggaaatatcaaaccaaattaagactgaaatctaacagggcaaatgcaaaaacaccctgtggctccacgttccgcatttgggactgatgacctcatctgtgctcccgtacataggcttgattagccctggccctccagcactgttgactgaagccattgtagttcctctcctgggccatttccacccagtgactacagcttgccttggcaaacttcctggatttctgatctccattgtaatataggcttcacctttacagcttcatgcacagcagactcggatatcccatgaagagaatatggcctggtgttagtgtgtaaaggaatgtgttaggggtttctttttttttttttaataatttttattaggtattttcctcatttatatttccaatgctatcccaaaagtcccccataccctcccccccacacacactcccct

SEQ ID NO: 229 - DNA, 1000 bp, mus musculus
ggaggagccacactgggtgtttgggtcagaaacatcctactacatggccagcatgggttctcatatcctcatttaccctagtggtgggagatagagttctagatcactggggtccctggtacaaaacctgacatggcagtgggcctggctggctttggatgaagggtaagagcaaatacaggaggagacagcatttgcaaagggcagtgtatggaatgaaaacatcctagcatgtatccagtgtgcaggaagaactcaggaggccgggcctcctgtgcaagttctaggtctgggcctctccttgtcctgcagaaagttgcctacagagtgagcgggttttcacagaaaccctggggccagtctgaagagagccatgggggttcactgctgatcggaagcaaaaccatcacactgagcaaatcactgtttttttctatgtccgcttggctggtgtttgggcataggcaaaccatcctaacacctaaggtcctgtccattctctgcttgccagtatccttggactttgtggatcttgctagaacaaagaaacgttttaaataagcttaaaagttagtgttcagaagacaaagagctgggtgcatttgggaagtgagaggtttgaagcaggataggtttgtcgtgtatggagcatgttataaatggtagagacaaagaaaagatcagggtacagtaggaacatggcccagagtttaccagtatgagtttgagctgcatccagggggccatagaagagacatggctgggcattaaaacacaagaagctgaggagagatgagacaccatgaagctgaggacacaggtggaaactgcagcatgagagtgactccgatcatctggacagactgtagataaggatggaaaactgaggaattccatcctttgcatgtggaggaggagaaggaccagggaaggaaagtagtccagcagtcaggtgatacagcaaaccaccaagactgatgtagaaggaccgacttctcct

SEQ ID NO: 230 - DNA, 1200 bp, mus musculus
cttgaccttgaactcacagagctgcctgcttctgcctcccaagtgcaggaattaaatgcatgtgccacccagcttagctttctactccttgatccatggaaatataaagaagctggatgcttcatgctccctactatgtcctggccacagacgggaactgattctaacactatacagtatgattaccccaccataaaggactgtatcctctttgaccacgagccacttctatctcagcaaccagaaatgcaaccaagaaattggctgtgttcagtgggcagagttatgaggtaagtgctaccatggaggatcccccttccaaagtgaaggcacagactgtatagattccaccaaggtccagcttcatagccaggcaacatggattatttagctcctactatgtgtcaagtgttctgtgaagttttgaacttccagggtctctgcctgtaaaaacttttgagttggaagatcctttcaaagaaccagaatataatcatttgagatgttgtgaagcttacggtaggttgaaaccccctaaatctattgttgttgcctctaaggcaaccacagacagcgtgggtagttgtggccatgtaccaatatggctttatgggcaatggcttagagcagagttggaaacacacaaacaagacctcaggataccggtcaggcccctgctgaagctcagtaggtggccttgtggtattttatatgtccccagcttccctgatctgtggtagctggccgatccaacaattgacattagtggataaaccagcagagacaacggcagctgaccagaacagtgtctgaagggctggaagggtctgacgcaccatgaggttttctggagccttctagccttttcaatccctagtccactttccaggtcccatgaggcccagcccagggaggtttggctatggccccagacagccttaccttggaacagggtgtcctgttttctctcttcccatatatagttggtcttctatatttatagttgccatatctgaggagccaatcaataggactgaaaatatctggggaaatgcatttgtaaagaacacctgcagaagtttttcttgccattgttcccaaccgggcacaagctgtttatttaacatttatatggtatcatgtcatcttaagtaacataaagatgatttaaagtatatggggggtgcactcagcagataa

SEQ ID NO: 231 - DNA, 1000 bp, mus musculus
ccaccctaggccctgccttggtcccttcgctggaacccacatcacctgatgctttgacagccacgtttgcaccaggttctgatcatccagcctggttccagactggttactgtcacttgggtactcagggtctggagtccccttgggaaacatgaactttcggcctccaccgaggatcacctttggtcagaggatcaacacaggtagacttagggctttatgagttccctacccttcctgaaagacagcccctatctatgtccccaccatgtctgtgggttatgcatctcctggatgttccacacccaccccttacatatgtaaactgcaggggacttggagttcaggctgtttatgcctggaactatggccagtccaaggttcaccctttgtccaaccctccagctggttcttggagctcacatcaatgtccatgttggagatgagttgagtggcgatgtccttgcagccgtcctgcagtgcagaggcaggcatctctgcatctgagtaccaattacggttcaccgtgtgtgcgtaggtgccggctggagaggcatgctgcaccctggtcgtggtcaccactcccacagacttccctgcagatgatagaagatcatccagtgaccctgccctgccatagcacccagaccagcaccaacctacctgctttcttggcacggtacatcactgagaagacctcattgccaaatgtggtgttgcactggtctaatcgagcagctgcactcaggccgatggtcttgtagttggccttgaccccacagagataggcggttgctgtgcctgcgctgtctgggacctgtctgtccacgttgtatgtctggggacagagacactctcagctctggtactggtagacattagtccctgcttcctgagacatgtctacactgtcctggttgcaaacttgggctccagttcttctgggttcttccatctcttgtcctctccagcccctttcccgtcctagtgtgttccagtg

SEQ ID NO: 232 - DNA, 1000 bp, mus musculus
tcaggatcacccaggcagtaacagtgccagacacacacaggcaggtgctgttggcccacagctcacagaaggtaaacctggatagagtgcatgatgactgccttccaccactggggagagtgcacaggggggcaagctggaccacccatgcctctgggtagggtgggtaccagctgacccagatcttgcagactcaccttgatcttgaactccatcttcttctgaatgctgatcatctgttctgtgcggctcatcttccggacaccctcattgcatgcctttaccacctggcacagggaggacttgtcaggccagcctgccagcatgtccccaaataccaccgagcagctgacactgactgactagcctcaggttggcaggaactctttctctacgacactctgggactaagtgaggatgctttgtgcagtctagcagtggttctcaacctgtgggctgcaacccctttgggattgaacaaccttatcataggggttgcatctgcagcagatacctacattacaattcacaacagtaacaaaattacagttatgaaataacaatgataataattttatggtttggggattgccacaacatgaggaactatattaaagggtcgcggtgcagcataggaaggctgagaaccatgggtctagaggatgatttatctccttgtccttgactagaaagccaacctcccagaccaagaaaagggatctttcttctcagtttgactaggaaaggaatggctcccccagattgacttctcatgccctgggggtgcacaggctcccactaccctggaaggcagccaggaaccaacatgccattaacactacatttccccagacccctgggcctccactccaggatcagggccataaatggctcatggtgtctaggacagagcctggcctgatacaagtgctttgtcagtgttaagtagtgcagggcagaaagaagcatatgaggatgttcctttcagtgtagcttagaa

SEQ ID NO: 233 - DNA, 1000 bp, mus musculus; identical to SEQ ID NO: 232

SEQ ID NO: 234 - DNA, 1000 bp, mus musculus
attggccatgtttttcagtgtgaaatggccaccagacaaatgctgaaaagggagacatataaagagggggtgtggaaggtgtgtgtgaaatagatgtcccacttagggctgagcgttctacagcctctcattctctgtactttgcacagctgtagttctctgcattaatctccatctactgcaaacagaaggttctctgatgctggctgagcagtgcactaatctatggttatagcagtaagtcactgagagtcagtctaattctatgcccacttagcagagtgacagtcataggttctcccctagggcctgagtgtctcgccacaggttccattaacaattctgggtgcgagttttatcttttggagtgggccttaaatccaatcaggaagtgattggttacctccatgacattcatgcctcttattgcaccagtgggcatgtcttgcctggccagctgctattgtagctcacgggatccacagcggggtaagactgaggattgcttttctactctggcaatgcatagcactttcctgcactgtgaacgctagtcagtagagatgaggtttccaggtcagtattcgcttgatttccccatgttctgtgactcttgtgggtggtatctttagcaataggctcttcttgtcaaggataataccttggtgggagttggtcaacaactccccaaaaggtaacccataactggccctggactttttcttattagtctgtgttgtcttggatagcctttgctgcccacttgttggttgggatgatgtgggaggagctggtagaagcagtgaccagaatcaaaatgcattgtgtgaagttctccaaaaactaaaataaatgagaaagaataaagagcaggcagagagtggtggcagacagtagaggtggaaagagatggtagatcagagatggagagatggagagagatcaactgggagatggttgcatgccttctctttatctgaaacttaaggtttcttgttct

SEQ ID NO: 235 - DNA, 1000 bp, mus musculus
gaatgtaacagaaaggtattgtgatctgtgctggtcattatagactccagggcatacgcaatgcagattagaatggtgacagtagagacgtgacagttttgtctgattccagggctttgacgtgtggctctgatagttggatgtaatagcctggcttccttatgtgtggcccgttggtctgtcccttttcttcctgcccacgtccagccttcagcactaatgagcaagacaaggacaactggaatggacagctgaagcttctgctggagtggaaccagttggaccttgccagtgatgagatcttcaccaatgatcgccgctgggaggtagcagaagcctcgggggttactcctgggttagcagggacaatggtctcagcaggagatggtctatatccaacaaggtcatcaatctagaatcttgttaatgactctgtcctggtatatcagtgttgtccagcctcatttcccttggttgtaagacgggataacaatgctgacttagtaggtttcttgcaaacaaatagcatagccaatggctgtagtggaggctatccttaatgtacggccctgtctgatgtggagctatgggtgtgctctcaggaggggttgcgtgaagggatggggactattgtggaattgtcagtctagcttgactaaaaagatcaagacagccacattcttttgccacctccccacctagcaaaattctggtaacagatttgtcagggatgagatgtatgagggagagtggaacaactttgctgaagacactcaccagtgtctttgagtgaggttctcgggatgccctgggtcaaaagagcacttccaatatggaagttgcatgtgcatttaaaaactatacatttccatcagaccacttttctagatttttccatttgatgaacattttaggagcccactgatggggttccatgcatctaaagttcagtcagccttggaaactctgttcaggaggaacaattgaaccatcaaacaga

SEQ ID NO: 236 - DNA, 1000 bp, mus musculus
tgtgagtcaccataaataatgacaggccaatataattatagggttgtcttttaaaaaaaaaatgtttgtgtcatttgtgacatggaaaaatggatgtcaacttttaaaacatgaactttccttttattaaaacttcctaatgttaagcatatttcatttcggcaattaagaactcgtgttttgtctctagacaaattgtgttagagactgaagccgacatcataattgatgatggccttgctttatcactgtaaattatatttatttgtttaatatttaatagtaacagatttgctgaactcaaagcttcacatagtcctaaaatgaaaaataggcaaatttctcccctcctcccctgctggcttcttgcttctgactcatttccccaaaaggatggctggtatcgatgccttaactactcctgagactgcttcagacacatctacagcttaaattgtgccccataacaaacatatccccctggcctaaccccttggtagcctggtgactagggcctcacttggaaagagtctgtctgccatgtaactaaagacctctggctaaggtcactaggacaggccctaaggacaggtgccctttaagaggagagagatggaaaaagataggagaacctgggaagagagctgtgtggagtctggccaaattctgagagacatgacaccgccaggaaccaggaagactctggtgtgcccagaagccgagcatgcaaatgtaggatttttgttagaacccgcagggagcagggacctgctagcaccttgatttaggtgcctggtctacagaatgtgaaaagcgaaattcaagttgctgttgtttgagtttgtggtggcggtgtcagtcactgtagggaactgcccagctcctaagaactctgcattcactctgtgtggtgtccttcttacaaggacctacctcgctgggcgtggtggcatactcctttaatcccagcacaggggaatttctgagttcgaggccagcc

SEQ ID NO: 237 - DNA, 1200 bp, mus musculus
atccagggtaaggctatggagcacgaccccagtgaacatctgcattgtgcttttgggaagatgcgattgaacctatctgagcatagacctggctgggggaggggtgaatgaagagggaaactatttaaagagaagtgaaccagacttgaacactctgtggagctctgtgctaacacaggtcagtgaggttgccctgtgagaacacagtgtgtcctctacgggctctgctcatcttccatttgtccagatgtagtgtgactccagagtctaaactcaatgttgcagtgttccaagggaggtcttccgagtccttccagcagggggagccccctgcccctcactctctctgaaggcttctgtgtctccatgcctgaatggaggagggaccctggggtcctctgactccttggggtaaattagattacagatttcctaagggtgtccgtgcctggtgcacagggcctaagtgtgatgaggcaaggcatttaagacaagaaatcagggcaagaatgacacaggagtcccctcctctgttccaaccggttacatggctgataagattcgtgggctaggacaatttacagcccatcccagaagcagcagtagccaggtcagcattgtcaccaccccaagcccagctctctcaagctggcatggcacataacatgcttaccctaaactcaggacagtcgtctgtagtggggggggcaagccagtcacccctacttttgccatagaaactgacattagttaccacaggtggtagaaagtcctccccttctctggggaatgcactgtccctgtcatcagtttgctctgcagacactcttgaaataaaacaaggtgttggtggtcacatccacgagattcaaggaaaaccaaggtctacagagagctgcctgcccacagtggctagtagggctcagaagtgtggtgaagccacaagagtgtcagggtacaggaggaaaagatggccttgttccagcagacttagccccaaagagtccagtggacacttgacctcagggagtagacacttcctttcaaggcccttgtctgtgactgcatcagaaccctcttctatcccatcaaagaggagacctaatatggcttccagtgtggggcttcagactcctccaaagatcccaactttatgtcatcttcccaggcataccaacaaaatgctatctgaaaaagtat

SEQ ID NO: 238 - DNA, 1400 bp, mus musculus
cctcttctcttgccgtttcttcctcccagtagctgacacagcctgcctgatgatgcctccttagccaccttgggtagcaactgaccagcagtccctagccaccgtggcccaggctctgcagtcctgctcctcagagaatcctgtggcctggccttcagttagagctcactgaatctgcagccgactgcagtgtgactgcgggtctgaatttgcggtttgctcacctgagctgctcatgggataagcttctagatttgtctccagcactggggccaggccttggattggttgttaggatattggagatccttgttagtgatgtgtgttctcagggaagtggcttgaaggggtgcaggagatcacagccacatatcagggcaagcttgctttgaggtccccaagcctgtgggtgggtgggtaatgggaagcccccagtagcatggacacttcagtgcagtgtggtcgaagtatggctctgtcttgttctagtagaacagccaggaaggggcctctgagtgtcatggaaatgactggatgatgtcttgcatctcaagcagtagtaggcacacaacaggcacaagtcccgatatgggaaaatgtttgcgtacccaagttagtgacttgtgaaattagaatctgccacaagtaattgctgaatccagagagaggttccccagagcgccattaccaggtgttggcatttgtcttctctggcgtgtgcatggcacttctcctgcatgaatgaacacattaactaactctccacagagcccacgaggtgggcctgagacctccctttcagagacaaggaatgtggcacctggagaggtgggtgacttggctaattctatccagatagttggagcagaattaattttaaagtaggtgtgcttgcctgtggcaccaaggtacagcctctgactgtactcaggagagagagagaggaaggagaggggtgtggccctgggaaccatggaaactctgggagaaggaaaatacagagaaagagatagacatacatacaagaagaggggagaaggatgagaaagagggaaagcacagggagggggaaggagggagaggatgaggacgaagagaagaaaagtgaagggggaggaagagacaggcgaagagggacacatggaagaaacaggcttcaggtgtgccctcggaaagaaagacctcagaagccgaggaagaaaatattctagaaaagtcaagtttgcctgattttccagggttaccacctgagtcctggtcctcactggacttgatggttgagacatcagtggtatcaacaacaggagtagtagaaagagctctatgaattcaggcctcgggcatggctgccagatatttaaaaaaaaaaacaaaaacatttctttcctgaaaatgcgata

SEQ ID NO: 239 - DNA, 1000 bp, mus musculus
caggcagcaccgatgcccagcgcacaccacctcatgcaaaagagcgcaagaaacaagggaagagcgagcagcaggcagaggccttggattcaccgcagaagaagacgaagaacaagaagaagaagaacaagaagaagaaagctgcaactcccgcggaaacctgcagagatgccaatgaagagttgaactgtcaggacccagatgtgggtgacatggaggaggaagagcggctccaggtcactgacaagaaacaggcatcaggaagcccagagcagaaaatcagagcgggaagcagagaacctgtcgaagatcctcaaagtgggtcgagtggaaaacagaacaaagtggaagaggatggtcccacggaaggtcccacagacatcttggatcagaacagtccccagtgtgaagacagggagatctccccagtgggagagaaaggtccccaatgcgatacctctcagataggtagtgaagagggacatgtgacctcccaacacggtggtcaggcagttgagaaccacaacctagataacagtgacctgtcagggcagctggagggcttcaattcagaaagtggagggcaggcaagagaggaggttgggaatagcaagagtaaggaggactgcaccatgtcgtgaggaggcagagcaggagacttagcccagtaagctccgtccctcagccacccactatatcagaacctccatccttccgctccactgccctgctgaggtttattgaatgttccagtttctgtggatgctccatgtgtccatcaccaagtatcaactacttaagtcttagactgttacctgtagatttgtactgaaccactgatcgctgagccagtactgttttttactagcagttctagctgagaacattccattagcatcaggggacaccaggtgtgcattccagcctgaaggttaaaaggtagcgtttgcttcaggccaggacgaatgtggatgttcttgaccaaatgcatcagtatctg

SEQ ID NO: 240 - DNA, 1000 bp, mus musculus; identical to SEQ ID NO: 239

SEQ ID NO: 241 - DNA, 1000 bp, mus musculus; identical to SEQ ID NO: 239

SEQ ID NO: 242 - DNA, 1200 bp, mus musculus
tctctgtagttggtcaggaggccacagccggtgtctcctttcctttctcctgtctgctctgtgctccacattctgtgctaagaccccagcagaggcttctcagtagtggagaggtgtgggcccactggtggaatgttcgagactttccttcagtgactgtactcttgctcttggctttcacagctagggtggaagtacttggaagcatgtggtgcaccctacttttcagacatggctcctcacccagctggaggatctggctgcttccccagtgaggtcaggctggcacctatggctacacatctggacacgcagatgtatgaagatagagtctccagactttatattaattactctgagctgggaagcctgggtaccaaagcttaggtgggcctgggagtaaggtgctaggctattagagagccctcctcagctgtctcttcctcttttctccacaaggtcatggacactgaggagatgtgggcactaacctcctccagcccagctattgcttctggctatgccttatactccaccatccactggggaattgccaacttaggaaatctgttgtcctcaagggggacttagccctttgcctgtgggagaggacctcctcagatggcccttggggtcaggaaactgaactgtcttattctgcttgtgaggtgtgtgaggaggcccctggcaagcagaggggacttgcaaagaaggaaacaggacctagagagagatgggcctgaggtccgttatgcctccagaagacagtgctgcctgctgcattcccatcatggagagggtggacctgaggtagcttctgcagggttagcagtacatgaacttctcctgtgggcgcctttcaactgaactgtgtgcctgcatgctgcagtctatctgctttgcaaacacccacttccctttcagtttgcttcattgtgtacagatgcgcgcgcgcatgcgcgcgcgcgagcacacacacacacacacacacacacacacacacacacacacgaggatgagtcatgccttaagtgttctgaaagtcaaagaagagaaaatgaacagatgccttgcaggaggtccaggcccggtattgttttcatcaaaatgaagacaaaggaggaaacacagaaacctagggttttaagagaaaatcttcatggcaggtgactccatgaccttcctaatcctctggctccc

SEQ ID NO: 243 - DNA, 1000 bp, mus musculus
cctagtcaggaagagcagtgggtcaggagcttccagaattctccactggattctgacactgccagccctggtcagcacatcagctttggttctgctttctcctgggcacctgggtctgtggtttatttggaattaaagccctgtttgaagttgtttaacaaagacatgaatttctggggcacttcccaggtcagtcttagacgatctgcaggttatgtacagagtgacagccacatcatggcctcatactgctgggcggggtgagctttgggctgtctcctctgcccagtgtgatttatcaagggctacctcagtgggaaagcatatggagagaatcccaaggctgctacttgctttggagagaaagtattcttgtggggcatttggaaaatccaaagatatcagtgtgcatgggcacaggatggacccctgaaccctggagcaactgacaagctcctagggcttctggagttgtggtcctgggattccccattaggacctcgctagggaagagagaggtttcctctgtggggttgatgcgtttcatgacacaccgcctgctgcttttagcgtgccacccagcttccctctgggaggaaagggaagggagcagagctgctctatgcttgagacaccgtgcccactggtggtagggtacacactgctacttgagccttcctccatgttctttctcttctcagaaacccatctgggtcacaggaaattgtagatggtttggggccaaaaaggtaaaagtactacagctttttggtgcacaatagacatttagacagcaggtagctccaggcactcacaagtgaagagttcagacctccttggcactcatttccatacctgccacctaaccctggctttctgggccttcaagcttttgatgctctaggtctgctgtcttagaaaaacacctttcctccccctagatatgagcagagtatggcagtgtggggaggaccgttcaagagcctttgctaaaagccct

SEQ ID NO: 244 - DNA, 1200 bp, mus musculus
ccttcttttgtgtcctgtggacagaataagtgggtgggcaattgccctactcccaaacaggccagatctcaccagctctagggtgggtggcctgtggagacctgctttgttgcatctctatagcgtgtaattttaaaagatccctatttgcctggtgactcgcgaggctgccaccagtctctcactctcactcagcttcgctaatggccagttggccattttcccctggagctgtgattgctcccccatcccctcatgcctagctttgtcaaactgtcgccaacaactgccccaatggatagaaaacaccagttttattatcttaaaactagatagataactcaatggctgggtgaagaatttcttgccctaatcttatcaactagctccctcaatcttgccttgccttctgcccacagcagaagctataaactctacgagccccaagacctacatgtctacagcatcctactcactccaaagcctggtccaaattctgctttcttctttctttcttctgcctgggacctacaacttcaatctttttcccttcattcaacaattagcttctgcctcctttattgacacaatcaagaaccaattagagaaccaatacctctccctccacatctttgggaagagaaccatgtgatttcttggatggatcttactggacagtttgccctgtggcatgtattctctgagggctgcagcagagttgtctagccccagattagttaccacagtgacagagaatgccagaactcattcccaagggcctgagtggggtttgctgtcatatcaagcaggccttggattggtaactgtggtccacctggctaggccattccctcaggttttgtttgttttgagacaggttctctctacgtaattctgactgttctggaacttatgatgtagaccagatagacctttaactcacagagctcctccatgcctctgcctttacttctgccccctgagcaatgggattaaaggcaagtgccactacacccagcttaccttgttcttaaagacctgtctggttctaagaagatgtggagggctatgattgcctgcagagcctgacctttctgggtatgggacagttccctaattgaatgaatagaagcgactttcagtcatgtggtctacacactattctctatcacttggcttgtctcatgacctggcagtctg

SEQ ID NO: 245 - DNA, 1600 bp, mus musculus
tctaagcatgagagatatgaaaaacactttacctgaaaattaaaagaggtctaacctcagtgacatcattcattcaaatttattaagggaatcactacccttgatcaggaatgaattttaaaaatttgttaaaaagccactgaggctttttacccacccatcataactgacagaagtgctacttacagcagcgacaagaataaacagtacaagctggtcactgaatctaaatgtttgttaaatgtattaatgaaggacttgccacagacaccaaaacctaacaaaactttattttaaaaataaatagttgtcatttatctcttttgcacattgcaaaaataaaaagaagatgaattaacataaaacacacagagatcattattaaagttcagcatgaaataaaagggatcttcggaggtagtgaattgaaagcaattgtaatttatttgagcaaataacaaatttactaagagtttacaatgaaaagaacagttatggctagaaatcaaggagtgacatacagacaaaagcttgagatagttatgtttgcaaaaaagggaaagagaacaatagtttacatggaataattggacccaacatgaaaaacattactaattatgaaacagacaatctggtcattcaacacaatgaaaaggcacatttcttttttaaagttgatagaagatccaacttcttcacaaagccggctctcatacatcctttcctatgggctggagcagtgagtcttcctgaccctcccacttactcatgctccacagctgtccagatctagcctgtgaaccacatccagtgcccagtcaaagtctggctatagctgtcttgtttgtaaccaactctggaggcttccagccagaatcctccctacttacccctgcaaccaacagacctatcccatgccatccgacctcagaagaaaatcagaactactggcatgatcaaggcttaggccaggaaacatcctgtacagggaccagttcctctgtcaatatgacttcatttcactcaatctctagccccaaatctgacttcatttcactcaatctctagccccaaatctcttgtaaccatttaaataatctaatgtttagaccaaaaaagacacaggggggtataaacataagaacttgaaagctcagcaagatgactttattttcttgacttaatttatatacaaaatacctatttataagcttgattctacaactaaactgctagctctttagaaatctttttctttttttttttattttttattaggtatttagctcatttacatttccaatgctataccaaaagtcccccatacccacccacccccactcccctacccacccactccccctttttggccctggcgttcccctgtactggggcatatacagtttgcgtgtccaatgggcctctctttccagtgatggccgactaggccatcttttgatacatatgcagctagagtcaagagatccggggtactggttagttcataatgttgttccacctatagggttgcagatccctttagctccttgggtactttctctagctcctccattgggagccctgtgatccatccattagc

SEQ ID NO: 246 - DNA, 1000 bp, mus musculus
catcttagtatgcatggcttatactgccacctgagacccggtggatgtctttggcctatgctgccaaacctgtcagtatctggatccacggtctgactgcagtgtctgagacccatgtgagttttactgccaaaggtcttgcatgtccaggcatgtttggatctgtggtcctattacaactgggggccatgttgagatccatgggctgtgttactatcaaaggccatgcagttgtctttggtctgtgctgctggctgcagtcatatttatgtccacgggtcatgatgtgaatctatgggggccatgtagatgtgaatggcctatactgccacctgaggtcatgttgatgtctttggtgcatgtttccacaggggacacagagattctgctgtagccaggggccatgttgatgtgcttggtctgtgttaccaccaaagggcagacagatatctgtggtctgtgctgacacttgaaaccatgttgatgtcagtaggcctggtatccaccaggaaccgcattgggggttcatggcttctcttatctcagaggtaatgttgatgtctgtggcctatgcagcagcagagggctatgatgatgtctgtggtttgtactgatatggaagaccatgctggggcccatacttgtatccatggtgtggagtgcaacagattaaggtctgtggcctgtgttatcactgaaggccatatagatgctcgtggtggtctgtgctatggcttgaagccatcatgatgcccatgagcccttactgaggctatgttggtatctgtggccatactgtcagaggagatcactctgaggtctgtagcaagtgctgactctagagtccaggtggacatccttggtccatgctatttccagatactatgtagagatttatgaagcatatcccagttgagtgaaaaggacaaggaagcttcctttgcagtgggtatcaatgactgcatgctcacagttatgaaagagagaaatagaaggctcg

SEQ ID NO: 247 - DNA, 1000 bp, mus musculus
gtagttatgggaagggccttgttagtattctcagagtgggtttgcattttagaaacacaatatgaacatcccttccccccaaacacatacatgatataatgaagtttatcatgatggaaatccgcaaacacatgtttgtgagtggatcaagctgtccctgctgacctgtgaagtgaactgccaatttccagacaacacagacaggagttattccacaaaaactttctaaacaggcctgcttcccccatatcctatctattttgctacctttgatgggaggtggggtacaaggaaggtgaaaacatttaagaaccatcattaaaaataggatttaaaaaaattaaggttacaatcatgcactggtcattttctgcccacccacatagggtgtagaatcccctctgtgcatctctggttcctggtttgttaggtaccgatcctgactatgtgactgttggtactcacatggctggcttggctatcctccaacctagccagtatcgcaagttttgtcaactgtactaagctgtcttcacatctgcaagagtcagctacagttgtttgtagttaacttccaatgttcaagacctcagtgtttgtggtcttgactctgaactaggtaaaggctttcttaaaagctatctgtcaaactcagctgcactatgagaaaatatctgtaaaaggttaacagcatgcacatcacacattggaggagggtatgaaaggacaacttaaaggaagctagctagttgtctgaccaatactgcccttgcctcttgggaactgcctctggcaagcctgtttggatatgtcatacataacagtaagttctgattcatatctctaatgctcctagtctcaccactccagccttgccatgtcctttgaactttaagatctatccccaacttcacgtgtgtgagcagtttgcagttgtcaccataggccttcgccaaagcccttcgccctttattacttcagaaatttaattcttgactta

SEQ ID NO: 248 - DNA, 1000 bp, mus musculus
aagggaatgtggactgagtgggggagcagtggtgggtagaggggaacatgaggtgggtagagggaaaaggactgaagtcctgagggacagcaaaagaatgtaaaccaggcaacctcaggaaataggaggttagcaggaccccccagaatgcaccagagatctgggagatgagagactcccaggattcatagggagggacctttgatgaaatgccccacagtagggagagggaacttatagagcccacctccagcaggaagacaggacatcaagtgagggatggggttaccatgccacaatcacatctctaacccataattgtttctgtctaaaagaactgcagggatggaaatggagaggaacctgaggaaaagaaggtccagtggcagtcccaaagtgggatccaactcaaggggaggtcccaaggcctgacactattactgaggctctggaaggctcacaaaaaggaatctatcatgactgccctctgaaagacccaacaagcagctgagtctgatgtagttatttgcacccaaccaatggacagaagcactgacccctgttgttgaattagggaaggctgaaagaagctgaggagaagggtgatcctgtaggaggtcccaattaatatggacccctgacatctctcaaacactggactaccaaccaggcagcatacaccagctgatatgagacccccaacacatatacagtagatgactgcagggtctgtgttcattcaaagatggtgcacctaactgtcaagaggttggaggccctaggagtttagaggtcaggtgggatgggggtgggggcatccatgtggagatggagttgggtagggagaaagtgtgagatgtggagcagtcagagggtggatggggaggggtggggaatgtaatatggagtgtaaacaaataaaatttggaaaaaaagaaaagaaaagaaaagaaaagaaaagaaaagaaaagaaaagaaaagaaaagcctctcatgactta

SEQ ID NO: 249 - DNA, 1000 bp, mus musculus
caccaccatccatgccttttctacttctttcctgatctagcaacagccacagaataagttacccagcctccctggtaccttgcatgcatgtcagctaaactctaagcttctgctgagaccctgtctcaacaaacaaacaaacaaacaaaaagtggatattagctgtaaagtacaggatatccatgctatgctccacagacccaaagaaggtaaacaagaaggaagccacaatcacgaatgcttgaatctcacttagaagggataataaagagtcagaagaggcaggtggagagagagagagctgagtgggagaaagatggggtagagcatgggggcacaggagcaggtgtggagagggacaggggagagagccagattaccatttaaatgaatggaaatctgtaactgatagagatggggaggtaaggacgggggcatctccaggatgccacagggaggtgcccaagaatcaatgggggtgaccttagctgtgactcacagcctaggggatatggaacatgaagagaccacctcctgtagccaagcaggaactccagtggagtggtagcaacaccaccaaagacagaggaaatacccaagtaatagcaggtccagctagagacccaactcatgggcaagaacaagtcccaggcgctacaaatggtactctgttatgctcgcagacaggagcctagcatgattgtcctctgagaggctccacccagcagctgacacagagggatgcagacacccacagcgaaacagtggatgaagcttggaagagttgggtgaaggcctgagggctgaaggggtaagaactccacaggaagaacaagagcatcaactttcctggacctttgggattacagagaatgaaccaccaactagggagtgtgcacaggctggaccagggcctccatacacctgcaacttgatcttcatgtggctcccgagcaagcggaggttatcctaaaagctgtttcctatccatgggatatgt

SEQ ID NO: 250 - DNA, 1000 bp, mus musculus
cttaaaatccatgttccattgtggtaacatttcatgaagtttttataattaaaaaaataagtcataaatcatggcactttccaaatacattgggaatatcaatagttgattacagcaagagaagaaatctcaaaaattgtcttttgatatcacttgatgacattttttgcctttttgttcctaggagatagtggcctgttcagttcagattttcaaaagctttcctctgatagtcatgaagatgtcagacaccgaggtgggcaagcaaggctagagggataaaggtaactcaagataaattggaatgtggctctggccgtacacattctgcccttccaaaatcattaaagttcttgtcagtgaatcagcctcgtgatttcaggtgaaattgtttgttttaggaactttgtctatagttacgcgcatttctccattatagtcgcaacaaattttaccttaaatatgttgctcactccattcttatcttctttcttatgagttacctttttttattaattgtgtacaagtgtgattgctgaacatctcaataaagcaatgtttagttttccaaaagcagcactctcagaaacctagcatggctttcctctgagaggctcaactagcagctgactgagacagatgcagatactcatacccaaccattggactgaggtcagggccacctatgaaaaagataagggaaggattaaggaactgaaggggatggcaaccccataggaagaccaacagtgtcaactgatcttgatccctggaagcagagtcttagccacaaactgaagatcatacagatcatacatggggtggtccaagggccctgtcacacacaaagcagaagtctgccttgtctggcctcagtaggagaggatgtgcctaattttgaagagacttgatgccactgggaaggaggatccctgggggtacaacctctaagaagcaataaggagggagcatgggataaagaactcaagaagggaggaaa

SEQ ID NO: 251 - DNA, 1000 bp, mus musculus
ctgtgggggtggagtctagccagaataccaggagcttgggacattgtctatgtgactgatagtcacaggactatggagttgaggacttataatgtcatatgcctgtgtctggaagcatagtttactgttccatcccttgaggaattttccactgggtctctggagtaagtttcactcaaccagaacacagactgtctttcatggtccaacaagtgcctatatgtgacaggagtgcgttttcatgtagtcctaatagaagttgtttaatgctctgacctttaatgtctgtcctgtcacctggcactgtgactcaaactagcttgaatagttttgatttagatttaggtcatttaggaaactcaagctatgcttggactaggaactcattataggacaacagataggtgaagctgtaaagtgtgaaaccttcaatagtacttagtgaaactgtgataatattgctgtaaactagctcactgttggtcagcaagacaagtaatgaaagggcttattaaagatcttgaggacacagtttctgtggacatgcacaagcagatgctgctgggtgaatgtcatgggtccataggcaatgctgggtgaagatacaagacaatgaataaaatttaccctgtttttaaaaatgctctgccagaacctgacaaatacagaggtttgccaagcattggactaaacatggggtcgcaaatggaggagttagagatatgattaaatgagctgatggggttttcagcctcgtaggaggaacaacaatatgaaccaaccagaactcccagggactaaactagcaaccaaggagtacactagagccacccatggctccagtcgcacatgtagccgaagatagccttgtcagacatcaatgggagaagagacccttggtcctgtgaagcctcaatgcctcagtgtaggggaatgccagcaaggggaagcaggagtaggtgagtgggtggggaacacccacatagaaggggaaggtgga

SEQ ID NO: 252 - DNA, 1200 bp, mus musculus
taagatatttactgtaattataatgcattcctttgtagatcagtgaatatttcatttctcatctgcaacatctttgccctttgttcaagaagactagcatctaactgaattgttcattccaatttgaaaaccagttgttcatttttcagaaaataattttacatgaatatatgttatgggacatacttgtgatgatatttttatattcactaagattttagatatttcagatatatgataatatatgtatgtggggcaaggggaccatgccaacagacagaagacctggtaaggttgaagcaggttcaaacaccccaggaatttttgtaattgagaaaaataggtgtgacctccttcagcctaggcaggctgtttcagaccatatgccactgaggcagggccacctgccatgctgcttctccactcaactagtttcctttgatgttacactggctgccacctgccaagaggccgaacaaatggttctccaagactttctggagttaactacgaactgtgaatgaaggggaagaggaggggagggggagtgaaggggaagaggaggggagaggagtggagatggggaggaggaggggtagaggggagtgggagaggaaaaggggaaaaggaaatggggaaggggaggaggagggggaaggggtagtgggaagaggggaagggggaaaggcaagtggggagaagggggagtggggagaaggggaggaagaaaagggaaggggggaggggagtggaaaagggggaaggggaagggggaaggggaaaaggaggagaagagagagtggatggggagaggggaaggggaagaggaaggggaaaggggagtgagagagagaacttgaagccatcttcagttgcaaaccttcaagaaggccatacatcttaatccttctataacatttctctcacaaatagaccaagtattcaaatatatgggccaatgaatgtctttctcattcaaactatcatatgtctacttctctttctttcagttcttaaagtctctgcccatttattgaattccgtgaaggccatatataataaagtttaatgaaatagaaagggatttggcacatatcatctagatttgaagttcttatccggtaaagccttcgacagtaaaatgtacctcaaaattgacaaattcctatgaacatttgagttgagaggggtcaaaataaa

SEQ ID NO: 253 - DNA, 1000 bp, mus musculus
atattagccaagtcaatcactaactcccaggtagaggttctggaaaactgtggccattcagtagtgatggagagaccgaggaagacagccaagctcattgtcgactttttagcttctgtgcataacacagacaacaagaagctgaactgaggctgttgctgcagcctgcattgtgcacacagcatctgctcccacccccaaaacctgtcacagtaaccactctcagggatcctgccccaaatgctgtctgggcaccaatagccctgaggaagtcagttgcctatcccagtacccttggttccacagagcatcaggggccacaagaaactctccaggatccttttttcaaaatagaaacctaaatggaacaaacaaacaaacaaacaaaaaaatatctagccatgaagcctaccagaagtcttcaagttcatgtcactgagaagccagtgctaagcagcccccctggaccatgagcaccacggacactttctttaaggcatttctcatacattaaacatcatctatttttgttgttgttgctgcttccgatgtatcctctgcatggtcagtggcttcttctacaggagctttagtcatttactgaaaactcttgtttagagctaattcaagttttgcatataggccatgtgtgaatgcagctgccaggtaaccgcaagactgggaagagacagagaactgtggaagaggtttctgcctcaaggcctgatacacaggaggctgaggcagaaggatccaaggtcaaggcctgccagacaggtacagagtgagttcaaggctggcctgagctactgactgaaatctgtagaaatctacatggggagtgggagtggggcatttcttcacctcagtcagccctaagaattgaccaagcagaagaacatacagactgatgagtttgggcacccacaggtcagatgcatctgaccaaccacagaagaacacctgactgggaaagttccctaggaatgacttacaactt

SEQ ID NO: 254 - DNA, 1000 bp, mus musculus
agaaaaatagtgttttaagaatgtaataaaaaaaagaatgtaataaattgtgaaatgttgtaaacagaacataattcagcagtcaagtttcttttttctttctttttctttttttgtttttttgttttttcgagacagggtttctctgtgtagccctggcagtcctggaactcactttgtagaccaggctagcctcgaactcagaaatatacctgcgtctgcctcccaagtgctgggattaaaggcatgagccaccacacccggctagcagtcaagtttcttatgtcatgacaagttttattgtacatctagtgatctcttgcttactagaaaattatgtaaagatgtatcaaattatgtttctagttgtatatgtaaattttcctgggatatgtttttgaagcatgttggaatgtctgctttatatacattatgtttctaagtattaataatgtatctcctagctgtcctgaatcatgtaaagatttttagttaagacaataccatcatacttgtttggtttcactgtagatttttatttcttgcatttgagttctccaaattggtttcattgatttcttatataatggagtatattttcaactcaataccttgtgttttttgccatacacacacacagacacacacacacacacacgtacataatgtacatactctgaggtatatgaaattctttcttagggggaaattatatatattctcttttaattaaatgtattttaaaacataattccatttgaatgttttgtattttaaaatgatagtctatgcattatgaataattttcaaatgaatttgtagagaaagcatctctatgacatttaacattcaagtatgtgagtgcttacaatacaatgcttaggcattcatttaaatgagtaggattttactttatctgtaaatgctttgttcaccttgaatatttgagcaacttatttgggcatcttattttttaattggcaaacaaattgatagaaat

SEQ ID NO: 255 - DNA, 1000 bp, mus musculus
gaaaagattcaacccagaatttaagttggtcaacaaatagcatgagctaacttaatgccaccttcccatccgctctctattggaggccagatgctgatacccacagtgtggagtgtaccctgccaggcaggtggctaaagaccttaaataacaagaaagaattatgttctctgacttttattccgctcatgcttggaaaataagccaagggtcatataccctctcttttcccaccatgtcaacctcaagactacctaatgattcgacttaccagagcaatcctgatcctccaacttaccttgagatagggataatatacagaacgagatcaggaaatagttaatgttgttgaaacgctgcaaagaagggaaaaccagaggccccaagccgaacggcccctccaaggaagcatcttgcattgtatctgataactgcgatgagtcttcagagacaggattttggagacttgcaatatgtaacatggcagctgaaagttttgtctgaaaatggacttctctaacgtcattcaacttctccaccggagcctccccagtgatgtccactggaggctccacagtattgtccaccggggcttgcacagtattgttcacccaggccttcacagtgctgttgagcgtttgttccggattctggtccatgtcttatctttttcagaagcaggtccctgcaggtgtgtttcaagatacctgtgtactccctggactcagatgactgatgctgtcgctgccactctaacctttgcagggaacgttacttctagtgaaggaagccaacgtcccttcagaagggttgagtgacgcggccgaagttccaaggctagattccatcttctctgcgtcacagagaagaaaagaagaggagagaggaggtgaatatattcaaacctgatgttgaacaatatgctcaaataactaataaaaatatttgtaaaaggaaaagggacaaataaacaaataagcaaaggacctcagaagcaacc

SEQ ID NO: 256 - DNA, 1000 bp, mus musculus
ccaaaactcacaggcagacactgttcagtaggattctggggcatctctgtataccccacatcgattcttccctctgtgtaggaagtcagagaactcctgtcaggcttcccaataacactgatggatcagggcctggtgtctcccctgcccagcagtccctctcccagtatgttacattgttccaactccagtccctagtatacctcccaagtcttgaattcacaaccctctaccctgtgggtttgcttttaagaacacagaatactcacactccctgatgcccctctgggtgagagcaacactggccccagagaatttagtgtttcctcacctaccaacgcaaacaaacatttttcagaacaggaatgacacggtacttgattttttaaaaagcaattaattaaccactacggagcatcgagaaagaattcctgaacacgagtgtagaactacctgctggagaatgtccaacttacccagcagacatcaactggcaagacctcctcagctggggagtggggaggtaggaactcctactttggccttgtctaggtcctgtggggcaaacacagccacggagttcatgagagcagaggcactaccatatctagtaagcactttcccggtagtattttctaacctttggcatttagacttcttcctccacttttccaagatggatattttccctgattttccattcgtttcccatgttaagttcccatgtaactatcacagataccatttccaaagacaaatgaaaaacctccaaaaccaagtgaagggcagaaacggttgtgtgctgagcagaccctctgggagtcagtgcccactgcccagcactgggcaccacactatgtgcttcacctgggcatctcattccatccctcctaacagcccagctctctagatttagctgctgaggtatgtattagtctaaggaacacagctaacaaggcacaaccaacttgcacggcctgaacttgacaaagcacacagt

SEQ ID NO: 257 - DNA, 1400 bp, mus musculus
tgactcctttattgacctcagctatgtggtctacatgttccagtatatttctactaatggcaaattcattggcatagtcaaggcttgagaatcggaagcttgtcatcattgggaagcccatcaccatcttccaggaccaagaccccaataacatcaaatgggatgatgctggggttgagtatggcctggagtctactggcatcttcaccactgtggagaagaagggtgtggccgaaagagtcatcatctctgccccttctgccgatgcccccatgtttgtgatgggtatgaaccaggagaagtctgacaactgctcaagatcctcagaaatgcatcctacaccaccagctacttagacaccctggccaaggtcatccatgagaactttagcatcatggaaggactcatgaccatggccatgtcatctctgccactcagaagactgtggatggtgcctctggaaagttgtggtgtgatggtcttggggctgcccagaacatccctgcatccactagtattctcaaggctgtgggcaaggtcatcccagagatgacctggaagctactggcatagccttctgtgtttcaaccagcaatgtatccattgtagatctgacatgctgcctggagatacctgccaagtatgatgacatcaagaaggcagtaaagcaggcatctgagggctcactaaagtgcatcttgggctacactgaggaccaggttgtttcctgtgatttcaacagtaactcccactcctccatttttgatgttaggtctgacattgctctcaatgacaattttgtaaagctcatttctggtatgacaatgaatatggctacagcaacagggtggtagacctcatggccaacattgcctagaaggagtaagaaaccctggaccacccacccaagcaaggacactgaaaggaagagagaagccttcagttgctgaggagtccctgtcctaactctgcctccaacactgagcatctccctcacagtttccatcccagacatccataataatcggaggggcctaggaagccctactgtccacattaataaagtctgctgcatcaaccccccctccaaaagaataaaacccaacttctcagtggtagctctgaaagctaggagggcctggatggatgttctacaaacttggagaatccacagatgccagagcagactactatgtcaagcaaaaactatcaacacaaccaacagtgaaagaaaaaattccataatcaaaccaaatttaaacaagttttatttaccaatccatctctatagaagacactagaagaaaaacatcagtctacataggttaaatgacataagaagacacaaggagcaaataacttcttgccaataaatggaaagtgggggatacacaccataa

SEQ ID NO: 258 - DNA, 1000 bp, mus musculus
tctttccatctttgtccttttaaacagatcatgagttctacctttttagcagtgttctgtatttctttaaatgagttattaatgccgttcttaaaatcctctaccagcatcataatatatgattttaaatctgaatcttgcttttcaggtgtgttggggtatccagggctcactgtggtgggtgtactgggttctggtgatgccgtgtggtcttggtttctgttagtaagattcttaagtttgccttcgacatctggaaatctcttgtgttagatgttttaactgtctctgagtggagcttgttcctcctgtgattctttttttaaaggtattttattcatttacatttccaatgctatcccaaaagtcccccataccctctcccccactcccctacccacccactcccactttttggccctggcgttcccctgtactgaaacatcagaagatggcctagttggccatcagtggaaagagaggcccattggtcttgcaaactttatatgcctcctgtgattctgttagcttctgtcagcactcctgggaatccaactctctccagattcccagtgctcagagctcactctgcgggcaagctctcctgttgcagagaaggtgcccagaggtctgggtctcagctctgcctcctggctgaggatgaaggcccaaagggaccctgttcaagaatctctgttacttctgtggcccacgtgctctcctgcttggactggtctctgagagacctgggatacaagattgcgctctcctctgagatctggagtcagatccctctctggaggcccactcttatcagtgatccttagatcctgggtgtgctagggctcctgaggcatggaaagtcttctggggactgtggaactgtctgctgagcttgggcccaaggtggctcggggatggcctggcctaaactttcttttatgcaggataacttatttccgaattttgtgcacatactgaaaacatagccttaggtctc

SEQ ID NO: 259 - DNA, 1000 bp, mus musculus
gatttctttactaggatttctatctctagagttttcttgctttgtgatttctttattgtttttacttccatttttaaatcctggataggattgttcaattctttcccctgttggatagtgttttccagtaactctttaagggattttttttgtttcctctttaagggcttctagctgtttacctgcatttttctgtatttctttaaggaatttatttatttcctattttaagtcttccattattatcatgagaagtgactttagatccatatcttgcttttctgttgtgatggtgtattcaggaattgctatggtgggagattttggttctgattttgccaagtaaacttggtttctgttgcttctgttcttaagcttgcctcctgccatctgattaccacaagtgcttactgcccttaatatagctgattagagcctgtcctacctataatcctggttgatttaagactcctcagagtcctgctttctctgtgatcctgtgattctgggctcctgtgcacctgagattctgggtgtgtcagagttcttggtagtcaagtttcctttgagaccctgagaccttgatgtgaccaagctcctgggatcctagtgtcctaagatcctgggcgtgtagtattttctctggagatcgtggggctgtctggtgtatttgaaaccaaggaataccagccctgatcagaaggaacccgagctgctggtcaggcagggttcccatgttcttgctcctgctgtcacaggcctgtcacaattgttttggaacagagatgttgtgttccactcaccaatgattctaagatcctggatgtgctaggtcacctgcagtatggagaaccctctgtgtaccataggactgtcagccgatttattgcccaaggtgacctggagctggtgccgacaggaagggcttccagtgtttagtaaagtggctatattaagaaaaataatttaatgcagtatatgtatccattgcatacacacc

SEQ ID NO: 260 - DNA, 1800 bp, mus musculus
taattctttatctctatttttggaacattatctgcagccagtgattcagccacctcaaacaagtgtctaagaaaataaatgctaaaaacagattcctaaggtgtagcaagggaaatgacaacacttcatatctatagccccatggccatagattgtaatttggccaccagtcacacattgcaccaaagtttaattaaatcaagctttgacatggttgaaataaaaacctaagaaaacatctgccaaacagaaatcatggtacgctcttatacaagaagaatgtttatagcaagtgtgacatctgagcagtcataaaaccagttttataatcttttatgaaattataaattgatgttattgttgtgaccaggagatatttcttgaattcttttgcactcaggtagagattcttccaactgtagagaagaaaagtagaagtttactcatatccaaataacctgacaattcacagaaattcatttttcttctttgaatttgttttcatttttgtggagaccatgttgacaaaagtgatttgactcttaatgagcactctttagaatctccagtgagtagaaagtattctggctagtaacctcaaatattcggaagtttttacaaagtttgttttcaatgtcaacttgccacaaatgaatcagttgtgtagggagccttacttagagacgtgctttgattgtcttttatgtgagaaggacctcaaaattgtgggcagtattaccttgttcagataaaaatagaatttctctgttcctatgttctgtggtctctaacttatcctgttgttgttgctgctgctgctgcttgcttttctgacagcatttccagctccctaccccctcacctctaccccttgcagttgcaggtggggatcagtaattctatagataagttcctgatttccagacccaaacctccgagggatccaggctagtgtatataggggttgtcagctctatacctctgccttggtgagggacagccattactgcattgtttctattgttcaggcacccagcatcagtcactaagtaattaccaagttctcacattcatctgctgtgatttagctgttgttttttactataaatctgactcaataagttcttgtttaactctgacacactttgccaataaactagatgtggaaagaggatatactggcattcaaattgccattgtgtgatatacaaatccagaaaaagcttctctctctctctctctctctctctctctatatatatatatatatatatatatatatatatatatatatatatatatatatatatgaatgtgtgtatgtatatatagttggttggttgtgtacatgtgtatgtggaagttcacactcaatatttttctcaattacttcttatcttattttttgaaacagaatctctttctgaacctaaattttccaatttggctaattaatcaggccaaagagccttatggatactcttgtctatgatactgcttcaacagatttgagcttagaaacattcaccatcatgggtagtttttttttttatatgtatatgggtgctgggaatgagatatagactaagtcatatcctcagccactgaccttcctatgttattaaagttatatcagtagttatttaaaatcaagagcaaataagagaatgggattgttaatgttatgttagactatatatccaatgaagaacaaggtagagatcagcccatgaacatgaacaaacaatggagactccagatctgctaagtcattagtatcttatcacatgactgggaagc

SEQ ID NO: 261 - DNA, 1000 bp, mus musculus
catgtcttatgataaaatgcccaacaaaggagatttgaggaaaaagaatttgttttggctgactattcaaggagtttcagtttatcaaggtggggaaaggtgataataagaacacggagtattaagtaacagctgtattaagattgaatttatatgctggtagctcagagtgcacagaaagtctcggtgggctataaagcctaaatgcccagctcctgtgacctacttttagcaagcttctactcagcaaacaagaacaagagctggtgaccaagtcctcagtctgccagggaaatttcacattcaagcacaacaaattgtttaggcatggaaagacgttgagggcacatcccagtctagctattttgagtttggaggatggggtcatgaacaaagtaacaaggtgcaagctagaagagtcaaggcaatattcttccagatatttgaggctcagattttggcacatacccagaaatgtctctatctaatgattctccattatgtcttctaagatcatattgatttggattctgaggcattgggaaaaaaatgcaccaataaattgctggatgattgctcacacaatataacatataatttgtaacccgaaaaataatctttaaaaggataatccattcttcccaataagttagcagtatttttttcttcttttcaaaattattttgtatttcatacatttataaacagaattttggtcattctcacaccccaaaaaccattctcatttccttgtctatcacattaaagtctccttccaaacaaggaccctccaaagctccttcaatcgggcctttctatgacccactgagtttaatgaaggctgtataattttgagttgggagatatttgctagaacaaggacaacttgtcagtggctactgaaagaaataacctctcctctgcacccttctctgcccatagtgtcttactgtggggttggcaggtaggagccatgataaaattacaataggtctagcct

SEQ ID NO: 262 - DNA, 1000 bp, mus musculus
agacacctgtagttcatgttataggattaattttgtaccttcattattttcaatacatagatcatgcactgtgattactctcttccccaagctcttttatttcctttcaattcctgccaagcctcatctcttccctaccttcctcttgtcaagattcatgatttgtgtgtgtgtgtgtgtgtgtgtgtgtgtgtgtgtgtgtgtgtgtggtgttttaaaaccagtaagtgtaatcaagggtatctgtgtgatcattgacttggaaatatcctttagagcaaggcaggattaagactggcaaacacgtcatggacacaccagccatcagttctatagagttgaaatagcaaacacaaatcagcagtggtggcactacttagcagagactgccaggcttcaccctcagcaggagggaccagaaggaaagtaaagagaagttctcagctgtgcctctcagtgaagtgaagatcagtgaagacatgaagccaacaagcatttagctattcaagcaagcctagctaatccaccatcactgtctgtcaggccctatttatattccctccaaacatcatgtatcctctatgggtcctgcctcagtacatgcatttttctcagctgacatcactctgctgatcagcttgggtccagggaagcaacaagaaactttgacacaccacctaaagtatttttgatgtgtttctctctttggaatcccaacaaatgaagctgaactacataaagtatgccagaccactgtggttagaaaagaatccttcatcatatgtcctttcatatgcttgccttatccaatattaacttgtgaactgaactgccaatttccagacaacacagttggagttgctccaaagaaacatctaaacagatacacttctcccctgacctttcttttccactgcctctgatgggtggtgggctaaaaggaaggttaaagaatttaagaaccatgattaaaaataggcttacaaaaataaatttatat

SEQ ID NO: 263 - DNA, 1000 bp, mus musculus
tttttaagatcttctacctatttatgtgtattctcctgtatttctttaacggaatcatttatgtccttcttaaaatcctctaccagcatcataagatgtgatttttaaatccaaatctttcttttccggtgtgttggtagatccaggacgtgctgtgatgggagaactgggttctgatgatgccaagtatccttggttactgttggtaagaatcttgtgtttgctttcaccagctggttatctctggtgctagatggccttgctgtctcttgctggagcttgtccctcctatgggtttgtaagcccatatcagcagtcctaggagaccagttttctcctggtagaacttgtgtacacagggctgtggaactgcccaagctccaggtgcagatggtgacaggaaggatcctgtcctagctgctctactgttcttgtgccccgtgtgctccttgctagtcctaccctggacagttattgtagagaaaatagctatctcacctttgaacctgggagtgaaagcattcctgggagaccagctctctcctggagggacctgtgcatagcgtgcttttgaacaaccccatctcttgggtgcagattgtgactggaagatcctgtcccagcagggtcactgttcctgcactctgagtgctcctggctggttttgatcccctgaattttttttcttactttcttcattgccagtgatataaaaaatatctactttatactttggaactgaaagttccaattctttgtaggagacaacaaaataatattgtgcaattttttcattctaaatgtgtcacttttgttattattatttattttctttttattaattcgggattgctttttacacttatgagtatagatgccaacctgggccagaagaagatatcagatcaagggaactggaatttcctccagtatgggcttcctgaagttgtgctgtgaactgaactcatgtgctctggaagagtagccagtgctcataact

SEQ ID NO: 264 - DNA, 1200 bp, mus musculus
cctgtttacctgtgttctcctctgttttttaagggagttatttatgtcattcttaaagtcctctatcaccatcatgagaagggattttagatccgaatcttgcttttccattgtgatgagctatccaggacttgctgttctgggagaactgggttctgataatggcaagtaaccttggtttctgttgcttatgttcttatgcttgcctcctacaatctgataattatctctagtgctatctgctctcacaacatctgactggatccttcccttcctgttgagtcagaactcctcagagttcacctgtttctatgatcatgtgattctggatcctgtgatccagagagctcctgggagttaaactgcctctgggatcctgagatcctcatgtgaccaagcccctgggatactgggatcctgtggtcctgggcacgttagagttcctgatgtgaatcttcctctgggtgttgtgggactggctatggttttaacatacaaggtctgctcagagcactggcccagacaggaaggaacctgtgctgctgatcaggcagatttcctgggtgtctgggttctgctggtcccagttacttcctgtgttggggcagatattgtgtccttctcacctctgatcctatgatcctgggcctgttagagctcctgggaatgtattttcctctaggtgttgtgggacaggctctgatccttatgtcctgggcgtgttagagtgcctgggagaagagttacttctgtgtgttgtgggattggctgcagaattagcgcccaaggtctgctcagggcacctttgatcctatgatcctgggcatgttagagctgctagattcggtttcttaagaaagagtattcttccaaatatagaattggtctaaaatattgaaaaaaaatggaagtccaatagcatggaccagaaacatatggcagtatctggctcattctgtcctccctagctttttttctgttcatatactgggggattatcatgtaaacaatcattctcttccagttatttctgatgatggtggggttccaatctttctctgtaacttttttaaatatgtcaatattttaaaaatattttatttttactttgatgtattgcatatgcatctgtgtatgggaaactctatccactggaagaaagttagagtttatgaggagcctggtgtgggtactggaatc

SEQ ID NO: 265 - DNA, 1000 bp, mus musculus
gatttcacttttactttgtgcctgcttcctggcaactttatattcgcctctgttttatccgtggtccttccctattcaattttactttgtgccttcttcctggcaactttatattcacctctattttatccaaggtccttcccaaaactcctggtgtcgtaagtttcagttaccatgaacttaccctgctggtaaacactgactgctgaaagttctgaactcattagtgggggagtaggttcttcatacgggcgaccacttgtcgaatccattctccaccagcaagaatgacacgatcaccagttcttctaacagcagtttatccagcaagcttcagtcttcatctctctccctcttcatctctctccccctcgaactcccggtctctcactcttatatactctcagaccccatccactcacggcaggtcacatcacctcaccaggcatggcttcagccaatcagggcagcaggagcatgtctccagtaaatatgaacttgtttacactgccagcatcatggtgcacctgcacagttctcatgatggttgtggcttattttcaggtgtatgaggaagtcaggtgcaagtcataagacttagcagcagtcccgggcaccatcttggaactgctgccacaccctctcctcacagtatcagagcaaaaggcatcacaatgggaacatctaagatttcttatctcaaaacatctgcctgcagatgtctggaagctcacttagagtggtggaaatctactgaagcttcatagcacacccatgtcactcaccttatccaataaggccataccttataatccaccccaaggtattttgccaactgagaccaagtatcaaaatatatgcaactaaaggtcctaaactaccactacaaccttttcttcaaatgtggtcaaggttttagaaaagttgcagaatacattttatcatgtgtttgtacttagacttgcaataattaagcatacttttgcatacaaggcatgat

SEQ ID NO: 266 - DNA, 1000 bp, mus musculus
aagatactatctccttgagagagcattgcagtcatccagcacagtgaccatggttgcatataaacagaggatgggagatcagtgaggttacagaagtggcttttatttggaaaattatggtcttgtattaactttagctattaaatattctgttattcagcaacaaacttgaaggggagggacatttaaaagcataagcatgagtctgtacttgggagctaatgaattgcttttgaaatacctcactgactggtttctaactgtggccgaaatctctgggctttcttctagcagaggccatcttctaggtgaaataaatgaagataagttgacttctattctttgtcccttccttatctagagaaaatgggtaaaggagacatgtgagtcctctgcttacattgaaattcatgtataactgagtctgaattcaaaaaatatgtttctgagtcaaacatttgtttttcttaaaacataaccaaacaacaacaaaaaaaaaaaaaacaaaaaacaaacaaacaaacaaaaaaaaaacaaaaacaaaaacaaaaaaacctttggtctctttgtatgtaaactcaccactccagtattttatctgtttttaaagtttcttgtcacagcagagagttctaaatttgagatgaagattagttctttgagagtcctgctaggctgctgcctgcccagcaaactgtgcacactcaatcgatagcagttgctaaagagacatccccaggcagcagactctgggttcagctttgcacttctttctttttcagatccctgtggtattaatggagcctttacatgtgatgtcaaattagcagaaatgtcataattgttttaatagtgacaagaataatgacacagaagaacatgatgtagtttgataaagatggagatgaagaaggtggtgatgaatgtgaaaatgatagtgatgtaggcagcgcagtgtttatccaggtcccttattcaattcctgaccatgtagcttcag

SEQ ID NO: 267 - DNA, 1000 bp, mus musculus
gccattgagataagaaaggcacaaaaggacaatctctggacaagctcagatgagtaatgggccacctactaatatggtttcagcttagccagatgtcctgtcaaccaagataaacaccctccctttagagttactgacacatagtgctccctgatgtttaaactgcccacttgtgtgtaactgtgccaatttcccctatccccccactcctttcctatataaacccctaacttttgggcctcgtggtcgacacccctgtctcctgtgtgagatacttgtcagtccggagctctgtcattaaactacctcatgtgtttgcatcaagactgtcttttgtgattccttgggtgtgcgtgctatctcaggacttgtgagtgggtgtctgccctttaggttctttcagtttcattctgttcatttgttcatggaggaaaattattctaacagggctaaggtataaggtagagtgagcaagcagttaaggtttattttttagcagaggcaagagagagaagtggacagtgcagtgtatgaaatgcagagtggagccagcagagcagcattgccatcttaacttctgttccatctcggcaggcctgacaccctcacagtttgaaccataacatttgttttaattgccacatcagccatcacagataatggaaggggggaaactgaggaagagaggaactaaaaagggaggaatggagggagcaggccaggaaaagtaatggggaaggaatataagaagctttcagaggatgtggggaagacgggagatgggcaacagaacctccaaaaatgatatttggacattggcagttaagacaacctaaggagactagtaggtagataaggaagcaaaagcaaacttctggactcatgcagcagctacatggtttggcgctgatagactgtactcctttcctgaacaagagggaccacttgcatggccgcactaggctccctctctcacgttgtcgtctgggactttaagacc

SEQ ID NO: 268 - DNA, 1000 bp, mus musculus
actgaaaaaggtcaacaagataaagtgcccatgtgagaatggcccagtcccacctgggagggagaagaaagcaattacaagtgaggagggatagagggacctgggagggaaagtggctggaggggggtaggacatgatgtgatattgggtggggggaaatgaaagcttgccctgggggcaagcagaaagaatagaaacaggcaatctcttgatgtaggaggttggggggaccctccagaattcaccagaaacctgggaggcaagagactctcaggacacaatgggaaggaccttagatgaaatgcctgacagtagggaggggaaacttatagagcccacttccatcaggaagacagaacatcaaatgatggagggggttgacatccctcagtcacaactctggcccataattattcccctctgaaagaattacagggatggacatggagaggaccctgaggaaaagaaggtacagggacaggcctgaagagggatccagctcaagggaaagtccagaaacctgacactatcactgaagctatagagtgctcacaaaaagggacctagcatgaccacactccggaagacctatccaacacctaaaagagtcagaggcagatagttgtgtacaaccaatggacagaagctgctgacccctgttattgaattagggaaaaatggaaagaagctgtggaggaggatgaccctctaggaggaccagcagtctcaattaatctagacctccaagatctctcaaacactggaccaaacaggcagcatacaccagctgattggagattgccaacacacattccagcagaggactgcagtgtctgtattcattcagacatgatgcaactaaccctccaaacactagaaaccctgcggagtttagaggtcaggtggagtaggggtggggtggggacctccacgtggagacagggctgtggggaggaggaatgggatgtggagcagtaagagggtggcaggttggggaata

SEQ ID NO: 269 - DNA, 1000 bp, mus musculus
ctcagggtttttatagtgtgggatcatttggaaatgctttcagataaatgattggatacatatcgacaatggacatagcatttttggttatgattacaaaaagctgattgtatgtgagagaatttattttattttatttttatcatttgtgtgtgtttgtgtgtgtgtgtgtgtctgtgtgtgtatgctgaaatatacccccttttttcagtgctagaaattgaacctagggccccacatatgtgttcctagtaatctaccactgggctatagctcctgtcattctctacttctatttttttttgaggcactgtcactcacaagctgtacctgggtaagtaggttacactggctggctagccagtccccccacccccacaaaaaaacagtataaacccgagtacgcttttctacaactagcatttttcttaaagtttatttatctattttatgtttgtgcatttgagtgcatgcacacataacatatgtgttgggaacaaaaaagtgggggcccctgaggaggtcctaggggagaacggggagggggtgaagaaatagcccatgtccggccagagttcctgtgctctgggcaggcagacatggggcgagcggctggacagtttctacttggcccgggtgggcatctaagcctctgaccccactcagcagagagtggacaaggagcagcccctgaccgggaaccctgaggtgacaccctgttgtcccggggttatatgagagagggagaaggaagaggttcccaacactgaccagagtgcacagccgatgttgatggagcagagactctctatggtttaaaagcattattatagaaattctgggggaaagagaagagagagagagagagagagagagagagagagagagagagagagagagagagagagagaggagaaagactagagagaaagagaataagagagaggagaggagaatacaaagagaaaaaaagaggagagagaactgagagaagtgagag

SEQ ID NO: 270 - DNA, 1000 bp, mus musculus
tcccaatatacatcttattgttatattttctagtttattttatccaattttttaaatctacttacattctaatcacaacagcacctccttcctgtcctcacagtcctacacttacaaatttcttgacctattgtcccttccccttcttcttacacaagacaaagattccatggttaacacctcacccttcgacaactagtaccagaaagactgggcacatcctctcacattaaaggccaattaggggaaaaagtatccaatgtcaggaaacatggaccaagacagtcacagctccccttgttagggccccacatgaaatactaagctgcacatttgctgcataagtataggggacctaggtccagtccctgaatgctccctcattgttggcacagtttctgtaagtacccagaagcccagattacttgattctgtaggccttcttgtgatgtccttaatgcttccctcttttacaattctatctccaactcatccataagaacccctgaactctgcttgttgtttgcctgtgggtgtctgtatgtattttaatcaggtgttagatgaaacatattacgagacatcagtggttctactctacaacatagagtataattaaaggacaattatgctgggctgtagagcattacaacctcagcaaagtgtcttcatggcttattcaaatcctgttctaagcagactcagcttaatgcctttcttatgacctccaggtaccaagcacattctgggctttacctgtttgatcatgctattacttatattaattcaagctatcctaatgacttcttgcctcttttagaaaacaaagacagcctcttgcttttcttttatactccatattctgttttcttcattttccctttgtgaacacttattaaattggtgattatctcttcactaacatagcaacattaaaaatgatagttggcaaagtataccattgatttttttctatttattttacttatatttggttaga

SEQ ID NO: 271 - DNA, 1000 bp, mus musculus
gtctagtttgaagtcacttacctctctgctatgcatgccttaacaggaaagagtgtttctgtaattgtgggatggtgggctctgcacagacagctggtccttagttgggcaaaggtatggaaccccagtgtacaactgtgccacctgggcccctgcctcctactgcaggtacagcctccctcagcaccccacagagaggtgtgtggccatctgtcatgtagaagcagcagcatcaagccctcccatgagcaaataagttttccccaaaactctcagaccaaactaatgagaagtgcctcttgtcagacccttaccccctcccaaaactgtatataaccatcttatctggaaggattaacgatgtgtgagaactactcaatcatccgagccttctgtcctaagagctggagcacttgggaagaggtctgctcttccaaaatgctgcctgaagcaacaccgcacttctcactgactggtgggccttgtcaacccagcccaaatgagtatcatggaaggcatggcagagatggaggtgaagccaactacagcagcagaagcggtggaatcgatctatcctccctgcctgtacaatcttcccttcactagaactctagcaccaggccaagccagagatctcagtggaaagcctatggcaagtaggcctacctgtaatgattatacctgcctgttcctggtttgatagggagcctgggtacactaacatagagcaatgtgtgtgaaaagaggtgactgattcattttctgttagagatcaaactgaaaagaatgaacagaagttacagtcacaatgtggaatgcagaaactagaatgttccctctagtgcagcatgcaaagcagttgtcaaactctccattcacaggacatcatcttccctttgggaagagaaaacacaggctctaggaaaattcagagtctctctctctctctctctctctctctctctctctctctctctctgtgtgtgtgtgtgtgtgtgtg

SEQ ID NO: 272 - DNA, 1000 bp, mus musculus
agacaggtagatcaatggaatataattggagacccataattgaacccacacacctatggttacttgatctttgacaagggagctaaaaccatccagtggaaaaaagacagcatttttaacaaatggtgctggcacagctggcagttatcctgttgaggaatgagaattgatgcattcttacctctttgtacaaagctcaagtctaagtggatcaaaaacctccacataagacaagagacactgaaattaatagaggagaaagtagggagtacccttgaagatatggacacaggggaagatttcctaaacagaacagcaatggcttgcactgtaagatcaagaattaacaaatgggacctcataaaattgcaaagtttctgtaaggcaaaagatactgtcaataagacaaaaacgccaccaaaagattgggaaaggatttttaccaatcctaaatctgataggggactaatagccaatatatacaaagagcacaagatgctgaactccagaaattcaaataaccccattaaaatggggtacagagctaatcaaaaaattctcaactgaggaatacctaagggctaagaattacttgagaaagtgttcaacatccttaatcatcagggaaatgaaaatcaaaagtgttgggagccgcgcccacattcgccgttacaagatggcgctgacagctgtgttctaagtggtaaacaaataatctgcgcatgtgccgagggtggttcttcactccatgtgctctgccttccccgtgacgtcaactcggccgatgggctgcagccaatcagggagtgacacgtcctaggcgaaggagaattctctttaatagggacggggtttcgtttttctctctctcttgcttcttgctctctcttgcttcttgctctctggcttcttgcactctggctcctgaagatgtaagcaataaagctttgccgcagaagattctggtctgtggtgttcttcctggccggtcgtgagaacg

SEQ ID NO: 273 - DNA, 1000 bp, mus musculus
tgaatttcatccagaattctctgccctgccttaaccacttgttgacattcctcgtcctttaagcacgatcttattagcttccacaatggcatggttcctgctttaagtttgccattctcctgctccccaactaaatctcccttgagtttctcccaagaggggatagttaaggaccctgagaacgcaaaccatggtgctatgcgatctacctcttttacaaagccttctagtgtcttggtggtgactttcaagccacgctgcttcatgaccgaccgtaaggcggtcaccacagagtgggagattcacatactggttgctgtccaggcctgaccacaactgagaaccagtcagcagttccagcggtggaagcaaaacaaaaccgaaagggaaggaacaatcaccatgaaaacaatcaaaagggcgtctaactctggagaaatttcaaaactgtacgtatccttgcaaagctgtaaagtgtcccatagttctgaacacgccccgtgaaatgagggggggaggagggtgttctcctatcagcgcctggtgatgataaattcccgggtttctcagcgccacttttcccccgagctagtatctcgccggcaagaattcactcggacaaccagatccttctacagcaaagcttttattgtttcaacataaggaagaccccgaacccagaaaatggcgctgcttatatagcccgcagtgtgacgtttcagcacctgatgtggtgtgacagcacctgattagttgctcgcccatcaccccattactatgccccgaggacagtgacagggcgtgaattcacacttgtacttgcgcataaggcgtgtttactagttaggcgcagtggaatccagcgccatcttataatggcgattgctcacagcatggctctccacacaaaggtacacccagctattatttagagccagatagattatttatatgaaccatgaatcttgtgaattatgaaattatttataggtccatttta

SEQ ID NO: 274 - DNA, 1400 bp, mus musculus
tgtttgtggaatcttctacacctgagattctctcttccatctcttgtattctgttgttgatgcttgcatctatggtttctgatttctttcctagggtttctatctccagtgttccctcactttgagttttgtttattgtgtgtacttccctttttaagtcttggatagttttattcaattccatcacctgtttggtcgtgttttcctgtaattctttaagggagttttgtggttcctctttaaggtcttctacctatttagcagtgctctcctgtatttctttaaatgagttattaaagtccttattgatgtcctctaccatcaacatgagataagtttttaaatccaggtctagatttttgggtgtgttggggtgcccaggactgggtggagagggagtgctgcgttctgatgatggtgaatagtcttggtttctgttagtaagcttcttaggtttgccttttgccatctggtaatctctggagttagttgttgtaattgtctctggttagagcttgttcctcaggtgaatatgttagcctctatcagcagaccttggagactatctctctcctgagtttcagtggtcagagtactctctgcaggctagctctcctcttgcagggaaggtgcccagatatttggtgtttgaaccttcctcctggcagaagatgtgttccactcaccagaggtcctaagatctggttgagagtcctgtggggaccttgggggtgtccgcatactctgcttctaaggtgtcctggtgctggtgcagagtggaagctttttttttttttttttttttttgcatttttaagtggcatttacagacaatgttaaaataacaacacgagctagaatgtcaacagccaagaagaggatcatttaaataaatggatttgtaaaacatgattgtcttaagcttgttcatgtcacaagtgtgatttgaattaaacatagagtgattgtttttactgaatcagtaagtgagacattacgtttgcagagcatgtcctactccacagacaaaactgtttaaccactttctgaaggttatattgcagccacaccctattaaagttgtttaacttttcttataaagttgctctttttacaatattaagattttttataatattattacttctagtcatttgccttggtaataaaatatgaacatgtttgaagacacttttcctaatgaacaaggtagcttcctttatagttcctactggaaagccagaaaaagtactgtaaaagaataaagggtctgcctcaagatggaactcctgagtagaaactggcttgagataagaaataattctttgtataagcaatttagtggtccatggtagttttggatttcatacacttggtttaattggtgagtggtagattcc

SEQ ID NO: 275 - DNA, 1000 bp, mus musculus
ggagggagaaaaaaatcaatcacatgggggaaggaagggatttgggagggaactgggataagggggagcagggagggtaacatcatcaggtattcagtgggggaaagaactgaaatccctgagggccagcagaaagaatggaaacatgcactctcagcaggtaggaggtagggggcccctacataatataccagagacctggaaggtaagagactctctggactcagagagagggacctcagatgaaatgcagtacactggggagagggaacttgtagaggccacctccagaggaagtcagggcatcaaatgagggaggaggttgccttgcacagtcaaaactctggcccataattgttcctgtctgaaagaactacagggatgaaaaggaagaggagcctggagaaagaaaggtccagccacaggctcaaagtgggatccagctcaaggggaggtcccaaagcctaacactattaatgaggcaatggagtgctcacaaaaagggacctaacatgactgccctctgaaagacccaacaagcagcttaaagaatcagaagcagatatttgcactcaaccaatggacagaagtgccgagctctgtagggaaaagctgggagaagttgaggaggaaggtaaccctgtagatggaccagcagtctcaattaacctggacccttgagatctctcagatactagaacaccaacttggcagcttaaaccggctgatatgaggcccccaacacatacaaagcaaaggactgccaggtctgggtttaatcagagaagatgcaactaacactcaagagactggaagccccagggaggttagaggtctggtagggtgagagtaggggtggggatatcctcatagagaaacagggggcaggaaggaggtatgggatgtggaacagctgggatggactggaagggtaataaaatctaaagaagagagaaagaaagaaagaagaaagaaagaaagaaagaaagaaagaaagaaa

SEQ ID NO: 276 - DNA, 1400 bp, mus musculus
cttccctgttacttcctgaatgtcagggtggaaacacatgtaagagagattggaaccagcttgtctgctcctctgaaatcattgcagtctgaaggcctcttaggaattcccatgcactcatgacaactagtaaaggaacacccccatcctcacaaagaactacagcagctgggaatcctgcaaagcctcagaaacttgaaacccatcaccccccaaaacccctgccccctgaattacactccccttctggcctgtgccttttgccagggctgatcagcagcttgtctgctcctctgaagacaccacagtatgaaggcctcccaggagttctactacatgcaaggcaactagtaaggggccctcttaaacagccacagctgctgggagccctttggagcacagtggacttggaacctatcacccttgctccccaataccttcccctccatacctggaattttactcctctttggcctgtgccttttgccaggtcagatcaccaacttgcatgctcctccaaaggcaccacagtctgaaggcctcccaggaggttctctgcacacagggctactgacccaacattctgaaagcctccctggagaatagctaccctcagaggaacagcttgactggtcctctgaaggctaaagagtcaaagggcctcctaggagatctgctgcagtaagggcaacagatcagcagattgttcagctctctgaagaccccacagttttaaggcctcccagaagagttgctgcagccagagtaacagttcacgagtgtacatgcccctctgaagaccccacagttggaaggccccacaggaggtctgctgcagccagggccacaggcccaccaggacacatgtaccaaaccagggacacaaaccagacaggatccagaaagagatacccagaccagctaacaccaggcacaaccagatggtgagagataagcacaagaccataagcaacagaagccaacatactttggcaccatcaaaactgagttctcccatctcagcaagccctggatacaacaacacacctgaaaatcaggaagctgacctattatctcatgaggataatagagttctttaaggagaatataaatgacacacagaaaggcataaaggaaaacacagataaacaggtagacacccttaaagaggaaataaatcctttaaagaaatacaagaaaacacaatcaaacacggaaaggaatttaacaaattggttcaagacctaaaagtggaagtggaaagaataaagaaaatacaaatggaggcaatccttgacatgaaatacctaagaaagagctcaggaattatagatgtaagcatcaaccaatagaatacaaaagacagaagagagcatctcaggtgtagaagatattgacac

SEQ ID NO: 277 - DNA, 1600 bp, mus musculus
ttgagttttctttattgtgtctactgccctttttagttctagtatggtttttttcatttccatcactggtttggatgtgtcctgtttttctttaaggacttctaactgtttggttgtgttttcctgtttttctttaaggacctgtaactctttagcaatgctctcctgtatttctttaagtgagttatgaaagttcttcttgatgtcctctaccatcatcatgagaaatgtttttaaatatgggtctagatttttggttgtgttggggtgcccaggactaggtggggtgggagtgctgcattctgatgatggtgagtggtcttgatttctgttagtaggattcttatgtttgactttcgctatctggtaatctctgaagctagctgttatagttgtctctggttagagcttgttcctcaggtgactctgttagcctctataaggagacctgggaggctagctctctccttagtttcagtggttagagtattctctgcaggcaagctctcttcttgcagggaaggtgcccagatatctggtgttcgaacctgcctcctggcagaagttgtgttccactcaccagaggtcttaggatcacgtggggaatcctatgtgcgcccttgtgggtgttgggagactccgctggcaaggcaccccggtgctcgagtggaccagaagggagttgtgccctaagtcaggccctggtcgtccgcttccctagttaatgcagtctcaggttctgcgagattggattggggcagacactgtgttccactcaacagaggtcttaggatcccatggggaatcctgtttgggcccttgcgggtgtcgggagactctgctggcaaggcaccctggtgctggagtctgtattctgtacttttaactgtgcaggatacacttggcggggtcccagaacaaagatgtctgctgccgatgctcaggcaaagctctcctgggctgggcagatccctatcctctggccgggaaagtggccagctgcctgtgcaggatacactcggcggggtcccagcgagatatgattttagatctaaatcttgcttcagaaggtagaatggtttatgcaggacttggaatggtgggataattgagttctgatgttgccaagtaatcttggtttctgttgcttatgttcttaagcttgctttctgccatctggttatatttaggactacctgcccttgctatatctgactgtagcctgttcttccttttatcctgattgtgtcagaaatcctcagagttcagctgtctgatctctttcatgcaaattccagtgtatatctcatcactttaggggttgttctttttttttttttcttttttttttttccattttttattaggtatttcgctcatttacatttgcaatgctataccaaaagtcccccatagccacccaccccctctcccctacccacccactccccttttatggccctggcgttcccctgtactggggcatataaagtttgcgtgtccaatgggcctctctttccagtgatggccgactaggccatcttttgatgcatatgcagctagagtcaagagctctggggtactggttagttcataatgt

SEQ ID NO: 278 - DNA, 1000 bp, mus musculus
gcatcgaactccctcaggtcctacggctgctcctcacataaggccatcatctgccacatatgtggccagagtcatgggcccctcaatgtgtactcttttgttggtggtccagtcgctgggagctccaggggtctgtctagttgatattgttgctccccccatggggctgcaaaccctatcagctccttcagtctcttctccaactcctccattagggaccccatgctcagtccaatggttggctgcaagcatccacctctgtatttgtcctgctctggcagaacctatcaggacacagccatatcgctttcctgtcagcaagcattttctggcacccacaatagtgtctaggattggcaactgaatgtggaatgaatccccaggtggggaagttactggatggtttttcttttagtctctgttcgacaatttgtctctgtgtttcttcctgtgaacattttgttcccccttcaacgaagtaatgaaggatccatgctttggtcttccttcttcttgagctttgtatggtctggaatagtatcttggatatcctgaacttttgggctaatatatatttatcagtgagtgcataccatttgtgttcttttgtgtctaggttacctaactcaagatgatattttcaagttccatccatttgcctgcgaatttcatgaagtcattctttttaatagctgagtagtattccattgtgtaaatgtgccatattttctgtattcattcttctgttgagggacatctgggttgtttccagtttccagttattttaaatatggctggtatgaacatagaggagcatgtgttcttattacatgtatatgcccaggagtggtatagctgggtcctcaggtagtactatgtccaaatttctgaggaaacaccagacactgttttccagagtgtttgtaccagcttgcaatcgaaccaacaatggagggttcctctttctccacatctttgccagcatctgctgtcacctgtg

SEQ ID NO: 279 - DNA, 1000 bp, mus musculus
aaagttgtcagtctcaaattttagttataataatgaagaatggactaatataagggatagtaaaatagcctttcttgagcaccaagggatggtcttaaagtactgcatggctgttaaatacaagatcctcaaaagattcaatgtgacacatataatccttgtcttatctttgagggaactgaaatcttgaagcataaggaaatttatccataggcacacaataaataaagtgttgtttatagctttagctgccctgactatgctctgggaacaggccgagctaccagcccccaccgagctccccttgaatccatggataaaagacacagacacacagttgttcattttcaacttgccttcttggcacaattgctgggcattattacattcccattgctagtgtacccttactaatactcttagctccacacctcccacctgtcctaaacttagttgctcagttacatcccagactgttcgcctgtaggagtggccataggctacactgctctgacagaaatctcacacgaaggttcaccttttctctctcagaagtttggccaactctgtctctcttcctttgtgtctgtctcttttccatgagggacctcctattccttctgctcagcaattagcccatggcttctttactgacatatcaagaatgatttggggaacaggagagcatcagaacatccctacagtaacaaccaatggtgacataagctggccctgcaatggcaggctgcaggcttacctaagaaggcccaatgctgaccgaggagtgtattccctttcattttccttatggtgatgcttacctccaagtatttttcccattatgaaatgaccttcagtgatctctcttcctaatttagatcatctttgagattctaaagactcccacatccaagaaaaatgcacagtatagaatagaaatgaagaacatttagtaagttaggaatcatcttcttatagggaacatagttcactaggaaat

SEQ ID NO: 280 - DNA, 1000 bp, mus musculus
acaccatgctctttgctgatattgcttgttgtgactgtaccaaagatcttttggtggtattctggttgcttcttgccgattccacagacttgtttcaattggtggagcctcatggtttcttctggatcaagctgatgctactggttatgtttggcattttgctaatggactggatgctgacaatgaatattggaatcatcacaaagaaaaatttctaaacagaatcagggctccatttcctatgaactttcttttcccataccactggagagtggtgagctacaagggatgttaacacattaaagaaccataattaaagtaggttctaaaaaaatctaagtctatgggaaggggtgcaaatgaggtttgggcataataagtaattctgcttctaatatagtagaagaaaagccaggttgtgatgggttggaaatattacttatggaggttggcaaaaaacagaaacttctgacattccttggtctccttctttggttctggactagattttctggttttacttcattgtcttcgaatttagcatttgaaaacaattgaagggaaagctgacaatacttttatgtttgtgaagattgcagagtttgctatgcactttgggagtttacagatagagagcttggaaagccaatgagccagtatatggagagcaacaggtttcaggcttggcgtctgagaccaggaatttgctacatgatgaaagagggaagcaaacttggctggtgtgtaaactgtcacctgactcttctccatacactttcactgccaggtgaccagaacatatctgtgagacaaaggaccagggagaggaggagatagtacagagtcaatgtgttagtgttcagccaagtgaccaacagagaattttcttggggctacccaggtatcttcagccttctcagtctttgtgcaacatatgcttgctaatggtgaacatcgtgtttataatgcgttgaccgggcatttgatagaaatgctagat

SEQ ID NO: 281 - DNA, 1600 bp, mus musculus
gaaagaaactttaattttctgaaagatttaggtgagtagttcttaatgtcctcatgacatgtttgtctaaaagtaaggaactcctgggcttgtatgtttctgttattaggtaacaacagttttctcattattctgggttctcagcaaagtattattactcatgcctttttattttgccacttatttatgaaaaataaagtaaaatgtcttcattttcatcttaatgtgcaactttctttaactcaactcataaagaagtatatattttgccccctttttgttacatgagcatcgccccaagtccttctataatttccatattgcttataataagacctgactaatgccactactgaacacatgtatctctagtttcctagatattaatctctgtgatttcaagttactatgttgtattatttttagctcagtttcagtcatatctactctgtgtcccacaaggtccctcacatgccagcgtggctataattttggcctaactctgtagatcataatgccatgttacaatatcaaaacacacacacttgaatgacaagtgatgtgtcaggaatattcacaagcaaggtcagtcttttgttcatgtacactttgtggttcacttttgtcctgacccgcaggaagacaaatgaggactgggggactacctggaagagaatatgggaacaagaaatgcaaagaacagacaacaagtcaaaaaaaaatctgatcaagctgacaaattttatttttccttggcagattttatacccaaatagaagcagggtatggggaggagggtgaactaggaatgctttgtcttccggggaaagcatctgttctcaagaacaggatattggctggatacataaagaacagaacagattggttgctaggtacctgtccactaaaatctatagctatttgttttacctcactttaaggtctacaacttgttttccattgggctagcactttcccacagatgtctcaacttttcccacagagatctcaactgaactagtacttttcccctaaggccaagactgtgtaagtaagcacttatggctgacaaggcagttaacattcaaacagggtctcttccaacacactttcaaatgcattttggaatatcgaatacatgaagtgtgctttcagaagatataaaatccatggaagcaagttcactggagtcgcctacaattcttgagtacattctgcccaatttttctgcacactagtacctactatcaaatatatgaacaggttttgcctcttcttcttgacccatggtgtattttagagtacgtagtagttgaagttttggatggaatggaaatgtggctaagtatctgcttccattgagaaccactgtggagagaaatatcatcctcaactcttacttattttccacagctaaatatttgaaaatattaataggcataagggttatgctaaatgcttgatcctctattgagttagactgtacagacaggttactaagtaagtagtatttcctggaaatagctctacacaagggatagtatttttaggaaaattaagggctttctttgctttctgactccaccatagaaggatcttc

SEQ ID NO: 282 - DNA, 1600 bp, mus musculus
ttgaaatgggaatcttcattctcttctatacatattattcttaggtttggtcttttcattttgttctgaattttctggatgttttgtgttaggacctttttgcattttgtatttactttgttttgtcaatattttctatggcatcttctatgcctgagattctttcttatatctattgtattgtgcttgtgatgcttgaacttgtgaatcctgattgctttcttaggttttccacctgaaaaactgtcttcctttttaatgtctttaattttctatttccatttttcaatcatagacagttttgctcaatttcctcaactgtttcattgtgttttcctttatttctttgagggatttatttatttcctctttaagggcttctgcctgtttccctgtgttctcctgtatttctttaatggagttatttatgccctccttaaggtcctctatcatcttcatgtgatggggttttagatcagaatcttgctgttcaggtgttttagggtattctcggtttgctgtgatgggagaactgagttctgatgatgccaagtatcattgatttctgttctttatgcttttgtgtttgcctctagacatctgattatcttgagttttaaatggccttgctgtctatggttggagcctgtcattcctttgagcctggtttattgtgcctgcttcagtcaagctgtctctcgatgtgggagtgtgtctggagtgcctgatttgtgaaattggctgtggcagacctcccgggagtcatgatgactctaggtgtgggtgtggttggaattgctggtgtacataatctatgtcctggcctagttttgaatgggaaggaagttggatctctgtaaaggagccaaagcaggtggtctcaattaagctatgttttggggcagaggggaggaactcacttcttggtctggtggtatcagaactcctggggctcaaactgactctgggtgtgggcagtgtgggggtggctggaacacagttaaaaggaaaattaacaattgctgctcccagttgtagttgttgactggaagcagcaattgttaattattcttttatcttatgtaagaaccaattttacttgtttttgttatcactgaaatttagtagtgtggtttatcatataccatttgtgttggtgataactgacatataaaatctcctccagtgtttcaattatttacactttgaagcacaatatcattgaaaaggaagtagaacagtgcaagatggctttgataataaagaataattctttgcagagatcaagagagttacttttttttttttttccccctttttttttttcttttttttttttttattaggtatttagctcatttacatttccaatgctataccaaaagtcccccttacccacccacccccactcccctacccacccactccccccctttggccctggcgttcccctgtaccggggcacacaaagtctgcgtgtccaatgggcctctctttccagtgatggccgactaggccatcttttgatacatatgcagctagagtcaagagctcaggggtactggttagttcataatgttgttccacctatagggttgaa

SEQ ID NO: 283 - DNA, 1000 bp, mus musculus
taaaaaaaaaaaaaaaaaaaaaaaaaaaaaaaaaaaaggagagctgcccttacagtcagcaccagctcctgactaccttggacatgaactcggacaacagttccacatttcccagaggactctacagaagaccttaggatcactggtgagtggaacacaacatctgttccaaaccaatcgtgacagcagcagggatgcagtaaacccacctgagctcaagtcccttccagtcagccaccttgggcacaaattcagctaacagtcccatggtcccagatgactctccatgccccaggcaccctagcactcctagaatcttagtatcactggtgagtggaacacaacatcttttccaatccaatcatgacaggcctctgacagcaggagcaagaacatgggaggcctgcctgaccagcagatcatgtttcttctgatcagtgttggtattccttggtttcaaacacaccagacagacctatggtccccagaggagacagcaattctaggagctgtaaagatcccagaaccttaggattccaggataccaggatcttggtcacaccagtatttcagggtctcagaggaagctttgtggggagccgccctcacattcgccgtaacaagatggcgctgacatcctgtgttctaagtggtaaacaaataatctgcgcatgtgccaagggtagttctccaccccatgtgctctgccttccccgtgacgacaactcggccgatgggctgcagccaatcagggagtgacatgtcctaggcggaggataattctccttaaaggggacggggtttcgccattctctctcttgcttttgctcttgcactcttgctctcttgcgctttggctcctaaagatgtaagcaatagagctcttgctctcttgctctctggctcctgaagatgtaagcaataaagctttgccgcagaagattccggtttgctgcgttcttccaggccggtcgcgagaacgcgtgtaagagttggtgct

SEQ ID NO: 284 - DNA, 1200 bp, mus musculus
tccctggtccaccctccgactgttgcacatcccataccacctttccaccccctgtctccaagaaaatgtccccaccccaacccccacccaaccagacctctaaactcattggggcctccaagtctccagagggttaggcacatcttatctcactgaatccagaccctgcagttctctgttgtatatgtgttggttgcctcatagcagctgatatatgctatctggttggtattccagtgtttgagagatcttgggggtccaagttagttgagactgctgtttttcctacaatagtcgtcctcctcagcttctttcagcctttcacgaatacagccacagggttcagcagcttctgtccattggttgggtgcaatgtctgcatatgactctttcaactgcttgttgggacttcaggagtgctctcaagataggtccctttttgtgactgctcaatagcctcagtaatagtgtcagacctgtgacttccccttgagctggatcccaccctgaccctgttactggaccttcttttcctcaggcttgtctcaatttccattcctgtaattctttcatacaggaacaaatgtgggtcagagttttgactgtgacaaggcaacctgctccttcacttaatgccctgtcttcctgctgtcagttcgctctccctactgccaggcatttcatgtagggtcccttcttttgagtcttgagaatcactcacttcccaggtctctggtgcattctggagggtccctcaaacctcctacctcccaaggttttatttttccattctgtctgctggtcctcaaagcttcaatccttttccctcacccaatgcaagatcaggttccactctccacaggaccctaccaggtgcctaccatcctccccacttgtaattgctttcttctccctccaaagttggacggaggaatcctcacttaggcccttcagctggttgacctttttgagttctgtggactgtaccttgggtattctgtacttatctactttttttctttcttttatttgttttttctttttttggcaaatatccacttattagtgagtatataccacgcatttccttttgggtctgagttacctcactcaggatgatattttccagttcgatccatttacctacaaatctcaggatgtctttttttttttggttagcttcttgtgtcctttatatat

SEQ ID NO: 285 - DNA, 1000 bp, mus musculus
gcatggtatttagtcactgataactggatattcgtcagaaagtacagagtaccctttataaactcaaaagactcaaagaaattcaacaagagggaaggtccaagcaagaatgcttgaattatacttagaaagggaaaggaaatagtcataggaggtagagagagtggagggctgggagaggggaagggaagaggaatggggtttagaatcaggtgtgaggagacgcaggaaagagatacagaaggtccaggagaatgagtgtacatctaaagctgctggccataggggaaagggagaaatctttagcaagtcccagagacctgggatgtggatgctcccaggaatcaatgcaagtgactctagccaagacacctaacagtggggtaatggaacctgaggagactaccttctgcagttaggcaggacacccagtggagggataaggacacctaactacccacagatttttctactcaaaatttgttctgtctaaaaaaaatacagggaaaaagatggagcagaacctaaaggaatggccagccaataacctgtccaacttgaagacgccccccccccatgggtgagcaccaatccttgacattattcataaaactctgttctgcttcctgacaggagcctaccacaacctcctctgagaggctctgtctaactgcttattgaaaaggtgcagattccttcagtgaaacattagatggtggttgaggactcttatggaagaagtgagggaatgattaaaggtctggtagggacctgaaatgggaaccccacaggaataccaatggaataaagtaacctggacccctgggaactttcagagactgacccaccaagcaaagaacgtacatggtttggaatgaggtcccacggcacacatgtagcagacatacagctctgttgtcatgtgggtagccaacaagtgaagtagagcatctccctaaagctgtaacctgacagtgctatctgttcagtctggcttcct

SEQ ID NO: 286 - DNA, 1200 bp, mus musculus
ctcttccatttcttgtattctgttgctaatgctcgcatctatggttccagatctctttcgtagggtttctatctccagcgttgccttgctttgggttttctttattgtgtctacttccctttttagttctagtatggttttgttcatttccatcacctgtttggatgtgttttcctgtttttctttaaggacttctacctgtttggctgtgttttcctgcttttctttaagggcctgtaactctttagcagtgctctcctgtaattctttaagtgacttatgaaagtccttcttgatgtcctctatcatcatcatgagaaatgtttttaaatctgggtctagattttctgttgtgttggggtgctaaggactaggtggggtgggagtgctgctttctgatgatggtgagtggtcttgatttctgttagttagattcttatgtttgcctttcgacatctggtaatctctgaagctagctgttatagttgtctctgttaagagcttgttcttcaggtgactctgttagcctctataagcagacctgggagggtagcactctccttagtttcagtgggcagagtattctctgcaggcaagctctcttcttgcagggaaggtacccagatatctggtgtttgaaccaaactcctggcagaagttgtgttccactcactagaggtcttaggatctcgtgtggaatcctgtgtgggcccttgcgggtgtcaggcgactcagctggcaaggtagcccggtgctcgagtggagtggaagggacttgtgccccaagtccggcacgggtagtctgcttccctatttaccacagtctcaggttatgtgcgattggattggggcagacgctgtgttccactcaccagaggtcttaggatcccgtggggaatcctgtgtgggcccttgtgggtatcgggcgactctgctggcaaggtaccctggggctcgagtggagaggaaggggcttgtcgagttagtttttatagtggatttgtgttgatggatttccatatactgaaccatctctgcatccctgggatgaagcccatttgaccatggtgaatgattgttttgatgtgttcttggattaaatttgtgagaatgttattgagtatttttgcttcaatattcataaggaagattggtttgaagttctatttctttgatgggtctttgtatggctttggtatc

SEQ ID NO: 287 - DNA, 1600 bp, mus musculus
aataaagaatactctgtacttcataatacaacagtaagaacattaaaagatagaaataacagtggctaaatttgggggtaatgttagctacctctgaatccacagctattaatattgtataatatgaaataattttaatttgtttcttcttaattttatactttgcatactaatgctgagaaactatcttctacaacaaagtaatagaaatctgaccatcccttatggtcagatcaatttttaacacatgattccatttgtgacatagaattaaaaacatttaaagtaccttgtataacctgtgaacagcccagtaaaatggtatctatactaaaattcatatctatgatatttactatggcatataaaaacagccatgaaaagaaacagtttataaggcttccaaaattgtatagaaatggaagaaatatttttatgagttatatggttaattccctcaacccaggcatggagagtgatgatttgtgctgtctgatttacattcagtgatttatattctgaattttccttggatctcaggaagtaactactcataaaagaaatataataattttagtttatattttcttgcttgttttgtttacttttgaatatctattgctaataaaaaacaaatctacataaagaaaacaagctttaaaagtatttaaacaatatttatttttctctagctgcttgaacagcagggttactaaagtaataatggaaaaggaaatacaaagttaatattccattactttctttgaaaaattgtaggttgaatattctttttgttgttgttgtttgtttttcaagacagggtttctctgtgtaccccttggctgtcctggaactcactttgtagaccaggctggcctcaaactcagaaatctgcctgcctctgcctcccgagtgctgggattgaggggtggaacaccacgtccggcaggttgaatattcttattgtacatccttgtgggcagcaaagctaacaaatactgtctgtgactaacccatttatctcccagtttaagattattaccccatgttatttctctagagtagagtcttcatagatagcagaatcttaagaaaccctcaagataaatcaatctgaaaatggtgttttatgaaataaagatcaaattttaaaatctattcagacattatacctacaaaaattaatttgtatgttctaaaaataagaaatatatatttagaatgttataagtttatttatttaatttaatctgtatgagtactatagttgaatggatatatgtgcaacaggtctgtgcctgtatccttggaggtcaaaatagcttattggttctcctgaaattacagttaagtgtatactcaaaagatgatccaccataccacaaggatataagttccactgtgtttatagcagcctttttcatagtagttagaatccggaaataatcaaaataatacagaaaatgtggtttatttacacaatactattcatccattaaaaatgaggacatcatgaaatttgtaggcaaatggatggaactagaaaatattatcctgagtgaggtatcccagagccaaaatgaaatgtatggtatgtatt

SEQ ID NO: 288 - DNA, 1000 bp, mus musculus
atgtgagagagagataaaataagaaaagtagattataatagtaaaacttactggagtaaaagaagtggtcattggcaaaaaaaaagcagggcatatgctatgtttacgaaatgtcataatgaaacatcattttgtacaataacttgaattgactaatattttaataacgtagaaaacatccattcaaaacatttcttctaattcctcaaatttgtttatggagtatatttgtaaaataatttattgcattttatgtgtaatatttggcttgcatatctgtacatgccttcctacttttatggacagataagaattgggcatcagatctcttgaaactaaaattacagataatcttgagcaatcatggaaagacaactcaagtcttctataagagataaacactgttttatttgatgattaatctctacccctggttgaatataattttatcctggacagaatttgcccatgcttgatacctgctagattgctagaaattagaagtctaggatagaaccaacgataactggcaaaaataaaaatatgaaacctaggtcaatattctgctatactcacatattcgtgcccttccttgaacagttgatgggagcagacgtagagacccacagccaaattaggaccagtttaagaaaccccagagaagccgggcgtggtggcacatgcctttaatcccagcactcagaggcagaggcaggtggatttctgagttcgaggccagcctggtctataaagtgagttccaggacagccagggctatacagaaaaatcctgtttcaaaaaacaaacaaacaaacaaacaaacaaaacaaaataaaaaacaaaaacaaccaacaacaacaacaacaaaaaagaaaccccagagaagaagagtggaagggtttgaggacagaggaatagggtacaccagaagaacacagtccaaagtataaagtagggttcatagggactcacagagactagcatgggtctgtgctatgtt

SEQ ID NO: 289 - DNA, 1200 bp, mus musculus
ggattctacatgtttacctgtgttctcctgtatttctttcagggaggtatttatgaccttgtaaagttctccatcagcatcatgagatatgattttaaatatatatcttgcttttctggtgtgttgagatacccaggatttcctatagtagaagaactgggttctgatgatgccaagttgccttgctttctgtcggtaacattcttatgcttattcttaccatctctttgtctctggtgttagttggttttgctgtctctgactatagcttgtatgtactgtggttctgtaagcctgtatcagtactcctggcaagaccagctctctcctggcgggatcacttacagagggctgtggaacacctcccagctcttggaggaaaatggtgactggaaggatcctgtcccagctgctccactattccagtgtgcactccctgatagtcccaatttggacagttattggagaaaaagtggtgatttcacctctgagctgaggagggtgagcactcctgggagatcagctctgtctttgtagatctgcatacagagggctgtggaacagcctcagctctgtggtacagatggagatgggaaggatctcattctgatctttttagccattgtttgctatgtataatcaacagagatccaatttaacatccttaagattaggtcttccttgtactttacaaatttaagttaacactgaaacttacacaaaatcgtctttgtaaaagaattgcattccagaacatcaatggtaaatattttagctattatagtggcatagcatgccaagagctattcatattctacctaccagtactgagagtgctgacactgccagctgtccagcaagtgattcattctctaaatcccattttagaatttgtttactaagactgtttctgataccaactgtcctagatcaggatgtccttgaagatacaacataagacataagatctgataaagaatattttctcaaagtccttttagcaaggatgcttgtaaggatgggaagtatgagaatgagagaaaaagtaagaagctgagtgaactgaaatgttgctcaaatctccccaagatggatagaagcattattttttgtttgtttgtttttgtccccaagtgacagtttacatacttgtatttgaaagcccctgaataaagaaaaaaaatgaaggttactattttt

SEQ ID NO: 290 - DNA, 1200 bp, mus musculus
gataggtcattagaattgcattaactatcagttgacagatgcacacctcttcctaagtctacttttattgatttagtgtcagagagttgttctctttcttatgaaaggctactacaaggcatctatattagtgaaacgtacccttgaattgactctcggtttttagcatccaatagggagagagggtggagaacatatttgttggctactgctcagccttctttggtctgaaaaataaaaccactgtctcttttcaggcatcattttcttgccagcattgctattattcagtattttggtttctaagtggtatcaggggtctaaacttctcagactgtatatagatatcaaaaaaaaaaaaaaaaaaaaaaaaaaagaaaagaaaaagagaatgaatacatctatgtgtcaagttaaatacttttccaaatctttcagaaaggtgctatatactaaatccttaacttgttttcttttgtacatattattgttgagtgattccaaccgtcctgaattttataaggatttatatttattgcttcaacagcttgcagtgcatcacagtgttctttcttggaaggaaaaagaaatagaaaatgttttttacttcattagaaggcttcaaacccatatcttaaattgagaattttagaaacttccagactagcctgcatgcacgagttaattccaaagggacagaaatgcaagtgtttgtgcagtgaataagagagtctgactttccttgctctggtggcaaaggggagctgagggcaaaccatgtgacagagtcctgtgtgaccatctccctagcctctaacaagcagaggagatctaactctgaccaacagtacaacagtgcctcctctgggaatttgctggttctgcagagaagcccccttgatcactgccccctcccccaccttgtcttgcaagactcctcactgacagaatgtccagggccatttaatatgcagatgtctatccatacattcagttcttattacagaaaagatttttcattcttgaaaattttatttcaagttattttgtaaagtatttattggaacataaagcctttcacggaagtcgtgtaaatcacacctgacagaaaggtgtaatacaagggcaaattaaaaactaaaactagaaaaacaagattttctataataataaaatgtaaagaggtagccctagaagtac

SEQ ID NO: 291 - DNA, 1000 bp, mus musculus
taaattcagacgctattgtggatgccaacaagtacttgctgacaagagtttgatatagctgtctcctgagagtctctgccagtgcctgacaaatacagaagtggatgctcacaaccatccactggactgagcagtgtcctcaatgaaggagcaagagaaagtactcaaggagccaaaggggtttgcagcctcataggaggaacaacaatatgaactaaccagtactcctagagctcccagggactaaaccatcagcagaagaatacacatggtgggactcatggctccagctgcatatgtagcagtggatggcctagtttcttaccaatgggaggagaggcccttgatcctgtgaaggctttatgccccagtgttggggaatgtcaggatcaggaagcaggagtgggtagattggtgagcaagggaaggcaggtggagatagggcttttcagaggggaaatcaggaaaggggataacatttgaaatgtaaaaaaaaatatctaattgaagaagaagaaagaagaagaagaagaagaagaagaataagaagaagaagaagaagaagaagaagaggaggaggaggaagaggaggaagaggaagaagaagaggaagaggaagaagaaggaggaggaggaggaggaggaggaggaggaggaggaggaggaggaggaggaggagcaaacaaatatagtcctgagctctgtctagtgcttttgtctgagttagctgatggtggaagctagtagaggacagtcatgctaaacttctgtctaaaagctaacagagtatcattaataatgtcagagtttggtgcttgcccatggaatgtgtatcaagttaggccggttactggttggtcattcccttagtctttgctccatgcccagatttcttgtagatagggccaattttgggttgaggggtttgtgggtgtatgggtgtccccatgggtccactggggttcctgtctggatagagaaggtggccactttagggtct

SEQ ID NO: 292 - DNA, 1000 bp, mus musculus
ggataaacaaatgtcatgtggatgttgaattgcacttatttttagcgttctgtctaaactccaccccacagtaacctggcaacagcaaggtaggcctgacccgctaaaaagggagatgcttgttccctcctccctctcttgctctcttgctctctcttgctctcttgcttctcttctactcttcctctccccttctcattcccttcccccacccctctctccacggggccatggctggcctctacttctctattctttccctctatctgcctttctctgcctctactacccatttaactcccctccctatgccctgaataaaccttattgtattctatactgtcctgtggctggtccctcagggcaaagggatgtcttggcatgggcatgccgagacatcctctttctccatacctcaccacacatccatagaacatatttctttctttgtttatctttttataaacacatcacctatagtgcctagtttgattttgagtaactagttagtttaattgagttattttatgattataataactttttagtttgtgaagcagagttgtatttaataataaaaggaaataccttaaggaagcatttataaacaattttcctgattcagcaaatatcatgtgacatcgataagtagattattgccccaagttaatggcctttattatcctttctaaagtaggactgcatcacatagttttttaaagtctactgacttataattgtaatgtaattgtaatctaaaatctatagtgaaaatacttttcagtatttatcattatgtgtttataatctaatggattattcctttttgcatgaatgttcaatatactagacttgggtgaagcttggcaggcattcagagtaattattgcattatccaagaaacaattagtattttagtacaatatttcaataggatatttgctgaatataaaagttcagaaacagaacactgagcctttgtagccaaagaccaactgtt

SEQ ID NO: 293 - DNA, 1200 bp, mus musculus
acactagaaaatgctcaggagatactgcagctgatgatgatagggacttatgtatttaaggctcaattaatttggccacaggatatgagagataatacatgaataatgtgaggaggagagagttctgcttttagaaagatataaacaccacacagtaaccattttcataagcataaagtgttcaattgcattagatatctattttctgcattagtatcatgattatttaaacatttcatcaaatatgagacagacatcagtaaagcacatatcgactcttttctgaaactaacagaaatatgtattggggttttgattcaatgtccttttactgaatgtttttgtatcaccttaaaacaagctagagacatcagaaagtaagaagcctcagttgaggaaatgtgttcatgaaatccagatttaaggaaatttctaaattagtggcaataggaaaggccccaggctattgtaggtggtgctatccttggtttgctggtcctgtctttgctttctgtttcctcgttctataactcagcaagccaggggtagcaagacagtagacagtaacccctgaatggcctctgcctcagctcctgcctcctgcatcctcctttgagttcttgtcctgtttttcttcaatgatacacagtgttgtggaagtgaaagctagataactcccccatccccaacttgctttttggttgtagtgtttcatcacctcaactgaaaacttacataagaaagtcctgttatgtgatttagcagaatagtttattgagtgcaatgagtatcacacaagagccataaaagcaaggatatagagagcattatcccggatgcaattcagcaactccagtacatgggatatccctgaaggatgagttttaaggtcttgttatatttaaacacctttgtaaaatgatcttggtttgtagttacagagagctcatttacattttaatgtggacagcaccattttggatgccattgggccctgttcagagaagttcaaggacacttctcatgagtctcttgacatattacaatctaggtttgtggtgaatgaagcagtacataaataaaagcactgtggctctgtccttaaacgtaaatgtgaagagcccacggatcttattgctgtattataatatccgggtctctgaaaaaggcaacagagaatgaacacgaatacagattgac

SEQ ID NO: 294 - DNA, 1000 bp, mus musculus
caaaatgccaggtgatattctcttaagtaaaacttacttttattacagtaaatttgttgaacttgtacattcaacaaaattttgtggtacattgtaaatcaaaagagtttaaaaggatacttgtaagaatccattgagaaatatttcagtgatgagtagtcaaatgatcaagtcattaattattttgaatgttttcaattagaagtagaatgcacaagagtcagtcatgttgtgttttataaaaagacaagaagaaaggtgacatgttttggtggatgtgtaatcatgtatgggagaaggggttgtctccatgggctcaatctaaggcatcccttccccctgagggaccagccacacacaatggtatagtatagaatagattttatttagcacatggagaggggaattaacagggtagtacagacagacagacagacagacagacagagaagaggcgtagagaagtagaagctagctatgagcacttgggggggcagagagatggggaaggggcaagaggatagtgtgggagcaagcaggcaagagtaagagagagaagaaggggcaagaaggccttttaaagtaagtcaggtatacatggtctaaggcttagacatgatgttttgtcctgtgtgccaaaaaagtctagtcatttcaactgaccatagcctcttgcactatagcaatacatctaacctctggactattccctaattacaaaccctgtgcttagtttcagtctggtgagttctttaaacactagcctaactacactctacactttctacaacaccaaatcctacttcaggttccccatcctatgtacctcactaggttagtccagcctactccagtcttaaccactagtgttagacctgaggtaaacgatgttccagacacttctactaaatctgtctgatcataatctcctatactatattcaacttcctggcctagattcagtctcaaaatttgtgcccaagtctggtatggggatgct

SEQ ID NO: 295 - DNA, 1600 bp, mus musculus
aagaactagagtattgcattattcaagaaaaggttagcaagagctaaattccctggtacatgtttttcactaggcccagagaaatagcataattaggtatttactaaggggcccctggtctcgggttaaacaataggctagaattgcacctgggaatattagccctttcacctggctcctgtgaatagctgactttatagctttagggttgatcttatcttagttgtaaacactgcctggttcctggcagcctttatgtatagattttctttgttttgtgtaaagagccattatgcatctcaatataacttggctgatatataccctaacttccttgtttttcttctgcattataaatgtgatgctcactttcagaaattaccttcagatacaacactctctctggtgtccatgtctgccaactccttgtccatctgagagcctggaccctgatttctccttcgggatgagggaccgactgagtctagtccacggcaggctagtgccctgagaagaccttaagtgtgaattctgtagctagtcccataattcccagatgaagatccactctcagctactctaaactcccaggattataggattagtgcaagtctcataacactcagaggaagatcctctcccaggtgctctaacactcccaggatcataggatcagaggtgaggaggacacaacatttgcccccaaactggcaataactggaaccagcgcgacccaggcacccaggatctccacacaaccagtggcatggttccttccagtctgggccactgccctgagtagactttgggcatgaactccacagctagtcccacaacactcaaaagaaactccacctccaggcaatctaacattcccaatataacaggatcaaaggaccacaggatcctaggagcttggtcacaccaggatctcagggtctcagaggtagcttgactcccaggagcttggtcacacccaggatctcaggattacaggatctcagaaccataggatcacagagacagctgaaatctgagaagttctgacacaaccaggatcacaggaaggatgggttccactcagctatagcaagggcagttagcaatagagataatcagatggcaggagtcaaatgtaagaacataagcaacagaaaccaaggttacatggcattattagagctgaattatctcatcatagcaagtcctagatacaccaacacaccggaaaagcaagattcagaactgaaatcacttctcatggtgatgatagaggactttaagaaggacataaataactcccataaagaaatacaggagaacacaggtatacagctagaagcccttaaagaacaaacacagaaattccttaaagaattacaagaaaacaccatcatataagtgaaggaaatgaacaaaccatccagaatctaaaaatgaaaatagaaacaataaaggaatcacaaagtgagacaaccctggaattagaaaacctaggaaagagatcagaaggcatagactcaagcatcaccaacagaatacagtacatagaagagagaatctcaggtgcagacgataccatagaaaacattgacacagc

SEQ ID NO: 296 - DNA, 1200 bp, mus musculus
atttcaaattatagcaaaaagggcttcaatatcctttgtaacaggtctgagaaattaaaactgtcaggtactccaaagctacattgacatttcaggtaataaaaacagttatacattgaaatatggcacttgttgaagttatttttgtataaatggatgtcattgcataatcatttttcaaattttaattttcaatgtttcatttgcatgagcactatacattttctttaacagaacttgaaaacaggcaaaaatttcctccatcaacatcaatatgaactaaccagtatgccccagagctccttgaaactaaaccacaaattaaacaaaacagatggtggaacttgtggttctagctgtatacgttgcagaggatggcctagtctgccatcaatgggaagagaggccctagttcctgtgaaggttctatgccccaaataaggggaattccaggactgggaatgggtatggtttggttggggagcaggaggagggggagaggataggggattttcagaggggaaactaggaaaggggctaatatttgaaaaataaataaagaaaatatccaataaaaaataacttaaaatttttcctccattattttgcccaataaatctctatctttttaaatagtaatatagtattttgtggaagcatggggacctgagttcagatgcccagcaaacatgctgaagtctattcttgtagtgttgatggagctcagacatatggatacacacaactcactggtcagggagctgagtgtggaaattaatctccagactcagtaaggagacatcttttcaaggcagagaatgattattcaggtcactcaatatgatcttctggaatttcaatgtaatatagtttttgaaagtctttgtgcacattaatcatatagcatgcgtgcacacacacacacacacacacacacacacacacacacacacacgaggggggaagagataatgatgattgatgatgatcatagacagacagacagacagacagagagcatgacagacagacagatgactaatagacagagtaggagatatcccctttttgatagagtcccaaatatggtgtagaacacttataaagcaattgcattcatagaagtagatacagtaaagattagtttccagtgaagatagtttttgtttgtttgtttgtttgttttttatcttgtgctaa

SEQ ID NO: 297 - DNA, 1000 bp, mus musculus
cacatggtacacactctagaatgaaggtgcaagagaggatactttaatcccacttagaaggcagaaaatagttttaataggcagagggagagaagaacctaggtaggagaagatcaggtgaggtgaatagcaagacaggattagatatggagagagttggaagagagtcccaaagggaaaggagaatgtccagagacctcagatgagggtagctcccagaagtcaatgtgggtaacattagctttaatgtccaacatttgtgatatggaacctgaagagactacctcgagtagccagacaggaccccaagctgagggactttaaaccaacccacaaaaaacaacaaaaaaaaaaaaccaaaaaacaaaaacaaaaacaaaaagaaaaccaaaaaaccaaaaaaacaaacaaaaatcttttgacagttgctggcccatttttagacccatcccattgacacactctaatctttcacactatttgtggtttgtggtgctatgttgtgcttgcaagaatagcagaagagcagccctctgaaaggctcaacccaacagcaagctgagacatatgcatatacttacaaacattagatgtaagttggtgacacctataaaagagtacccagaaagactgaagggcctcaaggagacttcaaccccacagaaagactaacaacgttaattaacctggagccctgggagatcacagagtctgagccaccaaccaaagagcaaactcagtcttgtccgaggcccaggacctctacatatgtagcacagggctgccgtgtctggcctcagtgggaaagaatgcaactaatcctgtagacacagggtggggtgatgttgggtagggggggattggtgagtgtaactgtgacaggcggccaagagagggcagaatgtgggatgaaagtatataaacaaatgaaaaatgttggtttgaacaaacctagaaaattgtccaattattctagcttttctaagtaatgaaatacatt

SEQ ID NO: 298 - DNA, 1000 bp, mus musculus
atagcccaaaagctccaaatacccaggatacaattcaaagaccacatgaagctcaagaggaaggaaaaccaaattgtgtatgcttcagtccttcttagaagggggaacaaaatattcaaggggagaaaatatggagacaaagtatggagctggaactgaaggaaaggccatccagagatggactcacctggggatccatcccatatacaaacaccaaacacagacactactgcagatgctaagaagtgcttgctgacagcagcctgatatacctgtctcctgaaaggctctgccaaaccttgacaaatacagaggagaaggctttcagccaactattggactgagcactggatccccagtggaggagttagagaaaggactgcaatagctgaagggatttgaaaaccataggaataaagataatatcaaccaaccacataccccagagcttctaagaactaaactattaaccaaagagtacatctagagggacccatggctccagccccatatgtagcagaggatggctttgtcgggcatcattggtaggagagatctttggtcctgggaaggctagatgccccagtgtaggggattgtgaatcgagtgggtggttggatgggtgaacatcctcatagaagcagggataggaggatgggagagaaggtttccagagggaaagccaggaaaggggctaacatctgaaatgtaaataaataaactattcaataaaaaataaaaattagacaaataaataaaagacatgcatactatgtggataattctcaaatacttattgtcaatctacattagcattcctattgaaactagaacccatcatatttaatatatagtatatatttaaatttttaaagctaaaccacaagtcataccacttagcaaaacaatcttattattacaaatatgactatttttcagatgattgtaagcatcaaattatacctcttttcccaagaaatatatcataatatgattgaaa

SEQ ID NO: 299 - DNA, 1000 bp, mus musculus
gttttacaagaagtcataaagagtattcaagaaccagctacaccacttctgggcatatacccaaaatatgctccaaaatctcaccaacacacttgctcaactatgttcctagcagccttattagtaataaccagaaactggaaacaacctagatgtccatcaactgaagaatggattcagaaaatgtggtatatctgcacaatgacattcagctattaaaaaccaaggtatcatgaattttgcaggcaaatgatagaacttgaaaatgtcatcctgagtaaggtaacccagtcccaaaaggacatgcatggtatatactcactaataagtggatattagccataatgtacaggatacccatatctaatccacagatccaaataagctaaacaagaaggaagatccaggtaaggaagcttgagtctcacttagaagcaggaatagaatagtcataagaggcagatggagaggggaaactggggtggaggggatggagaggggaatggtggattcagaatcaggtgtggggaaggacaggagagatggctagatggccatgaagatgaatggaaatatacaaatgacaggggtgaggagatggggggcatatctaggatacggcacatctaggatataggaagcacccaaaagtcaatggccaccctgctcatatgtagctgatgtgcaattgggccttcatgcgggtcctgaacaactggaacagggctatcccaaaagctgttgcctgttcctgagatatgctcaactacctcggcttccttgtctggcctcagtgggagagacttgaagtgctgaggtcaggtacatacccaggccctgcccccgacctgctcagaggagacgggaatgggggagttggtacggcaacagactggtagaatgatgtaaagtgaatacgtaaaaaataaattaattaaaaagaaatgaagagtattcaagtgttgtaaaactcaacaaaatgtaattctcattaagtata

SEQ ID NO: 300 - DNA, 1200 bp, mus musculus
aactgaaaatggacttaagctgaggttttaaactcttaaagcatacctacagtgaagtacagtgatgaccaacaaggacatttctcttaaacctgctcgaagagcaccaccagcttagaaccaactatttaagtgtgaatacaatttcttaaaacactagataccataccctggctcacataggctcactgacatatcacaaagcaaactgcattcagtccaccttcaagtatccctatattctttcatagtctcaacgttgtttaaaaggccaaagtctctgttaagactcaatttaatcttttaattataacctcttaggaaatcaaaaggctaattacatataattaccaagaattgcagggagggacagatgaacctggaatgcgactgcctgtggggtagttttcaggcagacacaatgaactgatctgagcatctttgcatgagagtctttctgtgtttgtttccctgtatcctccatccctcacctccccaccccatatctaggacagccagactggatatttgtgctgcttgcttgtgctgtgggttgcatgagatcagcacacaaacatatgcttccagctgcaactcaaagagggacagataagttgtggctctgtctatactgaacccctccttgtgaataaaagagtcaggagaaaaaggtacaaagggctccgaaacaggtaatacaagagagctatataatattttcatacttaaagatgagaaacacaataatatctttgggctttaagtgatattttgaatagtttgacagcgatggatttagaggaaatagacaccttaccatgtactggtattgcaatatttattatcttgatttactatgtcttctcaaaagacagaaccctcagcggggataggggggatgtttgccttagaaaagagatgacaagtaacacaagaactaaatgttcaggattttattggttaagataagcaacagaaagagaatgaagtttggagacagaagctggaaacgatgcaagaacagaaaattctgaatttcatagacgagtctgagcaaaagagagataagcttaagacttggcaacatgacctagaggaagcaataaaactaaaggttcaggatttcataggtcaaaataagcaacagaaagaatagaatgaaggttggagacaggagcttgaagaaatgctagaaaaaag

SEQ ID NO: 301 - DNA, 1600 bp, mus musculus
gttattccctttcctagtctcctctccaaaattcccctatcacctcccacaccccctgctcactaacccacccacttctgcttcctggccctggcattaccctacactggggcatagagcctttacaggaccaagggcctctcctcccattgatgactgacaaggccatcctctgatacatatgtggctgaagccaaaggtccctccgtgtgtacactttggttggtagattagtccatggaacttctggaggtactgattagttcatattgttgtttcttctatggggctgcaatacccttcagttcctttctttccaaattttatggccttgatctccttcagttgccttctctatctgaaatgtcgagtactatattgaataagtatgcagagaatggacaagtttgttttgttcctgacctgttggtctgtgctgccaccaggagtcatgtttgagtctatgtcctatagtagcaagggtctatttccattcaagctcaggcttacatccatggtctgggctgccaaccagggatatgctgatatccctgtgtaaaacttgtctcactcttcacctgagaatcatggaagatctgaacctgggagcatgacagtatgagaccagacctcacccctagccacctgtagtacatgggaaagcaggccctacatgtcttagaagttgtagttgagctggctctcaacaatatgagcatgagagatctggccctactattccacttaagtgtagtggcatgattaaggagaaatattctctttcccctcactcctcaccatctgtggcaggtgggagagatgtccctaaggtcatgagaataggagaactggccctgcccttccccagctgaagcacttgagagagcaggccctgaacctcaagtggataacacaggagatctggtcctggatatagggttggtgggtgagctgattccaagagagtggatgtgggagaaacagccctgcttcatatctggtgagcactgaagactctgggagaatctgcaatcctcctctcactcatgcatcactgtctagggcaggaaggaaaactagtctcccgttcatgagagagggagaactggccatttccttcactatcacaacactcaggagagtggaccccacacttcacttgggcatcatggtagagctggtctagcttgcaggggttgttggtgatcaggctccaaatgtatgagagcatgagacctgtggggctgaccagttcagatacctcccaggcctatatccaggactttgaattggcccaccacaatatcaatgactgctggattacataaaggagctagtactacagatctaaaactacaagatctccatgacacaggccaataggccatccaagagaaaccccagtgaggttctagttttgatagagtagcaccaggaaccagatgtcttataccagactaatgagtcattgtaatgaatctgtgtaagcaaagatgtgtggacaagtgggtatactgtgagaaacactgtggcacactagaactttcacaacgatattattcttttcctctgttgtggataaggttccaagggtaaaggg

SEQ ID NO: 302 - DNA, 1000 bp, mus musculus
tacttaagggaggaaagacggagtcaaggtgtggagcagagacagaaggaaaggccatccagagactaccccacctggggatccatcccatatacgaacatcaaacacagacactattgtggatgactacaaatgcttgctgacaggagcctgatatagctgtatcctgagaggctctgacaaatacagatgcagatgcttacagccaactattgtactgagtgtgggatcccaaatagaggagttagagaaaagactgaaggagctgaaggggtttgcaacccataggaagaacagcaatgtcaaccaaccagagccccccagagttcccaggaactaaaccaccaaccaaacagtgacccatgactccagccacatatgtaccagagagtggccttgtctaacatcaatgggagggggagcccttggtcctaagaaggcctgattccccagtgtagtggaatggaaaggtagggagacaggagtgggcgggtgggtgggtgggtgagcaccctcattgaagcaggggaaggtaggatggggtagggggtttctacagggaaatccaggagagaggataacatttgaaatgcagagaaataaaatatccaataaaaacttcataaatacaacccccccccaaaaaaaaacaaaaacaaaacaaacaaacaacaacaacaaaaaacctcttgttatctctgctaccaatgccatcagtccaacattcaacttagcttcaagcagatttttaggacaagggtagaaagtagctactcttttttccccaaccatcacaggaatggtttctaggacacttattggtattcttctctgaaatttcttatgctggatactcacagctgagatttcccactgcattctttctatggtactactagaatggctaattaaatcttacctaatgtgtgcaacagcttttatagtccagggtcccaaagtcttccatgtttttccaacagagaaaatggtcatgcctgtt

SEQ ID NO: 303 - DNA, 1000 bp, mus musculus
agtcactcaagtaatgacatggcagccttttattaattataaaagcttgaatttagctggatttctcccaactacttcatataacttaaattgacttgtttatactaatctatattttgttttatggcttattacctctatccacagtaccagcacttgtttcttcttcagtgtctagctggcaaatttcctctgcccttagttcctttgttaacctggaagtcctgcttatccttcctgtcttgctatatgccatcagctctttattaaacaaatcagaagtgatggaggaagtgtctacaaaatatgatgcaactgtaagaatagcaataaccgagctgggtgtggtggtgcatgcctttaatcccagcactcaggaggcagaggtcggcagatttctgaatttgaggccagcatggtgtacaaagtgagttccaggacagccaggactatacagaggaaccctgtctcaaaaacaaaacaaaacaaaacaaaacaaaacaaaacaaaacaaaacaaaagaatagcaataaacaaagtttgggctctaatcagatatatgccagtacagaaactaccatttgactaatataaagaccacatttacactgtgtgcaaaagctacccaacatttgtttatttatccatatttctaaaacattcagagaaatgctcatttaacacatgaacacataggttttgtttttttttttgggggggggggtcaaagccaggctttacagtcatttgctattgacaaaacagatattactatatttctagggccaaattggatttgaaagtatctcctactaaatatcctagagtgaagatgatgtgagctctgtgcccccaaagtccaaaacattttatattcatccaattgcttctatctttattaataacatgttccagattctggaattctagaattaccttcaattctttgcccttttgatatataaaaggccataagaaaggattctagtacatattattc

SEQ ID NO: 304 - DNA, 1000 bp, mus musculus
tattttattaaacagttttccatcaattcctccattcccatattgttcatgctctctgcagccttctttatcccagcagcacaaacctgctctctgattcatgtcttctcctagcaggagcattcagcatcggatgcttaaactctcctagcagtccagaaactgagagagagattcctacaaacctaactggaagcccatgtccctgggtcagcctgagtgtgtcctagccataagccatggactgcagaaatatgctatgcatgccaaaccagcaaaatcttctgtcctagttccaagcctgtgcagctgagggagaaagcacggggttggcttggcttggcttggcactgcttggctaagaaatcaattcttccagccttttaagcttaaagagaaagcgtttgtgttccatttggtaatcttcaattaatttttaaaattgagttcttgcccaatgttgggtgcaatctgttgaattatttttctcattaataaattctggtggaaggttcacaacccacctcaatgttttatgtttctgaaaaaaaaaaataaggcacacacacacagtctttatttgatatgtcttaagcagctcaatagttggaatactgcctaacatccacacgattaatcccaaggtattacttattaactttatgttctaccttgtttactctgaacccagaagattgccccactggcccatgctctgagtcaggcaccccctgtaccttcccatggcagccgtgcctctatgttctgctctgttaagaatggcatctctctttcctccttctccctgccccaaacctgggaatcctaaagtactccctcagtcttccctgcccagctattagatgttggcatatttatacaccaatcagaaccaattggaggcaggctcccagatgctattacaggcactctcatacaaacttttttgttcttttgtttgtggaacatgatcagcattcataatacaggcatctacaga

SEQ ID NO: 305 - DNA, 1000 bp, mus musculus
tgttgctgggttggtgttgggccatagggaagcaccagaaaacggcactggggatgataaagcacagtctgaagtggggcacatgtcaaactgctttgggggtccctgggcctgttatgaggccagggctacctgtttctcaggctcttcgacatccagggaaagttctggctggtcccaacgtgattgcctttggcttgatgggcagcaggcttgagcttggcttgtggtagtcatggctttgggagtgcagagaggccttcgatgggagataagacagcagatctgtcggaaagggaaatttctgtgctgccccatggtagatcctgatgaaaagagctcatggtttcaaggcatttattgtcatggtggaaagtgaatgtgtaaaaccatatcctactcctcagagtgagcctaaggttaattaccttttgcagggaggaatgtctgagaaagaaagcttattggctaaggcctctgggcttctagatacctctttaaaatggagatatatcttgagccttgtgaacactggtcatgtccattgcacgtgaaggggcttggggcattgcccttacctgactgatagcagcaaatctgtgggaagctgtggatagtgacaggggtctggtaccaaggaacagacaaagcacctaccatcagttcagagtctctggggccttgagccttagctcaagcatgaaccaagataactttcactgccccacataggtacatatctttaaacctagtattgtggagtcaaaaacagacattcaaggactcgctgtccaatcaacatcgacttctagttaggtccgtgtgtagagaaaggtcctatcttaataaaagggggcagggtagaccaatacctggtgaaaattgctcatggatgcccttggctaccacatgcatgtgcactcatgtgtacacaagccctacttagaaagtgtcacttggcaattccttactctatgggtttcttgtattatcccttgga

SEQ ID NO: 306 - DNA, 1200 bp, mus musculus
ttgtcaaaccatcatgtgtgtgtgatgtgataggccaagcaaccccagtttttctgtggaagcccatgtgtattatagagactggtagctcacagtagccttgagagtcttaatttatcttacttttataactttctgattgtggtaggcatgcagccttgctctctgaattcagggcagtaggatattgcctgctttattgagtagcagaggttattagcatctagacaataaggttgcatctctggggcagcagaaagcagcactttggaagggcctaggaatccccccaatttgatgctcatgggcttttccatttggtgagcaatcatatggggggcatagctgtaaattttagctcttgtttcaaccccggaaattaccctttgtaatcatatcccactgcatgctgtttgaggaaaaaatctacttgctaagaaacaattcactgaccttcctagtctaaagggacaggcatattttttatttgggaacctaaaattaattttgttaaaagtgaatttttgtcccacgttgggggcaaatatattgtataaaatagttaatgttaatcggagacttctgtcccttcttagatcatccagttcccagaggggggacaaagagaaacagaagttttattcttataataagccttaaaaagctctagagaagtgcagatatatacccaagaatgaaaagacagtgaagtgagagtccacagccacaggagtgaggagatcctttcccaacatacaaggtcatgtgaatgaaaacaattagcacaacagttggcgaagaaaggatgttggttactcatgcttgcccttattccagtgtcaagtacactcccatttctggaatccatctgggctcacagccttacattttatattcttctgaatctgtgaagcagtcaaaattttgcccattttattgatgagaacattatggtttggagagaataaggaaattgctcattgccacagagatgatgtgaattaacaactgatattctcttcttagttcttcttagttctagttcttagctcttctagttcttagttcttagttcagatgtgctaagattgagtcatcaggtcgcctttctcttgttaatgaagtacagcaacagttaataatcctcaacaaagagtgagggccatctctggtcaagggagggtttttttttgttttgtt

SEQ ID NO: 307 - DNA, 1200 bp, mus musculus
ctttgtgttttctttgactgttgtgtaaataccttctgtgatatcttctaagcctgggatcctctcttctatctcatatactcttttggtaatgcctgcatctgtagctcctgatgtcttttctaggctatctgtttccagggttccctctatttgtgatttctttgttgtttctgtttccacttttaggttttgggaccattatgcttaattccttcacctgttttattgtgttttcttgtatttcttttggggatttattatatttttctttagggctattacctgtttgcatgtgttttcctgaatttctttatgggagttatttttatccttcttgaagggttctatcatgttcatgagatgggtttttcagtcagaatattgttttccaggtgtgttagtgtacccagagtttgctgtgtttgagaactgggttctggattctgatggtgcccaattacactgctttctgttccttacattcttgtgcttgcctctcatttttgtgctggccggagtctctctgacttgagcctgtccctacttggaggcagttagagctctgtgacactggttagagcagacctccttggagatacacagtgctcactctgtttgggaagacctcctatgtctcaggttagagcaggcctcctatgtatgtatgtatgtatggtagacctccagggagacaggcaggctgtggtttgtgggaggacaggagctcccaatctgccaaggacagagttgcagtctggaaaagacatggtgttctggcagatctgcccctggcagatttggaaaccagaaggaagatgtggctctggcagaatggataggttataggtagctgggttccatggggtcccagttaagataggaattgaggtaaggtcccacctgtgttcctggttaaggcagacaggccagctgtgcactgtggtagaggggcagatgaagggacaaatctatctttaagggaaaaacaaccctatcttcaggaaaaaaaaatgccatctataaaagtaaaaacctatttctatattctttttgttccgagttgttgttgtgattaactcaggatatatgatcacattgtttttcaagcatcttttcaaaaatttcaagagtccacacaagtgcaaacatacattcaaatcataaattgaataagaaacaatggcagatgtttacatc

SEQ ID NO: 308 - DNA, 1400 bp, mus musculus
tttcatctcagctccaaactttgtttctgtaactccttccatgggtgttttgttcccacttctaaggaggggcatagtgtccacacttcagtcttcatttttcttgagtttcatgtgtttaggaaattgtatcttatatcgtgggtatcctaggttttgggctagtatccacttatcagtgagtacatattgtgtgagttcctttgtgattgtgttacctcactcaggatgatgctctccaggtccatccatttggctaggaatttcataaattcattctttttaatataaacaaactcaaagacgaattttattttaatgaaaggatcatgaactcaaacttacatagatcttcatattcttctaatttttttcttgtttttgaacatatgtgtatgtttataatagtgatttaaattatttcagtaacatataagatctgtctgtttctgagctcatttccataggctacagaaggaaatacagagacaaagtgtggaccagagactgaaggaaagtccatccaaagacagccctacttagggatccatgccatatacagctagcaaaccgagatgttattgtggattctgagaaatgcttgctgatagaagcctgatatggctgtctcctgagaggttcttccagagccttacaaatacagaggttaatgctagaagccaacctttggactgagtgtcagttctgatagaggagaatgagaagggactgaagtagctgaggggatttgcagccccatgcagggagcaaccgtgtcaacagaccagacccccaagaactactgggtactggaccaacaaccaaagaatacacatggaggtacccatggctctggccacgtatgtggcagtggatgggcttgttggatattagttggaggagaggcccttgggcctgagggtgtttgatgccccagtgtaggggaatgccagtgatggaagacaggcatgtgtatgtggttggaggagcaccttcatagaggtagagggagtgagagataggttaggggtttctgaaagaaagtactagaaaggaaaaaaacatttgaaatgtaaatacagaaagtacctaatatttttttactgatataatctgtaataatgagcctaccctttctttgttccattgttcttttcattttgtaaaattgttttagctgattatacttttttgtatatttatttatctatttttgtgcttttttgtttcattgattcataatttcatttagactaaaactacattttatgattatttttccaaaagcttgaaagtaaagtggtgtgatctttaatgtccatatttttcttcatatttttcatggctatatatgtccaagtcattttccaagttcagtagacaaatgacctcagtgaaat

SEQ ID NO: 309 - DNA, 1600 bp, mus musculus
actgagattctctcttccatcccttgtattctgctgctgatgctcacatctatggttcctgatttctttcctagggtttctatctccagagttatctccctttgtgttttctttattgtttctacttccatttttagatcctggattgttttgttcaattctttcaccggtttggttacgttttcctgtaactctttaaaggattttttggttttcctctttaagggcttctacctctttccctgtgttcacctgtatttctttaagggaattatttatttccttcttaaagtcttccatcatcatcatgagaagtgactttagatccatatcttgcttttctgatgtgatgatgtatccaagacttactatagtagaagtgtttggttctgatgatgccaagtaaccctggtttctgttgcttctcttcttaagcttgcctcctgccatctgattatctcaagtgtttgctgccctcaatatagcttattggagcctgtccttcctataatcctggttgattcaggactcctcagagtccagctttctctgtgatcctgtgattccgagtgctggtgaagctgagattctgggtgtgtcagagttattggcaatcaagcttcctctgagaccctgagatcctggtgtgaccaagctcctgttatcctgggatcctgaaatcctaagattctgggtgtattacagctcctggaagtggtgtcccctctggggactgtggggctgtctggtatgttcaaaaccaaggtataccagcactgatcagaagaaactggagctgctagtcaggcagagctcctgtgtccttgctcctgctgtcataggcttgtcacaattggatgggaacagacgttgtgttccactcaccagtgatcttaagatcctgggcatgctagggtgcctgaggcatggagagtcctttgggaaccttggaaccttctgctgagttcctacccaaggtggcctggagctggtgctgactggaagggcgtgcttcctgtttaagagcttctacctgtttacctatgctctcctgtatttctttaaaggagttattcatatccttcttaaagtcctctatcagcatcatgagatgtgattttaaatcaaaatcatgcttttctgatgtgttggggtatccaagacttgctttggtggaagaactgggttcttatgatacaaagttgcctttatttctgttggtaagttcttgcagttgccttttgtcatctagtaatttctggtgttagttggttgggctgtctctggccagatcttgtccctcctgtgggtctgtaagcctgtgtcagcactcctgggagaccagctcccttctggtgggacctgtgtatagagagctgtggaatagtcctagccccttggtggaaattgcaactggcctgactttgttcttgaggtatgtttcttatatgcaacaaaatgctggatcttgtttacatatccagtctattagcttatgtctttttatgggtgggttgaatccattaatattgagagttattaaagatagatgactcttggttcctgatatgcttgttttgttggttgctctatgtgcttg

SEQ ID NO: 310 - DNA, 1000 bp, mus musculus
taatccatttcctggtttctcctctacaactcccctatccctttcccctccccatgcttctatgagggtgctctaccatccacccacccacccacccacccacccactcccacctcaccatgttagcatttctctacaaatggccatcaagccttcacagaaacaagggtctctcctcctattgattccaggtaaggccatcctctgctacatatgcagctagacccatggcaacttcttcagctccttcagtcctttccctaactctgccagttgtgcttagtccaatgactggctgccagcatccacatttgtatctgccatgacctggcagagaattttcagagatagctaaatgaggcttctgtcagcaagcacttcttggcatccacaatatagtctgggtttaatgcctatatactggatagatcctcaggtcggggtagtctctgtatggtctttccttcaatctctgctcgatgctttatccctttatttcctttagacaggagcaattctgggttaaaaattttgagatcagcgggtggcaccatcctccaaacaggacatttcataacctctggatatggactgtatagtttttcctcgcatttgttgggtatttcagctaacatcatctctgttgggtgctgggagcctcttgctttcctggcaactgggactttgtggtggctacccctatttaaccatatgccattgctacacacctctgttcaattttcagacactgtatatcatgcccatctcctcctctgatcctgcctcccctttatccctccctcaattctcttcttcccaagttcctcctaccctctaactcctgtgagtgttttgttttcccttctaatagagaaggactgaataatccacacttttgtcttcctttctcttgagcttcatcaggtatgtgagttgtatttctagcaccacattgaagttcacagccttgtgtaacttcatttccagggaatacaatacc

SEQ ID NO: 311 - DNA, 1200 bp, mus musculus
tttaaatttaattttatttttaatttatattttacacaccatattcctttccctgccctccccatccaccctctaactgctccacatcccacacctcttccccacgtggatgcccccacaaccccaccccagttgacctctaaactccctggggtctccattctcttgagggttaggtgcatcatatctgaatgaacatgtatctggaagctctactgtgttttggggtctttatatcagctggtatatgctatctgtttggtagcccagtgttggagcgatctcagaggtccaaattaatttagactgctagtcttcctacagaatcgcttttctcctcagcttctttcagccttccttaattcagcaacaggggtcagctgcttctgtcctttggtagggtgcaaatatctgcacctgactccttcagctgcttgttaggtctttcagagggcagtcaggataggtcccttcttgtaagcattccatagcctcagtaatagtgtcaggccttggacctccccttgagctggatcccactttgggcctgttgctagactttttttcctcagactcctctccatttccatccctgtaattctttcaaacaggaacaattataggtcagagatgtgactgtggaatggcaaccccatccctcacttgatgtcccatcttcctgctggaggtgggctctgtgaattccctctcccttctgttcggcatttaatctaaggtccctccctttcagtcctgggagtctttcacctcccaggtctcctgtgcattctgggggtgtgttcccccaacctcctatttcctgatgttgcctgcttacattctttctgttggcccagagagcttcagtccttttcccttacctaataccagatcagggtctcctctccccacactcttccctaccctgtccactttccctcgcaggtccttttctctctccccacttgtgattgcttttttatttttattgctacttcataactgtaacctactactacaaattgtattacaaatacctgatatgcaagatagttgatatgggacctctgaaaagactcactgaactgcaaactctcagcctgctgctgattaagaaacactgctctattgactgtatcctttgccttaaaggaaattttctgtttcatgagatctgatttattaattgttgattttact

SEQ ID NO: 312 - DNA, 1400 bp, mus musculus
tttttctttaaggacttgtaactctttagcagtgttctcctgtatttctttaagtgagttattaaagtccttcttcatgtcctctaccatcatcatgagatatgcttttagatctaggtctaggttttcgggtgtgttggggtgtcctggactggacaaagtgggagtgctgggttctgatgatggtgagtggtcttggttcctgttagaaagattcctacatttacctttcgccatctggtaatctctggagttagtagttatagttgactctgtttagagattgttcttctggtgattctgttaccgtctatcagcagacctgggagacagattctctcctctgagtttcagtgctcagagcactctctgctggcaagctctcttacagggaaggtgcacagatatcttgtgtttggacctcctcctggccaaagaagaaggcccaaaacaggacctttctcagaagctgtgttgctttggcaggtcccagaagctgtcagcttctgtggtgcagactctcacctgtgcagactaaattcctaagtttggtggagtcccggaaccaagatggcacccactactcctgaggctgaggccgcctcctgagccaggaggacacctgtcctctggtccggatggtggccggctgtctgcggcccgcaaagggtgctgcctcagaggctctgtgcctccgcctgtcccagaagctgtcttgttctgtggcgcaccctctcacctgttcagactaatttcctaagttctgcggagtcccggaacccgagaaaatttttaagaagaaacaggctaacaataggtatgacaaaacaacaaaaaagaaactggctaacaaaacatgtccagtctcttttcacataagtatggaaacagcagcaagtcgtgcttattgtctctcatatttatcataccagtaaccactctgaatgttaacaaaataatagaggaataaaaaaagaaattaaggacttcttagagttcaatgaaaatgaagccacttcatacccaaacttatgggacacaatgaaagcatttctaagaggaaaactcatagctctgagtgcctccaaaaagaaactagaaagagcatacattagcagcttgacaacacacctaaaagctctagaacaaaaggaagcaaattcacccaagaggagtagacggcaggaaataatcaaactcaggggcgaaatcaaccaagtggaaacaagaagaactattcagagaatcaaccaatcgaagagctggttctttgagaaaatcaacaagatagacaaacccttagccagactcactagagggcacagggaaagcagtctaattaacaaaatcagaaatgaaaagggaaacataacaacagatcccaaagaaatccaaaatac

SEQ ID NO: 313 - DNA, 1400 bp, mus musculus
ttgggtcccatgaaaccctcaccattctatgacaagatgttagtagaccagtcttgagtaggtcatgtgcatgtaattgtttctgtgctgaatataccgccagggccaaaaaggggaagtgggcgggtaagggagtgggggtgggtgggtatgggggacttttggtatagcattggaaatgtaaatgagctaaatacctaataaaaaatggaaagaaaaaaaaaagagatagtatcacacaaaaaaaaaaaaaaaaaaaagaaaattaggttctgatggtgccaagtatccttggtttctgttgcttctgttcttttccttgcctcccgctatctgattatctgaagtgctccttgccctcgatatatcttattggagcctatccttcctgtaatcccggttgagtcagaactcttcagagtccagctttctctgtgattctgtgatcctgtgatcctgagattctgggtgtgtcagagttcttgtcagccaagcttcctctgtgaccctaagatcctggtgtaaccaaactcctgggatgatgggatcctaagatcctgggtgtgttagagtgcctagaagtgatacctcctctggggctgtggggttgtctgctgagtttgaagccaaggtataccagagcagactggaaggaactggagccactggctgctgggttcctgtgtccgtgttcctgctggtctcaggcactcctggtgatgtcagaacagatgctgtgctcgacttaccagtaatcctaatatcctgggcgtgctagggtgcctggggagtggagactcctctgggaaccattggaactctctgccgagtttgtgcccaatgtggtccggtttactggtactgacgggaaggaacctgagctacacatggcatacatttcctgacagtaggtctgatagtaacttccaaatggctaataatcattggcattggaaaatatggaataattttgttaatttaaaaaagatgatcacttatgataatgatggatgatgtgcctggcttgagtagaatgtcatttaaatgaaatttcatagcaatgaagacctacttcaacaggtcttccttgtaatctgggtcaatgcttgaagcaccttgaattcatataacatttggtacaaggtgatatgtaaataaatgcccatttgaaaattaaaaaaaaaaaagagtaaaaggacacatcctacttggaaaccagtattttgctttcaggaagcattagcataaacttttttatggaaaaatatgttttgtgccaacagacacatttactaaaagcccagtatttcagccaactccaagttggatctcaagagctatctattggggtatcctccagttaagcaccatttgcagaggaaaataaaaatagggtggaa

SEQ ID NO: 314 - DNA, 1600 bp, mus musculus
atgtggagaaagaggaacacacctccattgctggtgggattgcaaggtagtacaacaactctggaaatcaatctggcagttcctcagaaaattggacatagtactacagaaagacccagaaattcttctcctgggcatatactcagaagaaattccaacttctcataaggacacatgctccactatgttcatagcagccttatttataatagctagaagctggaaagaacccagatgtccctaactagaggaatggatacagaaaatgtggtacatttatgcaatggagtactacacatctattagaaacaataaatttatgaaattattatgcaaatggatggatttggagtttatcatcctgagtgaggtaacccaatctcaaaagaactacctgatatgtactcactgataagtggatattagcccagaatcgtagaatatccaagatacaatttgcaaatcacatgaaagtcaagaagaaagaaaaccaaaatgtgaatacgttgttccttcttagaacatggaacaaaatacccaagggaggagttacagagaaaaaattgggagccgaaatggaaggaaggaccatccagagtctgccccacccagggaaccaccccttaaacaaccaggaaacccagacattattgcatatgcaggaaagattttgctgacaggaccctgatattgctatctcttgtgaggctatgtgagtgcatgacaaatacagaagtggatgctcacaggaatccattggatggaacacaggtcccctaaagaacgagctagagaaagtgcccaaggagttaaaaggttctgcaaccctataggtggaacaaaaatatgaactaaccagtattccccagagcttgtgtctctggttgcatatgtagcagaggatggccaaatcggccatcaacgggatgagagtcttgtgaagattatatgtcccagtacagggcaatgccagggccaagaagtgggagtgggtgggttggggagcaagatggctagggggggtaggaatttcagatggggaaactaggaaaggggttagcgtttgaaatgtaactgaagaaaatatctaataagaaataatatagctggccaggcatggtggtacacacctttaatcccagcatttgggaggcagaggcaggcagatttctgaattggaagccagcctggtttacagagtgatttcaaggacagccagggctatacagagaaaccctgtctcgaaaacaaaacaaaacaacaataacaacaacaacaaaatattagagctaagattaaaaaaagaaaaaaagaatgaatcactgaccactgtccaaattttggctctgtgtatatgcacctatttcagtcagctgctaggtagagcctctcagaggacagtaatgctaggctcctgtctgcccccataacagtgtatcaatactaatttcaggtatttgttgcttccatatgggatgcgtttctagtttcatgacaagcaaaataatgaaatatactgcttaaataatactgttaaaatattcctgaaaatgtatgtgggttagaaacataaaagatagaaaagtagaatgcgaagata

SEQ ID NO: 315 - DNA, 1200 bp, mus musculus
gtgtatatatgtatggtggatgtgatagtgtgtgtgtgtgtgctgtgtggtctcagtcttgctttggtgtgcatgtggatgtcagaggacaacttgtgggaactgaccctctctgggacctaagaattggactgaggttcttaggcatggcaacaatgccattaccttctgagccatcttgctggccctgtcatctccctagggtaccaggggaatgttaggcagatccctgcaaaggccccgagataacctggctcccaaggccattatgctcgcacagctcatttaagtgctggaaactgctccgctcaggaatggaatgttccagcaagcccatttgattttcaaatcacttccctcagagctgtagtctcccccagagcaaaccctggccagggtttcctcaaatccaggggctaagctggctggctgctactgaagtgggggaagggcaccctagcctgtgctccctaccctcatcctagccccagttattatcccagttataaaaacctggccccatagagagagcagaacgccctgctccactgtgacagatgccctgggtgcttgtgtggtctcacttgcatttcttactctaatcgtctccctcgggctttccgtacttgtggaggaggaaacttgggaattcccccctcattcctgaattgttcgcctggaacctccctttaggacaaggccaacagagggccccaggacagttgggtgcaacccagttctcaagccttttaagctcgtaggaatgttcccctctgccatctgaggcccaacagggaccacagagcagtcctacctctgagctcagagggcaggtctcagcatcaggagatgagatgtgcacgcgtttatgcaagctaagcaagggacaggtttgtcccttccctcaaacctgtccacgagcagttgatccacctggtttagggtccctggccaaactcttccttttccgacaagatgcatatgtgtgtatgttcccacggagcccaggctaaccttgaacttgctgtgtacttgatgatgaccttgaaaccctcctgcccccacctgctgtgtactaggactgcaggtgtgcagcatcacacttggtttaaacaatgctgggattgaacctagggccacatacatgctaggcagcactctaccacgggaactctatactcagatcacagggtttttgtt

SEQ ID NO: 316 - DNA, 1000 bp, mus musculus
ggaaagaaagagagagagagagagagagaggagagggagggagggagggaggggaggggaggggaggggaggggaggggagggaagggaagggaagggaagggaagggaagggaagggaagggaagggaagggaagggaagggaaggaagaaagaccaacagacatttattgacagatgcagacctgtgtgtgcagagggctccctcacaacatacacccatgagtggacacatgggatacctgcacactcactaggtgttcatggagctatgcacagtaggagaggagggcacatgtagggagaaaccttgatgtgaagtcaatgtcccccaccccacagccttagagaccagcctcaaggcctatgctgcccccaggaccccaggcctttgcctgaactgtctctgtgtctccccaaagctcaattgtcctctccttgaggcacccagagcctcctcagaattcccctggtcaggaatgcaccagctaccctgccttaatggtgtacccccagatgctgggacacttgatcatcagcaccacacagtcacttaaggacccaagccaatagaagctccaccaccagtcttgccagctgagccacccttagtggccatggtagggaagagggacaccggcgggtcaagcctcacactaatgggaagtgagtgaattgtacctctgtcttgttgactggaattagtcacaaggtgccacctcctctcaggggccctgggaagttcaatgctccatgcttgctgtcctctgatgctgcccaaggtgaggagagaaagcaggactgggaagaaagtgcttcatgtacattcatgaaacccagacctcgtgttaaaaaatgggtgccatgacatgtgctcttgtcccagtgctggggaggtgcagatagctgacctgagattctggacagctcacagagccgacttgctgagttccaggtaagagactccgtttcaggggggggggggggaaggaaaactaaag

SEQ ID NO: 317 - DNA, 1000 bp, mus musculus
acctgctcctgcagccatgccttcaccaataacagacggtatccccaggaaccctgttcctgtgagttgctttcatcaaggtttaatatcacagcaaccggaaagtgcccaccaagacaacaattccttattttatattttctttttgtgacactgggcttagctacaaagcccaggctggcctctaattcatgatcctcctgcctcagcctccggagtgttgggattacaggtatacatgatcacacctgcttagaatgtacatgacgaaagagtgaattttggggttagcaagaaagcttagtgagtgtctccaagcgtgaaaagttggcattcgaatccaggacccacgtgcagtccatgagagagagaactgacttgtccctgttgtcgtctgacctccagtgtggtgcaacatgcattcacacacacaaacacacatacacagatacacagacacgcaccccaaaattaataaagagaaaaggtttatttttgactgatagcttcagaacttcactccatggtcctcagggcctgaggtgaggcagaggaggtgaggtggtgcgaggaacagcagaaacggtttctcacgtcccggcaaccaagaagcagaggaaggccggaagggagtgggactctaatatctcttttaaggacacacttccggtgacctaacctctcttgctgagctcaacttcccaaggtgctgtaggctgagggtctgttctttaacattcaaccctttcagagacactcaagaccgggtgctggggagtagctcagttggttgagtgcacacctctttcctgtgaaggcccaagccccatcctcagagcctcataaactaggcaaggtagcttgcacctataatcccagcaaggggaggcatgggaagattagaagttcaaggtcatcctaggctacatagtgcgttccaggccagcctgagctacaggagattctatctttaaaaaaaaaatgttggagttggagagac

SEQ ID NO: 318 - DNA, 1200 bp, mus musculus
acatcttctgggaagtgttttctgagagcacagaagctgtgttccagagatcaaggttgtaccttgtgctgtggctggacttaataatgtgaaagagttacccaggtggtactggttctgaaggcatgaaggggttatgcagagcagctgagcctcagcactatgaggggccatggaaggccattggtgaaggtgcagcctcagttgcaactgatggcccaggacagaaggggtcatgcaaaggagttgaggcttggcaccatgaagagagcctatgagaggctgttggtgaagcctagtttcagcagaagacagcagtgtttggagatgccagtaccatgagatgactaccaagaacagcagcagcagtgaagtacaggcagctggagcctagaagacaagccgtgtactacaaaggacagggctggagaagtgacccaagcccttggaggagcctagaagatcctgagttggatcccagacattggacagttggagtttaatttttgcttttgattgtgactgtgccctgatatttttccctcttgaaggaagaaagtattttagtggagcccacagttaagagactttgaattttcaaagatattgggcattttaatgggactgaactttaatatacaagattgtgggacttttaaagttacttaagatcttggggatgaataagaactaagggttgaggcttactagtgatgtgtttgtatgtcaagttgcaaggggtcaattgtactatgtcaacttgacacaggctggagttaccacagagaaaggagcttcagttggggaagtgcctccatgagatccaactgtaaggcattttctcaattagtgatcaagtggggaggtccccttatgggtggtaccatctctgggctggtacaggctgagcaagccaggagaagcaagccagtaaagaacatctctccatggcctctgcatcagctcctgcttcctgacctacttgagttccagtcctgacttccttggtgatgaacagcagtatgaaagtgtaagctgaataaaccctttcctccccaatttgcttcatggtcatgatgttttgtcctggaatagaaaccctgactaagacaaaagggtcacaacagacaccaaggaaatccagagaaccataaggacatacttcaaaaaactgtactccagcaaactgaaaaacctaaa

SEQ ID NO: 319 - DNA, 1200 bp, mus musculus
aagagacatacctaccagacagtgtggatcttgcttaaacacagatcctaataaacctatgtgatgtaggcacctttggaatatttgagtgcctgtgactataggctggctattagacactcgtaaggaacgtatgctgcttgaacacaggtatgagggacttcacacatgaattatgtaagtgagaaggcatctttgtgttgagaggcacatgctgaaaccgttcggcagagccagggtggttgggaatttttccccacaaaaaataaaaatagacgaagcaagagcggcacccgttgttgcatctaagtgatgggtgttgggagtttactgtgctgtctgcatgagtcaggatctaccccagaggagaaaccgccgggagatatttaaagcacacagcctaggaggcagaattctggttacacagtggatggagaccggaagccaaacaaagaactcagagttgagattgtcactgctggcctgggactgagggcagagccagaaggtgctgccctggagccctgccctcgagccaggggtggggtcactgagtgggtacacaagtaggcattctgggtgtgcagtacctcagtgacagtggggatactacctatggtgtctgacttccatttttgctggtattgcttctcaggccccattccacagcctgcttaatgtgtggtgctgggactccaacccagggcttttcgaatgttaaacaggcattgtacccactaagccagacctccaccccatgcatgcctcttagagctctcactcataaagcactttgcccatggcatcccattgcctgaggtcaccatggagactccttacatctcgtggagagccttgaacagtgcagctcttggggcagaggcactaccttcagcactgtttgacagcagccagcacttttagatcagtcagtcctctctggcaaataaagcaagggctgtactgtgtcaatatggcctgtcagtgagaacccagagtgagtcaacggctgttgcccagagccatcagctctgaaagcctggggagatttggcctcatttcccacagtggtcctgctggtgacctaccccaaatccattttctcagtgttcctatgaataaaacagagactttgttcaggtcgacagtgtacctacccggcagctaaaaaaggcttgcttccttggtactcttgaagtt

SEQ ID NO: 320 - DNA, 1000 bp, mus musculus
gcatgtgggccaacatggtgctggaggaggagcttgagagctctacatctggatctgcaggcatcaggaagagagagactgaccctggcttgagcatttgaaacctcaaagcctacccccagagacagtttctctaacaaggtcacatccatcccaacaaaagcacacctcataatagtgtcagtccctggtgaccacgcgttcaaatctatgagcctgtggggactttcctattcaaattaccacagtacccgagaaacagcatgtgagattgttctctgacctctacccatacatacaacatacacgcaccagtgcattcacacatacatgaacacaaacaggacattcgagccagtggggagcagttcagtggaagattgttgtcctcggatataccggattctaagatatactgtgccccatcatgcaaaagagatttagaatatttgatcacaagatcccttatgccctttgccagcaccactctttgcttagcctggtggcactatgtggggctgggaattcatggagcatgtctgaccctggacatctagtctcgaaagagtggtaggagggagtgggaccactcccctgccccaggcctgcgccctccacctttgtgcacaccagaggaggtcctgtagtcgcagccaggttaaacttcctcttcccttataaggtcacatccagcagcccctggaattcctcctcatgcaaatgaggcatccaaggtgccccgaccccagccaataatggaaacataccctccaacccccctgctcaccatcccaaaggtttaaatagccttggtttccccagttaaatgagctgtctcactgaagctgcctctcttgtgctctcttgccgcctgaggtctccatcgcccgcccggttgttccggtttcccttcccacctctggatctgccagttgtggatctgccagttgtggttgcaggaatcacactgtgaagtgaaggggagtgggtgagaatgaca

SEQ ID NO: 321 - DNA, 1000 bp, mus musculus
cgaaggctacgaggtgctcaagttcgacgacgtggtcaccaatcttggcaatcactacgaccccactacaggcaagttcagctgccaggtgcggggcatctacttcttcacgtaccacattctcatgcgtggcggcgacggaaccagcatgtgggcggatctctgcaagaacgggcaggtcagtgactttctcccacacacccctccctacctttcccggcccaacagagtccgcagaccgttcattacaggcgcccggaaccccagggaactatatactgtttcctgccactctccagcgccccagcaaactctggggtcgggtgggcgctggaccacatgcatcgcccagcttccctgcgtactatgctgtcctttgcataaatgtactgggcgtttgagactggaccccgggtgcacagtgaccctggcacctaaataggtctccagtccccaatcgattgagtcatggcctgaagtggctgggctcctagaaaaacccagttgtctttatcactgtgattgcacgtgggccatccctttccctccagtttattcatcttggccttgaccccctaggacctttacatactgggcaagtaaaccccctttccttgactctgctaccaagagaacttggagccgaggagggagtgtttacactgaagtagcaggcagggagcctgcaaagggatgggcgagggaggccaggcttggactcaggaagaggtgcagggtcccacccgctcgctcttctggttcgccccgcaggtgcgagccagcgccatagcccaggacgcggaccagaattacgactacgccagcaacagcgtggtactgcacctggattcaggcgatgaagtctacgtgaagctggacggcgggaaggctcacggcggcaacaataacaagtacagcacgttctcgggcttcctcctgtatccggattaggggcctagagggcgcgcgcgaggccgggtggcttcaggccaccccatcc

SEQ ID NO: 322 - DNA, 1000 bp, mus musculus
ccggccaggaatggtggcctcctgagcctgctccccattttgtgaggttgactaagttgatcttctgtgaatgttttgtgcaggcagttgcagttgttgtgagatcatgagttatcagtcttgtcatgtccagaagacacggcttcacagcagtgctgtgtctcagacaatgtttctcccattcctccatggcgctccctgatccttgggcaagggtatgtaatatagatttcctacttgtggctgagtgctctgctgtcagccttgtctccgagtgttctacatatcatggttctacaatgggggaccccaaagtgtcaccctggtagactacaaacccctgctggaaaactcagagcagatgcccaagctcccagctcttagctttggacctttcagcaagcctcagacacagcattgctcatgacagctacttcctgtcagactgaagtcagctacagcctacatcctccccctcttcaccactacacctgagtatgctttgtttgcttttctgtatttgtgtcacattttgtgactgataaaaaaattccagcatacagtcccagactcagttcatcagccactcaaaccagggtgttactttctattgctttacttaaccatgtataagacagggaagtaagggggcataaaatagcaacttttggttgaacttggggttcagtctttaagataagagtctgctgactccatgtcttacaataaatctgctttgtctgcattagtctgggttctagtaagtgctggtatgcagatgaacaagcagtattaggcaaactactaacttgtacacagttgtagttgccataaatggaagaacagtggatggaacccaattcaacatgtgatatacatgtcccattatcaagctagtaagcccaggaaagaagctcagttggcaaaatgcttgctgactggtgtgaggacttgagtcctggccacagaacatatagaggaaaaaaaatcaggcatggtg

SEQ ID NO: 323 - DNA, 1000 bp, mus musculus
tttgttcaattccatcacctgttttgttgtgttttcctgtaattctttaagggatttttgtgcttcctctttaaggatttctacctatttagcagtgttctcctgtattctttaagtgagttatcagtgccctttaaagtcctctaccagcatcatgagttatgattttaaatccaaatcttgctttttgggtgtgttcgggtatctaggactccctgtagtgggcatactgggttctgataatgcccagtggtcttgttttctgttagtaagattcttatgtttgcctttcaccatctggtaatctctgctgttaggtgttctggctgttgttcctgtgattctttagcctctgtcagctctcctgggagtccaactctttcctgaatcccagtggtcagagcactctctgcaggcaagctttccttttgcatggaagatatacagaagtctgtagctcagatccacctcctgagtcctggggtcagagccttccctggaggccgactctcctctggtggggaaggtgcccatgggtctgggtctcagatctgcctcctggctgaggatgaaggcctgaagggaccctgtccaagaaactttgttgcttctgtcattcatgtgctctcctgcttagactggtctcagtgatcccaagatcctgggtgtactagggcctgccgagttcatgcccaagatggtgcggggcttgtgcctactggaatgaaccccagctgctggtcaggcaggttttctttgtccctgttcctgctggcacaagactctccgggattttttggaactgatgtggcattccactcaccagtgatcccaagatactggatgtgctagggcgcactgaatttgtgcccaagatggcctagatggttcttgaggtagctgcattcccacttttctgaaaactgccaaatttaattcctaagtggttatacaagtttgcactcttaccaaaaatggaggaatgttccactaggtctgt

SEQ ID NO: 324 - DNA, 1400 bp, mus musculus
aaaaaaaaagaatccggtaacctcattgtaccttgctggtgtgtcacctaacttctattttcttctgtataaaaattctgatgctcaatttgacaaattacattcagatccacactcccttgtgtcagtttgtcacccctccttcttgccaactctttgccctcctgcaacaagaaacctgttccatgcagataggaaacccaaaagaggttagtctgtggcagaatttcatctaaggtccctccctttgagtcatgggagtctcttacctcccaggtcttggtctctgatgctatctggaaggtcccctcaatctcctatctcctgagattgctggtttccaatttttctgctggccctcaggacttcaaccatttttctctcacccaataccagatcaggttcccctcttcccacactgtgccctttccagtttccctcacaggtacttacttctctccccacttgtgattgctttcttctctctcccatgtagaagtgaggcgtcctcacttgggcacttcagcttgttgagctttttgaattctgtgggctaaatcttgggtattggacactttatttacttattttttggctaatatccacttattagtgagtacataccatgcatgccatttgaatccgagttacctcactcaggatgattttttttccatccatttgcctgcaaaactcaggatgtcctcatccttaatagctgagtagtattccattgtgtaagtgaaccacattttctgtattcattcttccattgtgggacatctgggttgtttccaggtcctggctgtcacaaataaggccagtatgaacacagtggaacatgtacccctgtggtgtggtggggcatttttgggtatactcacaagagtgatgtagctgcatcttcaggtagatctatttctaattttctgaggaacctccagactgatttccagagtggttgtaccaattttcaatcctaccagcaatggagtgttcctctttctccatatcctctccaacatgtgctgtcacatgaggatttgatcttaatcattccgattggtgtaaggtggaatctcagggtcgttttgatttgcatttctctgatcacttattttgaacatttcttaggcgcttctcaaacattcaagattcctcagttttgaattctctgtttagttctatacccaatttcttgattgggttgtttgattttttggtgattaacttcttgagttctttatatattttggatattaggcctctatcagatgtggggttagtgaagatattatttcccaatctgtaggttgctggtttgtcttattcactatgtcctttgccttacagaaacttttcagttttatgaggtcacgtttatcaattcttgaacttag

SEQ ID NO: 325 - DNA, 1000 bp, mus musculus
acttttcctaaatttgcattctgtttctccaatcttctgtatcccacttaattctagccacctgtctgcacagacggcgacttgctcacttctatgcaagagccacagacctggacccgacagatcagcccagttaaactgttgctgcctttttacttctctgggttgaagggaggttaaggaaacagagaaaacagatgttatttttaggcatttgatttctgtctctttcctctcctcctgctttagaaaacatgatatggtgcacattcgcctgaacattatgtatccgcatcacaaagacaacccctccccctgcatatcttctaaaacatggtatttgctatccaaatctttaggtagagaagaggtccaggctgcatgtcctgccttgcttatcctgtatgctaacttcctcatgttctccctgggacacagcaggaagcttcgataaaataggaggtaactgtctctgcagactcagtatgatgtcagaactatacaaaggggctttgttttaggccacctgttctgacagaacaaagatgtagcaagctagtgcactggatgccttgatctcaatgaactaattgctaaatgttttccatggacctaggaaatacaagaagaaagagtcacatggcaagctaatctggaagaaaataaggctggggcacttttgtttgggagtgagtggcatttgtcaataccaggagaagacatctgcctataaatttgcatttactttattttattatcacaatactgatcttcattggctggcagagaatctcagtgtacatcctgcctctgccttcccaaagtaggattacaagtgtgtttctggctttttgtttgaatgtaggggatttgaacttaaaatctcaagcttgcacaccaagtccttattgactaaattatcctttatctactgaaaaagaacatccaacataattgaaactttctggtatcatatgattaaaataaaggtagaaatgtt

SEQ ID NO: 326 - DNA, 1200 bp, mus musculus
gatcacctttaccaacatttctaatctaactaactgaaagcaaaataaaacaaaagacaataaaacatacttgaaaaaatgtagcaaaaatgctctccaagagaccaaacattaggtgtgaaggacagtaattctgagggagaaagcgggtttaatgaaccttgagattgcttgcacttactgactagagggacacagggaatagtgctcagtgaacattctagacataaccccgagatcacactcccttgaagtcattgaaggtgcagggtaaatgactttgtggagcacatagtggaaaggtgagaggtccatgggcagaagacttcagcgattttcacataaagaaactctcagagggttagggagggggctcaggggcttgttgagcaaacatgaggacctgagtttagatccttagcactcctgtacataagtaaatgccaggcgatgtgagcatgggttggttctcccactgctgaaaatgagcatcagagacagaagcatcacggaggtcaggtggacaatcagtttggctgaatctgtgagctacaagttcagtgagaaaccatcttaaaaactaaggtgtatctgtcttccatgtgtgtacatatggttgagcacacacacacacaaaagaaagaatgaagaaaaaaataactggagacaagaacagctctgcttctattacacaacactggctgatgtactcagaatactgtgcctcaacagtgagacaaaagcagacttacacagttgtctgagtaacaaaaggcagaggacaagctctttccaaatacctttagcagcatcttagaaggaattttaatgctactcatatgagtacaataataggcagtgtccagattttgtggtgtttactaaaacctttccgggaataaaaagcaagcttatttataaagcataatatggaaaaatcagttggaatatctccattaataccacgacaaaagtatagtgtacacagctatggaagaaaagagaaaaataaagtactgttggtattaacagcataattccaggacagagcagataagcacctgtgaaagagatatcaaatctgtataaagaggaagcacacagagaaaaagactggaaaggattagacagagaacagaactgtgggatactccacctgcaagcagctatgaatacctgtgtattttgaatccctaaagg

SEQ ID NO: 327 - DNA, 1000 bp, mus musculus
tgagccatcagataatacatttctgttccagggtgaggcccaagctgctacccttagccctctctgtgtagggggacctttgattgtggagtgcaagaggcgtaaatataggtgtgagattaccagtggtgggtggtgtgtgcgagggcccatcagtttgggttgattgtggggctcggcatattttcactgttcccaactccccattgatcgcagcatctgttcattcccgagtattgctgggctgtcggatacctgcagtcttggtcagctagctctcttattcagtcttgattccctttctcaaaccttccacacactgcctgctgttctttcctccagcagagcctcagttacacacgagctctggaaggcgactcgtcctctcagggctgctaagccctccagtgcctgcagtactctccaccttcctgtgttctgggctccgcccatctgcagctcttccttcttgaacttgctctgtgttcttctgtcttaacagctatggcactgagccttgatcttgcatctctttccagctactccctggcctcacacccctctcatcctaactgcttcaaaggacagccctacaatgactgtttctctgtttcttctcatctcctcttggaaatctactaccgcctgacctctgccttccctgagccaatgagatagttcccctaagtggccttcctggaatttcaggcttagatgcttgatccttcacagccttcatgttgccatgaagcgtcaaccacacccccacccgccatgcaccccaacttctccttccctggttccccttcctctgtccatccctcaccagctaacactcccagtggtctggtttcaaccctcttctcttctaacctccattgtccttccttgggcatatccctaccctgtgtattctcttcctggcaaggataaagatactctaaagggaaggacagatggcttggtgattaggaaccccagctgctcttgcagaaaactg

SEQ ID NO: 328 - DNA, 1000 bp, mus musculus
cttctccagtcaccatagcccattctctggtcacgcccactagggactcagcaactacccaggattcttttgatgcgagaaagtcagcgacttacagcttgtggttgaatcctccttgctgcccaattttgtaaagaaaacttaggagaatacgagtgtcccagtcactggaggagacggatgaggctatatccaaggacaaaccttcaggccccagcctagtccattgttagcttaacacaaaatatgtatgtgacagaaatattatccccatgtcagcaacctttgcagtacaggttatttgttctggaattcttgatttgcacatgacagtttttcctgtctttctatcttgcttcggttttttaaggaataaggaacagaaagcagaatgaagagagacttctgaactccttttgggacttggtcattcaaatgtgttgctggaacgtccccagcagcctgtgtggaacagtggggcattcatccttggggtgcaggagtgtgggctcctaccttccagccacacctgcttacctcaggccagcacagtttgggctgggcctgtctgggctcatagctgctgtcattcacgccagtcaatgctgttcttgtttctgaggtgacccaatctttctcgggctgcttgacccacattcccaaccctggtggttctctcttacttaaggccagacctgggccacttccgtgctctcattttgataaattaagaacagtgaaatcctctctgcagtccagctacaccttagtgaccctgtctcgtcctcctgcctcactggacactggcgtactttactccagagacattcctagttcagactaacacagccgtgcacctctcctagctcactcccacccacagaccactttcctggtctctcttggcctctaggttctgtcgcctgttatgtctggattctgctggcttctgtctgctgtgctttgttaaagtcccaaactgttcatttgactggctctc

SEQ ID NO: 329 - DNA, 1800 bp, mus musculus
tcttctgatttcaattaatataacctagaaactccctcatatatatgccctgagaattgtcttcttgatgttcttgatcatgctggtggttaatattagtcatcacagacacacaaggctgtctgtcctctggatgtgggccagcagatctgcctaatggcttttgcggtgttagaggcctgaacatggagtgctgagcacttgagtccctggcccggctgttctttatcccttcccttgctcttgttcatatctggtggattagggagctcagctctgcttccctaagatagggcagagttttatgcttgcacataatctcttttctgagaatattgttcaaaaaataggccatctattgtaaaggaaattagctagtaattaaattgaactggaagttacagtattggtgctttcatttggagacagtatgctctcctaattactttattgctgcagttaccctgactgagaattattattatttgtgtgtaggggagggtaatggatagtggtgggaaaggttatatttaataagttagataatgaattctggactcaaaattttttaattggcaaagggccttcttcaaggggaaacttttctttgtgccctcttctaggtctgtctgacagaagtcgccttagtttcattccaaagccattctgctttgtttttgccacctcgtgggactctttttggcaaagaacaacgtttctgcgtagataagaacagtgtagaagaaaacagctgacttggctgctcttcattagtgcagccatggtcacggctgggtgaggcacagtggtctcctggacatactccttcctaagtctgctcctccctccagggccttgagaggggagcagtcagaatacaggctagaccactccctggttcagcagcctgttccctatcagccttgcacactgtgactgggtgagaggagagctgaggtcaggaaagttgggaagggtgaagccccaatagagtttagatttaccctgcccacaggagatgctaagggaccagacaaccttggaggcaacaatgacctggatcctccatgtgtgtgttccttggctgtctcacatttctcttggctttatgatctgtttaggtaacctagtcctgaggaacaagaacaccatggcttctccactttgatccccattgtgtcagtatctttccattaagaatggacatttctctagatacttagggcctctagataaaccagctatattagctagtcttctcatcattgtggagcaccctaatggcacaggagttccttctgcatcatagctgaggggaagcagactgccatggtggggaacacaatggcagcgggaacaggaggcagctgctcacattgcttcacaatcaggaagcagaaaatgaacaagaaatggggccaggctaaaaaaaccttaaggcctatcttcagtgatctgcttccttcactgagactccacctcctaaagatgccataaccttcctaaacagtgcccccagctggggaccagatattcaagcacatgaagctggggtggggacatttcacatccaagctataacacttggctcaggagtggcactattaggaggtgtggccttgtgagaggaagtgtgtcactgtggggatgggctttgatacccccctcctagctgcctgtaagacaatcttctcctgtttgccttcagaacaagatctagacctctcagctccttcagctccatgcctgcctggatactgccatgcttcctgccataatgataatggactgcacctcaga

SEQ ID NO: 330 - DNA, 1000 bp, mus musculus
gctaagaatgagtgccatacagcagcccagcagcccctgactgtgtgaggggagtctggctaatgaggccaagtccattccctgcagctgaaagccaccctccacagctcaccacagtctatgctgtcagagaggaccggtaaaggcgataggtttgtgccttagtcggaaaccatcatcacaggcataaaaatagctccgagctggtgttctgaagctgtgaggtcagggacatagcagggtaaggagagaaacccttaaaatagacttgcaaaaagcgctttgaaagcccttgtggagaatacgagtgggagccagtagttcctatggctctcatgccaacctagcttagccccttgcctggaagctcgtggagaggttcatccatcacttgttcctgcagggagctactggagagtatcgccaaagaacacataggcactacagaaaagaaagcacagccaagcctgcccatgcccataggagcctgctgaaggaatgctcttatttcccttcttctcaagcaggagacacatattttagtggactactgtgaccgaaggatgaggagtgtctttggcatggtgtgtttaatttgtctttttattttcacaaaggaaaagtaattggaacatgttaagaaacattgatactgactttccctgtgaatcaaaactgtgaaaacgaaaagggaccaaggagaaaggtgttggatcttaattagtcagctctgcaaagggaaacaaggggaggatgtctgcgacatgctcatctctctttgtatttctgatccaccctctttcagggccctgctgctgcagctctctctgtggctcttacccagttctcagcctctgttcctggcagagccacaagtggggggaggagagatagaaacttaagcttgagttggtcaaataacgcttagggtattagttgttggggactttgactcttaatattagttgagaaataactttttacgggctagagagatgcc

SEQ ID NO: 331 - DNA, 1000 bp, mus musculus
ttccagcttggtcttctatctcagatgatccaagaagattttcctaatggagctccccttataatgcacccatttccctctgctactgcttgtacatcagagttaacggtccttcccacaccttcctgcagctgtctgaagcatccagtttaacacttaccatgtagaatagtgatggtgaacacttgctgcctcccagcagggaattcttaagagaacattagctctgagcactgtgcctggctgttagttgttcagtagacaattcagttagactgaatgaccagggtaagttaaatgctatgtgtggcagaattttgtgcaggacagtagggaattcagaagacctgggaatattccccatctcatgtgaaagttgtagccatggaaatttttaaacacagtctgctaggatagcccagtcttatctaccttgacaaaaatgtctggagtttaagaacaacccagacaaagagcatatgattttggaacacctcaagtaaaaagcatatgatcaacaaatgctagtgtagagaaacataagcaagaaaactgtgaattcacaagaataaccctggagagctcagattctctgtagcttttaaggcccagtcccagaatttggctattttccttgagatgaaggagacaccaaaagattttcattgtaaaacttagatgatcagaattataccccaaggacaatgtcacttgggaagcatcgaggatcctggaggcaagaagctaagttgcaggactcacagacactgagctgataagtgacaaacaggagtttgaaggtcagtggtagagtggcctgtggttctgagcagcatgatgggaggaaggtgctcctggcagatatgcataatcagtcaaggctgccacttgactgtccagctgtcagctctgccgctggcctggctggggctacagcagtcccgcttgtgtctccccagaatcattgatggaattacgtgagacatctccccacgaccag

SEQ ID NO: 332 - DNA, 1000 bp, mus musculus
ttaaactgagacaaagtttccaacttcaacctgcctccatttcatgccaaatttataatttttgtagtatgtgtgttgtgaaatacttagacttctctttccaccagagttgaagaatgatggagagccttgttttcctatctcaggtccctggggaaggtgtgcaggtgactgcggaccaggcggagcccaaagtcgtgctgtatggtgctttcacatagaagggtggacgagtcccatgtcgaactgtgatgagagcagccaacctccaaaggaaaggagctgtttccgcgtgtgtgactggcacagtgacctgttccagtgggaggtttccgactggcatcgctgccttctggttcctggggcccaaggtgagcccaggcctcgggctgtggaatgtgtgactgcacagcacggtctacagcaccggacagtgcgctgtcttcagaagctcaatagaaccatggtgtccaatgagatctgtgaacactttgctcctcagccccccacagagcaagcctgcctcattccttgccccagggactgcgtggtatctgagttctccccatggtccacctgccccgaaggatgtgggaagaaactgcagcatagaactcgtgtggccatcgcgccccctctgtatggaggtctgcagtgtccaaatctcacggagtccagagcctgcgaggctccagtttcctgtcctcttgggaaagaagaatattccttcagcctaaaggtgggaccatggagcaaatgtagactccctcaccttaaggaagtcgacctcagcggaagaaatatccaggattttagctctgattcaaacgagcaagtcaccctaacacatcagagttacaaagcacaccaccactcccagcctggggatgtagtgatagggtttcaaaccaggcaggtgtggtgtaccagaagtgatggaagaaacgccctgttaaggtaggatgtcctccctgcttgtctttcgttaatgtaggatatc

SEQ ID NO: 333 - DNA, 1400 bp, mus musculus
attagatccaggcatggaggtacacacctttaatcacatgctgatctctgcattcaagatcaatctacagagcaagaaccagaatagccaagcttaggcagtgaaggatttagaaaacataatgctagtgataatgtaatagtacaaggggttcctgtaagcagcagaactcagcagcttcagccatgtggctctggctctagagttaagaatggaaggaactactggaaaaattgatgctggttagctggaggtaaggaattagcagtgattaagaagagaccagcatcaatgaggtgaaatcttctggaaattgttttctgggagcacaaagaagctgtgttccagagataaccaaggttgtacctcatgctgtggctggacttggtaatgtgtaagagtcactcagatggtactgcttgtgaaggaatgaagtgatcatggagagaagctgaagcttagcactgtgagagtccagggaaggccattggagaaagtgaagcctcagctgtagttgatggcccagggctgaaggggtcatgcaaaggatttgaggcttggcaccctgaagagagcctctgagaggctattggtgaagcctagttggagtggaacaccccagtgtattggagatgtcagtaccatgggatgatcacaaagaacagcagccgtagtggagtggatcaacctgagcttagagtgctacagagggcagagctgtaaaagtgattccagtccttaggaggagtccaaaagttcaagtggaatcccagacactgaaacaagaagctgtaacattgaaattgccttggagactcaaagatgttaaagatgccagagccatgagatacatgctgaggaaagctgctaacaggaagtggaaccagcccaggagaaagcagtttgttgcagtcaacaaagatgattaaggagtggagatctgaagaccgctttgacatcagccatggagatgcagagtttggagtttgcccagctgatttcctcccttgctttggagattacagttaattaagttgaatgaatctcagaagagaccttgaactttggacttttatcattgttgctactgctatagactatgagaactttgaaagttggactaaggtattctgcacaggccccagacatccggccactttcccggccagaggataggggtttgcccgacccaggagcacattgctttagcatcagcagcagacatcttggttccaggaccccgccaaaagtattctgcacaggtgagagtgtagaatagagaagctaacagcttctgggacaggccaaagcaactcagccgcgggacaggcctaagcaactcagctgtgggacaggtcctgttttgggccttcgtcttcggccaggagagaggtcctaac

SEQ ID NO: 334 - DNA, 1400 bp, mus musculus
gcttacatatattgaatcatccttgtacctctgagattatgcaaacttgaacatggaaaataatctttatatattcttggattaagtttgctagtatggtagtcaattttgtatttaagctcataaaggatactgtattggtctttaattttctttccttgtgtctttgtgtggttttgttattagggtaactgcttcttcagttttgattttgtcaaataatttgaagagtattggtgttaattcttcattgaaggtctggtagaattctgcactgaattcttctggtcctgggctttttgatttaatttggattttggaattttattagtttatttctaatcagtgtgtctatttcactgagggataggagtcaatttaaattccttatttgatatgaatccatgaatcttttttaaaattagatattttctttatttacatttcaaatgttatccccattcctggtttcccctgaaaaaaaaaaaccctatcccacatcccttctccccctgcttctgtgagggtgttcccccacccacccagccaccctctcccacttccctgtcctggcattcccctacactggggcatcgagctttcacaggaccaaggccctctcctcccactgatgtccaacaaggccatcctctgctacatatgcagttggagccatgggtccctctgtgtgtactctttgattggtagtttagtccctgagagctcggggggagggggaggcatgtgtccatttggctgatattattgttcctcttatggggctgcaaaccccttcagcaccttctgtcctttttctaactcctctactggggaccccatgctcagttcaatggttgactgtgagcatccacctctgtaggtgtcaaactctgatagagcctctcaggagacagctagctatatcaggttcctatcagcaagcacttgtttgcatccataatggtgtctgtgtttggtaactgtacatgggatggaatccatgtgtcttatacatgaagaaacttggtgttctgggatttccaatttggtggggtacatatattcaaagtatattattttaattatctaatttcctcggtgtctgttgtaatatcctccttttcagctctgattttattaacatgagtattctctcttcacctttcaattaatttagctaagggtttgtcaaatttgttgattttctcaagtaagtcagccttcatttcagattcttttagttttgtttgtttgtttgcatctatttcgttgatctcttttattttagagctttcaggtgtgtcattaagttactaatatgagatctctccagtttttaaaatgtaggcacttagtgctatgaagttgcttctcagaactgccttcattataacttatag

SEQ ID NO: 335 - DNA, 1200 bp, mus musculus
taaaagctagccaagctgggaaatttactaatttatagcaattaagtagttaattagaagtctgtaattatctttgccacttcattaagaactctgtgcagatttcctaatgtaacttgttggaaaccttacttatcttggttattggagttttatgaagaaacagctttcagtgtgttaaaatgactgcctcattaaaacgttgctcctctgtccatggaagaacacatcaattcctaagagtgtaatagttctgggcttgctggtgaagtatgactgaaggccagaggatcgaccctagtcttaatcgctatggcagagaaggatttcctgtgatgctcagctgtcatccagctctgatgctagcatccattcttactgctttgtgcattgatttttattgatcaacttatgcatacatgctatgctaatgtgattgtttggtttgtgtcttagggttttactgctgtgaacagacaccatgaccaagtcaactcttataaaggacaacatttaattcaggttgacttacaggttcagagattcagtcaattatcatcaaggccagagcatggcagcatccaggaaggcatggtgcaggaggagctgagagttcagcgtattcatctgaaggttgctagcagaagactggcttccaggcagttaggatgagggtcttaaagcccacactcacagtgacacacctactccaacaaggccacacctcctaatagtaccatgccctcggccaagcatatacaaatcatcagagtttggtttgtcaacttgacacaatctggagtcacctgagaagagggaacctcaactgagaaaatgcccccatcatattggcctataagcacacctttggagctgataatggaaggatccataacactgtgattggtgccacccctgagatggtggtcctagagtgtataacaacaacaagccccaaaacaaaaacaaaaaaagagaaagggcaagctagtcggcagcatatcttcaaggtctctgcttcagttcctgcctctggttcctgctttgagttctgtctttggcttcctgtgatgatgggctgtgatgtggaagagtaaatcttttcctcccctagttggttttggtcacggtgtttatgacagcaatagaaagcacactgagacagctagttttgtgactttgaattttccaaaatgttga

SEQ ID NO: 336 - DNA, 1000 bp, mus musculus
gcagttctttaaaatgtaaacatcttgggcctggaaagatgcatcagcattttagagcaacgattgctattccagaggacccaggcttaattctcagcacccacaaggcaactcataaccatttatacttctagttgcagacgctctgataccttctgtaggcaccaggcattccggtgatgcacaaacgtgcatgcagacaaacacccatacatgtaaaataaaacttttaagtaaacaactaaaaataaaattgttttacaatcaaacaacccaacttctggacagttgtcagaggagatggggttagcacagcaaagagatttgcagtcctgtgtccactgcagagttcttactatagctaacagcacagagcaaccatgtccttcaatggctgaatgtgtggaaatgtgcagtactcatgcagaataatattaaggcctcaacagaagcaaactctgctcatgttccccaacgtgggatggcgaggctagagacagaagtaggcaggacgttatgcttaatggaagaagccagaggcacatactgcactgtctcagttgtacctgaaaacaaaacagactgagaaacagtgagatagagggttcaggtggagaattcaattggtacagtgtttgcctagcataggtgaggtcttgggttctagccacaacaccatgtaatcagttatagaacattcctgtaatcccagtactgggaattggaagctagaggatcaggtcaggccaacccgagttacataagaccctgcctcatgaatggacaagaagagacagtcaaatgatggtgaccagaggctagagacagaagtaggcagccatatggagatgtggtcaggataaaatggcaccgacctacatgactggtacagcagcattgaggttcgataggaagagcaagattttgctacctactgaaatacttctttagatttacttattttcaattttatgagtatgatgtcttgcctgcacacatg

SEQ ID NO: 337 - DNA, 1000 bp, mus musculus
aagctaaattcaaaccgatctgtaagccctggctcgttccgtgccaccgtggcccctatctcagtgtagagcagacaccctgagctggtccgtcttccttttgctcacactgccagctagacagcttgagattgtctcaggatggttttgattctctcctaatttagtactttaagtcatctcattctcctcagtatgtttggcctgacttgtgctaggctagttgacatgaaactgattattccctgtcagtgctgctttagagtaccatttgttatagtgactcctggaacccaggtctaaagtctgcagctctgctttgatagcctgtaatctaaagcccacttacgttaagaaactacattataactgactgcttaccaacatactagggattgagcctcagacctcacacctcccggggaagggctccaccactcagctatcccccaaagcctcttactttttgagacagtgtctcagtaggttgtccaagctgacctaaaacttgcaattaccctaacagctgagactaaagcctataccagcaggcccttcttgtcttgatcagaaaaattatattagctactgctccatatattgaggaaatgactcatttagaaatctcccttgtaccctacaagaaggtacttaatctaaaagaatcttgtgcattctctattctaaaaattactgaaatgtattttaaaagtatcaacgtggagtaagaatggaattgtgtggctggagacagagttggagcagatggggactccagagttccttttaaggtctaaaagtctgacattcgagcttttgcttaaaagagtctttacaatattcatgttgggagctggggagacggctcagtggttagactgcgcttccagaggtcctgagttcaattcccaaaaaccacagggtggctcacaaccatctgtaattggatctgattccttctgctgtgcatgaagacagagcacttatgtacataaaatgc

SEQ ID NO: 338 - DNA, 1200 bp, mus musculus
gagcctcagaaggtcagagcggaatcggggaggggtgggcaggaggtcacgctcaaaagagagcttaccacctacctctcctggcttgtccagagtctgcactggtgggtgccttccttagggacacgtggatgctgaaagctgacctttcttaggccctaggccatccgagtaagcaaaacgaagcctgagtaaaatcccagctcgatcctctcccctgagcgctgccgttctaaacagcgaagacagcagccctaccagaggaggaaccgaagtcattcccgagtgcccctgctccccgccagctcccacttgtcacttccagccctgtgtcacataaacagggctttattatctcaagcccaccacgtcctgtgagagttctgtaaatggaacaccacacaataacttgtttattaataatggctcgtcccctccctcagcctggctcactcactcaccgcagtgtcccccgcccccctccatgcataatggaggaactgtgttgcctgtgacacaagccaggctgtgctcttcagactgaggggatagatggggagaggtaccagcctggaccaggctccctaaggtggggacagcggggagaagacccccattataactcaaagacgtaatgttgtgtgtggagtgggagtgctatgtggcagccttagagccagctctgccctatatgcatgtcccacgtgagcccatgccagggttatccaacaccaatcctgttctatccagggcagacaaggctctccacagcctccgcccactggcccacttctgtgtctgggggcagacttctttcttccattcaacactccatgacacttctgctgaccaaacacctccagtccctacagtggtcccttcaggaaccaacttccaattggccaccaccctgtttttccctctgatgggcaagcaggggtggaacatggtttctccaaaccctcctctggagagcggaaagtctagaacacctaaaggtcttaaaaatgtttatgtcctagctgggtgtggtggtgcacgcctttaatcccagcactcgggaggcagaggcaggtggatttttgagttcgagaccagcctggtctacaaagtgagttccaggacagccagggctatacagagaaaccctgtctcaaaaaaacaaaacaaaacaaaacaaatataataaaatgtttatgc

SEQ ID NO: 339 - DNA, 1200 bp, mus musculus; identical to SEQ ID NO: 338

SEQ ID NO: 340 - DNA, 1200 bp, mus musculus
gaaatccccaaccaaaccaaggctaagagagaaaaccagagcacaagcacagccgatggggcctatgagaagacaagagcccgtgggttgagaaagagggagtgtctggcttggttagggtgtgagagatcctattgccaggtcctgttgccaggatgactaaagggcttagtgagaaatagctctagctcaaactctgtctgaagttagccccaaggtagacaagagactttgagggaatgtagggtatggaaggggccaccacaaagacctatgaaaagtagctgttgacaggaacaggtacctaggggtaggaggcaggactgagaggctggacaggaggagtgtgtcttgttgaaagtatagttgggacccttgattttttaaaaaatcacacacattgcaattgtctcatgtctcacctgttttgtgccaagaacataagtagaggttggatataaaaaaaaaagaattgtcaccatgacttcagttctcctgaggagctctcaccctgctgttgattttggagggtgaccacctaatgtgagcaggggacagatggtagttggggaacacacagactcctagcacaggtctgaagaaggtgagacactgagaagtgaagtttgctcaaataaggcttcagccagccatggtgggtcacacctaaaatcgtagcacttgagaggtcggagacaggaggactgtcaggagttcaaggcaagtctggcttacatggtgagctccaggttaacatggacaataggctagaccctgtctcaagacaagcaaacaagcaagcaaaaaaactcccctacggtttcgtcacgctgggggccatggcccaaggtaacatgtcctgggcactgattggccctggtttgtattttgtttgtttgttcgtcctcaagtctcggtcatcccaagctaagtgaacaagagtaggtctccaggctatcaccgtattacatgtcccctgccttccctcttcagaggttcacacattcaaacggttgctgagaccaggcccagaacaaaccagagcaaagcagactgagcacccagcaacaggagaggaggagatgcagccaggagaagcttcacaccatcagaacaggccagtggttacttagctcctgctgaccgttgccatggagaaaaggtaggctgattccagctaagtttcccattttggggggg

SEQ ID NO: 341 - DNA, 1200 bp, mus musculus
acgcacctctaggtcatggggatccagccggtaagaccctcgttctgtgccctgagcccggggtcaccgcctcagctggttctgggcagtctgccccgcggggctgtgccatacccaccttggatgctggagtctcgctgcacgagctgcgggctgagttcactgctccgcttgcttctgaggttttggcatgctttctcgctggagctcaggatcgctactcctggtcctccacccacaccctggcacttcctcagcgtggcgatcacgcttcctcctctatccacagagcccggtcttgctagcctctctgggggtggggctgcttactctgctcggcctggctctgggtacctacttggttcgaagatcccgccggccgcaggttactctccaggacccggatgagaagtacctgctgcgattgctagacaagacggtaagttgtgaagaagtgggctagggcagagagtggatacttagtttgagggatagcatcgagagtggttggattgctccaaaagacttggcaggccagacctgcctgatgaaacatcttgtcatctatcctctagacagtgagccacaacaccaggaggttccgctttgccttgcccaccgcccaccacattctggggctgcctgtgggtaagaaaaaagggagtgggcttctctacttggcatcgtatgagggcgagtcacttcttaggtggttttcctgctaagaaaaaccattgcccttctgtcaatccttcagcccatgagggaccactcttttagggtgtggcttctgtgcccctacgcatctctaacctccaggcttctctctttccttaggacttattataacccgcctcctatcccagaaaacactaattttccattatgcaaatcctctgcttacctgctgctgctaaggccctggcagtagggagtttcaaaggtgggaggaggcaggagatactgcggaggggtcctctcagtgggactgcagcttatgtgtctctctccatggttcccaggtaagcacgtctacctctctgcccgaattgatggcagtctggtcatcaggccttacacccctgtcaccagtgatgaagaccaaggctatgtagatcttgtcatcaaggtaagtatatagaaaggaaatctccgagctggggggatggctgggttgttgagtaaagcacttgccatcca

SEQ ID NO: 342 - DNA, 1200 bp, mus musculus
ggtttggataggtttggccccatggatgcacacgtttgaatgctcgacccatggggagtggcacttttaggaggtgtggcctcggaggaaatgtatcactgtggagctgagctatgcttaagcttgaggaggtctcctatgcctaagctccacccactgtggaatttcagtctcctccaggctgtctcttggctcctccagcaccaagtctgcctgcccaaccccatgcttcctaccatgatgataacggactgaacctctgaatctgtaagccagccccaattaaatgttttcctttataagacttgccttggtcacggtgtctcttcacagcaatgaaaccctaagacaccttccatcagggctttgtcttccctgtctgtgagagctgccctgaccaatggggagtggggagtcagactccagcctcagacctagctctgggccacagcacccatgcaatcttgtgccaacttatttaccagttttccttcgaaagtgggcaaagaagcacctgccttgcagaagttctccaaggactgagtcctcattgtcccaggctctgaccttgtaaattttacaattttacccaaggacatcactctcaatttccactcctaactaaatacagagtggaagcacaatctccgtgatgttttagtgttcacttgagcgatatgttataaacttcctaaagcacttccatgtgtatcgcccgtttatctcccacagcacacctgaggggtttagactgcatgagaggaaaaatttaaggcagatactgtgtgtctttggtgcagctttctgtacgtgtatctgagtatggagacggatgcgagcagacagttgtatgtctgtgattgtgagtagcagttgtgcctttgtggattagtacatgtcaaatcacatctcttctgttcccacaaaaggatccttgtgtcacttctgtcctgctactcgatgggctttgacagtgctggcgggagagcagccaaactaccaggaagcctgctgagggttcagctaggggcttgcatgggatgtatttccagtggacatgacacaatatagcattaccacctctttctggaagcactttcagagacagacacactggcactgtggcccttggctctttgtctcccctcccctacccagctttgattgattacaggaaacttgttccccaagttctcaggc

SEQ ID NO: 343 - DNA, 1000 bp, mus musculus
aaattttctttctttttaagttttggtagcactgggatttgacatagggccgtgcacattctaggctcaatgactacgattccttagccctggcttttttttttttttctctaaacttcttattgagagatggtctcactaagttgcccaggtggtccttacgcttgttgttcctcctgcctctgcctcctgagcagctgggatgacttgcaggcaagcctgacttagaattttaatgctggaaaacctgctctgaaaagaagcctcaaaggcaactatatgaagcctgcatcttctgttccagctgcttcatggtaagagaagagagtttctactacaggggcatggctctgcttttccagagtaacaaatcagatgacagagcaacagttcctagagacgttaggcctaaagcaaccctgaccaaacagttcagatacaattttagatacaagacatgctgaattatgagagtagaaaggacctgttcaagagattacttcactagcccacagaaggctccataacgcagcatgtcccctctcagtgagggctgggatgtagggggataaagaggagcagagggacacttctgcctaatgaagagaaaggccgatgatccggttatttgttttggaggatacgaggttttacatgttggacgttggacttgaactcaattagctaaggctaagctcaagtttgtgatcttaacatttttgtcttcacctcctgagagctaggcctatgctatcaccacaccaggtaataagtatttttttttattattatatgtgtaagaatgctttgcctgcatgtatgtgtgcagatcacgtgcttgcctgggactctgggttctctggaattggagttatggatgattgagaggcggcatgcggtttgctggaaatcaatccttggtcctatataagaataagtgctcttaatcgggagccatctctccagcttttaagggagtgtttttttttaaaacaataag

SEQ ID NO: 344 - DNA, 1000 bp, mus musculus; identical to SEQ ID NO: 343

SEQ ID NO: 345 - DNA, 1200 bp, mus musculus
aagagtaagcctttggttcatagcttaggggagatgccaacattgtgcaataaaaaagcttttttttttttttttttttgtaacgggcacctacttttaagcaagcaacttttggaatctaaaaggctaaaagagctcacctcatgacatggctctccatgcctgcccctttctctctgagctacccgtatcaagttgtgtacacatgaacagaattgtcttttgcccagtccttgcctcccgcctcagaaaaaccaactactaaaataacaagaaaatcccaacagcctgccaaagagctcccacttgtccgggttcttatctaggcaagacgttggagggctcagcaaaatttttatgtaggggagcaggcccgaggaaaactcacacgccataaccaattgtagacagaggatcatctatcaggagacaaatgcaggaactccagagtgcctctcctcaaatgaaataatatatctttgaaagccaatgcccgttttgggcccgaggcccatatatcaagcctgagaggcttgtggaatcgctccagggccattaaccttccacctgtttccccttgtccttcaggatgagcccctgcccttgattttactcccgtcccctgttcatcttcgacagagtgtaaatgtacagccgtgggcctgtgaaataactcaaaggcaatggaccaggggcacggttacaaatctctgccagtggcaccgtgacttatggaggcagtttgtcacacatgagccaggtgacctctgtgacataacagagaaaaatatcgcccgggatcaaagatgggattcggagtattctaaggagctgcgtcccacacgctgggcaggttatctggtgtccaaggatttcccccggtgccaacaacattcactccagggaaaatggaaaggtgggccagggaatccttaattgaaatcatgtctgtcaatagaattgggcctttcctgccatgccaggattagaatttctgccctcttgatttctcctggaggttgctgcagaagctggccttacttagacaacaccaatccatccattcgcccttagagagaaactgagacgcagtgaaaaatgatatgttcttaaagacttccgtagcttgagtacttatatccacagttagactgtcaagggaaagttttagtatagcatctttttttttttttcgtcaaa

SEQ ID NO: 346 - DNA, 1200 bp, mus musculus; identical to SEQ ID NO: 345

SEQ ID NO: 347 - DNA, 1200 bp, mus musculus
aaaaaaaatgttgccactcaacagcaggcattctttgtaggatgaaaataaataaatacctcttggggatttaagcacaaatacatttggaggggtgaactaagagatcatgtttaagcatatgaaaatcactattggcattaatgtgttcccccatttttacattagaactgctggggaggggagttgaagcaaatagctttatcttggcactcctcagtgatgggtggacaggtgaaacagttctgacttccactggtgttgcatactttccatttgccctgctactcctctaccctgctccagggcccaggatactgctccagcccccacctggttcttggttgggtttggtcagtgggtggcacctgctggagagtgctgggaagagaggccttatctccatgcagggtggcctcaggctgattggccggacttcccaaagctgtagctcgctttggctggcatttctccacaatgctttatctctaggctgctgtacttcgttgaccaagtccataaacacaccttctttctgatacttcaggcactaaaccagtgagcagtttcttttccagttcttacatggcaggcaatttgagtagacttcagtgtgaccaggatactcctgaaatggtcccgacaagtgtgattagtcattggataacgacatgccgagtctgtgagttcctctgtattgatccatgcaggctgcaggggttgtgaaactgtgattctgtcagggagttttgctaacaagccctgataggaggagccccacattatgtcatcctctggttctggtaaagttgaaggctagataaaacacccactatctctctcaaccacaacagccatgtggccagcgagtattcccacttcacagttgtccacgcaacgaacttggcaggctcaccccatttctcagaagagatttaatagtggcaagctttgtacctcaaagacttcattactctgaccagttctctctgctccatacttactggtgtcctgagagagatgacctaatactctatacccattacaagatgaatgtgccccaactttaaatctactaattttttattcccccgagacagggtttctctgtatagtcctggctgtcctggaactcactttgtagaccaggttggcctcgaactcagaactcctcctgcctctgcctccccagtgctggga

SEQ ID NO: 348 - DNA, 1000 bp, mus musculus
aacaaggtaactaggtagtggataagagaaagggggagggatggagggaggatgggaaggaggggaagagggaagaaggaaggcagggatggagagagtgaaggaggaaggatggaccagactcgggatagaggaaatactagagaccagtaacacttctgtgctggagctatgaattaggaactggccacttgggaagtagattgtcccacattatcaggactgtctttgctagtaatgtcacttcatccttaaacccggttttctctaattcagatgcagttgtccccaaacaaacccaatgtacctatcttctaagaagagctaataaagaatagagatctcaatgtacaagcagcacattgcagcacgcacactggggccaggctcctaatgtttccgtgacgtgattttattctgtcaagttaaggaatggagagtgggaccaaacctaccgcacttcccttgacagccaggtcaacaccacttataaaccatctccccttccctgccccacagctgtaagtgtcccaggtggagacttcagagggaagctgaaaccatacgagacagagcacactttccaatcttcagcttgccacatgcctgctgggactgcttctgatcttagtttaagttccccaggaatattttcagtttagatgtgatctccacatctgtctggaattatcatagtgtgttccatcgttgctggactgctggaaacaaagaccctcacaaccaaagtggatgctctgtctgggcgtggttggggtggggtgggggttgggacttagtccagagccacagaggtctgagctttatggattatgagataccttatgagatacgtctgccaaaatctaaggaattctaaagagagctatatattttcagcgtgccattcactttggacaaaccaaaaaggaagtcagcaggcaccaagctgtcatgaattcatggaagcaacagcatctttttaggtttttcactacgaaat

SEQ ID NO: 349 - DNA, 1200 bp, mus musculus
atctttctacttcactcaattatatttttctagtaactctttcaatgattctttttgagtttttaggcaaatactcctaatcatctgcagcagaattggtattctgtctatctgtgtccactctgccactgtcatggcctctcagggaggcagagcctggagagttgactttgcttacacaacaccattgctagggcaggttctgggctgtagggaagcactgagacacctctctgggggtgggaaagcgcagtctgagatgtgggaaagccagagttggtcagggtatctgcagggcctgtgatgaggccagggatgagggtggttctctgattcttggacatccaggcaccactgggagtcacagaagagctgagaatggagttgaggggtaggttgctggctggggacagcatctagcctaggactgtgagaaaaaggggagctccagcttgtcccagttggtattgtccttagcttggcagagtcaggcttgggagcacagagaagcctccaaagaaaaaattaagctgctgttctgtagtcaaatgccttctccatggcgccccatgatggatctcgatgaaagagactggccatggttctaaatagtttattgattgttcatggcagaaaatggatgcataaaatacaatactcacttcttagggtggacttgagattaaatagcttctacagggaggaatgtctggtaaggaaagcttattggctaagccctccgggcctctacgtaactcattagcatggagaactctgttttgggcctatgtgaccataggacatgtttcttttaagtgaggagcatggcatgtgttccaggctgggagtctggcagggagctgggaattgcctaagccttagatgtgtgtccaccgagtctctctgggtctcaaactgctctaccttatcaaacttcctagtatggctttactgtccaacagtattcaactttgttttctagtctgttattaactactttaaatgtaattttactagctaatgcctctgttacaaagatagtggggattttagttctgcaacagtgttgtcttctatgatgaagaataagtaaatatatatctttcttaacagaattttactttaatgatatactgatattaacatttgttaattactctcctagaaatgatccagttcattataaatctaattgtgaaa

SEQ ID NO: 350 - DNA, 1000 bp, mus musculus
aagggccaactcatggcatctcgtcagaagtgataagtttttaccttcagagaatctgaagatcaatatctttctgaacatctctcaaaagaaagaaagaaaaaaaagccctgcttctgggaagaatgttgtttaagcccttcagtgttttctgactcagcagcatgacacagtttgtatattacatcagtgtgccttactgtcaacttccaagatttctgctctgtccttgagcactgttgtagatggaacgaagcccagcctggaagtgtggactgaggtgacgcactctgtatttggtgataaatgcaagggcactgaagacatgcctcgggttgacatgcaatacctaattcagggtttcattatcattaaaataaaacaggcaggaggtagtgaataggaaaaggaaaagtgattcgtgcacagatggtgtcctaggctttcataggccctgcttcatgcagcaaggccagcttcgactgcagcatccttcatggctgcacacactgactgacatttcactatgatggatgcgtggccagtgcgagagactgtacccttttccgtctatttggctgaagcaaatagtcggatttccatttttatgttccatactttattaagagtatctctgcagatgcccatttacagaggaaattagctgaataggaaagaaatcggttttcactcatgcgaagcaatgaaatcataatctcggaaatctaagacacatggcctacattgctctcatcaagaagctaacggccttctgaaatatgacgtggtgcatgcgctgttctcagagtcctccaattacatacctggaaatacttatgactgaaattatgctatgtattaaaggcagatgaagttccccctatcgtgtaatgcacattttaaaacatttgtattctaaaacatttaaaaagatttctttgtttttatcttatgattgtttgcctgcttgtaagtgcaccacatgtaagcagtaccctca

SEQ ID NO: 351 - DNA, 1000 bp, mus musculus
catcactgaatgacttatcagcatttgccttttgaggggagggttgttttgttttgttttttaatttttgagacagggtttctccgtgtaatagccctggctctgctggagttctttaggccaggttggccttcgactcacagagattcacctgtttctgctgcccagactgttgagattaaaggtatgtgccatcattgtctagcctatgttggccacaaactcatcatcctcctgtccccacctccttcagcaaatcctaccagtaagtgacaccacaactgatcttgtcaccattagtgacttaatgtttgtttgagtcttttaactttttccagcgtgatctacagggataagaatccataaaaatggaaaggattcccaggtaatacaactcttaagatttaaaacaaagagatccttcctcttcggcaaggacaccaagaccaaccattgacatgcaataatgtcattggatgcttcaagtagggtaaaaccgtaagcactcttccttccatcccagaagggtaacaggatgaagcacttaccagtcttagagacatcattaagaaggagaagtaccagcaggaaaaaaggaacatatcttctgtcacaaggaagctattgagctaagatcgtagctcagctagcacagtgctcacctagtgtgcctaaagcccaggttagaggcccagtgtcaccaaagcctgggtgtgctggtgtacaactgtaatctgaagcagaaggatcagaatttcaagttcccttagctacatagcaaattcagtatcagcatgaacaacatgagtccctgcctcaaaagagacaaagggtatgctgtaatatttgagaatacttagaaaatgattagacttgtggtgtacatatgataaaggcctaatattactcatatcacatgttatggggagggcaggaaggaatgcattaattacaacaagtactgagggggacaactttgatggaaagagaataaatataa

SEQ ID NO: 352 - DNA, 1000 bp, mus musculus
ttacttagtgggggaataggaggcagatggagggaactgggtgggagaggggatggagtaagaaatgggaagggttcaggatcagatgtgagaagggacaggagagattgccagttagtcttaagaatcaatagaaatctataactagtggggataggaaggaggagggcatcttgagaatgtgccagagacttgggatagaggaggcacccaagaatcaatgggagtgaccttagctgtgactcacagcattgggaatatagaacctgaagagggcaccctatatggccaggcaggaaattcattggagcaataggtacaccaacccacacacaaaactttgacccaaaatttatcctgtctacaagaaattcagggatgttagatggtgcagaaactgaaggaatggccaaggaataatcagcccaactaaagaccaaaccccacgggcaagcaccaatccctgacgctattaatgatactctgccatgcttgcagacagtagtctagcaggattgtcctccgagaggctctacccagcagctgattcagacagatgcagacaccatagccaaacagtggatggagcttggggactcttatggaagaatatgaagaaggatgacagaccctgaagtagattggaattccacaggaagaccaaaagagtcaactaacctgagcccttggggctctcagagactgaaccactgaccaaagaacatacctgagctggacctaccacccccaatcctacacacaaacatatgtaggaaatgtacagctaggtcttcatatgggtcccgaacaactggagcagggactatcctaaaaatctgttgcctgtctgtgggatatgttcttctagctgggttgccttgtctgtcctcagtgggtgaggatgggcctagccctgtagagaattgatgtgccagggtgggaggacacccagggggacctccaccctcttggaggagaaggagggaggatattgtgggag

SEQ ID NO: 353 - DNA, 1000 bp, mus musculus
aaatggaagtagaaacaataacgtaatcacaaagggattctgtagggatttcaatctgtagattgaaaacctaggaaagaagtcaggagccatagtggtagttgtactgtgggccagggaaacaaaggcctaaaacttttcacccactacctgtcctgtctgcaatatgtgctagggtgaaggaatctcagtgtttatgggagtgaccaatcaattactggtctaaattgaggcccaaacaatgaagggagtcctccacaatgggaggatggccaggaatggaaagctgtatgactaagagaaatgtagtgataccaaacattactgacaaacaaaaaatgtcaatatgctaataatattctgctacagtcatagattagtgactagactaatcatcttcagaaggctttgttgagcacctgaatggaaacagatgcagagacacacagacaaacaataggcaaagatagaacaacccagtaaaagatgaaagaaaggattttaggagacagaaggatggaggacaccaggagtatatggtaaacagaatcaactaagcagggctcatagaggatacagagatggaagctgtaatcctagatgctgagtgggtctgtatatacactgtgttttcttattttgggcattttgtgggactccaaacagtggtagagggactgtctcactcctttgcctgttcttgggacccttttctgcctactgggttgccttctccagctttgatatggtaatttcaaccaagtgttattgcattctgctatggtgtattcatttggtatccctaagatgcatgcacttttctgaagggaaatggagaacaacttatatggaggaaattggagtggaagggactgggaggaatggagagaagtgtggctgagatcaggaggtattgcatgagaaaagaataatgaaaacagagtaaaaggaaaattaaaattctagaatgaaaacaggcaagcaagcaaacaaacaaaaa

SEQ ID NO: 354 - DNA, 1200 bp, mus musculus
ggcctatatgcagaattcaaagggatgttcagtttataaattgacaatctctatcattaccctttcttcagtctatgttttttcatataaatctaatattttaatttataaaagaaaggtattaaggtagcaatctcgacattttcttcacaattcattcttaaacacaatctgatacagaattctttggttttaagtattatttgaatagtttttttcctttccatatatacctctaatgtgtaaacctagcccctgaaagggtggcagcaatatttccactggtcttaaatttgtgtcacagtgtacctgtatttttttgtaattcaatttacatcctgattgaagccctatcctcccctcctagtctctccacatatcatcccttgccatgtcccctctatcccttctcctctgaaaagggtgaaagcctcctgggtgccagcctacttgagcacataaagctacttcaggattaggcacatcctctctcaccgaggccagacaaggcagcccagttaagtgaaacaggatccacaagcaggcaaaacagtcaaggatagcccctatttaagtttttggggttcctcatgaagacagataatatacatgcatagtagtaaaaacctgatctaacataataataatatatgattactgtcatggtttgaatatacttggcccagggagtgggactattgggaggtatgtccttgttggaatagggcgaattggaagaaatgtgtcactgtttggatgggctttgcccatcttctcctgactgcctttgtaacaagatgtagacctctctgcgccttcaatgccgtgcttgcctgctgtatccccttgataataatagactgaacctctgaactcaaaagccagcccccaatggaatgatgtcccctataagagtttctttggtcatggtgtctcttcacagcaaaacaccctaaggtaactacttaaatcaagtgtgtctcctaatttttatgtcatttaacattaattttgaatcaggaacaagaagtgtgttcctcacttttttttcctcttaatcatactctgactgtcatattttcatacaaccattatagtttatgtttttctatttaggttttcttaataatatagcttaactcagtatctttttaaactaaagcgctaagataccaaacaacaaagatatggccaagtatt

SEQ ID NO: 355 - DNA, 1000 bp, mus musculus
caccagttgtaaatttgtgtcacagtttacttgtattttttttaattcaatatatatactgattgaaaccctctcctctcctccttgtccctccacatatagaccctagcctcatcccctctactccttctcttaaaagggggatggccgcctgggcaccagcctactcaggcacataaagtcactgcaagactaggcacaccctctctcattgaggccaaaaaaggcatcccaggtagggggaacaggatccagaggcaggcaacacagtcagggacagcccctgcttcagttgttgggttctatgtgatgagagataatataaatgtacagtagtaaaacacgatataaaatagtaataaatatatatgtctactgttaggtttgaatatgcttggcccgggaagtggtattattaggatgtgtatccttgttggaataggtgtggccttattgtacttaaaaggagaagcaaacattatggtaagaactttgtaaaactgattaagaacaaaactactttttcccttgtatatagattctcaaatgtacagttttcttatttcaaatgttttgtagaaatatttgtaatggaatacatcatgcttagtttctttacattgtaaatcaattttgcaaaatgtaatctctacaggatactgatgcatcaaaataagttgttcaggacattgtgttatttttctactgttcctgcctatcattagagaggggctattaaatgttagaaatccaaaagttctgagaagttgttttagacccctttggtctggctatgatcagctacaagaaagtctacttattttcatattttcttattttaattttggtttcttatggagtccaagatacgtgtaaagtcagctgcaacaaattgtatattcagcgatatagtgtcaaagagattaaggtgccttggtttaaagataattgtacatcaactcaggtaaactctttcttcttcaggaaaacaaagtagagt

SEQ ID NO: 356 - DNA, 1600 bp, mus musculus
aatactcaggtgacagcaggtgctggcaaggatgtggagaaagaggaacactcctccattgctggtggaattgcaagctggtacaaccactctggaaatcagtttggcagttcctcagaaaattggacatagtactacctcaggacccatcaataccactcctgggcacatacccagaagatgctccaacatataataaggacacatgctccactatgttcattacagccttatttataatagccagaagcttgaaagaacccagatgtctctcaacagaggagtagattcagaaaatattgtatatttacacaatggagtactactcagctattaaaatcaaagaacttatgaaattcttaggcaaattgatgtaactagaaaatatcatcctgagtgagataacccaatcacaaaagaacacacatgatatgcactcagtgataagtggatattagcccagaagtttggaatacccaaataatattcacaaactacatgaaactcaagaaggaagaccaaagtgtggatacatttatccttcttagaaggggaacaaaatacacatggaaggagttatagagacaaagtgtggagcagagactaaaggaatgaccagagactgtccctccagtggatccatcccacatacaatcaccaaacccatatgttattgtggatggcaacaagtgcttaatgacaggaacctgatatagctgtctcctgaggggctttgccagtgcctgacaaatacagaagtggatgctcaagctatccattggacagagcacagtgttcccagggttagacctagagaaaggacccagggggttgaagggatttacagtcccataggaagaaaaacgatatgaaataaccagtacccccagagctcccagggactaaatcaccaactaaagagtaaacatggtgggactcatggctccagctgcatatgtagcagaggatgggctagttggacataaacgggaggaagacccttggtcctgtgaaggctttatgccccagtgtaggggaatgccagggccaggatgcacgagtgggtgggttggggagcaaggggagaggggaggagatagggtgagtgggttttcagagggaataacatttgaaatgtaaataaagaaaaatatacaataaaaaagaaagaaatgtatattttcactagaataactaaaaccattcaaatatgaagcagacatatgtgtgtgtcttacccacacatcgtggcttttcattgctccaaaggccattttctgagcaatgaatttccttatgtccttcaatcttgaagcctgaattgcattcaaaccgcaccacctgtccaaaatagtattcctggtctgtttctgctgcaccactcacaattcttccattctcgagttctgtcacaggtaaacacttcacaactgaaaatacaggcattgcttttactaacagaacttgaaagcttcaacataaaacacattgtaggtgaattaaaaccccagcactctgcaggaaatgacttcaatgttggagaaatattcagtatcactgtttgcaatacataaaaattaactaatacaagtagttcgct

SEQ ID NO: 357 - DNA, 1000 bp, mus musculus
aaattttagccatctttattttccaacatgaaacacagaacattcagccattcagacgactagacacaaacacacatgaattgaacacatgaacagaccagtgcaccagacattagatgttagacaacacaaagagagcagagaacttctgatataagggctagagagaaaaaggcaggacatccccgaacatttctctctgcctctgggagagtttcaaaatccactttcctcccacctgatgaatttctcgactgcggccatccgcctgattatttaatccaaactcttttatttctctcgcctaaaaagcagcttctggaagctgcggccaactgccggctgcattcctaggtcctggtatcactgctgaacctgagcggatctagcgcgggtcagcgctgttacagctcagaccgtaccacacccttagcaacattttacccgttgcttctccatgtccctgtatgaattttctaattctttcctatctgtgtagctccataccagcagtgcttcttccagcttcttctgccattcccagacccctcgttgggcgccaaattgctgtggccagcctgcagctctcatgtctgagttcgagcctggtaggcaacctggagctgaaagagaagagggaatctaggcgggtcgagaaataatggaaccaagacattctagtctgctcaaggttcgaatgtttaataaaaaagtctgtgcttataaagagggaaacccatccccagtcatgccaagtttcttgatgtagagatgtgaagttgtccgaacagccttttagcagaaacttggcaaattcacagtttgcaattaactccagaaaatcttggagagtctatttggcctcatcacaggtggcaggcagtgtcatatcaaaggacagtgatgagaagcagcacagcaggtggccccacctcagtgcttatgggctgaaccagcatgcctagactgaaagagtttacatggaagtattttaatttct

SEQ ID NO: 358 - DNA, 1000 bp, mus musculus
aatctcgacattttcttcacaattcattctttgacacagtctggtacagaattctttggttttaagtattatttgaatagttttttttttcctttccatatatacctctaatgggtaaacctagcccctgaaggggtggcagcaatatttctattggtcttaaatttgtgtcacagtgtacctgtatttttttgtaattcaatttatatcctgattgaagccctatcctctcctcctagtctctccacataccatcccttgccatgtcccctctatcccttctcctctgaaaagggtgaaagcctcctggatgccagcctacttgagcacataaagttacttcaggactaggcacatcctctctcaccgaggccagacaaggcagcccagttaagtggatcaggatccacaagcaggcaacaaagtcaaggatagcccctatttaagtttttggggttcctcatgaagacagataatatacatgcatagtagtaaaaacctgatctaaaataataataataatatgcttactgtcatggtttgaatatgcttggcccagggagtgggactattgggaggtatttccttgttggaataggtgtgggtgaattggaggaaatgtgtcactgtttggatgggctttgcccatcttctcctgactgcctttgtaacaagatgtagacctctctgtgccttcaatgctgtgcttgcctgctgtatccccttgatgataatagactgaacctctgaactcataagccagcccccaatggaatgttgtcccttataagagtttctttggtcatggtgtctcttcacagcaaaacaccctaaggtaactacttaaatctagtgtgtctcctaatttttttgccatttaacattaattttgaatcaggaacaaaaagtgtgttcctcacttttttttctcttcatcatactctgactgtcatattttcatatgaccattatagtttatgtttttctatttaggttttct

SEQ ID NO: 359 - DNA, 1600 bp, mus musculus
aagatcaaatactcaggtgacagcaagtgctggcaaggatgcggagaaagaggaacactcctccattgctggtggaattgcaagctggtacaaccactctggaaatcagtttggcagttcctcagaaaattggacatagtactacctgaggacccatcaataccactcctgggcacatacccagaagatgctccaacatataataaggacacatgctccactatgttcattacagccttatttataatagccagaagctggaaagaatgcagatgtctctcaacagaggagtagattcagaaaatattgtatatttacacaatggagtaccactcagctattaaaatcaaagaacttatgaaattcttaggcaaatgaatgtaaccagaaaatatcatcctgagtgagataacccaatcacaaaagaacacacatgatatgcactcagtgataagtgaatattagcccagaagtttggaatacccaaataatattcacaaactacatgaatctcaagaagggagaccaaagtgtggatactttgatccttcttagaaggggaacaaaatacacatggaaggagttacagagacaaagtgtggagcagggactaaaggaatgaccagagactgtcccgccagtggatccatcccacatacaatcaccaaacccatatgttattgtggatggcaacaagtgcttaatgacaggaacctgatatagctgtctcctgagaggctttgccagtgcctgacaaatacagaagtggatgctcaagccatccattggacagagcacagtgttcccagggttagacctagagaaaggacccagggggttgaagggatttacagtcccataggaagaaaaacaatatgaaataaccagtacccccagagctcccagggactaaatcaccaactaaagagtaaacatggtgggactcatggctccagctgcatatgtagcagaggatgggctagttggacataaacgggaggaagacccttggtcctgtgaaggctttatgccccagtgtaggggaatgtcagggccaggatgcatgagtgggtgggttggggagtaaggggagaggggaggagatagggtgagtgggttttcagagggaataacatttgaaatgtaaataaagaaaaaatacaataaaaaaagaaagaaatgtatattttcactagaataactaaaaccattcaaatatgaagcagacatatgtgtgtgtcttacccacacatcgtggcttttcattgctccaaaggccattttctgagcaatgaatttccttatgtccttcaatcttgaagcctgaattgcattcaaaccgcaccacctgtccaaaatagtattcctggtctgtttctgctgcaccactcacaattcttccattctcgagttctgtcacaggtagacacttcacaactgaaaatacaggcattgcttttactaacagaacttgaaagcttcaacataaaacacattgtaggtgaattaaaaccccagcactctgcaggaaatgacttcaatgttggagacatattcagtatcactgtttgcaatacataaaagttaactaatacaagta

SEQ ID NO: 360 - DNA, 1000 bp, mus musculus
ttcctctgtgtagccctggctgtcctggaactcactttgtagaccaggctggcctcaaactcagaaatccacctacttctgcctcctgagtgctgggattaaaggcatgcgccaccacgcccggctcaatattatttttttaaatattaaatgtacaattattcaggtactgcaaatgttattttggcatactgtttgctgtaacggtatttaaaaatgtaagttcaagtgattttcacatcaccttccacaagctcttaattgtacgactaataaaaataatcattgatttactgatgggtatgatatagttattaatcaaagatagacaatttatggtagcaagcagaaaggataaataaattatggagctttgaccaatcggaaatcttcataattggaaagagtgatttattagcacctatcatctaatcattgaaggttaattactgtgagtctttctttcagttacttatgcaataatatgggcctgcattttgcctcaacactgcggtgtgggacaccaccttgctgatggggttcagggctcttgggactctgacacattgttcaggggagatgatatacagcctaatacaggagtccttgcccacatttctctaggtgataaatggcagggttagtgccaagagtgtggagggttctcctgcggaatacttgtgcagctctgtacagcaaagtcatcacccctgtggtggtccttgacaagggagaccgcctttgtttgtctaaactgtttattcatagtttatgaggattcatatggcttattgagggtgaaacttttcctaggaaggtatgcttaggaagggaagctcattggctagacacttggagtttatctagatacctcattagcgtggagaactctgcgttgttcataattgtcctggtcctcttagtggggtgtcatggtcacgtgctccaggacttgtaaccttgtagggaggggatttaaatgcctactgttcttagttat

SEQ ID NO: 361 - DNA, 1000 bp, mus musculus
tttcagtccttcttagaagggggaacaaaatactcaagggaggagacacagagacaaagtttggagcagaaggtgaaagaaaggccatccagtgactgtcccacctgccgatccattccatataaaattccggtaatctctgaggagagccgtgtgtgccgcgagcaatcgccattataagatggcgcgggcctccgctgtgcctaactagtaaacaagccttgtacgcaggtgcgagagtgaattcactcctagtcactcccattatcggggtgtaatagtggggtgatgggcaagcaacaaatcaggagctgtcacgccatatcaggtgctgaaacgtcacgctgcgggttataaaagcagcaccattttcccagtttgggatcttcctgagaaacaagcaataaagctcttgccgcggaagattctggtttgttgcgtctttcttgccggtcgagcgggacgcaataccaaacccagagactattgaggataccaacaagtgcttgctaataagagcctgttatagctgttttctgagaggctctgccagtgactgacaaatacagaagtggattctcacagctatccattggactgagcacaggggccccaatggaggaactagagaaaggaccaaagagctgaaattcggatttgaaatcccatgggtggaacaacaatatgaactaaccagtacccccagatctcccagggactaaactacaaaccaaaaagtgcacatgaagggatccatggttccagctgcatatgtagcagaggatggcctgcgagatatcaatgagaggagcgtcccttggtcttatgaaggctcgatgtcccagtgtaggggaatgccaggacaaggaagcaagagtgggtgggttagtgagcaggaggagaggggagaggataggagtattttcagaggtgaaatgaggaaaggcgatacaatttgaaatgtaaataaagaaaatatctgattaaaaaagacttgtaa

SEQ ID NO: 362 - DNA, 1000 bp, mus musculus
caaatccaaccaatcatgagaatccaccttacactattcagaatggcaaagatcaaaaactcaggtgacagcagatgctggtgagaatgtggtgaaagaggaacactctttcattgttggtgggattacaagttggtacaaccactctggaaatcagtttagtggttcctcagaaaattagagtacatgaggatccagctataccactcctgggcatatacccagaagattctacaatttgtaataagttcacagtctatactaaattcatagcagccttttccacaagctgtaagaacccagatgtctctcaacagagtaaaggatacagaaaatgtggtacatttacacaatggagtaccactattaaaaacaatgaattcatgaaactcttaggcaaatggatagaattagagaatataatcctgagtgagttaacccaatcacaaaagaacatatatgttatacatggtattcacattgataagtggttattagcccaaaggcttggaatacccaagatacaattcacagaccacctgaagctcaggaagaaggaagaccaaagtgtggatactttggtccttcttaaagtggggagcaaaatacccatgggaggagacacagagacaaaatgtggaggagaacctgaaggaaaggctatccagagacttccccacctgggaattcatcccatatacaattagcaaacccagacactattgtagatgccaacaagtgattgcttacaggagcctgacttagctgtgtccagagaagctctaccagtgcctgacaaatacagaagtggatgctctcagccaaccattggactgagcacaggcttcccaatggaggaggtagagaaaggactcaaagagctgaaggggtttgcaaccccataggaggaacaagactatgaaccaaccataaccccagagctcccagggactaaaccaccaaccaaagagtacacattgatgaacctacggctccagct

SEQ ID NO: 363 - DNA, 1400 bp, mus musculus
tactttgacataggtcatcttttatctccaataccaatccattattttggaattgattcaccattgttttgaacaactactctgaacaactctgaacaactactgccattgtcaagtgtttctcaactttcaagaatacaaacagcccccaaaacattgatacattcagtaattttaaattgctaagatgttgaaaaagttattttttttcaaatactaaaaatcttgttttctgaaattttgtgcccaaatgaatcatgattttttgagttaataataagttgaaagagaaaatcatagaacataaacaacacatataatactggaagtcattatgaggcagtattcctgactttttgaggtgagttttgtaaaaataagttaaactcaaaaattacctatctctgagctgaaatgattttaaagtctggttcttaaaagttggcataagattaaaaagactttggagaaagaaaagttgagagagaaagtgggtggaaaaaaggagaaaatatgttaattgaatttggcaaaacaaacccagaatttccctaatcttttcctcttgaacaattctgtcattataatacatttagcccttctggtccaagcagcaccggggtagctagggcccacagtcggctgactatcgccagctacccacaacaccagccacacgatcctaagaattctgaggattgggatctgcccagcgcaggagcgctttgcccgagcataggcagcagacatctcgtttccgggaccccgccgagtgtatcctgcacagacagctggccattttcccggccagaggataggaatctgcccagcttgggagcattttgcctgagcatcagcagcaaacatcttggttccggaatcccgcctagtgtattctgtaaaggcaagtgaccattttcccggccagaggatagggaactgcctggctcgggagctcattacctgagcattggcagcagacatcttagttctgggaccctgctgagtgtaccctgcacagacatcttggttccaggaccccactgagtgtatcctgcacagctccagagaataccagatggcgaaaggcaaacataagaatcctactaacagaaatcaagaccactcatcatcatcagaacgcagcactcccacgccacctagtcctgggcaacccaaaagaaccgaaaagctagacccggatttaaaagcatatctcatgatgatggtagaggacatcaagaagaacattaataactcacttaaaggaatacaggagaacactgctaaagagttacaagtccttaaagaaaagcaggaaaacacaaccaaacaggtagaagtccttatagaaaaacaggaaaacacatccaaacaggtgatggaaatgaacaaaacca

SEQ ID NO: 364 - DNA, 1000 bp, mus musculus
catgctaccaggggtaggggagggggggagataagcagaaacctagcttaaatccttaaacttactgtggagtcctgattacattatatactgctccaataatggcacaaaagttgttggagtaaccacacactatcttctcggggatattccatatctgacgttgctcatgtgcctaaaagccttggactagataggccatggggctagaagaaaaccaaatattgcccctagccaaaggaatataacaatatgacgagtcataaaaacattctgctatatccatagatcactgctttgttttgttttgttttgttttcagccatctttagagatgtttccaattgcagtagatgggaacaaactcagagacccacaattgaacaatgtgcagaaagtgagagactgtggaactcctgtctccatcaaaccacttccctgaggacacagggatctttgtgtgtgtgtgtgggggggggggggattgttcaagtgcaatttttttgtttttatttttattagatatttactttatttacatttcaaatgttatccactttcctattttcccctcagaaaatcccctatcctctcccctctccccctgcttcccaacctacccactcccacttcctggctcaggcattctatactgggacatagaactttcacaggaccaagggcctctcctcccactgatgaccaactaggtcatcctctgctacatatgcaactagagccacaagtccccccctgtgtgttttctttgattggtggtttagtgcctgggagctctgggattgctggttagttcatattgttcctcctcctagggggctgcaaaccccttcagctccttgggtactttctctagctccttcattgggggaacctatgctctgtctaattgatggctgtgagcatccacttatgtattagtcaggcactagcagagcctctcaggaaacagctatatcaggctactgtcagcaagttcttg

SEQ ID NO: 365 - DNA, 1400 bp, mus musculus
ctctatttaataagcatatccaaactcagacaaagtaacagttaaaaaaagagtatcagagagaaggttagaaaagatggacaggagtaagcgttaggtctgtgtagtttatatgtaatagcaaagtctaatgttactcatgttaaactaagtaatttgaaacattcatttatctacacattgagtcactctaagttaccttcaagaatcaaatacttctaattaaatacattagtttttctcatttatattgtctagaattagtatctaaatcatgcaggttatatgttgaagtagaaatttcaaattatatattaaactagaaaatgatgttactgcctcattggcattcaaaaacactttgaagttaataacgcatttttcagtaagtttctttgagttctcattccctctatgctcattaagcttcacctttcaggtatggtcatatctttatgaatccacacatgtcaagacttgccatacttgaccttttgaactaggtacttgaaatctcacattccatgcattttcatgccattgagtcagtccttttacttatttaaatacagaaacaatctatccactttgtataagatatcaatatagagtgtcagttaaaataggtagaagttttctgatattgatggaattttaatctaatttcccaattgcagtgatttgaatagtttgggctctaaaaactcaagggtttgaatgcttgacctactgggagttacactatcaggaattatttccttttttagaatatgtgtggccttgttggaggaaatttgtcacaattggggtgggatttgaagtcttatgctttagctctgcctagggcaaaagagtttttcctctccttgctgcagttggatcagcatgcagaactctcagcttcttccccagaaccatgtctgtctagaccctgccatgcttcctgccatgataatggactatgtcactgtaagccatttccagttaattgttatcctaatgtaagagtcaaaagggttgatgcattgtcacagcactggaaatcctaactaaggcaaagttggcacaagaagtagggtattactgaggtagacctgacaaggtgtttgtttggacagatgtggacaaggtgattttggattcggaaagccatgtcatgctttaagtgggacataatgagtcatcctaacaggaatatggaaagcattggtgctgaggttgacttgacctctagacatcttccttataataatttggtgaagactgttgctgctttttgaactggtccaaaaagactacctgagaataacgtaaagagatttatattaattgtactgacaaagaaatctcaaaaaaaagcctaacatatgcttgattctctagtttactctcatgtagaa

SEQ ID NO: 366 - DNA, 1800 bp, mus musculus
ccagtgaaggctcaatgcaccagtgtagagaaattcaaggacagggagacaggaatgggtaggtggttgggggaacaccctaatagaagcaggaggaggggggtgggatggggtgtttctgggaggatcaggaaagggaataacacttgatatgtaaataaataaaatatccaatttataaaaaaagaaagaaaatgtcagtattttatggggggaagaaaatgtctaaaagagaaaggaaagcagagtgtttaactagaatttgcttcatcctatataaatggtaatattgagtgaggaaagaacacatagaaactctgctacaaatctggagttaagactctggaaatgaatatcaaggaaaactggtagaatatgtgatgttagcctatttgtgtaggtttggcctgtgggtttacaggaattgcctgctgtggttagttattctaataacaatgcatgtgtgtgtgtgtgtgtgtgtgtgtagcatagacattggaagagaagatcaattgatttgccagtgatgagggcatgacaggaagaaaaatccatagaaattggttagttaaaaagatagagtgaaactgaggtactgaatttggagagaaattagagagggggagagagagagaaaggggaggggtctgtatttaaactaccatttaactgttgagagtgacctgttcccagggactacttgcttccttgggaagctgagatgacagcatgagtggaaaggtttgaggggggaaaatgttgaataattgattagagatgggaacagagcggatggaaaggccacagcaggttgtctgcacaaagttttgggcaagtcaaggagactgtatgtagacaagagggaaaaatgaagacctgtagttcaccaaccactttctctgcacagagtgacatgtactcccaaggaatgcctgatgaagtacaggataggataaaacaaatgaatatggagaaggaaggttgagggggtgatctgcgtgatctactgaagatgggttcttggaaaggaggaggctccaggagacggtgctcccttggaaggaaggggctacagcattgtagagaagactagaggatctgatttgaagaagagaagggtttgtcaagtgtgcaactgaggcacttgttttcatggtctgtgattttttaaataaccgaggaatcattcccttttgtgcgttgggataattttatgattttttaaaacatttttgctataacgttttacaatctgcattgcaacaactaagtgtgacataaataagaaaataaactgtcataatatagaaaatctttatttgcatactatttgatggtatatataatatgttaataattcaaagtaaggtcaaaatcagggtgataaaagtattgctcaaaaataatgaaatagttttaaaatatttcagacgattcaaagagttaaccctatacctaagacctgtaaaatcacaaaaccaaagtgtctatactgtcttacatatagatttatgtttaaggctattatctttcttcttgaagaaaatatgtaaatacaattgaaattaaagcaactaattaactatatgtattacatgaactgagtaatgtaaaatgtaacatagcattctaagtgactgccaagatatatgaaaactctctgtgcatcttaacgttaatactctttttttccaaaataagtatggggcttttttttttatttgtggacaaagccatcatagaatcccttgtctgatttgtccagatcccatctatgataataaaaactggaacaattag

SEQ ID NO: 367 - DNA, 1000 bp, mus musculus
ataggcacacacacacacacacacacacacacacacacacacacacagaggcacacacacacacaaacatattcacacatgatcatgtttgctttgtgttgcttttgctattaaatattaataggcaaatttaatacctagtgagttgttatctcacacttgggaatttatattgtactactatagaaattattgaaagaaacaaatcctatcagagaccctcatgctgtctggaggcctgatcatctggaatcatttttctctcaaaactgcaaagctctggctgctgtctattctcatccgactactcccatgccatgtccacagtacagactctatttctttgcaactacagaccaatggcaggcctacatgtctctttctctctgcaaatgatggacatgacaggaacacataacttggcaacttgtgatgcagactttggtatgtagcagatcagatgataacagaacactttctaaaattcatggtaaaatgttaaaatcaaagcaaatatttgtaactctcttttatctgtggtcatagataatgctatatataaatggtaatagttcaagtgcactaagagagcatttgcttgtttctgacaccctgtacctttgaaaatcaagggataggaactccacagcaagacaaacagaatcaactaacctggagccttggggctctcagagtctgaaccaccaaccaaagaacacacaggggctggaactaggcctccccactcatatgtagcagatgtacaccctgaccttcatgtgggtcccagacatctggtacagaggccagcccaaaagctgttgcctgtatgtaggatatgttctactagctggtctgacttgtttggccttagtggaagaggaagtacctagccacacacagaaatcaaataccaggttagtggggagtacctgagagtccctacccacttagaggagaaagggagggggaaaagcttgtggaagggagtgatgggagg

SEQ ID NO: 368 - DNA, 1000 bp, mus musculus
tcattatagtatcaaccggctaagaaaggtatgtcaaaatcggagctattttaatattattaaaattatacaagcattttatcatgtaagtttctttcgtaggtttattatttggagtatttgcttattctttttttaaattttcatttaatctttttttttaaacagtccagattttatttccctctagtccaccctctgactgccccatatgccatacctcctccctgtctgctaccctactgtctccacatccccctttagcatccttcaccccacctcaccccaccagacctcccaaatccccagggactccttaaggctcttgagggttaggtgcatcttctcttactgaatcaagaaccaacaatcctctggtgtttaggtgttggggagtctcatatcagctgatgtatacagcctgattgctggctcggtttctgagagatcccagggttccaagttagttgagactgttggtcttcctatagcgtcaccctcctcctcaacttcttccaacttttccctaattcaaccacaggggttgcctgttactgtccattggttaggtgtaaatctctgcatctgactctttcagctgcttgttgggcctgtcactgagcctccttttcctcaggctcttctccatttttattcctgcagttccttcagataggaacaattctgggtcagagtttttgattgtaggatggcaacaaccctgtttgtccacttgttgctctgtctttccactagaggtggattctacaagtttcttcttcctactgtagggcatttcatctaatgtccctccctttgagtcctgaaagtctcctagctccaaggtctctgctacattctggatgcccccccccacctcctacttctggaggttgcctatttccattctttttgctggccctcaggggttcagtcctgttttcccattcaatacctgatcatattctccttttctcctccctgtccttttccccaccta

SEQ ID NO: 369 - DNA, 1000 bp, mus musculus
tatttccacaagaacaaatactgagagctaaactttttttttttttttttatgtctagtggtgtgttgatatcataggtttctgcacagattgctgagcaacattagtaggtttagaaaagtcagaacttgtccagactgaagcccaggaccagatagcctaaagaacgtcgaagtgtaggtcaagaagtcatgaaagtagtagagctgcccctgccccttacctgctgcagcactaaggagacatggccctcacctcacatgggcagtacagtagagctggctcttgggggcatgggcatgggagaactgtccctgagaacatgagagcaagagagcagatcctgccacttgcaggctacagcactgggtataccagatgaggcagtgctggacagctcaggcaggtgtggcctgtgcaggagagctggtgggctgaccacctcagctatctgaggctttgaattggaccacgtcaacatctaccctatccatgaactcctgaaacacatgaaaaaactggtcccacagatcagaagctttatgagctccatgatgcagagtaaccacaactgaggatctattgttgatagtgtagcagaagctagaggacttgaaagagactgtattagttagggttctctagagtcacagaacttatgaataatatctatatagtaaagaaatttattgatgactaacagtctgcagtccaattcccaacaatgtttcagtagtagctatgaatgggagtccaaggatctagcagttactcagtcccacaaggcaagcaggctaaggagcaaaagcaaggctcccttcttccaatgtccttatatggtctctagcagaaggtgtagcccagattagaggtgtggtccaccacacctttaatcccagatgaccttgaacttggagatctcccctgtcttaaccttctggattgtagctcattccaaatatagtgaagttgacaaccaggaatagccactacagagacc

SEQ ID NO: 370 - DNA, 1800 bp, mus musculus
acggttgaataagacactgatgtatgaatatagcagaatatcatcagtgatcactttttgtcattttggttttgctcagtagtatttggctttatgttcaacactcataaccattaaggaaatgaaaatcagaattattttgaaattctatcttcttactgtaagaatggctaaggtcagtcataaaagtgacatctcgtgctagcaaggatatggattaatacggacacttctccattgctggtgggattggaaacttctatagccactataaatatcagtatggtgtttccttagaaggattagaatcaaaatacctcaagatccagtgatacccctcatggatacataaaaccgttgtgtcctactacaaggcagttgctcaatcatgtttcatgctgctccatttataatagtcattaattggaaacaaccttgatatccctcaacaggatgctatgtttacacaatggagtattacttaccttttaaaatatggtgttatttccaacttacagtcaaatgaattgaactagaagaaagtcatcctgagaaagttagcccacaacaggaaagataaatatggtgttcattcacttgtatatggatattagctgctaaataaatgataacaaagataaagtccatagatccagagagggtaggtgtagaggacgggaccagagggaaacatggatctctctggggcagggaagaaataaaatatattttattgcttgacaagaaccagttgtgggagaaaaatgagagaaatgtgagaagggtgaagggggactgaattaagaggagagagtagagagatggaggagtaaggaaagaaggtagaggcaggtagaagtgaaaggcgtctgagggacattgttttgaataagtagagaataattcaattaattctgaaatcatgtaatgctgttttgaaactaagatttagaaatgtatcatgtaaataatttgaaaatcctctctaaaatacaaaggatgtaatgcaaaattcacagtataagctgtgctgtatttttagcatttattaactatttataattacttataatagtaaatataggttacattttatataatatatctgaagtttgttttatgataaatattttcacattattgttggagaataacatgtagagtttcaatagcattagacatagccagtattttgacttaatatgtaaagccatcattacaatctgatatgatgaatctataaatggggatgcatgctttgaaatactaattataaaaacataatatttgatatttttaaaatgacaagttgctctgcaatggtggcacacaactttaatcccagcacttgggaagcagaggaagaaggacttctgtgttcaagatcagccgggtttattgagtgagttccaggacagccagaactacaagagaaaccctgtcctgaaagaccaaaaaaaaaaaaaacctgattgttttactggagaaatataaaattcattatttttcatatgttagtaaagatctaaaatgatcgaagatataaattcaatcagtgagaaattttctcttacaccatggaaaatgactcataagataaaatcacttgctttctacaacagatgacattagatcagatccatagaatacacatgaaaagctgaatataataatatgctgtgtaatctcttcattccgcgagaaagttgttgctaagataaaagaatcagttgaagaacattgagttaccaagaccactaaagtgtggggtacaaagacagaaacaacacaatacacttt

SEQ ID NO: 371 - DNA, 1200 bp, mus musculus
gtcatgcctccatgcaggaccagaggttttactcagatcctattttttgaccaaaagtcacaaagcagtacagaaaacaaagaatttaagacaaattaaaaaaatgagttcctacaataaccaccttttattacaaggaaaacagtttgccttcagtggactccacctatcctgccaacccatcttcattcagataatagctcaaagcatcagtacacatgtgaggttttctttcttctgtaacatagcatttaagtcttcctaaaatgtaagtgtgcctgtgtccttgtcttcaatttagtgtgttgccagagaaaatgagataaggtccattgcgcatcaggatagaagtgtacctcaatattctctaagccagataatgtctggctatctctctagctgaatgatttactgcagtgaaaatcttgttggaaaataggaaaacaataataacaacaaacaaacaaacaaatgaaagcaaacatgaaggaaaagatccaggaatctttgtgagaggagaaaaaaatagaaatactaattcccattaacatgatctttttaaaaagtgggtttttttctgcaccgttatgtatttctatttttttttcttgttctgacaaagtaggtaatgctctgacgaaaacacaaaggaacttagaagtgtcgagtatctttcaagtgccaattcattttatctgcaattctactgcatcaatctgatagtgaagagacagtgtagaaaagcataacagaaaggatgaaatgataactgctatagtaaatgatggagccatttcagtgcacactgcagtgtgaagctgtttgatatgcaaatctccgtttctcggctctgcatgcttccatcatgtttctctacttgtgttttattttgaatgtttattaactcatctctactttactaaatctttcctcctctgcactccatatgctatgtgtgcagtaaaaaactcattgtattaaagcatgctttcagcattttgctttattttaaatacttttaagttattcagaagaatcaagatggtaatgaacactttatttttgttgtctcgataatgaaattaatagttattctgtgaaataaactcactacttcaagttgaacagatctctattaatttggatgacaaactgagctaatttgatgaccaagatagcattactactttgttgattcaa

SEQ ID NO: 372 - DNA, 1200 bp, mus musculus
aataaagtgctatttttgataattataatataatttggttatataatttcaaattttacttcttttgaacacatcatatgaattaagctagaaataacattattcaaaatcaccaaaatgtctcacttcacattatctccatataatcattaagtcaaaagttgatactctattagaagtgtcacatatattaaatgaaaattttaagttgcatgcatattgtaaaccttgactcaaaatacacagttctctcaacagtatttaaataagaaaaaaaatctaacataaaaatagatttctaggtttctggaatgctgtcattgaacaacaatcacaattttactaaacttaataatttatggataataactgccaagcagtggtggcacatgccttgaatcccagcacttgggaggcagaggcaggcagatttctgatttcaacgtcagtctggtctacagagtgagttccaggacagccagcgctacacagagaaaccctgtctcgaaccctcccaccccaacataataataataatttgtgaagaatacttggtagctatatgcactaaattttggacatgatttatctaagatatttaatattttcaaaacaattattaagtagatttatatgcattatatgcatgtataaaatttaaaacgtatttgcaaccacagccaaaagaaagcagaaaaagatatacgctatgtattattcaacatggtactgtgtgattaaaatcacatgctaactatgaaattagagaaaacctgagatggtggtgaattaaacctgacatgagtttcctggtgtactttaatgtctcattgggatcatctacacacacacacacccacacccacacacacacacacacacacacacacacacacactcacacacactcacaccacacttgagatatccactctaaatagagagaatacattcaatgtacaaatcctaatgctaaaaatgacaaaaagatattttcttaatttggtatttagcaaattttctcaacactcaccattcttgacttgcatgagtacagctggatctagtacagagaattgtggcaatttgtgtacttatgctaaagaagcctaattctgaggtaaaagatcttgtgttaaagcagaataaattagaggcactaactcctttctccacagactaacttcataagtgaatact

SEQ ID NO: 373 - DNA, 1000 bp, mus musculus
gaaaaggactgaagccctgagcgccagcagtaagaatggaaacaggcaaacttgggagataggttcgggaccctccagaatgcaccagagacctaggaagtgaggaattgtcaggactcaaagggagggaccttagatgaaatgccctatagtagggagagggaacttatagagctcacctccagcaggaagacaggacatcaagtgaaggatggggttgccatgctacagtcacaattctgatccataattggttctgtctgaaagaattacagggatagaaatggagagaagcctgaggaaaagaatgtcaatcaactgtctcaaggggaggttccaaggcctgacattataactgagactacaggtgctcacaaaaaggggcctatcatgactgccctcctaaagacccaacaaacagctaaaagaattagatgtagatattggcacccagacaatggacagaagctgctgacccctgttgttgaattagagaaggctgaaagaagctgaggagaagggcaacccagtaggaagaccagcagtctcaattaatctggacctctgagatctgtcaaatattgtaccaccaaacaggcagcatataccagctgatatgaggcttccaacacacatacagtagaggactgccagtcctgtgttcattcaaagatgatgcacctaatcctcaagagaatggaggccccaggtgtttagaggtcagaaggggtggaggggttgtcatccatgtgcagacaggtaggtggggaggaggtatggaatgtggaacagttggagggtgggtggatggggaataaaatttggagtgtaaaaattatttaattaataaaaaagaaacatctgaatagtaaactgtagaagaggtgaagttttacaaacaactcatctaataatataaagaaaatctaaaaaaactttaaaaaatattaataatctatccaacttaaaataagtcaaagatagaatagagacttccaaa

SEQ ID NO: 374 - DNA, 1000 bp, mus musculus
acaggaaactcatagcttgccatgagttagccactttaaccattccatgttggaaaccttcactcttcctactacaccatagggccagtggcagacagagtgtgtggggcacgaccctcactacccagtgttgcagctctgagccactctccagcagcttgtcctttgtctctgtagctttctggggctcttccattagtttcagatttcactcctctgcagcctcagctcttggcagtagttcaccacaccagtatctactcttcacagctcttcagttcccccactactaccacgccacccacccccgtggatctgctctctattatcccttgccttctttgcacttcacaagactcagaattctgcagactttgtgaaccaagccctgtcactcttctgttgttataggctatgcttggagcccagtaacctgggaaatacctacattttatgccaccagctcagcccactctaccaatggaaatagaccatatctaggaagtaaaaccactctaaaaaggttttattgagaggaggactggaaagaatgaaggtttccatgaatgatgcctcatgagtgagaataactctggttagatgccactgtcacatgcttatgctaccatgggttggatggaggctccttaatatcccatttaagggctgctatgatgaggtccaggttggatgtgaagagaggaaattatctctagttattgcagggaaggtccatttggtagtcatccgaaggagtcactactgtctcccaagtgatgaatggcatttttggtgattcctactataaaggagtctcttatgattacattattattgagtaatgaaaccttggtctaactacttggataaatgtatcaaatgaagcagtcaggagaattttaaaatggtagggactgtccaaatatgtgtttatggtgtcaacaagggcagctacttaaatgacatcttccagcacccctaaatgcgcaattgctaccat

SEQ ID NO: 375 - DNA, 1200 bp, mus musculus
attgttactacttccattttcagatcctggatcattttgctcaattccttcccctgtttgtgttttcctttaattctttaagggatttttgtgtttcctctttaagggcttctacctgtgttctcctgtatttctttaagggagttatttatgtccttcttaaaatcctttatcagcatcatgatatgtgattttaaatccaaatcttgcttttctggtttgttggggtatccaggacgtgctgtggtaggaaaactgggttctgatgatgccaagtagccttgggttttgttggtaaggtttttgagcttgccttttaccatctggttatctctgatgttagttagtcttgctgtctctgtctggagcttgtccctcctgtgggcctgtaatcctgtgtaagcactcctgggagaccaactctctccttgcagaacctttaaacagaaggctgtggaacagccttagctcagtacagatggcaaccttagggatcttgtcccagatggtccactgttcctgttccctgtgtgcttacttgagagaaagtggctatctcacctcttaacctgggagtgagagcactcctggaagaccatctctctcctggcaagacctgtgtacagagacctgtgctacatgaaacctccttgaatcatgagagaatatagaatatttggcttcaaatgaagaaggattttatttttatgctggaccagttatgacattatgtgaattttcaatagaaataaaaatagtcaaagaatatgttacactaataaaaaatcatgttatactattttatttattgtttgtttgattatgcatgtttcttcttaatgacacttacaagtcttgcagatccttgatgtacacttttgtgatggagcatttgtggtcatttctgcctcaagtgagatgcctattcactggtactacatcctgctttatctgtagctcttcaatgtcctggtttatcaatctcaagatgttatagctactactcagaaaagcagcaggcaaaatatgtcatccaaattatcggtgttacagattcttcttatctaaatagtgattggcagagtctagattacattgaagaagaaggaagacaggaagaaaagaatactctgctctataactttaacaaaagtttaataaaaatagaatttatgagttttgtgctagctttttgtttta

SEQ ID NO: 376 - DNA, 1600 bp, mus musculus
cattcagaggagtataggtgtagtggaagtttaaatgtaatgtaatgctttgtggatttgccacatcaagaattttcaaattattcactgcaaatctattcactccgtcgcatttcacttaaacctcaatatgtctcgatcagcctcctcctcctccttcctccccctcctgctcctgtcttcccttctcctcttcctctccctaaccctcccacctcacacaagccagcctcaaattgtcctcatccttctgcctccatgtcatacttgctaagattatgcacattaatgccctcccactaccaccacctaatgagtatctgctaaagaagtaataatatcagatgattattcatggcagcctgtcagtgccggaaaccactccacttctttcagggttaagaacaagtaggattgccctggcaacaggcaaagagaaacctccttgatagcagtgttcttacatcagtcaggggcagatgggtttggtggccaaagttgtattatgcctaggacttctagaaatcaaatcaagtcaaatctaggtagacagtgcaacaggaggaaggcagagagaaatctgtagagtaccatgccacctacacacctgccctctggcgcatggcacaggtgggccacagacatcagcttgcagccatgctacgccccagtgatagacgatgtcacccaggagcctgccagccaaatggtcagcctgcagcaggagccactacaatgtgtgagtatgtagttgacaggtgggagagaaagagaagtggaacagcttgaacctcatgaagagagatagaactggagagtctagggttgagagaaatagcctgttgcgagtggccagtcccacagcctgttgctgaggaccatgtctgagtccagggctatggagctgcaggggtcagtgtcgacatccttggctcatattaccattagagaacatggggacatccctggtcaaggcaactgctagagaccacatggatgtccagggactgtgcagacctgaccctgccctgtctgcagagccctggagagctggttccatctcacaactgagacagcactcaacaaggaaggcactgtttctctcccaggcagcacagcgaagctggccctggtgccagggttgtgggtggtccagccccaagggtctaagtgtaagagaactgaccttaccactcatctgccatggagggggcatgggcagagaggtgattccgtgctccccacccctgccccttgccacctcaggaagtcaggaaagctgcccacagattcagggtcatgagcttgtaagagttctgccccctcacccaatgcagcacacaggaatgtggcccctaacctcacctggacagcatagcagagctgaccctagtggtgcagacacaggcaaggcaatcccaacaagtgagagggagaatagagcccaccactcttctgccttgaagtggtgtgacatgggtgcaggagtagtgccttccccatcacccctcactacctgaggcagtcaggagaactagccccggggtcctgacagcaggaaagctggctttgtccctctccagctgcagtataggcactg

SEQ ID NO: 377 - DNA, 1000 bp, mus musculus
gtagtttttacaactatatagtccaacatccaacatggtggtttgaataaaaatgatccccataggctcatagggaatgagtggtactattaggaggtatgaccttgttggagtaggtatgacattgttgtaggaagagtgacagagttatctttctgctgcctgcagatcaagatgtacaactctcagctccttcttcagcaccatgtctgcctgcataccaccatgtttcccactatgatgacaatggactaaactcctgaactctaatcctgcactaattagatgttttcctttagaagagttgctgtggccatggtgtctcttcagagataaggataccaatccacccacaaaacgtttggcccaaaacttatcctgtctaaaataaatgcaggaacaaagatggggaagagaccgaaggaatgcccaaacactaaccagcccaactttagacccatcccttgggcaagcaccaatccctgatactattaatgatactctgttatgcttgcaaacaggagcctagcatgactgtcttctgagaggctctacccagtagctgactgaaacagatgcagatacccacaactgaacactggatggaagtcataggtccttttggaaaggttggagaaaaaattgaatgtcctgaaggggataggaaccccacaggaaggtttacaaagtcaactaacctggatcctaaatgttcttaaagacaaagccaccaaccaaagagcatacacaggctggactgaggtccctagcacatatgtagcagatgtgcagctcagtctccatgtgggtcctaaaataaacagagtagaggcttttcctaaagctgcagcctatctatggtatctgttctccaacagggctgccttgtctggcctcagcaggagaggatgcacctaatcctacagaaactcaatgcaccaaggtgagaggaaatggggagggaggaggtgcaccctctcagagaaggggagaggaatgg

SEQ ID NO: 378 - DNA, 1200 bp, mus musculus
ttatccctaccactcaccagctgcagcactcaggagagcaagccctgcatcttgtctggacagcaccatggagctggccccgatggcgatggcaggggtgtgggtgagcctcctctgagggcgagagcttgggagagcttacccctttactcccctacccccctcttgcctgccgtgaagtggcttgggttatggtataatgccccttgccatctttggtagtctggagaactggcccggagcacatgagagtggaagagatagtcccatcccttcattggctgtagcacttggtagagtgggccctggaatgtgtgggccacatgtcgagctggccatggtgacaaaggcacacttgtgccagtcctgagagtgtgaaaactgtctgagacccttgcaggcagcaggacttgggaaaatgcacccccccccaaaaaaaagaaccctttgggccacaaatttgaactggctctggaagcctgaatataggtaaggatgagccggctctagggcatgaaagcaggagagctgatcctgtctcctgttaatggtggcattgggttccttgctgaagctgtgctggagagctcaccctggtggtacagacatgggagaggtggtgagccttctgccacccaggtccagttctagggctctgaattggcctacccacaaatctgtatcatctcttaactgttggacacattaaagggccagtcctgttgatccaaagctgcaaggtctctacgacacaaggcagctaatgaagattcaatattgatagtgtctcagaaggcagagagcttgatgcagaccaatgactcattacaataaacatttgctccatttcctgcccctctactcttcctacattcctggaggcctgcaggcaccacagacaagcaagtgtgaccctgttccaagcccttgcctgacatatttccctgaaacaaacccatcagttttaacttgcactctgcccaccagcaagagaagcccctggctacactggtactagggaccctagaggcaagggtagaacccaaaaccttgcaggcagcacaggccataaaaaaatcccaggggagacaccatactgtatctgaagactggttagtcaccagaattccaggccacttaggccagtagacatcgaggaaacagatactaagggaaaaaaatccaaaacacccatccaag

SEQ ID NO: 379 - DNA, 1000 bp, mus musculus
atacgagtaaggataattcatcaaccatttatcagattaagataaaatattttttcaggatactgtgatctgcatgatcctcaaaatgtaggtatctaagcatgatgcctactgtagaagtactgtaatatagtgtcataaagcagtgaaggctgcatctctatgaatgcatcattacctccttaaaggaccagcactggtggggaaacctgcactgcttcctgctcggtgagatttcctggaccacacagtttgtggaaactgggctctcaccagacactggtgtacaggtgtccaaacagtctcagggactgtgagaagcaaattctttatggaatactccattttggcttttgttataacagcataaatagatgaaggtagatagctcctgtggtcttattctctgattcattttgagtccacatagacttaatggtcaaagaggaataagcccataaccttttctatacttgactatgaggtcttcatactaataaaactgtagctagttagagtttctactttatttcaaagtcataatttatgttctaactttatttttcctttaaggatttttccccaaggatgactaaatccattcacaaattacttgtagttgtgtaagaatctgaattctccaaagctattttgttcactccccaaagagaatcctggctgtgatgatcaatttaaagactaagtgattctgaaatagccccttttgagactttgtgtcagagtactctgcaccatcaacctccatatctagtgggattgccaacttgtacaaccactctggaaagcattctggtgattcctcagaaaattgaaaatagttctacctgaaaacctagcaattccacttctgggcttatacccaaaacatgttccattatattacaaggccatatgctctactatttcatagcagacttatttataatagccagaaattgaaagcagctctgctgcacctcaattgaagagtaatacagaa

SEQ ID NO: 380 - DNA, 1000 bp, mus musculus
ttaattaatgaacactccagattttattccccgcccccgttcaccctccgaccattctacatcccacatcttctccccaccccgttgtctccataaggatgtccccatcccctaccccaccagacctctaaacaccctggggcctccagtgtcttgaaggttaggggcatcatctctgattgaacacagaactggcaatcttcttatatatatgtgttgggggcctcatatcagctggggtatgctgtctgtttggtggtccaatgattgagagatctcagggtccagattatttgagactgctggtcctcctacacggtcatccttctcctcagcttctatcagccttccctaattcaacaacagtggtcagctgcttctgtccattggctgggtgcaaatatctacctctgatcctttcagcttgggtttttcggagggcagtcatgataggtccatttctgtgagcgctccataggctcagtaatagtgtcaggccatgggacctccccttgagcaggatcccactttgggccaatcgctggaccttcttttcctcaggctcctctccatttccatccctgcaattctttcagacaggaacaattatgggtcaaaattttgactgtgggatggcaaccccctccctcatttgatgccctgtcttcctgctggaggtgagctctataagttcccttttcctactgtctgggcattttatctaaggtccctctctttgagtccggagagtttcttgcctcccaggtctctggtgcattctggatagtccccccaacctcctacctccagaggttgcctgtttccattcttcaagcactattttatacagcaagaaacatgggcaatattttaatcaaacaacaaagaaaattcttcctatcatctcagatattcattgatgaattctaaagatcaatatttaaggttttagggagtcatttgtgtgaatgcttctttattgttattgtcattgtattta

SEQ ID NO: 381 - DNA, 1000 bp, mus musculus
tattcaaaaggaaaagataatcctaattataagacttctcaacgagtcaagattttacagggctgtagctacaacaaaatcagagggtgtcaaattattacagaaattgtctcatgtgattacagagatcaagtaattaagctacagagactgttcagtgtttaatagcacttatttctcttgcagaaagccaagctttgctttccagtgcacacatgatggatcacagcagcatggattcctatttcagggactcccataccctgtataaatttccttcagctcctccacatttgtgatatatatacttttatatatatataaaagtatatatatatatatatttactcagcaaaacacacacacacacacacacacacagacacacacacacgtacacacagtcacataaaataaatatttttaaaagaaaggtgcacgcctttaattccagcacttgggaggcagaaacaggtgaatttcttagtttgaggccagcctggtctactgagtaagttccaggacaaccagggctatacagaaaaactgtatcttgaaaaaaaccaaaccaaccaaccaaccaaacaaacaaacagaaaaacgaaaccaatcaaccaaacaaacaaagaaaaccaaataaaatgtcatgaacacctcttcagaagctgaacaacactcataaagggaactaatgctaaaactcagtcttgagtgaagacctaaaacatgggagagggtcatgtaagtgtccaagtgtccaagaaccaatatttcaaattgaaagcaagccgagcaagccagggtggaaacaagccagtaaggaacatccctccatggcctctggatcagttcctgcttcctgacctgcttgagttccagtcctgacttcctttgatgatgaacagcaatgtggaagtgtaagacgaataaaccctttcctccccaacttgcttcttagtcatgttttcacaggaatagaaaccctgactaagacagaagt

SEQ ID NO: 382 - DNA, 1200 bp, mus musculus
ctcaaaacattcccatttcatttctgttttaggaagtccatacagctgttaactgtcaaaaagaaatagaaagagcaaactggcttaaattgtgaaaacataaatcaatagaccaaagctatcctatcagattttttatgaggttggcttaaattgacttaatcaaattaaatgttctcaatacttcactataaaaattgctgtatgaagtttttttattggttattttatttatttacatttcaaatgtttttccccttcccagttttccttccacaagccacctaaccactcctcctgctccttgcctctatgagggtgctcccccacctgcccacccactcccatctcagcagcctagagttcaactgtcttggatcaccaggcttccacaggaccaagggacttccctgccatctttttcacagcatttcagttcactatatcaaagcatacttaagaaattactctatatttcaactcttttgtgcattaaaacataatgaattttttgtcctatgtaatattctataaaaggcaactttcacatttttctattcagtatagtagcttccctattctctactcgcttcttacagagtttgtgtcccatcacattttcagttttagcataagattcacccccccacacacacacacacacttgggtattttctttacttacatttcaaatattttcacctttccaggcttccactttggaaagccccatcccatcccccctccccctgcctctatgagggctcacccacccacctacttccatcccccagacctggcattcccctacactggagcctctaacaccctcaggccctagggtctctccttccactggtgtccaacaatgtcatcttctgccacatatgtggtcagcgccatggattgctccatgtgtactctttggctggttatccagtccccaggagttccaggggtgtctggtctgttgtttctcaagtttctgtcatatgccaaggttattttcaatgtttatgttcagacccttgtcctacacagatatgattagaattattcttttattaatgtgatagataatgtttgactccagaggctgtctctaattgatagccacttgtaaataaaaatgttgttttctccaaggactctcacaaaggaaacgaatcatcctttccttttttttttttttcttggata

SEQ ID NO: 383 - DNA, 1000 bp, mus musculus
aggtgggtcagggtctttcctgcctccatctgcacccaggaggtgggggaacaccaaagagtattccacagccctctgtgcactatcttgcaaggagagaactggtttcccaggaatgctgacacaggattacagactcacaggaggaagaagctccacccagagacaaaaagaacatctaacaccagaaattaccagatggcaaaaggcaaatgcaacaatcgtaccaacagaaagtaagattacttggcatcctcagaacccagtactcccacctctgccagtcctggataccacaacatactggaaaagcaagatttggatataaaatcatatctcatgatgctggtagaggattttaagaacagtaatagctcccttaaagaaaaacaggagaacacagctaaacaggtagaagcccttaaaaaggaaacaaacagacaaaaaaatcccttaaagaataacaggaaaatgacagttcccagaggactctccacaccacaggctccctagcacacccaggatcttgggatcactggcgagtggaatgcaacatcttttccaaaaacaacccagagggccttgggccagcaggaacagggactctggaaacacacccagccagcagctagggtacattctggtcattgccagctccgcaccaccttgggcatgaattcaggggacagtcccaaggtccccagaggactctccatgctgcagacactctattacacccaggatcttaggaaaactaaggatagtcagcctccagagagggctctaaccctgagactcagatgacagcaccctcttgtatcctgggtcttgcagagaccagtccacacataagagctcgtgggcctcagaagtaaaagagcttattggacaggaagccttgaggccttcatcttcagccaaaacgtggatctcagctccagacctctgtgcactttccctgcaagaggagagcttgcctgcagggagtgctctgagcact

SEQ ID NO: 384 - DNA, 1200 bp, mus musculus
caacattcttacagaatttcaagcccatggtcttgctcaaggacgttctaggactgttagaacactggcggaaggctttagctatgtcagaattcaatcttaaaaggcacttataataggaaaatactgaaagagagcacgtggatccatacaatagactaacacgggaatggaaaattaatgtatgggttagagggaacgccagactccaggaggagagcttccttgaagctctttgcctcatgagtgactttcaagcctctcggcttaagctgacttgaccaaggcaggatccgggaaccaagatggctcacccaggtgctgtggcaaagccctcctatgtggggtggacacctctcttcaggcagggaaggtgtctggatgtctcaagcctgaaattcaatctgcctcagaagttctgtggctcctgcctgtcccagaagctgttagcttctgtagtccacactctcatctgtgcagactagtctcggtgggaatccaggaaccaagatggctcccctagatgttgtggcaaagccctcctgggcaggggcggacacctctcctctggcagggaaggtgcctggatgtctggagcccgaaatgtggtctgctcagaagttctgtggcttctgcctgtcccagaagctgttagcttctgtagtccacattctcacctgtgcagactagtcttggcagaatccgggaaccaagatggctcccccagatgctgtggccttaacttattatttgttgaaccaacgttatatcatgcttcattacctattatagtaaaaaataaaaatagttagcactcaaactccttttaaaattattttacagtctttaaatactggcgtgctttaaatattttgtaataatgttacatgaaaggatctggtatctttaatatcatttacaaaattatattgaagcttgcatattccatcttataaatgcccacaactaataaaattatattcttagtattgatttttagtatctcaataatcaatagtttttactgactttacaattaacatttgtagtaatgcactgtatatggcaaaaaatagaagagttcttcatatgcttaaacttatcatttaaacttccctaaataatatgcataggctgagcagtctccttttcaataaactgcattaaattctacattaagtatggcctttcacactgctc

SEQ ID NO: 385 - DNA, 1200 bp, mus musculus
cctcctcctcctcctcctcctcctcctcctcctcctcctcctcttcttcttcttcttcttcttcttcttcttcttcttcttcttcttcttcttcttctaattattttatttacatgtcaaatgttgttctcctttttggtcccccctcaatgagttccccagtccatttctcctccccttcacctctaagagggtgctcacccacccacccatttccacctcaccccctagcatcctccttctccagggcatcaagcctccagaggaccaagcatattccctaccactgaaaccagacaagacagtcctctgttacatatttaaaaggggccatagaccaggccacatatttttttttttggaggtttagaccctgggagctctgagatgcttggtaagttgacactgttattcttcctttggggttgcagtccccttcagctccttcagtccatcccctaactcttctacaggggaccccagactcagctcaatggttttctgtaagtttctgcttctatttcaggtagatattggcagagcctctcaaaggacagtcatgccaggttcctgtctgcaagcatattgtgacttcagcaatagtgttcaggtttaatgtctgttcatgagatggatcccaagttgacgtggtctctggatggcctttccttcagtctctgttccatttttccccctacattttctttagacaggaacaattctgggttaaatattttgagatgggtaggtggccccattcctcagctggaggtggctattttcctgttattgggcttttcagctaatatcatctccacttgttcctaggacctcccacatccctggtgtctgggactttctcgtggttcccactgttccacccccacactgctgcatatttctattcattctccaggtccccggggcttctttcctgtcttcactcatacctgatcctggcccctcatttttttctctcccctcccctcttccacccaggtcccttgctacctctgcttcctgtgattattctgttttctgtctgttctaagtggaatggatgcatccatacttggttcttccttctactgtgagttttatcgtgagtattctgaactttttggctaatatccacttatcaatgagtatctatcatttatgtccttttgggtcactcaggatgatattgtctagttctat

SEQ ID NO: 386 - DNA, 1400 bp, mus musculus
catatatattctattttattatattttttctgtcaacaattacttcaaggttttttttattactttttattaattattttatttgttgcctttcaaatgttgccccctcctggtccccctcaacaattcctttaccacatccccttccccttttcttctaagagggtgctccccaacccatctacccactccctcctcaacccacttgcatcccacttccccagggcaacgagtttctacaggattaagcacactttcctttatcactgaagccagacaagggcagtccctagctatgtatgtagcatgggccatggaacagcccataattgttctttggttgatggcttagcctgtgggagttctgaaaggttcacattagttgatactattgtccttcctatggagttgccattccttttacttccttgtatccttcccctaactcttccataagggtccctgacctcagtctaaagtttgtctctaagtgtcttcatctgtctcagtcagctgctggtagagcttctcagcggacagctatgccaacctcttgtctgcaagcacaacacggcataagtaatattgtcagggtttgatgccagcacatggaatgaatgaatcccaagttggacccgtctctggatagccttcccttcagactctgctccacttttgtccctgtatttcctttagacaggaacaactctggttcaagaatgtttaagatgggtaggtggccccatgcttcaaatggggatcttgtctatctactgaagatattctatttaggcttcatctccccactgttgagcattttgggtaaggtcatcccccttgtgttatggaattctctcacatccctggtgtctgagactctctagataccccacttcacacatacacatacactgctacttattcctattcattctcttggccctctggggtttctctcctgactcccaccatacttgatcctgccccccttttctgtaaactcacataattgtgcaagtgatactaaattcaatttttataattttgtattatggaaactgagatatttgattttagcagaagaaacaacatgttaaatccttatgaaaagatttaaaatcaattttgtgggatgaataatgatcaaacatatcagggataatgttaagaactcataaaattatattataaagaatgactattttagccataaaaatgttctaaagattaactctaggagtatatatattctctataggactatatcattttgctaaattcccagcccaggaacaagatagtgttcaaggtttgtttaaattatagttcttgaaaactatccatatttggacactaaataaaagcaatactgtcctcataagataaatgccaggaaaaaa

SEQ ID NO: 387 - DNA, 1000 bp, mus musculus
agtgatacatagtaggccatttaaaaagatgataattttattttgtattctctaatttttttttacactcctgtcattatccccctgctggtccactctctgactgttccttatcccatatctctcccctccccagtctccaagaggacctcctcactccaccgaccccacaacactagacctccccattccctggggtctcaagtgtcttcagggttaggtgcatcttctatcactggtgtcagaccaggcagtcctctgctctatatgtgttgggagcctctgctgtctggttggtagctcatgtatgtgagatctcgggggtccagattagttgagaatgctggtcttcttatggggtcacaaacatcctcaacttcttctagcattattatcctaattccatcacaggggtccccagcttctgtccattggttgggtgtaagtatctgcatctgactctttcagctacttgtgtgcctcttggagggcagccatgctgggctcctgtctgtaagtacattatagcatcagtaatagtgtcaggacttggagcctccttttgagctggatcccattttgggtctttcactgaacctcctttccacgggctcttcatttttgcaacagcagttcttttagacagtaaacaattctatgtcagaatttttgattgtggaagggcaaccctaccactcaaaagatgataaatttataaatatttgtaatagtagattttaaagtactaactggaatgagtgttttaaaaactgtttctcagtatcagtgaacaaatatttcctgccccatccaaatacaaatatagccatatattttccttgttagagaaaaagacagtatcagcaaatttgtacataagaacataaataactgaaataatacaggttagaattcttagtttctgctgagagtagaagagactttccatcataaataatgtaattaatgtacttgtatactgagttttaatgtattagaa

SEQ ID NO: 388 - DNA, 1200 bp, mus musculus
caatatagataatttttttattcagcagggaaattaggtacatcaccaaaatatacgtaatttgaggaagagtatagtaaattctataacacacaaaatttctggtttaaaacaacaaaacatatctaagcctgatggagaacatcagcattcccagaacttcaaactcaaaggcaggaggatcatatattcaaggtcagcctgaactgtctaacaagtctgtatattaggaatcgaactattagagattgaaaaaataattatttggaatgctttttaaagaggtcaggcaaagtagcatcgagtgaaaataaggttgttgttatttgacttgcaatgatggcttagcaggtaagccctttgtccacaaacccgatgatccaaggacagggcccacataaaaaccctggatcaggtagtgtgccctggaatagcagcactcacacagaaagatgtggactggagatgagagtcccttagaagctcttagacaagctgtcacaattaagcaacatagtggcagaaaaagcaaggctctgtctcaaggaggttcctgggtgggagtggggatggaagtggcagcagagggtgggaggagtggagaggcatcaacaaagttgtcctattatccccacacatgggccatgccacaagcacatgcgcttgcacacacatagagaataaataaataaatgcaaaatattgatattaaaagatgctaaaaggcagcaattctttctcctaactctaggggaaaattcactcccgtgatttccagtttctaaagagagtgtgtgttctttgactagcagctccctttttctctctaaaagagcaacaatttaagtctctggccggtctttaataatcacatgtctctggaatcaccttactccccttttaaacagtgtgatcagtataaacactatgtccccacagacatttcctgattatttttccctattcaggttacctattcttaatgtttttaaagtttattttgcaaaataaagtaatatgttctgaggaggctttgaagatggccacttttggacttcctttctctacctactatggacctgaactttgggtaagttctatactattgtactaatttgactctatttacatatgacatcctagagctttgcattgtcctgtctggcttaacatttgtaaggtagttttattcttgttgca

SEQ ID NO: 389 - DNA, 1200 bp, mus musculus
tatttgtcttattgactatgtcctttgccttacagaagtcttccagtttcatgaggtcccatttatcaattcttgatcttagagtatgagccattggagttctgtttaggaaatttccccctgttccaatgagttaaaggctctttcccactttcacttctattagattcagtgtatctgtttttgtgttgaggtccttaactctttgttttaattaattaattgatttattttattagatgttttcttttttattatttttattgcgtatttattttatttacattttcaatgctattccaaaagtcccccacacgctctgccacctgctcccccacccacccactcccacttcttggccctgtacttcccctgtactgaggcatataaagtttgcatgaccaatgggcctctctttccactgatggccgactaggtcatgttctgattcatttgcagctagagacacgagctccggggggtactgtttagttcatattgttgttcttcctataggattggggatccctttagctccttgggtactttctctagctccaccattgggggccctgtgatccatccaatagctgactgtgagcatccacttctgtgtttgataggccctggcatagtctcacaggagacagctatatctgggtcctttatatacatttcaaataatatcctgaaagttcccaataccttccctctgccctgctcccctacccacccactcccacttcttggccctggaattcccctgtactggggcatataaagtttgcaataccaagcagcctctcttcccaatgatggccaactaggccatcttctgctacatatgcagcaagagacatgagctctgggggtattggttagttcatattgttgttgcacctatagagttgcggactccccttcagctccttgggtgctttctctagcttctccgttgtgggccctatgatccaacttatagatgactgtgagcatccacttcggttgggcataatactaccggaagatccagcactacctctcctggacatatatccagaagatgttccaactggtaataagaacacatgatccactgtgttcatagcacccttatttataatagccagaagctggaaagaacccagatgtccctcaacagaggaatggatacagaaattgttgtacattttcacaatg

SEQ ID NO: 390 - DNA, 1200 bp, mus musculus
tatctctgtgtctgtctatctgtctgtctctctctctctcttgctactttatttccatttattactgaaaatattaaaatatgttctatatgcagctcttttacattttggcatgtgtaaggatgtttaagttgtttatgattttaagcaattattgataaatctgttatacatatctgtaggattttttgttgttttgttttgtttggtttggtttggtttggtttggtttgtgacaaggtgtcactctgtattcagtcttaccgagaactcaccaggccaggctgccctgtgaattcaggcttctcttgcctcaaccttgatgctggaattacaggtaaaagccaccattctaggctacttcttggttttcttaaaaggtaaggatcaggtatgagaggagacagggatgatttacagggtcaggaatttgaacagatatgtgtagaaatggggggtggggaactggggtagccaacagaaagtcacagatgccaggaaagcaggaggctcccaggaccaaactgggatgagattagctgaaatggccaacaaaagagtgggaggacctgtagagaccatatctagcagtgaagcaaggtccccaggtggagcatggagccaccatgctcctgtctaaaggaaatacagagacaaaatgtgaagcattcactgaaggaaaggccatccagagactgccccacctgggaatccatcccatacacagacaccaaacccagacactactgtggatgccaaggagtacttgctgacaagagcctgatatagctgtctcctgagaagctctgccagagcctgacatatatagaagtggatattcatagccaaccattggactgatcactgggtcctcattagaggagttagagaaaagactgaaggagttgaaggccttttcatccccataggaagacaacaatatcaactaaccagaacccccagaccttccagggactaaaccaccaaacaaagagtacacattgaggggcccgtgacccaaggtgtaaatgtagcagaggatggacttgttgggcatcagtgggaggagaggcccttggtcctgtggagacttgatgccccaacgtagggaaacaccaggggtgggggtcaggagtgagtggttgcgtataggagtaccctcgtagaagcaggttaagggggcatggtatagggggtttc

SEQ ID NO: 391 - DNA, 1200 bp, mus musculus
gtgaaaaattatactgctattgaaagtattttaagggcttatgacttagtcaataaagtgcctatagagtaagtacaaataccttgatttgaccgcaagaatactcacataaaaccccaggcatcatggttaatagtaaacaaattttcagtgaagtgaaataagcaaaatcacagaactccacaaacatccaacctagacttctcaggagtctctagttcaatatcagactcagtttcaacaaaacaagggaatgagggtctctggtgaacaggctaatggtaacattttgtgtccatgtgccttcacataaatgtacacaacattcactagagtgaacacacacaaacacacacacacacacacacacacacacacatgcacaaacactacatgcataaaaattttagtacatgataaattagcacgaagtcatttactctgatttataatatgtcaagtattttcaaagttcagagagcatcataatatcctaatgatattcttgtttttaattagatactttctttatttacatttcaaatgctatcccaaaagtcccctatagcctctcccagccctgctaccaaacccacccactcccacttcttggccctggtattcccctgtactggggggcatataaagtttgcaagacctaggggcctctcttcccaaagatgaccaacaaggccatcttctgctacttatgcagctagaggtatgagctcagggggtactggttagttcatattgttgttccacctagagggttgcagaccccttcaattccttggttactttctctagtaccttgggggccctgtgttctatcttatatatgactgtaagcatccacttctgaatttgccaggcactggcatagcctcacatgagacgactatatctgggacttttcagcaaaatcttgctggcatatgcaatagtgtctgggtttggtggctgattatgggatggatccccgggtggggtagtctctggatggtccattcgtttgtcttagctccaaactttgtctctgtaactccttccaagggtattttgttccctattctaaggaagaatgaagtatccacacattggtcttccttcttcttgattttctcatgttttgcaaattgtatcttggttattctaagtttcttaaagataattgtcagttcttaccatcacaaattt

SEQ ID NO: 392 - DNA, 1000 bp, mus musculus
atgtctttctgtgagctgtgtctcgctgtatttttatacaggttgctgagtctctctgccctgatacatctcttcctggaataccgttcaatattagttcattacagaaaatgcctaaagtagatagataataccccccccgtgcatctatgttcatatatatgtcttatatgaatgagagagaatatctgatcatttacatgtctgataaatatatctctgttcatttgtctacatttctccttgtctggaggtctttttgagttaaactcttttcatttattagtaaagttataccttatctcagttcaaaatgattggagacagctgtacttttctaattctttctctgtagcctcaatgcatacatctctgtctcatttttgctctttcctgcatttcaggataccagtaaccccatatttagtctttagtacttctttgtattctcttcattataaaactttgtctcattattcgtcacagatgagtttccacataaacttagcatcagttctgccatctgtttcccaaaatgtgactatcttttcaatgactgcagggtactttagcacccccggtgtgtttcagatatatcacaaccgagctaagcagagttataattcttaaactttagaccacacactcttgttcccaagctatctaaagacttattgctgaagtcacaaaataagtctattcctaaatcaaagctgtcagaggtggtggtaccttctgagtcatggccacacgtatagctctttaatgagcacaggagagaaaaaccaggccctcattccagggtctgcctagtgatggttggtttgcttcagttctgctttaaactgacacctgcagctaacgctaatcaagatggcaaagcatcccaggagcctcccattgactggaaggtcgaatccaaccagaaaaatccaaacattctataaatattgaaatataagtcaaattaatgttctaatgaaaggttatttaaaaaaag

SEQ ID NO: 393 - DNA, 1200 bp, mus musculus
tggacatagtagtactggaagatccagcaatatatctcctgggcatatacccagaagatgttccaactggtaataaggacacatgctccactatgttcatagcagccttatttataatagccagaagctggaaagaacccagatgtccctcaatagaggaatggatacagaaaatatggtacatttacacaatggagtactactcagctattaaaaacaatgaatttatgaaattcgtaggccaatggatatatctggatgatatcatcctgagtgaggtaactcaatcacaaaagaagtcacttgatatgcactcactgataagtggatattacccagaaacttagaatacccaagatacaatttgcaaaacacaagaaaatcaagaaggaagaccaacatgtgtgtacttcattcctccttagaatagggaacaaaatacccatggacggagtttcagagacaaagtttggagctaagacgaaaggatggaccatccagagattactccacctggggattcaacccataatcagcactgaacccagacactattgcatatgtcagcaatattttgctgaaaggaccctgatatagctgtctcaagtgaggctatgcctggcaaatacagaagtggatgctcacagtcagctaatggatggaacacaagtcccctaatggaggagctagagaaagtacccaaggagctgaagggttctgcaatcctataggtggaacaacaaatgaactaactagtacccccagagctcatgtctctagctgcatatgtagcaaaagatggcctaatgggccatcattgggaagagaggcccctaggtcttgcacactttatatgccccagtacaggggaacgccagggccaagaagtgggagtgggtgtgtaggggagcagggtgggtggagggtatagagaacttttgggatagcatgtgatatgtaaataaagaaaatatctaattaaaaaaagaaaaaagaaaaataaagaagattaataaaatcatgatatttgcagaaaatagatattcctagaattattatgtccagtgaattagtcagattctgagagacaaacacaattactttctcccatctgcaaaccttaatttcaattatgtgcatgagattatttatacatttgtggttttggatcatgaatgagcatagaaggaatcacaagag

SEQ ID NO: 394 - DNA, 1000 bp, mus musculus
tgaccagtcaggtcccagagctaatttacaccggtgttgcttttttctatgtagtgtgttctaagatgagagactgtaaccttcattccttaacattggctgcgaattctcctgttcagggccaggagtgaaagataacgaggttctctgtcctcggattgagagacgttgtttctggagctctttctgaagaggtgggaagggggaattgtttgagacagggtcttacagtatagctctgggtagcatagaactcagtcagtagactaggctagactcaaactggtggcagccctgcctgagcctcccagtgcccataatgggtttgtgttgcgggaaatattaaaaaaggaactggcacattcccacacatgtgcctgcaactcttgtaccctctgtgggcccaccggctctgtctacctgccaactctccggtgctcccaaattcctctcgctgctacgcaacaaccatccaccccacaatcatatcaccacacccatgtacctgttagaatctcttaaagcttatagctggccaatcagatttatgtatcaataaattttcagcttacaagatgccaatacagtaatttcagaaccagttgataatgataaaagctttatcccaatctttctaaccttatgatatcataactacctgtggctggttaaagccatgctggttcatgtctgcctccatcttggccttccccttctctccctgagatgctctgtcattccagctccatccacctttgccctgtccaatcacaggcctcctgctgccctaatgtaattggacagggaaaatcttgcaacaggtttgtatctctcactgtatacccgcgggtagcctgataagcagtagacaggtctagcctcaaacttatggcaattctgcctcagcaatgctagtattgtgagtgtgtggtgccatggctatcatttctggagcctttccttcatgtgcttgttagtttagatacttaaattacattgt

SEQ ID NO: 395 - DNA, 1400 bp, mus musculus
atgaaaaattacttaattccacatcctcttttagattattgtcacagttagctttttatagtccatttttcctaggccttgatcaattaatgtcatatagtacaaagaactatcatgtctgtttcttccatttttatgttttactttataaagatattatgtctgttgacttgagttaactttgcatatattatacactgcattggctctacaggtacaatttatgagttttaacaaaccctgatatttgaatacttgtgataattacactgaagccatgaaaatattattctaaaaaactttaaccatcttttccatcaaccaaccatgtaataattaaaatatttaaaactaagtctttataattgctaatgaaatgtaatcaaattaattgataaatcaaataataactatttgcaaacatacagttggatttaaattaatgatgcatagaaaccaaactaaggacatcaatacagaaaaagaggcaagaagaagtccaagaacttgcataagttgattaaaccatggaatagatttagaaagtgagctaaaaggttctttgtcaaggtatgctcatccacatatggaagacgtggccattcagcaacccaaacttgagttaaatgacagtgaactgacctaataaatgagaagagacacacttggcagagatttgtgcttttatgtggcagtgtttacctggtaaaatcaatactcggtcactggaggtcagaggtcggccatctttgtaccatgtcagagttggtggaggagcagcatttgtctcacagtgcagagaaagggggttgttgatgatcacgtctttagcttcaccgctcctgccggtatctaacatgtttcctatttcccagagtttctgaaaacttggaggaactgcggagggaaagcatggcctcagttcagtgtgacagtcatgatttacccatccaagatttcaactgagtctcaacagacaaactgtagatttggtaagtaagatgatgctttccaacagcagcaaagactagccatcagttagtcatgtggaggaataaaggctatggtgctgagtctgcatttgtctttactatttgtatagaaaggctctgctgattaaccagcattggagcccatattggaggagagatgtggtaagaaatgtgattgctacaggaaaagctactttggaggcacacataaaagaatgtctgggttcatttgataacagtatcaatgatgtgtcttatgaagaaagttcaataagatgaacaatcaggactaagctatgaaaaatagaatattctcattattttctgacagtggatgtgagctttattagcagtaaactagcaattcattaaagacatttcaaaagtatgtgacctgaactttcaagg

SEQ ID NO: 396 - DNA, 1200 bp, mus musculus
ttaaatttaggaagaaaagtctaaactttaaaacattatgtaacgcagggaagttttccaactaaaacatttgaagttgacttttgcttgttttacttgacttttttttcttttgttttgttttctgtttgttctgttttagttgactttcacagtaactatttggaatttgtgccttgtgctggccagtttcatgtctacctgacacaagctagaatcagtttgaaagagggaaccccagttaagaaaatgccctctccagactggcccgtgagcaagcctgtggtacattttcttgattgataattgatgggggagggttcaactccatgtgggcggtaccacccctaagctggtggtaaagcaggctgtgtcctttccagcttctagctattataaataaggctgctatgaacatagtggagcatgtgtccttattacatattggagcatcttctgggtatatgcccaggagtggtgtagttgggtcttcctccagtagcactatgtccaattttctgaggaaccaccaaactgatttccagagtggttttaccagcttgcaatcccaccagcagtggaggagtgttccactttctccacatcctcatcagcatctgctgtcacctgagtttttgatcttagctattctgactggtgtgaggtggaatctcagagttattttgatttgcatttccctgatgactaaggtggatgctctcagccaaccattgcactgagcacaaggtcccccatggatgagctagagaaaggaccaaaggagctgaaggagcttgcagccccataggagaaacgacaatacgaaccaaccagcaccccccagagctcccagggactaaatcaccaaccaaagagtacacatgaaagggcctatagctccagctgcatatgtagcagaggatggccttgttggacatcaatgggaggagaggcccttggccctgtgtaggcttgatgacccagtgtaggagaatgccaggacagggaagtgggagtgggtgggttggtaagcagggggaaggggggatgggatagggggttttaggggggggggaaccaggaaaggggatgaaagaaagaaagaaagaaagaaagaaagaaagaaagaaagaaagaaagcaagcaagcaagctgagcaagccatggagaccaagccagtgagcagcacccctccatggc

SEQ ID NO: 397 - DNA, 1200 bp, mus musculus
tcctaggttctctatctccagagttgtctccctttgtgatttctttattgtttctattcccatttttagatcctgaatggttttgttcaattctttcacctgtttggatgtgttttcctataattctttaagggatattgctgtttcctctttaagggcttctacccattctatctgtgttctcctgtatttctttaaggtagttatttaaatccttcttatagtccaccatcatcatcatgagaagtgactttggatctatatcttgcttttctagtgtgatgatatatctaggacttgctatggtgggagagttgggttctgatgatgccaagtaaccttggtttctgttgcttctgttcttaagcttgcctcctgccatctgattatctcaagtgctccctgccctcgacatatttgattggagcctgtccttcctatagtcccagttgagtcagaacttctcagagtccagcattctctgtgatcctgtgattccaggatcctgtgatcctgagattctgggtgtgtcagagttcttggcagtcaaacttcctctgataccctgagatcctggtgtgaccaacctcttgggatcctgggatcctaagttcctgggcatgttagagcgcctgaaagtggtacctcctctaggggccatgggattctctgctgaattcaaaaccaaggtagaccagcgccgactggaaggaactggagccactggttgggtggggttcctgtgtccctgctcctgctggtcccaggcacttctggtggtgttgcaacagatgttgtgttccattcacctgtgatcttaagatcctgagcatgcaagggtgcctggggaatggagagttctctgggaccttgagttcacacccaaggtccactaataatttacttaatctttctaatcatcttagggcagacattattatctttattataaacaaagcacccaatgcttacaaagtttggcatctttctgatcattacagtgaaggttagtgacactgtcctgatctgaaacacatctgtctgactcaattccaccattgaatatatgtaatcagaggatccaggtacaaaaagctaaagagagcataaacagcatgtataaatagtctaattataagaaaataactaaatgtagaaagtagagtaacagtatgtgctaaaagttcaaaacatccacca

SEQ ID NO: 398 - DNA, 1200 bp, mus musculus
aagctgccttgaaggacaaggtgggaaagtgatctaacaaaattcctatcatcaaccttgggcctccacacaaagccacataccagtgtctcacacacacacacacacacacacacacacacacacacacacacacacacacacacgaaaagcagtgtctatgccatcccctccctgccagtaagtacctgaagctccatctccacacacttcccgcttgtcctgtaaagcgctgagctcttgtttttgccccatggggttccaggcctcgcctcccttcaaccctcagtttagactcggttcaggggaagaactcttccttatgctagacgcaaaaccctttgcctgtgttctgaatctcactcagggctgctctcgctcatctctttaaatggggcctttcaggagcccccccccccccatgaagcccccccggcctcttctagcagggttgtttctccgcagcagcagccctcaatgctccggaatcttgaggtgctctcctccgccaatggcgactgctaggttgtctgatcatctgtcactagcttgagacatgctcaagtgacaccatggtgttgcgtttcagacccagaagcagcagatgaggtgcatatttaaacatgccaaagtggacctggcctccgggttctcccagcatccctcagtccctacctgttaaaaggcatggttggcatacctggccctctagctgaatttctgagcccaggggctgggcctcctctcacctaagggctcttcactatataatccagacattgtggctctccccttctctcttgcctcccttcccccatcacccccctatgaccccccatcctcaccctttatctggtagatgatttccccgacccctcccttgaggtgaggtcggtgaacttgaaagcttcccccaataaacctgcttttatactttaattcagcctgaattggctcatttcctcagcagagaaaacctgtcacatggtacctcagcctgcagcaggtgaatggatgtctatggatagtcgctgggtttgtttgtttgttttaaatgtggacatgggaagaagcaaccatttaaaaaaattcaaaaataaaagaagaatttcctgcacttctcctaaaggcacagtggatttttttccccaatagttaagagtatttgaaggcaactgtgttttttatttcagttttgac

SEQ ID NO: 399 - DNA, 1000 bp, mus musculus
tttttatatattcttaaggttttcttttttaagcatttccattgtgttaaatacgtgtcgtagacgtttaacaatgacatttccttcccctacccaccagtgtacttatttccttggcaagcactgacttgagacttccacggtttacagtaggaatgaaatcaatccacaccaaactcaggggtcaaaatgaacactcagggctggggatgttagctcggtggggcgagtactttccaaacacgcatggtggtacacaggccatgctgtaacctcagcactcagaggggtgggcaggaggaacacatgctgtaaccccagcaatcagaggggtgggcaggaggaacacatactgtaatcccagcactcagaggggtgggcaggaggaacacatgctgtaaccccagaaatcagaggatgtaggtaggaagaccagaagttcaaggttatccttggctatgtagtaagttaggggccagcctgagctttaggagcccctatgttgaaagggacagagacataggtcatgggagagcacacacacttaagagctcctgtcaatattaggcaacattgtaactctatcttggcgaggaagctcccatggtaagtacctaacaacaggctcagttcagaagacttacaaaggaattttgtggcttctgccgcctttaatcccagcactcaggaggcagaggcagacagatttcagagttcgaggccagcctggtctacaaagtgagttccaggacagccagagctacacagagaaaccctgtctcgaaaaacaaaaacaaaaacaaacaaacaacaacaacaacaacaacaaccaagaggttctctgaatgacagggaaactgagcaacctttccatccctggggatagtgacaacacaggcattggcctggccaggatgatggagatgatggagtttctagagtacagatgccgagcacagctgggacccgctacttcagctgggttgcaccccacaggaga

SEQ ID NO: 400 - DNA, 1200 bp, mus musculus
ctctaccttgtcatctgctttcagtataattcttgatgccacactgactcccagccttctctggggtctgtgtccccgacctccacgtttctacacgcttctaaaccttcaggatcccctttgtatcccaggactctatatgtgcaatgaggttggatttctccattcagtatgtgcatctgataggccttgcatggtgatttatttacacttcagaatgatattttctgctttatctctttgataatgtctgctactcttttttttttcttatcctaccccctagaattcccattagaaaggagacttctttttacaaaaaattcatttatcagctttattgtgtgtgctcaggatgtgtttgtgagtgtgagcagtgcttttggcgtgtgtgcgggagtcacgcaacagtttcttcgagtcagttctgtccttccacactgggtttcaactcaggctgtcaggcttgagtgacaagtccctttaaccccagagccattgctggcccttgaaataagacttcttaagttttgtctacttttcttctccctcgctgtcaagttctacagagaagcatggcagcgggacttcaggtgagccgtcctttagtagcgcaggccgcccgcatcgggagaagctggggtaggagagtcaatagcccacagaggagatttcttacttcctatactttgaacagagaggggtctctggctagcggataagacgctgctatgaggtgactatgctgtgggactgtctctcctaggagcaaagtgagatcacaagccagcctggctgggcgtgtgggcggtggcagtgagggcatccagtcaccctttccaaccaggtggcatctgtgttctaaaggtcacagtgaggagcctgtctgcggtggagagaggtgacagagaggctaagcccccctctacagtcacagcatctgcgatctgtctgtatcttcttgcaacttctgtgggatttccccagtattgcccagtactgactacttccggtgggggttggggtgggtgcgtggtaactttttgtttttaagactttgtaatttggtgcacggagcccttgccacgcccagctgagtttgatggcatcaattggcttctggtgaaggatgctgggggagcggggtttggggggacgaggaggtggcagggatgtagcagcgctgtcagctgtcacgta

SEQ ID NO: 401 - DNA, 1200 bp, mus musculus
ccatttagttgcttccctttctgtttaccagactttacttaaaataccaaactattttaagtctggtgtagttccatttatttatttttgcttttatggctccaagttttgacatgatatccaaagatatcattgccaagcccagtctcaagaaaatttctcccaatactcttaattcttatagtcagctctgtgatccattttgtgttggttttgtgtgtggtaaagagtctaattttgttggttttttttccatatagaaatatagtttttccaacaccatgaataaaagaaactgtcctttctaccttggctcttcttagtgcctttgctggcatgcttggggttaccttctgctccatgggcctctggacctactatcaagccagtaccaagccattttatcaccacattcacaaaatactatcctaaatcaggaagtgtggtgcttccaattatgtgtcccccttaacttggctgtttctttggaaagctgttctcatcttcctcttcctgtggcaactgtcattggtataaagaccgactgattattgcctggagtgagatgagttttataacagtgtgatctgtccacactgtggtccattcatgtgtgccttcttcagctcctgaagtgacacgtgacaacgcacatgtgtgatcatgtacagggttgatttcttgtttctgtttttgcccctccccccaaagaaaggtttatgtatagaaatgtatagaactgttctttatcttgcagctttattaagtccacttactggtgtttgatagagtttggatcgagtcctttgaacgtccatgtagaggacagtgcttctgtggtccctgcttggatgtctgtggtactttcactgttctgcccatggtggtgaagacgtttgaatgaatgggatgaggatgcttgccttgtcactgaccacggggaaacagttttcctttttaagcgtctactatactattggctacaggcttttcatagctgctttttattttggtatttcgattcaagtgagtcgagggtagtaaataataagaaaaaaactttaaaagtgttaatttttccttccactgaaaagcacagatctcagttgactaactcgaaagattcaaataagtttaggatccagtgtaaacaacatctgcgttatgatagagggaacttccatgatcagaaagtccccc

SEQ ID NO: 402 - DNA, 1000 bp, mus musculus
ttttattcatttcctttgcctgtttgattgtgttttcctgtaattctttaagtgatttttgtgtttcctttttaagggtttctacccgtttacctgtattctcctgtatttctttaagggagttatttatgtccttcttaaagtcctctattatcatcatcatcatcatgaaaagtgactttagatgcaagctttgcttttctggtgtgatggtgtatccaggacttgctgtggtgggagtctgatgatgccaggcaaccttggtttctattgcttatgttcttatgcttgcttcctgccatctgattatctctagtgctccctactctctatatatctgactggagcctgtccttcctataatcctagcctgtccttcctataatcctggttgagtcagaattcctcagagtccagctgtctctgtgatccagtgattccgaaatcctaagattctaggtgtgtgagagttcctggtattcaagctgcctctgagaccctgagatcctggtgtgaccaagtttctgggatctttgaatcctgtaatcctgggtatgctagagggcctgagagtagggcctcctctgggggctgtggggctggtttcagaatttgcacccaagatacactggcacagaccagcttcccactgttaaaatccaaagttcttactacagtttataaaacatttgatggatcatgtctttatctttctcccaccttgactttaggggttctttcataaatacaaaatcaaaattttcttttggagggaggtattggctcataatacttaggatgtcaataaaacatcacatatctgggaaagcttaaacttgaaaaattctccaagggctttccttggtgttacagacagaggggggaggagcggggatagggaacaatgctaggtaggctcaagactagctgagctgtgagaacagattctcagagagctttcatgagtaccaattctatgttagactgggtttttccatat

SEQ ID NO: 403 - DNA, 1000 bp, mus musculus
acacgtttattgggagagcttgattgtagaggcgaagagaccccgagcccagaactggtgctgcttttataggcctaggagaggcatgtcttacacccggattggttatgcactacgcctcatttgcatgttcctcatctgattggcaactctctctcagtacctcacagagcctcattatcatacctcatttgcatgtctcacatctgattggttatactctcagtaccttacagaacctcattatcatgcccgggccaggcagtgtcttgcaaaaaactttactgcatatgtacacattggttgtttgtccaaacttatgtgtggtggccagcagtagtcagtgccactctgcaatggcacatgtggcttcccacagcccaggctactatacccggccaaactctcaattaccatagatggagaaaccaaagtattccacgacaaaaccaaattcacacattatctttccacaaatccagcccttcaaaggataataacagaaaaaaaccaatacaaggacagaaatcacaccctagaacaagcaaaaaaagtaatccctcaacaaaccaaaaagaagacagccacaagaacagaatgccaactctaacaacaaaaataaaaggaagcaacaattacttttccttaatatctcttaatatcaatggactcaattccccaataaaaagacatagactgacagactggctacacaaacaggactcaacactctgctgcttacaggaaacccatctcagggaaaaagacagacactacctcagagtaaaaggctggaaaacaattttccaagcaaacggtctgaggaaacaagctggagtagccattctaatatcaaataaaattgacttccaacccaaagttatcaaaaaagacaaggagggacacttcatactcatcagaggtaaaatcctccaagaggaactctcaattctgaatatctatgctccaaatgcaagggcagccacattcattaaagaca

SEQ ID NO: 404 - DNA, 1000 bp, mus musculus
gagatgctgtgttccagagatagccaaggttgttccttgtgctgcagctgtaagaaccacccatgtggtaaaggtttagaaggcagaaaagcgtcatgaagagcagctgaggcttggtactttgagaggccaggggaggccactggtaaaggtgcagcctcagttgtagctgatggcccaggactgaaggggtcatgcaaaagatttaaggcttggcaccatgaagagagcctatgagaggctattagtgaagcctagttgcagcagaagaccccagtgtactggagatgccagtaccaagggatgatcagcaagaacagcagaatcagtggagtggatcaacctgagcttagagtgctacagaaggcaaagctggaaaaatgacaccagccctttggaggagcccagaagatcgtgtgtggatcccagacactgaaacaatagactataacattgaagttgccttggagaccccaagatgtttgagatgccagacctgtgggctatccactggggaaagctgctaacaagggagtggaaacagcccaggaaaaagaagtttgttacagtcaacaaagatgaaaaaaggagttggagatctgaagactgctttgacatcagacatggagatgcaaagtttagagtttgcccagctggttttctgtcttgctttgggaattacagttaagtgactggatgaatcttcagaagagactttgaactttggacttttaacattgttgagactgttttagactatgggggctttagaagttgtattctgcattatgctagctttaggtatgacccccatagactcatatgtttgaacaagtcaatgagggccagagagtggaaggtgatggtttgtgtatgcttgccgaaaggagaggcaatattagaaggtgtggccttgttggagtaggtgtgtcactgtgggtgggcttaagaccctcaccctagctgcctggaagccagtcttccactagcagccttcaga

SEQ ID NO: 405 - DNA, 1000 bp, mus musculus
catcaatgtgattgatgtaagagggcaaatgacatgttatctctcatgaagaacaaggttagagacaaacagttgaacacaaggtctagaggctaaaagtattctttagtcctgtaggtctacaggagatgctcagtgggagaatcttgcctaacatgtgagacttttggttcaatttctagcaccacctacacaataacagcacatgtgcacaggcacacaacatatataacactcacacacaaacatacagacacacatgctcacaatcacacaacacacatgcatacacacacatacatacacgcatacacataatgcttacgacaaccatcgatagctccacttttcgaagaccagatacacttgtgtggcctctatgagcaccagacacatatgtagtatgcaaatatattcaggcaaaacacccatatacacaaatagtaacttaaaaaaataacactaaagtattaagtatttgattactactggaatcaaattccaaatcaaagttccaaaataagccactacctgatcaaaggtttgtatatgtagagtcatgaaatatatattggacaagctttccttaagaaaagtatatatttcagcttaaaatcctggggcaaaggaagaagctacccgttgttgacaaactgcaagcaacgaagactgtaactatgtagatatgaaaagctgcttcccgtgtgccattaaagtgtgcggagtgccactgtatgtgcgtttgctgctttaggtgtgtggtctttgtgctaaacattacagactccactgtaattgatatgcaatcaaataataccaatacaatatgatacgcataaaaaagaagaagcagcatggtaaacaagagagaaggatggataatctttacagccacaggtgttgggaggtgaggaaaaggtagtatacattactggtgaaaagggacaagatgaacatttggctagaaacttgtttctagtggcacattaggaaattagat

SEQ ID NO: 406 - DNA, 1000 bp, mus musculus
tgtaacacaatttcacttataatgagtaaaactcataattgaatttcttcaactattaacacaagacaaaagagaaaaataaaatgtattcataagataaaaaaatgctaggtgcgcatatgtgcgtgtgtgtgtgtgtgtgtgtgtgtgtgtgcgcgcgcgcgcgcataggatatatgtgcatgcacttttatctttctctacaactctgtaccttagtatctgagataggatctcactaaccctggaacctgccattctggctagatggcaagctactgaacccaggagatctgtctgtctcccccacctggattaaaggtgcacggtgctatgctcccttatgttggtgctgggaagtaaaacgtaggtaatcttgatgcagatcaaacatttttacccactgagccatctttctagctccaaagaaggctattttcaggagagcaaaatttatacctaatatgaaggcaaaattgttttcacattttaggtaattcttaagataaaagtcagtgattctaattgctagtaatccacaagccatggtttcaggtcttagggaatctttatttaactctgctcatgactgtttcttcattctcagttgtaggattttcttcctacgagtcctaggtgtcttcctggtactgtcaccatctccatctagggatgtttttgcttgttcttttttgtttcacgtcaacatttttctgttgcagaccagacatcttctttcctggagcagcccctcttctcttgccccctgcctattgttcctgattggccttttcaagttctcactgtttctgcaaagtggtgtccatgtatttcaatgctttgctttctggatccctgaattttcatttcacccactctaatagatgaagtatttcatttgtcctttatggcaatctacacattctgcttcatagagcagagacccatgaaagcaaagcactccctcacccttctggaatttaggtccaggtccttcttg

SEQ ID NO: 407 - DNA, 1000 bp, mus musculus
ttcctctcaattggcaccattactatagtacaggttgtaatttttgaaaaaaaaaaccttaatgcccattttttcatattgctattttaatgtggggatgtgtacaactggagctagtttgttggttaagttttgagtattaatttctggccaatctccatgaagtggactttgggatttatgtttgtggttattttggcttatctggttttatattggttaagagatgtttgaagtccagttgtggggacactcagtactgattcatgggtagggtagatgcaaagattctagcttatctaagtatgtatgcaagttggcatggggagtggtagggttgtgacattggcagagtgtggtctttgacatgagtagtggatgtatatttcacaaggtcctgtagcagcagagactgaggtcctggggatctgttgggtgttttctgtgacatggaaagtaggaagatattgttagattcaatggtggtggaggttggaatcctgaacatggcatctgagttgtagcttctgatctggggagcagacagggctttgttggagttctgtggacatagaagtggtcagtgggcatgttggctttgacctagggagtaagcaggtattctgaaccgtcttacctttggttggaggttttgctgggtttagagattcagtggaggtatggcttttaaccagggtatctaaccagagagtgggaaggtgctctgtagtttctgtacatgctggtaggtgttgggattccaggaattggctgggtgtggtctttgacctgggaatgtgagggcctctctgcagtgtctttgagtgtgatgaagactgggggttccagtgcttagccttgatgttttgagaaagtgtctcacactgtagacaaggttggccactactcctggtgatttttctgctttagctttttaagtgctgggtttattggtgggtaatattatgcctggctgtattttattttgtttaattaattt

SEQ ID NO: 408 - DNA, 1000 bp, mus musculus
ttttctctagacttaggattcttggctgaagtacctttctcaacactaatttccaagttcgttttctttctttctttttcacattttttattagatattttctttatatacatttcaaatgctatcccaaaagtttcctataccctctccctgccctgcttccctacccacccactcccgcttcttggccatggcattcccctgcattggggcatataaagtttgcaataccaaggggtcttttcccagtgatggctgattaggccatcttctgctacatatgcagctagagacaggagctctgggggtactggttagttcatattgttccacctatagggttgcagaccccttcagctccttgggtgctttctctagtttcttcatttggggccctgtgttctatcttatagatgactgtgagcatccacttctgtatttgccatgcactggcatagcctcatacgagactgctgctataacagggtcccatcagcaaaatctttctggcatttgcaatagtgtctgagtttggtggatacttcattcctccaagttcattttctacccacttaaagaagttgttttgaccccaccaaccacatggtagctcaaaaccatctgtgataggatctgatgccctcttctcatgtgtctgaagacagcaacaatgtactcaccataaaattcttttttatttttaaagtatttgttttgaaaacctaagttcaaaatattgggcagaatattttcaaacatactatttaatctcagatttttttcaatcatcatactaacgaaaacaagacaatttcataaagccacccatcatgttttttcctcatatgtgtaacctagcaggggaatggggtcgtgaaagtataagatgtgtataagggagaatgaaagggtagtaacagggagtaaatagtgtttaagtacatcctatgtgtgtatagaaataaattctcttacgttggatgcttgcttcacatactct

SEQ ID NO: 409 - DNA, 1200 bp, mus musculus
aaaaggaaagatccacccagagctgaggtcacagactgaattaaaagggggaaaggagaaagcaagctaagcataaacatctctttctgcttcctgactgcagactcactgtcgacatgttgttttcttttcctctctctctctgctatgatggaacgatcctacataaactcttccttaagttgtttccatcttttgtcatagcaataagagaagtaactaatacaccaggcaagaagtatgcttgttgataatccagtagtatatcttgcaataacagagaaaactttcaggtccttggagtagagaagagatttgaacacacagaaatgtacaactaagattatatctagcttaaagcttctataaaacaaaaaacacacctgccatcttccttctgagcccagcggaggcctctaagggctccagagtgctctcgatgccacaggaccttggaatcacctcgggatcactagtgagtagaacccaacttcagcttcaagaatcggggagggtcttgtgcccgcaggaacagggacaaaggaaccatgcccgaccagaggctgggatccattcaggtctaggccagccaccccatcttctgcgtgaacctggccgagggcatctagggcaccagagaactctccatgccgcaggacccctaacacacccaggacctcctgatcacctgagagcatgtgggcaatagaagcaacagaccttcttggtcagggtcccatcgtgccttcatcctcagccaggaggcagagctgagacccaaacccctgggcacattccttgccagaggagagtcagcctacaagggagggtcctgaccccagaactcagaaggtggataagagctccagattgctggacacctgctctgcaagaagagagcttgcctgcagagagtgctctgaccactggaactcaggtgagagttggactcccaggagtgctgacagaggctaacagaatcacaggacgatcaagctccagccagagacaacttgaacattaacactagagatttccagatggtgaaagtcaaatgtaagaatcttactaacagaaaccaagaacacttggcatcatcagaacccagtacgcccaccacaacgagtcctggataccccaacacattcaaaaagcaagacacagatttaaaatcatatgtcatgatggtggtagaagatt

SEQ ID NO: 410 - DNA, 1200 bp, mus musculus
aaagacccaggcagcaacagcaatctgagcaataaagaacagtgcttgaaggatcaccattgcagattcacagagctagtaatgctgcagtaatgcaaacagtgtggttctcacccagacagatgtgcacagagccaacatgagtatatattacagcaaagaggaaggcagcgtcttcaacaactgctgctaccaagactggttgcatgtgtgtaggatgaaattagacccatctctatcaccatgcaaaaaattaaccccaaatggatcagtgtgctcaatatgatacattgaaattgcttgaataaaacatagataatatcctataagaaacagttgtgggaaaggactttctaaataggactctgttatccaagaatttgtgtcataaaactaaaaatctgctgaacagctaaggaagagtaagctcaccaagtgagaaagttataacacttgacagaaaattaacatccagaatatgtaaaaactcaaaacaacagagtcaagaagccaagtgacccaattcagaggtaggctatgggtttagtggagcgttttcaacagaagaaataaaaatgactacataaggcagccctggggtggctggaaagagatacccaagcctctactctggccctgatgtggccacctctacaataaaggaatatgtgatagcgagatgggaaagaggaagtgagtagtggcaagctaggagggaagacaaaacctagcaattcaagccactgcgcagagaggtagaacaatgagtaatgagccactggggattgtgctgatgtcggttcccaggctgttgccaaggaccatgtctaggtccatggctctgtcatgagcctgtgctggtggctgtggcctgtgttgcttcctaagtctcaggaataatgtaaaagaagaggtagatttaatgagtgctacttacagatactgaaatgtacataatggaaaaatacattttctatttgaataaaaatgcacttagtaaatacttaacatagatctggccaagctcccccacctccccaaaattgcttacaatatgtgtaacaagaagaatttcctgctcatttaaacctatactctatttgggggaaataatggaattttcctttaacaatctcaaggtaacccctgtactcctgccactgctgctatattgatgtcaacgtgagaagctatgcgtaa

SEQ ID NO: 411 - DNA, 1000 bp, mus musculus
tataaagtgtatattttaatattacaaaataaccatctttgacagtaatcttctctctacatgtaaacctcactttttaaagatcagcaagtaacttccctccctgcagtctacaactctctccaaatcttcgactgtttactcacatggatcacctagcaatttgtgcataaaatgctagatattatcaacctctcattataacccaagtacagcactttaacaacacctaacatagcgaatcagtaacagaaaataaagttttgcaaaaagcaaacgataaagccttttttagcttttcatactcttgtcaaaacatgtcaaacttctgtaaaccaaggatatatttcaatttcctcctttgagagaaagatgaaaataataacaggaggtttaatgcagacaacttagtaaacttgggaagccatgcactaaatgatttttatcatgtactttttagaaccaaatcagtaaattgtaactattcccaaagagttccatgagtcttttcctaaagaacaatagattactactagaaatcactgaccctgataacatctaacaccaaacaaactagtactttaatggagcaccacagtctatgctaacagacctgggtaagtgaatgcatagcgagaagcccaggagcctcagggaacctggtaggggagcacagagggattgcaaccccattggaagaactacataggctgacctgaccacccagttcttccagagactaaaccaccaaccagggagtgtacctggagggatccaggtacacatgcagcagaggatggccttccaaccctgacagcaaccggaaaggaggcccttggtcccagggaggtttgagggcccagtgtaggggggatgctggaatagtagggtgggagaaggtgggtaggtgggggagcaccctcatataggcaagggggagggagaagggaggatgtgggatgaggggttggtagaggggtaatcgggaaatggggttcat

SEQ ID NO: 412 - DNA, 1000 bp, mus musculus
aatgttgccctcttcctggtcctccttcccagagctcttcatcccatccccctatcccttagcctctgagaaggtgctcccccacccatctactcacccagccccatctcactcccctcccagcatcccccttccctgggacatcaagtctctacaagattagattcatcctctcccactgaggccagacaaggcagtcctctgctccatatgtgctgggagccatggatcctctcagaggacaggcatgctaggctcctgcctgcaagcacagcatggcattagtaatagtgtcagggtttggtgcctgtccatgggatggatcccaagttgagccagtcactagatggcctttccttcagtctctgcttcatttttgtccccacatttcttttagacaggaacaattctgggtcaaaaattttaaaggaaggttggtgaccctatccctctactggggggctctgtctatccagtagcaggtggtttccttaagttccatctccccactgttgggcattttgactaaggtcatgaccattgagtcttgggagcctctcacatcccaggtctctagaactttctagagttccccctaccccttctttccacccaccacagcagcataagagaagcccagagggtcaggagaaaagaatcatttctaaataataaaaggaaagacactaaagagatgactcagcagcaaaacgctcactcttctctcagaacttactttcaaatcctagcgcctgcttcaggtggttcactccagctcctgggaatctgatgccctcttctggcctatgtgaatacctgcttcatgtgctcacatacatacatagatatacacgtatacacataacttcttaaataatgttttgagactataatatagtcataataatatgatataacttcctctatcctgccctgtatccaaatccttctatgtgctccctccttattttctttctaattcatggccgccttttgttta

SEQ ID NO: 413 - DNA, 1200 bp, mus musculus
cattcccagttcccagtcctacctgtctttacacaaattcctcatcactagtccatacttgggggggtggggggaggagggagggagggagggaggacccaatcacaactggtccagggaaggaacaggttttaggatgggtacccaagctacagatctgatgagagtaaccccataatacgcctttaagctcacggagaactgaactcctaacccttaatatcagtggcctggaaccatcctcccaagacagaagagcctgcctcaggagtctgctgtccttggttggcatggttgagccaggactttgctttaccctgcccttggcaaatggccacgtgcagggctagcgattgagagtagcttataagcattggccagctgccatgaggcctgagcccaaaacatgctgaagaagttattatggatgcaggcacagtgatgagctgtggcagtcccaggtctgtaggctgaagcaggagagtggcttaagcccacaaatatgaggccaacctgggcaacaggtgagaccttatctaaggagtggtgcttatatgtgttccaagagaggtaaagaaccaggctgtctgcctcccccaaggcctgccccagaatccacagtgcagtcttcgttgtccatcaaacagcaagaggagggtgcccaccaagtagtggctgaaaccggtctcacaccacaaacttgtttgctaagttgttgctcttggcagcagtgtctgcatgggcctggtacccaaggatggtcttcgtagggatgcccaggcgctctttgtatatttgcccgatctgcatcactccggctttgtcctctgcttcattcgtccacagggcaatcttgtccctcttcgtgcagatgttcacgacagcaccgctgtattcctcaaaacagttcccgaccagacacaccaacgtctccagccacagacggtccagttcgaagtggcgcagttgtttgtcaatgctgagcagccagcggctaccccacttgtttctgttgtcttcccacatgggcaggatgccttccttgaatagggcatagtcacagcaggaagagagcttgctggctagcttgatatggctgtacatcacccagaagtcctccacagtgttaaacttggagactagctgcaggttgtcctgccaggcccggcttcggtcattcttgaagaaccacagaaccca

SEQ ID NO: 414 - DNA, 1000 bp, mus musculus
gtaggctacgagataacctcaggggtcattttactcaggataccatccaccttttcatttgagacagggtctctcactggcctagacttcaccaagggtagctgtctaggaagccccagtgatccacctgtcttcacgtctttacttcaggaatttcaagcccacgccaccaagcctagatttttttttcttttgactagcgtctcgggattcagcttgctcatcatgttgtgaggtccctggctgtgctgtctcccagccctcctggtgatttcatagatgcctaaactgggtgtgtaaatcataaactccacaccaagccttaaaaggttccctatcagacaaggattttctccaagttcctttgtgtgccagcgctattggtgtagttctagacggtcataacggttcagcacatgggatcaatggagccaggaggccagtgcttgccaccatctcaagctctaagcccctgtgtagacttaagcttcttgggaacacaccccttccctgtccctcggcactgtgcaccttgcaaagcaagtgctctagaaggcatttctcacctaggaaggttttctccccatttctcaaaatagctctggggagttagcaatagcttctacttcattcattcaacaaagtctcactctgtacccctggttagcctggaaatcacaaaataaaccaggctggccttaaactcacagggatatgccgaccttttctttctgggtctttgttttctttttttattattattaaagatttatttatatttaaattgtgtgaggggtgtgtgtgtgtgtgtgtgtgtgtgtgtgtgtgtgtgtgagtgagtgcaggtgcccatgaaagtcagaggtatctctcctgaacctggaattgtaacagtcagttgtgagctacccaatctgggaattgaacttgggtcctctagaagggcaggatccttaagcctgaactgtcttaccagctcatctccctctgcatttcttcc

SEQ ID NO: 415 - DNA, 1200 bp, mus musculus
cacccctgtgtcactctgccatgcagcacagatggagaatctcacccataggcctgccatttgtcgagtctatagcaggagccaacacaatgtactggtgtgtcgtggtcagatgtgaaggaaagagaagtggagcaacttaagcattatgaagagagatggaactggagactcgacaatagaggagtagcctgttgtgagtaaccagccctgccaccttgggcaatggtgaaatcccaacctgagctggcactgaaggccacgtctggatctgtagctatgcaatggcaggggtcagtattgatgtccatggctcatcttaccactagagatcatgggtactctttagtgggggaatccatagatggccccacctctcactggacctggtgctccggagagctggcctcatctctcaccactggcagcactacagagagagagagccctgcaatttgaccaggcagtatagtggagcttgaccttgtggtgtgggtatgggtacacaggccccaagggtgtgactgtgggagagagaacactgacattatctgccattgggtagcattagcacagaggtgatgctccctaccctgccacctccagtcatgagctggaaagagctaccctgcccctcaccagctataacactcagaagagtgagccttggagttcacctgaacagcacagcaagctgaccttgatggtcagagcacaggtcagccagccctgagggtgagatagagggagagctggtcctgccatccatccatctatcttgaggtggagtgagtatggagattatgccctcctcctctcccctcctgaccacaggcagtagtcaggagagctggccctggagtcatatgagcaggagagctagccctgctccctccctggctggagcactctggagagagagctctgcacctgacctgagcaatacagtggagctgaccctgatggtgaaggcacaagtaagccagtgagatcagaagagctcgcctagcccctcagagcctgcaacagttgagagagtgccctctgcctcgacccccttgtcttgactgtgaagcacaatggagctagctggctctggggttgtgggtagggtgagatagctccaaagaaatgagagagagcaagagagttgaccttgcctcctgcagatggtagtaatggttggtctagccagaacta

SEQ ID NO: 416 - DNA, 1200 bp, mus musculus
ggttttgcaactgaatataagcatgtattcatttcctattatattcgatttgtattttagagactttataaatcattctgaaattccctgaggcacgcatgaattctcagcagtctgctgtcagctgtttgcctctgagctgctgaaggagatgtttctgtaatcctcaaacagtaatgtctgcacttctagctcaccttcccccaagcacacaagattagctgctactacagcggtacagtgccaagtgcataagcccagggtttgctgaactccatctctctgaacatcctaaaacaggctttccggctgaccactcagctgggttacatggctttaacaacacaggatcatgtgagctcagactttaccaggtcttggccctctactccagcatcagtcagaaaactcaccccaacaaatttcctaagaaattcacgagaggcttggatatctgggttggataattcaataaaatttcccatcatgccttcttctgtggctggtacttcttggtagaaaagtttggctctggcatagaactgcatctcaccatcaatgacttggcttgttaaagcatacaattttactacaaagaaaatattatcaaaggttattaatatgtatatggcatagcaggcttgtttttttaacaatgtaatgaatttcttaaaacttcatgaacttatgttgtagaagaaaaggcatagatttgatttgatttgatttgatttttagacaaggcctccctgtgcaggtctggctgccctgaaacttgctatatagaccaggcttggctcaaactcacatagatctgcctgcctctgcctcccaagtgttggaattaaagacctgcactgccatgcccagcatagacaatggtattaaatcagaaatatctgcatttgagttctagcctagagattggcatgcaacataacatggagaaaactatttaaaccctatgatcttcagaaatcatatctataaatcactttgactttaaattttcacaattgaatggctagttcaataagcatgacttaccatcttatcaaaatagtcttacagtattttgcacaatggaaaaataacctcaccacatggtgctaagtgtgatctcttagttctgagtgctttatggaaattttctcatttattcttcctgcttagccctgtgtttcacttcttcaaaagcag

SEQ ID NO: 417 - DNA, 1000 bp, mus musculus
cctgagctacacatatcaagcctcagacaggtgacttaacatacaaatcagacaacaggagaaagaaaaaaatacacacttgtttcctttcctttgcttgccatgttttttgtttgtttgtttgtttttcaagacagggtttctctggctgtcctggaactcactctgtagaccaggctggcttcgaactcagaaatccacctgcctctgcctcccaagtgctcggattaaagacgtgcgcaaccactgcccagccaccatgttgtttttttaaagctgggatagttgtaccacaggtgtaccttattcaaagaatgttttcctaaggaatcaacttaatgtactgtcagcatttactccactcttatgggaaaagaactgtgaaagaatgaaccctacctaggtcttcaaagacagcaataaagaatcaataagaaatggattcagaatgcgcttcagactaatcacctcacatagagccatttcagcctatgtattaacggtgttcacttgatgtgctgtttccacaggcctatatttctgcttttgaaaaagatttattagcctataaagaatctggtttccttatatgttttccaacaaactgtgctatttctcttctctcccatctcctcttctgccccctccacctccagtagcctccttcccacttgcctcctgtcacttctgtcttttgtcctatcccctttgctcagcacttcttcccaccttgtagcctctgtaatggtttgaatatgcttggtccagggagtggcactattaggaagtatggccttgttagagtaagtgtgtcattgtgggcatgggcatggggttcctcctgtaccatgcctgcctggatgctgccatgctcctgccttgataatagcggactgaacctctgaacctataagactgtcccaattatatgttgtacttctaagagttgccttggtcatggtgtctgctcacagcagtaaagccctacctgagactgccg

SEQ ID NO: 418 - DNA, 1000 bp, mus musculus
cacacatacacacacactgaactgcctattgaagattaaagatagcttctgaaatttctaaagactgcaacaggtccctcttgataacttggagcgtgtccttgtgacagattgtgaaacctggtggcacaaggttctgatgaggctggcgctgtagttaggggatgtgggtttcttctcttgaaatagcagtgatgatggagcatctctgagaacaggacatacacatgggctgtcatgggttcagccactgctgaaggactggatggaggaagagtttaaactgacacgtccctcaactcacaaacattctcccatagcgtatccataccatacaccacacacatcacatatgtacatttcctgttctgtatataggacaagtttcagcccaggaccaccaagaccaaattttcagcacaaaggagatttatctgccccagagggacaaagggcagggataaggggccagaacaggagatagaggaagagggagaaggggaaggaggagggagggagggagaggagaaagtggtatttgtcctgcaagggaacaatgactgtctctggatagaaaggagacagatgtggccaataggcaaatggctgtttataaaggtaaatggggaacctgtgttaggatgcagtgcttaattttaactggcagtgaacccaaaagggcttttgattgctggactttagtactttgagagctggcccttggaaataagccttaggaggaggtagcagccaaagaaaaggatagaccctgtggctagctttgggaagaactggggagaagggcaaggcctgccagagtcatgttcgccatgcttgagctgacaagagtccctgtgtgtgtgtgtgtgtgtgtgtgtgtgtgtgtgcgcgcgcgcgtgcgtgtttcccaagtacttactgcaatcaggcattctactggacacttatatttattattgatatctcatcttagactcacaagttccttgtcatacaggta

SEQ ID NO: 419 - DNA, 1000 bp, mus musculus
ggatcccgtgggggttcctgtgtgggtccttgcaggtgtccagagactccgcaggcaaggcaccttggtgctgcagtggactggaaggctctcttgtatttctttaagtgagttattaaagtccttcttgatgtcctctaacatcaccattagatatgcttttaaatccaggtctagcttttctggtatattgggttgcccaggactgggtgaggtgggagtgctgtatcctgatgatggtgagtggtcttggtttctgttagtaagattcttacctttgcatttcgccatctggtaatctctatagttagttgttaaagttgtttctggttagagcttgttccttttgtgattctgttaacctctattagcagacctgggtgactagctctctcctctaaatttcagtggtcagagcactctctgcaggcaagctctcctcttacagggaagtgcacagatatctggtgtttggacctgcctcctggcagaagatgagggcctaaaacaggatctgtcccagaagctgtgtcccttcggcctgtcatagaagctgttagcttctgtagtccacattctcacctgcgcagagtagtctcagagggatctgggaaccaagatgactcccccaggtgctctgtcaaagctgtcccaggcagggcagacacttctcctctggcagggaagttgcccggatgtctggagcccaaaatgggatgtgcctcagaagctgtcctttagggaccttgggagtgtccactgactctgtgccaaggtgaccttgtgctagcgctgactggaaaggatttggacctggtcaggctgggttttctgtttccctagtgttgcctcaggtcctgcgtaattggattggaacagaagttgtgttccactcacccgtggtcctaagatctcatggagagtcctctaggggaccttgggggtgtccgccaactccgtgcccaaggtgacacggtgctggagccgaatgaaagggtag

SEQ ID NO: 420 - DNA, 1000 bp, mus musculus
cttcattggctaaacttaggtcacgtgcccacccaggaaccaaccactgggattccatttgtccaaatccagccctggagcaacagaaatgggattgagccacagggaataataagagaggaagtctgagagatgagtgaaatcccagaagaaaatcaggtgctactaccagcaagggtaccagatgctcgggagaggctagtaggcagatgttatcatctccagctatctaaattgagagtgagtaaagccccatctgatagactgtcaggaagcaattaagccttttgtcactgctgatgctgcgcatgcatttaatgataacagatgtgctgcggcaccagtgagcagctgcagagagggagccagcagggctggaaggaaaagccaagccatccatcttccagccggagttccccccaccccttcccccgcgtcgacggaactactcaggatgcctaaactgactcgggtaccttccgagttgcaaaaactctgctctgggattcagcagatatatctgaaactgctttatgaccaacagttaaagtgaggtaaattaagggagagaaaccaaggatatggtttcgtgcataaaacccagccatataattaacagagcccacatcaatcacacatcagttaggcctcactggtttcataggtattcgatggtagaaataaaccagtcctgataggcaaagaggattgaagccagtaaaactgaaatacttaaatgtgaggctcctgtcgttaattagtcaagttccgactctgtttgtggtatttgtgggatatttagtaattaggttttttaatgttcctgtcctcatttagcttcagcgtctgtcattcccaacatttctttgtctaggcaatgccacgaggtgtatttttaataatagtaaacccttgtgctgcagatcactctgtcctttataaaatcactcactggagttgcccagcaacctcggagacaagcaagacgaactatcctccc

SEQ ID NO: 421 - DNA, 1800 bp, mus musculus
tagctgagggctggcttacagtgtcaggtgcttagttccctgtcatcctggcatggaacacagcagcagatgggtgtggtgctggagaagtagctaagagctacatcctgattggcgggggggggggggggggggtgtcacggggtggggggagtgacagagaggcagagagagacttggcataggcttttgaaacctcaaagcctcagagtggcacacttcctctgacaaggccggtcctcccaatccctctcatagactaccactctccgagcctgtggaggtcactcttattcaaacgccacacatataaaataaaaatgtatgttgcagctaaagttggcagtccttattgtatatgttttctttgtatttgcttgtctttattcctatttctttacaaaggtttccctgcaagaagagtaagagaaactcacatgcccttggacagaagaatttccagtcagatacatttttttgttatccagcaaagatgaaaccagacccagtcattctcttagttaggatggctattgttgaaataaaacactgtgaccaaagccacttgcggagggaagggtttatttggcttacatttccatattgctgttcatcaccaaaggaagtcaggactggaactcaaacagggcaggaacctggaggcaggagctgatgtgagggccatggaggggtgctgcttacaggcttatcatcatggctggaccggcaggcttgctccccaccccatttcgggctgactttcaatagatggcagcgagggagctgctctgctacatacaaaaccccgacccagaagcaggtcgtctacgaatggtttagcgccaggttccacacgaacgtgcgttcaacgtgacgggcgagagggcggccccctttccggccgcaccccgtttcccaagacaacggctctccgcaccggatcccggtcccgacgcccggcggggggagaccccgcgccgctgcggggaggacgcggggaccccgccgagcggggacggacggggacccggctatccggggccaacggaggctccttcggcgctgccgtatcgtatctaccccccaccccccgaaagtaaaaataaaaacaagaattaaaaaaaaagtcaaatttgtgctatctatatactcactggagcatggctaaactctcagtggcctgccccttaaatagaactgagtccttcacctcccacacctctgccagaagccattggctgtggagttaactcagcgtccccatcggactttttttaagagttctgtttggcacctggagagatggctcagcggttaagagcactgactattctttcagaggttctgagttgaattcccagaaaccacatggtggctcacaaccatctgtaaagggatctgatgcccacttctgatgtgtttgaagacagatacagtgtcagatatacattatatatatatatatatatatatatattttttttttttttttttttttaaagagttctctttggtagttttctgtctaggcagttactttttaggggatgggctattggtggtaggggttgtcacggaagccttccctgtcccttcctctccactgtgcatcttcagccatggatgacacagcaaaatagcctccttgctcttcacagccagcaggagcatgggccatggatcttcacagggtttctggagccaacactattcatggacacagctccctgatgcagtaggaccacagacccagacaaggtcctcagaggctgcccggaccatggacatcaacatgacctc

SEQ ID NO: 422 - DNA, 1200 bp, mus musculus
ttaggaatgtgacctatgcccccacccggcaccacccaggaaatggtttacctcctactctaagcggtcagtgtgtgtgtgtgtgtgtgtgtgtgtgtgtgtgtatgtgtatgtgtgtgttatactcatgtattcaatttcttcaaggtgagggagactctggctgcggagacagggctgagtgtccgtgtggttcaggtgtggttccagaaccagcgagccaaggtaacctgcttctcatctttatctgtctttgtcttactggtttcttccaacaacagccgatggacatcggacttgctgtcagcctttctaagctaacttatggggtagagtcgttctcttgattaaaaacgcctatcatcagcaattatttcagccacagcgcctggaggaagggagaagcgaagtgtctgtgttagtggttagtcaaacagtgaaacagttgtttttgttgtggcaggcagaatgcatgtgtccactcccagccttcagtgtctggcctctctaactccagccttagtgtcctaggtaacagacaagtcctgggttacttattttcttccagactctaaaaatatacatgccctggccattttcccataatcttggttttatttatccttctttctttcatgtatgttcatggacatggagtgtacatggagttatgtgcatggaagtgtgtgcatttacacgaaggccagaggtcttcaggatagtaactcaccttggtttttgttcttttgaacagaatgtctctctaggacctagagttcctcaattagtcagatcctggggtccaggcagccctaggcatcctctttgtccccattcctcagcactgggtaacagtgcgtaccaatactttttgctctagttcttaaacattgaactcaggtctgtgcttactcagcatcactttgcaaactgagctatcttcccagtccttagatggtgataaattacccttctcattaagtcgcaattctgcaacagaattcctcagatcagggctgttgttggtgtgttgctattccatcaatagaagaattcatggtgcagttactgttcgggagctcatggggtgtgcgttcaacaaagcaggagcacactgaaaactctggggaattgtatggccaaggaattcatttttctagtatctcactgtagtggctattcctggttgtcaacttgaca

SEQ ID NO: 423 - DNA, 1400 bp, mus musculus
cctaaatgatgatgaaatatttttattaaattttccaaattttctaaaacagatacatgatttcataaggagacaaaacccttcatggtcccaatcatatatctatcaacatagtcctgatgctttataagtgctaaggatttccatacttttggctttatactttctgataacttttattttgtatattgcaaaattatagggaggctctattcaagatggtggtggctggcagcacccacagggctgaggggcctctcaagacccaaggagggtttgcagagtgacatttcagtgaaggataagactgcatatcacgcactatctccaggacaacttcaacaaccttgtcaaagtcacgtctttttgttgttgttgttgtttgtttttattgattctttgtgaatttcacatcacgcgccccaatcccgctcatgttcttgccccaccatgtctaccctctacccttgcaacctcctcccaaaagaaaacaaaagaaaatagaaaataattatagcaaaaagaaaagtattacataaaaattaaaaaaacaaagaaacaaacaagggcaagaggagagaattagaactagagatgcagaagcagtggcagggtgtgctgaaatctgggatccatgctgctgccagaggctacgttggttcctgtgcttaggtttcctcagggggaggtcacgttgaggtccatgatctgtacccatctcaggacaccgtgtgaatctctgtggcccatgctgccgctgagggctgtgtggatgtctgtgtgctccagacatctatgctaatgtccaggatctgtgctgcgattgaggtccaggttgatgagcaggatgtgtgtcgttactggaaaccatgtggaagtacaggatccatgtggctgcaggatgctatgggcacaaaagctacttttgcgtggaattgatgactgcagattcatagctgagaatgagagaccttgaaggcttctgtgacagccgcttccccctccctcccctgcaccctcccctctgccccacaaaaaagagaaaccgtccagagaggaagctattggaaaaaaagaaaagaaaagaagagaagagaaaagaaaagaaaaaggagaggagaagaaaagtgttcttaaaacctgtgataaagatgctagctaactcctcagagtggatggtttctagcaaggattatggaggactgggactctgttttctttagatgtccagtccctgggagtttgaccatactctaatgcatatataggcaacacaaactagacttggtgttttgttgttttttgtttatttgtttgttttcttttaatgggaggatgtaagggagtcaggataatcctgggaggattaagaagcaagtgcaattagggtgcatggtaca

SEQ ID NO: 424 - DNA, 1000 bp, mus musculus
agggaaaagaagaaagatcaattagcagaggtctctaggaaaaggagcctgtgctcatcgctggatgggctcggggagccagctcttggtagctctgaatcagatgatgaattctcctctgaagaaacagactgggaggaagaagcagctcattatgagaaaaaagggtaccagccaggtaaagtgctagctaatcagttaaggaagccaaaagcggctggcgaaggccagtttgctgattggcctcagggcagtcggcttcaaggtccgccctatgcggagtccccgccctgcgtagtgcgtcagccctgcgcagagagacaatgcgcagagagacaatgcgcagagaggcaatgcgcagactcattcatagccccaagaaagaacaaaggcttacaagactggctcagggtctgtcgagagcttgggggacctctcaccaatgcaggcttagcggccgccatcctccaatctcagaaccgctccatgagcagaaatgatcagaggacatgttttaactgcggaaagcctgggcattttaagaaagattgcagagctccagataaacagggagggactctcactctttgctctaagtgtggcaagggttatcatagagctgaccagtgtcgctctgtgagggatataaagggcagagtccttcccccacctgatagtcaatcaactgatgtgccaaaaaacgggtcatcgggccctcggtcccagggccctcaaagatatgggaaccggtttgtcaggacccaggaagcagtcagagaggcgacccaggaagacccacaagggtggacctgcgtgccgcctccgacttcctattaatgcctcaaatgagtattcagccggtgccggtggagcctataccatccttgcccccgggaaccatgggccttattctcggccggggttcactcaccttgcagggcttagtagtccaccctggagttatggattgtcaacattcccctgaaatacaggtcctgtg

SEQ ID NO: 425 - DNA, 1000 bp, mus musculus
gttaaaactaagattccggtgccctctttacatgaccctgtcctcaaagacaccctgagaagccaagagcaccttctatctcacggtgagagaaccagctgcttcaaagaaggaagcccacaaggccaggagggagagcccacgaatccactgaagggcgtggaccccagcaaggatgtctctgtcccatgtcatgaccaagagctgtccaccaacaagacagaagacagtggcgtgtccagccaagatggtgagagagggtcagcacctgctaatgagaccagatctgaaaatgccagtcaaaagccacgtggagatgctgatgtacaaaattcccccagctccgtggactatgcaggaagcttcaaagatgaacgcacaaagccatccttcctagagctgttcgaaaaggccaagaatgctcactatgtccgccacagggtgccccccgagtctgagagattacttagcatcggagagatatttggacacaaacactactcactccccagaacaggggaaacactgtgaaaatggtgccaagtcccttcctctctgcctgtgtaatgtcgcctgaccagaagatattctgtaatcactatggaaacgagacccttcaaatagctgccgtagcaacgcacagaaacaagcagaaatgcaaaataagctttcttttgcaacctcggggaccctgcccttttgtttggtcttcctcctaataaacaaggccactatgaagaggaaggagagggaaaatactatgaaaatattttaagttgcgaacctgggcttattttgaagaagaaagtcttgtttgtccgaagctctgcgatgcttagagtgccacctgctggtcaaatggcatagctatttgcctagttttctttgaggtgggggggtgggaggggtggggagggtgttgcatgggaactcaactgaaatcacgtacggtgacctggtctccagataaaagctgttctagccacagctctggtctcct

SEQ ID NO: 426 - DNA, 1000 bp, mus musculus
atatgactggttgacagacagatgagtgatcagtgtaattacatagctaaacagaacgctatggaatgtaatagctgagagcgctggggctccacagaggatcatgaggtaatccgaactggcaagcggaagttaccaagcatggaggatgaggatgaggagaggcatcccatgcaaatgcaacagttatctgagcgaggcacaccggctccagacagcatgatttaaggaaggggtgagagtgctcgtggacacgggcagcacacagtgggaagagggtcatcttagaaagagacagcagcaataatgcaaggctagcctgcacacggccttgttggccacgctcagcacgtctaacaatttatacaacagaaacaagccatgttgtccttgtgttaattgatactcttccgggcatcaactgtaatgttccccgtggctaatggactttcctggtctggtggcacaatcagccatcttcttttcaggctttaatttacttgtttactatgcctcaccactgccaggacagcagaccatgagaacaattctttggcgttaccagctatcagctgggggtttaaccccattaggggtctccctaatgtaactctcaggctttaaactgagaagtcaacttggctgctccaccttctaaaaatgacttaaaatagttcttattctcctctgtatcagaatcctctagagcagcggccctctgactgagacatcgggcccagaagtgttgctatgacctgataactggctggaagtgcaaattcttgaatgaagcaactctgggctgcttgtctaaacgtcagtgtgtcaacaagctgtccaaacgactgccagtgactgagaacctccactcgtgcttctcacagcctcttccctaggagagccacttcttcacagtggatgcagctgaagcagacagtcagaggcctgggcagttaggcccgaagacagaaggacatggcccaacgtggcaaagttgtag

SEQ ID NO: 427 - DNA, 1400 bp, mus musculus
agcctgctagggtaggctgccccccccccgcctccccccacccccaccctccgccccacgcgcacaccccggtgtctgtttcgcacagccttctctccttacacggctgccccgaggccggccgcacagtcccttctggatgccctttcggactggtgccccctggcgcccaggaatcgcctttggtggcagggatggggtggagtcgggtcggaataagcactgtgtgtgccgcccgcaggatctgctggcacctctccccatgttacccattgaggtggagcacagtcctctgctcagcactcaggatccggcactgtgctggcagggtcaggacggaggcgaccgggcagggcacgcatccgctgggcaaaggtttctttcccgactcacatccgccacagtggctttacaactccccgaatatcctctgctcgcccaaaccgctccgggggcttgcgtgggaaatcgtggctcgcctcgcccacaatggcggtccctgtgaagtcgaggcgcgggaaccacaccatgagcttgtggctctgcagcggacatctgctccgcaataacaattgcccactggaaccccttccgaccctgcaaccgtccctctctccgtgccaccaccaccaccaccaccaagaccaccaccagcaccgtattccattctccgacatctcctattcatagtccaaaaaccaaaaaaacaaaacaaacaaatatacataatacacagagttgtgtgtgtgtgtgtgcgtgtgttgtctgtatgtgtgtgtattgatagatagatatagatagatacctatacctttcatatatggttatatgttcatatatatgggtatatataaaagattaatgcgtgtgcgtgtgcgtgtgcgtgtgtgtgtgaagtgaaagaaatcgctacaggggcttgaagtggacgctcatttgtgactattcgggaaagctgactgggcccatgggatgcgtgcgaaggatgctatgcacgcgacgcagttgctccatctgaggcaggtgaggcaggtggggcgggctagctagagggtttgttccagacctaagagcaggcgatgaggaggagatggagtcctgttgaggctccatgagtggcatgggtggacgagtgtttgtgatgcgggcggcgtgtgaggaaggtccgcttgtgatgggggcgggtgcgtagtcttggttccagggtaagcagggagtctgtagtggagaggtgcaaatttgttgtgtgggggcagagaggctgggccggagtggtagtgtgggaaaggaatgggcagcgtgcagacagggagagcatgaagcgggaagacgtctatggggtatcgggtcccggagagtgtggtggtgggagggcgcgagtgtgtgtgcatgtgtccacg

SEQ ID NO: 428 - DNA, 1000 bp, mus musculus
tggaggcgtgggttcgaatcccactcctgacagcctcgccttttgccaccgcaccccaccccacacaccgcatctcttgcctccatcctcaacctctccagcgcctccacactcctcgcctcccaaacttggtgccacagatctggatctgtcggggctcaccccaggacctcagctcggggcccggactctcctaccctctggcgcggcctcccctgactggttcatccatctatccatgcatccatgcatccatgcatccatgcatccatgcatccatgcatccatccatccatccatccatccatccatccctccatccctccaaccatgtatccatgtatccatgcatccttccatgcacgcatccttccatccacccacccaccaacccaaccaaccgtccgtgaatccatccatgtttgcctccatccatccatgcacctctgcatccatgaatccacgcatgcatgcacgcatgcctccatgaatccatacctccatgcatgcctgcatgcctgcatcatttccggcccaggcactgtcgggggggaaacatgttctaataatgggtcttgggccctggcaggaagcacaggctgagagttcatcaggtgatggcaggagacagggcatgggtggttcagtggtagaattctcgcctgccacgcgggaggcccgggttcgattcccggcccatgcagagtccagtcccttttggtcttcacgcccacattgcccttggacagcctgcgctgtacaccacacctcctccacatacacagacacactccactgggccactgcacacacactctggcctgtaagccttgcctctcctcattctgacaactacctagagcctccttcaaatcacttgacacactcagcctacccactcgcctccaccaacaagaaactacacactcagcctacccactcgcctccaccaccctcttatgctttcccttctccatcttcttctccaaggagttatata

SEQ ID NO: 429 - DNA, 1400 bp, mus musculus
cagccccacccgcccgtttgggagcctgctagggtaggctacccccccccgcctccccctacccccaccctccgccccacgcgcacaccccggtgtctgtttcgcacagccttctctccttacacggctgccccgaggccggccgcacagtcccttctggatgccctttcggactggtgccccctggcgcccaggaatcgcctttggtggcagggatggggtggagtcgggtcggaataagcactgtgtgtgccgcccgcaggatctgctggcacctctccccatgttacccattgaggtggagcacagtcctccgctcagcactcaggatccggcactgtgctggcagggtcaggacggaggcgaccgggcagggcacgcatccgctgggcaaaggtttctttcccgactcacatccgccacagtggctttacaactccccgaatatcctctgctcgcccaaaccgctccgggggcttgcgtgggaaatcgtggctcgcctcgcccacaatggcggtccctgtgaagtcgaggcgcgggaaccacaccatgagcttgtggctctgcagcggacatctgctccgcaataacaattgcccactggaaccccttccgaccctgcaaccgtccctctctccgtgccaccaccaccaacaccaccaagaccaccaccagcaccgtattccattctccgacatctcctattcatagtccaaaaaacaaaaaaaacaaaacaaacaaatatacataatacacagagttgtgtgtgtgtgtgcgtgtgttgtctgtatgtgtgtgtattgatagatagatatagatagatacctatacctttcatatatggttatatgttcatatatatgggtatatataaaagatgaatgcgtgtgcctgtgcgtgtgtgtgtgaagtgaaagaaatcgctacaggggcttgaagtggacgctcatttgtgactattcgggaaagctgactgggcccatgggatgcgtgcgaaggatgctatgcacgcgacgcagttgctccatctgaggcaggtgaggcaggtggggcgggctagctagagggtttgttccagacctaagagcaggcgatgaggaggagatggagtcctgttgaggctccatgagtggcatgggtggacgagtgtttgtgatgcgggcggcgtgtgaggaaggtccgcttgtgatgggggcgggtgcgtagtcttggttccagggtaagcagggagtctgtagtggagaggtgcaaatttgttgtgtgggggcagagaggctgggccggagtggtagtgtgggaaaggaatgggcagcgtgcagacagggagagcgtgaagcgggaagacgtctatggggtatcgggtcccggagagtgtggtcgtgggagggcgcgcgtgtgtg

SEQ ID NO: 430 - DNA, 1000 bp, mus musculus
gcatgtattggtttgccttagatagcattgttgagctccatttgtggtaatgccaccattgagagaaactcaccaaagaactgctaatgtggggttgggggctggagagatggctgagcagttaagagcactgactgctctttcaaaggtcctgagttcaaattccagcaaccacgtggtggctcacaaccatcagtaacaagatctggctccctcttctggagtgtctaaagacagctacagtgtacttacatataattaataaataagtcttcaagacaaaacaaaacaaaaaaaacctgctaatgtggttcctgaggcagcttgctgctgctaaggccttacctcaggctggttggtgagccttgcaatttctttaagattgatctacagctgctggttcatgtgtggtgtctgccttccaagaggactgcactgcagctgctgagtcatatttggtgtttgctacaggactgaactgcagaagaagatggagctcgtccccaaaaaactattgctaaacacgtccagttcccccatatcctaataacttttctcttctattgtagttggtgggtggtgggcaagaggagaggttgaacttttaataggttgcaaaaaaatttatgcttacactaatccctctagggaacagctctaaggagatatgaaaatgtctccagccaggacttcagctaagcatagccagtaaatcttgttggctacagattcctcaggacttatcatgtcattctttcaaatggcatgaataatcatttatattagtttggctatacagtccaaaccaacttgttaaaaaaaaaaaaaaaaaaaaaaagaatggccgggcgtggtggctcacgcctttaatcccagcactcgggaggcagaggcaggcggatttctgagttcaaggatagcctggtctacagagtgagttccaggacagccagggctatacagagaaaccctgtctcaaaaaaaccaaagaaaaaaaaga

SEQ ID NO: 431 - DNA, 1000 bp, mus musculus
aggttttcttgaggtgtccttgacccctttgtctccaacaatccttcctccacctcttctgcaagattccccaagctccacaggatgtttgactctggatctctgcatctgtttccatcagttgctgggtgaagcctctctgatgacaactgggctaggctcctgcctcaagtatagcagatttgttttgctatggttggtttgtttgtttgtttgtttgtttgtttgtttgttgtgtctctgggctatccagcctctgcttcatggctctccacacagtatcaggagtgggctccccgtcctggcataggtcttaagatggaccagtcactgattggccactcccacaatttctgtgtcacctttaccccagcacatcttgctggcaagacaaatcataagtagaaggtttttgtggctgggttggtgtcccagtccctccaccagaagtcttgcctggttacagaagatggcccgttcaagttccacgttccctactgctaagagtcttagcttacaaaagatattcttgtaagccaagtgtgaagttaatcacgacaaccaaaggtttgctaacatagaggaagagctctcatcaataggggaacagaaagtctcagcgacaagcttatgaaagaatggctgtctcaagggctccagcacccgactccgcctgtcagaggatggtctggctctttccacttgtcttctgcctcggctcaggtaaaaaacgtctgtggaaactgattgagtcactgagtgagttccttctttggaatgccttgctcctcttggtcaggttgactgcccagttctctattcagagacttagaaagctcaccgtggtcctagcgaactgcttcccgcagactgccacgggactgattcagagcaaacacttcggctgggggccaaggggaagggaagtgttttctgagatatggaaaatgagtctttgtaagtcaggactgttcgtgaccagcgtattgtggtacaaaaa

SEQ ID NO: 432 - DNA, 1200 bp, mus musculus
gagggagacagtaatctgaatacaggagactgtcattgggagtcatgttaaagctacattccttcagcagagcagtggtaatttgttttaacccagctataggcctatctagtcttctgacattattgcaccagcatatcctttctttttacttttctcttttattagatattttctttatttacatttcaaatgttaacccctttcctggtttgccctccgaaaacccctatcccatccactctacctctgctcaccaacccactcacttctgcttctctgttctggtattcccctatactgggacatcaaacgcactcaagccaaagggcctttcgtcccactgatgtccaacaagtccatcctctgccacatatgcggctggagccatgggttcctccatgtgtactctttggtggagatgcagagacaaagtgtggagcagagactgaaggaaaggccatccagagactgccccacctagggatccatcccatatacaattaccaaacccagacactattgtggagtctaacaagtgcttgatgacaggagcctgatacagctgtctcctgagaggctctgccagtgcctgacaaatacagaggtggatgcttgtagtcaaccactggactgagcacagggtccccaatggaggatctagagaaaggaccaaagaagctgaaggggtttgcagccccataggaggaacaacaatatgagtcaaccagtacgcccagagctcccagggactaaagcaccagagtatcttgcagctaggtcacctttgtcgatcaaagtgtttgcaactgggttggtgtttgcttttctcctctggaagtgtgcagagtaccttccagtaccatgagcactagacaggaggagttaagtatctagataggcaccagttcgacctctgtgttcagtgtgttttatatatatgttgtcttcagccgtagtgctagagagcacccgttagccttgaggacagcatggattgtttgggggtttccatggggccccttttgttaacaacttggttatatgcagccattcccagccctggaggtttcatttggtggctagaaatgtctagttagagctttgcctttccctctatttgttggctctattaagattcttttcacatatgcatgcatttaaagaagcttctattgtattctgtttccacatgactct

SEQ ID NO: 433 - DNA, 1000 bp, mus musculus
taaaactgcaagtcgacaataggaacaacagcaaatatacaaacctgttggggccggcctgcagctctcatgtccgggttcgagcctgggggcatcttggagctgaaagaaaaggaatctaggcagaagagggagagaaatggaaccaagacaggcttctgatcaaggctcaactttaatggcagcagacacgcttgataaaggagggggaggcccattcccagtcatgccaagtttcttgtgaagttatcagaacagccttttagcaggaactggagaaattcacagttctcagctaactccagtagatcttggagaaccagtttggcctcaggcaggtagcaggcagtgtagcatcaaaggagagtgatgagaagcaacacagcaggtggctccgcctcagtggtggacagtctcaaccagcctagttaggatgaaggaggttacacaaacccttgtttgggggttggttttgtacattttgtattcagatgctgatttctatgcctaaacatctgtctacagtccagatgatggcataatcaagtatctctgatctcgttgttaggtaaaatttgttcttcctcatctctgatgggataacaaagagctgattcagcttatgattgggcagaggagagaggaagaacgaacttgagatcccagccagggtcccaggtggagagagaggaaacaaagaagaccacagagagagagaaatgagtggagagaacatgtggtaggaccaggaggatttgccatgaagtcgtgatgagcaagtcaatatgtgatcacacatggaccagagcgaggcagacaagaccagattggcaagtaatgaggcatttgtctggctattagcattagagggctagaataatttagaacctaccaacaacttattaaaaacatataggttcctgtgtcatttactcaggagctaaaattggctagacagggcaaaaaaaaatgtgctgtagttatttggaagcaaaggagg

SEQ ID NO: 434 - DNA, 1000 bp, mus musculus
aaagggaactgcaaccctataggtggaacaacaatatgaactaaccagtacccgggagctcttgtctttagctgcatatgtatcaaaagatggcctagtcagtcatcactgcaaagataggcccattggacttgcaaactttatatgccccattacaggggaccaccagggccaaaaaggggcagtgggtgggtaggggattggggggggtggttatgggggaactttaggatagcattgaaaatgtaaatgaggaaaatacctaataaaaaataaattaaaaaaaaagaaaattataactttaaaaaaaagaaatgtcagtagaaaaatatttaaataaatctctaatgtacaaaggaaaaaaaaagaagaaatctagattagtcattctgatatctaacgaagtaaatttccaattaaaattagccaaaagagatggtgaaggacgttccatactcatcaagagaaaatacttccaagatcatgtctcagttcagaacaactatgccccaaatgcaaagatactcacatttgttaaagaaacattactaaagcttaaatcacacatcaaaacttgcacattgctcaggagcagagggtgccaccttggttcctggaatccgctgaacttaggaaattagtctgaacaggtgagagggtgcaccacagaagctgacagcttcagggacctgccaaagcaacacagcttctgggaaaggtcctgttttgggccttcttcttcggccaggaggaggtccaaacacaagatatctgcacaccttccctgtaagaggagagcttaccagctgaaagtgctctgagcactgaaactcagaggagagagtctgtctcccaggtctgctgatagacggtaacagaatcaccagaagaacaatctctaaacagagtcaactataacaactaactccagagattaccagatggcgaaaggtaaacgtaggaatcttactaacaggaaccaagaccactcaccatcatc

SEQ ID NO: 435 - DNA, 2400 bp, mus musculus
gcttgttatcccaatgttggattggggttcaaagccagctggcgcttcataatagaatccaggccagtctgggctgtacaatgagaaaggaagggagagagggaaggggaaagagagatggtatagactaaagaatggatggctttgcggactgtgagaaagtggagaacaagtggagtttttttgtttgtgtttagtgagaagcacaacaccggatttaaagtgacaaagttcccagttccaattcaatgcctagagaaccaagaactcaagtactctgtagagatacaagagcacacaaggcaattggtataatctagatgacaaagcagtggctttggggacttgggtgatagtgatggagaagagaaggaaatggctgtaagatacatttcaaggacaggaaaacagggcagagcagcatgcttatagattctggagataaaagaactgagaatttccccctcccccaggatcagcgagtcatgttgagaaggaatcagagaaaaaaagaccgcaaaggaatagccagaggtaagtcatgcaaaactggagaaactgtgccatgtagaccaagacacgaggagggggattcagccattcacaaatctattgaaatcaaacaggcagagaaacataaatgccactattgatctggcaggagagggatcacagtcaaccttcagaagagcagaagagcagcagcagaagaaagctgcatccagcagatctgataagaagctatcaagcaacactcaaagaaagcagtttagaactgctgttggatatgtgcatggagctgaggcagtgcttggcacaaggagaggacgtactatgaggatatgaaagatctatgggtaatttcagctctggttaggcacctatatctcttctcaagcataccacaaatgatccctgtgggtcccataccttacaatgttcacgcctttaaatgtctaatcaactgaggaatgtcctctactcttacctttggttatctattaaatgtttctcatcacatggtcatattagcccagtttcttttcactagacaatccttctagatagtacaaaatagtattggcttgtcacctaccatgagttggctcatatctcagaagcactttgattatcttggagggtctatcaccaaccctcttgatattttccctcatttgctcatttcctttctctctctgggagggcactttggagattacatgaggttgggatatatgagttaaacaacacaaactcttaacacaagtaccagcatttaaagtaaaagggactggggtcattgcaaaagattgtaaacgttgggactaacaaatttggttttgtgggttttcttcctgaggctgtgttccagagagggcaataaagggtaaaactcattagagcatcattatcttttgtctaaaggaaacaatgtgtggtttctgggtagcccacttggtgtttgcattggccctggaagcctttcaaaccaactatattgtttgaacaattcccgtcttgaacatgaaaagaaccaccagcaaaccacagagctgatgctaaattactaggtgatgactcctttggctcctaaaggtttctagatctcagtcattgaaattatggatcttccttctaaaaagaatgatcatcggtgcctctggggagacctcccatgcagtcttctctccactactatgttctgggacttctgagaagtttggtttagaatcatagtcactggattctctccaacacctatttgtgcttgtgtgtgtgtgtgtgtgtgtgtgtgtgtgtgtgtgtgtgtgtgtgtatggtgtggacatgtacacatggtccagtatggaggccacaggtcatcacatggtgtctttctcaatccctctctaccatatttttgacacaaggtctcccactaggcctggagctcactattttggctaagctgacacttagaaagacaggtgtcactgcacatggcttgttgtgtgaacaatggggactccaagttttatccttaagttgcaagcatcctgtaccatctgagctatctccccagtccctcagaccctgattgagaaatttcagttctttggaaactgcaaataattttcagatagaatttacaaacttaaatttgagcagtggtgtgacttaacttttttttctcctgagggaaacacactcagttcctgttgatccagaggatataaaatggctgttgagggcatactcctatgttgcttacctcttttggaagctttatcgaactttgtaataatgagaccttgggaggaaatcatagactatatctatggctttatggaaaaaaaaacttcatttataaggacttctactaatgaaacaatcagtatctttctagaaaaattccatcta

SEQ ID NO: 436 - DNA, 1200 bp, mus musculus
gagcatgtgtccttcttaccagttggggcatcttctggatatatgcccaggagaggtattgctggatcctccggtagtactatatccagttttctgaggaactggatcttacgttttaaaggcatactaacaatctttgctttttttttggaatatttatttatttatttatttatttacatcttaagcaattttcaacagttatattatttctggagctttagtcaaagagccttgtcactgagagttctgaattcttggcttgatcaggcaatataatgtaccaatcaatataccaatacaccaacaatatacaaatcaaagaaatgcatggtagaaatatgaggtaagatttagtcagcatgatcacattaagaagaagaatggtgccgggtgtggtggtgcacgccttgaatcccagcactctggaagcagaggtaggcgtatttctgagtttgaggccagcctggtctacaaaatgagttccaggacagccagggctacacagagaaaccctgtcttgaaccccccctccaaaaaaaaaaaaagaatggatgactatgtttagtaaccctcaaatccaagtccatgttttggcccttgataagaactttaaggcaaaataaagacttggagtaggacacatacatctacacacatacataaacgatatgcctgttcaaacaaccagcctgtgtctcattttctacgcctcagttcatgattttgaaggtgactctatgaagtccttaatgtttggatacccaggctatcccatagacacttgcttctgcttgagcgtgaccacatgactgggcaacattcctacacagtcctgttgctcctgggctctaggtggctggaggactagagtgatgactggactccttcaggcacttttggaggcctggaacagagcactgtaaaaacttaaagtagagtttcctcaattcctttgctctctttgcctttagcgtcaacagaggatgagatgggtttgataggctcaggttgcaaatagacactccttgagtgaattaccttcctatgtatagagtgagcagcgattgactcaaaatatttctagagagacccaaaatgaagacagagatgccaaacatcttcacactttccgttatggtgtaggactggcatagcatcaatactttttagcacgatcagcttctaagggcctcttac

SEQ ID NO: 437 - DNA, 1000 bp, mus musculus
aagaccttgactttgtgacttgctgcctcagtttccaagttgctatgattacagacctgtgtccctaagcccagttggtgtgacttttctggctttcccaaatgaactatttacttataggtatgaattttaactcattcaaaaacgttattcttgatcttaaagcagagagatgagacagaaatgtgaagtctgtgagagtggacaggaaggccaggcccttagccacagcatggagttggaaacaatgggacacaggaactgctgtccactttgctcttctgcagacctagcaagcacaagaagctacatttgcctgagcagttgactctgtaagttttatggttgtcccagaggtaaactgcccagcaagtagactgaagagaaataagtgggcggagttgcaccagatgacctctgaccttagcattaagagtacaagactatttccattttcaccgtcctatttaactcagcctcacaattcttgttatttcatgacagtttctatttgctggtgtcctggaaatacttgtgttacttttacatgtttctgaagatttacaagcatattacaaaataatgataccccagtgataatattccctgcccactgctttctatgacctgccaaatgcctagtctctaggcataaaatcagccgagctggccatgtgagcaaactcatataagaagatgagctacagatagaatctctttaactctcatattgaaaaatgttcaggtctcactctgcctagatttcaaaatcgttcaccatatggcttctctgtccctctagtctgcttactgttgctccatacatggttccacagctgccatgacagcagctgctctctcagtcaagacccctctctgcaccaaatgtgccccttactcagccttcaggggtaagctttctgtccacacctctgccccctgaattttgtcatcccatgaatctgcattcctgtacttctatgcctgtgaatactatttg

SEQ ID NO: 438 - DNA, 1200 bp, mus musculus
ctggatgtcataaagtcaaaagctcattctttcaaccattactgcaacaactatgcagaattatctaggtctaatttacacactggagacagggccttggataaagaaatagagaatttctctgttctcatggaactttcattctaatcagtcaaacagtgatcagtattaatggacaaagccatataggtattcgataataagcatcatataaaatatgaattacatgaaatacataattaagcaagtgataacatagaactaaaccaattcatttaaaaattccacacagtgcacttaaaaaatgtccatggcagtttcccaacccgagccagatcagtggcttgatacactcccataccctacagcctgtctgcctctcaggaggtccatagaaaccagcaacacaggtgaaagtccctcctgcccaagccagctgggacatccacagagcccagctgacaaaggacctgtctgccctgataagctccaccttctttctggtctttccccacccagaccagatcaggagcatgataccctcccacaccctacaatgtttctgactcccaggaggtctgcagtaatcagagacacaggaggtctgcagtaaccagagacacagaaggtctgccttaaccagggtcatagtccttccagtttgtacctccatctacaaatgggttagatcctgcccctgaagccctgagcctccttgtctcccaggaggtttgccctgactaggaacacaggagttctgctctaaccagagatacaggaggcccctcctaaccagagacagcactgactgccttccagaagactggctctaacccaggtcacagagctctacctgcctccagaggccagttccagtcagaggcacccaggccagtcaacaccagagagaaccatatgcaagctcaagaaaataagtaacagatccaaatgcaatttgccatcatcagaacccagttctcctatcagagcatgtcctggataccctaacacatctgaaaaacaagattctaaactaaaatcccatctcatgaagataaaagaggcccttaatataagtaactccgttaaagaaatacaggaaaacacgggcaattagaagccctgaaaaaggaaacaaataaatcttttaaacaaattaaaaatacaaaaaagcaggtgaaggaactgaacaaaaaggcc

SEQ ID NO: 439 - DNA, 1200 bp, mus musculus
cagcgagtgagtggcaatgtgacatacatacataatagaatattacagcatcactaagtactgccaagcagaaagcaagtcctgcacaacctcactcctatgtggaaccttagaaagttcatctcgtggaaactgaggatagaatggtggttaccagaagagagagtgtagttatgctgcctgagctgtcaaaatggccacacctctcaaaaccactgtatttcccacctcagcctgcagctgtcacaggagctgtacacagtggttgcatctcctttccctcctcagcttaaggctttggtaaaataccataggagctgtcccacaggagctgcccaacagtgacacctctccaagctcccctagcagctcagcagcaatggtgcctcagctgggacgatcttcccatcccaactcatgggcctgatacagggggggaagtggtgcaaaaagcaccagtccatgagcaggaaaacccaccaatccctgagcgtcccacaaaccctgccaaccccagaacaggaaaatccatgaatccctgagctcccagaactcaggacttgaaatcccaccaatcctcactttgggaaatctctgtcctgaaagctccgcctactaagaaatcctatataagccctgtcctttgttcaattccctgctgtccactcagggggagcagaggcagccaccctgggttcgtccttctataccctgaaccctccaataaatctttcacgagatttttctgcctggtgtgactttctcattggaagaagccaagaaacaatgaaaagaagaaggaaaaaaacgaagtgggtcagggctgaggctccggagctcctcagctggggataccctcccctgagagctataccgccaatgctgaggaggcttcctttcagagatgagcggtgcctgggcttccaagtcccgggataccctcccatctgagtagggaaacagcgaatgatcaggtgaagtttcaggcagatggaagtaaagaatactgatgtactgcactgtagtttatatgtaacaataattcactgtacctcttcccagtggcccaattgatctgagcttcttttaggcagctcaattggtctttgtttcttcaaagggattcattttgtttgtgcttctttcaagtggctggactagtctcagggtgactttcagcattctttttactgtttttat

SEQ ID NO: 440 - DNA, 1200 bp, mus musculus
gctttatataagtattctcattatgttttgaaaatgtgtgtatgtagatgcttctgtatctaatttaattagagaaggctctatttaaaagcatgactgaattcatgacagctttttatcactgtgcgtcttctccattgatcagtgggtgccaaaaatacaagcgtaacaacataagatgaagtcgaagctgagagccggtctgtgtttgtcatttccctccctcaccgccctcagaggtgctgatttccttgggttgcaacattctgcccgcagtacagagctcctaagacatcctttattctggactggcgagatggctcagtgggtgaaagtgccaatcacacaaacccgatgacctgattcgatctccagatcttacagcagaaggggacagttagctccgacttcccgatgcaggccgtggccgtacacccatgagcccacgcatgcatgcatgcacgcccacacacacatttttctacattaaatgcaaagcttgctgaaaattttccttctaggtacagttggcaggggtgtcggggtgaatccctgctgaacaattgccacagttgtctacagatgttatcctgtcctgagttagggtacctgccacagctgcctcctggtaagggctccagggagggacaactatcgactggaagtatccctccgagaaggctcctgcctagttgcctggtctctggcctatggtactgatgaatgggtcctttgaaggtaggcaggtgacacatcactgtcttggcagtgtaggggtactgagatcccagcactatcctctctctctagttttacttcctgagtactgtgaggtggcctgacctcttatgatgttctgtgctaccataggcccaaagcaacagaactaagcaatgatggaccaacgcctcaaaccatgatctacaataatccatttccttcttttagttagttgatcctctcatccatgactttggagctgagtgacaatttgccctgaaagcaacataaccttccgatggccctctgaggttactgttgtgggtcaaggctatagcagaggaaaaagtggagaagtctctctgcttctccctctcaggccctgagaagctgttgaaggggactgtctgactgccctgcctcctcactgaggatggggaagacttgtggaaatggagcctatgtctgagaaccaaatac

SEQ ID NO: 441 - DNA, 1200 bp, mus musculus
acatacacacccattacccattcacaaacaaaaatagacaaaataaaatgaacatccttaaaagattcactttgtttgtttgtttgtttgagacagggtctcactagcccaagctaatctggaattccttatataccacaggctatcaaaggattggagaggctatcagagattggaaagttgatgttattcttggtcttctttataactgtggccgtggtgtgactgagctttcagcagaactaaagccagattggaaggaactcacaccatcactgaagccagggctcctgaggccccatgtggaattccaggttctccttccgagactctatcagttctcttgacctccagcagctctccgtgggtggtggtctcaccatctgcaaccagcttgatgattgcaggattcagatagcttctgggcaatgacatgcttggcctgttgcagggtagcctctagctcggtcagattgccttgtcatccttaaagaccagatccccacacactgtttagtgtcagtaatggaaacctttagacatgatctttgggggccttgatctctgtctataagtggcttatgcttcatcttggagaactctacactattcttcccagccaacaatactcatatttgacccaatagtgctctccacctcagcccagggacttaggatctcaaacaggacaaagtcatggactttgaccacgatgccatccatgttcaggtagcagttgttgcctgtgagcagaaccatggccgtgtccaagaacacatggatctccaaggtctaagactgcagcacacagatctcaccgcacacggatctcgccttcatggatctgcccgaggaagttgacctcatttgtgtttccaggtcagcttccagctccattttgtttgtgtaagcatcatcctcatctttcacgagggaacaaattcattctccattcctgtctggttgatggcatctttctgcttcttcttggagttttctaccaggccggcatgttgccaagctccacctccatctacagcttcctctggcccaaggagcccaactgccacctcagactagggatgtagcttttacatttgttatttatattacttcaagctcacaccactttatgcactgcaggaggccccaacttgctttctagtacctggttctgcttctgaaagaagcacaccttga

SEQ ID NO: 442 - DNA, 1200 bp, mus musculus
tgggcttacctgctcaccttaggagggctttctatgactgattcagcaatcagtagccagtgagcatggcctgacacaaggggcatttccatccattcatcctttcccacacaccaagcctccaggggagaagctgagtacttttgtaaccgccccctagccaagccagacacatttctccctgaagtgattgattgattgattgattgattgattttgtctctgtcactactttaatggctgaataagaagctttctcatgttccagaaactcacactaaagaatcagagggagatgggcaggcaaggtggagaacacctaagaggctgaggcaggaggattgtgggttttggggtcagtatggacaattcagagagaccctaaataaaataaaggggggtggctgagactcagtgatagaactcttacctagcatgcgttaagttcctggttcaacaggcagctctgacgaggtgggaaaggggtggctaagtaaacgggacatgcaaaaggaagagaggaaagttagaaataaaatgagccatctctttctcccctacatctctcctcatttctccactcagcctgctccccgcccacccccatgtaagctgctcactctccccacctctttgtcacttctgcctgcctggccagggggtctcttcctagggactgcggcgggtcatactactggaagccagtagaggatggctctattctcgaagaaatggctagagcggatgaacttcttgagagcctcagcagactttgttgtacagatgatgtcagaaaagatcaaacagcctgctgcagacagcactgcagccctgaggaccgtgtcccagatggctgtgattcctcaaaactcttgactctaggggacaccttctaccccagtgctcagaactagaggtttgcctaagtggcaccacacacacacacacacacacacacacacacacacacacacacacttcctacacactcagcaatgtcatttcttctctattttgggtcaacttccctctcctattatcttagctattaggcaggctcagacagtctgtggttattcagaaaattaaagctctcagaggtctgtttgcacagacagaacctgtcttgcccagcacttgctttgagtcacactagatagccatgccccctcggactcctgcaatcactcagatcttgaa

SEQ ID NO: 443 - DNA, 1000 bp, mus musculus
gtcctctaccagcatcatgagatatgattttgattctgagtcttgcttttcgggtgtgttggggtatccaggactggctgatgggggagtgctgggttctgatgcaggtgagaggtcttggtttctgttagtaagtttcttacatttgcctttcgccatctggtaatctctggcattagttgttatagttgtctctgtctggagcttgttcctcctgtgattctgttagcctctgtcagcagttctgggagtccagctctctcccaagtctcagtggtcagagtgctctctgcaggcaagctctcctcttgcacagaaggtgcccagaggtctgacattcagacctgcctccttgttgcagatgaaggccaaaaacagggcctgtcccagaagatgtgttgcctccgcagtctgcactctcacctgtgcagactggtgtctgagggacccaggacacaagatggctccctcacctgctctggcagtcagagacttcccaggcatacacctctcctctagcgaagaatgtacctgggtgtctggagtccaaaacatggcctgtcccagaagctgtgtagcctctgcttgtcctagaagctgtgttgcttcagcagtccacaaactgacctgtgcagactggtctctgaaggacccgggagacaagatctcaagtcctattttttttctttttttctcttttttttaaaaaatttttttattaggtattttcctcatttacatttccaatactatcccaaaagtcccccataacctccccccccccgaaactcccctacacacccactcccacttcttgaccctggcattcccctgtactgaggcatataaagtttgcatgaccaatgggcctctctttccactgatggcctagtcggatccatttagatccttgggtactttctctagctcctccattgggggccctgtgatccatccaatagctgactgtgatcatccacttctgtgtttgctaggcccc

SEQ ID NO: 444 - DNA, 1200 bp, mus musculus
actcctgtctgcacaatctttctatatctgaagaagctgcctcacccacaacagtgttctttccaatacacacccacccatgagactgtcagtgattttacattgttctcgggataacagggaatggaaatcttgtaaatgataaggccttgtcactcttcagcatcaccttgaagaactgagcctgttggaatctgtactccagccttagtcttcttgtccttgaaaaccagagcaaacagcactttcttcagtgacttccctgatgcccagaccagagaagtttcctgtgttgtgtgctcctctagacccacactccttctccgcatgtttgtacatatccagaattagacattcaagccagggatggtggttcaggtctgacatgccaccatttgtggggctgcaggaggatcactgcaagttttaggtcatcctaaaaagacagggtctttccctcagtgaaacagattggatacttggtattgtttgctgtgtgtacatgcatgcacatgccagaggttaactgtaagtgataatccactgtgcaattacacaccttgtttttaatgtgggcgcccgggattgagttcaggtgcccctggttgcatggcaagcacagcgctatcctcagctgctagtgctgtggtattttgaattatatgtgtctctcctagcaaaaacaagtgccatgagcacgatgcatgccccgaacctcctcatcaaattcaacatttggctcagggtttgaaaaaaaagtagttgcttaatatatttgttgagtgaataaatgactatttttaactgtttagatagaggaagaagaacccactggctacattcgatttgaaaaatttattccagtgatgaccagagcccttgtagaaagaaggtaaggaaggaaatccaattttaaggcaaataatgaccagaatgacactaatgtgaaaacattctacttggccagacgcgctgcctcatgcctgtgactctagcacttatggggatgaagcaggaggatggcagcaaatttcaggatagccttagttacatagtccaagccagcctggactacagaataagatcctgtttcaaaagaaagcacttggatttgcagcttttattcacccagcatgtgtctcaggtggcttcctctagcctttcagtgtacttaaggctgggttagggataagcttagaa

SEQ ID NO: 445 - DNA, 1000 bp, mus musculus
tatttacccttatgcctcccacaatgtctctgagatctatccccatttccccgcccctcctaacttcacatcctttttaaaaagtccaattcatgttgaccatacagatacttgtgtgtttggagcgattcactggggcatagtcaacctttccaggggccacacccttgaaaaaactgactcttcctctgccagaggtgattgactgtcaggagctcctccactgtcagacctagggacccattcccaagctgttggtattgtggagactcccaaatcaacgccagctcttggcattgctcttagttgctcacaggaacagaacagtgtgattctattgctgattgcattacataccttggtcatgaaacacagagaaatcagatttatacggactagaaagtgtcttccctgctggctgtctttaatactaccaaaaaatgctatgtagtctgttggggaaaaaaatcatcaataattgtatccagccgtgaactatgacaatgacttgaatggcacaaggtgcccattgggcaataggagctccaagtgttatgaagggtagccaacagccaaatgctttctgattggatttaagacacacccgatgggagttttagaatgcctggttcatggttgtgaagctcccaggccccaagggttaatctactcctgttattctgctaagcggatatagtgttaaactactcattaaacttgaatctatatacccatacattagcctcacacctcatctgtctgaggaactgtcggtgattaatgcagaaactcaggatttggttaaagtgcagagaataagtgtgagtggggcactgagcctcaggagggacattcacatcaccctctccacagcttcaggaccattatcgtgaagaggagacaggaagattgtaaactccagaagctgggggcgggggcagaggcggggcagcagaataaaaccaagtcttctggaaatgtcaggaccgctggactcacc

SEQ ID NO: 446 - DNA, 1000 bp, mus musculus
aattaatgctgagagtgaagcaggtctgtcacccagagggtcccggggcacagcaggctcccttaggctcccttagactgaatattcagactgaagctttttaggatttagattagttgttcatagtcattttcaattttgattctattgatctattgataattatggattattcagaaccctgattgatctgtgcttgttttagtagaggaccatccttggctagcacatgcccgtggctcccagaagtcattagttctttctcagaataccttagcagggttcagtggaacttcatccatccatttgtctgtccatctatccatccaccaggccatgtgccctaaatctgttcattcactaaactaaacagagaactgtagtgggcactgtgccagcgcaggggaaggtagtcattttaaagaggaagacagatgagatgtctgtagaaaggacaatcaatgcattgataaagccgatgaaggctaagggtgattaatcaccaattaaatgccaagtgtaaggactgcagccagatggcagaatgattggaggatcagacccagaatttaatcacatgagtagctgtgtcccagcggaggctggttctcagtttggacaagttttgctattttgagatcaaagccttgagtttggcagaattgaatcctgagattcctggactgctggcatcattcgaacaaatagccttggatttctcaatccctctgtatcctcaaaggcctgttgaaagctccctgtgagagcctagtagccgctctagcttcaaggccaggccacaggggcagtgaataggactgaactacactgcctggcccctggggtggtggattcctattcactgagctacactgctgtgatctggcttggaaagtcctggggctgatactggaggaaagggaccgaggagccagactcagcagcatgccacaggagctgtgagagactcataacagtatcctgagtgaagtttatcggt

SEQ ID NO: 447 - DNA, 1600 bp, mus musculus
tatagccctggcagtcctggaactcactttgtagaccaggctggcctggaactcagaaatccacctgcctctgcctccccagtgctgggattaaaggcgtgcgccaccacgcccggcgcaacatgtgttcttaatggttgagtcatcccttcaggcaacaacctagagtcttaggaagaattatctggatcaggttggcctgtggtcatgtctttggggtgttgtcttaattgttaattaatgcgagaagaccctgcccattacaggtggcaccattccctagtcaggagatccagaaccacattaagagaggagaaagctacataagccacaagcaatatgtggctccacagggatccatgtgtttgttctctctctgctcttgactgaggacggaaggctttaagttgctgccttgaatttcttacaacaatgaattgtaagctgggattgtgagccaaataaactctttccttgtttatgttgccttttgttggattacacacacacacacacacacacacacacacacacacaaacaagcacacacagaaatgaaactgtatcaccagcttttccctcacatgcctggcttcatagttgcttagatcgttcttggcatagtgatgcttcctcagggagaccctccactccttgaccacccaccccactctaatttcctcataccaaccgtttcatcgttgtcacttaacctaccattttctgatatcttcttatctatttgttaattatttccttgttcttgattataatctttgtggtgacaaaggaccttattttcttcctcagtgctgtttttcagagctaaagcatggtgccagagaatcctgggcatccagtcaagatatgtaattttttctgtcttcactaactcaacactttcttttaccctttcaagtcgcagagtgggcacagcatgctgggtggagtacgggttggctgagcctcgtatctaggcatgtgctggctctgcctcactcatcctgtgatgttaagaatgccattcagactctccttgggcctctgcttcatgtactatgtcccagaggaagttcttgtcatatccagagttctcctgcagattaaactacatcaggtcagacagtatggatgcaatgcagggcagcttcaaccaaaataagggacaccacaacaaacacagggaagggaggatggcatagagactcatcctccggatgctaacgctgatgggcggcacaggaactcatcagttccccactttctagtgaggtctgtggaagtacacagttactatgtttagcagattacctgttttagaaggcatattctggagcgattgtgtttccctacctcacaagctgattctgggatgcctgcatcctgatgtttaggctgggctagttgaaggataactagacttagggcagacacaagcagtgactgatgccgctgcggtttctggggaggctcaacacatgggcttcacttggctgccatctttgttctatagccatctctgttgggggcacttagagaagagtgagcctgcctagggatgatggggccaacactgtagaaaaagcttccagtattaatc

SEQ ID NO: 448 - DNA, 1000 bp, mus musculus
tgttgactgggcctagtggtacctaccatacccactcctcaggaaatagaaggaggaagattcacgtctccaacaaagtctggaggcatggcgccagtggtagagcacttgcctggcatgcacaaggccctgggctcagtacttctgggtctgagtcatttggaggtcaatgaattctgtgatagcaaacaggctgatatagtttgcacactgaaaacagtcatggctcgggccacaccttctctagctggagtttggtgcagctgcaccagcagcctgggttctcaaagacacctatggaatgtacagaggagctagggctggcccaaggcagcttgcccaaggtaccagaggagagtccagtagttgtcaaagtgagtctccttaccctacccccccagcgcttacattcattcatgggaaaacatacagcagaaggatgctcacaataactcagtattcgtgttaatactgcttttaacagaatttaaaagtactttcagaaatgtgaaacacctgccgagcaccctggagggaggttgatctccctaaattgtgtttagctgagctaccattagcagctatgtttataagttccaggcagaggaaatataacccctggtcccctgtgatatcttctggggtcattttctttgtaatcctttaaggcagagttgggctgctcacatcacaaccacccacctggatgaactaactggtcaccagatgttttgatcctgtcttgggggaatgctgagtgtctctagtctggagacactgaagtacccctcctgggagcgtttaaagttcagaacgaaggcttagaaatgagaatggctgaactccaaagataatgaaacaagcaacctaaactcttaaaggcccctgaaaactgtcggtccagattttaaaacaattcccttcatcttctgaggagtagagtcctaatgaactgcttagtgctggtgttccacagcccagatagagttgggagacctcc

SEQ ID NO: 449 - DNA, 1200 bp, mus musculus
tgagtaattacagagaatcaatcataaggacatacttataaacctgtactttaccagattggaacatctaaatgaaattgctaattctatcaataggaaacactatttaagtaaactaatagtatttataaatgaatagttgtacataaataggtaatttactcagtaggtaacagatcagataaatgatgtaaatagactcacaaaccctagtaaaacagaagcagtcattaaaagtctctcaatgaagaaaagccacgagccagatgattttagtgcaaaactctaccagactttcaaagaagaattaatccaaacactactcaaattgttccataaaatagaaacagaaggaacagggcccaattcattttatgaggccacagttaccctgataactaaaccacacaaagacccaacaaacaaagacaactacagaccagtttccctcaggaacatatattcaaaactactaaataaaatacttgtagacagagtccaagaacacatcaaaaagatcattcaccatggtcaaacaggcttcatcccagcaatgcagggttcaacatatgaaaattagtcatgtaatccactgtggtggtttgattttgcttggcccagggagtgtcaccattaggaggtgtggttgttggactaggtgtggccatgttggagaaagtatgtcactatggggatgaactttgagaccctcctcctagcaacctagaagtagtctcctgatgctatgtagaactctcaggtcctccagtgccatgcctgcctggatgctgccatacttcccgacatgatcataatggactgaacctctgaacttgtaatccaggcccatttacatgtcctttataaacgttgccttggtcatgatgtctcttcacagcaataaaactcaaactaagacatccacatataaataaactgaaagaaaaaggcacatgatcatctcattaagtttggaaaaagcctttgacaaaatccaacagcccttcatgataaaagtcttggggagattagtgatataaaagacatacctaaccacagtaaagataatttatagcaagcctttatttaacatcaagttaaatggagagaaactcaacacaattctactaaaatcaggaataagacaaggctgtccgtgctctcaataaaaatattgatatatcaatacagtacttgaag

SEQ ID NO: 450 - DNA, 1000 bp, mus musculus
gaaagaatttattttggattatggttccagaggactaaggaccatcatgggggaaggcatggcagcaaacagtagatatggcagtcacagcaggaatctgaggacctaaagatcactcccagtgatgtacttccgctggcaatgccacccacccaaagcttcccaaacagggctaaccaagagttcaaatactgaagcctagggaataacagttctcattcagaccaccccaggctgaaactcatatagaagtttgtgctactctgaggaaaaggaccatgtgcagaatttaccacacagtgcctccaaacctagcctcacgtcccaaaccctcctctctagtaggcatgtggtagttgaagattagaaagtggaattttgagaactgaccctcacggtgcatctgtggattggcgcatgacatctgttctctcttctcaggaagcgtagaatctgcttctgaccctcttgtttacagagctctgactactatggttcacccctggcgataagatatcctggaactaagtttggaagccacagtgcagattaactccttcttttcccctcatcgtggtaacagcagggaagctctggctaacatggagttttccacagaattctgttctctggccagtgtcatctctgggcaacccaagctcaggacacgaaggcttacaactgcctatggtgaggcagtggcagggctctgtgatctttgataccattactatgaaataagcatgaacctctggggtaggcaagggctgtcagactggactattatcctctggcctgtctaagaatcggtccagcatctgttgcctaagtgagcatgtcaactgcaaacctacagggacagaggctctgatatcctctctccagctttagctgggggtttagaaaggtctcagaatcccagttgttgggttctagaagcttctagaaggccttgcactgatagctattacggtcacggctgtgatttactgtggaaaca

SEQ ID NO: 451 - DNA, 1000 bp, mus musculus
tttcctttgaacttccaaactcctagcgccaggcgttagaaagaggtcaaaatgctctgaacttggagattgtccagactgtttcaaggaagaagtctgctggcctccccgttcagtcagcctctgggtggcaggcaggccaggttagccttagggaaaacataccaacctttgatgttctggaaccattcgtcatggttaaagttgggccatggggtctagagaagccggggacatagtttgactttcagtgggatggactaagctttgtcctcagcagcctttcaaggggcagccttactcggagacagagtttgtgaacaactcttctggtgtgtgcacagacttggttttgtttgtttgtttgtttatttgtttgtttgtacagctgaattgatgcacatgagaggaggtccccagtaaagcccaccatctgcccatcctcagcatgccaagcgctagggcaccagaacactctcggaatctatctttcacttacttgagaacctcccttgagataagggcccccatttccagccctctggcagccctctcctcttccttccctagctctgacttacctcacacagtgtatatgccccacgcataagaccgtaagactggtctttgctgttgaggctttagccagctcacattctctgtcttactgggcaggtcctgttttaaggagtctagtttacacacttgggggtgatgtttttgaaggtgggcgacatggaccttggaggtggttggacagagattctcccgtgcagttggctgtgctcccattcttagggtgagaatcaaaccaggggcgtggagaagggtcagggagagcatgtggaaggaaagccactgaggttctcgcagcggtcacacttggacgtgatgttagagaggaaatttcaccccaccccattccatgactgagtgtgtacttattgttgaatgttttagaaaatatctggtgaaaacaaaattaagaaaataaatctgc

SEQ ID NO: 452 - DNA, 1400 bp, mus musculus
  misc_feature (1211)..(1400): n is a, c, g, or t
aggggtgacagcagtgttctctgaggctcacttcaagaagaggacagggcaggatcaaggggcgagaaggcacttgaggggtccctgactagcaggggtctggctcaggtgagtccacgcccaccgtcaccagtctccacgcccataagagcttcctgtctctgtgggtgtcacacccagagctcgtccccgctctgttgtgagctagcctctcccttctggttggaagtccctctattgcccagtgtcctgctgatgagcccagtcaggcacctactccagtgcccggacagcagtgggaagagcattgagcttgacaggagctggagcctcgcctttttaacctactaaacaggtcaggtgaacttcagcccccacaaaaaaaaaaatttgccccccacagttgacaagtgttaaggacctttgatgctgttgcctttaaacggtaggcattctgatggtatggcaagaatgtcagaaacaagactgtgggtccctcaacagaaacctgcgctttcacagtccccagcctctcacctgaagtcagcacactcacccagtagggcacccacctcagggtggagactgttgaatgggctcattcaacagaggcctctgggggcctctgcggccattctcttcatcgcccccaggtggcgctgcaagaccacagccctgagccacgtcttcagtcccaggctcaggtgtccttctgcaagctctcttgggactcctggagaccaacccttgaattctagacttgtctgccttcctagcaccccacaagattctggggcctttcaaattcatcagctcaaaggcatctagcgtgtctctgccatctgacatcagaagtggcacagggctttgagcctggctgttagaattcacacttagccaacacccagctggcccaagcccagaggcctgcttcttttctccccagcccagctcagacacagacgcctgggcctcaaagagaaaaatccctatgtgctcaagtcactcaaacaaacaacaaactaaaacaaacaaaaacacagacactggcatttcacagatggaaccatctggctggaatcacagctcacaacctccaccaacgttccttctgttagtcctgttagatgagtgaagggtgcacatacagacacactcacacacacacacacacagagatgtacacatatacagagatgcacagatacacnnnnnnnnnnnnnnnnnnnnnnnnnnnnnnnnnnnnnnnnnnnnnnnnnnnnnnnnnnnnnnnnnnnnnnnnnnnnnnnnnnnnnnnnnnnnnnnnnnnnnnnnnnnnnnnnnnnnnnnnnnnnnnnnnnnnnnnnnnnnnnnnnnnnnnnnnnnnnnnnnnnnnnnnnnnnnnnnnnnnnnnnnnnnnn

SEQ ID NO: 453 - DNA, 1000 bp, mus musculus
ggaaaatgtgcccttattaatattcttagccccactcttcccacctgtcctaactagttgctcagataaatcgagtccctgttaaacatccctgaccacttgtctgtaggagtggcctatgtggccactccattttgggatctcacatgtctcatcaacttttcttcatctgatgcatggtgaactctcttctcctcccttgtgtctctcttttcctccagggtcctggaagtcctgtctgtaccttctgaccagcagttggcccatgactttctttactgacagacaagaaccaattgtggaacaggacattaatatcagaaccacccctacaaaggatgaacattgttcggctcttatccctcagcatatggaatggaaattatctttctgctgcaggtttcgggtagcccaaggtgaccatgggtactgtagcccatgacattgtagcattcacccaagctggggcacttcctcactctgaagggcagggctgggtttatttcttattcagcttcaaaggtcatattaagattattgcccagagctcagtattattgccacctcgcccaactctactaactcctacctgcacaaaatatctttggtacttctcctggctcctgcttcctagcctcctctgggttttgttcttctgcaaaagctttgcatgggcacagtgatgagcaccagctacaggcacctctactgactggtcatttggaggcagttatgtggtcggccttgtttctcagaggtcttcattggttttccccagtcttaacttgtcatggtgacctacccttttggtaactgagagcctgagaagatgtgactggtggtgaatcatccaagccaagaatcatggcgaatgaacacagacttctcaacacatggtacctttggtgagccctgtccccacagagccccgtgaggctttcagagattccaaagacacagtaaaatgagataacgtcaagacagtaatgttttaaagatg

SEQ ID NO: 454 - DNA, 1000 bp, mus musculus
aagcagactccctgagtctggccccctgggacctacagggcagagagaaccagtttccatggactgccctctgactcctccacacacaaacatggtaacatgtgtgcaacacacacacacacactaaataaatgtaaataaaatgaaaacaaaactcagtttaataatgaatgtataaaaaccagttagaacagggcggtaagaaaatgcaatttaaaactggacaatgggttctggtgggcatttccctgaggacacgccacagctaggattgtgcaaaagatggccaacattaaccaccagggaaatgaaaagcagatccacagtgtttcaagtcccccacgcccgcatgactctaacaccaccctccgaagcatccttctcgcttgtccttgctcctgactaactcctgtttgttcttcagagttgatctcctgtgactttccatcctggagacctcttgtgatttcatccccacttttcctttcatgtctctgggagttttctgtccccagggttctgaacatctgtgttgtcctctgtcatggcctctagcatgttatactgcactaacacaaacacccactcctggataagagtcgtcatgtctggccagactgactgattccgtgtctccagtacccagcgcgtggaatgacaagttgaagacgaccagtcaatgatttgtccgtggtttgtaaaggcaccagcctgaccaaaatcgcagacaatgacaatgacactgacacaaacagcaagtgaagaagggattccaggaaccttacaaagaccaaggcatcagaacgactccccgaaaggaggaggtctggcagagagaaggcaatggcgggctcagggcagagcacagaatgtggaggccctggattccatcctgcaaagataaacaactgggcatatttccaccttcaagacaagtaaaggctgcccaggatggatggccacactgtttgaccacatttctccaacagtgtcttctgca

SEQ ID NO: 455 - DNA, 1000 bp, mus musculus
ccactgcggtaagatgactgtgcacagtcagtttacaaccaaatgaaggagcactaagtaattctgcctctggggtgcttagtgaatgcttagtccctgtgctggatgctctggacataaaggcggcaaattcatgcaccgcgcaattagcttgaacagctggcagcctttgcgagctgaagcacttgtctcccgtgatccagccttctaggctggagaaccacagagaatattctgaattaaaaaaaaaaaaaacaaaacgaaaattccaaacacatgagaagttgctcagtctcagcagacttttaggaaatgcaaattaaaactcaattaaacaagataccaccacattccaattaataggattttaggacaaaaaaatatgacttgctcctccgttggtggcttttgtcttttactgaatttgaagaggctgcctttccattttgaagagcaatcgtgtaagattccaggcaaccaggaaaaaaaccatgatttggggctaccaagcccagaagtaaccagctcatgtcacatgcaggggccgcgcacattaaagaagtattctactcagccttaactgtcaacttgacacagagaaggaagttctcagctgacggaaggattacctgcatcgtattgacttgggggtctatctctgggggattgcctttattgttagtgcatagaggagaggccagatcaccatgagttgcagcactccagggacctatggtcctgggatgtaaaagaaagctaagcctgggccttcaagagagctggcgagccatgttcctccttgcactgggcttcaagtttctgtttgagtctctgccctgacctccttcagtgatggactgtgacttggaaggaagacaaagagaccttttcttccctaaattgcttttggtcagagtgttttatgacaacagtcatggcgggtagtaaatcaggcttccttagagacccactgacaagacgctacttgccttaccaaaaa

SEQ ID NO: 456 - DNA, 1000 bp, mus musculus
agccacagagttttggcctagtttccagggagattccttcccaggccactgtgaccctcctgtgtggataccggcctgagctatgcacatagtaccctctctagtgaacttaggaaatctctggaaatccttggcgggagcccctggaaggctcagagcagctggctgccaaccagatttcctttacagggagtcccttccaactagcagcccattgtgcaagcagaaccctggccagctgccgaccagggactctgtgtaagttgggggtggctgggagctgggactgacagccagactcccacccttcagcacatctttaactacaccctacactccaggcaggcctctgtgaggccctgaataatccacagtgccaggtcctagagaagagctgagaggagtacacaggctgtctgtctttccttgcaggctaagggaaggatggacagaagccacatcgaccggggacatgtttgctttctgtgattgactttgaagccaatcattcctttttggcttccttccttccttctttcttcctttttctttcttttgggggatggaggaggcagaagggggtctcaactatgtagctctggaacgttctacataggtcaggctggcctcaaactcaaagagatccatttgcctctgagtgtcaggattaaagcccccaccacatccagctgattcatgacgaacatgtatttggagatttgagttgaataagatttctggacaaataggacataatccacagtcctgagctgagagagagagagagagagagagagagagagagagagagagagagagcctgcctgcctaggatgccttttccttgtctctcatctccccccaacccaaccctgggttcccctccaccaactccagataagcagcaggcccgagtcagattccatttcaccaccacacactctctatggtcatcttttaatatttgaaaggatcatttgttaactggaaatggtcaatt

SEQ ID NO: 457 - DNA, 1000 bp, mus musculus
cggcccctccataaacccacatatgcccctaagcagcaaaacacatccgaagagacacttcccattcgtctccagtgttgactttatgaagatttcaaaagcgtagatcacaaatttcagacagataaatctgaagcagagaatgaacaggggacaagagatgaaagtaggagattaaagaataaggtgctcggaggagaaaatgctgtatcgtataagcaggctcgtttttatgggcacagatattagctgtatttggagggttggcttgctacacggagaccggggaaaggagggcagctcctatttaatgcatcccaaggagatagagttatatagtcagtaattcatcctggcagaagggctctgacctttggctcttccttaaaggaattaaaacagttaatgactttcgtgcctattaagactacgggcgtttgtgggtctttgctttctgcattggaccatatttcaatgccttccagtgggcttttattttgaagctgtcgtgtgctgtttagtctgctccccaagatcccacttaagaatcagagagcaaacccaagagacatccttacctctattccccgtttgctataaaaatgtccacagcaggaccaagtcttcttttccaaaagccaggcagagaaagggatgctttctgttgtgaacagtgagttctttctgctgtgaatttccctaaacactgctcaaagcgcacagggtgtaccatggtggagtacgtgtgtttgatggtaggatactgcaattatttttcaaaatatgaaatagcttagagtttatagaagtgggtggttgtgctggtgagcatggagtgctctgttctgaccccacagataacaagattgtctcgcatttgttggtggctgaaccagagaagatctatgccatgcctgaccctactgtccccgacagtgacatcaaagccctcaccacactctgtgacttggctgaccgagagttggtggttatcattgga

SEQ ID NO: 458 - DNA, 1200 bp, mus musculus
caccaatgcacttcagcagagaagccaagaagaaaagaaagtgctgacctggaatgccgctctctctagtgaggttggaagaacagtccatgtgtacgtgcgtaacctctccccacacacaatgatcccagctgtgctatcacacacggtgccaatgatgggaagactgtcctttctgcaggagagagagactggggaagcagaagtcacagacaaggtgagctgtgcctagctcctgagtcacaggtgtgaaatgtacatgcgtgtgagcgcgcacacagaagctaacgtagagaggctatgtgtgctaaatttctgtactttcaagacataggataacaggacagaaagaagaacccttatgcacattgcaggggctgtgggggttgttggagtttgcaccaactccagggctgcaatggtgcagaaatgatctgttctaccctgtggtgaagaacggctgcctgactcagcctccacaagttcctccaagcccagcatgctccatacctcttcacaatccttcactgggtggcaatggctctatgaggggctcccagagccctgagctagcataatagctgctgcccactctggctgatcattagccactgccgataacagaccaactgccagacactttgaatatcagcttcatgctcatgaatcagcaactaaaggagccacttttaggtttggattttgtaaggactataaaggagttggtgcagaatcaccacgttaccagaattggcaatgtttcctgtctgttcatctccttccaaaagctttgcacacaatgtacacataacatgcatcccattgctctctctccttcatagctaaagaagtcaccactttacaaagtcaagtcttgctcccaaatctgagagagcacgtgttacagggcagtggatcctggtaacaatgagcctatttccctgctcagaagtggtgcaatagtcttatcaggtttctccatgtgtctccatcttgctcttggccagagtggtccagtcagtattaagatataagaaagattcttgcttcttactaaatgggcagtggttgagtagggaatggtgctgtgcagaccaggggctgggtcttcccacatcaattagtaattaagataatttcccacagatatggcacaggcacttctgtcaatcatagcatctctgtcagtcatggtagcct

SEQ ID NO: 459 - DNA, 1000 bp, mus musculus
ttagcaatgtgacctctgtaggttatttaaacttcttgtaataggaagtaaataggacctctttcagatggctaagcagactagtaaatgacataacacatttacatgctcattgagggtcttacacagaaagtgatcaagaaacaataggtggaaaagagagggggagggatgggggaggggaagagggcgaggaagaggttgagagccagcatcataatacttagtctctaccctccgtccttctggtcttccgcatgaagggacttaacagcttttccttggggcattttcaaactctctgcatgctgctctcctgggtggatgggtgatcggccaggaatccgaggagggcaaggcgcccaggagcctgtgaacagcactgaccttagtttccaacttgggagttctttatcatccggaaccagcaaggaactgaagccactcactcacagctgatgtgcgtgaaagctgctttagctgccacagtgagctgcagccctgtgctcgtcttcctgagccccgtggtagatactcccaccaataccagctcttgccctgagacggtgcttgagctgggctcacattgagtctcactgggagcagctgacattgctaccttcccctctcccccagctggtggaggatgagcagatgaagtctcctgacaacctgtaacagggaggctgcagagactaagtgcttgcccaacgagctaccaaccagctcactggcaaagggttcagccagctgagcagtgcatgggattagtccagcaaccattttcatctgtgtttcagtttaggcgaccaagagctcgctcatcacctcctacgcactaacccaagttaccccacgcccttgcatgacatcttgtagtcttcgaaggacttttgcataccaatctctacttgattttcataaccaacctctctgaaaataagtttaagaaaataaactcggggcttgggagatggtttgatccataaagtgtttccaa

SEQ ID NO: 460 - DNA, 1000 bp, mus musculus
atgtttaagcccccctaaaattcttgacctgctccgtttccaacctcggccggttcacccctccttaggcaacctggtggtcccctgctcccgggaggtcactatattgatgcagatcttagtgcggacacccaatcggcatagcgcactacagcccagaactcctggactcaagcgatcctccagtctcggcctcctgagtagctgggactacaggcgtgcgccaccgcgacggcccccctaaaattcttatgttcggaccttgcctctaatgtggaagtgacattttggtcggtgctaaggccctgaggaccgaatcctgcagctcccttgtgccctctctcacgtgagactgttgtctgtgaaccaggcaggggtgggctctgaccagaaacagagtacttcggcacttccacctaggcttctccacctccagcgctgcaggcgatgctctcctgtggcacctgtcgtgtcatctttgcaatctctttacacccaacacagaccaagacacttcgggacagaagatggtggacatctgggactcgggcgatcagcatcagccccacagagatggatgatcaggagcaaagcaaaggaagccagagaaccgggcgtgcctgacatgcgcagttggtgggctctccagctgtggcagcatagaggacaggaagtgaggctcaaggtctaccccactgacccgcatcctccagctcctagagtccccagccttgtgaaacaacaccgctagctggtgctgacttgcatgagcctgtaggagatgtcttctatcccaaccacggacacctgatagctggccacccggaaggacggtgcaaaggcagcctcctccagcgagatttccacggatgcctttggttttctcagtgtttgtgagatgtgttcagatcctaaatcactcactccagtgttcataactcatttacatcttatgttaatttttttgctaattgccttcagtcttttctttttctttcct

SEQ ID NO: 461 - DNA, 1400 bp, mus musculus
tccagtatcaagtgtgtttcttccagggcacctgggaccttgaccaaacatcagcgcagtcctcattccctcatcccgcaaggctggccacagcagctgttcctcccaaatacttgccatcattcagaaaagaatgttaagattcatgtgtctgacgagcatgggaaagtctgcacacccattagttagcagtgtgcaaagggatcctgaacttgaggttgaagtgaaaacgtgtaagacaaaggctggggagatggcctagtctgtaaagatacccagaacccaggtttacaatcccaggctgggatggatggatggaggaagggatggagatagatagatagatagatagatagatagatagatagggagatagatagggagatagatagggagatagacagatagacagatagatagagagatagataagaagatggatggtgcctgtgtagccccatctaaagttatccctggcttcatcagacagaaggacaggtgactagaagtcagccagacctaccagcttcccaatccttgtttcccaggacagtgggaagctctgggagatgctgactgtgactgaatcactcttcccaggggaaaagcaggacaccagagtgctgacagagcaaaactgtaagtttagatggaggtctgtgccaagagtccagtttccctgagttgaacacaacagggagaagctcctacacttgtgacccacattcttgttctctgaaatgtcacataggtaagaacaaagtaaaatcaagagccctgacccagcgagttcctagatctattctctacaagccccgatgttctagataattccgggaacatgatgctcagatgtgtgacaatgtgcaaagaacaaggtggcccatacaccccagacccatgcatccctggtcccacattctgtgcacccatgtaccctgatcccacataccccagacccacataccccagacctacataccctagacccatataccccggacccacataccttgtgcctacatactctagtcccatataccccacccctcacatacccaagacccacaaactatggtccacacaccccaggcctacatagcccagacccactcaccctgggcctatataccctgcacactcagcaggcggccaaagcggctgagtgtgcctgctgaaggataggcctggccttgtgtcctccacaagccagcagctccctagccactggtttccagaaagagtctctgcctatatctgtggctacaagactggagccctgacctttctattactccccagcctgtcctcctgctgcactccctaatgtgtgttttcctctttgatgaggagcaagaagaagatctgagagaggcttcagaaagactcaagttgccgtc

SEQ ID NO: 462 - DNA, 1400 bp, mus musculus; identical to SEQ ID NO: 461

SEQ ID NO: 463 - DNA, 1400 bp, mus musculus
agccacgccttacttttaaaagtgtgtaagtgtgagtaactgcatgtgtatatgtgtaacacatacatgctagtgtctacagaggccagaagaggctgtccaatctcttggaactggagttagaggtagttgtgagccacctaatacgggtgcttgggacctaaaggcaggtcctctgtaagagcagtaaatgctcttaactgctgagccagctgcctagtctgacactttgttttaaaaaataattattgattgatgattgactgatgattgattgattgatgattggcaggggcatgcatttatgccgtggaatgcatgagaagtcagaggacagcttgcagctgtctactctctccttttaccctgtaggttccaggattgaacctaacaggtatctcaccagggcgctgcgatctgaacttgggcgctcatgcttgtgcagcaaacactctcacagtcgagctgtctccccaggcctcactccctggcaatctgaattttgagtaagtgaatcatttgcacgtcatttcttcccgaggcatttctatctctcattcagtgtgttcccatccacacaggagtaaagagagcaaacaagagtccatttgcttagacaccagctcccccctagagttcccaaaggtaaactttggccttgtcactaaactgtcacgtttctgcatggtctagactaatgacatctccctcagtcatgaaaccaagtccagagacataccttccaaggccacacacgaacatgctctagggtaggcatgctttcctaagcatggctgggcagtcattctcctcaacctgcaaggatacctggtattggcctgcttctggtcacttgctgctgccggacctggaaagggctcaggcagcttgacagggaagagaacagccagttttgaaggctgctaagtataaggctttgtggtttcctcatggttcatcagggcaagcatgaggttggagcaagggggtttcctgccagtatttgggttcagtttgggtatgagagaacgaacacaaacggccctagcaaccagcctgaacttcactgccctgtttgcctggggaggtgcttggcctcctttaagctctctgggggagactttcctttagggtctgggagggtcctgctttgtgcctatgttgagtctggagctgttgggagtggggaactagctgattttctcttggtggctgtgataaaacgttctaaaaataacttagggaggaaagggttaatttagtttacactttcaagccagagtgtgtcactgagggaagtcagaaaactccaaccaggagcttgaagcaaaatgtatggaggaactgctctctggcttgctcccagggtcacgcactgctagcttcttacatagccaggt

SEQ ID NO: 464 - DNA, 1000 bp, mus musculus
ccctacttcctcctccttggaatgtcatctccaggcccttgctggagctgcttcctcgttctaaatgtcatcttgctgttttcatggatgtgagctctccctctctgctcaaaacatcacaggattccagctctcctcagtcacctttgcccttctgaattcttgacattctccttggccacattgccctgtgtcgtaattccagggttgtaaattagagtgtcacacaccagcacagaaactgcaaatctgtgcacagagctctgtggcacagctacagggggcagcttcccggctggcccctgtgcctctgtgtgaatgcagctgtgccccagtgcttagcacttgggtcttccagcccccaccttcttggtgaattcaccacatctagctttctgtcagcaggagctacaggggctgctgtagcccgagcccctccagagctcactcaccctccaccacctactggctcctacatcatagggatgtctgagaccatcttcctaggttgtaggttgaaggccaaatccttagtctttcctcctacagtcaaagacagctgcgctgtcattgcttaggtcgcacacctagagacacagctgacttctgtttctctcatgccggcatcccttcaacctgcaacggatttggacacttgcccctcttgccattctgctgtgattcacagccagccgttgcctgctttgtcctgttgtccttaatgtctccttgcctccttgtgtactcctgcttcctctgtaattcaaggagttaactcagcagccccactcttctgggaagtcagcggcggccgctcctcagcccatagccttcttctgatgggatcatgccctaattctgagtaggaattggtgccctcacaatggcctgtgtagctcctaacatagtggtgtctgctcactgcaaccagctgcagtggcctaaaggactccaggtgtaccccactttcaggcttgggcaatggcttcctctctgcttg

SEQ ID NO: 465 - DNA, 1200 bp, mus musculus
gtgataactccagctgtgtcaagttgacacaaaactagccagtacacagggtttctctgtgtagccctggctgtcctggaactcactctggagaccaggctggcctcagaactcagagatccgcctgcctctgcctcccgagtgctgggactacaggcgtgctataaccaggcccacttttaacatgctgtggtcttctgcacagaagcatgagcacagggaggggccttgattctccaagtccatccactaagcttcggcaactaccaagagcaggactcagagatgtgtgcagcgcacacagatgcccagctgacgagtccacagagtttggacttaagtctgtaggcagtgaaaagccaacagaggctcctaaatagggtgacccagagagcagttggctaccaagccacatacgctaattaataggcttattaagaagttttgtgggccaaggagcttgttcagtggtaaggcatttgcctagtgtgtgtgtgtgtgtgtgtgtgtgtgtgtgtgtcgggggttggggatgtctacattcaaatccagagtaataaaagaagtctgattaatccagagacttaaacaaaacaaacaaaactaaaaacaactgggctcagtggtacacacctttaatctcagcccttggcagtcctgtgagtttgaggccatcctggtctacctagaaatttccagcctagacagggctacatagtgacactctgtcttgagaaccaagaataaaccccacagaatgggaacggaacgttttgacaaaggcttatccggcttacagtgtcgtgagtgaggtctgctggatccagtgacatcttggccacacctctgctggagtccttcccggccaaggcattgtagggggctcctcgtccataaaactctgcagcagggcggaaggaagagtgtgggtatgcatggatggaagccaggggttggggggttctccagactccccagttcttggaaaggctatagttctgaagatgaacttcacagggcagatgggaggcccaggcaaacttatggtgttgcacctacccagaacacacctgtcagctgagagactgcagaaaacactcaatgaagtctctttaaaaactaaaatgtagggggctggagagatggctcagtggttaagagcactgactgcttttccaaaggtcctgaattcaattctca

SEQ ID NO: 466 - DNA, 1400 bp, mus musculus
acgtgctgtgtggtacatgcacactaaactcagtgaacctgtgagtaaagaaggacgggaactaagctctgcctgtaattctttacatgtttttctagctggatgctgactgattactgttctatcgtctacatagtttgtgtgtaagaaataatatactgagatgtgtgtgcagttttagattttggagagaaaaaagtcaggtcctctgtttttgaaatggtaagcttgagctggcatctgggctctgacatagagggaaccaaacagggaggactcctttgctgcctacatctaatccagtcagaagacaggctgccaacctcagacaccagcagaggaatccccacgagaaagagtgggatacaagaagacagtctccagagcttccctggtggaggtttcctccacaccacagagaaagtgacaaaggggcaggggccatccaggcagagcccgagagacagatgggtcgctaaaacgaagacaagggaagtgtggttctttaggtttctaaggagaagaaagagcacagagcacagaggaggaagggagagcctgtttgtgacggcagggaaggaaatcagagaagactggggctgaattatccaggaaaaacagttgtattgactttacctgagcagtgccgaaagcaactgctgcggcggagacttccagacgcagatgctttcagggcggtacttcctgcccagcagtcaaggaggagaaaactggggagatacatggaagagtgagttgttttccctgggcaacacacagcgagagaaataagggtccatccccacagcatcctcggctctcaggcacacatactgtgtcactgagaagaagaagatgaagacgtcgaatttggaaggcacagtggtgtcacagcctaagaacgactcgggtcagatccagtcacctgttctcaataagccaactaaaagagccaaattcaaagcaagaagcagaaaaaggagatttattcaatgtgggcacattgacaagaaagatccagaaaccccaccccaccccatcttcagggtcctaaggtaagaccaaaggttagagcagaggatacacacatctgagcaatcctggtgagggtatgtgcctgcccaccgctggcctacccttgtctggactgacaagttagaactgggtgaaatctcttccgggacacaggttcccgctctggctgctacctgctccttttccaagcatgagattcttgaggaaatcctcattgctttggggttggttgttttaacagtttgggagtcagcctgggatacagtgtctctttaagagttctccactccagccaggcctgttctagaggctggcatttgtgaggcagagaaggtactagagaaggggggtgggggtgggatgga

SEQ ID NO: 467 - DNA, 1000 bp, mus musculus
ggtgtacatctagagagtatgcatacaaagtgacattcaacactgtaattactgggcaacttgaaatccatacactgtcactctaatttcagaatggccattatcccaaccactgataacatcaaatgcatggaaatgtggagtgaaagcaactccttgctggagggcttacaaggaaaacatccacactcaaagacagtctggtggggctggagagatggctcagtggttaagagcactgactactcttctagaggtcctgagttcaattcccagcaaccacatggtggctcaaagacagtctggtcatttcttatgacattaccgtaaaatccagtaaataaacttggtattaatgaaagtaatttaaagtttataccgtcactaaaagctgcaatagacattaataatattctttttaaaaatatttatttgttttatttatatgagtacactgtagctgtcttcagacacataccagaaaagtgaatcagattccattacagatggttgtgagccaccatgtggttgctgggaattgaactcagaacctctggaagagcaatcagtgctcttaaaagcatgctgttcagtccatgaacaaacaggacacaagatgtccactgccaaacttttctatgacaaggtaggccaggccttcgtgttcctgcttcactaagagtctgtcagattataggctaaagatgcttgctccaacactgcaaaggaaccttgggtgactgtctgtcacttctataggtttagaagctgcttgctctgcacttcttgtctactcaggtaatagttatccttctctgctctctgataagcctaaagactagatagttttagtcttacataaaagcttaagttgtttagtatttaagaaaatgatttaaggtctaaaaaatatttttaagttgataaatgcaagttatggtagaaaactgatctgtattaattttgaaggaatccacagattttcatttcctgttgaaac

SEQ ID NO: 468 - DNA, 1400 bp, mus musculus
ctcaacctgggtgaggtatgcagtttcatggtttggccgttccaaaacaaaatgtccgctgtgacactcatgcacacacacatacaaatatgtatttatgcgtgtttgtgtgtcttttcattaaatctgaaacaaaccttaaccggaaaggttcaagtctcctgttctgaaactgtgagagaggtctttgtgtggtgctgttcagacaggatcccttcctgtccatggctttgggctatacccagtgctctgcacaccttggcccggaaacagtctaattccctaagtgcttttctgcttttcctccgcatcaagctgcttctgaactggtaagctccggctcatcctgtaaggcccagctgagaaggtctctgcaaacagcctgccttattctacctcaggcagagccactctctttttctgtgtcaggctgcacatacgtttgcagccttgtctcactggcattatctgctgcgactcttccttgctggactgtgagtctttcaaagcaagggctccatttcgttttgttcctgaagtcctggcatagagttgaaagtcactcagtatctgctgaaggggtgcgtgagatgagctcaatttagctctgtgccggaaaccacctcacatgcccagctgcccggctcaggctccttccctgctagtggaaatgacttggcaagcaggggcctgaccaaagggactcctgaatccaggtccagtgactagcttgaaaagtgggagtggtggtcttctgtgtcactgcaaacttcctggagtgtttcgtaacttcctgtttcacttctttaagcataaaccttcctaccaatgaggtgcattgggcgcatgggagactggcattctgcctcaacactcctgctgccttaggctttggtggcaccaacctgcttatcatctgttggacacatgagctcctagagactctttcaagggatctgcaaggcctctccctttccagcatgtgtctccatgacactgaattctttcaaacactttaactaaaagagtgaatcacaagaggctgaattcagaagcaaatagagtttagctgtctattttttcagctagatattgtaaatgtatattgtatatgccgcttctctctttttatccttttgaaaacaaaattcttcattaaaatacataaattaacgaatgatgcttgactagtgtcatttcaaaattaatgtttctaaatttctgttttaacttttaacaaggtgagttctgatatggtacacatccaaagttctttggaatttttaattaaacttagtataaagaaccctggactggagagatggctcagtggttaaaagcactgactgcttttccagaggtcccgagttcaattcccagcaaccacatggtggcccata

SEQ ID NO: 469 - DNA, 1000 bp, mus musculus
gatttgcccaatagggtgggctgatgcccaggaatcattaggctatgtaatagtgacaggaaaggaatattacagcaagatgcaatgctgggacgaagtctgtaagtatcctgcatcctaagagctcacccattgcaggccatgcaaaatggtgggccatctccaggaaactcacttgcatgttgtggtggtttgaatatgcttggcacagggagtagcattattaggaggggtggcttcattggagtaggattggaaggaatatatcactgtggcagtggacaatgagaccctcctcctagacatgaggagggcagtcttctcctagaagccttcagatggattttaaactctcagctcttcctccactatgcctgcctgggcactgccatactcctgccttgataataatgggctgaacctctgaacctgtaagccagccctaattaaatgttgttttttataagagttgtcttggtcatagtgtctgttcacagcagtaaaaccctaattaagaaacatgcctttaatctttcctagatggcttctgacagttactaactagtccaagaagcacctgtgtggtgcacatctgcctatccagattcggggcactcctagttcagataactgtgcttgaaagttgggctataaagagagagaaagtaggagatgtaatcttcaatggttccaaagctaagatgttagcttcctatctcagtctatagctgctactgacatacacagaactaaagcaaacccagctgataatggactcatgaatctggggaggatgtgagagaggacaagactgagaataaaccaccatcactataccaggaaattgggctgttctggtgttcatccctgtagccaaagttgcagtagcctctgtgtagccttggaaatgaagccccatttgcaactcaaaagaagagctcactatgaagagaaatgacctctctactctgttattactgccttgcagttagataaactg

SEQ ID NO: 470 - DNA, 1000 bp, mus musculus
tgtgctgatgttctctatggaatgttctgcacctgagattctctcttccatctcttgtattctgttgctgatgctagcatctatggttccagatttctttcctagggtttctatctccagcgttgcctcactttgggttttctttattgtgtctacttccatttttaggtcttggatggttttattcaattccatcatctgtttggtcgtgttttcctgcaattctttaagggatttttgtgcttcctttttaaggtcttctacctgtttagcagtgttctcctgtatttctttgagtgagttattaaagtccttcttgatgtcctctaccatcatcatgagatatgcttttaaatccgggtctagcttttcgggtgtgttgaggtgccctggactgggcgaggtgggagtgctgggttctgatgatggtgagtggtcttggtttctgttagtaagattcttaagtttaccttttcgccatctggtaatctctggagttagttgatttagttgtctctggttagagattgttcctctcgtgattctgttagcctctatcagcagacttgggagactagctctctcctctgagtttcagtggtcagagcactctctacaggcaagctctcctcttacagggaaggtgcacagatatctggcgttcagacctcctccaggccaaagatgaaggcccaaaacaggacctgtccagaagctgtgttgcttctgcctgtcacagaagctgttagcttctgtagtccagactctcacctgtgcagactactctcggcagagtccttgaaccaaaatgtctgctgctgatgctcaggcaaagacctcccgggccgggcggacacctatcctctggccgggaaggtgcccggatgtctggtaaagccccatttcttttgaagtatatgtattttgaattttttctcttttaatctccctttgttttagtctttatataggtagaacacagataaaagataatagagtg

SEQ ID NO: 471 - DNA, 1000 bp, mus musculus
ctcttgttctcatcctgccaagtgtatttccacacacaagctccagccacaaaggtttgtccagatgctttcttataataagttactcagaggccaaagcctagtccaaaaggagacagtaggtccacaaaatacctcacaggtggccccatctgtctggctgatgcttaccatcctgcctctgggaagacctattacacaagcatcctttgctaagatgcttgcccaccccctctttgagggagatgaagttgcccttaccatgtctgaagttctgaggttgcttgagctacctcgcagcatccacagaaacactgagatcagctgagttacagaggaacttgcaggctgggtaccctgaaaattcactacctcttctaactggcatccccatgtggatgttttgatttgctagtgagtcttgagtgacatgagcagcacccttagggttagagtgtgctgaagggacacagcagagaggtctcagcctgggccaatccttttccagatctgcagatttgcagttcagtagcaccactgtgactcttccaatagcctacttgtctgttttcacaacaagcccttgggaggggctaagattcctgatccctgctgcttacctgcctgcctctcccactttctggacagtgcccctgggttcactgctttgaaagtttggagcttgcctgagctccactttcagcactcacgaggcatttccccttctcccttctggaatcaagctggatagcttgcattccccatcaatcagctgacactggagttaccaaactgcccagaggtggtcagtgccagaatattagcaactgaagagagatttttaggacacaagattttgttttgtggcttcaggctggtaaactgcaagtactttccacccaatggttatgagaaaaggctcagagcaattaggacacatgtctgacactgtggagcactcttgttaatcagcacactgtcctcagtggtttgtcaaaac

SEQ ID NO: 472 - DNA, 1200 bp, mus musculus
gctcaaaccattgcatacaccagcaagattttgctaaaaggaccctgatatagctgtgtcttgtgaggctatgctggggcctggcaaacacagaagtggatgtctgctattggatggaacacagggcccccaatgaaggagctagagaaagtacccaaggagctaaaggggtctgcaaccctataggggtggaacaacaatatgaactaaccagtacccccagagctcgtgtctctagctgcatatgtagcagaagatggactagtcggccatcattgggaagagaggccccttggccttgcaaactttatatgcctctcagtacaggggaacgccagggccaagaagtgggagtgggtaggcgagggtatgggggacttttgggatagcatttgaaatgtagatgaagaaaatacctaattaaaaaaaataaagaaaatagaaaaaaagaaaaaagaaattaggatgttagttgttgtgcccagcgattgagttaccattgattctgaactgagtttgtgttgtgttttccttcatgtggcagctcaactgggttccagagagaaaggtatggtggtaaagtgtgggtttgcaagaagtgtaccccaaaaggctgtgggaattttgaagtgtggggttggcgtggtagtgacccaccagtgggaccttagtgaactggttggagagatttcagagctgagtcagagagtctccacaagatgagaacaggccagccatgccctccagtgcctggccagtcagcctgccagggcccgtcagtgaagcatggtttgcagttttcaatatttcatgctacagatggcgtccaacatgacaggcaagaatccactagaaatgtatgattcttagcttatcagtttgaaatttagttagaaacttggaggtttgtcaagtggagcagagtcaagtcccatgtgcaggaacattgaaacaaagaaagagggctctgagtgcaggctgctctgatcactgagagccagagaatggaagctgcctgtttccttagcagatgttgattggagtatgatttaattaaaaattgggattatttgcttttaggatagatttataaatagattttgtctgaatcacatggggaattttgcccatggtttgaaactagaatagggaaaatttactggccccaggtagagagcataacagatagataagaggtat

SEQ ID NO: 473 - DNA, 1000 bp, mus musculus
gaatctttacatcttaggaaggaggccccatttgggatctggaagacctcaggcagggagtcctaacttaagccccattcccagcatccccaactgcttatagttatgtgacccgggcaggcattgggcctctggggattctagttttttttatctgtgaaataactctggcttcctgcctcccaaggataccagaaggaagaatgagttgaggtttacagtgcaccctgggagccttccagaaaggccctgcagggttaggaaatacgatacactaaaacaggaagaatgtccctcatttttggtgtttatctctgtttaggctccatgagccatcactctgtacagagaaatatagaaaagaaaggtctcaacttggagcaagtagcataattcacactcaaaattgctgggttttgtttgtttgttttcttgctcactttgaggggaggggtttggaagcagatgacttgcttgctatatggctctggtctgtattcagagaacagcagacagacagacctctgtgctgaaaacagcaggaggctgagctggagtggtcggaagctggaatttatcatcacgatggacaggttctggagggcaggaatggtgttggatggatcattacattttcagtatctgtttaaggatggatgcacagtgctaccgcatttggcctaagatgacatttgcagctatgagactcagccatatggaaatggctcagtcagtaaagagcttgccttacaagcacaagaccctgagttcccatgtcaaagtgagaaagctcgatatggcagcgcatgcttataattccagtactggggaggaagcagagacaggaagatccccagagctggctggcccctctggcttccacatgcatgcacataagcacacatgcatgtgcagccatacacacatgcctataaacatacagaaacacacagagaacagaacagatttcagctgtgttctttcctggctgtgggtttct

SEQ ID NO: 474 - DNA, 1000 bp, mus musculus
ggatttgaactcaggaccttcggaagagcagtcagtgttcttaccactgagccatcttgccagccctggtctctttcagtgaattctactttttgatattccatgtataactgggatcatgtggcatttgtcttctctgactggcttattttaattatcatgtgtcttctaagcacatcatgtcatgagcgactgccctaattagggttactgtcctaagggtgtacacaggctcccttctcccactggaacacctacgtgatacagtgtgtgggaaggaaaatcacaggacaacctcagttgttggtccttgccttccttctttgccctggatctcttactgctgtgcaggcaggatggttggcctgtgagcttctgagtgtgactctatctctgcctcctatcttgatgcacactactgtggatatctgacttgatgtgggttctaggccctcatgcgtctgtggcaagtgatctcctaacaccacctccccaacttgatacacaccgttatttaacaatgccatcagaaagagtgttctgcatgtgtctctcaggtacatttggtctgaaatatggttcatgtccctttgggctgtggctggtagtccatagttgaaatgggggactgactgtattataacctctccttgagccctaaacacttgctttgtctgctcaggattaagatgttgagtgcatgtcttttttcttttcttttttaaaaaaattattgaaaatagtttcttctctcatgctacatcctgatcacagttccttccctccagtcctcccagcttcctgaagctcccctctgtcctaggttcaccccccctcgccccagacaggcaacggctgcacctggaagctggacaggtcacctattggaaggaaagagtccaagagcaggccaacgagtcagaggcttgcctttttttttctcttcatgttggtcagaaaaactttattatttttactgatcactctccttccaaatgct

SEQ ID NO: 475 - DNA, 1800 bp, mus musculus
agagctgctgtctctaacaagtccaggagctacttgactgtctgaaactgccttgctctgaaaaaaaaaaaaatcaaattttattagaaatccctggtatctcactattactaactcccagtggtccattaagtgaatgcaggcatatcgactagagagtcataaattattgattctgtttcactagacccaagtcagtgcccagtgctgtggagtacgctgtcttgtgtaaaaataaatcagtgtctcggaagaggtcctatgctccagtttctggactcctggtgtttgttgcagaaccatgctggtctgcctccttgttccctgccgagtctttcagcatctcctgttctgaactaacctggcttcagtcctcagcctatctgccctcgcagatccatctcctagcttttggtcttgtcttcctctcttaaccggagactgccacaaagcaaacctttgtggtcagccatctgtgaagggtttccttgaattctattcaacttcaatcaaaactgttcagagaacacacacgccacgtctgtactgaagggacagaaacttgcccccttgttactcttggactagttaagtacagtgtaataatgatttacttactagttattgcattgagttttataactcatccacaagtacacagacagatgtgcagagggctatgcgaatgtctcttcaccgtgccagactagagtcaagctcaacagggtcttctttcccccctgattccgccaagcccgttcccttggctgtggtttcgttggatagtaggtagggacagtgggaatctcgttcatccattcatgcgcgtcactaattagatgacgaggcatttggctaccttaagggagtcagtttctcccgccgtttacacgcgcttcattgaatttcttcactttgacattcagagcactgggcagaaatcacatcgcgtcaacacccgccgcgggccttcgcgaagctttgttttaattaaacagtcggattcccctggtcctcaccaggggaattattttgtgtgtatttgtgtgtgcgcgcacatgtacatgtgtgagcatatttgaggaggtcagaggtagtgctgtctgtcatccctctgatgctatccatcatggggttttgaagcaggatctctcactggcttggaaagcatcaaggaggctaagctggcaggccagcaagccctagggatgttcctgtctttctccccctagtcctgggatgacaattgggaggcgccaggtatgtttctgtgttttaatatgggttctggggatgaactgaaccatctccttagcccacaagttaccactgtagataacagactgatgctcagggacaactgtcagggtcatgtccttcctgagacttgacaccatagccaagtctctttgcttgtcttctaaacactcagaaccaggagttccagggaaggcttcccacacagcgggtgggggacaggccttgagaagggctggttacaggcagacagaagggaaacacaaaaattaggctccaaatgatagggttaaattagctcttatcttggttattatggtgtttttgtaagttaggaagcttatgagtcatgaatattgccacctttagtggatatcatcacaagtaatttatttttcaaaaactactcatacaaatatgaatttcacttggttcttatgggcaactgttattggcctggtagcagggaagaactaacaaggtcacagcaaagataaattggttggttagtaagaagatgtgattaaatgaatagtttgtgat

SEQ ID NO: 476 - DNA, 3600 bp, mus musculus
ctacccgagacccccctctttttctctctcagggcacggaggccctgccttgtcctctcctgcccagctataggctgatgacctcttcattgaccaatcagaagatgatggagaacatcatttttacacaatactgagtcacaaaatgcttcctaataatgacagcaccaagtcggactgcagcctaggttcagaagtcagcacagctgactgcacagaacattctcaaacagcttggtgactatgatgtgtgttggatgtatctgggcacccagaagctgtggttctccatggttctccatattggtacagttccgataaggtacagagccccaccccatgccatctggaaggcacaaggatatgccactgcttttgaagtagctggcacgagaggtttggcagatgcacatttttggaatgaagctgcctagagcccagcacaccaacccatatccttgatggttactagctgctaagttgcaggggtagatactgcagcgatgacgtgggcagtgatgatctgctgtttacttcgatttctgacctgggtacagtagtttcctaatagagggtctgcagttatatggaattattggaaagttttgacctttcttaccctttcacacactccaaagacccaaagtgcctctggttccctatattgaaagccattttgctcttaataacctggagtaattttgtttttctctgactaaatccttgttgaaatatttgaatagtttcctgataatttggggtgtttgttgagcgtttactaccctccactgggctgagcattttgcaggcatggtctgtttagttctgtaaagagcctgtgaggcagcttctcttactcattttacagagtagtgcgatgaggcccaggaccacacaaccatgccaagtctcagagctggcaagcagcagaggctgagatttttttttttttttttgagacagggtttctctgtgtagccctgggtgtcctggaactcactctgtagacctggctggcctcgaactcagaaatctgcctgtctctgcctcccaagtgcttggattaaaggcgtgcgccaccactgcccagcagaggctgagggtttgattctgggttctgactggagagcctggctgagtactttgtacggtttcaccttcacagaagcattgatgtagatctacgccacagtcccttcaggcctgagaccaggaatggctcaggattcagaagttccgatttttaggataacatggactatgaattacttcagaactgctatgcattaggtgtagcataatataatcaaacacactaaaaatttgaaggataactagtgaggtattagaatagcttggggcctgagcagaacctgggctacaaaaggagttcaaggtcagcctggacaacatagctagcttccaccttaaagaaaccaaaccaaagagccccaaccaacaccaccccagaggaaacccacaagtaattaaagaaagttcagttttcaccatttagttgccaaacatacattgaaaaatattttgtgaaatatcttgaaaacctttgtgaatcttaaagttacacattaagaattatgaacctagctggcagtggtggcgcacacctttaatcctaacacttgaggggcagaggtgggcagatttctgagtttgaggccagcctggtttacagggtctacagagtgagttccaggacagccaaagctatacagagaaatactgtcttgaaaaagaaaaagaattatgaacctgtaattttcaatgcatattatcagacagaacaagctaggcagatcaaaaagtcatttttttttttttttcatctctaacctcattttcaagagtcttgagtctggctgcttaagacccttatgtcttttccattttagtcagagtaggttgtcaaggacttatttcatgtctgagtcaaatgtaattgaaagtactgtgtatttacttagatcaaggtcattatgttgcttcgcagagtccaatcatgtatcatcccatctcaaagcagagacccagacaaaattagaaacttctctgtaaaagaaggtgcccttgaagtctctagagtatgctattttttaccttgttttcatagcctgacctatgaccatggcatttctgcagattttgatgttattttgttattaaactttaggtgaaatgtgactaaatatagctttagaactttgtgtgtgtgtgggggggcacatgtgtgtctggggactcatgcacagtgtgtgagcgtgtggaggtcagaggttaattttgaatgtcacttaggagcagtttgccttgtttggtaggggacatggtctcagattgtcctagagctccctggttgggcttagctggctggccagaaagtcccaggcatccacctgtctctgcttctcaatactgggatcataacagtgtgccactatgcctggctttccatatggcttctggggactgaacttgggtatcacacttgtgtggcaagtgccttgctgactgagccacctctccagctcagaacttcattcttaataaatttactgcacttttcctgcaggtttgtgacaaaagacattgaagtctatctgcaatttattattgttctgtggctccctgggctcacctggaaggtcaccacctagggtttctcagggtgtcgttcagctgggactccaggcatgcaatacccagttgccttgcccatgtcgccagtttgaggttagcggctgttggcagtgggctcaggtgaagttggctatctggtgtgctcactgtaagatgcctgagtttcttccttgacagtatttgaattctgagagaaagtgcacaaaggatttcagagactcaggtagaaccttgaggcttcttctgctctcatcttagagatcaatcactctgcctcattccctccacactgagtcacagggccgtcgtagatataaacggagggtggctaactgtgtgagtattggtaggcatggttcactgggaggtttcctaggaaaactgcctttcaacatacacagagttagaaagttaataacaatcatgtacatgaaggctaatgttttatcactaaaatggagacaaaaaagccaggaagtcatattttaatttttaaatacttatatatgtgtgcatcttaatatttacattttatcggtttgatgaaacttaaaaaatcatgggaccggtgagatggctctacaggttaaggcgcttgctgtcaattctgatgacccagggttcagtccctgggacctgaacgggagagggagacaactgactcctgaaagttgtcccccgagtgccatactggcgctgtagcacgtgctcaaaccccgttccagaatgggcgaatatatgtcctaaaaataatggtatggcatctgggaagggacttggggcagctgacatatggtagacggaagcgctgctgacagaaagtccgccggagctaggaagacaaagtggcacatctgaaaagtgatccagcctcgttacagactcctggcagactgtgatgtcttactgtgtagtcaggaacaggttggctacaagcaaggagta

SEQ ID NO: 477 - DNA, 1000 bp, mus musculus
ctgaggacccagagtcttcctggaacccagcagggcatgtgagggaggctgaacccaaggcagcaacagtggctctcctgtgtctctctgcctagtgccacctccaggtgaccctatggcttcctgggcagcaatagcttcatgtggagaaatcagcacacttgcgggctcagcagtcctctgatcgtggtgtttggagcccaaaagggaaggggacttaaccaccctgagcagcccacccaccgcatgcctcagcaggctttcccccaacatgggaatgactgattgattccgggagacaagccggctggttcacattgcccgaggagattttccttattgtcttgttttgggttgttgttgttttcccattggctggaaatttagaacatgccactctagggcaaagaattctcagaactctacccagtgattgctaagctaatttgctgtcatagcaactttagagtttgctccacctcctctcttttcctggagacaggttagtctcaaactcagtaccctcgagcctcagtcccttgagtgcagggattgcaacccccagataccaccacatctctaagcggcctctgaattttacagcctcgctttacctgaggctcacacacacctgtgaggacaacagccactgttgtcatctgaaagtagacaacagcggcgtgaatgagtcaaggtctcagccaggttttacagagttagggagggagatagaagacagtaggtccctagacggcagttcagtgcttgcttctggcaaatgctagtctgcaatgcgccacctagtggcaggattcacatacaggctcaagtgcgcctcattagaatgacttcaatctacatgtggacaggaacacagcgtcttctgtcttgtcactctgctgacctttacgctgagtccactgttgagctagaaactgagtcgctctttcacgttgctgtccacaggaaggaagaaaggaagggtagggcaagcaatgtc

SEQ ID NO: 478 - DNA, 1000 bp, mus musculus
tacctttcgccatctggtaatctctggagttagtagttatagttgactctgtttagagattgttcttctggtgtctgttaccgtctctcagcagacctgggagacagattctctcctctgagtttcagtgctcagagcactctctgctggcaagctctcttacagggaaggtgcgcagatatcttgtttttggacctcctcctggtcgaagaagaaggcccaaaacagggcctctctcagaagctgtgttgctttggcagttcccagatgctgtcagcttctgtggtgcagactctcacctgtgcagaccaaaatcctaagttccagggagtcctggaaccaagatggtgaccgctgctcctgaggctgaggccgtctcccgagcaaggcggacacctgtcctccggtccggacggtggccggccgtctgcggcctgccaagagtgctgcctcagcggctctgcgcctccgcccgtcccagaagctgcccggttctccggcgcaccctctaacctgttcagaccaatttcctaagttctgctgagtcccggaaccaagatggcgaccgctgctgctgaggttgaggccgcctcccaagccaggcggacacctgtcccctggtccggacggtggcccacacacatgtattaaatagcaagaatttctgggaatataaaacttctcctgttttgcaccacacttttttatatcacaagcttccctctcctatccccaaaccccaaattactgtctttgtttgctttaaagagcagagatgccacagggaggaaaccaagcaaataatgtaactagaaaaacgctgttaaaatgcacacccctaaacagactttaaaagagatactaaataacccattgtctccaaagaaaagaaaagcaaacagataaaatcacaacatacaccagggacaaaaatccccaagtgaaaaggtggttatataaagcgccattgaacaatgtaagaactataaatacatacata

SEQ ID NO: 479 - DNA, 1400 bp, mus musculus
attatgtttctttttttttattacatattttctttatttacatttcaaatgttatcccatttcctagtttcctctctaagaatcccctataccctccctactccccctgctccccgatccacccactctacttcctggccctggcattcccctatactggggcaaagaaccttcacagaacgaaggacctctgttccattgatgaccgactaggccatcctctgctacatatgcagctagagacatcacccccaccatgtgtcttctttgatttgtggtttagtcccagggagctctgagggtacaggttagttcatattgttgttcctcctatggggctacaaacccctcagctccttggatactttctctagctcctttctaggtccattgtatggaccctgcgctccatacaatggatggcagtgagcatccacttctatatttgtcaggcactggcagagcctctatggagacagcaatatcaggctcctgtcagctagctcttattggcatctgcaatactgtttgtttttgttggttgtttatgggatggatccccaggtggggcagtctccggatggtaattccttcagtctctactccacactttgcctctgtaactccttcgatatgtattttgttcccctttctaagaaggatcgtcgtatccacttttgtcttctttcttgagtttcatgtattttgcgaattgtatcttggctattccaagcttctgtgctaatatccacttattagtgagtacataccatgtgtgtttctttgtgattgggttacctcactcatgatgatatcctccagatccatccatttgcctaagaattttatgaattcattgtttttaataacagcatagtcctccattgtgtaaatgtaccacattttctgtatccattcctctgttgagggacattgtcgcacccacctcgtctgacaaggaaaacgcaacacggtcggattcttctcaacggctttattgcaggaacacctctatgctacgggaacccctggaacccagggaggactgcttatatacaccccagcactggggagggctatgtgtcctcctgggattggtcagtctgccagcaccttaatttgcatgcacccgctcgagaggggttggcgccagatttgggctagtgcctgtgcagtggtgttgtttagtgacggtgtaccggagaccggcaccatcttttaggcgtcggctgcctatatctcccccttttttgtttaataatatgatgctggactaggtttgggcaaatctgtccatcggccacagctcctgtcttaggtcgatcctttcatgtcacagccttacccgtcataccctatcgcctccaggcccagtgtcttaggttggtttatgcataagg

SEQ ID NO: 480 - DNA, 1200 bp, mus musculus
ccctctcctcctctcctttcccctccctctccttcccttctctttgctcttctactttccttcccttccacttcattcgcctctccttcattccattgttcttgagatggggaaagattactgtctttgcctgggaaagctcagggctcctggtctaccccccacagcctcccaagttggtgagaatgtaaaaatgcatgtaccactatggctgtctaaacttcttgtcttgaagcagccatcctatttcatgaattcagggaagcaaatcaatggcatgagactgaacttcccaaattgcatgttttagcagccaaacccagcataaggatattagctgaattacttcattagacaccttccaatgaatgtgataggcaacccatcaaaactgaattctcatgccttgaatgcttctttttcatagtcgtgttctttggccttgcatgatgcagtctaagggacaggaacaggtggcatggtatgccacataggaaggagacacttgttttggaagagagatttcaaatcggtgattcattaaaaggtaaattctgtgttttaaaccataatataccattaatgtggaagaattttaatccagcaacatgactgctctggcaagagatcatatccaaagacctatgtctgtgtgatccatctggaatgcataacgacataccacatacctctaatccctctaactgaaacacacacacacacacacacccttagttcacacagttcaggtaaaattagttaatagaagaaagcaaccatgtatgaaagtgaccgaaagtgaaatcgaatggtgaagcagacaaagtgatgaatcagagaaaggtttgagagaatgaatcagagatagtatgcgcccagctctcatgggaacagcacaggaaagagaagctagttacgagcagtacagggagagagacagtcagttgcgagtcagtgcagcgagtgcagtgcaggagagttgagtttgttcaggagttcatgaacttcaggacatcagaggcagttgaagccagagaacgagaagccagaagattaatatacaagccatatattaatatataagccagagttagtttgaggccaagtagagcaattccgtgaatagctgagagaaaccagattcaaccagagctcagaaaaaacaagaaaggataagcttattcagcaatgagcctctga

SEQ ID NO: 481 - DNA, 1200 bp, mus musculus
ttttttaattaggtattttcctcatttacatttccaatgctatcccaaaagtcccccataccctcccccccactcccctacccacccactcccactttttggccctggcgttcccctgtactggggcatataaagtttgcaagtccaatgggcctctctttccagtgattgctgacaaggtaatcttttgatgcatatgcagctagagacaagagctccggggtactggttagttcatattgttgttctacctatagggttgcagatccctttagttccttgggtgctttctctagctcctccattgggggccctgtgatccattcaacagctgactgtgagcatctacttctgtgtttgctatgccgccaccattgcatacactagcaagattttgctgaaaggaccccactcatctttctatgagggtgttcctccacccacccacacacctcacagctctagtatccctctatcctggggcatgaagcctccacaggaacatggccctcccttcccattcatgccagataaggccatcctctgctacatatgtagctggtgagttagtccttgagcactcttgtgagtccagttagttgatattgttgttctgcatatggggttgcaatcctcttctgttccttcattccttcccctaactcctcccttggggtccctgggatcagtccaatggtgggctgtgagtatctgcatcttccttagtcaggtactggctgagcctctcaggggacatccataccaggctcctgtgagcaagtgcattttagcatcagcaatagtgtcggggtttggtgtctgcagatgggatggaaccttaggtggggcggggcagtccctagatggtctttccttcaacattctttttaataattattttaaactagatgaacatagaaataacaaaactaaagactcatttcagcataactcaaatgtgtgaaccatgcttaaattagcatgtagcactgaattttacataatgctctcaagcatagaaaaatattttttaaattcctgtttacatggctacagtgcaagtcaattaacttccatagaagagttatataacaccatcagagttaggcatcagtgctaaaaatgacattaaatgtagttgataattttagaactaataaataagttacattagatgtaactacacattttgaaatactt

SEQ ID NO: 482 - DNA, 1000 bp, mus musculus
attagattcagtgtatataaagatccttgatcacttggacttgagttttctgcctagtgatacgtatggatctatttgcgttcttttgcatgcaaaccaccagttacaccagcaccattttttgaaaatactttctttttcccaatgtctggctttggcctttttgtcaaaaattaaatatctgatctgttccggttggggccagccccaccatcttctacttgatcccgccggaggccaccaagggccctagagtactctccactctgcaggaccttggaatcacctcaggatcacaagtgagtaaaatgcaacatcagcttcaaagaatcaaggagggtcttgtgccagcaggaaaagggacagaggaaccagaggctgggatccaatcaggttggggccagtaccgacatcttctgcgagaacccagccaagggcatctaggtccccagaggactctccatccacaggacccctagcacacccaggacctcttgatcacctgaaagcatgtgggtaacagaagcaacagagcttcttggacagggtcctgtccagccttcattctcagccaggaggcagagctgggaccaagacccttggcatcttccttaccagaggagagtcaccctacagggagggctctgaccacaagactcagcaggtagatcagagcttcagacttctgaaaacctgccctggatgaagagagcttgcctgcagagagtgttctgaccactggaactcaggtgacagttggactcccaagagtgctgacagaggctaacagaatcatgggaggatcaagcactagccagagacagcttgaacattaacaccagagatttccagattgcgaaaggcaaaattaagaatcttactaacagaaaccaagaccaatcagcatcagaaatcagtacgcataccacagcgagtcctggataccccaacatacccgaaaagcaagatttggatttaaaatcatatcttatgatggtgg

SEQ ID NO: 483 - DNA, 1200 bp, mus musculus
aaaatattttcattaaaggagcaaactgtagtcaggatacaaaaattataggttactccccatctttcccactatataaataaggagttgtttatcttccaaacctagaactacagccactttatacatttcaccagatgggaccacttggtgtatgaaccctgaaactcagggtgggcccaaaactaaaaattaaacaccattcctctaatccacaatctgacagattgggggggcagcaaagatttgaacagcctcatttgtgaggagtcaccctcacattcgccattacaagatgtcactgacatcctgtgttctaagtggtaaacaaataatctgcgcatgtgccggggtggttttccactccatgtgctctgccttccctgtgacgacaatccggccgatgggctgcagccaatcagggagcgacacgtccaaggcggaggacaattctccataaaagggatggagtttctccattcgctctcttcctcctgaagaagtaagcaataaagccttttgccgcagaagattccggttgtcctgagtgtgttcttgccggtggggacaaaagctcgggatactcattcacatatccacaacaagaagtaccacaaacattgtgacttcagatggctagatcccattgcaaaaaagaaaatcacaaatggggagaatatacatattctggaagcaataaactattataaaatttcccaagtacaccaatttaactggagtacaagacacaagacaagcatgttaaaaatagcaattgtgaatacacacaaaaaccaccaaaaacttaaaaaattgaaaaaataatgaaaccaactcaagacataaaagtagaatttaacaaagaaatagaatcactgtagaaaaaccttactgcaacaaacttgaaatgaaaacctaagggtttcaagcaaaaacagataatacatggaagaaataatttcagggcttgcagacaaagtagatatggatcaatcaccaaagaaactactaaacctcaaaacaataacaacaataacaacaacaacagcaaaagaggccagaaagaaacattcaggaaatcaggagaactgtacaaacaccaaattaatggataacaaatatggaagaagaagaagaagaaacccagattaaaagcatagaaaattattttaacaaaattaaagaagttttcaaaatcta

SEQ ID NO: 484 - DNA, 1200 bp, mus musculus
gtctgtttccctaactaagactcagagtcaggaactagcttcactatcagctgttaagcatgacaatatctacaaggggtcccaagtgatgttggtcgagcttattcctccaccttacgatggtccacaactgagaagcgttcaggagaaggcagactctgggttttgagatttgatctttcccagacaacatctgtgtaagagagccttgctatttagagccaagtccacagagcgcaagggctctgttctcacagatttactaggagagccgaggtaacaaataaacaccgaggctaattcacagtgattaagagctaggaagccaataaaatagggcagtggatgtggagagagacaggctggtgacagaatcaccaaagaagtgatgccacagctgtcaccagacaagtaaaacgtgaccctgggtgacaattgaacagacatgccagggaagaaagacagagggtaaaagtctcactgtggtgccagtgtcagcattggctggggcctgtgtagaagggaagcagctacccagagagtgcctccagcctacaggagccactgggcagcagcagcagtgcactgtcactgcgggaaggaaaaaacacccaggaggagggcagaggaagctgagagcagatcttcgagtgctcacttctctgtgaacaagagaaactatcagataaggcatatgaacctacctgtgttcaagtctcaacaaggtgagctgattggtcagactgaacaaccacagccagctggaaatctagcattagatgatacgacatagacacaaagtcactaaacaagaatgaggagccaccaactcccacaggttgaacagagagcagagggcagagggcagaggccagggcacctcagaatccccttggagaaaggctatctccattctatttgaacagctagctatcaggatggaagtaaagtcctacacatactgatgctgcctgccagtacttcttcacaatgtgcccactcacggatgcaatgtctgtgcggcacctgagcctaacactgtctcaatgaccttgacaaaatttggagggaaaaaaatccctcaagacctgggctttaaagttattttaaaattaactgtgaataattgtcccataatatgagttccttgattaattgcttaagataacgtctcctttcctctgtggcctccagggctcc

SEQ ID NO: 485 - DNA, 1200 bp, mus musculus
ttgattgtattttcatgtatttctttaagggatttatttgtttcttctttaagggcttctacctgtttgcctgtgttttcctgcatttttttcaaggaagttttttgtatcctacttaaaggcctctatcatcttcatgagatgaaatttaaggttatcatcttgcttttcatgcattttaagatagccagggcttgctgtggtaggagaactgggttctaatggtgtcaaattgcattgggttctgttctttatgatcttgcacttgcctctggccatctggttgtctttggtgttaactggcctgggtgtctctgactgaaaatcatctccttggaggcagatagagctctgtgacctgaattagggctggtttccttggaggcaggcagtttgtctctggttaggatgggcgtcctgtgcctctggttagagcaggcttcctgtgcccctggttactctggatttcctttgcccttggtttctgtggacctcttgggaagctctcaggctgtagcatttgggctggtatcagaccactggtctggcttggatgggtaagtggttcagtgggaagatggagctctgtgtccttggtcagtgcagacctcctgggaagcacagaggccgcaccattagaatgggtattggctaagccactgatctggcccaggtgtggagctgggcaggaaggaaggtagagattgggggcagtgggagcaggggtaggttgtgcttcagctgggatatgtagatattccagctgatatgggtacttgggtggaatcctcatatgtgcccttggcccctgtggacttcttgggaagcacacaggctgcagcatttgcgcaggtatcttcaaccttgagcctgaacagccttttgcttccttacattgtttcttgtgaaggatttgataacagaaatgagagaagtaactgaaatgcagatgtctaagagacccctttagtagtgctgcaaaatgtatttccccctttctcatcctcccctttcctcctttcagagatgctctctgaaatccagaaagtgaggtcgaaggcatgcctcccacttgccctccagccctgagccttacatgtcatcgtatctggacttaaggtcttttcagttgtccttagtgaggaggtcatgttgaagctgtgtggatcttcactctgtaagtggtgtctttataagaga

SEQ ID NO: 486 - DNA, 1200 bp, mus musculus
cattctcttgtggtctgtatattcatgcctcattactatttcactattgggtatttctgttagattctttatttgaaaagaaatttggaaaacatgcatgatggaaaattaatgatattctaagttatgagtggcttttttttccggttttgttgagatgagctctcaggtagagagaattggtcttgaactagctatgtagctgaccctggccctgaactcctggttcttcgcactgctcaagttctgggagtgctttattgatatagaatctgtggttcccttagaaaaacagggcaaatttatattgactgaagctttcccacataccagataaataagtgtgtgctgacttccttctgttcacactcaaccaacaggctgtatgtcgatggatgaagcctgtaatactgggagctccgtgaaaagcaatacaatccccactggtttttctccatgattgttagcaagcaaaataggctgctatggcactcgctgcctggacctctgtggtttatttcttccacctggttctttggagagttttatcgcacacaaatggcattctctgagccatcaccatggaaacccaaggattcctatactacttctgtagaatgtagcctatctaaactagaggatggaattcacatctcatagttcctgtctcacagtaactttgaccatcatgtcagtgggaatgggtatttgaagtcctttcttgtataggggaaaatttcacctgcctgttaagaagtcctccatgttcttatttgattgtttggggttttacattgttggcactgcagactgaatgcacagctttggaaattcctggcaaacactttcctactgagatatattaccaattcgttcatgtacacacacacacacacacacacacacacacacacacacacacacacacacagtttttattgttaattatgtatctgcatgtatgtgtgtaggtacctgcagaggcaaggagatagcactggatatccctggagttggagataaaggtgttcatgatcttccttaaatgaggcttaaaacaaaacctgggctctctgcagagtacttgcactctccctgactgagtcatttatctagcccatatattttatgttttattaagtctctcaggctagcctcgaacttgcaaccctcattcctttgcttttcaagtagtggaga

SEQ ID NO: 487 - DNA, 1000 bp, mus musculus
cagaggcatttccaaatccttcacacaggactgtgaggagttttgctaccacatgcacgttgaggctattgccaagcagccggtaacgctgtttcactgttgtcttctcaggaaaccctagaaaacagaggtggcatttacaatgcaatcacttgtgatcccaatttccagaagtaaacggattccttttagtaaaagcacactatgtgcttaataaatacactcctgccttcatggtcagtgtaggcctgttgtacggaggcctacacaatgcatcaccttgtgatgctgtacttgtcattgtgtatgtgcgctctttgatgctcgcacaatgaggaaatggcctaaggacaccattctcagagagtatactcataattaaaacacaaaaggtggtaaattgctaatatgcctacgaagttttactaataaatgagaatttggagaccaaaatattgtagaacatcattctatgatgataatacagcgagatgctgtataagacaattatatcacattatatccaagtatggttaatatttacagaaacatatgtgttaatacactttggaaaaatggttgctactattttccttggtagtttcttttacttaatagtacttttatagtgctctaatttacatcccacaaaatttacattttaaaaatatatggttcatacatttgaggattgaattcacaaacatcttaatttttattccttcaacataaaataaaaaagcaaagcaaacaaacaaaacaataacaacaacaacaaaaccccaaactctaaaaagcccctgtcccatcaacagtccctcccggttccttcccttcacctacctgcagctctaccttttgatggcactgaagagttggctattctagtctcatataaatggagtcaggtgacatgtttatacctgcctttttatagtcatcataatgtttttaaggttcattaacatttcagcaagctctagcacttactttttattac

SEQ ID NO: 488 - DNA, 1000 bp, mus musculus
tgtagaaattccgaggactatcacatagatacagcttttcttaagtgagcattctggtcagtagatgatcttgggcagctctgtggttcatccgagaccagccttctccttgttggagatttacctacagagtcagtgctagcttcacttcccctctcctgtctgacatgcccagccactcgggacacaacctgtactgatgtagatgaggacggagagtgggacagtgctgccgcactgggcttgcatggttctagcacggctgtgagaacttcccttctggacatgctttgggtagactgaagctgtcagcaagccagggagccttctcccatgagcttacccttgccagagcatatgctctctgtcagaagtgctgtcctttgtagtcattcctgtttattggttctgagctggcagtaatcgtcatacccagccttgcagtgctggggcatacttgaataaccaaagaagaaaggtagcatgagactgaggatttactgttctcggggttccagtgcggagtgtgaaattttggtcctcaagcaaaatggaggcagtgcatcctctcgttgactctgttgtgtcttctcgttggccatcacactgctcagatactacagcactgggacattgtaatttttgtccttggtgctgattaagaatgtcttgaaaatattctagatgaaataaaaggtcaccatcctaaatggtgaagaaaatgccattctgccccgtttagttgcaagttagccttccagaatgtcagctactatgttgatttatttaatgatagcgattatgtgatttatttaatgtaagctactatgttgattgttctgatgaacttatttttagtgttatttgtgtcacacacaataatcatacaaaatactggggttctgttgtgacattgtcatacttgcatgtttgtaccttggtcataatcattctctattacctaccccctcccactgctccgccaggaactcttatcaat

SEQ ID NO: 489 - DNA, 1200 bp, mus musculus
catcattagaattggttgcaagttttgttgttgagtctcacaaaacggtgttttgagttgtggtaaaacccctccccttatcctcttgtcttcctcatccacaagttctcacctaaaacattaactgtgattagccccacctcctcctatttgcaggtcctgatgtttgtgtgtgtgtgtgtgtgtgtgtgtgtgtgtgtgtgtgtgtgtgtgtgtgtgttggatgactctattactgaaggcattgatctctttggtgctttataggcactacatagagaaatcaacctcaaactgaccaggaaccctttccttgctgaccagcttacatagtgccaaaggaggctcatttatattaatgagagatgagagacaccaatggtcttactcatgctccctgcatactacaatactgacctgcttggaaggaggtacacattggtgtaatgacggtatgacaaggttataaaaataaacaactactttctgatcagatatgaggtctgccctggagaggagagtccatgtctggtattatcaatctactcaaaacctcatgtctgttgtggtattgctaagtgttcatgctgccaaactgcattctaaatatgtgtgcatacccgtagatttttttccttcaactttggtcaaagatgctcccttttgcaatgagtagtgattaatgcaaagactcataagttgtcaagtgtggaggataattgactcattgctctgttgttgtgggtcatctataccaacctccccttgcacataatttagaaatttttgtggagtggttctagaagactggaagaactgggtaggtgtatagtaaaatgctgacttctgaacttaacatggctgctgtgcacaatccctcaccacagctgtggttacctgcataagaagagtagaagaagccaatcagaattatagcatgaatgcaagggggacttaatagtttccagagctgcattagcagttggcagctgctgagagggagcatcctctttggaaacacagctgccagtaagttgtccatgccctcctggattctttacctagatgccacacctagcttcttctatatatagggagcagaataaatacactgaaatgcaatattttcaatgagaattcaattcctatctataaatttgattacatttgcatcagtgaatgcaattgctgcttttccta

SEQ ID NO: 490 - DNA, 1000 bp, mus musculus
taatgctctttggcaagaatgagagctacttctttcagactctcccccagcattcatgttctcctgtgcatcacaataggtgttaagctggctggctgctgtagctggaattacacactatccaggcagccacagttggtgagatctgaagctaaaggaatggatctccagtttggaaagttgccatgcccgagcacagcacatgaaaatgctcaagacccatcaactccagctcctttcattttatcttagaattataaacaagactgacagagaagtacaggtctccagggaacactcctgggaacatgcctggctaggttttctttggacccagtatgcatatctagctgttactagattcttaaccaaggaattttcatcttcacttagcacttacaagaatgctaagcatagtgtgattgacctgcctactatacaacagctctttgaggcccatttctcttcctggttgtagccttcagttttctggggatccaatcagaagacttgtgttttgggaaaggttatctcctgaaatcattttgcaattctagtagcttctggttttaccttattagatgctaattctctccagaatatccctggatatcagaaagtctctcatctctcttatcaaaagagaaaaatcaagaacatttcataccaacttgagagacaccaaaagtatttatgcagtcatgttgttaaaacaattgactgtcctcttcctcggggagcccagatatgtgctcaaaccattgcactctctgaggaacctatgttcgtgttcctgggagtgtcctgctttcttcttgagtacttctctttgtcttttaactctcatgcctatgcctatattacaacatctttaatgaagccagcagcctgttttgtcatcctagataatcctgaaatgcttttcaggttaaagccaatagtcctggtttagcctgagagaaggtctataaaatgttatggctactcctcaggattccga

SEQ ID NO: 491 - DNA, 1200 bp, mus musculus
acagaaactgaggaaatagaaaaaaatcatcagatcctactacaaaagcctatactcaacaaaactggaaaacctggatgaaatggataattttctagacagatatcaagtacctaagttaaatcaggatcagataaaccatctaaacagtcccataacccctaaagaaacagtcattaaaagtttcccaaccaaaataagctcaggaacagatgggttcaggacagaattctatcagaccttcaaagaccgaataccaatgtggggcaatgggctacacacagaaagcctcgtctccagtcgatctgaggtcttgaaccccggtaggacccagtgggtagtaatttccacctacatgggatggtaggcattcggccatgggccatgtctcctggaccccagactcctgtcaaagttaccgcccccagagcccccacaggagaagcatgtggctagcagtcacatagacaatgtcccaagcttctggccttctggctagactcatccccacagttacctagcaaaagcaagataacaagcaagataagagggactgtttggcctctcaccactctctaagcttttacctctctctctctaagccttcacatttcttattctctaactctctctctctctttcccttcccccttctttcctcttggccatggtcagtctctctccctccctctttttatcttctctctttcctcctgcctttctacaataaagctgtaaaaccatagactgtctctgttcatcaagtcctgccatgcttggaagatgggataggcttttgtctaaagagctgcttctaaactcctgtcaaaagaccttcctgtgctccaaccatggactggactaaagactcttgccttcgtaggaaccacccagcaccccctttctctccctgccctctcttcccatatctccagaaccaagtgctgccccggggcacctattctgttctcagctcttctgccctatccagtgtgcgatgctgaagactaagaacctgatactgggggtttcattgacccatgctgtgtagggtcaatggcttcacacagccagattgtccacctggggctgcatggaaaatgttcggcagtcctcccacatctgcctgcccagagcacaggaactctggccagacacaggctctctccctcccccctcttcccctacacccatgaccct

SEQ ID NO: 492 - DNA, 1200 bp, mus musculus
aagatttgaatgcaaaaaaccttacataaatttaaaaggatggatacatttactggtgttaatgaaaacgttccctattcgagtcaagtaacaacccatgtcagtcagaaggggaaaacaaaaacaaaaaagaacacggaaactgggccctaaggctcggattctcactctcatagaccagcaagatggaagtggtaactggttcaggaacccttcccagactcaggaaagcctggaagtctgtggtcagttaacaccctgcacagaccgtcactacttggtgctcacacagatccaccaggctggggatttctcatccacagtgtgctctcctcagccacgaagggcccgagccacatggattatggctaaatcaagatatgcacagggtgttaaacatataccaagggaactgttaacctgagtacaaggtcaaaactcagcaacaagtgctacggtccagtgctgataccagatacaagcttcaagtttgtgtttcttttctttttcaaaggcttatttattccagtttcatgagactagatgaggtgtacgcatttgcctgggcaaatcgatgcttcacatcagctcatgcagcagatgcctggcacctgctcagtccttctatgaagcagtgagggtggataatggcttgccatactcctgcttgctgatccacatctactggaaagtgaacagtgaggccagcatggagccactaatccaaactgagtacttgcactcgagaggagcaacagtctttctttttttctttttttttattatttcttttttactagattattttctttatttgcatttcaaatgttattccctttcctcatttcccctccgaaaacctccctatttcattcactaactcacccactcccacttccctttcctggcattcccctacactggggcatcgagccttcacaggaccaagggcctctcctcccactgatgtcccacaaggccatcctctgctatgtatgtggctggagccatgggtccctccatgtgtactctttggttgagtccctgggagctctgggggtactggttggttcatactgttgttcctcctatagggctgcaaaccccttcagctccttgggtcctttctctatctcctccattggggaccctgtgggagcaataatcttaatcttcattgtgctgggtgttatccctctg

SEQ ID NO: 493 - DNA, 1000 bp, mus musculus
catggcctgtctgatgcttctttgcaagatttaggaaggaaggtctctaactgcctctgatccttgctacttcagcactgttgttaacctggaggctttggtgatctctattgagtgttgcagtgttttaggatggtccttccatacgaggtagctttaaaaaaaaacaaaaacagaagcaaatatctcccagccctgtatgaagtttggtgatttctttgttcacagcacccatatatagctctgcatagtattcagcatacagtcaaaaacttgacagagcagccatggctcaaatgtctcctcaggatctcatatggttagtttgtttcctacacgctaaagacatgctaaaaaggttggggttttgcagataatgaggattggtaaggccattagtgtgagggctccccatgtgtcttagtcagggtttctattcctgcacaaacatcatgaccaagaagcaagttggggaggaaagggtttattcagcttacacttccacattgctgttcatcaccaaggaagtcaggactggaactcaagcaggtcaggaagcaggagctgatgcagaggccatggagggatgttacttactggcttgcttcccctggcttgctcagcctgctctcttatagaaccaagactaccagcccagagatggtcccacccacaaggggcctttcccccttgatcactaattgagaaaatgccttacagttggatctcatggaggcattttctcaactgaagctcctttctctgtgataactccagctgtgtcaagttgacacacaaaaccagccagtacaccatgataaaacaaattatagtaggatgaaagatctaagagctgcttcatgcttgttctgtctcttcaaggaggccctctgtcacactgtggtacagaccaaggtccacacttgatgctggagcagtggctggcaccttgttcttggacttcttagcctctagaactaggaactaaataagctttatt

SEQ ID NO: 494 - DNA, 1000 bp, mus musculus
tatttctatatttaaacaaattatatacctatcacttgaaatcaaagtggaaaactcatattttaaatctataatgagtgctctcagaacccataggattttgcattgtaaacattacaatgaatattacaacttgcaaacccactcaacaatcagtgggctaacatttggcaataccatacacaacttgcagttttggaggaaattctgtgttacccttgtcctaggagcacagaactgtataaaagctacctgtgctatatggttttagcccatattaatcaggattcaagactcttacctgttctgaatgagagcaattacttgggaataggtctttcctatgacactttctccattgacttttataattctgtcaccttcaaagaagagggggggggggggagaacaacatattaggaactccttgaaagaactactcactctgagtaactgtgtcgaaactcccaacactgctccctcctcttcactctgtttccatggtgctgggatcaaacccgttgctgtctgagctccacacccagaccaaataagcccgtattttttaaaatatgcctgcacatttttaaagtacctgttacaaaaataaatcttccttttaaaacatcaaactgctcatgaaatatagcaatgttctgagaattctagacaccaatgagcttccactgaagtggtaatgccccaggtgagtgctatgtctatcaatgagaaagacccacagaatgctcacagacatttataagatggaacacagggccccagtggagaagctagataaagtacccaaggagctgaaggggtctgcaaccctataaagtggaacaacaatatgaactaaccagtacccccagagctcgttcgtgtctctagctgcatatgtagcagaagatggcctagtcggccatcactgggaagagaggccccttggtactgcaaactttatatgcctcaggacaggggaatgccagggccaagaagc

SEQ ID NO: 495 - DNA, 1200 bp, mus musculus
caaacaagcaaaactatggtgaaagaagagctaataccaagtgtctcaaaactgtaaaaggaaggagcacactgtcaagcttattctctaagacagaactacgatgataccaaaatgagagataagaacacaacaaaacagaagaatataaaccaataccctttataaacaaaaaacactgaaattctcacaaactgccttgtgagactaggccggggcctagcaaacacagaaatggatgctcacagtcactattggatggatcacagggcccccaatggaggagctagagaaagtatccaaggagctaaagagatctgcaaccctatcggtggaacaacattatgaactaaccagtaccccggagctcctgactctagatgcatatgtatcaaaagatgtcctagtcggccatcactggaaagagaggttcattggtcaggcaaactttatatgccccagtacaggggaacgccagggccaaaaaatgggaatgggtgggtagggaagtggtgggggagggtgtgggggacttttgggatagcattggaaatgtaattgaggaaaatacgtaataaaaaaaaaaaaaaaaacaggaaaaataaattgaagaagtgttgtgtccgaccagcggctcacgtgtctgggttctagcctggaaaggcatcttggaaacctggagagaagagggagctagacgggcgagaaaaagatgcagctaagacagtcgttctgatcaaagctcaattttactattccgacactcagttatgaaggagggggaggggcacgatttccgccaaataatcctggggtaaggttgcaggtgaacgtgtgatggctccagaacaggaaagcggcaggctccagcagtgggcgtggcagaacaattgatcggcaagctccacccctgagcaagcaggtttcaggctggggaggggaggctacaaagaagtcactagaaagtagaaagacctcacatgttcatgagtttgcagaattaatattgtggaaataacaacattgctgaaactgatctacagattcaactgaatccttgtcaaatttccaatgacattctttacaaaactagtttaaaaaaaaaaatcaaccctagagtttatatggaagtacagacatctagagagctaatgcaatcctaagcagaaagaacaatgttagaagcatcgaaatgcatga

SEQ ID NO: 496 - DNA, 1000 bp, mus musculus
ggaaactgagctaggtccatctgaaagagcagtacttgctcgtaaacactgagcccatccctccagcctcttctgatttttgaaacaacacaagttgactttgcagagatttgacaggctggactacgcacatgcgcattaacctttattggcttcaggtagtcgagggtcacaggcacgcacacgttcacgcacacccttgcatatttgcgtccaccagtatggcttgacaagaactgttctgccaactgtccctgcagttgatagacactaaaccagggagcagacttgaagggacagggactgtgggagagacttggcaagcctatgacaagtgataatatttggataaggatgagtgggcttattacatcgttgatacttagataacgaataatgggctaattataaatattaaaaacaggagggtggacttataattcgatatgagatggggagagtctgcttgttataataacgttgatactggggcagttaacggttggtttgttataaataaccttgcctgagatgggaggaaagtacagccgtggggaagagaggaggcctttggggtttccaggcttctctgcgctgtgttgctgtcagaaaacaaatagggaagagacccccttgggtttctgcgatattaaggcacggagaagtaacctgagctttggaagggaggatcctgcttatttagacatggcttactttcctgacaatgatctgcacatggcggcctgtgcaggcgatttaccttttgtgcggctgtactttactctgggtaaatacgaagtcaatcacagagacagggagaataggtaagagattcttcagacctggggtctgagggcagtgtgggcagtgtggaagaagacacctctactcactcccgggacaggaacaggagtggggagggcccagcgctgattgttgccactatatagtgaccgtttcagcacctgtgatcagcacacctgggaggaacccctggccc

SEQ ID NO: 497 - DNA, 1000 bp, mus musculus
aagattaagaattaggttttcttcccaaaactccaggcccactttcaggtgaatattttctttttttattacttttctagggtccatgacttaacactcatgtacttatagcctcaaacggcctaagatgcccttcagcctttgaccttaatcatgaaatcctttatgttgaagttgagttacacttgggcatttgcaacaagagcaccttaccagtatgacacgggcaatcaaatgcaggttgcaagagactgggcatctgtgtatatctgttctctgttttctctgcacttaagaaacactatctgaaatgtgttaagaaactacaccagaaataatattcactatatttgatgtacaagaagataaggttattaaccccttaagtaatcatctgtatttgtgaatggacagtacatacagtaatatattgtaagatggtgtcaaatttaaaaataataaaaacctacttggcttgatgaaaatgtgcactaggtaccacctcaagaggcttctgcccagtcccagcgagtgctaccccgcacagcctgcctgcacatgccttccttcacctcttgctaccttctggaggctaataattgacacttacggttaaagccatcacacttttaccctaaaatatctacaagaacagataatgcagacagtatggctaccaaaggggggacatgtgaatattttagtttggtttgtatgttgaacacagacatgctatgaaacttgctaacttctctacttctacttatatcccaatacgttcaataagttgcctagttctcttcataacaagctctccagatccaagcttataagcagatcctaatgacattctgttaaagtgccaggtactagctgcaccctccacacgatttgatagggaagagaagatgaaggaaatgagggaagaagcggtgggatttgatagggaagagaagatgaaggaaatgagggaagaagcggtgggaggcaagtaaagacc

SEQ ID NO: 498 - DNA, 1400 bp, mus musculus
tgcttatttcagtgatatgtttgtctgattaaaatattacttccacaaagaaaataagcctcaactctttatttcaaccactcaacaacttaataaaaatgtgtcaagaatttacattagaaaatggaaaaaagtaaaaaaatgagtaaatgaccaagaaaaatgctatatacaatgttcattattaatcaaagaaaggaaaaacaaaatccaatgaattatctcttgcaaaccagttatgaatagactctttattatgttagtctagaatatatattatgaaggtaagtatcgtcttaggaattatgcaacgtaaatattttagcaggacctggacttagactaaaactataaagccatctttgttctgttggaaactcattgggttgatctgttgcatgtaataattaaaaaattaaaccacgctatttccagctactctctggccctggcagtctctccgtccccatggctaactgcttgcggtgaccaccccaactttttgtagtttgcttgctgcagaacccactcatattcccagtcatctaacccctgcggcttgctactgccaatccaatcagcaatcctaaatttccatggctagctgggggtacactctggccagcctgtgctctgcttgctacctttcccctggagctcagtccaatcttcctgtcccaaagcctggccaaattcacctccactatgttctttcctctggcccacctgtgatgctgagaaatggaaaacaccagacaatcttagtttagaatgaacagataacacaattgctgggtgcagaatctatcatcctaaattcatcaagtattctatgttaggaatcttctggtggtggatcctgatggctactgccaccagaactatcagtccccaacctacatcttgtctgctttgctcctgtcatccaaaaggaagtgctctcccactcccttccctcatcctctctcagtcccaaaagacctgcctcctacttgcccagtgattgggttcttgctgtctttattatttaatcaattaggggaaaattctgctacattgatccacaaaactttaataacttttattcaatgcataatgaataatcattaccaagaaatttatcacaatattaactgttaaaaatataaaccagaatgaaaaaatgtcattcaaactactatagaaccatagaatataatcaatatggtcactaaaatatatttataagataacatgattttaatggaaaaatattattttaagtgaaaaaagtaatactaaaatatatgcccactatcatgttttattaaatatatgaattttaattatacttaaaatactcattaaagcttcaaatatttgaagttttagtttaatggcaatatttaaatagtattgaa

SEQ ID NO: 499 - DNA, 1000 bp, mus musculus
aaaagctgggaatacccacgatacaattcacagaccatatgaagctcaataagaaggaagtctaaagtgtggatgcttcagtcctatttagaagggggagcaaaaaagatagcaggaagtagagggagggagggacctgagagaaagggggaggggaagggaaaaggggagcaggatcatgtgtgggagactgggtagaagtacagtgtcagagaattgaatggaggtgtgtagcagtgggggatggggactggggttatccactagaaagtctcagatgccaggaaggcaagaggttccaaggacccaaggaggatgacattatctgtaatacccaacaaattagagagagaccctgtagagaccacatccagatgttaggcatggccacaggttgagtgatggtgccaccaacccatcttaaaaatattagcacagaattgttcttgtctaaaagaaatgaagagacaaaacgtagagcagagattaaaggaaaggccatccagagactgccaaacctggggatccttcctatatgcagacaccaaacccagacactattgctgatgccaaaatgtgcttgctgacaggagccttgtatggctgttctctaagaggctctgccagagcctcagcagcggatgcttgcaaccagccatcacactgaacatggagaccccaatgggggagttaggggaggaactgaagaagctgaaggggtttgcagccccatattaaggatgacaatatcaaccaaccagaatacccagagctcccaggactttagtttaccaccaaagaaagagtacacatggagggacccatagcttctgcagcttatgtagcagaggattgccttatctggaatcaatgggaagggagacccttggtcctctggagactcaatgtcccaatgtaggggaatgttagagcagtgaggtgggagtgggtaggttgatgggagagctcccacataaaagcagggggacgggggtttaga

SEQ ID NO: 500 - DNA, 1400 bp, mus musculus
tcaccaaattatccccagatagtcggagagtactgcttttcttaaacctaatctctcatgtgtaaaccatctctagtcagggtataaggtacctatgagaattaccttcgtttctctagattttcacatagctctaaacacatgcacaaaaatacacaaaatagagaccaacagatccagacacatgccatcctttcttgtcctccacaagcaggcaaaagaattagacgattttggaaggttaagcttccacttcagaactccgtctctctgaccaaccgatctcctgagactaccaggagtccctggctctccctgcttccccgggcataccccagggcagcggtggtcttcctagcacatctgctgaccacagtcctccagtccttatggaccgaaaggacagctgcaaataccaagcgtgtgtttcagaaaaccccatcatctacaatcaccagagaaaccaagctcaattggatccaaactcagactgagccatgcttcagaagcaagggacaaaacacagacaacagaccaacacaacgagcacatgttcgtttcagaaaacataagacagacactcagaacaaagacactggtggcacgcacacaagaggggattccctggttttctctctgtctctgggagagtttcagaatccactttcctcccgtctgatgtagttcccaactgcagccatccgcctgttccattgatttacacccttatatttctctcgcctaaaaagcagtcacagtcagctattggatggatgacagggcccccaatggaggagctagagaaagtaatcaaggagctaaagggatctgcaatcctataggtggaacaacaatatgaattaaccagtaccccctggagctcgtgtctctagctgcatatgtatcagaagatagcctagtcggccatcagtggaaagagaggcccattggtcatgcaaactttatatgcctcagtacaggggaatgctaggtccaagaagtgggagtgggtgggtgggggagtgggtgggagagggtgtgggggacttttgggatagcattggaaatgtaaattcttacacgcgttcacgcgaccggccaggaaagacgcagcaaaccagaatcttctgcggcaaaactttattgcttacatcttcaggagcaagagtgcaaaccccccattgcttacatctttaggagccagagcgccagagcgccagagcgccagagcgccagagcgcctgagcgcagagccagagctctattgtttacatctttaggagcaagagagcaagcccaaacccaaaaaacgaaagtgaaaccccttccctcttaaggagagttatccttcgcctaggacgtatcactccctgattggctgcagcccatggccgagttgt

SEQ ID NO: 501 - DNA, 1200 bp, mus musculus
ataattaatatcttaatattatgtaattataatacattaattaataaatatgaattaacacataaaataatataattacaattattatgaaactataaaatatattttatttttatacatctcactaatattaaatgcaaacattcaattctcccaacaggaataatctgggataattagcagcactctagtgtgaaccaaagctaggggaaatcttagggtaggattagaagcagcaaggacagaaagcagggtcctgtggggtgcgatgaccacagtgaaagctctgcatgtcctaccatgaagtgacaactcttgagggttttgagcagggaagttatatgaccatagttctatctcatcatggtcataggtttgttgacatttaagttcaaggagaaagagtttcctgctgtttgtgttgctttagtttctccaagagcccagaagagtcacacctggatcgcttccctgccttcccttcaaatcctcagaggtcctcagtgccagcccagttttttggcttagtgggtacagctagggccagacatggatagtagttagggaatatgacaagattctaaggagaaggcatgatggtgtgtgtcagagaatctgaccatgacccacatttgagagttccctgagagcaaagtttggaacagaacaagtttctttcagcgtttagcactgatccgcatcagtaaacggggaagacttccttctagtatcaatgtccaggctgtgtctgacttgacctgcagagttaggaattcacaaacctgaaagtctttcatagcacctttgtctggttcatgcacacagagtgcattccaaggcctcctctgtgtttctgttactacagtatgcagaagatcaagacccaaggtgaacacatcacacagcaagcaagagagaacgcacttgcccttccacttggctacacagcatccctggctgcctgacatttttgtcatcacttggggcttgtttttctgattgagaaagatagatggactgtaaaggactagtgtgaggattaatagattacccaggaaattggagctcttacagctttatcagaaacacaagaagatgtcaggagttgcggcatattaaatatgtaaaatgtctgagatcagaactgggctctgccacagatcaaggtaaacagggctttggtgttaagctgttcactga

SEQ ID NO: 502 - DNA, 1200 bp, mus musculus
ggtcacggttgacaacaaactggctgacttttgacctcttcagagagtaggcggtccatgctttgacaggcacaacctaggggccccatttagtggtaccacatagcactcaccgtcttggtatactgggagggactacaatcttgggtggacctgagaaacctgtgctgacccttcatggccactgggtgcttgtgggtaggctggtccttctaggagatcaggagggcctaggccagcacatgtttgtcatgtccagtcctgggcaggcagtggacagactgcatgtggcctcatgtggcccaccctttccagtgggtcctggcttttgagatcttcatcccgcttgtcctcttcttcatcctgttgggactgcggcagaagaagcccaccatctctgtgaaggaaggtgaggtgcaggcatagcccgggcacgtgggtgggcagggagggagcagcgtcctttctgtgcacgagtccgcctgaggttctctgaggccacagccccaagtgcctgctccctatgtgatcctagccacacatggctaggtcatggaggtcatggctggccatggtgcccatgaatgatggagttgcctgtttctggagggccaggcgttcacctctgttctcctctgttctgttttgacctgtcccccaccccgcatggtctcttgtcctcctcggcccggcctgcatgcagtctgtaagtgagcagccatctcctccttgctggctcgggtggcagccacggatggcctggcaggtcctcctggtgcggcttaagcacccctactgcttgcattaacagccttctagcagctgggtcctgtagaagccactgcccgtggtcaggaaaggctggcttatgactcagggtggcgggctgtgatatgggtggtggtgatcagtgaagggccaggccatctgggtcatagctgatatcctgctcaagccactggagtaacttcttggcagggtatctgtgaggttgcctggccgtgctttataagggtggggttcctgggctgagcctgggctagcctgagatgagactgggatggccagtgactttcccttcagactccttagctgttgcacttactctgctaaccagttggcctgagaggtcagaggtcactgctaaggggggtgcctcctgtgctacctcggtctctgttggaaggggagatagttggg

SEQ ID NO: 503 - DNA, 1200 bp, mus musculus
cttttataaggagcactttacccatgttctgtaagtaaggccaaataaattcattggttctgcacagtgaactttgatttgtctttggggccttacccttatgaagaggggattggtattgtctccccagggaaagaattctcacaataggtgcagttttaggagggaatctgacactagggagctacagaaggtacagatagccgagctctggatgtcaaactcacaaattcacctgcctctgaatccccagtgctgggattgatggcgtgtgccaccacgcccagctatgcgaggtctattttaagactggcaagatttcatcattggaacgctcactgatatactggagcaatgggaagacctggtgctggataggacagcagagtgctggtgtcatacaattgggcagaagcctagcagagagggccttcctccttcctcagcatcaggaaagaaagcaggaggtgtaggggcaggaaggttgaccggggtgggtaccagctacttctgcactggtggcagagcaggggtactatgggttagatgcagaaaaagccgggacaattgtctggactgtatcccccccggacaggagctgaaacacgagcaagggcttgggcagagctactgagttggaccaggatagaaccatcaaaggatatgctggggtcattagtgacactggtccacatggctagcaggcaggtggagggtccagtaacacaaggtgccctgggcttaaggcacagcccggggtcacttgagaccagcagcagactgcacggaggaagacagacttgagcgtggaggaacagtagccatcctgggctgggtagagctgactgctgagaggctagtgagcttagcccttggcttaggcgctgagtttgttttcatttttcaggatcttccctcaaagccatttgatcaggcttctgcacagagctgctgtcttaacacgggaaggagcgctgcacccgaaggcaggctgtcctagcacctagaaccaactctactcttctctctattggagaagctatcaaaattctaaggagccatgaggaacagcttcctcttctgtccatccttgaatcctcagtcaggatccaatgaaagtacaaatcaaacagtgggaaatggcttacccccacccccacccccaccccaactagctcgcaaccacagcaggaggaagtc

SEQ ID NO: 504 - DNA, 1000 bp, mus musculus
cagagctgactgaggtgtggccctagcaactcctctcattcacaaggatgaactagggccaacactggagcaaacaggagctcggcatcttctcccaatactttccccagtgatgagagtctaccaccctcacacatgcctagagccaggaagtttagactgaggagagtccaggtgtatggctgctcttctagcctgagtgaattctggtatccagcatctttagggttaaaaaggagatgtctccatgctgctgaatgaacttgtaactgatcggccatcagattcataagaagacctgaggatagtcaggtctccagcctcgggtgattcccagagacaatttagaggatgccagttcctgcctggacatgaggtactacatgggtgacccatacccaagtctcagtggtactgtatatccctaactagggtcctgagggatttcaaggttaccatctccccagagctcctggatcactcctgaggtgtcactgaaccctggaatcccctgtttcctccggatccaggagtacccaggggctgcagcaaaggtggctggagagaagccgatgaggacactaagggatgacaccttggaatactgccagctcctgggggaggccagctaacagcctggtgccaggccgggcagcttgtgcgaaccgcctgcgaagcaagctggcggctggcggcgcttggcaggcagcgttgggggctgtttgcagactgccgccgacagcttcgcagctgaaattgccctgggtaaacagaggagtgcatcgtgcccacagaaactaggagggggcagggaacaggagatgtagagggctgttttagggtgactggagccttttgggaggcccttagtatctactggccctatctggatctgacttggtctctgggtcctggatctaagactggcacccagaaacccagcttcctgtctcaaggctatgaaccaggaaggttgatggggctaaggtgaccctttacc

SEQ ID NO: 505 - DNA, 1000 bp, mus musculus
gtccatgcagtggccattgtgcagacaggggctgctggcgcactcatccgtgttgatttcacagtatacaccttcataacctgtggacgggagatggtgagaccgaggacggcttcggtaggtccttctagagccccagctgaagacttgggagagaaataaccctccctcatacgggcctaatgtgcccactgtggttcatgtctatatctactgagtctatgcacccaactctgggtacattctccactttgtcctgttatcctggcctcggcttcccagatgctaccaaccatgacagaaatgttacttgaagctatgcagccttgactcattcccctgctgcctgctcttagcagcccccatggtgggaaatggcataagacatacctggcatacatatgcattggaactccccaatctggtccaggcaagtggcatcattctgacatgggttggagatgcactcattaacatcaatctcacagcggggtcccgtgtagccctgtagacactggcactcaaaagaacccagtgtgttgaggcatttgcctgcgtgctcacaagggttggcacctggtgaaagaggcacggatgagggctcatctggccttgcagcctcccgaccacccgcaatgccccagcccaggccatcaaaatggtggttctccaggacagatcacatcccatatatgtgacagccagcccgttcctgctgcctgtgccactgcatctgtacctacccagagcacactcatccacgtcctggctgcaggctggccctgtgtaccccgaggggcaggtgcagatggctttgccgttgacagggttggtgtcacagttggagccctcgttgcaggggttgctgatgcacgcatcgttgaggtggcacagcagacctagacaaggcagctgcggtgagtgggtgctgcttttccctatcctgggattaacaggttgttgcagcagggccatcctcacccaacaccctggaatgaat

SEQ ID NO: 506 - DNA, 1000 bp, mus musculus
ctaggactccatccagactagtcaggacccatagctgggagcttcttacagtaaggcagtgaactcctcaaatggacggcaaacaataagtcctcaactttgctgtcctgacagccatttccaaatcagctgtcctgtcacctgctgtaggccacaaggagccagtctccagagacaacttttcccacctacctgcctaccgctccattcccctcctacagcctgagatctgcaggccccacccctaccctacttcctccctctcccaagctgtcagctcacaataagcagctcccaagggctgtccctgcagtcacccttgtcctgggatgtctggagccagccttccttccacctcaaaactgcttcccacagccaaccaactgctcaccacccagcccctgtgcctcgggtactctgggtccttgtcgggaaccaagatacccacgttcacaaacgtatgcataggatggaaaacttgaggcaggcccagaaagggtaatccaactgctaaagtcacaacactggaagggtagggctagacctacccagaatcttgttcggattcccattccttccccacccccacccccgtctctgttccttcccctacttgaacctgtaaagggtagccccaacatctggtagaggccacttttattgccataagctaaagccttttgtagaatccctggtatgattttgagcaaatactccagtttgctgttcttagttccccctctgggaccacagtgtggacctctgcaaccttgcgctctgcattgagtggatagggaaatagggatcaggattcctgggcaaggggcaggggatattgctggagatagctttgggtggtaccagaagtctccatgggccctgagcccctttccccatttctccctactcttcctggtcaaaagcacatctgtccatccattcatccatctaagtagtatgcagctataatcctcactaagatggctcttgtgtgaggcaa

SEQ ID NO: 507 - DNA, 1000 bp, mus musculus
attcttgggtgcatgctgaacgggaattgagtgggggtttccccactaagttctttcactccctccccaatttcttcacccaccctcttccactttgcttctgagagggtgttccccaactcacccacccacccacccacccacccacccccttacccacacccaaaccctttaagcatccccctgttttggaacatcaagtttctacaggattaggtgcagcctcttgcagaggccagacaaacagttttctcctacatatgcaccagggcttagtctctgggaaacgtgaaggatctgggttagttgatactgttgttcttcctacggggttgcaatccccttcagctcctttaacccttcccctagttcttgaatagggatccccaggttcagtcaaatggttggctggagtgtctgcatttgtctcagtcagctactggtagagtctctcagaggacagccacgttaagcacctgtctgaaagcatgacatggcatcagtaatagtgtgaaggtttggtgcctgtgcataggatacatcccaacttgggctgttgattggcctttctttcagtctctactccatttttgtccctgcctttcctttacacaggaacaattctgagtcaaaaaatgcgaagatgggtgggtggctccatgcctcaactggggtccatgactacctattagaggtggtctcttcaggttccatctccccactgttgagtattttggctaaggtcatccccattgaggcctgagagcctctcacattccagatctctggaacattctagaggttcccctggaccctgcacctccccacaaacacactgctgaatattttcattcattttcctggccttctggacttttctcctgtctcccaccacacctggtcctgccctctctcctctctccctcccctctcccacccaggtccttttctccctctgcctctgatgattgctttgttccttcttttaaatgggagtgag

SEQ ID NO: 508 - DNA, 1200 bp, mus musculus
ctgtagaagtcaggatgaccttgctgaagttggttatctctttccactgtgtgggtcccaagggattaaactcagaacttcatgcttggcagaaggcacctttacccactgaaccatcctgccagcacctattgctaagacctttgaggatccattgaggtgtcatggcatgcaccttcagcttactgtgtgagctgtccagggttgctgtaacagaagacagtgaatcaaggggcaaaacacagagagcatttccttcaagctttggagagatctatcaagggagatctaacattaagtgccctacccaccgcccctgccacactctcctcttctcagctctccaactcatcacagatggggaggagactcctgtcttgccctcccactttctgggttcccaggcatgcctgacttgtaaatcatcactccaaattccatcttctcctggcttcaaagcctctggtcttcccctcctcctagcaagatttgtccttgggtccagggtttatcaggtccagcccttcactgtcacatctacaaagcctctttctaaacaaggccccattctgagttctaagaggacataaacttaccggtgaacgtcttccaggacagcccttacttaattaggcatttcctaggacctagcaggctctaggctccatgttggggactaccatcctgatacctttgatcaccttggctctactctgtggatggtaggtgatcgtgatggactgactgttcgcagaagtttcctagggtgccctggcccaggacagaggctgacatctgcttctacttaactgcctcacacgccaggatgatgtcatcgcagctcaggcctggggggagttggcgtctggccaccagtgacagctcaactgggagccctcaactaatgaggagggggccctggctgctctggcctgcatggaaatgttgtctctaagcccagaatggggcctcgtaggctctgaggcaatgtgtagggagagagcaggatcagtggaagggtagagttggctgctgtcctaggtgaaaatggggctggggtgaggggccactttggtgcatgttatgctagggctctggctgcacccaggatgcattctgggtgttgctaagcaggagccacaaaaggaagctccttccccgccatggatccatctttctgttgcctgctgagagcgaatg

SEQ ID NO: 509 - DNA, 1000 bp, mus musculus
tcagtacatgtgtgtgtcaccacccccaacccctgccctcaacaggttgtgcctcttggaagcccagttgctcatttgtggttactagactttccttgcaaagtgcacactgtctttctacgtgatcaaaatgacatccagtgtcaccaatgtcaccttgccaccacgagccaagacattttctgttacgtgagtagtccagtgggggaaactgaggtagctggagattctccattcctgagtgcaagcaggaacaagatgccagacagctcgctgcccctgctgcttggcacccatcccagatttcccgcagactccaagcctgcttgctgtgtatcaggtatccagtggataacaaaacaaacccagacatttctaggcagtccacggagaccccagacatgcaaagtgtccgccgcctctgctctgaccagagtttctggaagcatctcctctttggggagggaggggggcaaggggtggggaagagacctcagagagacatgaaactgcgaggctctcagctgtgaaattgccctggacaggttttccctagaagcccagcctgcctctcccggcaggaagccccgctgtagcatctgggtagcccctggcgtggctggtgctgcagtcaagccactctcaggccttcccaaaggcaggggtggctggaagccccttttcctctgggagtgtccccagctgatggaagcatcgttgcatggttctcgagggggggcccctgaagcctgagctgctgaggcctccttacctacaaacccagctcaggggcacagggggcagctaaggagctcagcaccagccagccctgggagcctgcaactccacacttgtctgtattgctcggggagtgccattgtggcagcaaggggcagtgggtgacagaaatcactgagtgcagagggacctggccaggctggagctgaggagcgtggggcctgagaacagagaggtcatcgcagccacgcgcagggatcca

SEQ ID NO: 510 - DNA, 1000 bp, mus musculus
atctgtctttaacaggtctcctgctaagcactgtgctatgcgctgagatggtttaggaagccagagtgaagcacgttctcccagcgggagtttaccggccacaaactgaaacactcataaatctatcacaaagcgaaaaatctctaaaatccaaagactagaggagtataaggtttcagactttggttttaaaataatagggggttggggacaacagccaacacctgttgacagtctcctgcaaggcctcacctgggaaggggagaaacggctcaggcaacaaaaacagctattcctgggtcaaagtgacaacccaaaaaatgccacagacacaagcaatgcctggtggagagagctggaagacagcgtggactcagtggagaagggctttctggggaagggatgccagagattttgtccctgtaggctcctgggagtaggatggtttccactactcaaatgccccacaaccatctctaaacaacccagtagggttcacagtgttctacggatggggacacagtggctcagagggtgttgcccaaggtcacagagctaaagaaaatggctggactgccaatgaaaccatgctctttctacgacaacatgttacccaaggaactgcacaaacacaaaagtgttcacttctgtccaagccacccatttgatcaatacgacgccagcctaccagcctatatgatgagtttccctcatgggccatccccagccctcacagagcataatgcactagacaagccaaaaaaaccaaaacaaaatctgtcatagaagtctaaggaatctcaactccccgagttcccgcggcgtagctttaaagtgcgcgcagctcggcggcatatggcaaatcaattactagtttaaatcttaaaacaaaaacatggcaaatgcagcacggaaataatcaggtacaatggtgcagctcggattacagcggccactggagttttgaatacaattaatcatcgttccaggcaatgggaag

SEQ ID NO: 511 - DNA, 1200 bp, mus musculus
ggcagccaaatgacaggccatcagtctctgcccagacactctcttcacagttctagcccggatgccactccacccgatggtcacccccagcaccgggtcaggaagggaggtggcccagggaaggggctgcagtgggaggtgcggagtccggaaggccagaggaacagtcttcaacctgtgaatctgaccgtgcctggcccacagcctccctgccccagccagtgtccccggatgcactgatgcacgctgaccccaccccgaaacctctgggacagattgtcaccttcacgtgctgtgtagagtcggaattgagggtcctggacaggaagccaaggttaaaagctacatggctactttcctgttggagtgtgtcaagtctctctgtgcgtgaaagctatttaatccacttggcacgataagacgaagggaagctgaaaggaagacacccctgaaccagagaccccagtcacatgtcccacgttgcactcctgaggaagccctgccagcccccctaccccacccccacctgccggaggcaaccaagccaggagtcaaggtctccgggtaaaacttattgtttgtacttcctagaaaatggctctttttccaaagccttgttccatccgccctttctaaagcaccgtgtgcttttgtgcccatctgggaggtaggctagtttgcctgtttattaaggtcccatttgaagcctagaatgtcaagtcatctttcccaaggtcactgttaggaagaaaaggaatcaggacttgaacacatggcttcacacaccaagcggcgatcccctggcctggctccctgcccattgctacctcgttgaggggtaggctttcatgccagagacaccctggttgtccctagtcctgcgtccagagctatgagatcacgtaggtgtagagacctgaggaccaggctgccttggagacatctgtccggagatcctgtcaggatccaaccttctcactgttgaaactttacttacatcttggttactcatttaatgtggggcaataaacagctgtgtgacccccctcctcccaaaaagtcattcaccctctctgggcttctgtttcttcactacttttaagggctgagttctaacttcagtacccaactataacccagccccgtggtgtgtggagacaggaggattctttggggcttgccccacagttaagtctagct

SEQ ID NO: 512 - DNA, 1400 bp, mus musculus
ctcagggaatcctggagatagaaaacttaggaaattgaatagaaacaagagattaaagcatcaccaacagaatatgtaagaaagaaaagaaaaatctcaggtgtagaagatacaatggaagaaactgatatatgagtcaaagaaaatgttatattttaaaagttcatgacacaaaatgtccagaacatctgataccatgaaaagacctagcctaaaaataataggaatagaaaaagttgaagaaacccagctccaaggtatagaaaatattttcaacaacatcataaaagaaaactttctcaacctaaagaaggaagtgccttacagaacaccaatttgactggaccagaaatgaaaatgctcttgacatataataataaaaacatgatggtcagctccagatcctggtccccttgggcacgaactctgcagatagtttcacagtccacagaggactctccacgagatcttaggatcactggtgaggagaacacaacataggttccaatccaattgtgacaggcctgtgacagcaggagcaaggacacaggagacctgcctgaccagcagcttgcattcctactgatcagtactggtataccttggttttgaacacactaggcagccaccccaatcctcagaggacacacaattacagaccctgtaacacacccaggatcttaggattccaggatcccaggatagcagaagcttggtcaaacaggatctcagggtctcagaggaagcttgactgccaggaaatcagatacacccagaatctcaggttcacaggagcccggagtcacaggatcaaagagaaagctggactctgaggagtcctgaatcaacccgaattataggaaggacaggctccaatcagatatattgagggcagcaagcacttgagataatcagatggcaggaggcaagcataagaacataagaaacagaaaccaaggttacttggcatcatcagaagcaaactctcccaccataagaagtcctggatacaccatcacaccagaaaagcaagacatagatgtaaagtcacttctcatgatgataatggaggactttaagaaggaaatacaggaatacacgggtaaacagcttgcagtccttaaagagaaagcacaaaaatctcttagagagttacaggaaaacactttcaagcaattgaaagaattggacaaaaccatccagaatctaaaaatagaagtagaaagaattaaaaaaaatcacaaagggggacaactctggagatagaaatcctaggaaagaaataaggaaacataaatgtgagcatcaacaacaaaatacaagagatggaagagaaaatctcaggtgcagaagattccatagaaaacatggacagaacaatcaaagaaaatgcaaaatgc

SEQ ID NO: 513 - DNA, 1200 bp, mus musculus
gtagattttttttcctcccactatatcacaattgactttcaggtttaacacttaaaactaaatatttaaatgaagtctttaaaaatttaaagacaacatgccacacctgcaagaataagaagtaggccaggaacttgtaaacttttccactctttctgttctctaagaaagacaccccttgttcaaacatatgccatgcctgccaaaatatcaaatatactgtcctcccaaggacctccttctctctctctatcagtgtcacctctccttgacactatccacaaatcccccttcttctttttctttgatactagcccacaatgtggatggagacctcatgctcaacaatagaccatgtctagcaccagaagtctatcccccaagtctggtggagactccctactcaaccacagagctcacagactagaagaccagaacaggagaagcaaaaacccgccaaacaaagacaaatatagaaactgtcacctagacctataatcaccccaaacctggattctgaaatgtcagcataagaacacaatcaaccaccaggcatggtggcgcacacttttaatcccagcactagagagccagaggcaggcagatttctgagtttgaggccagcctggtctacaaagtgaattccaggacagccagggctatacagagaaaccctgtatcaaaaaaccaacacacacacacacacacacacaaaaccaaccacagtggtggaaataggtccatcccagagcacatctattctactacaataaacccaaaatatttcaacagagctgaggcacaataaaaagaccttaaatccaaatttataaagaggttagagatgcttaaataagaagcaaataaattgcttaaaggaaaatataagctgaaaaatgaagaatattaataaatcctctaaagaaaaatctagaaaaaaccaaacagttgaaagaaatgaataaaattgatgaagacctgaagtaaaaataaagcaataaagaaaacacaaaatgagggaattctggtaaaaagaaatctatgtaaacaaagagcaagcaaataggagcatgagtaacagaatacaagagataaaagtgataatcttggaagaagatatggtagaagaaatagatacatcaatcaaagacactgttaaatttaaaatgttcactacaaaatacccagtaaatctaggac

SEQ ID NO: 514 - DNA, 1200 bp, mus musculus
cggatccaagatggctaccactgatgctgaggcaaagccctcctgggctgggcagactcctaacctctggccgggaaggtggccggatctatttatattttccttaaaggactctattatcttcatgagataggattttaggtcagcttcctgatttttcaggtatattggtatattcagagctcactctggtgggagaacttgcctctgataatgcccacaaatgttgacttctgttgttcatgttcttatgcttgcctctcaccatctggttatccctggtgtttggtggtctgggtaactctgtctggagtctgccttttttgtccctgagatgtttctggcctcttagtaggccttcagacctggctgtagaagaccacccatgggaccttccaactgtggtcttttcagaggagcagagaagctcctgaactgttgctctggcttcagtagatcatctggaaggcctttagactcttgagtcttcagaggagcagctaagttgctgtactttgtgaaaatattttccaggggttctatggactgtggtttctttttccctgtgtgcagcagaaccccaggaggctttaagtctgtctagtcagttgccctgcatgtcacagagttcctgagaggtcttcagactgtggtgtctattgcccagttgctctgtgtacagaggagctcttgggatgcctttaagatgtggtgtcttcaggggagaagctaggctggtgatcagttgctcagttgccctgtgtgcaactgatctgggatgcctcaggctgtggtgtcagatgctgtgttgctctgagtgcagcagatcttctgggatgtctcaggatatggtatcctcaggggagcagaccaggtagcagtctgccccagcagaaagtaccaggcagaagggtagtggtattcagcgtgtgttcccagagtgtgttgagtcccaagtccactgggctcccagtggcagctctgggagtttggggtggagatgggggggcatttcttgccaactgttctgagtgcagcagatcttctgggatggctcagaatatggtgttttcaggacagcagactggctagcagtctgccccaacagtaaggactgggcagaagggaaattttaattttttttaaaaagaataggcaatcctaaattccatatagaaccacaaaagaccctgaatgtct

SEQ ID NO: 515 - DNA, 1000 bp, mus musculus
ctcaagaagaagaaagaccaaagtatcgatacttcactccttcttagaatggggaacaaaatacccatggaaggagttacaaagacaacgtttggagctgagatggaagggaggaccatacagagacttccccgcctagggatccataccataatccgccacaaaacgcagacactattgcatatcgagcaagattttgctaacatgaccctgatatatctgtctcttgtgaggctatgttagtgcctggcaaatacagaagtggatgctcacagtcatctattggatggaatacagggcccccaatggaggaactagaaaaagttcccaatgagctgaagggatctataaccctacaagaggaacagcaatatgaactaaccattaccccctgagctcttgtctctagcttcatatgtagcagaacatgtcctagtcggccatcattaggaggagaggcccttggtcctgaaaaaattatatgcccaatacagggggaatgtcagggccaggaaggagtggatgggttggggagcagggcgggggtagggtataggggactttcaggatagcatttgaaatgtaaataaagacaatatctaataaaaatgcttaaaaaatagaaattaaaaatgtgtggcactattatgaggtgtggccttttttgaggaggacttccttgctggaggaagtgtggcattgtataagtgggctatgaggtctcttatgcttaggctttacccagggctgaagagatcctcctcttcgctgaccattgaagataatcgcctttggttgcctttggatcaagatgtagaactctcagcttcttttccagcaccatgtctgcctgtaggctgtcacgcttcctaccacaatgataatagactgaacctctgaaactctaagccaggcccaattaagtgcttacttctataagaattgctatgatcatggtgtctcttcataccctaactaagaaagtagggtaaataatttt

SEQ ID NO: 516 - DNA, 1600 bp, mus musculus
gtataaaatacatagatgtattatatacatatatatgtatattatatatacatatacagatagcactgagaactccaacataaaagcaacagaagtttctaccaataaaagaacaactttcattgtctaatttaggaagcagtttagactttttcaacttgtagggtctttgatgttactgttgtttttatttttaatataatttcttcaactaaacatatttttaaatcctaatgaatggcattgagatttcattgcaggccagaggataggagaaacattgtcttgatcaatttgtccacaccatttccaaccatattaagagacaggaaaatgaacagcagcagcacttcagacttcatcttgctgggtctctctaccaatccctggatgcagaaacccctttttggcatcttcatcataatgtacctggtcacagtgatggggaatgtgctcatcatcctggtcatccgctctgactccaggctccatacacccatgtacttcttcctcagcaacttgtcattcatggatatctgcttcacaacagtcattgtacccaagatgctagtgaactttctctcagagacaaagactatctcctatgtgggatgcctagttcagatgtacttcttcatagcattagcaaacacggatagctacctgctggcctccatggccattgatcgactggtggccatctgcaaccctttacattatgatgtggtgatgaggtcacaacgctgcctcctcatgttgctgggttcttgcaccatctcccatctgcatgcactgttccgtgtccttctcatgtctcgcctctcattctgtgcttcccatgtcattaagcactttttctgtgatactcagcctgtgttgaagctgtcctgctctgacacatcctccagccagattgtggtaatgactgagacactggctgtcattgtcactcccttcctatgcatactcttctcctacatgaaaatcattgtcactgtgctcaggattccctctgcagctggaaaatggaaagccttctctacttgtggctcccacctcactgtagtggccctgttctatgggagtgtcatctatgtctactttaggcctctgtccatgtactcagtggtgaaggaccggatagccactgttatgtatacagtagtgacacctatgatgaatcctttcatctatagcctgaggaacaaagatatgaagagaggtttaaggaagttaagggacaggcttcactcatagaagtgcaaaagtatgaaacatataactgcaagatgacctaagacattttcaggctatacttcctttctctacatctctgtatcatacactatgaagttatgttaaccaccaacatcactgatctgaaagcatgacagtgttctataaattatcttgaccaagtacatgttcattctcatactgtgtactacagtaatccaaatctcagaattttgtcaaactcaatagattggtaattaaaccttcaataagcatgtccaagttctcacacataggaattttaaattgaccagtgttaagtagagtaaattaagtgatcttagtggaaaattgagaatgattt

SEQ ID NO: 517 - DNA, 1000 bp, mus musculus
atgtatttctctgtcaattcttagaaaatatgtttcaaactcatgacaaatggtgataagggttttttaaacagacttggagttaggggagaagttattcagatgaaaattcctctcacatctttcctacaacttctccaaaatttatcctgagacagagacatgaacaaccacagcagcagcagcagcagcacctcagacttcatcttgctgggtctctctaccaatccctggatgcagaaacccctttttggcatcttcatcataatgtacctggtcacagtgatggggaatgtgctcatcatcctggtcatccgctctgattccaggctccatacacccatgtacttcttccttagcaacttgtcattcatggatatctgcttcacaacagtcattgtacccaagatgctagtgaactttctctcagagacaaagactatctcctatgtgggatgcctagttcagatgtacttcttcatggccttagggaacactgatagctacctgctagcctccatggccattgaccgactggtggccatctgcaaccctttacattatgatgtggtgatgaggccacaacgctgcctcctcatgttgctgggttcttgcaccatctcccatctgcatgcactgttccgtgtccttctcatgtctcgcctctcattctgtgcttcccatgtcattaagcactttttctgtgatactcagcctgtgttgaagctgtcctgctctgacacatcctccagccagattgtggtcatgactgagaccctggctgtcattgtcactcccttcctatgcatactcttctcctacatgagaatcattgtcactgtgctcaggattccctctgcagctggaaaatggaaagccttctctacttgtggctcccacctcactgtagtggtcctgttctatgggagtatcatctatgtctactttaggcctctgtccatgtactcagtggtgaaggaccgggtagctactgttatgt

SEQ ID NO: 518 - DNA, 1200 bp, mus musculus
gatgggtactccacaagtggacaggaggccacacacggcacattgctactctagtttatttaatgttaatgcagtgatgggggtggtattaaaagtgatttagttatagggtcagtaagatggctcagtgggttaagtcacttactgtcaagtctgacagtctgaatttgatccctgagacctacatggtgaaaagagaaaactgactcctggaaagagctttatttacaagcgatgactggggaaggcagaatgtcagctaccttaattttactggccatatattatctggtttcaggatagagtctccctaggctccaagtaggagctggtagttgggtttatgaacactgaacatgtttgctttagaagaggtacacagtaacaactattcctgcagatgggttatctcacatgccaaggctcttatcccgaggctctccagaccctgcctgcctgtctaggctgcctccaagcttcctcttccaccccaacaagcacaggtgtctcctctctgggatgctgcttcaggcttgcttcacctcttcctgctatctccccacctgagagggactgtgaatattactttagcttccatctatcctacctctgtgacaagctctaaggctgtttctagggtatgccaaccctcaacgtctctccagccaccactcctgcataccagaagtctcctttcctgccagctgctcccagcttcctgcaagctgtaccccaggctatgtgttagtccattcggctcatgccatcctctttttctggcatctttatgaatcatcctcttttctgtatcaggctaaccactcctcatcctacaggtaaagtttagcatcatgacctccacaaaactttcctttttcatacacttttgggtcttcctctgaactcccgagggccctaagcttacttctatcacaccacactatcaggtacctgtctattcctgttttctctcaaggacacgagctctttacaggggtaaactgtcttcctgggtccagcgctctcttactcagcacaagacgtggtgtacaaagtaagactaaacacagggtgtgttgaatgaactgtccattctcttttatgggaatgagtctcatgaaatgaagtggctttcagtaaagcgaaagaacaccaacagtgctaacaagagacccacatggtccctgaattcttcctata

SEQ ID NO: 519 - DNA, 1000 bp, mus musculus
gggctcactgtggtgggagaactggattctgaagatgtcaagtagctttggtttctgttgcttatgttcttgctcttgcctctcgccatctgatgttagctggtcttgctgtctctgactgtggcttgtctctcctgcaagcctgtgtgccagtacacctgagagaccagttctcttctggaggaatttgggtatggagagttgtggttcagggtcagctttggggtacagatggaaaccagaaggatcctgtccccagattttccttggtttctgtgtcctgatggctctaggtgggtcccacttgggccaggaatttgaacagaagtggtgtcttacctgtgttcacaggtgtgttagcactcctgggagaccagctctctcctgacattatttttatatgtatctctgtggcacaggatcagctctgggggcagatggaaacctgaaggattctgtcccaggctgctccttgatccctgtgtcctgaggtctctgggcagcttcctttgagcagaagtaatggtcttacctgtgctcacgggtttgttcccactcctgggagaccagctctcttccagccatatttgggtttggagtgctgtggcacaggatcagcattcagtgctcttaaacactgatccatctctctagccagcctctcatattttgaggcagggtctcatatagaaaagctaagctctaattcatatatatctgaaactctctttgaaattttcatgcttctttctttactagcagtgctgggatgacaagtgattgccaccacacctggcccattttgtggcatgactgaattatcaaccaggcactgctcctgcatacaggcttactgtgatttttgtagttttagcctttataaactgacagagaaagatgttcataagttgtagcctcaaccctgaattctgagctacagccctgatcaatcagttttaggtgtcagtaagccactcttgtttgactgaggttggtgttt

SEQ ID NO: 520 - DNA, 1000 bp, mus musculus
actaaatcaatttcagagagtacttatatacagtttgaacccatgaaaatccactatgtttcagaggacagaaatattgagtgtgttctttaaaaaaaaaaatatgggcggtcctttcagagctccatcttccttctgatctacacctgtacatgcaaccacagatttgcaccccattccctagcccacatctctgtctgcctcctaggaggttttctctaatttgggaaacacaggacaaacagctccactctcccatccatacctatttctgcaattgaggatctgtactccataccccagtccacagctctgcttgcattttgtggggcctgctgtcatctgggagaaccaatcccagaagattgctattcccagggactactaggccagccaacaccatcgacaaccagatggctaaaggcaagtgtaagaacaaaatcaatagaaccccagtacaatatggtacattaaagctcagctcttttactatagcaagttctggatatactaacacacccgaagagcaaggctatagtattcaatctcatcttatgaatatgatagaggtttttaatgaggaaataaataaatctcttaaagaaatacaggaaaacatattcaaaccgatagaaccctttaaagaagaaacaaataaattccttaaagaactactggaacatacaatgaaacatgtgaagaaaacgaataaaactgttcaagacctaaagatggaaatagaagcaacaaagaagatagaattggaggcaaccctggagactgaaaacctaggaaagagaacagaaactatagacacaagtatcattaacagaatacaagagatggaacagaaaatctcaggaatagaagatacaataaaagaaatagatacatctatcaaagaaaatgccaaatctgaaaagtttctaactcaaaacatccaggaaatttgcaaagctatgaaaatatcaaacctaggaataataggatagaagagggt

SEQ ID NO: 521 - DNA, 1000 bp, mus musculus
ccacatttccacgaaattaagcacatcctctcctacttaggccataccaggcagtcctctgttacacatgtgcctggggccatgaactagtccatgtatgctccttggtttttggtttagtctctgggaggtcttaggggtccaggttagttgacactgtttttcttccttctctttagctccttaaatccttcccctaggctcttccatattggtccccaatctcaatccagtggttggctgtaagtatctgcatttgtttcagcaatttcttggcaaagcctctctgaggatagccatgccaggctcctgtctgcatgctcaatatggcctcagcaaatcaaagtatgcagcagtcaggggttagggggcagggggaacctttagaaagtcccagagacctgggctgtgacaggcttccaggactcaatggggatgacattagccaaaatgcccaatagtggggagatagaacaaatggtggaggtttcttaaatcttaaaaaacagaaagactatatgagcatgctgtacaactcctaccacagagatcttggcataaccatgtttttctcagattacttagagtagccaagatagagaagtagctgaagtatgaatagatgaggaaactgttatgtgaaacaatgggatcttactcagccacagataaaaaataaaatcattgcttttgcagaaaaataggtggagctggaaaccattgtctcaagcaaaccctaaaagcaaataatgaaagttttaggtcatacatagctacttgattttacttttaatacatgttagtggtcatctagaaagtggatcataagaaggggaaaataattttttatattttgttttttcaagatagggtttttctgtgtaacagcttaggttgttctggaactcaccctgaagaccaggctggtctcagactcacagagacccacctgcctctgcctcctgagtgctgggattaaagacatgtccaaccatgcttg

SEQ ID NO: 522 - DNA, 1000 bp, mus musculus
tttctcttctgataaccccctatactatcctccctcaccctgcttcaatgagggtgctcctttcatctcccccccccccattcccacttccctgtcctggcattcccctgcaatggggcactcacagagccaagggcctctcctcccattgatgtaacacaaggccatactctgctacatatgtggctggagccatgggtctctccatgtgtactctttggttggttggtggttcaatccctgggagctttggggggaggagagagggtctaggtggttcatattgttgctcctcctatggggctgcaaacctcttcagctctttcagtcctttccctaacatctccattgggggccccatgctcagtccaatggttagctgagagcatccacctctgtatttgtcaggctctgacagagcctctcaggagacagctatatcaggctcctgtcagcacacacttgttggcatccacaatagtgtttctatttggtgactgtatatgggattgatccccaggtggggcagcctctgaacagcctttcctttggtctctgctccacattttgtctctgtaactcctctcatgggtattttgttcccccttctaagaaggatcaaaggatacacactttggtctaccttcttcttgtgttttatgtggtttgcaaattgaatcttgggtattccgagcttctcagctaatatccacttatcagtaagtgcatatcatgtacgctcttttttttaaaaatatttttattaggtattttcctcatttacatttccaatgctatcccaaaagtcccccataccctccccccaagtcccctacccacccactcccactttttggccccggcattcccctgtactggggcatatacagtttgcatgtccaatgggtctctctttccagtgatggccgactaggccatcttttgatacatatgcagctagagtcaagagctcaggggtactggttagttcataatgttg

SEQ ID NO: 523 - DNA, 1000 bp, mus musculus
gaaagatggggggaacatgggttgccatgatgctgtttgtattctgatcttaattttgattcctcaagaggggttgccccccatgagtagtctatcatgtactcaggtgatctcatgtgaatcttctccccattttaactggtcaataaaggctagagactgtgtttgggcagtggagggggaaggtgggactggaggatcaacagggggccaggtagagaaggggaggaaaacaataggggaaggagaggtcagaggaagagaaggaagaagcagcaatggaccagaaccacgtgaccaggagaaacttcaagtggcaaagggtcatatagctggggaataagttagtatagtgtttgattgtcctaatctaggcatatagcttataattataataactgtattatgtgttttttatatgggcttattggggttggaaaatccaactacaaatatcctccttccctggggcaccaagtccagttgtctgctacatatctgctgggggcctcagaccagccaatgtatgcttttttgttggtggtttagtctctgggagctcccagggttccaggttagttgacatggtaggtcttcctatgggttaccatccccttcagtcccttcaacccttcccctaactcttccataggggttcctgactttaatcaaatggttggctataagtatatgtatctgtctcagtcagctgttggtagagcctctcagaaaacagacacactagactcctgtctgcaaccacaacatagcatcagtaatagtgtcagggtttggtgcccacacatgggatggatcccaagttgggtcagtcactggtcagccattacttcagtctctgctccattttggtgcctgcatttattttagacaggagcaagtttggattgaaaatttttgatggtgggttgctgtccccatctcaccactactaactatctaactactagaggtagtatcttcaggttccatctccccactg

SEQ ID NO: 524 - DNA, 1000 bp, mus musculus
caaattccttcctttccaatttaaatctcattgatctttagttgttttattgttttacctagaacttcaggtgctatattgaatagatatggagaaagtggacaactgtggggcagaagacagtaccactggacaaaaaacttggcaaagtcaagcagattcagaaaccccagaaattctcataactgagaatgatagacatttaaatctacttctgaccaggttcctgtcctggaacacatgaccacaagaccccgtggagaggactgtgacaggacatgtcatgtcacccaaaacccttccacatgcatataaggcatccttaatatctcagaccaagtcaatagaaaacattgcatttagacccctatcctccctaatgtgtataagaccgtatccacaagggaaaaaatacatgagttatttcaccaaaggtcacctgggaatgtctttcttatagagctgtaacactttgtggaagagaattttctcctgaagtgtcccatcccccgcccccccccaatcccccgtgcaatcggcttgagcctactacagatgtttcccactcagtaccctgaccttggctcctagctgcccactgcaccctgcagccccagagcagtagcagctttgctctggttcctcttccctctccccaggttgaactgtaattctttggtcaatcaagccatgctagagcaccacagagagcagacagcatcaggtattcccactgaccaggcccagtatcacagaccggcagacaatcttgtcttatcctttattttagaggaattgctttgagtttctccccatttaatttgatgttggccataggcttgctgtaaattgtgtttattatatttagaaatgttagtttaatccctaatttctccaagacttttatcatgaaagcatgttggatattatctaagttttatattagcatctaatgagatgatcatgcattttctctttcagattgtttacatagtgtttt

SEQ ID NO: 525 - DNA, 1400 bp, mus musculus
tgtgttctcattgaagcataactacaaggtgctgagtgatgatggttctggagcaacacaaagtatctttttgttaccatccgcacaaaagaatctagaaggtaacagagctaacatagttctgttgcataagcacctcaaccctgatgtcatttaatagtaaatgaagtcaatggtgatgcttcagtcctacattcacaatactcctctgggatgctgaagttaaagaattaagaacgtgaaactaggggcacaaactcggtggacggtcccaagtttcccagaggactatccaggcagcaggtgccctagcacacccaggatcttgggatcactggtgagtagaacgcaacttctattccaaaacaacccagaggggcttgtgccagcaggaacaaggacacaggaaacctgactgatgagcagctgggattcattctggtaagcaccagccccatgccaccctgggcacgaactcggcagatggtcccacagtccccagaggactctccactccgcaggcaccttagcacacccaggatcttaggatcactaaggagagtcagcgtcttgagagggctctgaccctgggactcaggtgtaagttccatcttgtatctggggtctctcagaaaccagtctgcacaggagatcacatgggtctaagaagcaacaaagcatcatggacagggtccttagggccttcatcctcagccaggaggcagagctaagacccagacctctgggcacctttcccgccagaggaaagtcagcctccaaggaggaccatcttgtatcccaagtctctcacagaccagtccatgcaggaaagcacaagggtcacagatgcaacagacttcttggacagggtctcttcaagccttcatcttcagacaggagtcaaatctgactccagacctctgggtgcctaccctgcaacaggagagcttgcctgcagagagtgctttgaccactggaactcaggagagagttgggctcccaggaatgctgacagaggctaacagaatcataggaggaacacgcttcagccagagacagctagaacatctaacatcagagattaccagatggtgaaaggcaaagataaaaatcttactaacagaatccaaaaccatttggcatcatcagaacccagtatgcccaccacagtgagacctggataccccaacacatccgaaaagcaagattcagatttaaaatcgtatcttaagatgctggtagaggtttttaagaaaggcattaataacttacttaaagaaatacaggagaacactcctaaacaggtagaagcccttaaagaggaagcacaaaaatccctcaaataattatatgaaaacactcctaaacaggtagaagaccttaaagaggaagcaaaaatc

SEQ ID NO: 526 - DNA, 1200 bp, mus musculus
acatctgactagcaagaatgatgaatgctgtttccttctagagcttatggtaaatatagggatactcatattgagaggtttggtatattcatttatcagaaaacatccataggtagtttgattgatgtttgtgtggcactaatcttcattaagatcaatctcacgagaagctgacaacttctgggacaggcgggagccacagagcttctgaggcagtgcctttttcaggccccagacatccggtcaccctcccggccagaggataggtgtcctcccggccagggagccctttgcctcaggattggcaagagccatcttggttccaggactccacccaacttagtctgcacaggtgagagtgtgcaccacagaagctgacagcttctgggacaggcgggagctacagagcttctgaggcaaaccccttttcgggtcccagacatccagccaccctcttggccagagaacagttgtccacccggctagggagccctttggctcaggatctgcaggagccatcttggttcctggactctgcccaaagtaatctgcacaggtgagagtgtgcaccacagaagctgacagcttctgggacaggacaaagcaacacagcttctggaaaaggtcctgttttgggccttcatcttaagccaggaggaggtccaaatgccagatatctgtgcaccttccctgtaagaggagagcttgcctgcagagagtgctctgaccactgaaactcagaggagagagctaatctcccaggtctgctgatagacagtaacagaatcaccagaggaacaatctctaaacagagacaaatataacaactaactccagagattaccagatggcaaaaggtaaatgtaagaatctgactaacagaaaccaagaccactcaccatcatcagaacccagcactcccactacacccagtccagggcatcccaacacacccgaaaagctagacccggatttaacagcatatctcatgatgatggtagaggacattaagaaggacattaataactcagttaaagaaatacaggagaacactgctaaacaggtagaaacattaaagaggaagcccaaaaatcccttaaagaattgcaggaaaacacaatcaatcaggtgatggaattgaataaaactatccaagacttaaaaagggaagtagacacaataaagaaaacccaaagtgag

SEQ ID NO: 527 - DNA, 1400 bp, mus musculus
cattttccacattgactttgtcttataaaattgttctatttcttgtctttgacttataaatttgttctatttcttgatgaaaattgtaaataaaataagagcaacttcttcacgtgttccactatgttcatagcagccttatttgtgtagccagaagttggaaacaacccagatgtcccacgacagaagaatggatacagaaaatgtagtttacttacacaatggaatactactcagctattaagaatgagaacatcctgagttttgtggggaaatgaatggaagtagaaaatatcatcctgagtgaggtaactcagtcccaatggacatgcatggtatgtactcactaataagtggatattagcttaaaaaataaatacagaatacccaagatacagtccacagaactcaaaaaggtcatcaagctgatggacccacgtgaggatgcctcagtccctcttgggagggagaagaaagtaatcacaagttgggagggagggagggacctgggagggaacctgatttggtatcgagggaaagaactgaagctctgagaggcaatagaaagaatggaaacaggcaacctcaggaggtaggaggttgggggcaccctccagaatgcaccagagacctgggtagtgagagactcttaggactcaaaaggaaggaccttatatgaaaggccatacactagagagaaggaacttataaagcccacctccagcaaaaaggcagcatcaaatgagagatgagtttgtcatcccacagtcaaaactctcacccataagtgtttctgtctgaaagaactacatggatggaaatggagaggagcctgaggaaaagaaggtccagtgacaggcccaaaatggcatccagctcaaggggagattccaaggcctgacactattactaatgctatggagtgcccaggaaaagggaccaagcatgaccacactccagcagacccagcaagcagatgaaagagtcagatgcagatattttcacctaaccaatgcaaagaagctgcatagagttacattttgctagataggtcaagatttcaaatactattaagctcagaaaggaatcccatttcaatagcttcctaaattgtctgtcttgagtacaagttaattacttctgtcactggtgtgagtctaggattattaattcccattaacctatgatagtaaacatatttgagaattccttactttaccagcgtgaatatttctttagcagtgaaactactgatttataaggtatgtctatctttcaattttttagaatttgatgaatatgcttttctaagaagtacacttaaaatcacacaaaatacaattgttcttcccagagacaaacattcttttacctgaaaaaaaaagaattagaaactaaag

SEQ ID NO: 528 - DNA, 1000 bp, mus musculus
gtgacttcttcctgcatgggatagcaggtgttcagccatacctcctgggcccctggctcctgtcacagctaaagcctctcatagccccctccctaccacacgcaaagaggtttgtgaccatcaatcatgtaggcaatgctccaagctcctggtattctgtctggactccaccccacagttacttggcaatagctaggtaggcccagccaactatagagagctccttgcccccattctctctttcttactcttttgctcctgtctctcccactcttgccttcttgcttcccctctctccccattcccttctcccctctttccacgtggtcatggctgacctctacttttctacttttctccctttctctgccttcctacaataaatgccttaaaaccacggactatctctgctcatagggacccaccatgctgtagcaatggagcaggtcttctaatgagctgcgcttctaaactgcaatgaggcccccctgtactccaactagccggagctctctcttccttgcccttttctcttttggcccctggccagagtctgcccgtgcgcccccacctgtttttagctcttctgtgacactcagcagtgtatgaggtgtctaagacagagaacctgacatccctggcctctgtgtgacccaggaaccccagaacctgcttttccacggcatccagcagcatctgtagtgcccaagagtctgagcccaactccagcatgaccgccggggcctcatactgctccttccctagacccgacacaggttcttacagccccatgtctacctggaggtttcgtgggggtgcgcttagtcaaactttgcgtgtccagccttgcccaatagcctagccctgagcagaaagaaccccatttttgacccacagtcattaatgtggtgaatgggctttacaattgggcaagattgagattaatcttgtcctgcactatgcttagcaactttcagcactatgaaccctggccatttga

SEQ ID NO: 529 - DNA, 1000 bp, mus musculus
cctgatgtgaagttctctaaagttgtgtgctgttgcaatcaaacctggcctcattattccttagataatcaatctaaatatggccaactagcagtactctcaatcccaatattatctggtacctttactttatctaagggaacagaaaagagattctccatgccatacttcttagctacaaaccctgtttgcttttgtctggtctcccccacaaactgattaaaccttctgtctctgagttacctttgatggatctgtaagtttgttgcaaaatcctggctgtagcaggtcctagtaggaagcagatgagtaagtcagctgcagcttgcacacacctagcacacaccattcctgcctcaatgtctgccccaaaccaagctgttgatcctactcagttaaagtatataaggatcatttgtttctgctggattttgccacccacaagcttgatccaaattttagagtttgattcttcaggtgctgtttccctctacctgctatgccctctatgtgggcacctgtctttgactcttacaccttgctgtacttctggcctgctacactcaagtggacatcaggttttccctctcactctgaactacttgctgctctcattcttgacttgttccctggcctttgcatttcaagttcccttgtctctcattcaactctttttgtaaagcatataaaaattccctccagtagaattttgtatatactcttccctctcttattccctggtcccagattttataacaatggcttgacatcagtacaggtcaatgtcacaaaaattggcaaacttgatttctacattttttactaatcagaataactgctaccacacagacaaatgattcctaaatatcttatatctaacttgctttactatatactttctttactttccaatcttaaaaatctttactctctattatctaactgtgctctgctctaaaaaataccctataaaatctagtcaagatttttaagatcattg

SEQ ID NO: 530 - DNA, 1000 bp, mus musculus
ctctcaaaaattaaaaactgctagaatgggtgacctatatgacatgcatgagttttgaaattcagcctgtcagggctgaaatctaggcctctacttaaccccattacaggtttctcatgtctcctgcaggagcaagcaccctccctgcttggtcaaatcgtgccagggatccagcccagtcttagctctgaccactgtccttaagatccatttacattgtgcatgtgtactctttctttttcacatcgttctttcctcctttccattttccttcatttattcatttactgtcctttttttctttttaatttggatattttatttatttacatttcaaatgttatcccctttcctggtttctcccctggaaaccccctttcccatccccctcccctgcttctatgagggtgcccccacccactcacccaaccactcactcccacctcaccaccctggcattcccccacactgggacattgacccttcacagaacatatgacacctggattgttaaactagtagacaagtacttcccattgatgccggataaagccatcctctgctacatatgcagctggagccatgggttcgtccatgtgcactctttggttggtggtttagtccctgggatctctagtgtgtctggatggttgatattgttgttcttcttatggggttgcaaaccctgtcaactcctccagtcctttctttaacacctgcattggggaccccttgttcagtccaatggttggctgagaggatcttgcagagcctctcaggagacagttatatcaggttcctgtcagcaagcacttcttagtatccacaatagtgtctgggtttggtgtctgtatatggggtggatcctcaggtggggcagtctctgtatggcctttccttcagtctctgctccacactttgtctccacatttcctcacatgagtattttgttccctccctaagaaggactgaagcatccacattttggtcttccttcttc

SEQ ID NO: 531 - DNA, 1000 bp, mus musculus
tagggagacatgtcatctttcatgaaggttcagtgtcctagttcccttcccccaggcaaaacgacacgggagcaggtcagggttgctctgggtaaaagcctgtgagcctaagagctaatcctgtacatggctcctttacctacacactggggatttgacctctatctccactctcattaatatgggtggcctatttgctcttattaaaaggatagggggagatgttgggagccgcgcccacattcgccgttacaagatggcgctgacagctgtgttctaagtggtaaacaaataatctgcgcatgtgccaagggtatcttatgactacttgtgctctgccttccccgtgacgtcaactcggccgatgggctgcagccaatcagggagtgacacgtccgaggcgaaggagaatgctccttaagagggacggggtttcgttttctctctctcttgcttcttgctctcttgcttcctgcaccctggctcctgaagatgtaagaataaagctttgccgcagaagattctggtctgttgcgtctttcctggccggtcgtgagaacgcgtctaataacattttactgtgaataggaactgttttttctgagtttaaatactataacacctagtttcaagtcagtggcatcattaaagagggcattcagccttattagaagaagtatatcactggggttggctttaagaatattatcaactaactggatcacccacatctcccagagactaaaccaaagtatgtacatggagggatctgtggctccagatacatatgtagtagaggatggccttgtctgacaaaatggaaggggagtcctttggtcctgtagaggcttgatgctccagcataaggagatgttacagctgtgtggctggagtgagtgagtgattgggagaacaccctcatagaggcaaaagggaggtgggagatgggtatatgggatgggagggtttgtggagctgtaactatgaaggaggttatcat

SEQ ID NO: 532 - DNA, 1600 bp, mus musculus
aattttaattggaagtttcacagtactccaacaaaacaaaatctttgttaatcaaatattgttttcaaaatgaaggaatgaataatttcatattcttttcactgaaatattttcaaatctcaacttcagaatgcttagaggagttgtctctagcacacaaatatttggaaagtaaatattttattttaagttagccctataccctaaagcattcctaagttttctcctgttgaaaggtgaatttttaaacacatagaattatttgaagggtagattttttttctatccttgaaatagttaattatggactgttggcaccaacctggctctaaacaaatttttaaatacatttcagtctaattatatatttattactaaattctattgctttttaaatgcaagtatcagtaattcattagaaacttacatcaaaataaattggttacatttttttgtttcactgagaaataaaatattattgctatcaagaaaaataatttgataaagaaaaatccatatttttaatttcctgaaccctacataaatcctgtattggttctatgaaattcctctagtggaacataacagtaacaattcacaagcatttatcagtgtagcatgaaggcctgacatagcacagtgcctgggtgtctgaggaattaattctcataatgtgactactgaaaacgaatatatttttttaatcaacctgttgtaacttttttggtttgtttgttttttcaagacagggtttctctgtgtggccctggctgtcccggaactcactttttagaccaggctggccttgaactcagaaatccacctgcctctgcctcccgagtgctgggattaaaggtgtgagccaccaagactggcataactttttaaaaatagtttgtagacatcaaatttagtgtgaagaattaatgcaattattgtagaagttgctgccagaatgaatgaaggctttatttttttagactaattatgagctaccgaagttttctcctacacattttctagtttgtagttgttaactgcttccataacactagatagccacacccttattacatagcagagattacaaggctgatatgatatgttattactcactatatatagttacagctcctctttcaattatacaaattcaaatacattctaggcaataatctaaaacttaacaaattgcttgtatggtattataggaaaatatgatctaggattttcaatatatttagttaatacataaatgtttactgaaaattttcatggtgttttcctcttttgcactgataaaaaggatggtttccatggcaccaacattagagggaacacatgtgagtatggggctgggatggctctactgtgctcagtttggaacacttctatctattttgaaaagtctatattgaaagacagttgctttcagaaactgtgtgtaggtttccaaagtcagctttctgaaagaatagagttttctccgtgatctataaatctccaagattttcaaaacggtgatgggaccataaactggcctacaaaaaaactttggatccacaacaaatgaactatgtctccttagccaaatgaagac

SEQ ID NO: 533 - DNA, 1600 bp, mus musculus
gtcgccatcttggtccgggacccgccgaacttaggaaattagtctgaacaggtgagagggtgcgccagagaacctgacagcttctggaacaggcggaagcacagaggcactgaggcagcaccctttgtgggccggggacagccagccaccgtccggaccggaggacaggtgcccgcccggctggggaggcggcctaagccacagcagcagcggtcgccatcttggtccgggacccgccgaacttaggaaattagtctgaacaggtgagagggtgcgccagagaacctgacagcttctggaacaggcagaagcacagaggggctgaggcagcaccctgtgtgggccggggacagccggccaccttccggaccggaggacaggtgcccgcccggctggggaggcgacctaagccacagcagcagcggtcgccatcttggtcccgggactccaaggaacttaggaatttagtctgcttaggtgagagtctgtaccacctgggaactgccaaagcaacacactgtctgagaaaggtcctgttttgggccttcttcttcggccaggaggaggtccaaatacaagatatctgcgcaccttccctgtaagagagcttgccagcagagagtgctctgagcactgaaactcagaggagagaatctgtctcccaggtctgctgatagacggtaacagaatcaccagaagaacaatctctaaacagagtcaactataactactaactccagagattaccagatggcgaaaggtaaacggaggaatcttactaacaggaaccaagaccactcaccatcatcagaacccagcacacccacttcgcccagtccagggaaccccaacacacctgagaacctagacctagatttaaaagcatatctcatgatgatggtagaggacatcaagaaggactttaataaatcacttaaagaaatacaggagaacactgctaaagagttacaagtccttaaagaaaaacaggaaaacacaatcaaacaggtagaagtccttacagaaaaagaggaaaaaacatacaaacaggtgatggaaatgaacaaaaccatactagacctaaaaagggaagtagacacaataaagaaaactcaaagcgaggcaacactagagatagaaaccctaggaaagaaatctggaaccatagatttgagcatcagcaacagaatacaagagatggaagagagaatctcaggtgcagaagattccatagagaacatcggcacaacaatcaaagaaaatggaaaatgcaaaaagatcctaactcaaaatatccaggaaatccaggacacaataagaagaccaaacgtacggataataggagtggatgagaatgaagattttcaactcaaaggtccagcaaacatcttcaacaaaattattgaagaaaacttcccaaatctaaagaatgagatgcatatgaacatacaagaagcctacagaactccaaatagactggaccagaaaagaaattcctcccgacacataataatcagaacatcaaatgcactaaataaagatagaatactaaaagcagtaagggaaaaaggtcaagtaacatataaaggcaagcctatca

SEQ ID NO: 534 - DNA, 1400 bp, mus musculus
atttatttggttctacttctaatcaggaaaaaaaattctatgtgattttaaggatattaaagaatctatacattccagaaggaggaacctggctgggaaaggagacagggaaggaaagaggggaacatgattgggtatctggcatgggaacaggactaaagtcctgagggccaacagaaagaatggaaacaggcaaccttgggaggtaggtggtggggcaacactccagaatgtaccagagatctgaggtgatagactctcgggactcaaaaggagggaccttagatgaaaggccctacagtggggagaaggaacttgtagagcccaaccccaccagaaagacaggtcatcaaatgagggatgaggttgccatcccacagtcaaaactttgacccataattgttcctgtctgaaagaactgcagggatggaaatggacaggagcctgaggaaaaggaggtacaacaggcccaaatgggatccagctcaaagagaggccccaagtcctgacattattactgagactatggagcgctcacaaaaaagggacctatcatgactgccccccaaaagacccaacaagcagctgaagagtcagatacagatatttgtgcccaacaaatggacagaagttgctgacccctgtggttgaattagggaaaagctggaagaagctgaggagaagggtgatcttgtaggaggaccagcagtctcaactaacatggaccctgatatctctcaataattggtccaccaactaggcagcatacactcagcagaactaaggctcccaacatatatacagcagaggactactgggtctagactcagtcagagaagatgcgcctaaccctcaagagactggagagcccagggagtggagatgtcaggtaagattggaatgggggtggggaaatcctcctggagattggggagggggtgtgagaaggaggtgtgggatatcaaacagtcagagggtagacctggagggggataaaatctggactgtgaaaaaaaaaagattaaataaaattaaaaataagattcaagtaaaggggaaaatgcatataaaaacaagtcttaagaatcatattcattgttgaaaagagtccaaactgggatggtgattatggaaattagtgtgtcaagtccaaaacaaacaaaaaaacggaaagacacacacacacacacacacacacacacacacacacacacacacacacaaacaactagacatagattgagcatttgctccagttttattttcaggcatatatacccgaacaattcacactttactctagagatacatactcattcatgatgataactgctgtatccacaattactaggatataagagccactttaatatctatgatctaacacatggaaaatgcaa

SEQ ID NO: 535 - DNA, 1000 bp, mus musculus
caactcccacctcacccaccagatctctaaactccctggggcctccagtcttttgagggctagaagaatcttctctgactgaacccagacgctgcagtcctctgctatatgtgtgttgggggcatcatatcagctggtgtatgctgcctggtgggagctccagtgtctgagagatctccagcatccaggttaattgagactgctggtcttcctaccgggtctccctcctcctcagattcttccagctttcccccaattaaaccagtgagttcaacagcttctgaatgtttggttgggtgcaaatatctgcatttgattctttcagctgctttttaggtctttcagagggcagtcataatagatcccttttggtgagtgctccatagcctctgtaatactgtcaggtcttgggatctccccttgagctggatcccaaagtgggagtatctttcagtattaaatatatcttttaacttaaattctgcaataatctgccatggtttttattcaaagaactataaaacatatgttcacataaaaatctacagtctacctatggctgtttataggaattttgaggttgaataaaaaatgtgtatatgtggaggacagaggacaaaattatagaatcgattcacatctgctcctgtagatctgggactgatgctctaggtcaccaggcttgtgcagcaagcacttttgctggctaagtctccctggcctcatatttcctctttacttattgtactatggtgattgagaagattcggatggtattaaattcatagataaaagagcctatagaaaatctctcagtcagatccacaggtttgcaatgaatctaaagctgcttctcacattgtcattataaggtaatcgtctttaaaatatcaaaaagtatttctaaaacatcagcaaatattcatttgtggaattaattgaggtgaagaaaaattcagagttcaagagaggtgggcatgggaagcagagaaagagaaag

SEQ ID NO: 536 - DNA, 1000 bp, mus musculus
attaatgttacttgtataacttattaaactagaagataaaatatcagggaatttgctgtgagattgtgtcttctagtaattttagaagctatgcccacaaagtctcaccaacatggtggctcaaacgtaagctgaacaaggataacaccaagaggcacggaaaacaggatggacaatatcccatggggcttcaaacatacacaaaggactataggcaactgtcttagtcagggcttctattcctgcaaaagcatcatgaccgagatgaaagttctggaggacagggtttattcatcttacacttccacactgctgttcatcaccaacggaagttaggactggaactcaagcacgtcaggaagcaggagctgatgcagagccatggagggatgttccttactggcttgcttccattggcttggtcagtttgctctcttacagaacccaagacttctagcccggagatggaattaccaacaataggcccctggccttgatcactaattaagaaaatgcccttacagctggatctcatgtaggcatttcctcaaggaaggctcctttctttgtgataactccagcttgtgtcaagctgagagtcaaatccagccactacagcaaccaaaggaagttgagaattagagagttaatcttcctcaggaaagagcacaccagttcgttgtctagtgccaaacttattcccacaaacatacatataggtagcatgatgtaaactcaataggttatatttagaaacgtatacatgtgtgcattcaataccagttttgaagacaaggctattaatttagtgataaaaagatagaactgttgtgttattgccaatccattatatctgggattaaaagaaaaccgaagcatctggtcatgcctatgaataacttttcttgattggatcgttagcagttggaagactcaccttcaatctgtgccttgtcttcttatggcaaactctataaaggatgtgaatgaaagcagcttt

SEQ ID NO: 537 - DNA, 1600 bp, mus musculus
caggtgagaattctttgttcagttctgagccccattttttaatggggttatttgattttctgaagtccaccttcttgagttctttatatatgttggatattagccccctatctgatttaggataggtaaagaccctttcccaatctgttggtggtctttttgtcttattgacggtgtcttttgccttgcagaaactttggagtttcattaggtcccatttgtcaattctcgatcttacagcacatgcctttgctgttctgttcaggaatttttcccctgtgcccatatctttaaggcttttccccactttctcctctataagtttcagtgtctctggttttatgtgaagttctttgatccatttagaattgaccttagtataaggagatattagatattttcttcctttacagtttctgtacctctttgacactttgaatattaatgaaaataggcaacaagggttgacaatttgaaaaaatattttgtttgaaagattcaacaagagcattgtcagccacctcacagcacagttgcatggaagacagtcaaaggcctgcctgctgcttccgaggcttagttcaggccaggtaggcaccattgtgatgagcaattctgtgatggagaaatggaagggaaagagaagtgaagtggtttgtgtgctatgaactggagatgtgatggaggtgagaagcagcttgatatgagaggttgttgctgccatctgaggtcaataggatgcctgagctatgtctgggtccatggccttattgaagcaggggtgtgtttcaatgcccaaagctgatgttaccaccaaagaccatgaaatggttcacagtctgggctgctatctgaagccatgtttatgtctgagaatctctgagctgtcccaaccatcaccagcagtggcgccagccttgatgtgggggcaggagagatgatcctgcccctgactagttgtgggactctgaagagcttgtcctgcatgttgctgaggcagtgtaggagatccccagtggtctgggcatgaaagaaatagtaggctggtcaactcagcttaccaccctgtctcatatccagcttgagcggacccaccccaatacctaaaccacgtaggagctagtggagctccagaagggctgcttcttcggaaccacagtggaaggatctccatgactcagggaaacggcaggatatctgaaaggattcctggcgagggtccagtattgatcatagagcagaagccagaggccttgaaccagagcgatgactctttacagtgaacatttgtaagtgaagctgtttgggcaaaatggtttacatgtgacacgctgtgacactgtactttcagtggcgagatttcgtttcaatttttatgtttttattgtgttttgtggagagattacaagcgtggagggtaaacattggaaggactggaaaatgagtgatattagagttcataatttgaaattcacaaagaatcaataaaaaaaaaacctttttaaaaaagtgtgaagtatagagtatcctttaaaaagattcaacaagagatttgagtttttatttgtttttgatgccagtcccaatactgtgccatttt

SEQ ID NO: 538 - DNA, 1200 bp, mus musculus
aagtaaatgaagataaaatatgtagtcttataatagattacagccaggtcttaatgccaattaatacataagaggccacaattacaaagtaatgtttatttctctttaaatctttggaatcatactcacttggttttggagaaacattgaagagtctgatgtttgtacatggtctaactctctgcttctcttctccgtgctttcagcttttaacaaattggtacaagctattgaaagtcagagcaaagcaatggcggctgtgtttctatcagtgcttttagtctgtaccacatggactgacagcttggcagagctgtgcacaacattgccaatcctttagtgctgtgatgtgagggcctcacacagcaacagccaagcccactgtcctgaccttcacctcacatccatgaccttgaaagtgacagggttccgatgaacaaccctcattccatttccaccattttattttttttccaatgtaacactctggagccttaattagaatgtttcttctcccctgagtctcaagggtggtatttcttccctttcttaaccctaaaactggtagctgtaatttaaaacactcagcttgtctaatcactattttgcatgtatttttattttactataaagtgtttgagctgcagtttgttggaattgaaataaaaaaaaggcaccgtccactgaggaaaaggcaaccacagtaagaggacaaagatgattctttaactcagtttttatgtgtatcatgcatcagaaaacaaatgcgatcactttcagtagcatataaaatcttcctaacagacaatttttttttaagccaagtaattttctttcccattatttgccttcctgcttatgctcttgcaatgcctcagacaactttagggatatcagaaacagatatctcatggaggatggtgagaacaaccttgctattgcaaggtatttgtggtaatttattgagagacaccatcttgttactcattatgtggaatatcttcatgtcatgttattaagtctaggggcacagtcatttttttattgctctgagtgctgaataaacacttaaatatttgagaaagttatatattattgaaccaagttgtattattcatctaagaaatgtaaattacaccaaccacaggaatggctctttttttcctttgaaccttatagaatttttgaattgcttttcag

SEQ ID NO: 539 - DNA, 1400 bp, mus musculus
agtttggtttgttcttgtttttccagatttttgaagttgtaacattaagtcatttactgtgctctgaatttttaatgaagatatgtagaactataaattcccctcataggactacttacaatgtgtcctacagattttcagtgctatgtttttattttcatttagttccatgaacatttttatttctttcttgttccttctttgacccatttatcatttggtaatgcatggtccctgagtttgtgtatgtaccagatatctgctgctgattttaaattttgttacatcatggtcagattggatacatagaattaggtctatttttctgaatttgctggatttctttgtgtctacatatatgtgacatatatgtgttttttaaaagcctttgtgtgaaacgctgacaccattgcatatgccagtaagattttgctgaaaggaccctcatatagctgtctcttgtgagactatgccggggcctagcaaacacagaaagaagtggatgctcacagtcagctattggatggatcactgggccccgagtggaggagctgcaggaagtacccagggagctggggggaactgcaaccctataggtggaacaacaatatgaactaaccataacccccccccccacccccagagctaatgtctgtagctgtatatgtatcagaacatggcctagtcggccatcagtggaaagagaggcccattggtcgtgcagactttatatgcctcagtacagggaaacgccaaggccaataggtgggagtggataggtgggggagtgggtgtgggagacttttgggatagcattggaaatgtaaatgaaataaacacctaataataattttaaaaaaaaagaaaaaaataaatgaaccaaaagaggaaagaaaagcctttgtgttcttcttagtaaaatgtgtactctctgttgttcaggctgattattttgtacccacttattatgtccttttgatgtctagtgacatttaattttgatgtttctttggtaatttttttgtccagaggacctctcaattggagaacgtaggatattgaaatcacttactcttattgggttgatatggacttgtgtcttcaattttagtggtatacttttttacaaagtagggtgcaccaaattttggtgcccataagtttaggatactaatgtctccttggttaactgtagttttcattgcaatgaagtctcattctttgtgtcttcatatttttaaattgaactctattttttctgatattaggataatgataaaaaatatgggatataaatatagaataatgtctgtctcctggcccattttatttgaatactataaccattcattcacattatagtgtacctatctttaaagttaaggtgtgtatctaataga

SEQ ID NO: 540 - DNA, 1000 bp, mus musculus
gggggagtattatgaagatagaaagaaaagagagacctggtgaaaggctgtatatagtatccacatgaccagttcctcttacccctgtatgtgacctccagcctgctccaggctcctcttacatcagagtgcaagagaagtctgaagggttgggagcaggggaaacctggcccaggaagaggaacagcatgcatgtcagtcatcccaggcagccaaaacaaagactgggcagttttcaaagatccatattctcgctgaggccaacagctcatgatctaaatgctaccaggctctcttcctggcttgcaaaaaccaatttcacatttttacccagtgggattaagaccttacccctatgacctcagtcattaattaccacaggggatgaggacttcagcatatggcctttgcaagacacacttaattcataacatataaatgtaagcatgctcttagtggcagttaaaactcacctgaagactgtgtaccttctctgtgctttaaatctcaaggttcaaacaggacactcaccttcctcaccacacaatttactaggatcaccttactgtcaacaatatcacatgcttaattatcatcttttacattgtaagccacattactatgttatctattacaaaactttaaactctgaatcaaaaaattgcaagcaaaagtaacattaatttccaattttattgagttcctaatgggcaaattttacattggtttaatgaggccttattatgggatctgaatatttagtgtgtactaaaaataccaccccttctgaaagatgacaggaacaatataagcaaatgtgtctccacagaccaaaagtatagctgttatgaaagagttcaggaatgtgcaatcgccacttctgagcagcacacaaaccttcataagaagctgtcgggtgtgtgtgctatctggtgtctggaacacaataaccaagggtaccaaagggcatccaagttcaggaagggtagaagcgcagcat

SEQ ID NO: 541 - DNA, 1000 bp, mus musculus
gagagagagagagagatgaaatgtacatattttagggtttaggtttagataagtattgggggaatgatattcaagcaaagtcactagtctgtacaaatcattctgaagtcaagccaagtcagttaagtagaaaaagcattaagagttaagtcaaaccccaaatcaatccaagggaaagtgttcactatgtctgagtatgtgcctcctaaactaccctccccaggacagttatgatttggtcaatacaggacaagattcatgttttttcttgccaaggaccagcctaagcttggagagggcttctgatgaaaagatgtctaactggggaggagtttatcctgaaggtcagaagcttaagccattgcctatgtgacttctagccatgcttctcttgtgggggctgtggggaatggtaacttaggcaggagccagagttccaggagcatgagggaatgcctaccgtgtcatgtaggtgaattatcacccttcgaggttcagacctcagctcaactggagaccagcctgtctccatagcccaattccccacaggtatctgagagcagcaaaggaacaactcaaagccaaattgtgggttacaaactgatagcctactgcccgagacagctgtcagacagccctttgatcaaggcagctttctctagcaattctaaaaagctcatctcttacagacccaaagcccagtcttttatttacatatcagttcagtcattaccccaggttccctcttgattaccctatgaataagcatcccataacccctccattcttagaaacagacaccaagcacattttttttaacattacaaatgaattcagagatctatggccttcataagcagtgacaatgagatatatgggtgggatccagtcctgagattaccatttccattatgcatgggcccaacctatgtttgtttcaggtatctgcctttgtaattttctgacaagctggttcagagtgcagctgcctctgtttagt

SEQ ID NO: 542 - DNA, 1200 bp, mus musculus
ggttatttttctatttcttttataaacttcaaataaaatgtcagaaaggggttggggcaggcggaagaaagacacctaagtgcccaccccagtcacaccagcttgaggcagcctgaagaaaaccactcaagcacccaccctggtcccactggcccaaaaaggatggaaggaagcaagacatgcacagagctgccataggtacaattttgatgggtgactgtgatgtagagacgggaaagatggagtaaacggtggagagatgccagagaaagcaaagatgaggggttcctctgctatggagaaaggtgaaattggagactcaatggtggtggtgaagaacaagtagatatgaggaaatcatggggaggccctgttctaggctgccacaaagggccatgcctgggtctggtacccctgctgtagctggggttctatacacgtctggcctgagttaccatgaaagcccaaatgcatgtctgtggtctgggctgccagcagagagaccatgaggatatttgagggtcaacatgttgatctgagtggcctgccacataaggccatggggatatccgagtccacattgctggagggctcagggcacaaaacactacagatgaacatggctggttcactggtcctcaagcagttgggttctctagtgatgtccaaggctcatgttaccaccaaaggccatgtagatgtccctgatctggactgctgcctgaggcattgtgtgagggagacatgttctcctctgcttgccccttcatgtgtatgtcaggagggttaaatgactttgaggtcatgagagatggagagttggtcatgcccctcaccagctgcagcactctgaagagtaggccaacacctcagggcagcacagcaaagctgaccttagtggcaaaggtgccaattagcaagtggggtgggggtgtgggggagaagggaggctgaccctaccaccccttgctggctatagcattgggtaaggtagccagggcagtggtaaaaagctcaacctgatatgtgggtgtgggagagctggtgagctgacaaacttaggctactatccaggctcagatccagggctgtgagttagcccatctatatgatctgttggagcactaaaaacaaccagtcctacagatccaaagctgcaggatctccataaaacagggcaacaaaaggatatctgagagg

SEQ ID NO: 543 - DNA, 1000 bp, mus musculus
ggaaaagttctcttcattcttctcgtggcggtacttgatgtgctccttcagcgatgtcaagcgcttgtagccgcggtcgcagtaggggcaggtcagcagttgggcaaaagcatctggagttccaggtggcaggtctgtagccgagaggcgaggggagaggagcgggccaaaaggtcagtaaatcaatggcagctaatgggctggctgcccgggctgctatgacaggaatcgctgcaatctgctcctgcacagcgccatcattgcgccccggcctcctcacaaccagaccccttgaacacccagggcaggcttgtccgaatcagctcacactgcgctcgaaaattaattaattacttgagcttatttgtggggagggggaatttaaacagctgataaatgaagaaattccctttgggtgactgacagtccccctgaaccctagactcacatgtaactcaggaattcacaggagggaaggagattttttttttcaggtgtcagagaacaaaaggtgagggtcggtgatcttaaacttttttttttcctcaaaagtaaaatatctctgaaagattggaatacatttagatatttttatctcttagaaatgggctgtaattgttcttattctgtattggatgtacaaatgacacaaatttgctgacaaaaaaaaatttcacaataccctaaaattacagttctaatctttgctcatgaaattccatgcctctgcagctgttcttcaaattttaaggtaaacacccaggcatgtagtgcatttgtaattctaacagctgcagaggtcagtatcgcggctaaaaatgaattacagccttaccattttcttcttgcccgttggcctctggcgtgccaaggcgagacagctcctcaggggcttctgggtaaataatggccgtgtcgcttcgctgaaggtactcttcgatgctcactgcgtggccatctctttcctccagttttcttttggcaaagtattcctcaaagt

SEQ ID NO: 544 - DNA, 1400 bp, mus musculus
agtttcccttagccctttactctatattgaacctatgctagtctctggattgtagcttggttatcattgatttgactaagttaatatcagcatataaatgaatatgtaccatatttatctttctgtgtctgggttacatcactaaggataattttttttttctatttccacccatttacctctaagtttcatgatttcatttatttcatttttgatagctgagaaatactccattgtgtaaatgtataacatattctttattccttcatctgttgaggcacatctaagttgtttctaatttctggcaattatgaatagagcagcaatgaatatggtagagcaagcatcaaaggtataccattttgaccaagcagatttacgtgccaatgttcatcgcaatgagacgttggtttgacttgagatctctggcttctgctgcacagtcaatgctggatcctcactgggacttctcttggatatcctgctgttaccctgtgtcatggagacactgcaggtctggatctgaaggactgccccatttacacgccagcagttcatagacaggtttgatgttggggtgggacaactctgagctctggatctgggcctgagtggaagctgacttggtcagcccatcaggtctcctgtgactgcaccaacaaggccaactctttgccaagaggtagggtttgttttcctgctatcatgccctctgggccagatttcctgtgcccatgctcccacggccagctctactctgttgcccaggtgagagtaggaccagttctcccaagctgcccacgtaagagccgggtacaactctcccattgaaggcaaaaggacagagccagctcgacacggtgcttgaacatcagcatgacctcaggtggcagcccagaccagggacatctccacggttttggtggttaacatagacctcagataggaccaccaacccagacatggttccctgtgcatgtcatttatatataggagggttactgatttttgtgaattaattttgtattcacctactttgctgaaagtgtttattgcctgcagcagttttctggtggattttagtgtcatacatgtgtacaattttaggagatatgtatatatacatatatatatatatatatacacagatacatatatgcagtcatatcatcaacaaataaaaatactttgacttctttccaatttgtgtctccctgatcacctataacatttatcatttcatgtctttgtcattggctctttactcttcaatagcataaaacctatcttatcggacagtcattacttgatatgcctgttagctatttaaatttaattataattcactaacaaggagatcttttttttcaaatgctattacatggtaatagaacatttta

SEQ ID NO: 545 - DNA, 1400 bp, mus musculus
atattttttgtgacaatgtctttcatggaatctactaaattgactatactgtcaagcagtgtattctggcttatcaatcccattcttatgccccaagactgtattttgagattcttgacaacatagccagctcttatgttaaagttaggaatccatacatattccatcatgctttctaacactggaacagtgtttgaacctaatacatactaatatgtaaatcaaagccagagtgaggtaacccactaatatgtaaagtcagagccagagtgaggtaacccaatcacaaaagaagtcatttgatatgcactcactgataagtggatattagcccagaaacttagaatacccaagatacaatttgcaaaacacaagaaaatcaagaacaaagaccaacatgtggatacttcattcctccttagaatagggaacaaaatacccatggaaggagttacagagacaaagtttggagataagacgaaaggatggaccatccacagactaccctaccaggagattcatcccataatcagccaccaaacacagacactattgcatatgccatcaagattttgctgaaaggaccctgatatagctctctgttgtgaggcaatgccagtgcctggcaaatacagaagtggaggctcacagtcatctattgtatggaacactgggaccccagtggaggagctagagaaagtacccaaggagctgaaggagactgcaaatctatgggtggaacaacaatatgaactaaccagtacccctagagctcatgtctttagctgtatatgtagcagaagatggcctagtcggtcatcattgtgaagagaagccccttggtcttgcaaactttatatgccccagtacaggggaatgccaggaccaagaagtgggagtgagtgggtaggggaacagggcagggagaaggtataggggactttcaggatagcatttgaaatgtaaatgaagaaaatatctaataaaattttgaaaaaaaaataaaaaaaaaacaaagccagaaaagttactaatcttccaagtttcactacacacacacatacatacacacaccccatgtatgtaaatcttcaaaatcaagagatgacccacattccaatgacatattttcgagcctgttgacatttatatttgaaacaatgaatatctttggaaattttactatgactttctcactgagtttattttttattataaaaatataattatgaccataatgtcactgcattttcaatctcatagcataaatactgtggcccaaacttaaaaagcctcttcattctgcccatgacttttactttctttgttgactttttaaagtgattttcttgtctcaattgctacttacatctctgatactcatgtaacccttgaattat

SEQ ID NO: 546 - DNA, 1000 bp, mus musculus
cttggttctcttgatcagaatgatgtatacttttatcttctcaaagatgtttggttctgtgattctttcccaaggacaggttgcagctacacctgggaagtgcttatccatttatcagtgagaatgccaggaggcaaggaaggctgctcctgtttgtccattctaaagcccacctgggaggaggggtggggttcatcaggatgtgccactatggaaacagggatagatactctggtgccagtcagggtcctctttgaaaatccagggaggggaaggaagcctcatgctacttgcttcacagaagaaggttgcctgggtcatttcactatcatcgggttggggggggggaagcacacataatactgtgtattcaacaaaaacggattcttttcattttaacaattttctattaatactttgagaattctatttaattgtagtttgaacacattcatctccttccaccaacatcatccctaacctccgtatatcacccaaaatccatatcattgaggaagaagatataaatatgcattacataatataaaaaccaaattctttatatgtgtagagaaatattttcacaatgctgtcaaaggttataccaaataaatgtgtagaatagagtaaatgttaaatatggtcatgaattttgagaactaactagaaaattttcatggagaaattattttacttaaggaaataaaactaaccgtgttttaaatttaaggcaagtccatgtttatgaataagaatgggacatttagcttcctatgaaaactgaaaataaaagtgtaggaacacagatgtaaaggagtgctcagataagaggaagactaggaaattgctacgggttcgaaactgctatacaaacccaataggcctcaaatcaggaatgaattctagacaatgttcatcactccacttcttccttaccaaatgacatgttcttgaggaatgctttagctgtctggcagccaaggagaactgggaataccta

SEQ ID NO: 547 - DNA, 1000 bp, mus musculus
gagtgactcaggcaggaggaaactaacttcccagacactactcttatctccatatacaccatggcacaagcttcacacacatcatgcaggaacacacagaaaacacacacagacacactcacacattcacatcctcaacaaatacataaaagataaatttttaaccatttttagttttaactacagaagttttgaaagcttggcatatttggttctaaaactcagctattaccttaacttgaactgaaatatagctacaattcactgtaattttgtacaacataaatctgctcttaaaaaaatgataaatactccttcgggtcagtgccagccccttgtcaccttgggggcaatctcaaccgagggtcccaagttcatcagaggaatctccttgccacaggttccctagcacacccaggatcttgggctcactggtgagtggaatgcgacatctgttccaaagcatccaaagggggcttgtgccagcagtaacagggacaaaggaaacccaaacgaccagtggctgggttttattcctgttggatccagccttgcaccaccttggttgtgaaatcaagacagagcttgttggacaggatcccttttgggtcttcattctcagccaggaggcagacctgagacccagacctatgggcatctcaactataagatgagagcttgcctgaggagaatgctttgattactgggactaaggaaatagttcgactcccaggagtgctaacagaggctaacagaatcacaagaggaaaaagctccagccagagacagctagaacatctaacaccagagattaccaggtggtgaaaggcaaacataagaatcttactaacagaaacctagaccacttggcatcatcagaacctagtatgccaaccacagcgagttctggataccccaacacacccaaaaagcaagattcagatttaaaatcatatttcatgatgctggagatgattttaagaagggcattaataactca

SEQ ID NO: 548 - DNA, 1200 bp, mus musculus
tatagagaatctagtaagcatcacctgccaataaaaaccctatggtcaatgaatgaaattaggcaggattagaaggagggacatctagcaaagaaatattgtaatttttgtatagagtcaggcaggagatctacccaaacatggaaggagatgtttacatgaatctgaaaagtggttaggaactacatggtaggacctagaatagacgggtaattaagttatgagctagtctgggaacaaaccaaaacttttggcctatttattcatgaaatattaagtctcagaattgttattttggggaacaaagagtccagtccatgtagaaaagcccatgaatacaaatggtgtccattgtcaggcacaaaatcccagcttagaaagaatcaggcttagagtctgagaagtttgagatggaagacaggaacaagcaccttcagaaacagaacaggttcctagattgatacaggaaactgaaaaaatgaattccccaagggcatctcctttaagagaaaccatcactttgcagcaaacctggcagaaggcagaaagcagaggccagagtactaactcagtaaaggggctgctctacagtctccatggaactggatgctgaagacatagcagttgtaacttcttccaagcacagcatggttctagagcaaggttaaatgcctgctagagagagctagacatcccaattcaggatcatatggggtgggatttgggggaggctacatttgcccagaatctggctgaaaggaactcatcggagtggttagagccaggagcagcctgtgtggcatactagctgagcagcagagaaacattggctacaggtaaaactgaaaagtcaacagacttgataagatacttaagaagtccttaagaagagaattagaagttaaaaagaaggggctgttaagatggtgcaagctgttaagagcactgagttcaaatcccagaaacctaatgggaaacaaacaaataacaacaaaacaaacaaacaaacaaaaaaccaaaggagtgagtggtgcctgagcaagaggaaaaataaaacaggaaaaaatgttaaaaagaaaatatgttctatatttaaaatgcaatgacagagaccacatggaccttctatacttttgttccaattatcagcatgacaattagtgtatgttcaataatgattacagttttgtataaccactt

SEQ ID NO: 549 - DNA, 1000 bp, mus musculus
ttatgggttatggagaaaagggtcattttctttgaaatagaatctcactattgttgagatataacagattatagctgttgttggtccagaactggttgtgtataccagggtggtctcagactcagagagatccacctagctctgtcttccaagtgatgcccttgatagcacacgaggcttacagatggttgttttaatagaaggatgtactgttgaaatgtacagtgtaattaaatagtgtgttaccagcatactttttaatgcagcttttatttaacctagacaacttgtacaaatttttagagaacttgtagagaccatatctagaggttaggcatggaccctggttgaggcatcccacccttctcaaatttttaacccagagttctcctgtctaaaggaaatacagcgacagagttgagcagagactgaaagaaaggccatccagagactgccccacctggggatccatcccacatgcaaacactattgctgatgccaagaagcgcttgctgacaggaacctgataagcatgtctcctgagaggcttggccagagcctgatagatacagatgaggatgcttgcagtgaaccatcagactgagcagggagaccccaatggagaagttaggggaagatctgaaggagctgaaggggttcccacaggaagaacaacaatatcaaccaaccagacccaccagagctccagaagactaaattactaatgatagaatacacatggagggacccatggcaccagctgcatatgtagaagaaggtggccttgtatagcatcaaagggagggaagccctttgtcctgtgaaggtttgattccttagcataggggaatgctagggtggtgggagcacactcatggaggcagagggtgggatgggggtggggttcggagaagaaatcgggaaggggggtaacatttgaaattaaaaaaaaaaaccaaatcaatacaaaatgttaaaaaaaaatagaatcatattcaga

SEQ ID NO: 550 - DNA, 1200 bp, mus musculus
ataaagtgtaggcaggattatcacatatagcatggcatgtgctttggagctggttgttatcagtgtgacactgtagtcagttaaaatcacattgcatggctccatgtattgatttactgggcttttgcttcccagattaagttttcattccctagaaaaagggaaagagtactcaacataagatttgagatcctgttgctgaacaaagcccactcttcaggaacagacctgggaggaatagtaatggcactgacttggaagtctcttatctgatgtctacctctcatagtataagaaggtgccatgcaagcttccaagaaagaaagtaatcagtagtactacctagatgttaaacctgacaatcacagtaatcaacccagtaagatgtcaccaatttgggtcaccttgggcacggagtcgtgggacacccccaaggtcccctagagaactctccatgagatcttaggaccacctgtgagtggaacaaaacttctgttcaaatccaaacatgcaggacctgagacaacattagagaagcagaaaaccttgcctgaagagggtcatgagtcccttctgattggcaccagcacttcgtcacctgggcgcagagtcagagaacacccctaaggtccctagaggacagcttctgagacagaccccatttcgggatccagacactcggacaccttccctgctagaggaaggattttgcaggagcacctgggggagccatcttggttcccggatccctccaagaatagtctgtgtaggtgagagtgtggactacagaagctaacagcttctgtgacaggccaaagcaacacagcttctggggcaggtcctgtttcgggccttcatcttctcccaggagggaggtccaaatgccagatatcggtgcaccttgcctgtaagaggagagcttgcctgcagagagtgctctgaacactgaaactcagaggagagagctagtctcccaagtttgctcatagaggctaacagaatcatgacaggaacaatctctaaccagagacaactataacaactaactccagagattaccagatggcaaaaggcaaacgtaagaatcttactaacagaaaccaagaacactcaccatcatcagaacacagcactcccaccttgcccagccctgggcacatcaacacaactgaaaagctagacccagatttaaaagcatat

SEQ ID NO: 551 - DNA, 1000 bp, mus musculus
ctgcaggtctccaggagatttgccataaccagtgacatgggtgagaatcttgaccaaataaccactccagctcagacctcccatggagcccaacagatatgtgatcccctcccatctgcacaaaacccatctcacttctggtctacacctccaccaggccacataactatgcttgcctctcttcccaccccacagtgtgcaggcctgccaggagatctgccataactagaaatataggtggctacctctgtcacagtagatcagtatagcttctcctttcccacatcccacaacctgctgggctcccaggtggtctagcataaccagggacacagcctgcctgtctctcaggacatctgtcataaccaagtcatggaagcattgccctaactcagggactcaagatgcctgttataaccagaaacgtaggaggtctccccaaaccagatgcagcacaggctgccttccagaaggcctgctctaacccatgtcacagagctctacctaccatcaaggaggcagacttaggagttaacaccagagataatgatatgccaagaggccagcacaaggacataaacaacagaagccaatgtaattgggcctcatcagaaaccagatctcctatcacagcaagccctggataccctaacaaacctgaaaagaaagatgttgacctaaaagctcatcttgtgaggacaatacaggcctttaaggagggtaaaaataactcatttaaggaaatagaggaacacataggcaaacaggtaggccttaaagaagaaacaaagaaaccccttaaagaaatacaggaaaacatgatcaaacaggtgaaggaactgaacaaaagtggtccaagaccaaaaatcagaaatagaaataatacagaaatcaaatgttgaggcaactctggagatggaaaacctggcacaaatacagactcaagcatctgttgggagccgcgcccacattcgccgttacaagatggcgctgacagctg

SEQ ID NO: 552 - DNA, 1000 bp, mus musculus
ctctcccccgctgcctttatgaaaatgatgcccaaccccccagcccatttctgcctcagtgctctagaatttccctacctttggtcattgagcatccacaggaccaagaggctccccttccagtgactctcaataaggcatcctcagctgcatatgcagctggtgccatgggtccctccaagtgtattccttggttggagttttagtctttgggagctcaggagggagggggtgtctggttggttgatattattcttcttcctatggggttacaaaccccttcagctcccacagtccttgtcatactttctcccattggggtcctggcactcagtatgatggttggctatgagcattcgcatccgtattggtcaggctctaggtagagcctctcaggggacagctataccaggctcctgtcacattgctgacatttctagaagacacagtttcatagcaaatgctatcatcctatcatcttcctgccctgtcttctgcaatgatccccgagcttaaggtacaggagttgtgttatagatatattgtaatggtcagaaaattgctgcaggaagaccccaggctcagatagtatgcaaaaacaaagagcatttattctgcagaaacaaccagcatatgggggtcaaccattctctaaaatggccacctcagacaaagacatgcataccttcttatatggaacaggcgtaactctctagaaagattgggcaacctaaaaattcattggtgggtgctaggggcatcatacgtggtcagtggtctgcattcctatatcatgaacatgtaactatatgatgaaataggactgcccagcatagatggcccattcagagatatttcacaatttttgtagttacctcaggctgttctttgggaagggattttatgatcttggtctggattttattgtctgtccctagagctggtatcttatagcttagtttctgggacttatggtctattcctgaagctggtgccttat

SEQ ID NO: 553 - DNA, 1000 bp, mus musculus
taatggtagaccattgcccagaatgactgagacccttggtttaatctacaaaagtacaagaaaaaaagtaaagtttagttttagagtctaattaacaaggcaacattattgaaaacttttacacatacaaaaacttaaaatgtgcatatttttggtgtgtgtgtgatcaagcccactcagtcaacaggttctccagcacgggagtgaggattaaaaagaaaaaaaaaaaaaaaaaacagacaacattatagcatgaccccagtcaattctgagactgaagacaaatttaatttttccaaactgctttttataccaatttaattgcatgcaagtattttgggcaagcagtacaataaggaactaacaagacagtaagcaaagtcccatgacagttgtttaaaagagcttgtcatgatgaccaaaatacttgaggccacttccttgtccaagccaaaatcttacctgaagcctacttttgttccaccctaagatttaaattcctgccttaccctactttcctaacatagcctaaagttagattcttgtggaaacttacttccttgtcatgccctaatgtcggattcctccctgagcctacttccttttcatggacaatgtcagattcctgtctgaagcttatttccttgtccttggccaatgtcagactcctgccaagtggcaccccaaaaggctttccacatgtgtatgtatgtgtgtgcatgttacacaccttggggtaaacatgtagatggatgtcagaagacaacctctgtggagtaggtaccaccttccaccttcgctctgagttccagggattgggctccagtacttgggtttgtgtggcagatactttactgctgagccgtctttgtcagcccgttgagacatagttcagatacataaagttcatactaataaaatcaaaccatctttacagatgatggaccagtaattagaatattattgttgtttgttttgatagttcttttgctagtttcat

SEQ ID NO: 554 - DNA, 1000 bp, mus musculus
atttttaattagtttatttaattttttacactccagattttattccccaccaccacccggtcaacccaccgaatgctccacatcccacacttcctccccacctccttgtctccacatggatgtccctacctcccaccccacctggcctctaaactccatggggtctcaagtctattgagggttaggtgtatcatctctgattgaacacagacttgacagtcctctgctgtaattgtgctgggggcctcatatcagctgatgtatgttgcctgtttggtggtccagtgtttgagagatctctggggttcagattaattgagactgctggtcttcctacaggttcgcctacctccccagcttctttcagcctttccctaattcaatcataggggtcaccagcttctgtccatgggttgggtgcaaatatctacatctgactctttcagggctgcttgttgggtcttccagactacagtcatgctaggtccattcttatgaacgctctatagcctgagtaataatcaggctgtgggacctccacttaagctggatcccactttgggcctgttactggacgttcttttcctcaggcttctctccatttccatccttgtagttctttcagactgaacaattatgggtcagagatgtgactgtggaatggcaaccccacccctcacttgatgtcctgtcttcctgctggaggtgggctctataagttccctctccctactgtggggcatttcatctaaggtccctccaattgagtcctgagagtctctcacctcccattctggtgcattccgtaggattccccaacctcctatttcttaaggatggctgtttcccttctttctgctgcccttcaggacttcagtccttttcccttacccaatgccagatcaggttcccctctctcccccatctcttccctcccatgttcctctctctctcctcccctgtggtttctttcttctctttcccaaatgggactgaggca

SEQ ID NO: 555 - DNA, 1000 bp, mus musculus
acttcctcaggatccctaatgtgaataaaataaataactatgaattattagtgtaaatccttacatgctgggtaacgggatgcaaagagatgtacaataaagctgtacccatgctcactgctgtctgctgcctcagtagttatcctgaaatcctgactgctgggctgcctggccagtgcacctctgttccagcacagaccttggccctgccccgatggagccatagacatagaatgcacacactgctttctagactcctcacagtaaactgggctcgtgcaagggagactccagatattcagcagggagaggaaagtcagtatttctaatgcaggcctctcttgcatttttccttggttcccagtgctcccacccttcatcatcttcatacacttgaagctggagccagaaacttctggccagttatggtatgactgtgtcttcctttgatcagaagaagttccaacctcctcagaacccccaacttctctactgcttcccttcctccatccaggcagaatggcgtttcctctctaagcacttggctactccgacaccaaagcccttcctttcaggactttgtctttgcactgagcgtcccaaaaggccgctcactcactctgcccttgtctgtctcactctcctgtcttttcatctgtgactttttgtcttaatcacctgaatcccgtttgtcttgctccactgttagggtgactcttcattgtctccccttgtgacacctagtcacaagcaaattatcttgcgtatccccaagatgctcacacagctacttgttcccagtggaaatggatcatactgtgcgggagggcagaccagatgtggctgtcagcttagcccctgagactgtgacactgagtcttattgatggcatgcagggatcctccagacaggtgcagcccacctcttgaaccaccataccattcatggtgctgctctaaaaccctagccattggtaactggatgattgcacggttcatca

SEQ ID NO: 556 - DNA, 1400 bp, mus musculus
cacacagtattgtttgacagttcatcacttcaccagccacggaagaagtacgtccatcacgaagaagtgtgcctctaaaaatgaatgtcattttgtcggctgccgacacagccgagattcggaacacacggtaaagattatgcttgcttggaattaactttcccagatttcatggggggatggtggtaagttacgtgtcatgggagaacctagaaggagaagccatatgttaggtttgtttgtactctgacataaagactctacttcagtgccagtgaggagagcagacaattgaagatattctgtcttcaaaaagaaataatggtgccaagaatgagtgttagtttccagagctctagagataaattctgaacttgaacagcctgaagcccatgctggaagctcaagaatcacccacccttcagagagtaaggagcactggaatctggatgatgtgtgactctgatcatgcaagggccacatgggcagcaccgctgaggtgagctggtgaggctggacaggagcaccctaaactaattgaaatggaacttcacatagaggtcttaggaatcaagatctctagaaggtatccatggtgagcacagcggctcacttctgtaatcccagtattctagagcctgaggcaggaggattgcgagtatgaagccaacttgagctacatagcaagatttggaaaggaaaataaaaacttccccctgggtcaatctgatgggcagctggctgcatagtcatttgtggctgtgcttgaagctgctgctttctgctgcccccattggcctgggaacatgcatgagtggccagttcatgaagacatggctttgggtcaggcatgcatcactgttgtggtcacaggttgcttcccttgaatgtactcttaagaatgggcactttattttatttttttattttagcaaattatcactgccatcataacaggactcaggtgagggcacagacaataatagcaggtcacagttatcacctaacaaataatactaagaaagagaaccaataaatccagaaggttcctgactttcaggtcattgtttttggttccattgtcttctaataaatcttttaagatctggaaactgagcagtctaactcagtctcccatctttgcctcagttttgcttgggtttgacacagatgcttcaagagttaggatgagaactctcacggtagtctttgtttagctgggggaagggtacccaaaggtcaggacaatgcacaggctggactatcagctccagtgcctgtcttgtcccatcttcctccctgcttctcactccaattcctctttcctccttgtacccaggagtgtaggtcttgctgtgaaggaatgatctgcaacgtagagttgcccaccaaccacacaa

SEQ ID NO: 557 - DNA, 1000 bp, mus musculus
tgagggtgatcatagtttagggcataacattttcacccactgttatgtggagcacatacccatgggtgggacatgccaggggcacagcctgagacaagtaaaagccctggtatgcttacttgagtgtcttcttgcttagtcccattgtccagtctgctggaacatttaatagtccctccctgcaagaatgatctgcctggaaagccactgtgctctgttctcccacaaggagattatgtttgtcatggcaggagtgagacaaaatgaaggaccctcaactgcaaacagtgtctatccaatctgccaatggcaagctttatctggtgagagacgagtaaggactctgtaaggctgaggatgacagagccttgaaagccaccaaggcacccacggtggaaatgaatctgcccgtgtgtggtgctgtgtgctctctgtgaaacctgggcttgctgcagtgggatcctgctgagaacacagccaaagcaacccggaagactggagagtggacttgtttaggttcagacttcaaagtataagcttcttattacattttaatgaccagagtcatattttattcatatagctcaagctgcgtaccccggagtcagtaaaacacaaggtttccatttcatacttacacaatccctgaaaagtttgaaactggaaaaaaattctggaattggatatccttattaaaactgaatatgaagggttggctgagcactatcatacatatgtagggaaatagactcatgaagctttgatggctcctgttgaatacatgagtaagtcacagctcatttgctggagaactactctttctttaacctgcattcctgaaccttgcaatacacctccaggagaaatacaattctccttgcaattcctctccgacttggaaagttctagaacattctctatttgtgttttacattttgctggagggggaggaagtggtattgttgtcttctgcttctacgtataatgtggagaagacaaa

SEQ ID NO: 558 - DNA, 1000 bp, mus musculus
tactttaggtttactgcaacctagactctgggcttcagctgataatccagagttctactgcagaagaggttaacactggacaaattgtgtatatcaggtcagaaatgtacagagaaggtcacactaaggacgtaaggtttaagtattaaaggatttctggaatctggaagtatcagagaagagacatatggcttgaaaaggagctcaaaactagggctcagcaaaggctgagaagtgtgtctgtcatgacaacatgcatggacaggctttgaggagtgctctgtaacaaaggccaggcagggtaacaggacacctaatgacaaaggtgtgcccatgtggctttgccaaaggaactaccaagtgtattttttgttttgttttgttttgctacagagcatcaaggtacattgctgactttagtgtattttatgtttcaagccaaatgctctgcattgtttgggtaaggttaatttctaacccactagaaacgccagtggttttcacttggctcacgttcctctcctgcaataggtttttgtttgtttgttttgtttttcgagacagggtttctctgtgcagtcctggctgtcctggaactcactctgtagaccaggctggcttcaaactcagaaatccacctgcctctgcctcccaagtgctgggattacaggcatgctccaccctgcccggactcctgcaatagttttaaccattgacacttactctgttacaaggcatggtggttttttagtgtctgttgtcctgttttgagtcagtctttggttctgtgaagcatagaccaccagtctacattcccctgtatctttctaaacaagcagtgggcacacatatacttccatttcttatttacatctcaaaaagttggatttctttttcccccagaactatagaaacagctgggtctctgaccataatcagaagtatcaggtaattatcaaactctgagagtagccctcaacttgggcccaggaggtgtaat

SEQ ID NO: 559 - DNA, 1000 bp, mus musculus
cctggatgggaaaggctacagggaggggaagaggggaacatgatagggtattggggggagaaaaggactgaagccctgaaagccagcagaaagagtggaaacaggcaacctcaagaggtaggaggtgcagggatcctctagaatgtaccagagacctgggaggtgagagactcttaggattcaaagggagggatcttagatgaaatgtccaacaatggggagagggaacttgtagagtccacctctagtaaaaaagacagggcatcaagtggagggatggggttgccatcccacagtcaagaactctgacccagaattgttcctgtctgaaggaactacaggagcaaaaatggagaagaaccttaggaaaaggaggtccagtgacaggcccaaattgagatccagctcagggggaggcctcaagccctgacactactactgctgatgttatggtatgcttacaaaaaagaggcctatcataatggccctctgcaaagcccaaccagcacctgaaagagccagatgcagatacttacacccaaccaatggtcagaaactagtgaaccctgtggttgaattagggaaaggctggaagaagctgaggaggagggtgaccctatagaagggccagcagtctcaactaacctggatcccccggatctctcagacactgatccaccagccaggcagcatacatcagctgattcgaggccctctgacatatatatagtagaggactgccaggtctggactcagtcagagataatgcacctaactcttgagagacttggggccccatggagtggggaggtctaggggttggggggaggggacatcctcttgcagacaggggggtaagtgtgggattttggaacagttgggagggggataaactaaagaataaaaataaataaattaaattaaaataaaagaaacaatatgagtttaatatttcatccctacaacctaaagacgttgcctctattaaaacctgaaacct

SEQ ID NO: 560 - DNA, 1600 bp, mus musculus
gtctctattggtagtagaccaccatgtatacaagtgtcgccctcatcgaagcctgggccatggacgccattagctcttggcagcagcacaggctaaagacatcaacatgatctctaaggcaacatggaccaaggacaccaatatggtccctggtggcagacccacccatgaatatcagcgtggcttcaggacacggcacagaccaaggatatctgcatgtctttgatggcaacagggctcacatcagcacagcccctgaccgtagctgcatgaaagactccaacatagcctcaggcagcagtacaagctattcacattcgaatgaccccagcagcaagccctaccacagacactaatacagcctcctgcggtagctcagactatggcggacttcttacatggccctctctggaagcccagtccaaaacttcaagcttcaacacagcaatctggaacagcggaccacagataccaacacggcctccaggagcagcacggagttcttttgagggggtccaagccaagaaattgcaccactctttagttcacataccctgtcattgcagggaaccagggttatcctgttgctgggcagcgtgttccaggctgattgagtaggctccagtctgctgctgcacaacctgccaaccctactctgcaatgacttgttccctgtctcctgcagccttctctcccgtgtgtctccactatatccaattctgcctttctctaccctgcgtgcacggctccgttcctccctctttctcacctctccatctcatgcacattcacttgtcacgatggctttggaaactgccagacttgtcacacaggatacccaagcagctttgcatgcagatattcatggcaaagagtcattgatctggtttaaggtttctggtttggggcacactgtaactactggaccatcacagagacttgtctcatttatactgcagttatccagagtcagggtgatcttgtagctaagcagggtgtcaggggcagcatccttgcctgagctccaggctgctgtaaacttcctcttcagtatctgctaccctgaggttccgtgagcttgaccttcgtacttgtagcctccgggcagcacttctgccccatgttctctatctcctggtggagaaggcagcgcaggctgcagctgtagcagctccatgctagggaccggccaccaggcctagaaccagccctactccctgtaacaaacatttggttctggcagagcagctcctcagtgcgtttcagcaatcatagacagaatagatgttggggtggaccgacccaccaagctggatctgggcccgcgtgggcctctcctggggtaaaaacaaatttttataattaattttagagggcagctgcacatatgcacacacacaatcttttacattcccttggtcttaacttttttcacacccagcctattgctcacaatatggattccagatgaagggtggactcaaagaagccaagctgcaaagaatgtgcatgcgtagcccatgagaattctcactgcactttcaaacagtgttgaaaattatgttaaggaagctcaaatggagaatgcttttccctgtag

SEQ ID NO: 561 - DNA, 1200 bp, mus musculus
gacttaagagatgtgttcatcctgctatacaggtggtatggtgtcaattgtcaaatttatttatttttcttattagggtaccatgaaagctttacttaaaacttggtcagaattgtatagagcatttactcgctgtgcttctttggtggcaacagcagaagagaatctgtgctgtgaagaactttcttctaaaataatgtgcagtttggaagatgaagtcctttcagtgagtcgccccccccccaccttttttaaaaattggagatagacggtttattgacacttctgtatgagataagcacaagtcttaataaccttggaatgcctctttctcttaatgctaatcctagtctaagcttttcttaacagtaccttccttgtgctacatagagctcagctttcatgcagcctagttgccagttgttgagaagcacattgctgagtgtgtaactaggaagtacttatgaccatgtatttgtagcataaacagtaaaaatattatttgtgtgtcttgactgtagtactgtggctgtagtaaagttttctaagtataatattaaatttcttcctaggatttgctattcttggacaggatctctcatattattattgtaatggttgattgtatcgacttttcaccatataataagaaataccagccaaaaatcaaatgtaagtattgtctttacctttgttaatatggtatttcatagctgaaatttcagggaaaattcttacagctggcttttcttagtttactttataaacttaccagattattttgctaattaagcaaattttcaatgtagagaaatactgttagaattgtctacacatcttttggttagattctccaatgacagttatggctgggcgcactcctaaattctggcagttggcttggaggttggcctccattccagggctaggatcgggtagtgaatgagtaatgggtcagtcttggttggctacataaccggactcaatctcacaggcacaaaaccccaagcttgtttttgttttagtatattttccaaggcataggttttttttttttttctttcattcttttgtgtgtgtgtgtgtgtgtgtgtgtgtgtgtgtgtttgtgtgtgtgtgtatgtgtgtgtctgtgtgtgtctgtgtgtgtgtgtgtgtgtgtttgtgtgtgtgtgtatgtgtgtgtctgtgtgtgtctgt

SEQ ID NO: 562 - DNA, 1000 bp, mus musculus
tttaacaggcaattcataacagctttaaaaacagttctttaagaacttcctacaatgcactttgatcatattcacatttttctacatctccttcccgatctattcctcttttgctaccaacctttgtgtcctcttttaaagaacaaaacccagtggaatcaaaattgtagtgtccctgtatccttggacttgttgtggctttctgctagcacatgtttgatctagcaggaaacacactcttaaagaaaactgaccaatcatgccctgcagttatcaattgtcaataactcctcagctaggggtgagtccttgcacccacctccaccctccatgctgggacttcatctggcttgagctggcacaggtcttgtgcatgtttacacgattgtgagttcttatgtgcatcggtggtggtggtgcacacctttaatcccagcacttgggagacagaggcaggcgtatttctgagttccaggccagcctggtctacaaagtgagttccaggacagctagaactatacagagaaaccctcttgaaaaaaaccaaccaaccaaccaaccaaccaaccaaccaaccaaccaaccaaaaccccccaaaaaaacaaaacaacccccaccccccaacaacaacaacaaaaacctgttgtaagctggcccgcagcctacatgaaccgggtatttctggaaggcaggctggggctgaaagagacttagactgcgcgaaaagataatgaagtcaagacaaatgttctgatcaaggcccatgattttactcagagactgtgcctaaaaaggggaaagcccatccctgccaatccattcttggtgcctggagccagcctgcaggcgaagtgcaggataggatgtgtcttccgggatgtctaaagggtctctcagcaggtagcagagtatctgagaagggcagtggtagttgacataacaatatagccatctaagtggaaagctacaccccagttgatctcatattcactggcagcaa

SEQ ID NO: 563 - DNA, 1000 bp, mus musculus
cttcccttcccttccctttctttcttactgaatattttatgtgtttgcatttcaaatgttatcccccacctgttccccatctccctgctttggagagtgttccccctcccacctactcacttccacatcactgccctggcactgccccacactggggaatcgagccttcacaggaccaagggcctttcctcctattgattccagacaatgtcatactctgctacatatgcggctggagccatgggtccctcatgtgtactctttggttggtggtttagtccctgggagcttgcgggggaggtggttctggttggttgatgatgttcttcctatggggttgcaaactctttcagttccttgggtcctttctctaactcctacactgcagcttgtgctcagtcaaacggttggctggagcaccctcctctgtatttgtcaggctctggcaaagtctctcaggagtcagctatattaggatcctgccagcaagcacttctttacatccacaatcgtgtctgggaaaggacccccatttgggtcagtctctggatggcctttccttcagtctctgctccatactttgtctctgtatttcgtttagacaggagccattctgggttaaaaatttggagatgagtgggtggtcccattccccaatggaggctttgcctaacctctggatatagtctctacaggttctccctcccctttgttggttgggcatttcagctaatttcatccctgtcaggtcctgggagtctcttgctttcctgtcatctgggatatgctggtggttaacatcagttccccatcccccattactataaatctgtccagctccatctcctcctataccagatcctgctctcattccccccctttcttcctcccaagtccctccaaccctctacctcccatgactattttgttaccccttctcagaagcactgaaacatccacactttggtctgtttagctctgtaccccattttaaaatttg

SEQ ID NO: 564 - DNA, 1000 bp, mus musculus
ttttgccttgctttcatgcattcccaggtataatcaatattgcatgttaggcaattgtgtttaaattggtctgcttgagaacgttctgggaagtggctactgtcaaaatttagtatgtgcttactggcatttatttacatgtgtttctgatcctgtttttctgaactcaaacacccttacttggatcattgctctcttttcttcagtcatgaataaaagcacattgaaactgaaatagagttgtctacaacattagtctgtagttacccaattcttccaggttctcagataccaggtccagccggcaagatctgcaaaggccagataagaagagtggaccagagactgaaggaaaggtcatccagagactgccccacctggggacccatctcacatgcagacaccaaacccagacacgattgctgatgccaagcagtgcttgctgagaggagcctgttatagctgtttcctgagaggctttgctagatcctgagcaatacagatgcggatgctctcagccacccattgaacagcacagggagaccaatggaggagttaggggaaggactgaaggagctgaaggggtcttatctgggatcaatgggaggggaggaccttagtcctgtaaaaccttgatgccccagtgtagaagaattctaggtcggtgaggcgggagtgggtgggtggaaggcggagcaccctcacagaagcaggatcagagggataggataaggggtttgcagacgggaagccgagaaaggggataatgcttgaaatgcaaacaagtaaaatatctaatttaaaaagttcgctttaaaaaagttgacaagtggcacctgaatcagctactggaatgaaaagttgaaaatgaaaaccagcaccatatattgagttgttacaccatttcttaaaaagaagggtgctgcgaggtcaaagcccagctcaagtatgttgggttttaataacagaatataatccttgggttcctgaaaagggcagt

SEQ ID NO: 565 - DNA, 1000 bp, mus musculus
cagaagacatattcttgttttcagttttttagcaaggagaaaagtaattagaattatgcaaatgaaatgtcaggatacccatcctatgctatcaagggggaggtaaagtgtataattattaaataaagatagaacagttagtaaggcatagttgtcttttaagggaaaactataactttcattttggaaagactaaaatgcagtgttaactgaatagagaagatgtggtgacactacttaaaaactgaccaatatgatgacaatggctaatagggtgtatccaacggcagtaagtgtcacaaacgaggtgtgctatatcagaaacaagtaaataatttaattttctgttcattttgtcagttcctaccattagaacagaagatagtgcctatctaaaaatgctctcttagcattaatattttaatgatgaattaatatatggtatggtctgatttaaactatgttctcatggtcgtagaatttgtgtgatcatttctttataatttaaagaaatgaatgaattatttcatagaaagaggctttgaatttgttgttactcagcctggctttatttttttgatatttttattagatattttctttatttgcatttcctatgttataccttttcctcctttcccctctgaaaacccccctatcccatcccccacccccctgctcactaactcacccactcctgcttctctgtcctggcattcccctgcactgggaagatcaggggcttctcctctcattgatgtcctacaaggccattctctgctacatatgcagctggagccttgagtccctccatgtgtactctttggttgatggtttagtctgtgggtcctctgggggttggttcatattgtttttcctcctgaggggctgcaaaccccttcagctccttgggttctttctctaactcctccattgggaaccacatgcttactccagtggttggctgagagtatttgtcaggcactggccgagcctctca

SEQ ID NO: 566 - DNA, 1000 bp, mus musculus
gaaacaactttttttttctccttttttagttttttattattagatattttcttcatttacatttcaaatgctatccggaaaaccccctataccctttcccccacccctgccctgcttgccaacccacacactcccgctttctggctctggaattcccctgtactgtggcatataatcttcccaagacaagggcctctcctccagtgatggccgattaggtcatcttctgctacatatgcagctagagacacaagttctgggggtactggttagttcatattgttgttcctcctatcgggttgcagaccccttctgctccttgggtactttctctagctcctccattgggggccctgtgttccattcaatagatgactgtgagcatccacttctgtatttgccaggcactggcatagcctcacaaaagacagctatatcagggtcctgtaagcaaaatcttgctggcatatgtaatagtgtctaggtttggtgactgtttatgggatggattcccgggtggggcagtctctggatggtcctttgtttcatcccagatccaaactttgtctctgtatctccctccatgggtattttgttcccctcttcggcagatggatagatctggaagatatcatcctgagtgaggtaacctaatcacaaaagaaatcacatgatatgcactcactgataagtggatattagcccagaaacttcgaatacccaaggtacaatttgcaaaacacatgaaaatcaagaagacataagaccaaagtggatacttcgttcctccttacaatggggaacaaaatgcccatggaaggagtatggatagaaacaacttttgaaatctaatgtccttgttttgaagcccagcgttaccactgagaagcaagttgtgtactagttttcacattaagttacttagttaacaaataggagttctgtatcaagaacaggatcaggattatcagatcagttgcccacaaatcactagaaaagg

SEQ ID NO: 567 - DNA, 1400 bp, mus musculus
gcaaaaatgttaacagaactgtttaaaagtctgtcacaagcacaccgattttctcagaatgctaagttgattttctgatctaatattctgaatgtcacttaagcaaaattaaatatccttatgtaattattaactaaaaagtacaattttatgtatttaaaataattgttaaaatattctgtcattattaagtgattctgataggcttgtcaaagtgcagtagctcccatcaataaatgttctgagttaaaagttgaaagcaatgtccaaagtgaatttccactattttaaaatgaaaacttgtgaggaacagtgacatcagctcactaggaaaagatgctctagtatcactccagatcattttaaaatggttttgctgattacaaagtagtacatgttcagagtacaaacgataaaatgattatgaaagatagattgcttttgttgtaaattatgatcaagagagaaggggcattaagggaggtttctagttatagtaatacttgttttaaggaagatatgaaagcaacattgtaaaaaaatatttatttcatttcccttacacattgggtgtatagtttattttcttcaattttgatttttttttaatttaaaataaaatgtttgtttagttcatattgttgttcctcctatagggttgcagacccctttagctccttgggtactttctctagctcctccattgggggccctgtgttccatccaatagctgactgtgagcatccacttctgtgtttgtcaggccccggcatagcctcacaagagatggctatatcagggtcctttcagcaaaatcttgctgttgtgtgcaatggtgtcagcatttggaggctgattatgggatggattcccaggtatgacagtctctagatggttcatcctttcgtctcagctccaaactgtgcctctgtaattccttccatgggtgttttgaaccagtagccccggagcttgtgtctctagctgcatatctatcagaagatggcctagtcggccatcattgggaagagaggtcccttggtcttgcaaactttatatgcctcagtatgggggaacgccagggccaagaaatgggagtaggtgggtaggagagtggggcagggagagggtctaggtgacttttgggatagcatttgaaatgtaaatgaagaaaatacctaattaaaaaaataaattaaaaaaaatgtttggaacatctataaacctagtccgttcattccaaggtctagactgctatatgaatattagaatgcatattttattaaagtttagagttataaatttgatgttttcctttgaacactgtataatacatatctcatttatagtttataaaatatatttttgtcttctagatcacaaaattctataagtattag

SEQ ID NO: 568 - DNA, 1600 bp, mus musculus
gctgggattttcataatatggaatttttttttgacttttgattgtatgcggttctagttatcctcttcctatagttgctttctatcacattgaaaaagtgttccctaccataccatattctcttctttgcacattagtcttatttctatatgtagctcaagtagttctcatttctacaccaagtgtgtctatatttgtatgctcagttaaaatattcttccagtagaacatgtaactattatgtgaaatgaatgtttttacacttttattattaaattaacttactatgttccacagattggtgttacacccttcatgctcctgcatcagtcttttgagtgctagagttttaggtacgtggcaccatttagtaattttgcaacagtgaatatctgggagaaaagaatttgtttcattttcagacatatttggttcttgctattatctaaggtggaaatttcttgttttgttggagactcgggttataataatgttttgctggggcacataggtgaaagaatttttgctgaagccgacacaggtgaaaggatgtttttctatagcaaacacatgaaaggatgcatgatgtttagaaggaatataaatatgacccaacagacagtgggagctcaagtattggttcacattgctctgcctcactggacttcactgatgacaggtatggcttgatttgccttatattgcagagctttgcttgtggcaacttcatagagagaaacccaccaaaaacttcttgtgagattcctgtggcttcttgcctcttccattgactctctccgattggcgagcctcaggtttcttctggattaaactacccttgctgattcatgtgtggtgtctgctgagtggactagactgcaatggctgattcgtgtgtggtgtctgctgagtgggttgaactgcaggtgctgttcatgtttggtgtttgctagtggactgcgttgagaacaacaaagattggatttgcccccaaagaactatttctaaacaggtcctaattctttcccactaccttaagtaggtgctgggctaaaagagaggttgaactcttattaaagtaggttgtgaaaaacatatgcctacaattatcactcttaaaatgtaagtagatgtaaacgaaattatttagtttttgttttttaatcattatgcaaaatggataaacttacaatatatatgattctgtagtttttaccctattcactgttatccaaatctttttcgtacttcactctttattctcacagccttaaaggtgcatttcaatttgctctgttggaatgagaaagggctgcatgtgcaaagaaatagcttgccttatccaaatatttattctgtttatcattcaacaactgatttcttactctcttcaagagactaactggcttcattaaggcttaaacaagagtttcaaaaatctctataaaagtgggattgattagtcaaaacaaggaaaagaaaattagccttactcttttaaacattaacatctgagaaaattacttaataactccacatcaaaattttaatttacataatcaaactatggcagcattccacgagctattcatttacattt

SEQ ID NO: 569 - DNA, 1000 bp, mus musculus
ctttttttgaaaaattaaacaattttatttatgcacattccagtcattgccccctcagttgctactcacagttcttcactccattccttctcctccttgcctcctatagggcgcttccccccaccacaaggcctaccccttccctggggtctcaaggctcttgaggattaaatgcatcttctcccactgaggccagaccaggtagacatttgctacatatgttccagggaccttggaccagccagtgtatgttcctggttggtggctcagtctctaggagctcctggggtctgggttagttgagtctgctgggcttcctatggagtctctctccctttcagcttcttcaactcttcccctaatttaatcataggggtccccgacttcattccaatggttgagtaaaagtatctgcttctgtctcagtcagctgctagtaggatctctctgaggacagtcataccagactccaatctgtaagcacatcatagcatcatagtgttggggcttggtatcctccctgtgagatgtatcccaagttggacgggtcattggaccacctttccttcagtttttactccagttttgcccctgcatttcttttagacaggagccattctgggtcaggaattttgactgtgggttagtaaccccatccctccacttgaggacttatctttctattggaagtggacttttctattttcctttccccaatgatacatattttggctgaggtcactctcaatgcgtccagagagtgtctcactccccaggtctctggtattctctatagtgtgtagcccacctcccactccccaaggctgcttatttctaaattatcttgaccctctggggttctctcttgtctcacacccccatatatgatcccatttcccttttcccttcacccttccctctttcacccaggtccctccttcccttagcttacctctatcactctgtcacctttctaggtggggttgaaacctccttaggt

SEQ ID NO: 570 - DNA, 1400 bp, mus musculus
agtgtgagagagagacgacaggtacataagtgttgcctctccagttaccaaaattaccttctgtgtataatccacactaagcccttgtttgacagggcattttgttaatactgaacattctctgtgccagtcactttaataagcatgatagataaactctttcttttaatacttccctaagtccaatgagaccctcttatcctagaaatccattgtaaagatgttgaaaaccgtatctttggtaaatgaaacgacttactcaactcacagagatgtgctagcaattaaatccactgcatctgtttttagacatccagatacacaaactcttattttaatgttgacaacttctcattaacagaaccaattactaaaagggatcatactcatgtaaatatttgctaatgaccacaatttgttagtacttttaaagttcaatgctgttgcactgttagcaaccacatgctttgttgttctttattcatttatttatttatttattcattgctttccaatgctaaacaaagtattgtgaatgtgtaaaattcagacctttggatttaagacacattttccatgccaaactaaaaggaaaaaaaccactttattccttttcaaaaagagatgaaagagaataaatgtaatgggtgcctactgtctcctgcaggttcccatggcagcatagcaggctcaagagccatcagatgttggggatggggggggggcaggagaatgagagacagagaatggagggggttgatgctggttttcttgcatggaatcacatcagagagtatgtaggagctgaggcaatgtgatggaagggaactgaagcagaggaacaggtcgggtgggggctaggctttcatggtgtgtcctgatattcttacttctcatctccttgaccctgttttgatgatcagggacacgcctgtcctctgtcacatagtagctgagtttgttttcaatttcttccacgatgtttttcctgacttctttccttccttcatagctatgtaaacacttagggaatcaaaggcacacaaatctgctcatcccctctcatcttattgtaccttctcattgcttcctcttaaacagctgagaaaacccgtaacatagtactagcatgccattattataatggcaaaaactcgatcagatttctcagactggaggtttatactgagaatgtaattaagttgggaatagaaagggagactcttgtttcaaattgtttgaaataatagacaaatatatttgtgtacattgatacttctctttctgattttcttagtttacttattgattacataagtcataaaaacctggctataaacaaacactgtgacaaatgactctatttttaagtgctgatcaaaatcatatactgtttaaat

SEQ ID NO: 571 - DNA, 1400 bp, mus musculus
aatgttttacttaccaaagtaactacttaagcacataattattatttagtaaatatatataatacatcaatatgaattcaatttgttttagataatttcaggtatataacacataaatgtgtataaaacatacctatgccaccttttaataccaacaatgaattccaagtatttcattatttatattttgtatatattaccctagtacatagattcaaatgttttaatcttctttatttttctccgtttaatgaatgcgaatgtattttaaaagtttgtagcatccatttttccttttttattaattattttatttatttgcatgtcatatgtcgtccacctttctggttccccctccatgatatctctgccccattgctactcccctttgccttaaagagtaagcttactttcccccagagtccataatgatatttaagattgcatcgactctcacctcagccctctagcatcctacttctctaggcatcaattctccacaggactaagggtatcccttcccattgaggtcatataagacaatcctctgctacatatgtagcaggggaccatggaccagcctatgcatgctcattggttggtgacttagtctcttggagctgcgagggatccagttagttgatactgttgttctttctattgggttgcaattcccttcagctccttctgtccttctcctaactcttcataggtgtccctgagctcagtccaatagttggttgtaagtatcttcatctgtctcagtcaggtgctgatacagcttcctggaggacagctttgctagactcctgtctacaaacacagcatggcatcagcaattgtgtctgggtttggtgcctgtgcatgggatggatcccaagttggggtggtctctggatgacctttctttcagtctctgcttcatttttaaagataagtacattacttaatttagaatactgttcattttttctttgtgaaattataaagcttcatgtaaacattcacttttaaattattaatttgtaaaatatttactgactgttagcttcagacactggatagcaatgtagacagggatatagacgtgtactcggtccacttctaatcaagttcattattttccgccagagtccataattgacattcaagaacaatcaacagcacccatgcctaatgttgtatcttatttataacctgacaccattccttctttgttgtcacttttgattttgctgatgacccgtatcaactatattccttgtttttacccagtaaagttctgaatatcattgctttttataatgcccagattttgtttgcatgcagatatcattatagtgtgaaagtttataattttaagcttccataattggactttctgttgcatagctagtaag

SEQ ID NO: 572 - DNA, 1400 bp, mus musculus
ctgcttattaactatgtgtaagcaaatgaaagaatgcatgagtacatgatgttgtgcctggctctcagctgagcgcttcactttgcttctcaagtcatctaaataaccctgtaatttagattagattagattagattagattagattagattagattagattagattagattagattctgccatatctcagcacactaccaggtacattttctagagtatttgcaaactatgaggttcattctgtatagtgcaacagaaaatcatgagtttagacttataatttaaccattaaaaagcaaacatatccttgcagccccacagctcctgggctaatttgtgccacacacatcaatacaggactctgcatgtagcaggactatagactgagacatgagcctcagcagcagccttggcccaggaccaaggcctttgttggcatcacaagccacccagatcagattgtccactggtatcagtacagtctctggtcatgaacatggtctcaggaagctttgcagactattgacatccagaaggtctactgttacagtagaggccacagacaccagtatacaaccacattgggttttggtcctctgcaacatcaccatgtccccaggtggttgcagagattcctcatagctgcctgttcctcactgctgtccagtgtgtccagttctgtctctctccaaagtacataaaccactaggctttgcttcctctcccatctctccaccatttactccaccaatcccttctcttcatcatgaattgttcatcatagtggcacctgccatggggctaggctgggcacttggatgtctctcttctgggctgcccagaatatgtttgctttttaattgctttttaattcctgtgttcctgtcattgggggccagctctcccacaccacaccaccagattcagttctcccatgtcattcagacaagaggtatgaccaactctcctgagtaaggtagccagtgaggggcagggacagatcagtatactgcttatacctaaaacatggcctcaggtggtagccaagaccagggacatctgcgtggtaacatgggccacagatatcaatatagattctgtgttcaattggatcatggacccagatatgacccttggtggcagcatgggcccaaatgtcatggttgccttaagtggaaattcaggccactcagattactatggccctgtgagacaacatggtcctcagacatccacatggtttctgctggtactccagactatcgacatcagcatttgctaggctcctcatctgctgtgcagtgaccattggcaagggactacctttcccctgcagcccttcactgtgacagatgggagagctagccctgcctctcattagacatagagcacaagacag

SEQ ID NO: 573 - DNA, 1600 bp, mus musculus
aggcaattctttctttaccatgatagactattgctacttgccaggtctgtggttacaaaaataagacaagtcactaacccagctcatagtcagtactttcgggaaacaaagtaattgatgaaagtttatgccagctttcttctcctttgtattcagtccaacacctggaatcacattgcccatatttaagtaggttttcttaaatcaattaacacaatttagaaactctctcacaaacatattcagaggtttgtagcccaggttctgtcaaggtgacaatcagtgttaactatcacagcagctaaagagttgaaacaagtcaacaggaccccagctactgtttcttttgttaattttgttggctttctaaggccattggcatgtggagaagctgcgtacatgtgaagttgtccctcttctgataaaaagattggtcattgccatgaatttccttcttgagcccaagtagatatcctgataaagggtcttgtattttgcaatccgtttcttatgagagtgcttttaaaatagtttctcattcacactcatagttcagttaaaacatgagtttaccttacttcatgttttaagaaatagcatctgtattcagtcaccaaacccagacactattgtggatgccaacaattgcttgctgacaggagcctgatatagctgtctccagagaggctctgccagagcctgacaaaatatagaggtgattgctctcagccaactattggactgagcacagggtccccaatggaggagctagagaaaggaccaaaggagctgaaggtgtttgcagccccataggaggaacaacagtatgaacccccaaagctcccagggactaaaccaccaaccaaagagtatacatggagggacccatggctccagtggcatatgtagcaaaggatggccttgttggacatcagtggaggagaggtccttggtcctcagaaggctcaatgccccagtttagggaaatgccaggacagggaagcaggaatgggtgggttggtcaacgaggagtggtggtgggggtgctggggggatgtagtgggggggttggaggggaaacgagggaagaggataacatttgaaatgtatatttaaaataatctaataaaaaatggagataaaacaagatgcctaaaaataaaaacaagattgctgagctccctggaagaggttcaaatgaagtgaatcaggaagggaactataacatttggctctgtctgtatttggtgcagttgcttcaagtttcaagcttttgttatctgtcatacatgctgggggtgagttttgaaaatacagctatctttgaattatgtaagttacctctcatcatatagtcctataattattcccaaaccaaacaaaaatagacatatgtggtatccattctttgtttagttgtcagtctccttgcttggtgtggagacatttttttccacatcccctaaaaataaagtcacacaacagtccagtctcccactagatctccactagatctcccactaggtatcctagatctcccactctttatattttttaataagaattttaagctatgttctaagttaagtttaaatttaat

SEQ ID NO: 574 - DNA, 1600 bp, mus musculus
ttaagagcttattcttcaggtgactctgttagcctctatgagcagacctggagggtagcactctccttagtttcagtgggcagagtattctctgcaggcaagctctcttcttgcaaggcaggtacccagatatctggtgttcgaaccagactcctggcagaagttgtgttccactcactagaggtcttaggatcacgtgtggaatcctgtgtgggcccttgcgggtgtcacgcgactcagctggcaaggtagcccggggctcgagtctcgagtcgagcggaagggacttgtgccccagatcaggcccgggtagcctgcttccctatgtaccgcagtctcaagttccgcgcgattggattggggcaggcgctgtgttccactcaccagaggtcttagggtcccgtggggagtcccgtgtgggcccttgcgggtgttgggcaagactctgctggcaaggtagcccgggggtcgagtcgagtggaagggacttgtgccccagatcaggcctgggtagcctgcttccctatgtactgcagtctcaagttccgcgcgattggattggggcaggcgcttgttccactcaccagaggtcttagggtcccgtggggagtcccgtgtgggcccttgcgggtgttgggcaagactctgctggcaaggtagcccggggctcgagtctcgagtcgagcggaagctttccaactgtttttattcagaatttacaacttgtgtagtgtctgctgctgctgctgctgctgctgctgctgctgctgctgctgctgtttgtttaaattcagttctttgaacatctacctcatttggcgagcctctcaaagcatttcttcatcaatcctacaaggagtacacaggctatcatgacaggggcctaaatttatatatcacttaagctgtgtacttgtgtgtatgtgtgcatgtccatatccatgaatgtgtgtgtgagtgtgtgtgtatatgtgtatgaaatcttagacattgtacctaaactgagtctttcttcaaccttaatatatatatatttgccttgacatatgttatatatgtaaaatataacatacataatatttgccatcacacggcgatgagaaataccctgctcagtagctcaaatagccttccttcattattcttcttccttcctttttttcttccttttttatttccattttctttcctcgtaatttttttcttttattcagtatagttttttgattactaggtccgagcaccttagacacaaaatgtttttccaacttgaacatggacttagaattgaatattctcaagactgtagttctgaaacaaaatgctgattgaaccacatcaataaggatattctaattactacttatttgactgttatagaaaattcttgtcatttaatgttactgttttcagaattaatagtggtgacagaaattaatgctgccttgttttataccagaaaaccaagttttgtgtgggctgcttcctagtttaagcattaattcaatttctgaacaatgaaagcgttatgttataataatagaaaaaagtaatctatatcatgtaaaatcaaagtggaaattaacttccagagaacaat

SEQ ID NO: 575 - DNA, 1200 bp, mus musculus
tcctagttccttaagtagggtttctgtttgttcattttgatgttttgttttgtttttgcatgtctcttttctccttgtgtcagtctcagagttcacttactgctttgaacaacagttttctctcgtgccattgtaacagaatacctcgatgaaagcaacttagggagaaagaattctggcacacaattcaaggggacagtcaatctgagtggagcggtcaaggcaggagcttgaaacagctggtcacatgacatccccaatcaggaagcagagatcagcagatgcatgtgactgctcggctcccttcctccacttgaacaatccaagatcccagccggaaacagtgccgccacaggctcagagaatatgccaaggcaatctcccacaggcccgcccagaggcccatctactaagggctcctagagtctgccaagctgacaattaacacaccacactgattcatttggaaatatctcataagtcctcctacctttatttggttatcttttccttttcatctgaccaggcaattcttactgacctctctttacttccttgactcctgcttctgcttggctcaatgtctgttgacactttatttcattgtctttttttttcactcagtgcaatctttagcctagtaagttgattcttctttatgatgtctatctcttggtgagttctctttgttcctttattgtcttttatgatcttttattgttgttcttgttgtctgtgttcacttaaacatctgcgaggtcttgaaagccattatttcgcattattctgcttggttgtatgtggggtatagaactgtacatgtgtgtgtacgtacatgcgtgttgagttgagagactaatatctggtgtcactcttaatcatgtttcactttatatttctgagggtctctcactgaacctggggtcagccatccagctggactagctggccagggaaaactagggactgtcctgtctgtctccccagagctggcacatttctcttaagatagaaaccacttgacatgttgaaatcttatttttttatttgcctctttcatcattattttgattatacacattcatgtgttactgtgtgacaatttgatatgtgcttgtaatacatgatgatccgacgagagtagtcaacatttagagatgttatttttaaagaagaaaaattccaatactttaccccaaa

SEQ ID NO: 576 - DNA, 1000 bp, mus musculus
agaatagattccaacaagtaagttttaagaggaggattaggaatttggattcaagacaggtggggattttcatttaggagacaagacttaaattaacctttaaagagaaaagaagggggctggagagttggctgagcagttaagaaggctgactgttcttgaagaagatctgaaatttggatcacaacatccacatcagaaatgcttataactcaagttccaggggatgtatgacatcctctgacttctgtggatacatgttctcacatgcacaccccctacatacataattaaaaataaaataactcactaaaaaggaaagtaaggaaggaaagaagggctggcaagatggttcagtgggtaagactgaatgctgccaagcctgacaacctgagttccaatcccagaatctacatgttggaagtaaagaattaagctttttgacctacaacacacacacacacacacacacacacacacacacacacacacacacaccacattcctgtgaacaactgatttttgataaagaagcctaggcactaggaaaaggtcaccatcttcaacaaatggtgctggtctaactggatgtctgcatgtagaagaatgcaaataggtctgcacttatctccctgcacaaaactcactatctaatgatcaaagtgtcctaccccttagtcacacctccagcctatgaccttctaaacatttcacatatatttatttcagaaaagtatttttctaatttaacctttttaggaaattttccttcattttaattttggttgcttccaatgatgagtttgtttcctctttttttctggcaaaatattattctattttgtctgtatgcctatattaatacacgtcatatgcacatatcactatatatttctgtttctacaaccatggatacgttagttatttctgtatattggttactgtcaatatactgcagtgaacatgggcatccaggggatcttggattgttcatgaaaga

SEQ ID NO: 577 - DNA, 1000 bp, mus musculus
caatagaaagatgcacatgagaaagatgcatggtgcgtaggatttctaggtagtgaataggataaatggtcatcaactttgtattcttttttcctaaatatagggacacttttcttaaatatatacattcatatttattttacagatatatttcatcaagaacagatagtttttacattgccttttttgataataatgcaactaaaatctttaacctccgtgaaatatactcgggtggatttttttttttgctgtttttgttgagttagtgtgtgtgttcacacatatatgtgtttacatatgtatgtgtacattaacatgtggaagccagaagttgatatttgaagtttgtctcaatcacttttcaatatataaaaaaatatatatatatatcacatataaaatatattttcctatatacttatattccaatatatattatctcatcataatatatagttcttttttacagttttacattttaattttgaatgtgtgtgcaactgtgcatgtacatgtttgtgtgtgtgtgtgatttaatgacttagacttaaaatgatgtcagaagaaaagcaatttaaaatcaataagagggaaattgaaggtataattgtaatggtttaatggttttacatgtatgagagggccgtgtgtgtttgtgtgcgctcgcgcatgcgcacataagccaaggggggcgggatttgcaggtgtcagcattccatcacgcagatctagatattgaactaggtttttcaagtttgatctgctgagccttctcactggttcttctaccatatttttcatgtcttttactgaatctggagctcaacaaaccctctggatggccagaaatccataagggtcctcctgtctctgctctcctatcacaggggttacaggagtgtcctggttcacctggtttctctgtggatgctggagacctgacaagcttgtaaagtcatcttcccacccgctctgtggctacaattacagattaaag

SEQ ID NO: 578 - DNA, 1200 bp, mus musculus
gcacagtttacagaaacatggtcaatttatcagtgtattttctactgagaaaatggcagcctttccttcagtactctttaactgcccattgaccttatgttaggagttgggccccatgagcccttctctggtgagtaataaaatggtattggtttcggttttgtacagatttttgatttctgactggtcttggcaagaacccatggatgaggaaatcataggccctaagggagtatctactattgttgttttgctaaatgtcaaactgtctgttgattattttgtacccacgtgttagtataacactcagcctccaccagaagaattttgtccagtggtcagcagttaatacagagactcagaacttcctgaggggcagagaataattgattgtggtaagattccacattaacctgaaatctataccactccccttccccaaggctttagatatcccagagaagagaaaaattataaaactcagaaactggggaagagtattctgaaatggtacctttgcatatagactctagaatgttactggtgatatcagatcctgtgcaatttctatttgttattgtttgaggaagcactatactggtttgtactagctctgcaactaataaacgtcctccttatccctacttatcaatgcatcacatccactgagagtaccgagtctcctagtatcatatatgtgtataagggctcctcacagcctcttattagccttgcctgaaacccattaagaatgtgtgctggggctccccatctcctttcattatgtttcttaccaactgagcatgtatagggggcccctccccatctcccctcacccttgcatcctactcacaaagagtatataggggtcctccctgtcttccctcaccatcacatcctatatgctaagaataagacaataggatgaggtcctcctcatctcctctcactctcgcatacaatccactaagtgtataaaagaaagctgccatgttctctcaccatgacatccaagatactgcttattgcttgctgtcttgacaataataattttgaattgtgtgagatgggaccctattttagctttaatttgaatttctctcttcagctttataaatatatttattggctatttttatatcttttttaaaattaccattcattcagcctatttcccacttattggttggattttcttct

SEQ ID NO: 579 - DNA, 1200 bp, mus musculus
gaaaaacatttggaaacatattaccaaaaacaacctatgtgatgtaattcaaaatttaaatatttaaagcccaatgacccaatgtgcaagggaatacataaagatgtatatgtgagccaaatatcatattaagaaacataaatatcatcattcagtatgtccaattttgagctatatttatttatataaaactgttttgcttatgatatttaatttagagcttgttagttctttctcagttaatttgaaaatgaaaaccttcagttatcaattaatttaaagaataccaaatcccagtgacctatagctattgagccctttaaggtcctaaaatgaaaaatattgaaaaccactgcctccagtcatatacttatttaaattttatattcagtattatcatttgtgcatatgtgtgtgacaactttgtgaagaggattctatctaaatttacaaggcttatcaggcttggcatgcaacaagtctttttcctgttgaacaatttctatacttttcattagctggtatttgaagaaatatattgtatcaatcagagtaagaaaagacaattgtactgcacaaagagtgctaattatgtatgagacacgatcactagcactttcttcaaattgacttatttgctctactgtgtagttttaggaaggatgtactattatacttcataggctttgccagcactctaaagtgaatcaaaggctctttctgaactagaaaacatggaagacagatttaagccaaataaatctgccatcaatatttttgctatctcattcattgtgattgtgtgaatgttgatcatatagtgtctggttgccaagtcttgtaatccaagctgctagggggacaatggccataagaactcagggccagtctggattacagcgtgagttcagtaacacctgggctgagatccttcctcaaaataaagagtagaatgtagtcaacagttccctggcctaccatatgcagagaacgttgtatgttccatctcaagtactaataagaaaagcactgaatacagctatattcttaggatatcatgagtttagattctctactacttctaaggagacaactctcttattctttgtctcttgtaatcttactgtcccttctcctatgtccagggaccttagattttagggttgtattgatgcattcatttgggctggaatccacaag

SEQ ID NO: 580 - DNA, 1000 bp, mus musculus
tgttttatcatgttatattgttatttttttttttatccctaagaagccagtttgttttccttttgtaaattgattaattaattaattacatcccaaatgttgccccctcccagtaccactcacaaaagttcctccctccatctgagaggacagcacctcatctccccaacctggtgcatcaagtctttgcaggattaggcaaatcttttcccactgaggtctgtcatagtagtgctctattacatataagttgagggtctttgaccagcccatgtgtgctcatttgttgatggctcagtctctgggggctcctagaggtccaggttagctgactgttggtctttctgtgaagttgctatctcaatgagggcctttgatctcttttataactcttccatgggggtcctgacctctgtccaatgtttttctgtgggtatttgcatctgtatcaatcatctgctgggtagagcctttcagagggctgctatgctaggctgctgtctgcaagcatagcatagcatcattaatagtgtgaaaggctggtgcctgcccatggtatgggtctcaaattagtcagccactccttcagtctctggtccatctttgtccctgaatttcttctagacaggaccaatttggggtaaaaagttttttatgtgggttggtgttcccatccctccactgggggttctgcctggatacaagggatggtctcttcaggttccatattccatctgttggaaatttctgctaaggtcgccagcattgactcctgggagcttctacaatcccatgtctctgggacttcttaaagaatacccccatcactgacccctgacagctacatatttccatgtattcttctggccctgtaggactctctcctgtctctccacatgcctgatccttcccctccactcacccagacctcccatcacctactcagattcctctgtctctctacctcccatgattattttgttcccccttttaagtggaa

SEQ ID NO: 581 - DNA, 1400 bp, mus musculus
tacaaatcacaggccacatgaagctcaagaagaaggaagaccaaactgtggatgctgcagtccttagagggggggacaatatactcacaggaggtagagggtaggagggacttgggaggaagagaggagagggagggggaaaagtggggaaggctcagttatgggaggagacagggatgatatacagagagtcaggaaattggacagaagtgtatagccatgagggagagcaaactgagggtagccaccagaaaatcccagataccaagaaggcaagaggctcccaggacccaaaggggatgaaattagctgaaatgtcgaacaaaggggagggagaacctgtagagaccatatcataggttaagcaatgcccccagttgagagatggagctacccactcatctccaattttttaacccagaattgatcctgtctaaaggaaacatgggaacaacttgtgaagcagtaacagaaggaaaggccgtccagagacttccccacctggggatccatctcatatacaaataccaaacccagacactattgaggattccaagaagtgcttgctgttaggagcctaatacagctgtctcctgagaggctctgccagagccttacgaatacagatgtggatgctcacaaccatccattggactgagcatggggacccaaatgaaggtgttagggaaaggactgaaggagctgagggggtttccaaccccatagaaagaacaacaatatcaaccaaccagaacccttagatctcccagggactaaaccaccaaccaaagagtacacatggagaggcccatggctccagctgcatatgtagcagaggatggcctttgatctggcatcaatgggaggagaagcccttggtcctgtgaagactcgataccccaatgtaggggaatgccagggtggtcaggtgggagtgggtaggtgggtgggggaacaccctcagaggaacagggagaggaggggatgggataggagtttttgtggaatgtaaaccgggaaaggggataacatttgaaatgtaaataaataaaatattgaatttagaaaaaaataaagtcagccattattgtaatgggcctgtctttatgctatttagtctttttctcttgaaggtcttagcctttgtttgttgtatatatttagtggtttggttactatgttacataaggagtttattttctagtgctgactatttgtgttcattatgcctttattacttctgctggtgagaagatataaataatggagatggtattgtgggggtggcacggtgctcaagagggtgaggagcaataaatcctggcatgctctgcatagtccagtatggatgagggcaaagggtgactacctgtgtcccacccagctgtgtacatctatac

SEQ ID NO: 582 - DNA, 1600 bp, mus musculus
gtcaggtaggattgggagtgggggcatccatgtggagacagggggtagggaggaggtgtgggatgtggaacagttgtagggtggatcaggggtggggcaggaaatggaatatggtgtgtaaaaatgaatttaatttttttaaatgaagtgatttaagatagaaatgagagaaccgagcagaacatctttatgctcctctcttcatcttcacttctctcctagacatagggaagaacacttccaggagactgcacaacagagcaatggccccagggcactactccagctgcttcagcaaaaaacatcccatacatcttccttctgagcccagcagaggccactaaggactccagagtgctctccatgctgcaggacctcgggatcacctcaggaacacgggtgagtggaatgcaacatcagctccaaagaatcgtggagggtcttgtgccggcaggaacagggaaaaaggaaccccaccccgaccagaggctgggatctgttctcgttggggtcacccaccccatccccaccaccatcttccttctcagcccagcggaggccactaagggctccagagtgctctctacactggagatcacgggtgagtggaacgcaacatcagctccaaagaatcacagagggtcttgtgccagcaggaacagggacagaggaactctgcccaaccagagactgtgatccattccagttgaggccagcccctccatcttccttctgagcccagaggagggtgctaagggctccagagtgctctccacgctgcaggacctcgggatcacctcaggaacactggtgagtggaacggaataccagctccaaagaatcgagaagggtcttgtgccagcaggaacagggacaaaggaaccccgcccgaccagaggctgggatacattcaggtcagggccagcccaccatttgctgcgtgaaaccagccgagggcatctagggcaccagagtactctccacgccacaggacccctagcacaccaaggacctcctgatcatctgagagcacatgggtgatagaagcaacagagcttcttggtcacggtcccctcggaccttcatcctcagccaggaggcattgctgagacccagatccctgggcacattccttgccagaggagagttggcctacagggagggttctgaccccagaactcaggaggtggatcagagctccagactgctgggacacctgccctgcaagagaagagtttacctgcagagagtgctctgaacactggaactcaggtgagagttggacttccaggagctctgacagaggctaacaaaatcacaggaggatcaagctccaaccagagacagcttgatcattaacaccagagatttccagatggtgaaaggcaaatgtaagaatcttactaacagaaaccaaaaacactgggcatcatcagaacccagtatgtccaccacaacgagtcctggataccacagcacacccaaaaaacaagacacggatttaaaatcatatctcatgatggtggtagaagatttaaagaagggcattaataactcacttaaagaaatacaggagaacagtgctaaagaggtagaaacc

SEQ ID NO: 583 - DNA, 1600 bp, mus musculus
cactagcaagattttatcgaaaggacccagatgtagctgtctcttgtgagactatgccggggcctagcaaacacagaagtggatgctcacagtcagctattggatggatcacagggcccccaatggaggagctagagaaagtacccaaggagctaaagggatctgcaaccctataggtggaacaacattatgaactaaccagtaccccggagctcttgactctagctgcaaatgtatcaaaagatggcctagttggccatcactggaaagagaggcccattggtcatgcaaactgtatatgccccaatacaggggaatgccagagccaaaaaaaaaaaaatgggaatgagtgggcagggaagtgggcgggagggtatgggggacttttggcatagcattggaaatgtaattgaggaaaatatgtaatatttaaaataaataaataaataaataaataaataaataaataaataaatagaaccatatacttgctgttttatgaataaggctttgtaaacaatatatcatgaaaggagttatgtatacccagggctatgaatccctgaaaatattaccttccccacttgaaaaaaagttacttttatgaatactttaagatgtagatacacgtacagtagccatttgtattcccttctaagagtttcatttaaaagcgtgtgctttggttttccagctgtactggctagttttgtgtcaacttgacacaggctggagttatcacagagaaaggagcttcagttggggaaatgcctccatgagatccagctgtaaggcattttttcaattagtcatcaaggagggaggtccctttgtgggtggttccatctctgggctgatagtcttggttctataagagagcaggctgagcaagccaggggaagcaagccagtaagtaatatcccaccatggcctctgcatcagctcctgctccctgacctgcttgagttccagtcctgacttccttggtggtgaacaacagtacgaaagtgtaagctgaatataccctttcctccctaactggcttcttggtcatgatgttttgtccagaaatagaaaccctgactaagacaccagctctccataaactcatactatagctcacaaatgcaataatatccttaaggaactggatgttgttttcattcgttcttccaggcataatcaagaacgtaatcgaaactgtgcactgagccacttgctcccatctaaagtagagttttcatccattccaaagtgttccaacaagtttgtgtgaaggcaaaactcaaagtgtaaagagaaacatagactgaagaaaaaaattcccagttatcggtatctttcagaccaaaatttacaaaagggttttgtagttatttaatagtacaaagtgatatgctgattgcacagagtatgagctttcaaataataattgaacagaaataataaccattattaataataaagaaaagtatactgtgaccttctagcttcaatttaaactttaaatcattatttaaacatttaaaatgaaaatcaatatgtgtgtatacatagtataagtatatgctatatgtaatgtaaaacaacctatcctaca

SEQ ID NO: 584 - DNA, 1000 bp, mus musculus
gagggctccctattttgattcaaagattctttcaacctctgttttatggtatctaatctctcatctaatttctcagtgtcttctttctccaagtctgtctttttctgatttctcccgaagaggacatacaaaactgtaatcattgtcaaaatagccatttgtatgctgataaatgaaccaaaatcatatagagtccagatgcagagcgtcattgtgcttccctccatcatatatatgtgtgtgtgtgtgtgtgtgtgtgtgtgtgtgtgtatactaatcatgtatatatactcatcatatatactcatcatatgtatatatacatatatatgtatgtgtatatgtgtgtgtgtgtgtgtgtgtgtgtatacacacacttcaaattttctccataaggactttattttcttatattgcttccattttcttttattgttctttaaattcaataccttatctattaggctcttgggacctttcagtttgtactttgtgctgcattagccccaacccagctgttcagccagctcaggtctccttgttcagccttttgccagttctggccaggcctctccaattttccctacttctaagaagcttcaggacttcatccccggacatccccaatagtttctggcccttgtgtcctgccatgcttggttgtgccagaatctctcaccagacagagggctggagactcagtagacccagactaggctgctgttctccatcggcctcaatataagctgtgctttccagaatagcttgcagctcttgggagaaccgcagcccctgtttctatcagcactgagtgagtgtgccttcacaagccctagaaacttgaaagccatgttttgggggacagttttgggttatatctctacccggtaacttatcacagatagtttggttttatgcctcatgtaaggtgaggcaaaatgaagtacaaccaatttaagcttattcctaactagcttaaaaataaatgagactcagccta

SEQ ID NO: 585 - DNA, 1400 bp, mus musculus
gagttgatatagataagatcattcatgaaatgcaaatagctgtaactacaagaagaaacatatagtcaaaatagtcttttactttactgggcatattttggttgttcaaaacctgtgtttcctttatctgtaatcttcattccactaagctgatgctcttgatttattttaattttttttttggtatatcactgttaacatatgtcaaatacaaaggattaaatactaaaaaattctgatccagatcataaagcctaatagattttaacgtgatccagaaagctgtcccttaatggctttaccaggtattcgtatcttctgaagagtgttgtcctatctactacccagcttcagccacattggatccttggaagcatctcctagcagtgtgggaggttagtgatatttaataaatgatatttatttattattctgtggtcctttcgtgcacagaacatgctggggtttggccaacaggaagaagcatggaccagagttcagcttcagctaacccttctgcaaggttgattaacggattagattggcagtgaccacggaatttataatgtttcagtcccagagactaattaccatttttcttggacttatcccccttaactgccattccttgcccacctctttatctgatcttgtgactcacaagcaaaactttttaagttgcactaacataatagaccactggctctcatcaaccaagagacaaagagttaaacacctagggctagagcagcgattttctcattttaacccacctgcctacagtttctacgaatgtatttgaaaagtgtctataactttctttgttctgttacgataaaaaaaaaaaaaaccatcaaactgttactacattggaacatgactttggagtagcctaagtcagtgttgtgaggtaaagacacaagcagaaccaaggttagacttgagagtctgcatcaagccactcagagactgcctggcaagaaacacatcttacagagcagttcccaagaaatattacagggagtttttaaagaaaaagaaaacagaaaatgacatcctggttggcaggggaagcaaggaagcagtttaacaagagccaagaacattagctgttagctggggcatttcgacctaaggtttgtcactggacttttcagggtgggggtaaaaaaagcaaagatggcctcagctgagatacgttgccctgttacaactgtgttcctagtgtgatttttgggtcaggattaaactatctcttaactctttagaggtgagagttgcattttcacattgacagtttggatcaccattacccacattaaaacccagcagcaaggaggcagacacagacacagacacagacacagacacagacacagacacagacacagacacagaca

SEQ ID NO: 586 - DNA, 1200 bp, mus musculus
tacagagaccacagagggatgctccttgtggactcattactcagcttcctgctgctcatctggcttccactcattcatacacacacacacacacacacacacacacacacacacacacacacacacacacactgcccacggccaccttcccagggagtgggtacctccagtgggctggactacctatgtcagtaacaatcaagatgatttcccacaaacatagcaacaggccagttgatctgggcagtcccagaactgaggttcccatctcaggtgactcgaagcttggtgaagttgacagttaaaactaaggagtacaggtggcattaacaatgatgtatgaggacagagaggaaaaactgtcaatcctgtttggtgttctgagttcatataagtttgccagtcccatgtaatttgctagttgtaaaggagatcatcctatgataactgtataagaagccattttagtcacatagatggttgtgtaagaaaaattgtttttagagacagaaagtatccagggactgcgggggtggcagagtgggtaagtgcactgtacaagctgagagctgactgcccagcactgtcaaagctgggtgggcatggctctgcctgcctgtgtgctcactgaccagactgtctagctgaaacagtgagcttctgcttcattgagtgcccagtgtcatggggataaggtgcagacgatagagcaagtcccaagtccctgtgctgccacccacagctgcatgctcgtgtacacaccacccacaaaagggatacatggaataatagtagtattcctattagacttgacttttttttgttttttgtttttgttttttgttttttgtttgtttttttcgagacagggtttctctgtgtagccctggctgtcctggaactcactttgtagaccaggctggcctcgaactcagaaatccgcctgcctctgcctcccgagtgctgggattaaaggcgtgcgccaccacacccagctacgaataggaattcgtaagaaccaatgtgtaatttaaatggaatttaaatttaatgcatctaactaataaaagtggaaaattgaaaatgagttgacttacttctgctaatttctttaaatttgaggtattttctcctgattatatactaagctgttctgttttatttttaatttttttattgcttgccaacagtcttaaaata

SEQ ID NO: 587 - DNA, 1000 bp, mus musculus
ggtttgtggttttagtttatttacttatctgctcactgtttcttttttgatcttgtgtgtctcagattggtctcaaactcactgtgttgttgagaatgtcccaaacagtgggttcccctgctccatttcctgagtgctgggattatgggtgtgggccactactcccagtttatgtgaaagcacccacaggacctcttccatagcttcccagtgggtcagggtagatgaacccatttaagaaggatccatctgttcctttcctaggggctaaagcccaggaagactcagcacatactctgttgggcatagtagcaggagttgtgatactcaaaggatattttctcaagtatcttttatacccttaagtttcctgataaaccacgctgaagaaaagatgacacattttggttactctgtataaaaaaatatatcaaattgaagaaaaaatgtatctaataaatataaagaaaatagtatggaaaagttatgtccaatggttaataatgttacattgttttcctttcattttgaggtttttgttttgcattgtttctttgagacagcatcgcatgttaaccaagaaagccttgaagtcctgtttatatcccaagcactggaagtacaggcatgtgccaccacaccttgcttatattgttgattttattgtttgctgtgtttgccaatgtgctgaccagttttatgccaacttgaaataagctgagatcatttaggaacatagagcttcaattgagaaagtgtccctaccagagtggcctttaggcaagtctgtagggtattttcttgattgaagattgccataggaggacctaagcctactgtgggtggtgtcagtcccaaacaagttatccctggtgctgcaagaaagcagactgagcaagccatggagaagtgaaccagtaagcatcatttctctatggcctctgcttcagtttttgcctctagatacctatgctgagttcctgccctgacttcctttgat

SEQ ID NO: 588 - DNA, 1000 bp, mus musculus
tctgcctctgctcttggaatatagaactcttcagctctaggctttaaatagcaacggcccagctgcagtgactggcatgacatctctgcgctaagggtgttgggaccctgtgcccctagtgctatctaactccttacagccagccttctggaactccacgactagtgtctggagtgctcaccagccttgtgccagctgcagttgcagctccccacccctctcatctttcaacttttcaactgtggagtccttctagtatctgctgtccctactctccccagcatcaaccatagactctgcggttgcctactccctggggctctagctcctgtctagttgacagtgcctggagctgggctgggggaggggagtctaagatgtcccccagtaaccagctcaaacctgacccccccccccgatataaagactatggacagtagacaccaaagggggtttattggaacctaggtgacacaagctaaacaacgcactggatgaggcccggatgaaggtatcatacccttcacctactcaacgaatgagaagagggctacttatatgacttctagaaatcagtctttctgcttagctatgcagtctgcagtcgaaattctagacccgcccactccaggtgtcgtgagtgaatggggccctcctccctgactaggctgaagactgcacagacctcccgttgtaactgtgggtggaagaaattgttatggtgaaagtgaggcctcttggcagctttttggggtacctgaatctgctgccactgaagcaaaaacccttagaggtcagcagcctccatgatgtcatgtctttggttcttcccactgaactgaaatctctttggcagaagggtgggggtgcggtgggctcaggcttgagaggtgggggctgtcaccattgatggtttggaggctctcccagggggatcctccccctacagtggagaagactgttgcccctggcctgttctccaagagcagacaaagtcctt

SEQ ID NO: 589 - DNA, 1000 bp, mus musculus
accatgtgtgtgcctgatacccacagagttcagaaaagggtgctggatcccttggaactggaatggcggatagttgtgacccaccatgtgggtgctgggaaccaaacctagtctcctgcaagagcagcaagtactctgaactgtgacgccatctctccagcttcatttaacagcaacagagcaggcaggaaaggttcctttcctttgggcctggattcccatgcgttggctcagggactcagtgttgggagatcaggaagactggggtcagacaggggctgtggatggtggcggcagcgcttggctggatgctttgagcggtgatttgtgcactgaaggtgagctggcactctgcttccctgcgttcctcgtgacagcacttaactcttccaggacctttccttggcacaggctcaggttcacgtttgcctcagtctcttgtttcattttcacactctctcagtgtagttgcataagagtattaatacacacctcctatcacccctcttttggtaatctcttaaaacagtcttagaaagtgccctgagtattttatataatccactacatccattatcatgttgactgcaaagcaaaggctattcatcagatctagccatgacacctgacctagattgcctgccaacctctagtgacatgccacctcttacagccccatgttttcttcagactgccaggaatcacctcttgttctacacatgccacatagttgtatggctagaaagctagtctgttgccagaaggttaagtaaagaaaattaggaaatgtggtgtgtgtgtgtgtgtgtgtgtgtgtgtgtgtgtgtgtgtgtagatatgctcatttggaggtctgaggacaactttggatgtcagtctttaccttataccttgtttgaggcaaagtctctttgtttttgctactgggtgagccaagctagctggcctgcagtcctgcctctgcctccatcttgcctcagaagctctgggattgtcagta

SEQ ID NO: 590 - DNA, 1600 bp, mus musculus
ggttcatactgctgccatagcagagcccaggcacagaatcacaagagaaattctgtccatctctagagctgtctgaggagagaggcttcctggctgcctgcatgcttcttttgggagggtgtgtgtgtgcagcgaactttattgatgatattcaagagagtagggagggccccctaagtgcctcctgttattatgggggtctgggatggaatttgtgagggagattctcagtgttgggggctgagttgggacagggactcctcagcaactgagggcctctctcttgctctcagtgtccttgctggggtgggtggtccagggtttcttactccttggaggccacgtaggccatgaggtccaccaccctgttgctgtagccgtattcattgtcataccaggaaatgagcttgtcaaagttgtcattgagagcaatgtcagccccagcatcaaaggtggaagagtgggagttgctgttgaagtcacaggagacaacctgatcctcagtgtatcccaggatgcctttcagtgggcccttagatgcctacttcaccaccttcttgatgtcatcatacttggcaggtttctccaggcggcatgtgagatccgtaacagatacattggaggccggaaggccatgccagtgagcttcccattcagctctgggatgactttgcccacagccttggcagcacaagtggatgcagggatgatgttctgggcagccccatggccatcacaccacagctttccagaggggctatccacagtcttctgagtggcagcaatgacatggactgtggtcatgagcccttccacaatgccaaagttgtcattgatgaccttggcctggggtgggggtggggtctaagcagttggtggaaaagaatgcattgctgacaatcttgagtgagttgtcatatttcttgtggttcatacccatcacaaacatggggacatcggcagaaggggcagagaggatgacccttttggccccacccttcaagtgggccccggccttctccatggtggtgaagatacccatagactccattacatactcagcaccagcatcaccccatttgatgttagcagaatcttgctcttggaagatggtcatgggcttcccgttgatgacaagcttcccattctcagcgttgaatttgctaagggtggagtcagactggaacatatagactatgtagttgaggtcaataaaagggttgttgatggcaacagtctccactttgccatgtggagagcagacctcagccctggtaaccaggcacccagtacggccaaatctgttcacaccgaccttcacctcatctacgggacaaggctggcactgcacaaaatgatgtggctgcctctggaacagggaggagcagagagccctcatatgtttcttaaaatttaaaaacctagcatattgccctctatttaacttgtcctttatgttttaaaaaaccttttttgtagacaaatctgaccagaatatacatttatatataaaattccttactaataatgataaaaaataatagcaataaaaaataatagtgacgacaaccatgctgtgaatttgcacggagcacttggc

SEQ ID NO: 591 - DNA, 1000 bp, mus musculus
gtaaatcctgttggaaacgatggaaggctcagagtaaagtgaatgtaagctggggaatgagccgaggcctcgaaggaaacacatgcgtgtttggaagtcagggagcttggatgcgactgcgatagagccgcagatagcattggcgctgagagcagtcgtcaggcagcctttcaggagagagtggctgtgtgttctcagcacgtgcttagtctaggtatgcacagggaagactcttttattcaagtgtttatggaatcacatggaggacgcttcattggagtattgaattggaaaaaaagtggaaacaacatagctgtctgttaatcagaatggaaaagggttgctttagaaccatgcagcggaatgatggctcataactggtcaggtgagtgagtcagatacgcatgcgccctcaggatccacagccgtatgcctgagagacaaacagctgacgtcaaaaggcaatgcgccggaggatacacactctcagaacgcattcacgggaacttttaaagttcactaaatagttctattttttgttatgggcgtatatgtatacacacagctataaagttaggaaaaataattttctagctattggtgcctgggttagaaagcagggaggttaattagctctacgcagttttattttactttttaaaggtgtaaagcaagggagataaaaggcctggatagtgatatagggatctgtctattattttctgttgttttcagggtgttaaggatattccagagttgaagagaagggaccaaactcgaaccattagttattttaaatgtttcctaaaatggaaatttcacattctaaaacaatcctttgaaaataagaaagataggagtatttatttagctgggtggggttggcacacagctgtaatctcagaactcgggaggcagaggcaggtggatctctgagtctggggccagtctggtctacagtgtgagttccagaatagccatgactacacagagaaaccct

SEQ ID NO: 592 - DNA, 1200 bp, mus musculus
gtaagctactggtgtttatagtcttcatgaaatgatataagccattgagatccttttctttttatgcgtctttaggagctaagtccttacatatgtcaacagtcaggtcctgttggtgtgacattttagttagtgagttgagttgactctccaccttctctttcttaaacagagatgtgctcctgcatctatccgcctcatggacaaccagcagttccagtttggtgagtaaagtacagcagtttggaaatgtgctgttagcccagggtttccagaggacagtggcgcatgccatggcactgcccgtcacaggctcccagcctaaggagaactcagccttgtaagcgagggcagcaggggaggagggctgtgggcagcgcagggactgggcttgtggggatgctaggcttcattcacggagcttttccaaggtggaagaggaacgaacacaaggaaatgcttctgtaagaggctgcacgtgatctgcatctaaggggagatggaggtctgtgggagccgtctgccttaccaggcttgatcccctgttggcagagctggacttgtgagagcacagtagcatgacttagagcttttcagatgtttgtgtggtaattaacctgtctgcagtaggctttctctgtggagggggcgtcagtcatctttgcctcagaaagctctttctgacggtcttactcagggtgagttaggaggagctggactggaggtgaagcttcaggtggtgtaacatgagcgtggtgagtctgaagtgccctgagcagagtgacagccgaggaaaaggggcaggtcttcaggaccgccatccgcctgctgggtggcaagcttatcgaagactgagaacatctccaggcattaattggttgattggcagtggggttttggagttacagtggatttggggtgttgctggaatatttgtaaccatgccctggggtcggctatgatgtttttgtttgctttctttattggtatatagttattatgcattatattggctttcatactgagaatgtctttcaactatatcatattttgatcatatgccatatatccctcccctttggccatccccttttccccttaggctatagcatttttaattccttggtatccattgaagattctgtttgtatattctctaatggcttcatgattaagcaattaaaagagggattcttagca

SEQ ID NO: 593 - DNA, 1200 bp, mus musculus
taaaaaagttatcggctgccatgatttctggtgaaataattaataataattaaaataattaaattaaattaattaataacaaaataattaagaacaaaggactggcagatgctgccctctctgtcttgcaggtgtcctgttcacatagcacactttgagccagccatgactttgagctaacttatccatgcacttcattgcatttaattccaggctggcaaatttcactttggggcttttgttgagtcctctgaaagtcaacaatgtcacttcattttacaaaaatgtattgctaaagaactttcagagtcaccttgggatcataaggcgcatcttcccagcacttactgctaagggttagtatgcattctttattcctggctgtactttgagctgctatcaggacagtgtccctataattgacaaaaggcaaagataaaaaaaaaaaggggaaaagaaggctggtaaggaagggagattttccatttatcttgtgatacattctgcagcatgaaacacctctatctcttaaataaactttttgaaggcaggaaaagaaaacgttgcaagagaaagctttatgatcgggagcctggcctcccgctgtaggtgactctgtccttttggtgagcctgcatgccctttctttgtattaaatagaaggagagtgtaaggagcgatgatttgatttggtgtgttggttacagaaatggctctggcatctgttacttccactctgtgatccattacttctcttcagctaatggcaggagacatttgattaactgccgagatgtggacatgcaggggatccgaggcaggctgcgaagtctatcacacagctaaagctccgttacgtcttcatgtcacctgcttctctatctccagatagctggtggacgggcagctgcaaacctcacctcaggggcaggagaggctccacgtgttccaagaataactgagtgtttgtgcatctgggatatctacattataatagcccatcaataaagattttaaaccaaaaggtagtattccattttaggaactaattaagaataaatctctcctccaatgagaaaacatgcagttttagataaactgaaaaaggaagttaagaaatttcctttcttaattaaaagaaattattaaaataaatacttttatcatttctaaatactaatacaatatatagtttatgca

SEQ ID NO: 594 - DNA, 1000 bp, mus musculus
gccctccacattccctaggagaagaataagacatttacagccttttacctcgtcaattctaagataagacttaattcatactatgtctttgcaaagccagatcccattggacagatagctccacctttaagaaacaaagactctattctagctataattgtatcacattaacttgccagcctaccaattaatatccagccaaattaaagcttggtgtgtttctggcaggtttgtgacaccgtggcacaaacctacaattttaactaattatagaaattctgggcaggaagactttagaaatgatgctcagcttcatcctccttttaaatggtgaaaccaccctaaacccacagttctatcttccacttgatctggcagagaagggacagtttcccccaaggatgattattctctgtgcagttggagtatgaggtctctcatgtgtttcttccttttgcttgtgctagggtggaaacggaagaccttcatcacactaggcaagtgctctaccattgagctgtatccccagccctaactctttgtatctttgtgtaggaaaaaaaaaatgactgtctccattctacagagggggactaaggatcagtaaaaataaattgatctaggacaaagaaagtacattctagatttgggatctcacacacaaggtcttatctgattccagaaagtacggtttctgttatttccccaagctgatcagcagagctggctctgcaggctcaaagccctgacttacacacttctctttcgaattctacatttactgatactccaagaacaagttgaaattggacaaatcatggatttttagcatatcagctaagtcacagtaaatttcagccattctttctcttgtatcttgtgtgtgtgtgtgtgtgtgtgcgcacgcgcgcgcatgcgtccacacattttgctggtagaagaacctaggacccatgcatttcagaacagtgcgatccctgggttgtattacttactattc

SEQ ID NO: 595 - DNA, 1000 bp, mus musculus; identical to SEQ ID NO: 594

SEQ ID NO: 596 - DNA, 1000 bp, mus musculus
ctgaaatgtaaacctaaggggtgactgagtgtttttgatgataaagcaatttcaaacgagggagggataggtgaaaagatgacgctcatgctcagaaggctttgtgtatttgttatgacgtggctcttgggtcacattgcttggattcctcttgatcaccacagtgactgggatcttactctggatggcccctccccccttggctctttgtgcttgggatgctatctgaagtaattcagattgcacatacagcctatagtgtagaagatgggtagcagttttagcttgtttagaggaaaatgcattctcaaggggtcaaagggattaattattgttctgatgtatattttaggcaggctttatataacttgcaacatctccagagcagacaacgtatgacgggggtttccagactaggtgattgatggatgcatttgaatccactcttcaaagtatacaatggcatgcccttgtcctttgtcagaaaatctcttgctagacagagagtttgtaaggtttagagatcttataacctggtttggatagttaacaactaatactttccaggaggttcagtataacatgcttcctcccaaggccaggttatacccttctgaccagcaatttgcttcccagtattctagttcatggttttatgaattgatgattatgatggaggagcataactgaaatgtcttcaaattctcaaaatgtctaaataactacccaacatcaacagggtagagactgacttctttaaccctgggcctcaattttatcatgtgcggtgggtttaaaacaagtgacagattcagtgcaatccccatcaaaattccaactcaattcttcaaggaattagaaggagcaatttgcaaattcatctggaataacaagaaacctaggataacaaaaactcttctcaaggataaaagaacctctggtggaatcaccatgcctgacctaaagctttactacagagcaattgtgattaaaactgcat

SEQ ID NO: 597 - DNA, 1200 bp, mus musculus
atttttattatacacaactatttttttcctttggaagtgtagctttgtgctcaaaggaagtgttagtaatgtctagcagttctgatagcttcctgtgctctaaaatatatagtgaacatatcctgtgttccttctagaggtttgctcatagatattagggaaagaagagggtgggcagctttgcaagctgtagagccaattaggggcagtgtctgattctcacactgacattagctgggcctttgctgttcacagatcaggaaaagaagacctacaccagcatcccttgtgattctcaatgaacataattccccaggtaaagaggcatgatgtctttcctattgatgagatggagcggggctgtctaaagaggtccaaagagtatggcattgatgataagttccagattacggtttcagttagctaaagggataataaacaaaatcatgaatatatagtataagaattgcctccaccaacagccttccttttcttctagaccagtggttctcaacctttctaatgcagccacattttagtagagctcctcatgttgtggtgaccccaaccataaaattattttcattgctttttcacaactggaattttgcttctcttatgaatcataatgtaaatatctatgtcttatgatggtcttaggcaacccctgtgatcttgttttctgatcaaaagggtggagacccacagattgaaaaccattgttctagaatgacacactgctaagcacatagtgtgcaatgctttatcagcattggtttccatgtgtttctatggaatcttgttcaggccttattgataaagttagtaaaagttgcttaattaggttttgaggttcaagtttcagccctggagatgatcatgtaattgcagaatgtgattttatttatggtatgggaagggcgacatgccagcattggctgcagccttgctcctgatgtcatctctgaataatgcaattgaaaaggaaccagatcaattttcagtgctgcccatttgagagccattctgaacagttgcatccatttgtcgaggttttagtttccatttcctgtaaaaagtaaaactgtattattagtctcgataaagagctatggtctgtaatagacaaacattgtttacttactgagtggagtgattttcatcttacatttaatggcagccctggaaatataagtcaac

SEQ ID NO: 598 - DNA, 1400 bp, mus musculus
ccactggcatatttttgaaatatactttgtataagaactcatgtatttttgcaattgaattactatccttttatttccttaaaacaaactaatctgtgggcaagcaagacagctcaataggttaaggcacttgccaccaagtctgacacctctagtttgatctctggggcctacattgtagaaggaaagaagcaactctacaaattctcctctgacctacacacatgcaccacaaaatgtgtacacccacaagtatacacgcacaacaaacaaataagttcaataaaattacatacactgtgaaactaatgttagtaatgaaatttttaaaaaattaaaaatcgtaatatgtgtaaacttgatgatgaaacataccctctggtttatatagcttggtggtctatggtatcaccaaacatgcccattactcattacagctacagcgctacttccagacaggaagtagcctcacaaagccctttgagatacagctctttgtctacttcacaggtctgacagcaatgtacttttatgcacgtctaatgctttcgatttccttgtccacagtcgcagaatgcatcgcctaagcaaaggaagcagagtgtgtacacaccaccggccatgaaaggtactgctaggtaccacttcggggtgtcatgagtaatgggtgtagggactggcgggccattggtctgctgattatatgtgcttgtctctgctttgcttccagttaagggtggaggtcaggaagattttacctctctgaagctttgtttcatcatggaataaataggtacttgaagaattggtgacttggagagtctcagaatcttagaatgggaaaaaaaatcaattttcaaaataacgacgattttttttcttttacctttgtttatttttctcctttgaaaaaattatcctcaaatctctaattgttcttgttgattggcatgtgattattagtttgtttttttcccttaaggtaagcaaagcagaagtgcttggtctgcgtggaaatgtaatgtcaagaatcacctctctgccttgtgtcaggagcagatctactgaacccaattgagcaccaatttgctgtactcctaacggctgcccagatcacatcagagaatgctggctcagaggctggcgtcttcccagaacttctccccaaaattagaactgccaagtaacatttaagtgtatcagtatttcgacaaatactagttccaagaaaggcttcttttctttttcacacaaaaatgttcctgacacaaggcagtgactgttcaggccagtatctcccttccagcttggctccctggttgttggctcaaggttcatcacactgccctccagctctgattcagtgtggaagaagctggtggggaagcttagaggtccag

SEQ ID NO: 599 - DNA, 1200 bp, mus musculus
acagtaggtacttaattaaatcagttctcttggtgacatacaaaggttccctgaagtgggtcttttcttcaatacgatgaaaggtttagactgtgtggaaaaaaattaaagatatacacattaaaagaatccctcggtttgcttacaaagagaaataggaaatgctggctatggtggtgcatatctggaatgacagcattccggaggctgaagcagaagaatcacaagtcttagactagcctgggctacactgcggtttctagaccagcctgagatagaaggaaataaaatataacgatgtgcatgaccagttcagacctatagaaattaaggctttccagagagcagagggaaaatacattcctgcctccgatgccaccagtttgctctgcagcatctcttgctccagcatgtttagttgtggttcctgttaatttttagaaagcctcttctctagctttaaggctttgtcaaaacatctaatgtaggaaattagaaagcctagacccaggacattcagcagaaaaggcgttcgctatgcagatctgctcaccaaattcgatccctgaagcccactcaaagatggaagtagagaaatgacttcacaaagttgcttcctccatgtacataccttggcatgttcacacacccacaccataacaataaatagataaaagaaaatttaaagtagaaaattttttaaaagtttagagcattcaaagtgaggatcaagaagatagaatcttcttcccttcaagagtagtggcaagccaagcgtggtggtcctttcctgtggtccctgcacttaggtatctaaagcaggagaatgtgaggtcaaggccaacctggcctacggcccgagaaggggatggtttccagacaagcaaagtcaaggtaaattcccagaaatcaatgaataagtaactgcattgcatccaggacaaaacatctgggccatgagctgagtatttaacactggcttgctgccaaggagaaaaggaagagggctggctactgaacacctcctgaaatccctcccacagccttcaatccagttccatgttttacttgtagacctctctaaggagaaagaatgtgcaatgtaaggaaggatctgttagccaagtatccccaaagctttgctgttctcaagaacaatttgctagtccagtctgggaaagttacaaccccatttctgcc

SEQ ID NO: 600 - DNA, 1200 bp, mus musculus; identical to SEQ ID NO: 599

SEQ ID NO: 601 - DNA, 1000 bp, mus musculus
ttccctacccacacattcccatttttttggccctggcgttcctctgtactggggcatataaagtttgggtgtccaatgggcctctccagtgatggccaactaggccatcttttgatacatatgtagctagagtcaagagctccggggtactggttaattcataatgttgttgcacctacagggttgcagatctctttagctccttggatactttctctagctcctccattgggggccctgtgatccatccaatagctgactgtgagcatccacttatgtgtttgctaggccccggcctagtctcacaagagacagctatatctgggtcctttcagcaaaatcttgctagtgtatgcaatggtgtcagcgtttggaagctgattatggggtggatctctagatatggcagcctctagatggcccatccttttgtcacagctccaaactttgtctctgtaactccttccatgggtgttttgttcccaattctaagaaggggcacagtgtccacactttggtcttcattcttctagagtttcatgcatttggcaaattgtatcttatatcttgggtatcctaagttttgggctaatatctacttatcagtgagtacatactgtgtaagttcctttgtgattgagttacctcgctcaggatgatgccctccaggcccatccatttccctaggaatttcacaaattcattctttttaatagctgagtagtactccattgtgtaaatgtaccacattttctgtatccattcctctgttgaagggcatctgggttctttccagcttctggctattataaacaaggctgctatgaacatagtggagcatgtgttcttcttaccggttgggacatcttctggatatatgcccagaagaagtattgctggatcctccagtagtactatgtccaattttctaaggaaccgccagactgatttccagagtggttgtacaagcttgcaatcccaccaacaatgaaggagtgtt

SEQ ID NO: 602 - DNA, 1000 bp, mus musculus
gacatgtgctataggagagtgattgtagggaaggagaggtaggtggggaaaatctattcagttttactataagggaaaaaaaaaataacagtacagaatattagtggcttggcttcctctgcactaactacccaagactcatcttctcttatcattatcatttagatagtgtgtgtgtgtgtgtgtgtgtgtgtgtgtgtgtgtgtgtgtgtgtctgtgtttgtgtttccttgaacacactctcttgctgtgaatggatacagaaaatgtagtgcatttatacaatggagtaatactaaaaacaatgacttcatgaaattcttagcaaatggacagaagtagaaaatatcctgaatgaggtaaccaagtcacaaaagaacacacatggtacgcactcactaataagtggatattagttcaaaagttcagaatacccaagctacaattcacagactacatgaagctcaagaagaaggaagaccgaagtatggatgcttcttagaagggggaacaaaatactctagagaggaaatatggagacaaagtgtgaagcagagactgaaggaaaggccatccagagactgccccacctggggatacatcccatatacagctaccaaactcagacaatattgaggatgccaggaagtgattgctgacaggaacctgatagagctatctcctgagaagtggatacagatgtggatgtttgcagccaaccattggactgagtactgggtccccagtagaggaattagagaaaggactgaaggagctgaagggctttgcaatccatagagagaacaaaaatatcaatcaaccagacctcacagagctcccagggactaaaccgccaaccaaagagtgcacatggagggtcccatggctccagctgcatatgtagcagaggatggccttgtcaatggagagacatcaatgggagagtagggccttagtcctgtgatgacttgatgccagggcagtgaggtgggagtgggag

SEQ ID NO: 603 - DNA, 1600 bp, mus musculus
tctttggttacataatgacagagagttcaagggcagtctaaactacatgacttagtcctcagtgtctctctttctttctccctctctctctctctctctgtctctctctgagagagagagcgagagagagaacacacagagagaacacacacatagactaattcttcccttcgtttggtagaataccacacagatccttgagcttctcagcctcttacatgttaaagaagcatcacatatgtatgatgtttatttatatatgcatgcttatttgtatgtataagcatatatatatatatgtgtatgtgtatatatatatatatatacacacacacacacacacacacacatatatatatatgtgtgtgtgtatatatatatatataatcaaataaatccactcagtctaatatgaaacaaaactcctccagtgtcccaaatcaatcatgtctgacccaaggctaaaatcctgaggaaagaagatgccatgctacaaggctgcccctttctcctttctcgtttctcgtttctcgtttctcgtttctcgtttctcgtttctcgtttctcctttctcctttctcctttctcctttctcctttctcctttctcctttcctttctccttctctgtgaagggtcaggacttaagaagcgaataaggggaaagagagaagtcagtgccacatgtgagcgtccctcacaggatgctggataaatgctctgtgctttgacatcagccaaagcaaatacattccatggaggggaaaacaagaagctttggcaggcatgtcagagagccctacagtattcagacagcagctgtgcattcacagtggcacactgtgtccttcctgaacactctggttctctaatatatgcccaagacaccccccttcaggaatcaaaattttattttccccatgtgggtcaaactgcccaatagtcttcttgggcagtatagtttttaagaagtttctgaggctggagacatatcagctggtatggaaggcaagcttgaacttgaatttggatcctcaacatccaagggtatagtaacaaaacacctctaacccctgtgttggagaaatagacaggaggctccctggagctcactagccagctaaccttgctgagcacaggaaattcaggtgcagtaagaggacctgtctcaaagaaacagtgtggagaacaataaaggaaggcatctcacaccaacctttttttttccttgtatacaaccagagagagagagagagggatgaggagaggagaggagaggagaggagaggagagaagagaagagaggagaagagaggagaagagaggagaagagaggagaagagaggagaagagaggagaagagagaagagaggagaagagaggagaagaaaggagagaggaaggggcttcctggccagcggagttgcctgacaccctcaagggcccacacaggattctccacgggatcctaagacctctggtgagtggaacacagcaccggccacaatccaatcgcacagaacctgagactgcagtacatagggaagcagactacccgggcctgacccggggcaatggccccttccgctccactcgagccc

SEQ ID NO: 604 - DNA, 1000 bp, mus musculus
agactagtattcttttgcaagggcatcatcctcaatactcaaagaatatgctgtgctgggtctgacctattatcattccgatgttccagtttagccacttggaggtcaaactcatagtagatgaaggaaagagccacatttaagaaaacacataatctgatttaaaaacctcaatggggcctgagcatcggaggcagacatcttggttcctggactccaccgagagtattctgcacaggtgagagtgtggactacagaagctaacagcttatgggacaggcgggagccacagagctgctgaggcagccccctcttcgggctacagacatccggccaccttcccggccagaggataggtgtccacctggccagggagggctttacctgagcattggctgcagacatcttggttccgggactttgtggagactattctgcacaggtgagagtgtggactacagaagctaacagcttctgggacaggccgaagcaacacagcttctgggacagatcctgttttgggccttcatctttggccaggagatatctgtgcaccttccctgtaagaggaaagcttgcctgcagagagtactctgaccactgaaactcagaggaaagatctagtctcccaggtctgctgatagaggctaacagaatcacgagaggaacaatctctaaccagagacaactaaatcaactaaatccagagattaccagatggcaaaaggtaaatatagactcttactaacagaaaccaagaccactcaccatcatcagaacccagcactccgacctcgctcagttcagggcaccccaacacgcccgaaaagctagacccagatttaaaagcttatctcatgatgatggtagaggacatcaagaaggactttaataactcactcaaagaattacaggagaacactgctaaacaggtagaagaccttaaagaggaagcacaaaaatcccgtaaagaattggagaaaaacatgaccaaacaggt

SEQ ID NO: 605 - DNA, 1400 bp, mus musculus
ggttcattttttcctatgcatgtagagaaggttgagagtagtcatgaagacagccagaatgcaaaatggaattccatctataattttaaagaaatatttacaggaatggaaattcccatttgctaagagtatcatatatgtttggaagacacttacattaaggttaaggtttctgggttaagatgaacgattagaaagctttgtaggacactagtgctgaggacaacagcacactataaatataaagaatatataaagaatataaagaagaacctagggttgaagcgactcagtctcattttaaaattcggcaagagttcctctgagaatttagctggattataactcaaagaaactctggtccagacctgaggaatctgttgtacattaaatatatgtatgactaaatttaaagaccttgcctacattgttgattattatacatacatatatggtatttctaaagctgactgtgcatttatttagggtcagaccgaagagatggaatacaggccagccacagcaccagcatcccatccatgtcagagaaacagcaatggtgagagaaggccagaagccaggaaagtaagattaccaggaaaggcacacgtcagatccagaagttatagtggcagtgctataagataacctcagtgctagacagaaccttctggatagtgtttgcctctctcaagtgtttgctaaagcggctgatctcaaaagtcacagatattaaacatgaagggaatgagggagctgaaggggtttgcagccccatggaggaagcaacagtgtcaacaggccagaccctccagagctcccagagactggaccaccaaccaaagaatccatatggagggactcatggcactagttacatatgtggcagaggatggccttgttggccaacagtgggaggagaggcccttgagcccgaggatgttcaatgccccaatgtaggggaagtacaaggcagaaagactggaatgggggggtgggctaccctcacagagacacggggagggaagatgggataggggttttctgaagggaagacatggaaaggagaaaacatttgaaatgtaaagaaaatatatatccaatttaaaaaaagaaaagaaatgaattttttttccattttttattaggtatttagctcatttacatttccaatgctataccaaaagtcccccttacccacccacccccactcccctacccacccactccccccctttggccctggcgttcccctgtaccggggaacacaaagtctgcgtgtccaatgggcctctctttccagtgatggccgactaggccatcttttgatacatatgcagctagagtcaagagctcaggggtactggttagttcataatgttgttccacctatagggttg

SEQ ID NO: 606 - DNA, 1200 bp, mus musculus
ggatacccaaaccatgtattataaacacacacacacacacacacacacacacacacacacacacacacacacacacacacacaaacacacacacacaaatgaaattaaataataaatcctaaaagcaaaagtgatttaaagctaaatgtaattttataaaaattagtatattgcccttccagtcggcaccagtaccggatcacatgggcatggagccctcggacacccccaaggtccctagaggacttgccactcgatcttaggaccaccagtgagtagaacacaacttctgttccattccaattgcttgggacctgagacagcattagggaagcagaaaaccccgcctgacctgggtcacaagtcccttccggtccacaccagcaccgggtcaccttgggctcagagtcagaggacacccccaagggccctagaggacagcttctaaggcagaccccctttcgggattcagatatcaggcaccttccatgccagaggagaggtgtctgcccttcccgggagggctttgccagagcacctgggggagccatcttggttcccagatccccccaagactagtctgcgcaggtgagagtgtgaacaacagaagctaacagcttctgggataggcctaagtgacacatcttctgggtcaggccctgtttaggaccttcaccttctgccaggaggcaggtccgaacaccatatatctgtgcaccttccctgcaagaggagagcttacctgcagagaatactttgaccactgaaactcaggagaaaactagtctcctaggtgtgctgatagaggctaacggaatcactggaagaacaagctctaaccagagacaactataacaactaactccagagattaccagatgctgaaaggcaaatgtaagaatcttacaaacagaaaccaagaccactcaccatcatcagaacgcagcactctcacctcagccagtcctgggcacaccaacacacctgaaaagctagacgcggatttaaaagcacatctcttgatgatggtagaggacatcaaaaaggactttaataactcacttaaagaaatagaggagaacactgctaaagagttacaagtccttacagaaaaacaggaaaacacaaccaatcaggtgatggaaatgaacaaaaccatactagacctaaaaagggaagtagacacaataaagaacaccc

SEQ ID NO: 607 - DNA, 3600 bp, mus musculus
gttgaatttctttttcataattgcttaattgttttgtcatgaatttattattaacctaggcccatcagtggtatatctatgcaaaatagttgctcatgcttaaattaatatcagctataatataaaatcagctcctgaaaatagcagaatcagatctcaatcatgcaaatcaaaactaaatatatcattgtaaaaaatgtgaatattaaaaaatgcatggaaaaaaaatgccaggtatggtggcacatgcctttaatcccagcactcgggaggcggatttctgagtttgaggccagccttgtttacaaagtgagttccaggacagccaggagggctatacagagaaaccctgtctccaaaaaaccaaaaaaaaaaaaaaaacaaaaaaaaaaattaatggaaattcaggcaattcctagagcttaagtttgacccaaatgaactaccatttgccaatgtattaaaaccagcttcaatttacacatgtcttttcaactggaaagatagtttattaaatacacttttaaatttattccttacaaatttatacatgttcacaatgtgttttgattggtactccaccagattctttcttaatcatatcaccatgtctctccatcagcatcatgtttcttttattatttttattttagtattgaaattttagttttgaattagtgttgatctttgcttgttttaactttgatagtttgaattaatctagaaatttcctcctctacctttcttacctagaaaccctcacacataccctccttgttctctttcaaattcacaatctatcatttcatcaattggtgttataagcatatgtatacacacacacacacattcctaaatataacctgctttgtccacatgttacttgtatgtctatgttttcagtgctgaccattttggcattggatagccagtcagtttgcttttccctgggaaagaatatttttcctgctcctagcatttcttagttgtcttagttgtttcaagttctttgtgtagggatgaggccttatagtgtttccctcagccactttggatgtctgtcgttgttccccttgttcagcttatgcttaggcagtcctgatcaaaatgcaaacttgcgtatccaatggatacatgtataagacaactctgatacctaaggctcaggtaaaaaagtacaaaaaggggtacatagattgtgacagagaatttactgtaaaattgttcttcaaagtaatgttaaaagctgcatccacaaacttttatgaaattttttagtccactcagtccacttactgtcatgtaaggttctgtttcagtcttaaggctattaatatgaagttattttccttaagcctcaagctaataggtttataagtcttaacatttattattatcacattattttgtttgtaagcaccactgacttagagttgcttcaaaatttctaagtacatctgcttgacaacccacaatagttgtttatcactatttcttaatcataattaagcctgttacaagtgatataatgatattactaaatatttacttatcttttagaaaatataactatttttacaaaaaacaaagcagtttgcagatggtgttacacatggacgtccagatgaagaaaataaaacttttatgagttatgaatatttgcaagatgtagcagagaatataaagtttagtaatttgggtgccaattgttgaaccaatttgcatagaacagattttcaccgaagcatgaaagtacattggctgatttccaatgtgaactgatgtaaaatttacagctacatgttatttcaaatatataaaataacaagctactctgtgtgtaaatgtaacatagatataactcagtttcatatatgctataaatgttattatctgtgtagttttcatttaatattttatagacttcagtaatttattatgagtaaagataaatataattacagtttctttttgtcattttgtctttaacaatgtaactacagaggctttttttagcagaaagatcaacaagctacctttaaaccttccccaataaggccggagtacttttaataagtatacaccaatctatcttaatttttataagagtagaattaccttttaattaaatttatattaaatatgtatgagaggaattaaatttttgataggagaaaggcaatacatgtgaaggacattctaattgccaatgttttcaatgcaatagttattagaaaatataactaaaatgaaaaaagcttattaagaaacaagctgattaaaagtaataggattttgtataccttttcttaagatattttcctctaccactttatgatgagaatagattttgtatatgtaaatatatatgtatttttaagccttcagttttgaaacaaattattttattaaattccctgtaaaattccttccagtagtccaacagtgtcatgtttatcaggtcatgatccagaatgtactcttaggagaacagctgaaagtcacagatttattgaacttgagttacagaatgaccccttgttgtgttttacaataattattgaatccataaaaacacagtgtttagagactaagagcttctgacatttattttctgagaaaatttatggaaaaatcatttcattgattagtttataatgatgcagattgctaatgctaaatgggtgcatagaaaaacaatacaggaaaaaaacaagagaggactttaattacagagacacatggaacattaaaagtttagaataatttgcaaaagaaatatcatgctagtgtcagtgagttttacttgctttgggttaaggtagagacttacaaaaaaggatgagctctctagaaaggatgccgcacgatgctctgcagtggctgttccttgcctggcacaccaggatccctgtgagaagtagtggtgcccattttttatttactagcatcacagctgctctagtaataaccatttcaagactatatatatatatatatatatatatatatatatatatatatatatatatatatatatggagatatgctcatattgagactagatataacagtatagaaatggaaggtttactatttcatagaatttgaagtagaaattagtcaaagtggatttcctaaggctgggaacttggctgagtgatgagtatctgcttagcatgagcaagagcaaggccctggggagaaaggctgagtgacaagcaaaatgagattgaaagggagaatgagtgtgtgtgtgtgtgtgtgtgtgtgtgtgtgtgtgtgtgtgtaagagcgagagagagcgagagcaagagcgagagagagagagagagagagagagagagagagagagagagcgcttgaggtctttattcactcctaacttcctttaagcctgataataaaccacagacccattgccgtatttaatattaatttattgaaagttgaatgttaaccaataaaccatacaatacatagaatatattatgaaattaggacatataagtatatggattagtcaaatacgtttaatcggttccttcaccttgtattattactctatcattattactgaggttatgtttattatatact

SEQ ID NO: 608 - DNA, 1600 bp, mus musculus
taaagtgcaaaaccctgaacggtaagtcctggatgaaaaagtgtgcatgacacatttgattatttaaatgttcctgtactgacccagcacacatggctaagtgactactgaaagcaatgaatctctgagccggaagaaatctttacactttttaagttgttgctctaagtgatattaccacagatatgtaaaatcagttaaagcagaaagttggtatcaggagtgtggataccattaacacaattttttttgtctgtgtttcataagccatttaaactgttttgaggaataaatatggaaggttttagggatttgagctagtaaatccctgaaatgttataagcagaatataataggaagttctaaggagcatctaagaggtgagtacactaaaagatactcaaagaatgtaaatatttcagattttaatacaacattgcaagtcaaactgaaggccatttatgttatattccagaaaacaactaatccataagtggagtgcttcataattgtgagtaaaagcatttcttttgaactgatgaattaatttgtcaaacataaaaattataatttttaggtatgtgtttgtcaatgtgtgtgaaaaattgaatgccatggaaggagttgcagagacaaagttcggagcagaggctgaaggaaggaccatccagaaactgccccacctggggatccatgccatatacaaccaccaaacccagacactattgcagatgtcaacaagagtttgctgtcaggagcctgatacagctgtctcctgagaggctctgccagtgcctgactaacacagaagtggatgctcacagtcatcctttggatggagcacagagtccccagtgaaggagctagagaaagtagcaaggacctgatggtgtttgcagccccataggatgaacaacagtatgaactaaccagtaaccccagagctccctggaactaaactactaaccaaagaaaatgagtggtgggactcatggttctagctgcatatgtagaagaggatggcctagtttgtcatcaatgagagaagaagcccttggtcctgtgaaggttctatgccccagtatagaggaatgccttggccaggaagtgggagtgggtggattggggagcagggagaggagggagagaacaggggatttttggaggggaaactaggaaagaggataacatttgaaatgtaaataaagaaaatatctaataaaaattttaatttttaggtatgtgtttgtcaatatgtgtgaaaattaatagattagaaaggtacttcctcagacacatgtacttaacatgaaaacataaatgatgccttataatttataagaataaaaaaactatggcttgtttcttgataatataatttactgatgaactatttaatcataatgaattagctaaatgttaaacatagttttaattgaaatcatattaatatttaaattaataattatgttgtaaaattctatactactacgatttttttctcatatactacatcaagtcctaagacaagtaattttaactgtttcgagattaacttcaagttaaaatacttgaaatgtactttctacttatatagtat

SEQ ID NO: 609 - DNA, 1400 bp, mus musculus
tcttatattgggagtggcttacagcatgtatacacctatccttcagtcttgctgagtcgattaatgtttcctgtgtttatatcatttcattttagccttagatatagattttatttctttataactttgacttgatactggcacactatgacatctgctaatttaagtatttttattttcattttcaactccagtcattgcgaatatgtttttcaaatcttctctgtaaatgagaagccattcgaatacaccttttgcaatcacaagattaaaattcaaagggcccttaaactgtaacctttatagccttgggttagaatatatcttagttagggttttattgcggtgaacagacaccatgaccaaggcaagtcttataaaaaaaaaaaaaaacatttaattggggctggcttacagggtcagaggttcagtccattatcatcaaggtgggagcatagcagcatctaggcaggcatggcacaggcagagctgagagtcatttgtcttcatccaaaggctgctagtggaaaactgacttccaggcaatgagggtgagggtcttaagcccacactcacagtgaaacacctactccaaccaggtcacacctattccaacaaggctacacctccaaatggtgccactccctggtccaagaatatacaaaccatgacagtatagctctcaactgtcctcagaaaatctactttcttacaatagatggcaataaataaagaaatacatagttgttcaatattcacataaagtaaatagaaacttgaagaatatgtatatcaaaggaaatatttatgaagatgtaatctaaattttgaacatctatgcctcaaacacaatgacagccacatttgtaaaagaaaccttgctaaaacttaaattaatagtgggagacttcaacaacccatcaaccaattgacaggacatccagacaaaaactaaacagagaaacaaggaaactaatagaatcaagtggacctaacagacatctatagaatattttacccaaacacacaagaatgtaccttctcagcacttaatggatccttctccaaaactgactatatagtcagtcacaaagctagcctcaacagatacaagaaaattaaaataacaacttgtatcttatcataccaccatggattaaagttacacttaacaatagcataaacactggcaagcttacatactcttggaaattaaacaactcaatggtctctttgtcagggaaaaaatacagaaaggaatgaaaatgacagaacaaaatgctaaaattatgggacacaatgaaagcattactaagaggaaagttaatagaactaagttcctccataaagaaattaaaatgttctcatatccagaatttaacagtataccgggaactcta

SEQ ID NO: 610 - DNA, 1200 bp, mus musculus
acccctgagctcttgactctagctgcatatgtatcaaaagatggcctagtcggccatcactggaaagagaggcccattggacacgcagactttgtgtgccccggtacaggggaacgccagggccaaagggggggagtgggtgggtaggggagtgggggtgggtgggtaagggggacttttggtatagcattggaaatgtaaatgagctaaatacctaataaaaaatggaaaaaaaaaaaaaaaaaaaaaaaaaaagaaaacatccccaagggagagaagtatgtcgctgccaaaaacgttgagaagtatgtaaagcatgtttggacttcagacatagaggtatgaaatctggagtttgctctgctggttttcagtatttctttggtccagtattctcacgaagctacctttacttctttttggcatgctaatatatatcttctgctatttgtatgctggaaggatgtgatcagcttttttattttgattttacaggtggatacagttgaaaacttgccatgagtctcagaccagattttgaactttgtactttcaagcagtgttgagatttatagactatggagacttttgaagttggactaaatacgtttttatgggtatagaactatggggacttggtagtggaatgtggtagtttaaataaggatagccctcatccactcatagatttgaatgcttagtcatcagggagtggcactcctttagaaggattaggaagtgaagccttgttgaggtgggggtggtcttttctaaggaagtacgtcattaggggcaggggaggggcagttacactcagaagccctagacaggcccagtacctcattgtttcttcctggtacctacagatccagaggaagaactctcagctccttcttcagtatcatgtctaccagcatgcagtcatgacctctaccatgatgataatggaccaagcctctaaaactataagcaaacctcaaataaatactgtcttttccgagagttgtcatgttcatggtttctcctttccacaatagaacactgactaagacaactaacatacaaaactataaggaatcttgctagtatgagtgtcccaaaactgcagtcagagactttaacctttttttttttcttgcttgctactcctgtgagaggtacagatgtggaagagttttctatgcaccagggaaaatgtgc

SEQ ID NO: 611 - DNA, 1000 bp, mus musculus
aatgttgagcagagactgaaggaaaggtcatccagagactgccccacctgggaatttatcccatatacagtcacttttgtggatgctaacaagtgcttgctaacaggagcctgatatagctgtctcctgagagattttaccagtgcctgactcatacagaggtggatgctctcaacccacttttggactgagcacagggtcctcgatgaaagagctagagaaaggatccaaggagatgcaggggtttgcaaccctataggaggaacaacaatatgaactaaccagtacccctcagagctcccagggactataccaccaaccaaagattacacatggagggacccatggctgcagccacatatgtaacagaggatggccttgtcattcatcaatgtgaggagaggcccttggtcctgtgaaggctcaatgccccagtgtagggagtgccaggacagggaaacagcagtggatgggctggtgaacaaggaaagtggggatgggatagggagtttttggaaggataaccaggaaaggacataacatttgaaatataaataaagaaaatatctaataaaaaacatattaaatcacaactaacttaaattacaaaattcctcatcttcatgaattttatttactctgatagaaatataattttaaaaattcaggcaaaacatttctacaagtattactcaaagcttttgttttctttttaagagcactgggagttgttattcattgatctcacacttcaagaaacctgccaagactaaccacaaaaatctgtcagttgaagctgatattaaagagaataccctgaagttatctgaacttcccttttaatctcttctgggaaagagaggaggcacgcacggagggtagaggccaaacgcttcccacactctgatggtacacggccaatattctgacacaagttaataaatgtaatagcatagctagactgacaagaattggtacctgcaatacctgcccacaaatg

SEQ ID NO: 612 - DNA, 1200 bp, mus musculus
tcaatgaacttctccatgactggatttatgaaaaacaaaacaaacacaggcaagaggttgtcttagtatgggttccaaatgcaatctacattttaaaaatgatatttttatttatatgttgaaaatgcttaatatattgtttcaagcttgtataacaagtcataatcaaaaggcacagatatataaataaacagttttatctaggtagtagatagatggaaggaggggactggatgggagaggggatggagatgggaacagggcagggggatcattgtagggggaactgaggagagacaacagaattcagtgacaggtgagcagatgaacacacaggcgacaggggtggggggatctataggacgtgccagagaccccagcaggggaagctccagggagtttatgggggttactctagctcagactcctagcagtgggggagcctgaagtggcctcctcctataagcagatcagattcccagtagaaggataaagacaccaacccacctgcaaaactttcaacccaaaatgtgtccttctacaaaatgtacagggacaaagatgcagcaaagaggaaggaatggtcaaccaatggctggcccaacttgagacccatcccatggaaaagatccaatccatggtaatattaatgatactctgctatgcttgcatacaagagcctagcatacctgtcctctgagaggctccacccagcagctaatggaaacaaatgcagagtcccacagccagacagagcttggaaagtcttatgggatagttggaagaaggattaaggagatagggactccacaagaagaccaacagtctactagtctgcatccttgggggttcccagagactgaaccaccaactaaacagcatatgtgggttagacctagttgcccccaaagatatgtagcagatgggcagcttggtctttatgagggtgccccaaaaactggagtgggggctgtctctggctctgctgtctgcctcattcccctaacttggctaccttgtctggcctccagaggagagaatatgcctaattctgcagtgacttgatgtgccaaagtgggttgatacccagggagagccttgcccttctcagagtagaagagggaagaacacaggaggggattaggagatggggggttgcaatcaagatgtaaatcaatgaaaaaaaatggaaatttgcca

SEQ ID NO: 613 - DNA, 1000 bp, mus musculus
attccccaaacacaacattctacccgacactgctcttatttttgttgttatctactagatttcagcctcggagctctaaaaaggcatcttagtgagagttatctgagcagttgccaagtcatcttggcggcaataaccaaagaattagtctgcgaatagctccactttctagctttccgtcatcgcgccgtccttagtgatctggaaaacatgctccgagggaaaaggctgcgctttccacttgagtgcctcattcagtggagcaggcagatcaacccctgtctctgtccagattacagaagcaagtttgtgtgataatcatccatctcttagtggacacttgttctctccacaagactcaaccgtatccagtctatggggtcatttaactcatggctgtcacctgctcttacaagcacttctctgagtgtccctgacaatggtcacaagcaatggactggggcaatggagcaatcgctccttttgccctggatcttttaggttagtcatagatggaccatgggtgggtaactagatagcaccatggcaacataactgaaagtcaacctagattgtgtctcatattggtagatgcagttgttaagatgattccaggggaagtacactgacttgtatccctttttatgacattgattcttctcacacttcttctgactgattatcctgcaagtgtttgtttacatctaacccatttaaatgcatgtttttattaaaatgcattccatattaatcaactagtactcttaagcaagtgatctttctgatcttaacttactggcaactgaatgagccactatgaaacacagtaagtagttttctttcaaatttggggatagagcaagtcagtgaagggggttcagcgaagcagtgaaggctcttcctgagtacaatccccacgtgtcctgtggcttgtttgaaagacactcatcaggtttgaagaagctaccatttactctcaacggagtctgtaatcacaacg

SEQ ID NO: 614 - DNA, 1000 bp, mus musculus
gaagggtcatagtttgtgtcactatcaaagcagaaagaaaggcgtctactccagttccaggtctactaggtcaggagtggaagagaagatagagcttttaatagtcacagtgtcctcaaggagaggccaggtctcagtaagaaggtgaaggaaatgctgctggaagatcaacacaaagcaaaatgtactgatgagaaaagttgagtttcagtctccatgaagtgactgaagggaaggggaagagggtgaaagataagctcattacatgtgataaagctgtaccctggcaggattggagagttggtgcacggaagtgatgtactagtcttagatttaagaagatgactgatatggatagggatgaagatcatacatagcctgagatataatctgtgttaagagatgggggcaggaggagacataaagattattttagactcaacgttcactcttcccttagacatagcaagatgaggtaggttggatttaagtaactgtcattgggctgaattcagggctatggctctctactgttgaacaaggctttgtttctgattaagtactttggagaggtttacttctcatttgaaattttctcctcagcattttttgcagctcttctgcaaggcacctgtgattggttctacctagttcccagatcatcatgtcacctgtctaggtaggctcagtataaaagccagctgcaactgagttaaattcctggcttattttacaaccttcttaaccctcttcaccatgtctctttttggcattttctctatcacttaacgacctgtggatggcaaataattttcttctatttatatgtgtggatactaggaagaaaagatagatgttgctgcctagttttcagcatcagatgactcctgcatttgtgagtggatgacctgctggggaactgcaaagtctaaccacaaaggaaaataacttaggccaggagaacctccataggaaaggctttggtttgagtttgcaattc

SEQ ID NO: 615 - DNA, 1200 bp, mus musculus
cttttccatccaagtacatacctcttttggattgcttgcaattttgaaattttatttattgaatgtaattcccatttatttaccataatggatcaagctaaattctaattttatctaatcctaggtgagatttcctagtggaatggaacaatataatgatacagtgactgagttcatcctggtaggattcacaacaaaccctgtcatgcagctggttctgcttgttatttttcttgctgtgtatgcattaactgtgttaggaaacagcaccctcattgtgttgatctgcaatgactctaggctccatacacccatgtatttcttcattggaaatctgtcttttctggatcttggattgtccacagtctatacaccaaagatcttagtgacctgcatctctgaagataaaagcatctccttttctggctgtgtggctcagttcttcttctctgctggacttgggtatactgagtgttatctgttggctgccatggcttatgaccgctatgtcgctatctcaaagccactgctttattcccaagccatgtccttaaagctatgtgcatttttagttggagtctcatatttgggtggtttaattaactctttcataatcaccaaagacacatttgccttgactttctgcaatgataatgtaattgatgactttttctgtgatatcccacccctggtaaagctctcatgtggcaaaaagaagagctttcagtctgtgttattcttccttttgacttccaatgtcatcatccccattgtgttcatcctggccacctatctcttcatcattgccactatcttgaggatccgctccactcagggccgcctcaaggccttctccacctgctcctcccacctcatctctgtgaccttgtactatggctccattctctacatctatgctcggccccggtccagctactctttagatagagacaaaattgtttcaaccttttacacagtggttttccccatgttgaatcccctgatctatagtctgaggaataaggatgtgaaagaggctttgagtaaactgttcaaataatcacaaccgtattctaaaaataaaagaggcaaagatgagtttgattcagagattgtatgtatagtaatgcttcccccattgtccatcatgcttatgaattattatagttttagttattctacgtaaacatttgaggatga

SEQ ID NO: 616 - DNA, 1000 bp, mus musculus
tgttgaaacaactttgtctgaatctaaagaatatctggtacggggacgagagtagatgtagagaatggagccatagtacaaagtcacagagatgaggtgggaggaacaggtagagaaggccttcatgcgaccctgggtggaacggattctcaagatagtggcaattatgaaaatataggaggctaggattagagcaatgggtatcattacattggaggtcagtaggaagtacataagggtctggtatccttccttgccaccacaagccagattcaccaaaggaagcaagtcacaaaaaaagtcatcaatgacattgtcattacagaaatcaaaggtaaaagttttcttggtgatgatggaagagttaataaagccacccatataagacgctgctacaaaaaatgcacataatttcatagaaatggcctgagaataaatcagtggctttgagatggccacatagcggtcataagccatagcagccagcaggtaacactcactgtagtccagtcccgcagagaagaagaactgagccacacagctagcaaaggatatgctcttattttcagagatacatatggctaagatctttggcgtatagacattagacaaccagagatccagaaaagacagatttccaatgaagaaatacatgggtgtgtggagcctggagtcattgcagatcaacacaataagagtaatgtttcctaacacactcaatgtgtacataatgagaaacatcacaaacaggaccaattgtgtggtagggtcagaggtgaatcccaagaggatgaactcagatactgtgtggtttcctctctccatggttgtaaagactcttatcttagaagacaaaacagagaattgttttccaatgattgtgctgaaaaaacatattaaatgggtaaatcagacattctcctggtaatcatgaaagtcttacatgcaacacttgaaagattcatttagaaataaattttatttagtagccaaataaaac

SEQ ID NO: 617 - DNA, 1200 bp, mus musculus
ttaatcacttttaataaagacagttatgtcagagcaaatgcttttgattctgatcttaatatttcaaatttttgtaagaatttgtgtttatcaaaaacctatgagtgtatttccattttttttgttacatttgttagtatttgtatcatctgtactctacattcatagaaattaattcaatgatctaacagttcttgtattccaacacagatggtcaggagtggaaaaggaatccaaaataagaatgccacagaagtgacagaatttatccttttgggtctctcagacaatccagacttgcaaggtgtcctctttgcattattcctgatcatctacacgatgacactggtgggtaatttgggcatgatggccctgattaagattgaccgcagtctgcacacacctatgtacttctttctcagcagcctttcttttgttgatgcctcttattcttcttctgtcacccccaagatgctagtgaacctcatggctgaggataagagcatttctttcaatggatgtgctacccagttctttttcttcggttccttcttgggaactgaatgcttcctgctagccatgatggcctatgaccgctatgcagccatctggaatcccctgctatacccagttctcatgtctgggagaatttgtttcatgttggtgtctacttcattcttagcaggctttggcaatgcagccatccacacagggatgactttcagactgtccttttgtggctctaataagatcaatcatttctattgtgacaccccacccctgctcaaactctcttgctctgacactcacattaatggcattgtgatcatggccttctccagtttcaatgtcatcagttgtgttctgattgttttgatatcttacttgtgcatcctcattgccatactgaagatgccttcagcagagggaagacacaaagccttctccacctgtgcctcccacctcatggctgttaccatcttttttggaacaattcttttcatgtacttgcgccctacctctagctactctatggaacaggacaaagttgtctctgtgttttatacagtagtcattccaatgcttaatcctctcatctatagtttaaaaaataaagatgttaagaaagcagtgaagaaaatcttacataattatgtggtttgaggcaagggtatatattttcaccctatgttagttgta

SEQ ID NO: 618 - DNA, 1200 bp, mus musculus
tttttgactctgaatttaatatctcactattttataagaatgtgtgtttatcaaaactccatgtgtgtatttctgttttattccttacatttgttagtattacatcatctgtactctacattaatagaaattaattcaatgttctaacagttcttgtgttgcagcacagatggtccgaaccatgaaaggaatccaagataagaatgcaacagaagtgacagaatttatccttttgggcctctcagagaatccagacctacaaggtgttctctttgcattattcctgatcatctacacgatgacactggtgggtaatttgggcatgatggccctgattaagattgaccgcagtctgcacacacctatgtacttctttctcagcagcctctcttgttgatgcctcttcctcttctacagtcacccctaaaatgctgctgaaccttgtggctgaggataagagcatttctttcaatggatgtgctacccagtttttcttctttggctccttcttgggaactgaatgcttcctgctagccatgatggcctatgaccgctatgcagccatctggaatcccttgctatacccagttctcatgtctgggagcatttgtttcatgttggtgtctacttcattcctagcaggctttggcaatgcagccatccacacagggatgactttcagactgtccttttgtggctctaataagatcaatcatttctattgtgacaccccacccctgctcaaactctcttgctctgacatccatatcaatggcattgtgatcatggccttctccagttttactgttctcatctgtgttctgattgttctgatttcttacctgtgcatcctcattgccatactgaagatgccttctgcagagggaagacacaaagccttctccacctgcgcctcacacctcatggctgttaccatcttttttggttcaattctctttatgtacttgcgacctactactagctactctatggagcaggacaaaattgtctctgtgttttatacagtagtgattcccatgcttaatcctctcatctacagtttaaaaaatagagatgtgaaagaggcagtaaaaaaaatcttacagaaacacattctataaagctgtgttttccatcctctgttatgctggatataatagatttataaatatgctacttgatttcttaagtttttttcta

SEQ ID NO: 619 - DNA, 1200 bp, mus musculus
tgaagcaatatctcaatttaaactataagaattttgtggagctaaatgcaactattttggaaatatcatatggcagttacaattgtcacatattattacttaatactgaataatgcagtcttcatagattcttaaatactctatgaaaggcattttttacctctttgttccttaaactataaatcaaggggttaagcatggggatcactaaagtataaaacacagatgctgctttgtcatattcaaatgagtgagcagatttaggctgaacatacatgaagagtagagaaccgtagaacacaaccaccactgtcagatgggaaccacaagtggagaaagcttttttcctaccttctgcagaacgcatttgaaatatggttaacaaaattagcatgtaagacaaaagaacaacaacaagagaagagattaaattgaaggctgaaaacaatatagtcaataattctgtctcttctacatgtgaacagatcaaaggtagtaaggggacaacatcacaatagaaatggcttatgatattagcaccacagaagcttaatgtgaaatacctaatagggaacagcagagcctggaagatactgtagagatatggaattccaataagcacttgacagcgtctctgagacattatagcactatagagcagagggttgcagatagccacatagcggtcataggccatggaggacaagattgaaagttcactgacaatgaacagaatgaagcatgccatttgtgtggcacaagcataataggtgatgttgtttttatccacaacaaaattcaccagcatcttggggcagatggcagtggaatttccaagatcaatgaaagcaaggtgtctgatgaaaaagtacataggggtttgtaggcgagagtccagtttggtcaaaatgatcatgccgaggtttcccaccacggtgattgcatagatagtgaggaagactgcaaacagtgggagtttcagctcagcagtctgtgtgactcccatcaggatgaactcagttggcattgttatatttggttgccccattggatgttccaaaattaactcttcttgaagaaacaattaggatttattagatttctttcattgccatataaacttcgtactagtcacagttagatcggttaaatattttattcaaaactagacaacactagtaatttttacatattttaaga

SEQ ID NO: 620 - DNA, 1000 bp, mus musculus
actaaagtataaaacacagatgctgctttgtcatattcaaatgagtgagcagatttaggctgaacatacatgaagagtagagaaccatagaacacaaccaccactgtcagatgggaaccacaagtggagaaagcttttttcctaccttctgcagaacgcattcgaaatatggttaacaaaattagcatgtaagacaaaagaacaacaacaagagaagagattaaattgaaggctgaaaacagtatagtcaataattctgtctcctctacatgtgaacagatcaaaggtagtaaggggacaacatcacaatagaaatggcttataacattagcaccacagaagcttaatgtgaaatacctaatagggaacagcagagcctggaagatactgtagagatatggaattccaatgagcacttgacagcgtctctgagacattatagcactatagagcagagggttgcagatagccacatagcggtcataggccatggaggacaagattgaaagttcactgacaatgaacagaatgaagcatgccatctgtgtggcacaagcataataggtgatggtgtttttatccacaacaaaattcaccagcatcttggggcagatggcagtggaatttccaagatcaatgaaagcaaggtgtctgatgaaaaagtacataggggtttgtaggcgagagtccagtttggtcaaaatgatcatgccgaggtttcccaccacggtgattgcatagatagcaaggaagactgcaaacagtgggagtttcagctcagcactctgtgtgactcccatcaggatgaactcagttggcattgttatatttggttgccccattggatgatctaaaattaactcttcttgaagaaacaattaggatttattagatttctttcattgccatataaacttcgtactattcacagtttgatcagttaaatattttattcaaaactagacaacacaagtaatttttacatattttaagaaaataa

SEQ ID NO: 621 - DNA, 1600 bp, mus musculus
tgtgatttgtgatgcccagcagtgtgaattaggttatcactgtgatttatggctcttcctcttagctaatcagactaattttctacatacaacattgtataatcaatccattacctagtttaccaactattacttggaagttttttttttttataaactaacaggtaacaaaactcttatttttttaatatgtaaaatttcatcttgaatacacatatataacacacttgtacatgacttaataacagaaatagacacagacatacaagaatggctttaaactagatttgtgttacaaaataatattatttaatgtctatagatatgtggttttgccatcttggaggtatatctatcatcatatcaggtgacagcaacacagttaaagtgtgacttattctacttcattaaatattctgacattaaaattaggtagtggatgttttactagtttcaaggttcaataattaatatcctttacaatataatgttaaaattttcacaatgttttgatccataattatatctctgtggcctttcttaacataacaaaagtttggtaagtgtttctgttttaaaaattaatctttcactgacatagaattattattattagatcatatatttatacacaaaatagatcgattttaaagatttaaactgttctagtaaaataggagtgtattaatatttaagggaagaattgtgggaagccgcaaacgccattacaagatggcgctagctaccactggccacagcccatgattatgggtaaacaaccaatgtgcgcatgtgcataagagtttttttgctgagtcactccctggcccaacgcatatgaggtactggtagcataaccaattaggtatggacacgtcactcctaggcctatataagcagcaccatttctgggctcagggtctctttcgcctatgcagtcaatgctctcccaataaacatgtgcagaaggatcttgttgcagcgtccattcttgctggcgagtcgggcgctcacaaagaatattgttttaaattgtacctatattttgagctatcaaatttctctgttaataagaaagtaatgtgtttgcaagacaacatgtgtttcaaagagcttattatcaatgtcaatatttctcattttataagtttgtatgttgtatacaaacaccagagcaagaaaagaaaatgttttaagaagacatttacaatgaatattgggtgtggaaaaacatcttcctgctctactagcacaagatcagtcccttatgatacagaacacagtgcataaaaccttgtgcatggagatagcacttgcggtaatataatagacatcacgatgaaaattttaagaaaacagcagatcaaaatattgaacaatacacttccatgttgttttaatagaaaaagaaaagaaataaaaaacagtggttaagagaggtgaacatattagtctctttagaaagaacaatgaaatctacttgttaacatcttgtttaaaggtgatttcattttatgagtacttttgtggccataaaataaaatttgcaaaatgtaatttctaatatgttgtctatattgtttattaatcttgtggccct

SEQ ID NO: 622 - DNA, 1200 bp, mus musculus
agagagagagagagagagagagagagagagagagagagagagagagagagactattttaaaggagtttggaaatcagatatctttagtcacccaggcagtggactagagttctgcaaagtctagtctaatgaatctccattaatcttgtcatctaggctttctattcagtttacaggatacatctcaagcacttcttccaattttgctgcctagtcggtcaaaccactgcatctccttcaaccagcttactgatatccaacagggcttgttgtgcaggataaagccacaggtatcttccttgtgatttgtaacttctcccaccattcagatctcccacattcttttctgggtctatccagggactcttcttgactttttccatacattcaacttctgtaactgaccatgtctagtgcatgtctcacatgctaaagtatatgttgaagaaaaaaacatttcaaaattttctctctgctaactctctaaggcaggtccactcaggaaatcacagtcctcagaagaggcagagcttctgagacaaggttgtacaggcctacatctgcacccaggaggaatgggctgaaactcagccctctgtgcaccttctccactaaaggagatcttgcctcgaggaagtgtctgaccctggaattcaggagagatcgccattttctctctggtggctctctaagacaagtgcacttaggagagcataggcctcagaagcaacagagcttctgggacagggacctatgcacttacacctacacccaggagctagggctgttctgcagccctctgtgcgctggtcttgccaggagagagctggcgtcccaggagtggcaacacatgcttacactctgacaggaggaacaagctccagccagagacagcaagaacatctaacaccagagattccagattgcaaaaggcaaatacaagaattttgccaacagaaaccaagactacttgccatcattagaacccaatactcccaacacagtgagtcctgaatgccccaacacacctgaaaaataagaattggatttaaaaatcatatctcatgatgcagatagaggatttcgagaaggacattaataattcccttaagaaagtacaggagaacacagtagaagtgcttaaattggaaacacaaaaatcccttaaagtatcacaggaaaacacagtaaacaggtaga

SEQ ID NO: 623 - DNA, 1000 bp, mus musculus
ctgtttagcagtgttctcctgtatttctttaagtgagttattaaagtccttgatgtcctctaccatcatcatgagatatgcttttaaatctgggtcgatctttttgggtgtgttgggatgcccaggtctttgtggggtgggagtgctgcgttctgatgatggtgagtgggtgggtttctgttagtaagattcttacgtttgccttttgccatctggtcatctctggagttagttgttatagttgtctctagttagagcttgttcctcaggtgattaatttagcctctatcagctgacctggaagactagctctctcctgagtttcagtggtctgagtactctctgcaggcaaactctcctccttcaggaaaggtgccctgctatctggtgtttgaacctgcctcctggcagaagttttgttccactcaccagaggtcctaagattccgtggagagtcctctggggaccttgggggtgtccgcagactttgctcccaaggtgcccctgtgctggtgctgactggaatggacttgtgaccctgctcaggccgggttttctgcttccctaattaatgcagtctcgggtccagcaaaattggattgaagcagaagttctgttccactcaccagaggtcctaagatccagtggagagtcctgctgggaccttgggggtgtccggagatgctgtgcccaaggtgccccggtgctctatttactaatcttaactcattgtgaccttcaaaaacaataaagcccatagctcagcatattcacactgttacttataacttactttcactgtctgtctttgtacctttggctctctctatatataatctctatcatctatctattacctatcatctatctatctatctatctatctatctatctatctatctatttatctatctatttatctatctactatctatctatctatctatctatctatctatctatctattatctgtctatgtcatttacttacctgcttttt

SEQ ID NO: 624 - DNA, 1000 bp, mus musculus
ccaacccatcaactctctctttctagccttggcactctcctacactgaggcatataaccttcacaggaccaagggcctctcctcacattgatgatcaactaggccatcctctgctacatatgctgctggagccatgagttctgccatgtgtactctttggttggcgatttggtccctgggagttctgaaggtactggttacttcatattgttgttcctcctacacagctgcaaacctattccattccttgggtcctttctctagctccttcattggggaccctgagctcagtccaatggatggctgtgagcatccacttctaaatttgtgaggcactggcaaatcctctcaggatgtgaggagccggtgtagcagcagtcccaagatggcgctcgggactgcagccaagtcttatgacttgcacctgacttcctcatacacctgaaaataagccacgaccatcctgagaactgcacaggtgcaccatgatgcaagatcggaccatatgaagagtgatgattctggccaatggactgctgttacctggactgggctgatggggcatggttgagagcttataaagcggattgcgattgggggaggagatagatatagagagattcctaaagagattgattcctggagagagatttttcctgcatgcatgttgaaaggttcctgaataaactgctttgagaagaatgctgtgtcgttgttcctttctgctggtcagaatcagaggcgacatcaggagacatctatatcaggctcctgtcagcaagctcttcttggcatccacaatagtgtctgggtttgatgactgtatatgggctagatccccaggtggggcagtctctgtatggtcattccttcagtttctgctcttaactttgtctctgtaactccttccatggatattttgttcccccttttaagaaggaccgaagttttcacactttggtcttccttcctcttgagtttcatgttttgtgaattgtat

SEQ ID NO: 625 - DNA, 1000 bp, mus musculus
agtggctctgggcttccttggtgctggcacccaggaggggacagttgatgacgttctcatggtccactaaatccaggtcccttggtggctcttctgtaaacacatccagtgaagccccagcacactgaccagactgcagggcacgcaacaggaacagggcaccttcatccacaatgcctccttgagcacagttcaccactcacacacctttcttgcactgagcaaagtgctgttattcagcaagcctgtggtggagggcaagagtggggtatggacagtaatgaagtcacagagatgccagatctcctcctgcggcaactgctgaacacaaaaggaggctgtggcttcaggagaaatgatggggtcatagcctacagttttcattccaaaggactgtattcccatggccacctgtcttctgattctacctaggccaagaattcccagtgtcttcccgttcagttctgtccccatgaacttctggtcccatttgccatctttcatcgaagcagtcacctggggaatctgcctggccaggcacatgatcattccacagatgagctccacagcattgatgctgtttccgtgggggtgttcatgactaaaatactcttccttgtggcagcctccagatccacattgtccacgccggtaccagccctgcctaccacctggaacttctctgctacattgatgacaccagcagtgaccttagtagctgactgaacgataagtcttcacagtcctggagttcagctataagttcctcctttgctcgtttggcttctccaccacctgcagccctccatcttgcatgatcatccggcagcaggggtccaggctgtcactgaacagtacattgcacagatttgctaagggcattgctagagtcaggccttagaatcaattgctctgggtggacagaagcacatagttcaggaaactgcaggcatggctggctccggtgactgggccaggaaattttaattgtacaggattt

SEQ ID NO: 626 - DNA, 1000 bp, mus musculus
atgattatccttctgggaaatggcatcatcattctaatcacaaaggttgaacccactctgcaaacccccatgtactttttcatcagcaacttttctttcctagaaatttgttatgtttctgtcactcttcctagaatgcttatggatctcttcacactgaaaggaaatatttcctttcttgcctgtgctacacaaatgtgtctattcctgatcctgggggctactgaatgcttcctcctggctgtgatgtcctatgaccgctatgtggccatctgcaaccctctgctctatcctgtagtcatgagttccaaggtgtgtacccagttagtagttggttcctgggtcattggtgttcccattcaggtggggcagacatatcagattttgtctctgcccttctgtgaatctaaccaaattaaccatttcttctgtgacatacctccactactcaagttggcatgtgggaacatctttgtgaatgaacttgtggtctttatttttgctgtattgatcgtcactatcccattcatgttaatacttgcatcttacagcaggatcatctcaactatcttgaagttaccatcaaacacaggaaggacaaaagccttttctacctgctcttcccaccttatagttgtgtttttattctatggatcagctagtatcacctatttaaaacctaagtccaataagtttgaggggacagacaaacttctctctctgttttacaccattttgactccaatgttcaatcccttgatatatagcctgaggaacaaggatgtcacaggggcactgaaaaaattatttaccagattgttagcattgtgagtcaattaaagccaattaaaatatctaattttttgaacatttaatttgaacacaatttcatctcttaaatgagtaaataaattgataatatattgttttcataatggactctattcttcaaacataactgcaagctcattaacattgatttgcttttaaacatcagtgt

SEQ ID NO: 627 - DNA, 1200 bp, mus musculus
ctgaaagctattttctgaagtatcttggtttctagcagatggatgctttgttggtgttttttatcctgggtcacagagatccttgtgcttagaagcatttttctatcacatctgatgagtaaccattttctaaagaatttaaattcgttataagcaatattgtgaaaggaaacagacatttccacaaataaatatagttaaatagttaaaataaattatacatgggtgacattaatataactacagaaagttcaactgagagcccttgacacaaaagatcagatggaaaagctttgaaatagttttgacaaattttggcctctttaaaaatcaacctgcacctgcacatgcaccacatacttagtaacacacacacagacacccacacagacacacacagacacacacagacacacacagagacatacacacagacacacaaacagacacccacagagacacacacagagacatacacacagacacacacacagacacccacacagacatacacagacacacacagagacatacacacagacacatacacagacacccacacagacacacacagagacatacacacagacacacacacacacacagacacacacaaaaatacattgtacacatacaaaaatataaaatcagagtctgtgtatgtgatcaaattaaattattatcaatatgatgtaaatatggcaaaatccagaaggaaaccaaaggcaaaaaatggcattctttacataagtggcatataagaaagatctattttataccatactgatcaaaccttacaaaaattagtaaaagtgaaagaattgaaaaagaaatttggcccgaggtaccttgccagcagaggtgctcaacacccgcaagggaccacacaggattccccacgggatcctaagacctctggtgagtggaacacagcccctgccccaatccaatctcgcggaacctgagactgcagtaaatagggaagcggactacccgggcctgacctggggcacaagccccttccgctccactcgagccccgaggtaccttgccagcagagactcgcccaacacctgcaaggtcccacacaggattccacacggaatcctaagacctctagtgagtggaacacaactcctgccaagagtccagttcgaacacgagatatctgggtaccttccctgcaagaagagagcttgc

SEQ ID NO: 628 - DNA, 1200 bp, mus musculus
gatgctttaatgaccaaattattatggtgatttattaactaagaaaatatgtaattatagttttaaagcaatgggatttaaagttttcattattacgaagacaaaaatctaaaatgtgtactctcagaaatgcatacaaaaactacatagactaaaagcaaaagtgatatatatttgtgatttaatattttccacagatgaatcatgaagagctagagtccataaacaatgtttccacagtgatacagtttgtgctcataggattttctgacctgcccaacctccaaggatttctatttgcagtgttttctgtagtttatattattatcttgattggaaatttcctcataatcataataatcagtacggaccaagcattacagaaaccaatgtatttttttctggcaaatttttcctctctggaaatctgttatgtatcagtgactgtcccaaggattctgttcaacattgggacacagaaccgaagcatttcactgatgtcctgtgctacacaactgtgcttcttccttgtttttggaactactgaatgtttgttgctagctgtgatgtcctatgaccgatatgtggccatatgcaaccctctgcactatcctctggtcatgaacccaacaaagtgcacacagctggcagcagtctcctggcttggaggcatcccagtccagataggacaaacttgtcagatattctctatgaatttttgtaattcttacaaaatcaaccacttcttttgtgacataccaccaattctcacgctggcttgtggaaacacttcagtgcatgaattgtctgtctatgtggtcgttatggtggtggctgcattcccctttatattggtgcttacatcctacagcaaaatcattgccaccatcctgaggttgccaacagccaaaggtcggggaaaagccttctccacatgttcttcccacctgctggtggtactattgttttatggatctgctacggttacctatttgagaccaaagtccatgcattctcctggaactgacaaactcctgtctctgttctacaccattgtgactcccatgttcaatcccttaatatacagccttaggaacaaggaagtgattgctgcactgagaaagttaatactaaaaaaatagggccatgtgtacacttagaacattcttatgtaccttagctactggtaagtcacttatt

SEQ ID NO: 629 - DNA, 1200 bp, mus musculus
agtagagggatggagtgacctgtaagcaagagaggatggggagggaaaagggggacaggatcaagtattggaaaggataggagagaagtatggaaggtcagaaatagaatagaaatatatagcaatgggagatgaggaaccactacaaaagtaagccactagaaagtcccagatgtcagaaaagtaagagactcccaggatccaacagggatgaattttagccgaaatacttatcaaagcagtgatagaacctgtagagaccacttccagtagatagggatggtctccagatgaaggaactggccactcactcatctcaaatattttaccaaaaatgctcctgcataagataacccagacacaaaagaacacacatggtatacactgactgataaatggatattgcccccaaagctcaaaatagacacaatataacccacaaaccatttggagcttttaagaaaatggaaggccaaactggatgcttcaaatccttcatagaaggggaacaaaataatcacaggaggtagagggaggaagggacctgggccaaaaaaaaatgtagcagatactgaagaaaaggccatccagagaccatccgatctgcattcactaaacacccacactgttgatgatgccaagaaatgcttgctgacaggaacctggtaaggatgctccctgagaagttctactactggcacacaaccattgaactaagcatgggaacctccaatggaagagctaggagaaggactaaaggagctgaagtggtttgcaaccccataggaagaataatatcaactaaccagacaacccatagctctcagagattaactaccaaccaaaaagtttatatacatgaagggatccatggctccagatggatatgtaggagagcatggccttatcagacatcaaagggaggggcaggcgttggtcctgtagaagctgatgcatcagtgatagggaaagtgaggtggtagctgaaggaggcccttcatagaagcaaaggggagagaaaaggggggagaggggggatgggaaaggtgggttgtggaaggctaactgggaagtgggatattatttgaaatgcaaatatagattatcattaaataagtaagtaagtaagtaaataaataaataaataggaaaaatccagccctctgaaccacaatggagggttcaaaccaatatggtatt

SEQ ID NO: 630 - DNA, 1000 bp, mus musculus
cacgggatagagtgagtgtgcttcagcagcccgagagagttgcacggctaagcactgcagtagaaaggctctgcggcatatatgagcctattctagggagacatgtcatctttcaagaaggttgagtgtccaagtgtccttctctccaggcaaaacgacacgggagcaggtcagggttgctctgggtaaaagcctgtgagcctaagagctaatcctgtacatggctcctttacctacacactggggatttgacctctatctccactctcattaatatgggtggcctatttgctcttattaaaaggaaagggggagatgttgggagccgcgcccacattcgccgttacaagatggcgctgacagctgtgttctaagtggtaaacaaataatctgcgcatgtgccgagggtggttctccactccatgtgctctgccttccccgtgacgtcaactcggccgatgggctgcagccaatcagggagtgacacgtcctaggcgaaggagaattctccttaatagggacggggtttcgttttctctctctcttgcttcttacactcttgctcctgaagatgtaagcaataaagttttgccgcagaagattctggtctgtggtgttcttcctggccgggcgtgagaacgcgtctaataacaccagagttccttggaactaaaccaccaatcacaggaaacacattgtgggacatgtggctctaactgtttatgtagatgaggatcatctgtatattggtcatcaataggaggagaggccctaggtcctctgaaggtgctatgccccagtatagggtaatcccaagactgggaataggagtgggtgggttggggagcagggggacaggggaggggataggggattttcgaaggggaaattaggaaagggataaaatttaaatgtaaataaagaaaatatctaataaaaaaaagcttggaaaaatattatttttagagtaaaatcttagttgtcatcatcttttattaat

SEQ ID NO: 631 - DNA, 1400 bp, mus musculus
aaatttcctttcttcttagtgtctcttcattgactggggcaatattatgagttatgtttatattttatatttgtgtgtgtagtgatcatacaaagaagtaagttttgttatattatttattaataaatgttttcttcactgatatcattccttaaactttcttttgtgtacaattgtctacacatgcttgttcccttctctgtaataatcctccttccacatttatgtagaatatattctattaccctaatttgattctgttcctgcctacttaagattgtttgatcttatattactcctttatacattcatgaaaaacaaacaaatacatgttcaaattataaatccttgaatccatgatttatatatgagagaaaatatttaatgtttgtatttcagacctattaatataaacattaattttattcaccttcttttttgattttttaaaattaggtattttcttcatttacatttccaatgctatcccaaaagttacccattccctcccatccccactctcacttctccctgtcatttctctatactgaggcatataaagtttgcaagaccaaggggcctctcttaccaataatggccaactaggccatcttctgctacatatgcagctagacacacgagctccggggttagtggttagttcatattgttgttctacctatagggttgcagatccctttagctccttgggtattttctctagctccttcattgggggccctgtgatccatccaatagctgactgtgagtatccacttctgtgtttgctaggccctggcatagtctcacaagagacagctatatcagggttctttcagcaaagtcttgctggtgtatgcaatggtgtaagcatttggaggctgattatgggatggatcccgggtgtggcagtctctaaatggtccatcctttcgtctcagctccaaactttgtctctataattccttccatgggtttttttgttcccaattctaagaaggggcaaagtgtccacactttggtcttcattcttcttgagtttcatgtgttttgcaaattttatcttgtatcttggatattctaagtttcttggctaatattcacttatcagtgagtacatatcatgtgagttcttttgtgattgggttacctcactcaggatgataccctccaggtccatccatttgcctaggaatttcataaattcattctttttaatagctgagtagtactccattgtgtaaatatgccaccttttctgtgtccattcctctgttgagggacatctgggttatttccagcctttgactcttataaataaggctgctatgaacatagtggaacatgtgtccttcttaccaattagaacatctttggcatatatgcccagttattcacct

SEQ ID NO: 632 - DNA, 1200 bp, mus musculus
ttgttccttttcacatgttatcaagtggttaagatagggcggattctagaggaaattcaggacaagctatcagaagtaaagcggggagagagagtaggagcaaagaggaaatatggtacacaaaataagtatacaggcctttccaagggtcttgaacccgaggaaaagttaaggttaggtaggaatacctggagagagattagaagaaaaagaggaaaaagggaaaagaagaaagatcaattagcggaggtctctaggagatactcgtcactagatgagctcggggagccagctcttagtagttctgaagcagatgaagaattctcctctgaggaaacagactgggaggaagaagcagcccattaccagccagctaattggtcaagaaaaaagccaaaagcggctggcgaaagccagcgtactgttcaacctcagggcagtcggcttcaaggtccgccctatgcggagtccccgccctgcgtagtgcgtcagcaatgcgcagagaggcagtgcgcagactcattcattcccagagaggaacaaaggaaaatacaacaggcatttccggtctttgaaggagccgagggtgggcgtgtccacgctccggtagaatacttacaaattaaagaaattgccgagtcggtccgtaaatacggaaccaatgctaattttaccttggtgcagttagacaggctcgctggcatggcactaactcctgctgactggcaaacggttgtaaaagccgctctccctagtatgggcaaatatatggaatggagagcgctttggcacgaagctgcacaagcgcaggcccgagcaaacgcagctgctttgactccagagcagagagattggacttttgacttgttaacgggtcagggagcttattctgctgatcagacaaactaccattggggagcttatgcccagatttcttccacggctattagggcctggaaggcgctctcccgagcaggtgaaaccactggtcaattaacaaaagttgtccagggacctcaggaatccttctcagattttgtggccagaatgacagaggcagcagagcgtatttttggagagtcagagcaagctgcgcctctgatagaacagctaatctatgagcaagccacaaaggagtgccgagcggccatagccccaagaaagaacaaaggcttacaagactggctcagggtctgtcga

SEQ ID NO: 633 - DNA, 1000 bp, mus musculus
ctgactgttccacatcccatatctcctccccgaccccctttctccaggaagatgccacatctccacctccaccctaccagaacactaacctccctgggagactagtcacttgagaattaggtgtatcttctctgtctaaacccagacccctcagtcctctgctgtatgtgtgatgggggcctcatatcatctggtgtatgctgtctggttggtgttcgagtatttgagagatctttggagtgtccaggttaattgagactgttctgcttcttaggttcttccagctttcccccaattcaacaatattcggcagcttctgtccattggttggatgcaaatatctgctactgactctttcagctgcttgttgggtttttcagaggtcagtcatgataggccccttttttgtgagtgtcaaatatcctccttaataatgtcaggtcttggggcctcccattgagctggatcccaatttgggcttgtcgctagaccttcttttcctcaggaatctctccattttcatccctggagttctttcagaaaggaacaattatgggtcatagttttgactatgagatggcaacactctctctcacataattccctttctcctggtggaggtgggctctacaacttccctctgccccagtatagggcatttcatccaaggtccctttcttttgtcccaagagcctctcaactcccaggtctctgatagattctagacggtacccccaacctcctacattccgaggttgcatgtttctactttctgctggtcctcatggctgagtccttttccttctcccaataccagatcatgttcccgctcccccacccataccatttttttttaatttctattttttattacgtattttcctcaattacatttccaatgctatcccaaaagtcccccacaacctaccccctccccactcgcctacccacccattctcattttttggccctggcattcccctgtactggggcatataaa

SEQ ID NO: 634 - DNA, 1000 bp, mus musculus
aagaacttaaaaaggtcaacaagctgaagtgcccagtccttcttgggaggtagaagaaagcaatcacatgtgggagggagggagggaactgagagggaaaatgcatggggttgggggaggtagtaggggagtacctgatatggtattgggtgagtgaaaagtcctgagggccagcagaaaaatggaaacaggcaacgtcaggacataggagtttggggcgccttccaaaaagcaccagagaccagggaggtgagagattctcaggactcaaagggatggactttaaatgaaatgccagacagtaggaagagtgaacttacagagtccacttccaacaggaaaacagggcatcaaatgagagagaggaggcccatcccacagtcacaactctgacccataattattcttatctgaaagaattacagagatggaaatggagaagtggctgaggaaaagaaggtccagggacaggcccaaagtgagatccagctcaaggggaagtcctaaggccagacattattactgaggctatggagtgctcacaaaagggacctatcatgaccgcactctggataacccaacaagcagctgaaagagtcagatgcagatatttgcacccaatcaattgacagaagcaaatgactgctcttgttgaattaggaatggacgtaagaagctgaggaaaagagcgatccagtaggaagaccagcagtctcaatctggaccccctagatctcccaaacactggtccaccaaacaggcagcatacagcagttgatatgaggtccccatcagtcatacaagcagaggactgcagggtctgtgttcattcagagatcatacacttaaccctcaggaccggggtccacagggagtttagagctcatgtagggtgggggatggggacatccatgtggagacagtcatgtgttgtggaacagtcagaaggtggacaggcgggagaggggagaataaaatattaattaatttttaaaagtct

SEQ ID NO: 635 - DNA, 1200 bp, mus musculus
ctggcacaacactctggaaatcggctttggggttcctcagaaaattggacatagtactacccgaggaaacagcaataccactcctgaacatatacccagaagatgctctaacacgtaataaggacacatgctccactatgctcatagcagccttatttataatatccagaagctggaaagaatgcagatgtcaagagaggaatggatccagaaaatatggtacatttatacattggattactactcagctattaaaaatagtgaatttatgaaattctttggcaaatggatggacctggaggatatcatcgtgagtgaggtaacccaatcataaaagaacacacgtggtaatcactcactgataagtggatattagcccagaagctcagactactcaagatacaattagcaaaacacatgaaactcaagaaggaagacaaaagtgtggatacttcattccttcttagaaggggaaacaaaatatccatggaatgagttacagagacagagtatagagcagagaataaaggaatgaccatccagagattgtgccacctggggatccatcccatatacaatcaccaaacacagacactattgtgaatgccaccaaatgcttgccaataagaatctgaaatagctgtctcttgagagattctgccagtgcctgatcaaaacagaagtggatgctcacaatcaaccatttgactgagcacagggtctccaatggaggagcaagaaaaagtacctaaggagctgaaatggtttgcagcctcataggaggaacaacaatataaactaaccagtaccctcagagctcccaggtactaaaacaccacccaaagggtacacatgctgggtctcatggctccagctgcatatgtagcagaggttggcctagttggtcatcaatgagaggagagaccctgggtcttgtgaaggctctacacccagtgtagggggatgccagagcaaggaagcaggagtgggtgggttgctgagcagggagtggggacataggggaaaggatttttggaggggaaaccaggaaagtggttaatatttgaaatgtaaataaagaaaatatctaatgaaaataaatgaattaaaaaataagtgactgttctctacatttctcaaagatattaaataataattacaattgcatatgttgggtatgtaagagaactggcacatctt

SEQ ID NO: 636 - DNA, 1200 bp, mus musculus
aactcacttagaaaggggaccaaaataatcacaggaggcagagggaatgaggatcctgagtgggagaggggaggggtagaggaaagaaggggtggaccaggtgagagagaggagagaagccccgagggtctgttgaatgaatggaaatatgcagatgctggttgtgggtgttcaaggggatcctctcgaaagtctctgagacctgggatgtgagaggtccccaggactcattgggggtgatcttggtcaaaatgtccaacagtgagaacatgcaacctgaataggccacctccagtagattgtcagggtccccagtggagagatggacaccaacttaacttcatatttttgacacaggattgttcccatctaaaagtaatacagggagaaaaatggagcagagactgaaagaaaggccattcagtgactggccaacttgggatccctcccatggatgggcacctaacattgatattatcactgatgtaatattgtaatattgtgtttgcagacagaagcctagcatggctgtcctctgagaacatctaccaactgactgaggcagatgcagatacagccaggcattggactgaggtcagggatgcctatggaaaagttagggaagccctgaaggagcctaaagtaatagcaaccctgtaggaagaccaacagtgtccaggatcctggactggtgtgagctcccagagaaaagccaccaatcaaagatcatacaagggctgtgtattggttggttttatatgccaacttgacacaagctgaagttgtcccagagaaactagtttcagttagggaaatgcttccatgagatccagctgtggggcattttctcaattagtgatcaagggggaagggccccttgtgggtgggaccatctctggactggtagtcttggttctataagagagcaggcttagcaagccaggggaaacaagccagtaaagaacatcccttccatggcctctgcatcagctcctgcctcctaacctgtttgagttccagtcctgacttcctttggtgatgaacagcaatgtggaagaataagctgaataaaccctttcctcaccaagtgcttcttggtcatgatgtttgtgcaggaatagaaaccctgactaagacaggctggtctgaggtcctggcattatttagaagaggactgccttgtctggtcttagtgagagg

SEQ ID NO: 637 - DNA, 1200 bp, mus musculus
tgtttacttgtttgtttatatcgaatctactaatctttatagcaacccagaaggatgacactgttttatttttgttgttgttgtattttgtattgcataatttatttacttgcatttcaagtgtaatccccattctggtttcccctccacaaataccctacaacatcctgcccctcctgtacttctttgagggtgatccctgactcatccacccactattgcctcactgccctagcatttgcctatgttggggcatcaagtctccacaagaccaaagacctcccctcccattgatgccagataaggcaatcctctgccacttatacagctggagccatgggtccctccatgtatactttttcctcttttgttggagcttaagtttctgagagctctggggtacgggctggttggttgatattgttgatcttcctatgaggttgaaatcctttcagctccttcagtccttctcctaactcttccattagggtccccatgcttaatccagtgattggctgtgagcatcctcatctgtattggtcaggctctgacagtctcttagggaacagctataccaggctcctatcagcaagtacttcttggcttcagcaatagtgtttgggtttagtgtctgcagatgggatggatctccaggtggggcaatatctgaatggacttttcttcactctcagatcaactctttgcactacatttcctttagagaggagcaattctgggttaatatttttgagattggtgggtgaccccatctctcaaccaggggccatgcctaaccactggatttgctctctacaggtcctatctctgctttgtatccccattgtatcatgggaaccttttgtatccctggcatctgaaactttttaggggctacccccatttcccatcccctactgctacacacctcaattctattttctgaccctctgtacttcttccttgtctcctcccacacctgatcatgatccactttaccttcccctcctttcttcctcccagatccttcattctttctaccttctataattattttgttccctcttctaagtaggaccaaagcagctacactttggtctttctttttcttgggcttcatatggtctgtaacttgctctaacatataacaagtatgcatgctccactatgttcatagcagccttatttataatagccagaagc

SEQ ID NO: 638 - DNA, 1200 bp, mus musculus
tccttattataatggtataaagtatattcaattaaaattatctatagataattaaattttattatatgctctgagaacaaaatgatctaaaaagtaaaaattttgtatatataaactatataatttaaatagtaaaggaaataaattctctacatattattaatttttgatgtttcatattattgtaaataaaaataatacaattggagagatttagtaattttaacatatcttttaaaaattaataaaatatcatcttatattatcaatgattaggatatttaaaaaaataataaaaaatctattgaacaaaacaaatatgatttagcagcaactaaataattaatttagtaaattgattaccttctatggtttgttagaaaagtatctatgatttttcagtaatgtttatatggttgtgattcaactgaattgttgcttctgaaattctcttttccatagataagtattcttgcacagagtataataaatggaatgtaagaggaacatatcagaatttcttcttatggggctgtcttctaagcggaacattgaggtgttttgcttccttttcttctcattctgttaccttgccatcttgtgtgggaatctgctgatccttatctccattagatgtagttctctgtttaaccaacccatgtactatttcctcagtcatttatcttctatggacattttctatacctcctgtgtgacacccaaactgattggagatcttctagtgagaagaaaaactatctcttatacaaactgcatgctacaggtctttgccatgcacttctttggaatgattgaaatcttaatcctaacagccatggcctttgaccgctgcgtggccatctgcaagcctctccactacatggtcatcatgagcagaagcaggtgccatatcctgatctgggcttcttgggttggtggtgctgcacactccttgtctcagttttgtttgctaatctgcttgcctttctgtggccccaatgaaatagaccactactactgtgacattttccctttgctgaaagttgcctgtaccgacaccaccatcactggtgtcctggtggttgccaattcaggactgattgctttagtaacctttgttgtcttgttcgggtcatatgtggttatactgttcacattaaggaattactctgcagaaggaagacacaaagccctttctac

SEQ ID NO: 639 - DNA, 1000 bp, mus musculus
tgacatcagccatggagatgcagagttttgaatttgcccagctggattcctgactttctttggagattacagttaagtgattggatgaatctcagaagagaccttgaactttggacttttaacattgctgagactgctatatactatgagaactttgaaagttagactaaatgcattttgcattatgttatgtttaagtatgccccctcccccccgcatagactcatgtgtttgaataagtttatgggggccagggagtgaaatgttatggtttgtatattcttggaccagggagtggcaacatttgtaggtgtggccttattggaataggtgtgacctggtgtgtcactgtcggtgtgggcataagatcctcaccccagttccctggaagtcagtcttccactagcagtctttggatgaagatgtagaactctcagctctgcatgtgccatgcctgcctggttactgccatgcttccaccttgatgataaggaactgagcctctgaacctgtaagccagctccagttaaatgttgttttgtataagacttgccttggtcatggtgtctgttaacagcagtaaaactctaactaagacaccctttttgaagactccctgaccatctttactggaaccctgattcctctgtggatctaaggcccaactgagggcagtctgcagcacacctgctccctttggtcctctttaatattttgtttctttgggtctgtgaattttaccatgcttatgctgtactttatggctaatattcatttataattgagtgcataccatgtgtacctttcttggtctgggttatctcattcaggatgatatttttaggtccttccatttgcatgaaaactgcatgatgtctttgtttttaagagctgagtagtattccattgcataaatgtgccacatttgctttatccattctttgattcaagaacatcatagttgtttccagtttgttgctactttgaatacatctgctaa

SEQ ID NO: 640 - DNA, 1000 bp, mus musculus
tagggcatattctatctctgactcattcggttaaatctttcctgattcatcactttgtctgaacctcaggcattgatttcaaagatggcttcttccttctacaaaataactgtattttcaacgtaagggatcaaaagtatgtactaaaggcctatctgtaggctgtgggccttggtaccagatgttttccacggagatctctggccaggcctggtgcaagggttccagtaaagggaagggagtgcagacagggagaagaagtctctgccatgccttctaggtcactaggtaactctgagctgctctgcactgagttgggtcaggctgggatgacaagaagccgactatccagtgaggagtgcagcagaacctcaggtggcactacgggagagaagatctcttcccaagtgttacagctcttggaacaaataattcagacaagggagtagttctcgcacacctttaatgccctggatagaatttatatacagttttggtggtgattcagtgttcgacagcaggtacaactcattggtttggactgtgagtttagggaaaaccttatttgcatgtgggaaggcttggtgctgcttctatgtgactgatagccacacacctctcttgtgggggctgtgagggcggtaacttcgacagaagccaggggtccaggagacatgatcaaacaccttcagtcccatgtaggtggaaattgggtcctccagggttcaagacctatgcttgactggagaccaagctgtctgtgcgcagcccactgccccactgtagtctagccatatcatactgtaacctcgagcattccggctagattacatagacctagaaggtctttgtttgtgatcctttgccaaaacagccatgatagtggattaaaattcgtctacaatgaaaatttataaagcattcatataataatttcccacttacaacatttatatacacttatctttttgcccatattactagttcatgaagtacaaaa

SEQ ID NO: 641 - DNA, 1200 bp, mus musculus
agaattgtcgagttatagctttcatcagtgctactatgtggtaaatattgtaatgtttgtacataggagttttttttttttaatccaggtccatcaatacagtcacaaagtatatcatccttatcctaactcttcaaggcatttggtaagtgagattcatttacttattgtacttactgatgatacaaaacctatacataaataggtaaattaaatgtacttatcactgcttcacactgacatatgtcttttaacaactaaggctattcataggattgagtaaactgtttagcttaaccaaacaataaaattctcaatatgaatattaagtaaacaaatatttgagctttttattacgagcataaacagagataattcattctgtgttgtgtgataatgaatcttacaaatctctgtgacttctggccatgtagtggtagcatatgcctttaattccagcacttgagagacagagacatgcctgaggctgagttcacagccagcctggtctacgaagtgagttcaaggacagcaagaactacaggcaaaaattctatctaataaaagaagaaaacaagaacatgaatttctgtagattctttcaaagtatcaaaaaggatttctcttatgctcattggaaggttaaatttttctccatattgctgtcaagttattaattatactgtattcatgattaagaaaataaattatagccttgtatctgcttccaaacatgcttctccatcttaaccagttctcatactaaattatccaatgctattcttgatctcattttatacatgatacatgatgaatcagatatgtgaaattacagaattgaacccaaggtgagcaggaagaagaataacaaaaattctcatttggtgtctatctacaatttctgaactgatgtatttgggaattgttgaagcacattgccacagtgtttgccagtgttttgcaacccctactgtataactatatatgagaaagaggaaagatggtctataatcctgactacctatgaatttgtttcaaaagaagttatttcataaatggcactcaactaagtaaatcactaagtcatatctaaaggagtttgtgaaccagcacctttcttatatgacatgagtaataaaattagatgattttaattgcacaatactttaaaacgtggagattaaaaataactaaaagaag

SEQ ID NO: 642 - DNA, 1200 bp, mus musculus
gtattcttaaaagatacaattttatattcattatttctcatttgacagtctcacatatttgaaaatcataacataaatgttcaaaatacatagcaggtgacttcttgtacagctatgtggtacaaaaaaaaggaatatatataagcatggaaaacatttttgaattttttcaatatagtaaacatgaacagattgtgcataatactaacaaggcacattttgttcagaaaattacctactgaattttattactaaaagtaatgcctccttcacaaaatcattgtttgaatgtgcagtctattcagtacgcattaaactgatactttctgaataaattaagcctagacaatggtaagtggtaactcactggaaagataagatcttatagaacttacaaatttagcatggatttcaaacattttttttctttttcagattcgttctggcatgtgagttcctctcttggactgacacaatgcagcagaacagcactgtcaccgagtttatactactaggattgacacaggatcccctgaagcagaaaatggtgtttataatcttcttagttttctatatggggactgtagtggggaatacactcattattgtgacaatcaagttcagtcgaacacttgggggtcccatgtacttcttcctgttttatttgtcctttgctgattcctgcttttcaacgtccacagccccaagactcattgtggatgccctttctaaaaagaacatcatttcctacaatgaatgcatgacacaagtctttgctctccatttatttggctgcatggaggtctttgtcctcattttcatggctgttgaccgttatgtggccatctgtaaacccttgcattacccagtcatcatgaggcggcaggtctgtgtcatcttgattatagttgcctggatagggtcttttctacattccactactcagattgttttggccttgagactgcccttctgtgggcccaatctgattgatcattattgctgtgacttacagcccttattggagcttgcctgcatggatacacacatgataaatctgctgttagtgtttaacagtggtgcaatttgctcaagcagttttttaattttgattatctcatattttgtcatcttatactctctgcgaaaccacagtgctgaagggagaaaaaaggcactctctacctgcacatctcatat

SEQ ID NO: 643 - DNA, 1600 bp, mus musculus
aaaaccaaagaagggtctttgtacctaattgtacttcttcttctctcccactacacaaaattgactcaacaaaactatgtttctaattgtttccttactatatgaacttataatccttatgccccaagaagctagtatattaaacattaactaaaaacaatgttttattgacatctactttattgcaaactatgaaaataacctggagacctcatttactttcgatcatctgagaccactttctttctccataacttcttcatggcatttttcacctctgcattcctcagtgtgtaaatcagaggattgagcaaaggtgtaccaattgaataaaatatagctatcatcttgtccataggaaatgttgttgcagggcgtgtgtatataaagatgcaaggtccaaagaacaggatgaccacaataatgtgggatatgcaggtagatagggctttcctcctcccttcagcactgtggtttcttagagaacgaagaataatgacataagagaccatcagcatgaggaaactcactgtacaaatggctccactgttggacaccagaagcaggttgatcaaatatgtgtctgaacaggcaagcttcaatagtggctgcaagtcacagaaatagtgatcaatttcattggggccacagaagggcaaactcaaggccagaaatatctgaactaaagaatgaacacaggatcccacccaggctatggccaccaacaccccacagacccggcggctcatgatggtcatgtagtgcaggggcttacagatggccacatatcggtccacagccatgaggataaggataaagatctccagacagccaaagaaatgaaatgtaaagacttggattatgcactcagtgaaagatatagaggcttccttaagcaaagagtccacaattgttcttggagctatggttgtagagaagcaggtgtcagacaaggataagtagaacaggaagaagtacatgggactcccaagggtctggcttgtcttgattgtagcaatgataagcaagttacccagtaatgtccccatgtaaaaaagcaaaaacacaacaaataggattttcttcctaaaaggatcctgtgtcaaaccaagtaaaatgaattcagtcacattgttattcagccacattgtttctcattagtgatccaaaattgttaatgtgaaacactttgtctggaaaaaaaaaaagacattgattttgatcttggtatatgatgctatgctaagcaaaatactcattaatgatattctctctgtaattttttaataagtagttcaatacttgttcctgcattttattgacaatatatttgccctgttatgagtcccagaaatggttaggaaagttttaccatagaacctttcaaatacaaatccctgttattacaattatggttaatattacaactagaaggatatagagttacaatatgtgatctgtgatatttttatcattaactttaaaattttttcacattttaagcacatagtcaacttaacttttaatatatatttgattgccttggtgttttatgaacccccccaaaaatgcctaatactaacacaccataaagaatatc

SEQ ID NO: 644 - DNA, 1000 bp, mus musculus
tgaagagaactgcctttttccccagaaggcaccaactccaagcagcttcttggctaagagtaggactctgtatccatgtcctatttagagtatagagtttgcttttaatctgtgtgtgtcacagaatctgatcatcaaagtataagagaatcttatccgcttctaatttttaaactagtagagtaaaatggaaaaacagcatctagtagttattccacagctaaaaactggaacttcttttctcatgacagattggagtccatacctgtacaactagagtcaatataatataaagtcataatgcttgtgatataaaaggcaacaaaatgtttttattattgttttgctgtttttttatttaattaggtattttcttcatttacatttcaaatgctatcccaaaagtctcccttacccccccccccactctcctacccacccactcccacttcttggccctggcgttcccctgtactgaggcatataaagtttgcaagaccaaggggcctctcttcccaatgatggctgactaggccatcttctgatacatatgcagctagagacacgacctctgtgggtactggttagttcatattgttattccacctatagggttacagacccctttagctccttgggtactttctctagctcctctaatgagggccccgtgttccgtccaatagctgactgttagcatccacttctgtgtttgctaggccccagcatagcctcataagagacagctatatcagggtcctttccacagaatcttgctagtgtatgcaatggtgtcagcatttggaggctgattatgggatgaatccccgggcctggcagtctctagatggtccatcctttcgtctcagctccaaactttgtctatgtaattccttccatgggtgttttgttcccaattctaagaaggggcaaagtgtccacactttggtcttcattcttcttgagtttcatgtgttttgcaaattgtgaactcacatga

SEQ ID NO: 645 - DNA, 1400 bp, mus musculus
taataggagggggacaaagaacagattccatagctttgcctttgtagaccttaaacttctcttcagtgtttttttgcaagcttaactggttctgtatacccaatcaactatttcaaattaaactcttagccatcccaaatgacatcctgcctgtgctttaacagaaggtctaaaacacaactcgagttgtcttcatgatctaggaatatttacttccctctcaagaaaaatccttaaataaaatctcatacctcaaatggaattgaaacactcgtttgtttgcttgtttgttgttgttgttttttacttgaccatgtgtacaataatttttttttcaggtaatgtaattgagtaacacacaaactacatggaaattaggagcaatgtgacagagtttgttctcttggggctcaccagaaacccaagcatgcagaaaatcgtgtttgctgtatttgtcgtcatctacatcatctccatggtaggcaatgtgctcattgtggtcactatcactgccagtccatcgctgggctcccctatgtactttttcttagcgtatctctctttcattgatgcctgttattcctctgtcaacactcctaaattgatcatagactcactccatgaaaaaaagacaatactattcaatggatgcatgacccaggtctttggggagcatttctttggaggtgctgagggcatcctgcttactgtgatggcctatgaccgctatgtggcaatctgcaagcccttacactatacaaccatcatgagcagaagggtatgtggcctgctggtaggagtggtatgggtcggaggttttcttcatgcaaccatacagattctgtttatttttaaattacctttctgtggcccaaatgtcatagatcactttatgtgtgatctgaaccctttgcttaaccttgcatgcactgatacccacattctggggctctttgttgctgccaacagtggttttatttgtctgttgaacttcctccttctgttggtctcctatgtggtcattctacgttcattaagaaaccacagtgcagaggggaggcgcaaagccctctccacttgtgtctcccacataacagttgttgtcttgtttttcgtaccctgcatttttgtgtacatgagaccttcagccactttgtctattgataaagcagttgctgtcttctacactatgataactcccttgttaaatcctttaatctacaccttgagaaatgctcagatgaaagatgccattaagaaattgtgtagatggaaagatgatgttatttccatcaacaaataaatgtttctaaagttcaacatttgagacaagtatcaaaaagagaatcatcaaaatgacattgtatttgaagccagcaagaatgttacccaggacttct

SEQ ID NO: 646 - DNA, 1400 bp, mus musculus
cctgttaaaagatgacctatgcatcataaatttaatctcctagcttcacacaaaatgatactactgacaagcatgaccgaaggattaggaaacattcatgtcaaaaattttgaaagttcatctcattgtctgtggtgaaaaaaatatcacaatcaaacagacaaaatagtataaaataggaactattcaccaggagtgactttgcctcaaaggagatctagttctgtctaaaggtcccattgctttacctggctaagaagaaaaattccaatgacattatgaaagtcgataattgccaaccaataacaggcccaacttgatacccatctaataggcaagcactagtccctgacactattaatgatactctgtaatgtttgtacaaaggagtctgtcctcttagaggctccatccattagctgactcagacagatgcagatacccatagccaaacagtggttgaagcttggggacttctggggaagaataaagggaaggattgcatcccaaaaggggatagaaactctacaggaaggccaacaaagtcaacaaacctggacgttggggctttcagagactgaaccatcaaccaaagtacatacatgggctggacctagacctccccacatgtatgtagcagatatgcagctaggtcttcatgtagagccaaacaactggcatacaataaatttcaaaagctgttgcctattcataggatatgttctatctggtctgcattgtcaggcctcagtgaaagaggatgaacctagcccccacagagacttgatgtgccagaaaaaaagggccccacccactcaggggaaaagaagaggggagatggggtaaaaatcatgggaggggataactgggggcagggagtgggatgtaaactgaataaataaaaataaattaattttgaaaaaaaagaaaatagggaacaaggataaagaaacatcttacaaggcataaaaacactcccacataacaaagattagtccaactgaagagctcatagatctgccattgaaatatgctggtatagagaaaaattaatttgctctgaactaataatcattaaaaataccatattggtagattgcataagagtttatgcaatacttcttaagcatgccaacatgtatctgaagtttccggtgatcaaatatctctttttttgatgtttgataagacattttattcaaattaatcttctttttgggggggttatttatttatttttttccattttttattaggtatttagctcatttacatttccaatgctataccaaaagttccccatacccacccacccccactcccctacccacccactccccctttttggccctggcgttcccctgtactgggggatataaagtttgcatgtccaatgggcc

SEQ ID NO: 647 - DNA, 1000 bp, mus musculus
ttagatgctgaaaacgcctttgacaaaatacaatacccctccatgttaaaagtcttagagaactgatcaaaaagaacccgtgcctctggtcaggaagggctctggtgtctttgttcctgctgtcacaggcccatcacaattggattggaaccgatgttgtgttctgctcaccagttatcctaagatctcctggagagtcctctagggaccgtggggatgtccgctgactctgcgccctaggtgacccggtgctggagccgactggaagggactcactcactgataagtggatattagcccagaaacttagaatacccaagatacaatttgcaaaacacataaaactcaagaagatcaaagactgaagtttggacacttcgccccttcttagaattgggaacaaaacacccatggaagaagttacagagacaaagtttggagctgagacgaaaggatggaccatccagagactgctccaccggggggtccatcccataatcaaccaccaaacgcagacactattgcatacaccagcaagattttgctgacaggaccctgatatagctgtctcttgtgaggctatgccagtgcctggcaaacacagaagtggatgctcacagtcatctattggatggaacacagggcccccaatagaggagctagagaaagcacccaaggagctgaaggggtctgcaaccctatcggtggaacaacaatatgaactaaccagtacccccagagcgcatgtctctagctgcatacataagcagaagatggcctagtcggccatcattgagaagagaggccccttggtctagcaaactttatatgccccagtacaggggaacaccagggccaagaagtgagagtgggtgggtaggagagcagggtggggtaagggtataggggactttcaggatagcatttgaaatgtaaatgaagtaaatacctaatagaaaatttgggaaaaaaaagtcttagagagatgacgcaagacaca

SEQ ID NO: 648 - DNA, 1000 bp, mus musculus
tacactagcaagcgtttgttgcaaggaccgtgatatagctgtctcttgtgagactaggccggggcctagcaaacacagaagtggatgcccagtcaaactccccacctggcactgtccccggagcgggtcgcgcccgcccgcacctgcggaaggatcattaactctcgagcgtgcccccaactcgccagcaagaacgacgctgcaacaggatccttctgcacacgtttattcagtcctgtttcttctttctccatatatctcccttgtttatatctcccttgtttatatatctcccttgtttttatatctcccttgtttttatatctccctcgtttatatctcccccgaaccctgggcctctcactcttttatactctcagttcccatccacgcacagcaggccacgccacctcaccaggcacgcagcttcagctaatcagggcagcaggggcaaatctccaccaaattggattcacctgtatcctggtacacctgagcagcactcaagatgtttgtgtcttatatgaggaagtcaggtgcaagtcatatgacttagctgcagtccctggcgcctttgggactgccgccacacccgctccccacactcagagtcaactattggatggatcacagggcccccaatggaggagctagagaaagtatccaaggacctaaagggatctgcaaccctgtaggtgcaacattatgaactaaccagtaccctggagctcttgtctctagctgcatatgtatcaaaagatggcctagtcggccatcactggaaagagaggcccattggacaggcaaactttatatgccccagtacaggggaacgccagggccaaaaaatgggaatgggtgggtaggggaatggggggggggacttttgggatagcattgaaaatgtaattgaggaaaatacgtaataaaaaaaaaaaaaagatgcacctggaagtacctcacaaatctcttagttgaatctatctccagtcaagttgat

SEQ ID NO: 649 - DNA, 1200 bp, mus musculus
atttttactctgaataagttccatctgggttggttgaattcacagctgaatgacacagtgggggtaaaaggagctggctgtatgtcagctccacgtatggaagctaaaagctcgatggtgacacagtttgcatgtagtcacagtttagttatccagtctccaaaagctagctatgcatgtggcttcaaaactgttcaacctccacaaatgatactgacagtatgatttaaatgtactgtgagcgtgtatgaaaatatcaaagaacttgtaataataataaagtagaagacactggagatatatatatatatatatatacccaagagaaatggaaacaaacacagagcttactcatctcttagaggagcttctaaataaacagtcttgtgagaataaacaatgctgagactgagctctgtggctcgtgagcccattccggaactccacatcttgtcttcatgtcaaagactccaacttgagctcaccagatgaagagatatgaccatctgaggcccttgctatgagctggaaaatgttaaacccgtttgcacactcagttggtgttaacggtgactcagaacattttctctactttcaaagaaaaggagactcagcttctagaaagcctgtgatttaagtggatttggttttgtaacttagtgggggaagggaggacagtgcatgtaccctagaatccaaatcctggaatcaatacaaactgttcctagcagtaagcaacccccgtgcacatccccacccagatgacacaaaggcctccgggaagcaaagtgtcattgccatgctcgaaagactcatttactcagaaacgacaccaaagtcccctcaagaaagtaaagctgaggctcctcagaaagcctgcagatatgggcagcaaaagatgctttcctcgtgcatcaaatattagttattctcagtattaatacccattgattttctccgatcaatcttgacttacatttttcaccacaaaatctctgatggtccattctggaagaacgacttctgatgtcatcgccacagttatgtccccgtagtcctgagcctgcttggaaggccagtactcctcacatttggtctagaacacaaggtcagggatcacacatccaccatcatcaaaacctcgcaaggaaaaccatggaactgtcatggggaactaactgctcagtcccttatcggggt

SEQ ID NO: 650 - DNA, 1200 bp, mus musculus; identical to SEQ ID NO: 649

SEQ ID NO: 651 - DNA, 1000 bp, mus musculus
agcctcaacttactcccctgcttctcccttctgagtcctggaagtataagcatataatactacccaagctctctgcctgtttttgtttgtttgtttgtttgttttttaataagatctcactaaccgatggttgtgagccaccatgtggttgctgggatttgaactcaagaccttcggaaaagcagtcagtgctcttaaccgctgagccatctttccagctcatctctgcctgttctattacatgctaacttcatctaaagtctgtccttggtcttctcactgtgcactactctccttcagtgctgttatctattcttttgtcaatgtggttattgacatatcatatgtctctttgatgctccagacttgagttcccaactgctgcctacatcaacacttgtctaatatacatcttaactcagcttgtctagaatccttcttctatcttttaacatgaacttagtaaaggaatatttgagcacttagaatctgacttttctcttaggcatcatctttaatttaaattcttcatgaccttctgattgcttttctgtttttcaaatcattctgtgcatggatttacatacgtgttatatggtttttgattacttttgtttttgagtcaggagttcattcatcctaggctgacctgcaactgtgtgtgtacctgatgatgacctgatctttctgcctctaccttctgaatcacaggtttaccatctgggattgtacagtgcagggacagactccaagactttgtgtgtactatgcaagctttctacccaccaagtcccatctcagaccctcttggaaaatacaagtttggggggctggtgagatggctcaccgactgctcttctgaaggtcctgagttcaaatccaagcaaccgcatggttgctcgcaaccatccataacgagatctgacaccctcttctggagtgtctgaagacagctacagtgtacttacagatattaaataaataaatttgaaaaagaaaa

SEQ ID NO: 652 - DNA, 1000 bp, mus musculus
atcgtggctcacagtttgacaggacacattcccttatggtagggatgccatagcctccgaagaatgaggcagctggccagatcacttctacagtcaggaagcagagagcagacaggaagtaaggccaggctatgaaactttaaggctatcctccagtgacctacttgttctgttaccttttaaagattccacatcttccaaaacagcaccagttgctggggaccaagtgtaaaaatacatgagctggtggggggaacattccacattcaaacccactgacccactttacagatatgcaaacaaaagacccgggtcattgtaccagactcactcatgcaagtcacatgagaccctagaggacagaggtctatgtctggcccttcccttcaaaacatcaaccctacagggaactgcccttgctctcagatgctgggagctggaccagactgtactgccttctttgcggtggtctttctgctcagcttgctcagctctcttgtccttgtctgtaccctggcaaagagggctcacgtgaagtccgtgtgttcctacctaatgcaacaaagtggtagagcaaagactcggaaggacctaacttatgtacaaggtcccttgacatacttaggacagacaagaagtcaggatcaggcagaggcctgaggactgggatcaatgaagatgtctcctagggaggtagcagtgatgtgatagtggtgattattaacttgtcagtttaggctcactgggaggtgtgctttgaggcatgcctatgaaaattatcttgattgctttaactgacagggacaacccatgccgatcgacagtggcagggactctgcctttgagagggagtcacggactccatgacacggaaaaagcacaaggagctctcagtgttcgcttagtcttgagtgtaggcacaatgtgaccttttgtatggcctttcaccatgatggactgtaccctggaacagtgagctagaaaaggccctttctccccg

SEQ ID NO: 653 - DNA, 1200 bp, mus musculus
ccacatacagggaatggaccgagatccctgctgggtgagaaagactactctggtctcctggggcccttgctccagcgcgtcaaaatattttcctaaaacagttctcccaggagaccctgctgatgtaccagaaccacctcaccatgcagtttatgggaaagttattaccatctgacagcggctaatcccaagactgtccatgggctgtactgttctagaacacagtatcttccaggaactcctccatccatctcgtcagccatcacaacacacgtaattaacccaggcaggagctgagccctctacacatctgctttcatccctctccccacacgaccaggacaggaactttcatgattcaaggaggaaacggagggacaaaatgttaaaccaactgccccacccattccacatgtgactgctgtcccctgaagttgttcagtgcacacctcgcacattgcatgtatgatctctgactcctcctcgggcctcacaagagcaccctgttctgtgagtctcacctggattgcaaggtctggttcaaggtctaccctgggtctttggaccccccccccccagagttgagtggctcccggtggcaccagtggtcacctctatccagttgcctgtgtacatctggatgctctagacaaactccagccacaggggctggcctggaattgacttttttcctcctgcttcacctgtcaagatgccaagggctctctataaatatttgttcattggccgacctccaggtggtaagagatgaggcagaaaccccagaaataaatcagacttccagagccagaaaggtctcgaaaagagtgtgccctctctatttggtaaatgggtaaactgaggcatggaggggatctggcttgcccagtatcacactgtctgtgggagctttgactctcattgagagctcttgccatcagccgtgtaaccttggcccttagccctgctatccccctagatagataagagaacccagccttgtctacttgatttctgggaaagtccccagtcacagggtgctataatttggggatggaaaggtctttctacaacttcagtttgagatgaccacccaccatttacagggagctagcctgagatggcctccgaccaaaattgatcttgtctttctcggagtctatcaatccaactattttgagtgatcatgttacatggatc

SEQ ID NO: 654 - DNA, 1400 bp, mus musculus
aagagcaatctgcaaattcatctggaataacaaaaaacctaggatagcaaaaactcttctcaagtataaaagaacctctggtggaatcaccatgcctgacataaagctttactacagagcaattgtgataaaaactgcatggtactggtatagtgacagacaagtagaccaatggaatagaattaaagacccagaaatgtacccacacacctattgttattagacgcgttctcacgaccggccaggaagaacaccacagaccagaatcttctgcggcaaagctttatttcttacatcttcaggagcaagcgtgtaagaagcaagagagcaagaagcaagagagcaagaagcaagagagcaagaagcaagagagagagagaacgaaaccccgtccctattttaggagagttatccctcgcctaggacgtgtcactccctgattggctgcagcccatcggccgagttgacgtcacggggaaggcagagcacatggagtgaagaaccaccctcggcacatgcgcagattatttgtttaccacttagaacacagctgtcagcgccatcttgtaacggcgaatgtgggcgcggctcccaacatctccccctttccttttaataagagcaaataggccacccatattaatgagagtggagatagaggtcaaatccccagtgtgtaggtaaaggagccatgtacaggattagctcttaggcttacaggcttttacccagagcaaccctgacctgctcccgtgtcgttttgcctgggggaagggaactaggacactgaaccttcatgaaagatgacatgtctccctagaataggctcatatatgccgcagagcctttccattgcagtgcttagccttgcaactctctcgggctgctgaagcacactcactctatcccgtgcaatgagtctagcctcgtgagatgtaagagctgagtggccagcgacctattgcctaagcatagataaccatatatcaggggaagctccatgttctagtcctgcaagcgcctgggcaataaccaccttgtctctcctagtttgggccttaagcttacagaccaatcaaagaagcaacactaatccacagcaaagtgtatctccaaataatattaatcccacccaattttttaaagaaggaaaatgctgaggagatccaattgggtaatcctttggtcagggacaggtccaagcgcgtggagttgacctgaagtctcaattcccgaaggatctgttcaaattcagccatccaattctgtaacatatactgaaaaagactttttgacaaattagctgccctagtaaatttagcatactgaatggaaataacacacaatcccggaaacttttgttcacatccctgctgagttatttgtcataatacatctag

SEQ ID NO: 655 - DNA, 1200 bp, mus musculus
tattattgagaatagttttctgaccctcattctggaaccaagcagccctggcaaagagcaagcctgagatgatccctccccatgccaagcaggcgaaacacacctggaacaaaccctgtccagtgccacatggcacaggcagggcataaccctcttgaaacaaccccagataccaaaaaagccctgagtgccactaagatgagtaagtggagaggtagaagtgaaagagctacagaaggatgtatgaacaatgaaaaaagacagaactagaaactcaagagtagtgaggaacagcctgatgagagtagcctgcaatgccactaaagaccatggtgtggtcctggcccatgcagccactgagggccatgtctgagtttgtcaccctgcagctgtagggagtctgttaccatcaaagtccctggcagaagtcccttgtctaggctgctacctggggccatgttgatgtctgagggatgtgcagaactgactccaccctttgccttgcttcttgggagagctggccctgaaggcatgaggtcagtagagatggccctgcgcatagcccaagaagcacagtagcactggccttagttgtgggagttgtgggtaagttggctctgccagttgtgctggcatgggcaagggaaagatgttcttctcttccactccctcacctctttgtcactcaccaccaatgggaggtaggagagcaggatctgggtcatgagagtgggagagctggtcctccctctccccctgctgcagcactcagatgaatatccaagtaccttacccagacaacacaatagagctgactctggagacatgggcataggtgagtcagccccaagggcttggaaggaggagagctggctctgccccttcccagcagcaacattggatgagctaggcagggcagtgctggagagttcactctggtagtgtgagtacagtagaactggagggatgatcagttcagatagcacccagccctgatccagagctttcagttggccagccccaacatctgaactgttgatgtactgctggagtgcatgtaggagcaagtcctacatgtctaaagctgtaggatatcatcatacagaacaacaacaggatatctgagaggagttcaggggaggatcaagtatttatagtgtagcagcagccagaggccttgaatcagaccaatgactcatt

SEQ ID NO: 656 - DNA, 1000 bp, mus musculus
tcccaagttgatgataatggactgaacctctgaacctgtaagccatccccaattaaatgtttttttataagacttgccttggtcatggtgtctgtttacagcagtaaaaccctaactaacacagaaattggtaccagcatattggggtattcctgtgacagcctagccatgttttggggaggactgtggaaggactttggaactttgggtcagaagatccatttggtgttaagagctctgtcgaatggtgtataggagcttggaagataatgttgagaacagtgcagaggatggaggcctgggttgtgaaatttcagagggaagattaaagactcttttcagggccattgctgttttgattgtgaagattctgtagttctggttagctggggctgaagaatcagctgtgattaacaagataccagaactactaaagcaaaaacttcgcattactgggactattcatgctggttagctggagctaagaaattagcggtgattaagaagagaccagcatcactgaggtgacatcttctggaaattgttttctgaaagcacaaagaggctgtgttccagagatagccaaggcagggaaggtgcctggatgtctggagcccgatattgggatctgtctcagaatctgtcctctagggactttgggggtgtctgatgactctatgcccaggtgacccagtgttggcgctgacaggaagggacttgtgaccttggtcaggcagggtttcctgcttctctaatgctgtctcaggtcccgcacgattggattgaaacagaagttgtgttccactcactggtggtcctaaggttgcatggagagttctctaggggaccttgggggtgtctgctgactccatgcccaaggtgaaccggtgctggtgccgactggaagggcttgatttttgtttattgtactcacatgaggatatagggcttttcctgtctctgaaatcatttaggggattctctaatgttaccatacaaa

SEQ ID NO: 657 - DNA, 1400 bp, mus musculus
ttgggttttctttattgtttctacttccctttttagatattggatgattttgttcaattccatcacctgtttggttgtgttttactgtaattctttgagggatttttgtgcttcctctttaatgacctctacctgtttagcagtgttctcctacatttaagtgagttatttaatgcccttcttaaaatcctttaccagcaacaagagatatgattttaaagctcaatcttgcttttcatgtgtgttgggatatccaggactcaatgtggtggcgtactggattctgatgatgccgagtggtcttggtttctgttagtaagattcttacatttgcttttcaccatctgataatctctggtgctatatattctagctgtctctggctggagattgttcctcctgtgattctgttagcctctgtcagcactcctgtgagtccaattctcttctgagtctcagtggtcagagcactctctgtagacaagctcttctgttgcagggaaggtacacagaggtctggagctcagatccacctcctggctgaagatgaaggctctgtccaagaagctctgtttcttctgtggcccatgcattctcctgtggggaatggtctctgagagaccctggatacaagatggagctgtcaaatgatttctggagtcagagcccttcctggaggctgattctcctctggtagggaaggtgcccagatgtctgggattcagctctatctcctggctgaggatgaagtcctgaagggaccttgtccaagaagctctgttgcttctgaggtctgtgtgttctctggtgtggactgatttctgagaaatctgagacacaggatgggactctcaactgagtcctggggtcacagccttctctggaggccgattctcctctatgaacctaaggtcctatgtgtgctagggtgcctgtggcgtggagaatcctttgggaactgtatggctctcagcagagtttgtgcccaagatgggaggggctggtgctaacctgaacaaaccgcagatgctggtcaggcagatttcctgtgtccctgttcctgctgtcacaggctggtttttttggaagagatgtcgtgttctaatcaccagtgatcccaaatcctggttgtgctaggatgcctgcagtacagagggtactccggggaccttgggactgtctgccaagttattgccaaagtggtgctgggctgatgccaaccagagcgaacccacaaaaatatttttaaaagttaagtaaaaattaaattatttggtaaagaatgaaactcagtagacatacagtccaaaactcaaattttggtgaagtcattgacacagctttctggattatctaaagtttgttttggacactccttcctgttaaaagagttagctcct

SEQ ID NO: 658 - DNA, 1400 bp, mus musculus
gcaaaactatttgtattcaactgtagtgattttcccagtattgcttcccagatgggaactcttacattgaaggatgatataagagtcataaatttggcatgaatataaaaatttattctgaaaatttacaagcctttataagtgtaaagaatattgcatagtggactcctatttagccccttggtatacattattctgcctagtgagcatggatgaacataactcagttgatttctttatcttgggctgaaaaatatgaagcaaagagctgtaaaatgttaacaagtgagcttgttcagccactgctctgcctcccttcaggtggcctgctgtcccaggaatgtccagattagatccatcaccactgcccattccctgcctgccaagtcccctggagcttgcttagctaccttgaactgcctgctgctcacagtcccagctccaatgtttgttcacctatcaacccaccttaaccaggactgctacaccaggatcatctatgctaaagccttccctctgcccaaaacgccctgtgtcactgtgtctcctggcttatttccggttgcttcaagatatgcactgctccctgagtacaattgtccagcccaagtctgccctccagacagctaccttaccaggaacatccagagatagccagatgtccaaagaccaccatacaaagacaattaaagagtaagggaactatgacacctttggagcacagctattctactaaaggaagacatcaatatcttagcacaactgacacacaagaaaatgaccttaaattcaatcttataaagatgatagggggagctgatcctgtgccacagtgtccagagctgatcctgtgccacagcaccccttactcaaataccaccaggagagagcctgatctcccaggagtgctgacaagcctgtgagcacaggtaagaccaccacctctgctcagaaggacccacccagagccctcaggacataggaaccaaggcacagtctgggacaggagccttcacttttccatctgcaccaggaactggacctctgccacagcacttcatacccaaatactgtcaatcaatttaaaacaaagataacaattcaaagaatcaaggaaaccaggagctggttctttgagaaaatcaacatcataggcaaacccttagccaaactaactataaggcagagacagtgtccaaattaacaaagtcagaaatgaagagggggacacaagatcagtcttgcaggaaatcaaagaatcactaggtcttacttcagaagactgtacttgacccaattagaaaatctaaatgaaatagatgattttcttgatagatgccactactcaatgttaagccaagatgagataaacaatttaaattgtcctataatccctatgc

SEQ ID NO: 659 - DNA, 1000 bp, mus musculus
ttggaaattatcttcaaacttttataataggaaatataattaccattgaaacaaagggtcttttttagaataatgactcaatttaggtaactagaataaattatttcatattagatataataatactggcttatttgaatggttagtccataagtttcaaaacaacacacaaagaagttcaaatgtttggtcatattatactattaataactgtatttcagaggaagcaaagttctttatattaagccaaattatttaccttgttttgttcctcaagttttaactaaactattagaaagataatttttaaaatatttctgttagttttaataagaatattcttttctggttgaagtgaaaattatttttacttaatttctgaatatatatagaggtttgcttgaccctccccaccacagtgctcctttatgtaaagatttaaatatatataactagaaatactcataggtcaaaatatattgcattttcagaaataatgaaagatgtctgtatttttaaacatcttaccatacagataaacataatttcattgtagcttcgattctgcaattcatacataacagaaatatccaccaaattaaaagaaaatactgatccaaatacaaaacactgcccgctctgaaggaatttttactctttttcagttcaaagtatacaaagagaaaattcttcgaaaaccttgtaaccatgtctactttttatcatcagtgtgacagaatacagtctcctaggagacacagagtttgacaaggttctggaggtatttccagaaaaggtgaagtgaggagggaagccctatccagaatgtgggtggcaccattccatgggctggagagtcttcccaacaggccaacagggtctcagactacaatgaagaaggaggaagaagaggagcgaagaggagcaggaggaggaggaggaggagaagcaggggagagagagagagagagagagagagagagagaaagaactcagtaaa

SEQ ID NO: 660 - DNA, 1000 bp, mus musculus
aaaaaaaaagcttagctgataaaaatgcttcttcgaatgaaaatagaagtcgaggggctagggagttttctgagttagtaaagtgcttgctcgataaacaagaagacctgtgttcacattcccaggtccaggaaagaagcccagcatggcaatgcctggaattgtaacactgggcttagggaaaaggcatgtggctggaacatggtcagcagcaagtcttgttcaactaggtatcgttagagaccccatctcaaaattgatagacagtggcaaaagaagatgtttaatgctgccccgacctgcagaaataatcagcggggacctagcacaggggcgagagagtgggagggacaagaaacacaaagaacgagagcaagacaactggactgatcaagcacagaaaaactttattcaggagtggcaatataagtataagcaagaggagccttcaagggaggcgggaagagcctaggggctctccaaaggtcaggtggcaatctcagctcctggaactaatggtcatagcgtcctctctactcataaacattattactgttatgaccatgaatgttctctcaggatggtttctgtaaggcagaacttttccacaaggccatggctgaggccatggctcctggcataatgccaaaccccaacttgcacattcacttacacattcatatatagggacatatatgcacataattatataaaaactaaaaatgtaaaaatgcatttgagtcagctagcaatcttcggagtcagataggtccctgagttcaagacagcaaggtgtgggttctctcctgtatctttgcgagtcattttcattcaggctttactcatctatgtatagtttaaaaagaaacaagtatctatcattttttaatatttgcacgtatattctatctcttccaatgaaataacactggaaagtgctgtgatttcccaacatctggcatgaagggcacaagttgatttgtttagtggcacctttgaa

SEQ ID NO: 661 - DNA, 1200 bp, mus musculus
tgccttgtcctcaccttacttctctttctatatttctgtgatcataagccagtcatattcctatttgaaatctctgtattattttccctacaacttatataatcttcccatatccttctgggcacaatctctgaaaaagaaaatcttgtctgctatatgattttgtaattcctgctctaggactgtgtttgtgtctgaattcgtgccctaattctgagaaccctattaagtccagtttgactcttttaccaaggcaccaaccaggatccatttagaaaccttgctgaataagcagatgggaagaatgtaaatacatgtagacttatgccataacacagaccctgaatggcctacagatatgcatgggtgctggtgctaaataagagctggcattagtcttagtttagaactggaattttaaactaaatcttatttgagctgcaagattgatgacctttaaccctctcaaaggaatacatgaataaatgtaaaattttattacattctatagtgcaccttgatatgcagattaggggggtcttttgcattggtaggatatttgtgaagactatttctgaaaaattcttaatgaagtaaacaaagtaattgaataattgagataaaagatgcaattattcagatatgaagtggagttctggtatatctgtgttgtaagtcgattactatagattcataagatggaatcgcacttgtcccttctctggtacccacgcatatagtacacatttgtgttgtatgcatcaatgaatttctcagcatttatttctccatgtgtccaaagtgatccagaatttagtgacaaataagttcaaaaattggacacatactactttctcatacccttcttttttcttgttctaattcacttaagcagtgctatacaaagcccttaatctagtcctaactacagtgccctgcctttctctaacatatgacagttttcttatttatcctactttattcagagtgctattaggtaattgtatatttattattaaatgtaatttttgtaaagcagtgattattctcatctaaacacatatttcaacacaaaataataactctattgaacataaaagtgcttatctatattggcttagtaaacagatttagtgacattcatatatatactaactagatagatatgaagtgctatgttagacattaaaaattatatgt

SEQ ID NO: 662 - DNA, 1000 bp, mus musculus
cagtgacccagtagaaaactctacaagggagagaacagtgggccacattcccagagaaggtgcctgaaaccacaaagcccccacctccataattctgtgacaattattcacacagacaacatcccaagctcctgacattctggttagactccaccccaacagttacctgactatagccaggtatgctcttccccatagttacctggttttcagcaagatagtccagctcattataaaagggctgcttggcccctccttgctctctttaagctctcacctttcttactctcttttctagccctgcttctctctctcccttcctcactctcgacacatggtcatggctggcctctctccctcttttaccttctccctttatctctgactttggacaataaatctctaaaaccatagactgtctctgctcatcaagtcttgccatacttgaatgatgggatatactttcccctaaagagcctcatctaaccccccgaaaggccttcctgcactctagtcatgaaccatacatggactggaccaagtactctcacccaagtgggaaccacccagcaccctctctccccctgccctctcctccctttggtcccggggatgaccgaactgccctcaggtcctccatttgttctcagcttttccaaggtgttcagtggtgtctgggatgcctgagactgagaacctgttatctaggactgccccttgtccaccccttgccgagatgatatctggtgacttcccacaggcagacacccaccctgactgcctggatagcttgcagcagtccttcatcgcctgcttgcacagagcactggaactctggtgggacacaggttttttcccactccctttattaccctgtctcccactgcccaacaacagttgtgtctctctttcaatgatttgttaagtggtaagagtgggttgttgaagtctcccactattattatgtgaggttcaatttgtgtgtgttgagctttagtaa

SEQ ID NO: 663 - DNA, 1400 bp, mus musculus
gacaaatagagctaagaaagtaatgtatacatttagtaaaatactcagatctgaaaagatttaaactatccaactggattaaattgtagtctcatagtaaatagcaccattattaatgtcattgaagtagtgtattctttgtgaactaacctatattgatgttaaaatttttgtttcattgcctcaaaattgcatagatttcactaccatagaaacaacagagttgctcaataaatgtttgttcgtcgggtgacaaaagaaacgaagtgtggtaagtttaccaaggataagtatttttttttaagtgagacagaaaaataagggaaaaacatttatttttccaaataatctcagactgactgctttcattagtaattattgtctgttggcaatggtctttcagttcctttgaattggaagggctcagtattgaaccactgagctgttggtctagatgaaattggcacatggcatgggaagacttattttggtataaagactgctcacacacttagagattattttaacatttggttattaataaagttcctctgacaattatacagttttcctcctgtgccttctacttttatctcttgaaacaataccccatgcttaaattctgcacatgataaatgataagtattagttatcaacctatatatatacttatcttttatctgaccaaatgtctgcctgctgcatttaatacacaacccaccatccaatggaagttcagaaggcaagtctcaatggcactggaaaggcttagagatgatagcctcattgtatcaaaatgtttctccataccattttctggagacaattgactttaagaagagttaggtgtttaatacttttgttatttattctactataattccaggtataaattagcttaaataagaacaagtgatatttttagtaatttaaagttgtttcaggtttattcctagctgtaatgctttctgtcattactgttctgtgagatgatactggacatgcatcagcacttacacatttaattaaatatattggatgtggtgacagtgctgtttgagatgtaggctacctaagggcttcagatggtcctctggaaagtgccacaaatgagatttaaacaccatttttgggaatttgagaattgattaggttgattcatcaggaaattttcgaggactctaagactcatatttttttatgaatcacagtaaactagactagtctttccataactgtgtaccttgtgtaacattttaaagtcagaaacttttataaagttttgctttttactgaatagtactttatggtgattggagcattcaagcacaatatgatagtttcccatcttaatgaccaaattatataatccaggatgaatagattacttgtttcttgga

SEQ ID NO: 664 - DNA, 1400 bp, mus musculus
ctatctcattcagaagcgatatcatcttacataattttctcttttattatgtgtactaatcataacttaagaggtatctccagactgactaatatagggatagatcaatgtgagaaagtccacaaggaaacaatggtgctttctgatgcttcctttctgaagctagatgcacaatgtgtgtttgagtaatcctggtttaaatctttgtggttgatgtgggttttcttttgtttagtgttttgttcttaggacaaaaatgcctgaatcttcaatggtgctttcttctgggtaatgagtgagacaaccattcaaccagtgagccagataatgaatagatgttgggcttgattacattttaaatgcatattaaccatttaaccccaattggaagtgctactgaaaaagactttgaataagctgaagccttaaaagcaaagcaacagaagataacttctgggtcttgtatcctggatctctcagtgaccagtgcacacaggagagcacatgggcctcagaagcaacagagcttcttggacagggtcccttcaggccttcatcatcagccaagaggcagagctgagaaccagatctctggccaccttccctgccagaggaaagactgcctccagggagggctttgaccctaggactcaggtgagagcaccatcctgtatccgggtctctcagagaccaatccacacaggagagctcacaggccacagaagcaacagaacgtcttggacagggacacttcagaccttcatcttcagcctggagagagagctgcaatccagatctctgtgcaccttccctacaagaggagacctggctgcagagagtgctctgcccactgggactcaggagagagttggactctcaggagtgctgagagaggctaacataatcacaggaggaacaagctcaagtcagagacagctagaacatctaactccagagattaccagatggcaaaaggcaaatataagaatcttactaacagaagtcaagaccactcagcatcatcagtacccagtactcccaacacagtgagtcctggatatccccatacctgaaaagcaagatttggatttaaaatcatatttcttgatgcaggtaaaggattataagaagagcattaataactcacttaaagaaatacaggagaacactactaaacagatagaagtccttaaagtagaaaaacaaaaaatcccttaaagaattaaaggaaatcaaaaccaaacaggagaagaaattgaacaaaacgatccaaaatctaaaatggaagtagaaacaataaagaaagcccaaaggaaacaactctggaaatagaaatcctaggaaagaaatcaggaaccttagatgtgagcatcagcaacagaatacaagagatttaagag

SEQ ID NO: 665 - DNA, 1600 bp, mus musculus
aagatagagaacttcagaccaatttctcttatgaatatcgatgcaaaaatcctcaataaaattctcgctaaccgaatccaagaacacattaaagcaatcatccatcctgaccaagtaggttttattccagggatgcagggatggtttaatatatgaaaatccatcaatgtaatccactatataaacaaactcaaagacaaaaaccacatgatcatctcgttagatgcagaaaaagcatttgacaagatccaacacccattcatgataaaagttttggaaacatcaggaattcaaggcccatacctaaacataataaaagcaatctacagcaaaccaggagccaacatcaaagtaaatggagagaagctggaagcaatcccactaaaatcaggtactagacaaggctgcccactttctccctaccttttcaacatagtacttgaagtattagccagagcaatttgacaacaaaaggagatcaaggggatacaaattggaaaggaggaagtcaaaatatcactttttgcagatgatatgatagtatatataagtgaccctaaaaattccaccagagaaatcctaaacctgataaacagcttcggtgaagtagctgggtaggtctctcagagcagaagtgatcttacttgtgctcacaggtgtgtcagcactcctaggatatgagctctctcctgctaggaccagaatatggagagctgtggcacagggtcagctccagggtgcagatggagagcaaaagttctatctagatttcataaattgttacttaaaacataagccactgggtcacaaaatatcaaatgcttatgagctctcccaattataaaaagcagacttgggctgcagagatggctcagcggtaaagagcactgacttctcttccgtaggtcctgagttcaaatcccagcaaccatatggtaactcataaccatccataatgagatctgacgtcctcttctgctatatctgaaaacagctacagtgtacttacacataacaataaatctctctctttttttaaagaagcatacttatcttcagagaaaaatgttcagtaactctggtaacaaaaaaaagaagagaggagattcaaattgttaccaaatccacaatctgaagactttttactaatattgccttttcaagacatagttattttgtgtacccaactgtcctataactagctttgtttaccagatttgcttcaatcctgcattaacatagataatctggaaagctagaaaaaccattactgatgatgttaagacaaactgaaaacaataaatagcaggacaccacttgtaacattggtttttttattgttttcggaccattactttggtgcataaagaacttccttttcactaagctattatttatttttacaacttgtgttgaatgtcaaggaaaactatttgatgttatggatagaaaaagcattcatatcattgtaaacactttggaaatgttcaactggttgctgcccttttgtctaagatcaaatgaagagtctgatgatatgagacacaagaaaaaatctagatttgcaatcaccttccttagctcaacctctactaaattt

SEQ ID NO: 666 - DNA, 1000 bp, mus musculus
ctggccatggcattcctctgtattgggcatatgatcttcacaccaccaagggactttcctcccattgatggctgactaggccatcctttgctacatatgcagctagagacatgagctccgggggtactggttagttcatattgttgttcctcctatagggttacagacaccttcagctccttgggtactttctccagctcctttgatacttttttaacatggattgttattacatataaacaactgtagtttttacagtatttattttgagtttatgtgggttaggttgtttttttttttttttataaaagtattctttaatacaaacagtatattttgcttcttatgttttatattttattgtctatctaagcattatgtatgctgagatgtttgtaattttttattttattttttatttcttaatttatttttacagtctaatgtttatccccctcccagtctgccctctgactgttccacatcccatatctcctcaaccacacacacacaccatgtctccagaaggatgttcccaccgctaccccctattccaaccccatcagacctcccctttcccagggcctcaagactcttgagggttgggtgcaccttttctcactgagtcaagacctcgtagtcctctgctgtatatgtggtgggggcccaatatcagttggtgtatgcttcctggttcttggctcagtgtctgagcaatcttgggaattcaggttagttgaaactgctgttcttcctatagggttgtcctccacctcagtttcttccctaattcaaccacaggggccaccagcttctgtccattattttggtgtaaatattttcatctgagacagtcagctgcttgataggcctttctgagagcagtcatgctagacttctctttgcaagcacaccatattatttattatgtcaggcctttgggccatccctggatatttaacatgatcatatagctataagtagtgatacattaatatat

SEQ ID NO: 667 - DNA, 1200 bp, mus musculus
tgtttgtttgtttaacacacatgttttaattccgaaggcattcactctctgacttatgttcaatgtatcattatcagtttatatacttatgtacctcataactttctaaggcttagataatagaagtagcatgagttccttactgcccacacatctgtgggtcccatgagtagttattttcatctagacaaagcagatccagtttatcttggcttagttatatcctgtttccattgcaacattagccattgcactaatggctagggtcagctgttttgtctgtgatgactacccaaatatgcggggaaatgggctatgtacagacaggctggtctccagtcgagctgaggtgtggaactccagtacccggtggtggtaattcccacctacgttggatgtaagatgttcactcatgtcttctggaatcctggctcctgttgaagttaccacccccacagcccccacagaagtgtggcttttagtcacatacacaatgtcccaagcttctgaccgacaggctagactcctcccagttacctagcaacaccgagataacagcacactataagaggggctgtttggccccaccttgctcttctctctctctctctctctctctctctctctctctctctctctctctctctctctctcctctctttccccctgcctttcttcaataaaggtctaaaaccatagactgcctttgttcatcaaggcccactgtgcttggacgatagcataggctttctcctaatgagcttggcctagtttcctgtcagaaggccttcttgggctccagctatgaaccagactaaggactctccgctgtgtgggaacctctctccctctgccctctctccgataactccaaaggggtttgcatcagggccactagtatcaggggctgccccttgtccaactccagaagagtggggtccagtgtctttacacagccagatgcccacataggggtggagtagaaagcctccggtagccctcactcccacgtctgcctgcccagagcacaggaggaactctggatagatgttggctatttccctcccctctccttccattaacaccccccccttccatgccccacacatatacttgctgtttagctggggtttgaatgggccatactggttactgcactatgtgtttctgattacacaacaaggtagctgaagctacttg

SEQ ID NO: 668 - DNA, 1200 bp, mus musculus
ggaatctattatcacaagctatttcacagataatttttgaaaataatagaataaaggccttacaatgatggagaaatgcattctccaatttcagttaaaagataattaaagaaccaaagaatttttattcttctttattcctctgagttatgctcagtgtctagtgaatcattgaactaatttgtgaaaacgggctttaaaagctttataatttgtgcatgtaaacatacacatgcacaccacacatgtaaataaaattcaggtcatagtattttacacacatgttcctaagggtaacttcatgattaaaaaccaaatttcattacacaatgacagaggaatttagacacaatgctttatttttctgctcttcagggttttatacttaaattatcagtaagtcataaaattgattaaaagaaattatttttaatgagagcatttgtttttttagggttttactgatgtaaacagacaccatgaccaaggctactcttatataggacaacatttaagaggggctgattatagattcagagattcagtctattatcatcatggtgggagcatggcagcatccaggcagatgtggggctcaaggagcagaaagttctaagtcttcatccaaaggcagccaggagaagaatggcttgaaggtgtttaggaggagggcctaatggccaatgcacaccgtggcacatttactccaatgagaccacagtaacttcaactagcctacatcctaacactgccaatccctgatccaagcataatcaaaccaccacagtactataatgaattttatcatttttctaaaattggcttccttttttgtaaaatgaaattatttcctttgtcttttctttttttggttgtcattgtttctttaaaagcatgtaatataacttgtgcaaaagggttacccaaaagtataccttttcttatttttctattcttttatttaatatggtcttcttcagatataaatatgagaacactttgaaaaacataaaagagaacaaaatatatgtatttcaacataattacaagtggattatatcagatctttcttcagcaaaccatgtggaactttgtattgaaaaaatatagagaaactgcatataacaaccatgatatatatatatatatatatatatatatatatatatatatatatgtgtgtgtgtgtgtgtgtgtgtg

SEQ ID NO: 669 - DNA, 6000 bp, mus musculus
attcatttacatagaggtcttttattctcttggacttgggtttctgcagggtgataaaatatggatcaccaaattccagtgtattcctgtcctcacatattttccagagatgattcagttttattttgttcagcaacaaactagattagaggaaggacatatttattgttttcggtttttgtttcaattttataaggatttctgattttttttaaagttgtcatttaacacattacaaaatatgcaaacaaaattgaatagtttacagtgggtgggggatatgtaaatgcctaaatacccatgagaagtattacctaaaaaaaaaaccaaaaaacaaaacaaacaaacaaacagacaaaaaaacactctcaaaacaatcctaagaggcaaatggtcataattaaatcagagtatgtgtaacttagaaataacatcgcttgctaattgaacttatatgtctcacacagacctttatatgtgctgttattttcattcctcacaaatcctggttattttggttcattctgtagatgagagcatccgaattggctttcctggtgtcatttctacatagggaaagataagctgcatgtccttcagtgtgcatttctcatttttcacgttttttagtgatttcgtcatttttcaagtcgtcaagtagatgtttctcattttccatgattttcagttttcttgccatattccacgtcctgcactggacatttctaaattttccacctttttcagttttccttgccatatttcacgtcctaaagtgtgtatttctcattttccgtgattttcagttttctcgccatattccaggttcttcagtgtgcatttcacatttttcacgtatcattttccatgtttttcattgtaactcattgatatacactgttctacaaatcccgtttccaacgaatgtgtttttcagtgtaactcactcatctaatacgttctgcagtgtggtttttatcattttcgatgtttttcattgtaactcattgatatacactgttctacaaatcccgtttccaacgaatgtgtttttcattgtaactcactcatctaatatgttctacagtgtggtttttatcattttccatgttttcattgtaagtcattgatatacactattctacaatgccggtttccaacgtatgtgtttttcagtgtaactcggaaaatttagaaatgtccactgtaggacgtggaatatggcaagaaaattgaaaatcatggaaaatgagaaacatcgacttgacgacttgaaaaatgacgaaatcactaaaatacgtgaaaaatgagaaatgcacactgaaggacctgtaatttaactagaaaactgacacatttttattatttgggatgttaaaaagttatcgtatgtgtgtgtgtgtgtgtgtgtgtgtgtgtgtgtgtgtgtgtgtgtgtatgtgtgtgtgcttccttatgaagctgttttgtttccagtttctgtgaagaattgtgttgaatgtcatggggtttgaattaaatctatagattgcatttgactggatggccatttccacaaaaatctctcatcttctgatatgcttttcaatttctttcttcaatgctttacaggtttattatacaagtctttcactgtcttggttagagttatcccaaaatgtccttttttttgaggttctgtatatcctcccttcagaaggcaggagttacttgagaatgctgagctgggaatgccaagatgcaggaaactagctataaagcttccagcaaatttccagaagggcattctgagctggacctggcttgtacaaagccctggggttcaatccccaagaccactaacaaataaaaacagtactgaaatatgcagagctactgagcgaaagtcctatatcctctatcagttcaaacctctcctcatttataatgaaaccactttgcccatctgtgtagaaagctgttgctctgggcttgggatgtggctcaatggcagagtgccatttctaaattttccacctttttcagttttcctcggcacatttgatttcctaaagtgtgtatttctcattttccgtgattttcagttttctccccatattccaggtcttacagtgtgcacttctatttttcacgtttttgagtgatttcatcattttttcaagtcaagtggatgtttctcattttccatgattttcagttttcttgacatattccatgtcctacagtggacatttctaaatttcccacctttttcagttttcctcgtcatatttcacttcctaaagtgtgtatttctcattttccgtgattttcagttttctcgccatattccaggtcttacagtgtgcatttatcatttttcaggtttttcattgatttcatcatttttctagtcgtcaagtggatatttctcattttccatgattttcagttttcttaccatattcctcaaggtttccggggctagagaaagtttgctggtggtagacgaagccgactgcatggtagctgggtctcagttgtttgtggcctccttagtagacagatggacatggtttgaattttttatattaagaaaaggattgggctacaaatagagctcagtcaatagactgcttgcccagcctgtgtgcagccctgggtcaagcatatgcatcccattatcctggcctcgtggctcttcttatagacccagcactgaataggtagaagctgtatattacttttctgttgctccgataaagcatcatgactaaggcaacatacataaggaagagtctcactaggaaacaaaataaaggagattagattcacggacatttttattctttctcctatctttcttcctcttttatctaatgttagggggacaaaggagtaataaatgttggaaagaaaaggggttttataggaatgatacagaaataaaaggaataaagtgcagattattgaatctactcaaactattagagctactactaggcaaaaatgatacattgggatggatctttgtacattgatgtaaaatcgtggttatatattgctacaacatattttgtactttgctgttgaatttagattttcaggtagttttttgggactggatatcatggacctgcagttggggtatgagaaatgcagccaggcaggtgaaacaggggatgttctaaactaagcttttgtattctgagcccttgagttgctgggctatagggaagtgttgagcatcactaaaggaaaatgataaaaactacactgtagaacatattagatgagtgagttaacctgaaaaacaaattcgttggaaacgggatttgtagaagagtgtatatcaatgacttacaatgaaaaacatcgaaaatgataaaaaccacactgcagaacgtattagatgagtgagatacactgaaaaacacattcgttggaaacgggatttgtagaacagtgtatatcaatgagttacaatgagaaacatggaaaatgataaaaaccacactggagaacagattagatgagtgagttacactgaaaaacacattcgttggaaacgggatttgtagaacagtgtatatcaatgaggaaagtaataaggatattgaagtagaaaagttttaaaagtgaagtgaaaagaaagtagagaagaaaaaaagaaaaagaaaaaaaagggaatttagcgttggatcaatgagtaaagtgcttgctccgataacacgaaaacccaagtctagattcccagcacacattgagtcctgggaggctcccccatcccagatctctgggactttctagaggttctcccatgcccccacccccagcagctgtatatatctactcattctcccataacctcattatgtagtccatcttcattctcctctagttttactctttcctaattccaagtaacacttgtcagaaaacagaagtatgccaaatgtagttatagatccagttagctttaactttcaattcattaacccctgttctatctctctctctctctctctctctctctctctcaatgtgcagtactgggagtcttatttgtcactataaaggtaatatgtaccaatataaataacttgaaaaaccttccaagtgtcaacatctaaaggcgattgtgtttccttttgtttttttctaatccataggcttttaatttttttttaatttatgagagttttcatatatactgaaatatggacatatgtgcaatgtactttaatgttcatgctcatagacctttggtagagccagtgtttttaatctgggtgtcttgatgtctttattagcaatatcttttgataaataatttggcccatttattttttgtgcttgtggccttcatatagctttatgaaaccttagtttaaatttatttactgatttatttgagatggggatctcactatatcacccaaactggcctctaactcctgggctcaagcagtcttgtttcagcttcacaaatgaccctcgggccccttttgaacatgtgtctggctatgtcccagttcttcaaatttccctatattcatagaagcctttccccaatctttctgtttctcccctttcccagtttctttcttttattttgatatacactgttctacaatgccggtttccaacgaatgtgtttttcagtgtaactcacacatctaatatgttctacagtgtggtttttatcattttccatgtttctcattgtaactcattgatatacactgttctaaaaaatcccgtttccaacgaatgtgtttttcagtgtaactcactcatctaatatgttctacagtgttgtttttatcattttccatgtttctcattgtaactcattgatatacactgttctacaatgccggtttccaacgtatgtgttttttttgtgtgtgtacctactttggaaagaaaactgaaaatcatggaaaatgagaaacatccacttgacgacttgaaaaatgacgaaatcactaaaatacgtgaaaaatgagaaatgcacactgaaggacctggaatatggagagaaaactgaaaatcacggaaaatgagaaatacacactttaggacgtgaaatatggcgaggaaaactgaaaaaggtggaatatttagaaatgtccactgtaggacgtggaatattgcaagaaaactgaaaatcatggaaaatgagaaacatctacttgacgacttgaaaaatgacgaaatcactaaaaaacgtgaaaaatgtgaaatgcacactgaaggacctggaatatggcgagaaacctgaaaatcacggaaaatgagaaatacacactttaggacgtgaaatatggcgaggaaaactgaaaaaggtggaaaatttagaaatgtccactgtaggacgtggagtatggcaagaaaactgaaaatcaaagaaaactgaaaatcatggaaaatgagaaacatccacttgactacttgaaaaatgacgaaatcactaaaaaacgtgaaaaatgagaaatgcacactgaaggacctggaatatggcgagaaaactgaaaatcacggaaaatgagaaatacacactttaggacgtgaaatatggcgaggaaaactgaaaaaggtggaatatttagaaatgtccactgtaggacgtgaaatatggcaagaaaactgaaaatcatggaaaatgagaaacatccacttgacgacttgaaaaatgacgaaatcatctgtttccaaagtaggtacacacacaaaaaaaattgtatataacttagttacatgttcctgcacatgtttgctgccatgtatcttgtgcaccctgccaccaaaattccccttccaattccagtaacttctcccagtattttctctttcctttcctaacaccctcaatgtggtccctactgttcccagacctggccacagtctacctgagaaatctattttattttggcttccctgggagagtcttgcatctcactgtaagcccaccttgttccttagctctcaaggtctgtgaactgtagcacaattgtc

SEQ ID NO: 670 - DNA, 1400 bp, mus musculus
ctaccttattttaaaataccaaacatatatgaagaaatcttattgaccaaatcactgctaaatcttgcattttatatttaataaattacattttcaatattgaggtgtgatacaattctatggcttagctatgcatttctataaaaattattaatgataacaaccaggtttttgtgttttaggttgtttttttaaaaaaatatttgtaattaatgttttacaattcatattacatttcccacccttcccctcccaccctccaactgttccacatcccgtacttcctccccaccacacccagtttccacatggatgcctccaccctccaccccatctgaactctaaacaccctggcgcctccagtctcttgagggttaggtacatcatctctgaatgaacatagacctgcaagtcctctactgtatgtgtgttgggggcctcctatcagctggtacatgctgtctgtttggtggtccagtgtttgaaagatctctgtggtccatactgctggtccttctataggatcactcctctcaaattctttcagccttccctaattcaacaacaggagtcaactgattctgtccatttattgggtgcaaatatctgcatttgactctttttgcttgttgagtctttcgacgggtggtcatgagagatccctttctgagagagctccatagcctcagcaatagcgtcaggccttgggacctccctttgagctggatcccactttggttatgtcactggaccttcttttcctcaggttcctctccatttccatcactgtaatcctttcagacagaaacaattatgggtcagaaatgtgactgtagaatggcaaccctatccctcacttgatatcctgtcttcctgctggatgtggactccataagttccctctccctactgttgggcattttatcaaaggtccctctcaatgaattcctgaagtctctcacctcccaggtctctggtgtactctgcggggtccccccaacctcctatttcctgaggttgcctgtttatattctttctgctggacctcagggtttcagtccttttccctcatccagtactagatcacctcacacttgtttggtaatcctgaactttgactggaagaccttgaactccttttcagataattcttcactatgtatttgtcttctttcatcaaatgtctatttgggcttattgccatatctatctatctatctatctatctatctatctatctatctatctatctatctatctatttccttggcttgtataaattggttacttattttgcatgctagccagttaatatacacaacttataaaatacaaatcacatttcttaggagttcaatcatttcactcacactttcttctttctcctttttagatgtggg

SEQ ID NO: 671 - DNA, 1000 bp, mus musculus
tagtagtcttctatatgcctttggatcaagatgtagaacttttggctcctccattcccctgtctagatgatgccatgctctctccttgatgataatgtactgaacctgtgaacctgtaagcctcctcatgttgtggatgggcctgatactgaccaatcacctaatgaataaaggagccaatcactggcaggacttccaggttggaaggaggaagagaggtatgaggaaagagttaggtcctttttggaacagggacagagatgggtaaggtgtagctgctagagttccctggtatcaaggcggatccacaagaattcgccaccagaggaatcagattttaataaagcttacaagttcaggttttagttgttgcacccagggattgagttaccgttgcttctgaactgagtttgtgttgcattttccttcacgcagaggctcgtctgggtccaagagagaaaggtactgcagcaaagcgtgggtttgtcatatgtgcttcacaaaggccatgggggatttgaagcatagggttaaagtggtagcaaccagccagtgggaatctagcgagctgggtggagagattgtggagttctgagtcacagtccccacaagataaaaacaggtcgaccattgcccgccagtgcatggccagccaggactctgtggcagaagtacaagctttgcagaaacatgcaggatctcttttaatattttctgcaacagggaataaattaaatgttgttctttataagagttgccttggtcatatctctttacagccatgtaagctcagcatccttagccttcagggaaattcaaatcaaaactactttgagattccatctaactcttgtcagaatgactaaaccaataacactatttatagttcattctgacaaacatgtgttgcaaggggaatacttctccattgctaccgggtatgcaaacttttgctgccactgtggaaaaccacaaggtgattcttagaaagttggaaata

SEQ ID NO: 672 - DNA, 1000 bp, mus musculus
tctttattagagactggaatataacccctccctattttctttttttttcattagatattttcttcatttacattttaaatgctatcccctttcctagtttcctctccaaaagtccactataccctccccctgccctgctccccaacccacccactcctgcttctttgccctggcattcacctgtactggggcatagaatcttcacaagaccaagggctctcctcccactgatgacagactaggccatcttctgctacatatgcaactagagacaaaagctctggggggtactggtcagttcattttgtcattcctcctatagggttgcagacccctttagctccttgggtactttctctagctccttcattgagggccctgtgttccatccaatagacgactgtgagcatccacttctatatttgccatgcactggaatataaccagaagatgttccaacttgtaatgaggacacatgttccttatttataatagccagaagctgcaaagtacccagatgtccctcaacagaggaatggatacagaaaatgtggtacatttacacaatggaatactactcagctattaaaaccatgaatttatgaaattcttaggcaaatggatggatctggggaataacatcctgagtgaggtaatcacaatagaacacacatggtatgcactcaacgataagtggatattagctcagaaacttagaatacccaagatacaatttgcaaagcacatgaaactcaagaagaaggaagaccaaagtgtggatatttaattccttcttaaaatggggaacaaaatacccatggaatgacttacagagacaaagttcatagcagagactgaaggaatgaccatccagagactaccacacttggggacccatcctgtaaacaaccaccaaatccagacactattgcatatgcacacaagattttactgacaggatcctccctattttctgttctgagattttgtctggattgtg

SEQ ID NO: 673 - DNA, 1000 bp, mus musculus
aagtggacattagccaaaaacatcagaatacccactaaacaaaccaaaaaccatagcttaagaaacttaagaagaaggaagatcaaagtgtgtatacttcagtactatttagaacaggaaacaaaaaaaaatcacaggaggtagagaaagggatgcacctgggagggagagaggtgggagaggtaaaaaagggggcaggatgaggtatgggaagagacttgagagaagttcagagagggaaattgaatagaaatatgtttcagtgggggatggagaactaggggtagccactataaagtcccagaagtaagggacgtgaggggattccaggacataaaggagatgacattagccaaagtacccaacaaaggagtgatagaacctgtagagaatacctccactatatagccactgcccccagttgggggatgggacctcacacccatctcaaaaaatttaactcagaattctaaagaaaaggcagggataaaaaatggagcagagactgagaagaaaaggccataaagagactgtcccacctagggattcatcccatcagcaggcaccaagccccaacactattgctgatgcctgacaagaagcacttgctcacaggagcctggtatggctgtcccatgaaaggttctgcctgtaactgactaatacagatgcaggtactcacagccaatcatcaaactgatactggggaccctaagggaaaagctaagagatggactgaaggacctgaaggggattgcaacctcacaagatgaaaaataaccactaatcagaccacccagtgctcccagggactcaatgaccaaacaaagagtcatggagggattcatgactctggctacatatatagaagatacatatgtatcttacatatgtagacatatatgtatcatacatatgtagccttagctgtcatcaatgggaggggagactcttgatactgtggaggcttgatgtcccagcaagcatagtggaatgctag

SEQ ID NO: 674 - DNA, 1200 bp, mus musculus
ttgttcaattccatcaactgtttggttgtgttttcctgtatttctttaaggatttctacccctttagccatgttctcctgtatttctttaagggagttattaaagcccttcttgatgtcctctaccagcgtcatgagatatgattttaaatttgagtcttgcttttcaggagtgctggagtatccaggagtgctgggttctgatgatggtgagtggtattgatttctgttagcaagattcttacgtttgccttttgccatctggtaatctctagagttagttgttatagttgtctctggttggagcttgttcctcctgtgattctgttagcctctgtcagcagacctgggaggagtctagctctctcctgaatcagtggtcagactactctatgcaagcaagctctcctcttgcagggaaggtgcacagatatctggcattcggatttgactcctggctgaagatgaaggccctaaacaggtctcgtcccagaagatgtgttgcctctgcagtctgcatgctcacctgcacagactggtctctgagggacctggtacacaagatgcctctctcacctgctctagttgtctgatccctcctgtatagacacctctcctctggcagggaagctgcccggatatctggagcccaaaatgcctgtcccagaagctgtttcgcttctgtatttcacactctcccctgcctagactagtctctaagggacctgggacccaagatggctccctcacctgctctgaaagagccctccagggcagacacctctcctctggagaggaaagtgcctgaatgtctggaacttgaaatggggtgtgtcccagcagttatgttgcttctttagtccacttgctcaccctttgcagtctgtgagctgacctgtgcagactggtttcttagggacccaggacccaagatggctcccttacctgccatatgtgaagttttattgattactcaagaaaaattgtttacatttgaatcttcccagctttttaatgatttttaaaaaaattttaatttatttttattttggttattttgagacagggattctctgtgtagccctagctgtcctggagctcactctgcagaccaggctgcacttgaacttagaaatctgcctgtctctgcctcccaagtgctgggattaaaggcattcgccacctctgtccgccttctttt

SEQ ID NO: 675 - DNA, 1200 bp, mus musculus
aacattggtaaactactcttagttaattaaaaattccattaatacctcatctcctttttaatccaaatatattttcccttccccctctaggtgttagtcctactttctacctttagttcccatgtcttcttagttttcattggtctttgatagtttctcagtttttgagttttaaatatacacttttaatttattagagttacataattttctccacaccgcccctggcccccaagccccgtctcttcccatttccagcctccctttcaggtatacccagttcatccatggctgctggtcagctacatagttttaataaatatatgttgggtttcccatttaaccactgtgctgctaagcaatgctaaatattttcagtgtgagaaacaacttacagagaaaggctgaaacaactgtatttaaatgccatgattaaacattttctttttcattttatttaatttttttacagtgcagagtgttttttaatttttttattagatattttctttatttacattttaaatgttatcccctttcttagtttcccctccgaaaatcccctattctctcccctctctccctgcagattttataccctttccagactaccctctgactatttcacatcccatacctcccacatcctcccccccaaccctgtctccacaaggatgtccccacgcctaacctgcaccttacatgacctccccacaccctggggcctcctgtctcttgagagttaggttcatcttctctgtctgagtccagacccggcagtcctccgttatatgtgtgtcaggggccttatatcagctgatgtatgctgattggttggtggcccagggtctgagatatatcgggggtccaggttatttgatactgctgtgtcaacttgacatatgctaaaggcatttgaggaaaagcaattccaattaaaaacatggctccataacaccaggctgcaggtaaacctgtagaatatttcttaataagcgattgatagatgagggactaccccattttgagtagttatgggttctattagatgagcagcactcttccatcgtctctgcacctcctgccaccatgttccagcactgtttgagttcttcttttgactttaatgttgaactgtcatgtggaactgtatgccaaataaacacttttgtccccaacttgctttgggttatgatgttt

SEQ ID NO: 676 - DNA, 1000 bp, mus musculus
agccaacttccacatggaaactgaataacactcttctcaatgataccatggagaaggatggaataaagaaagaaattaaagactttttagagtttaatgaaaatgaagccaaacatacccaaacctatgggacacaatgaaagcatttcttttttttttaagatttatttatttatttatttatttatttattttttatgtaagtacactgtagctgtcttcagacacaccagaagagggagtcagatttcattacaaatggttgtgagccaacatatggttgctgggatttgaactctggaccttcagaagagcagtcaggtgctcttacacaatgagccatctcaccagcccgaaagcatttctaagagggaaactcagagctctgagtgcctccaagaaggaactggagagagcacacactagcagcttgacaacacatctaaaagctctagaaaaaaaaggaagaaaattcacccaagaggagtagagggcaggaaataatcaaactcaggggtgaaatcaaccaagtggaaacaagaagaactattcaaagaattaaccaaacgaggagttggttctttgagaaaatcaacaagatagataaacccttagctagactcactagagggcacagggacaaaatcctaattaacaaaatcaaaaatgaaaagggagacataacaacagatcctgaagaaatccaaaacaccatcagatccttctacaaaagtttatactcaacaaaactggaaaacctggatgaaatggacaaatttctggacagataccaggtaccaaagttaaatcaggatcaagttaacgatcttaacagtcacatatcacctaaagaaatagaagcagttattaatagtctcccagccaaaaaaagcccaggaccaggcgggcttagtgcagagttctataagaccttcaaaaaagatctaattccagttctgcacaaactatttcacaaaataaaggtagaaggtactctacc

SEQ ID NO: 677 - DNA, 1000 bp, mus musculus
acccaccacgccctcaactctggcatgttctctaaatagatgttgggctgcttccagctgagcttggttagcagagagtcagtcccactaggtgggaagggtagtatggggagacatagacacaaaacacattattgcatgaaaatattcttaagcaattgagtaccatttgcaatgagtaatcactaaacaaattgaggcagggagagtaaaggtctagaaagaactattttagtcactacacaagcctcttgctgaccccaccttaattctacagagctacttctccaacctgtggaaaaagttgcaggtgaaaactcagagagttataagaatgtatgaagtaattctttgaaaaatggagtattagaaatagaaaaataatagaacaaagaaatatctccaattagtgaggttgtgaggtgtgaaaatttatacagatgggaaattctatttattcgtgagcattctataattgtgaagtgccacgaattcactttctttattgacttcagtgtacttaatcatgactgtgttgtgatgtgtaaccaaatacactttagagctatgggtatatttgccaactcaaggaaaagagatgaatttgcctgattgacattctcctgtggagttaaaggatgtgtttcttgccaagttgctttatctattgaaatgcctgaggaataaattaatgctggccacagatgagtctgttataattatactgtaccacttatgatgcataccatacctcaaagaactatgattactttatagtaataatataggccagcaagaatgctcagtcagtaaatgggcttgctagacaagcctactaatgtgtttgatccctgtaaccagtggtagaaggaaaacaattcctgagagttgatctatgtgccttagtgcaccgcaaccaagcacaaacacaaacacacacacacacacacacacacgcacatgcacacgcacacgcacatgcacatgcacatgtgtgtac

SEQ ID NO: 678 - DNA, 1400 bp, mus musculus
tttatagcatgtaatataaatatactaataaatatacacaatatagaaatacatattaaattaagtttaaatatatatgtataaatatataattatataatatttataggtttatatgacaatataaatatatatttaaactttattgtagagagacacattgatatatatatatgtatatatatatatatgtgtgtatgtatgtgtgtatgtgtatcacacatacacacatacatacacacacatacacacacatgtgcactcttcagggtggggatttttatcccactcctcctatcccataggaaactccttgaaagctattttttccaaccagaacgagtcatctgtctggtgagtctggaaaacatctctgagcatgctgtcatgggcttgttctctttgctgaggattttgtgggctagtgatttggtcaggacttagttggtgtcatctgtctctgtggtgttagctcagttcaaccgtgtgtttgcggtcagtggattgtcaatcgggtgtaggttgattctgcgagatggcactcataggtccagcagtcacccaggtttcagctgaggcactgtgatatctctcctcgtgcctttcccactggagtaacagtttaaacttcctcacttggtggatgggttccagaggaaggatgcagtggacccttgactcagccttgccgcagaagttgaataacactatttgtccaggcgagtcacaaggcaacagtggtaaagaactgggaaatatattccttgatgtgagcatgagtaggtccccacaacaggggtgggaagaatccacagctaatgttttcaagctctggcctcaatggtacagattagtttccagtcacagaagaacgctaccagggccttggtctcattcctgggtgcatttcccccattgttttataccttagaggagagaaagccataaataatgaaaacctcacaaattgggcaatgacttgaaggagttagggaaataagcaagaacaccaggccaggggattattctgaaagcaacgtcacagtctctaccacaagagaaggagctagatgcacactagaaatgttcccactatccttgtggaccaactctacagagcctagctactaactagaatgctggaaaagtgccgatggatcctgggaagcacttattgcttttgcattcatattctgcttctgtcttcctctactattgccgattcttgcacagctctctggagatggtgatgggatgtggcactaaggtggcatctgagcattcagatattgcagttccttctagatcatcttttccacaggcagtcaaaggaggatgcagaacacagacacatgcatggacacgctttgagtattgctgatacagttgatggtggggca

SEQ ID NO: 679 - DNA, 1000 bp, mus musculus
acgacaggcaggctggaaggatggagcttgatgggaagatcaagctgctgatgagaaaaagagatctctgtcctagggagaaggggacatggcaggggagaagggggagtggccgggacagcaggaagggcaaaccacttataatagtccagatggaggttaggatgcaaacctgaagccagaaactggctgagccccatcaggagtgaaacttcttgagcagctgggtagagcttgtctgcatctacactgtcagacctgcgttagaagatagtccagtcatgttggctttcagaccaaggctctgctcagagcttccctggcttttccagcatctttacctctcatattccacagggtattggctcctggatcctcctcccaagactgaaaatgccctgtactcgttacatttgaatgcagcctatgtctgcatatcctttcctatagttgaacttattcctagaatatttgtaaagtccactcctaactaagtgctatataaatcattctgatagtgtattgcttaggacacaattattattattattatttttaaaaactgacctatatatgttcagcacagattccacccagccaatagtattcagtgtggatttggttgaatggaaatatgaagaacccaatgacactgagcacccgtggtggtccctccagtcacttcttcctcaacagcccaatggcttccaagctcatccccacaagtttcagcccatgccctttcatttctccatgactcacctctgacctgctcttgacctcctcctcctcctcttcctcctgtgacttcttggctggtgagccaagacttctgtctggctttgacccagcactgacacaatcccagagttcagcagggcagaggcagggcatcaccttggcctggaatacagctgaggtattttggctgtgtaaagacttgtaagaaaagtgattcctattcatccttctggagtgttgtctccttagttctcacttg

SEQ ID NO: 680 - DNA, 1000 bp, mus musculus
cttgcttagcttttcttttctttttgccagtaatttatttagataattttcatctagatcccagccccatctccatcctctcttcctagtcccacttttacaaatccctcctctcactacgcccttccctattgttcagagaaaaggatgccttccttgggcagcacctgatccttgaacaccaaatctcagcaggactaagctcctcctctcccactgaggccacatgagtcaaaccagcaagaggaaggagatacaaaggcaggcaacttagtcacagcctgatacaaatcctactccaacttttgggagatccacatgaaaaccaagctgttcatgtgctacatatgtgtagaggacctacgtgaatgctctttggttgatggttcagtccctctgagcccccatgggcctaggttggctctgtaggtcattttatgttgtctgttactcctccaactctctcgatccttctcccgacactcccatatacaccatgaactttgtctaatgtttggctgtgggtttcttcatgtttctatcagctgtttaatgaaacctctcagatgacagttgtgctaggctcctttcagaaagcagagcagagtatcgttaataacgtcacaggaacatcttggaggcaaggaacttttggggtcaaagggtttgggttactgtctttatcccttcaccagaagtcctgcctggccacagaaggtggccatttgaggacccatatcctccactgctaggagtcttagctaaggtcatccctatatcctcccagatgcctccagagatctgcatcttgtcccagagttgctcccccccacacacacacagattttctttatctctcccagctctctcaacccctacctctgctctccacatagctaactgccaccccagttcctctcaatactatctctgccacccagttccatctctccatccacttctaatgtctattttatttccccttctgaatcatcctttc

SEQ ID NO: 681 - DNA, 1200 bp, mus musculus
acaagtaatgtcttaataacattgaataaatgtgtgattcattccttttgacatagtttcctggtctgaaatgaggagtggatttagatttaggacattgttctggttccttgtgggcttttactcttttagtaacaaatcctttgtacctgcagccaagaaggttgacaatgatatgcaaagagacattaactaaacctctttatgcttattaatttgtgaatgaggttgatgaaaactaacaaggcagaaaatgattgcaaatgtaaatgccaatgtgtttaatgatccaaggaagcaagttcaattggagcttgtcagatgaaaattgttttgccagttgacctgtccataaatacaaatagactgtggaagactggacaaacacttgcattcaccacggaatgacttaattaaatgaatagaaatcttgaataacgaatctttaaagtgatgaaaattatctgctcaactgctagtctacaaagcaattgtggagtcattataaacacaatatttcaaaagtctactaattctgtgtttcccagcaaaatgataaagaagcttagcgtgacaggccatggaactagttctcttaacaccctgttcgtgccgggcgtggtggcgcacgcccttaaacccagcactcgggaggcagaggccagcctgagttcaagaccagcctggtctataaagtgagttccaggacagccagggctacacagagaaaccctgtctcaaaaaacaaacaagcaaaaaaacaaaaacaacaaaaaaacaaaaacaaaataaaaccaaaccaaacaaaataaaacaccctgttcctacaactcccgaattattgatattatatttttatgtctttctggagccttcaatatattgctggtgtaacagatgaattagaacatcattcctcagttatatgttatctactgagtcatgaatgccattcattcactggctaaatattgaaagtattggagttatacagttagaagaaagtgattcttaaattcagttctatttagttttaggaatataatcttataggtctaaaaattggcatagtgaaaaaatatattttgagattccagaaatgaattttttaatgtagaaccgtacttaattcattccgactgtaagataaattccatagaatatttaaacttttcattaaaaatgtagagattaaaaaga

SEQ ID NO: 682 - DNA, 1200 bp, mus musculus
gttcattgatggggtagatgttgggataagtcacttcaaagtcctggatctgggtctgagaagtatctaagcttgtcagtcagtccactggccagctctcttgctttcatacctttggagcaggctcacctacaatatccacaaccagggcctagtctactctgctgcccaggtaaaggacatgacccactctcctgagtattgaactagtgagagacagtcagtttcctacttcatgtaccaggggcaagctcttttgcctgccagagatgatgaaggagggaagaagtcccatctatgccactacacagcagataagtgtcagggttggctcacccacagtccccatgtctagggttagctctacttgctgcccagatgaggtatatggagagttctgctgatctcatgaccccagggccataagtgacagagagtgagggtgtgagaaaacatctctccttcacattgcactaccctgtggcacacaagttctcccaagctcataccctagaggctagctcacatgctctcctaccatcagggtcagctctactgtgctgcctagatgaggtgtagggcctgatttcctgagtgctgaagcaggtgagaaacagggattgctctcttgctgtcatgcctctactggggccagctcctgagaaaaagagagagggagtcttttcatcatcaaggccaccatacagcatacaagagtcgggttgggtctctcacattcatcccatcaggagaagcagtcctgtatccccaccactagggccagctctagtatgctgcctatgtagggtacagagccttctttcacaaagtttcctcagggttgacttacctaaggctctcttaagtactacagttggctatgagtggtacccatatatatgggtggctctgttctcaggaccccaggaccagttctcccatgatgcataagtgagaggtgggaccagtgctacatggctcttattcatcaacatgttttctgggcagaagactaaatcaagcctggcctttggtgtgacaaacccctgctgatgcaaggccatggacccagacataatcccctgatgcaagcataggctgagaccccagcattgtccctgctgtcatcattggctactctcatcaggttgttcctcactaccctcaagtctcagaaagttggcaataaaataattataa

SEQ ID NO: 683 - DNA, 1200 bp, mus musculus
gcaagtgaaagatctgtatgatgagaatttcaagtctccaaagaaagaaacagaagaagatatcagaagatagaaagatttcccatgcttaaggataggtaggattaacatagtgaaaatggccatcttgccaaaagcaatctattgattaatgcagttccatcaaaattccaatgtgatcttttacagaccttgaaatagtaattctcaaattcataaggagaaagaaaaaaaaaactaggataaacaaaacaatttttgaacactaaaagaacctctggaggaattatcatctctgacctcaaactctactatagatcaatagggataaaaactgcatggtatggaaacagacaggttgatcattggaatcaaattgaagacccagacattaacccacacttagggacacttgatttttgataaagaagccaaaaccataaattaaaaaaaaaaaaaagaagtatcccatcctgtgggattcagttattggtgggtgcgagggggactgcaaatctggcagaaaatgggatcggaaggggaagaaaagccgaagaccaagaccatttattaggctgagacgcctggttttaaagcatacatcaagaggaatgggtggtggggtcgaggggcaattaacaaagagcaaagaagtaggcatctgctgacatgagggccaaagtcaggctccaggcggcgggcactctgttccttatctctggaacagacttgtcccttcttaacagacttggggtgtcaggccgggggctcaagcataactcatgtccttggaagtcatgggagtcaggaagagataaggaagaggggatcataattcagctttcacagcctcaggtgccaggaagggaacagggaggagggagtgacaactggctcctagcatgaggccatttggcctgtcagggtgggagattgtaaagggctcagtttctcaaggtatggtctctgacaaagaaggcatcttcaataaataatgctggtctaactggatgtctgcatgtaggaaaatgcaaatagatctatgtttatcaccctgcacaaaactcaagttcaaatgattcaaggacctcaacataagacccaatatactaaacttaatagaagagataataggaatagccttgaacacattggtacaggagaaaattttctgaacagaacatcaagaacctagctcct

SEQ ID NO: 684 - DNA, 1600 bp, mus musculus
ttctcccttactgcttttaatattctatctttatttagtgcattttttgttctgattattatgtgtcgggaggaatttcttttctggtataatctgtttggagttctgtaggcttcttgtatgatcatgggcatctctttctttatgtttgggaagttttcttctattattttgttgaagatatttgctggccctttaagttgaaaatcttcattctcatcaactcctattatccttaggtttggtcttctcattgtgtcctggatttcctggatgttttgagttaggatccttttgcattttttattttctttgattgttgtgccgatgttctctatggaatcttctgcacctgagattctctcttccacgtttgcctttcgccatctgttaatctctgaagctagctgttatagttgtctctggttagagcttgttcctcaggtgactctgttagcctctataagcagacctgggaggctagctctctccttagtttcagtggtcagagtattctctgcaggcaagctctcttcttgcagggaaggtgcccagatatctggtgttcgaacctgcctcctggcagaagttgtgttccactcaccagaggtcttaggatcccgtggggaatcctgtgtggacccttacgggtgtagggagattccgctggcaaggtaccccgttgctagagtggaccggaagggacttgtgccccaggtcaggctgggtcttctgcttccctagttaatgcagtctcaggttccgcacgattggattggggcagatgctgtgttccactcaccagaggtcttaggatcccgtggagaatcctgtgtgggtccttgtgggtgttggaagactccgctggcaaggcaccccggtgctcgagtggaccggtagggacttgtgccctttattgtctttttaatcatttttatcagctggttatattgtgccaaattgttttaaatgtggatattgtcaatccttcttgagcagagtaattaattaattatccatggaatgtgttcaaaagatgttcattttcttcagttactcggtgataaagaattatgattacacatgaaatgaaaatttttgaggaagtcatggtacccaaaatttttcacagactacagaatagaaaatttccttgggatcatgatttagattcgtgcatacatttttgatcattcacaaatttgttcggtaaagtggtgaagtgctaatgatcattgttttctggatagaggactgaaagaggaatcatgacttgtatgataaagtcatcattccacagcttgattagctctgtgattttagaaacagcatctctaaatttgatacctaatgagcatcagctgagagcaataaaaaaggaaagctgacagaaaaataattgtacattggctggaaaaatataaccaagagacagtatatttaatagtcctattactgttacaaagtagctgtgtgaattcaggtcagccacttaattttcagattctccaattcttccaaacgtgaagaactagttaacatttagcagacatgaacataattataaagacttaagactgaatacttttaatcacacatc

SEQ ID NO: 685 - DNA, 1400 bp, mus musculus
agaatatctcaggtcagtacacactactagagccatgtatgagctcccagtgttttcattgatatcatggaataagtttgtattcactttatttatttatttatttatttatttatttaatattttttattacatattttcctcaattacatttccaatgctatctcaagaagaatgaagactgaagtgtggacactaggcccctccttagaattgggaacaaaacacccatggaaggagttacagagactttattcatttataagtgagaagataacctcaactagttagcatgcctctcttctgttttccctcttctattccatccttttggggttaacaatttgcttgaaataccaatttaatctaattagtctaatctaatatagcttttaggacaacatatctgatttacaaaaatcaaatctaaataatgcttaaaataatgccctaagcaaaagagaatgaaacactcagtgtgtgcatatgggagagatgaggttagctacatgatgaaacttcacagtccttctcaaaattattaaaaataaaaccactctggcaacagcagagcataaaggcaagcccagatccccaggagacggcacaggtggcgtgcccataaagttggctttgctgtgggacacagatgattggccaatgaaacaacagtattcatagaaaaccaaactagtatgtactaaaataaatctgtctggacagtaaaattatagttctttccaaaattcaaaaatataacatttctcttttctcttatgggttagacttacatattaattgataggaaggaaaattgctcagaaatccatactaaaattttgacagaaaatttttcataaagctggaaaatagcattagactgttcttttttgggtctgtctatcttttggagatatggctttgtgattaaattataacaaaacaagcagaatttaaaggacatgcaagattatgcaattacttttgtagctgatgaaatgtaaatgactaaaatttacaaagtaattacaaggcaattatggagaaaaaggctgttttgttcactcttatttcagctcctatggaaataagttagtgtgttaaactattaacttaggggaagttaatcaccatcttttaaagctaaaattagaaatatgaatatcttgccaaaaagaggatatatatatatatatatacatatatatatatatatataattttacaaaccaatatctagtaacatccacttacatggcaaagagggagacatgactgcaatattaacactcagataagtagattttgttaattttgggatagcttttatttattttaatcctgtgtgtgtgtgtgtgtgtgtgtgtgtgtgtgtgtgtgtgtgtgtgaatgcttgcttg

SEQ ID NO: 686 - DNA, 1200 bp, mus musculus
taacattttatgaactgaatatatacatgtgtaattagatgctctataatgtattcccaaatgatagggcatattggacctggttttgtttaggggttttcatagtcttttgaatccaattaatatacttatacttgacaagcagttctgtcatatttgtatgaaatcctagagaaatgttcatctttcttgtatggcaaataaatcgttataaatatatattgaactttccttctcagatattgattcccaatcatgcatctagtctggtagccatgttgtaacatcttctaaactttttaaaggtttttataattttatttttcaattactttatttacattccaaatgttacccacttttccagtctctattcccagagtttttcaccccatatctcctgtggagatgatgctcccccaccctcaaccccctacctcacccctcccagcatccaccttccctgaggcatcaattctctacaggattagaggcatcctctcccactgaagctagatcatgcagtcatctgctatatatgtgcctagagtcacagaccaactcatgtatgctctttggttgtggctcagtctctgagagccctgagggttctgggttagttaatactgctggtctttctatggagttgccatccccttcagttccttcagttattcccctaactcttctacaggggtccctgacctcagtccaatggttggctgtgagtatctgcatctgtctcagactgctgctggtagaacctctcagaggacagcaatgctgaactcctgtctgcaaacacaacattgtatcagtaatagtgtcagggtttggtccctgtccatggcatgaataccaatttgagcctgtcactggatggcttttccttcaggctctgctccatttttgtccctgcatttcttttaaacaggaaccattctgggccaaaatttttggaggtgggttggtgaccccatccctccactggggggccatgtctacctactgaaggtattcttttcaaaatccatctccccactgttgggcatttcagcttaggtcaaacatttttaaacttcaatggatgacttcaaattgatggtgggacaaggagtggaaaaaagcgattggtgatattgatttaaatgtgtcagtacgcttctaggaagtttttttctattgcctttctccaagttc

SEQ ID NO: 687 - DNA, 1200 bp, mus musculus
ctcattattctttgtttgtggtaggaaacttaccttgttgattcatggtaaatcagcctgtttaacagttgtgccagtggttctctaggcacctatgggtgtcacgaaattggaagtgatgcttagtcctcatgatgacagccaagaaacatgtttcctccaccaacacagtctcaccaagaagctatccttctggaatagcattcttggaaatccttatggacaaaacacactatagtggctagttttatgtcaacttgacacaagctagagttatcagaaaggagccacagttgagaaaatttttccatgagattgggatctgtgcaagctcatagggaatcttcttaattggtggttgatggggaagggcccaatccattatgagtggtgccatccctaggctggtggtcctaggttctagaagaaagcagacgtagtaagccaggaagcagcactcctctgtggcctctgtgtcagctcctgcatacaagtccctgctttgcttgtattcctcttctaactttctttgatgatgaaatatgatgtggaagcataagcagaataaaccctttcctctccaagttgctttggtcgtagtacttcatcgtagcaatagtaactctaacaaagacacgtggctactgatttttgtaagtagatttttcgatttggggagaccccttatgtataatacatagtttgtgaatagggatgatttgatttctttttttttcatatttgtacctttttaatatcctttacagttgggtagaacaactgattgctcctctcctttggcagcttgcatggcaccttctgataatgaaaactcaaggaggtagctttcagactagaccaaactctgtttctccaagttctcttagaattgcaaggtgtctttacaaataaggtcttaccttcaagttctgggcagcaaagaagagctatagcaattgcctgtattgttttaggagtctcttggacttctctgatcataaaatgtcaagggacgtttcctatgcctgctacagggctttctgctagtctctggctcttgtggggagcattgtcagcctacgcttaactttatttcaatcacttatgtatgtacccacatacactcatataatatgtattttaaataaacataaaataatgtttccctatgactttttcaattgtctgtggaattcctta

SEQ ID NO: 688 - DNA, 1000 bp, mus musculus
ggtttcccctctgaaaaccccccttcccttccccctctcctgctcaccaaccctcccactcctgctacctggccctggcattcccctacactggggcatagaaccttcacaggaccaagggcctctcctcccattgatgaccgactaggccatcctctgctacatatggagctggagtcaagagtcccaccatgtgtactctggttggtagtttagtcccagggagctctggggttactggttagttcatattgttgttcctcctatggggctgtaacccccacttagctccttgggttctttctctagctccttcattggggacgctgtgcttagtccaatggatggctgtaagcatccacttctgtatttgtcaggcactggcagagcctctcaggagacagctttatcaggctcctgtcagcaagcactcattggcatccacaatagtgtctgagtttggtgattttatatgggatggatcctcaggtggggcagtgtctggatggttattccttccgtctctgctccacactttatctctgtaactccttccatgggtattttgttcctgcttctaagaaggatggaagtatccacactttggttttccttcttcttgagtttcatgtggtttgtgaattgtattttgggtattccaagcttctgggctaatcaagttttctttcttttgaggcaggtacatagtgctgtaagcttttctcttagaatagcttcctttatgtctcacctttgcattttaattcaattctagggttttcttccttaattccaacattggctcaattttcatccagtgtgtattgtttagtttccatgagttttctattgttatcgctattcacctgtatttctttatgagtcagatagaatgctaaatgtatttcagttctcctgtatttgctgacacttgcttaatgcccaaatagggggttgattttgaagaaagttccattggctgctgagaaaaaaatgtatt

SEQ ID NO: 689 - DNA, 1000 bp, mus musculus
tcaattcttatactttgtctttaaacctttatgttctttatttaacttgctccattcttttggctctccattacatttttattttacttattgagttttttcaagttttatttttgtttggcttttcttagtttgccaccttcattcttgaactaatacatctattctttgagtttcttgaagaaatatatacttgttctttagaaataattgctttgtacatcaaaagttgcttttctagggaactattaaaatgaggatactagtttctggaggagagagattgtcttactgatttatgttgtgtttttatgatcagacgatgcatctggaattaggctcttggtaatgtttcatggtactgctgtagtagatgtagtgtagttctttgttggctggtaccccaacttgtgaggttataagacagcaattggtgcttgtgcaactctgtcttgatgtgggcatggggtgtcagaagtagtccccggtcacttaggaaaagatacagcgtctgaactcaggaactaaacttctgaagtgttagaagattatgatgatttaagaagatctaaggtgttgatcttcagacatctatgaatgttcactagattctttggaggtccttaagtggcagggtcttgggtaacaccacgcatgggcaatgctccctgaaggtaggatgtagattgccacagtgacctggactgggcatagaatgcaatgcagtccaggacatcttggtgggtgaggtggcagatcgtttcttgggctccctgcttgggaggaagcgattcttagggaggatggtaagttgggtgactggcaggttttggagattctgacttagggttggagttagaggatgccatacccctctttagtctttaactattctttttttgtgtatttttggcatcttgagtataagatgctatggagaagctcttttgtctatttggacttttaaatgccccctgtgctttcatgtccatttctttct

SEQ ID NO: 690 - DNA, 1200 bp, mus musculus
atagctgagtagtactccattgtgtaaatgtaccatattttttggtatccattcctctgttgaggggcacctgggttctttccagcttctggttattataaataaggctgctatgaacatagtggagcatgtgtccttcttactggttggaacatcttctggatatatgcccaggagaggtattgctggatcctccggtagtactatgtccaattttctgaggaaccgccagactgatttccagagtggttgtacaagcttgcaattccacatcctcaccagcatctgctgtcacctgaatttttgatcttagctttttctgattggtgttaggtggaatctcagggttgttttgatttgcatttccctgatgattaaagatgctgaacatttttttcaggtgcttctcagacattcggtattcctcaggtgagaattctttgtttagctctgaactccattttttaatggggttaattgattttctggactccaccttctttagttccttatatatttggatattagtcccctatctgatttaggatcggtaaagatcctttcccaatctgttggtggcctttttgtcttattgacagttttttttttttaattattacatattttcctcaatgacttttccaatgctatcccaaaagtccctcataccctcccccccacttccctaccctcccattctcatttttttggccctggtgttcccctataatggggcatataaagtttgtgtgtccgatgggcctctctttccagtgatggccgactaggccatcttttgatacatattagctagagtcaagagctccagggtactggttagttcataatgttgttgcacctacagggttgcagatctctttaggtccttggatactttctctagctcctccattgggggccctgtgagccatccaaaagctgactgtgagcatccacttatgtgtttgctaggctcctgcctagtctcacaagagacagctatatctgggtcctttcagcaaaatcttgctagtgtatgcagtggtgtcagcgtttggaagctgattatggggtagatccctagataaggcagtttctaaatggtccatccttttgtcgcagctccaaactttgtctctgtaactccttccatgggtgttttgttcagaattctaagaaggggcacagtgtccacacttt

SEQ ID NO: 691 - DNA, 1000 bp, mus musculus
ctcctctcaaagcttgagaaccttatggaagaggagggaaaagatagtaagcccgagggcatagaggacaccaagaaatcaaggccctatatatcaacatgaccagtggtcatatggacctctagggtctgcaaatgtcccctgtgtatatttaatggcttccagtttagtgtttaatgagactcatgagtgtcaaacaagtaggttcctgattatcattgtgcctcatcttgggcatctttccttctcttcgttttgtccagttccaatttgttagtttttgttttacattttattttgtcattgtttgaaacaaactaaccagacaaacaaacccaggaaataacaagaaatgtgtctctgaatcacaggatctggaagtttcacaatgtgcacagattaaagacctctggaatgaagtttatttcagaactttggcactcttaaaatgtgtatttatttatttatttatttatttatttatttatttatttataattttcgagacagggtttctctgtgtagccctggctgtcctggaactcactttgtagaccaggctggcttctaactcagaaatctgcctgcttctgtctcccaagtgctgggattaaaggcctgtgccaccaccgcccagcttaaaatgtgtttttaaagccaagctgtgacgaaaggatggaccatctagagactgccatatccggggatccatcccataatcagcttccaaatgctgacaccattgcatacactagcaagattttgctgaaaggacccagatagagctgtctcttgtgaggctatgccggggcctagcaaacacagaagtggatgctcacagtcagctattgaatggatcacagggcccccaatggaggagctagagaaagtacccaaggagctaaagggatctgcaaccctataggtggaacaacaatatgaactaaccagtaccccggagctcgtgtctctagatgcatatgtagcagaagatggccta

SEQ ID NO: 692 - DNA, 1000 bp, mus musculus; identical to SEQ ID NO: 691

SEQ ID NO: 693 - DNA, 1000 bp, mus musculus; identical to SEQ ID NO: 691

SEQ ID NO: 694 - DNA, 1000 bp, mus musculus
tgtgttgtttaaaactttcacaaatcactgcttttctaagtctttgttcaataatgctgagaccaaacaataattcctgaactgcaaggctagggaaatgtttactctttggctatgactgcaaagtgatggaaatagctctcattaaatctcaaagctagctaatcaagactggctgaagatgctgaggaggcggatcaacgtacaaaaacgcttgctgagcaaccctcaggaactgactgtggatcttcagaattcatgtacaagccagacacaaaaatgcattcctcagtgacccccacatgcctcagtgtggagatggaaggaggagactggagagtttcctaactttctggccagtgcagcagcaaagacaaagaaagtctttttcaaacaaggtggaaacagcaggactgaagtttgtccttcaacttgctcactggagcactcatgtgtgttccttacacctactcacaaagcagtttgaaggatctcatgttgctgttgttattatctgaagctatttttataaactggcagatattcagctagatatcttccttccaggattcatcttaaaatatcttaaccagcttcactgagcagcttgctgtccccacctccacacccaccccaaggctccattgtccagctgccctgagttacatgctgtgccacctcctccattgtctgttcaccactccaccagccatcactagacttgttgcattagcaacatccaaattacatcacttcataccacaatcccttgccaaccaagtcccctgcagcatacccagctgccctcaaacatgctatgcccccccccccgaatattattgtccagctcaaggctgcctgcctaaagccttctgcactagaaacatgcaggttagtcctgccttcttgagacatgctataccaggaacatccaggaacaaccagaaggctaaaggccagaataaaaacataataagagccagggccataaggcacctgc

SEQ ID NO: 695 - DNA, 1000 bp, mus musculus; identical to SEQ ID NO: 694

SEQ ID NO: 696 - DNA, 1000 bp, mus musculus
tgatagctaaaatgatccttaaacattcctaatcttatgatatactatgaagctttagtaataaaaataacatggttgtctgccctgcctgggagggctttgccagagcacctgggggagccatctttggtcctggatctctcagagactaatctgcgcaggtgagagtgcagactacagaagctacacagcccctgggacaggctcaattgacacagcttctgggacaggccctgttttgggccttcatcttctgccaggaggagggtccaaatgccagatatctgtgtgccttccctgagggaggggagcttgcctgcagagagtgctctgaccactgggactcaggagagagctagtcttccaggtctctggatagaggataagagaatcacgggaggaacaagctccaaccagagaaactataacaactaactccagagattaccagatatcgaaaggcaaacttaagaatcttactaacagaaacaaagaccactcaccatcatcagaacccagcactcccacctcagccagttctggataccccaacacacccaaaaagctagacccagatttaaaagcatatctcatgatgatagtagaggacatcaagaaggactttaatgactcactgaaagaaatactggggaacactgttaaagagatagaagtctttaaagaaaaatgggggaaacctgagactgcggtaaatagggaagcagactacccgggcctgacctggggcacaagccccttccgctccactcgagccccggggtaccttgccagcggaggcgcccaacacccacaagggcccacacaggattccccacaggatcctaagacctctggatggaacacagcgcctgccccaatccaatcacgcagaacctgagactgcagtaaatagggggtaaatagggaagcagactacccaggcctgacctggggcacaagccccttctgctccactcgagccccagggtaccttgccagc

SEQ ID NO: 697 - DNA, 1200 bp, mus musculus
catctcatacatttaataccaaaaaggatatatatcatttactggaaaaaatatagaaaatgaattcttttttctcattatcttgacttttttttctctttttattcaaacaaatttttattagatattttcttcatttacaattcaaatgctatcccaaaagtcccttataccctccccctacccttctccccaacccattcactcctgcttcctggacctgacattcacctgtattggggcatattatctttgcaagaccaagggcttctcctcccaatcatggcctactaggccatcttctactaaatatgcagctagagacatgagctcagagggtactggttagttcatgttgttcctcctatagggttgcagaccccttcagctccttgggtactttctctagctcctcagttgggggttctgtgttccatccaattgatgactgtgagcatccacttctgtatctgccaggcactggcatagcctcacaagagacagctatatcagggtcctgtcggcaaaatcttgctggcatctgcaatagtgtctgcgtttggtggttgattatggtatgggtcccgcatggggcagtctctgcatagtccttccttcggtctcagttattgatatgaatacaaacttgtaaagccagtatagatgataatgtgggagtttctccaatattacaataggaactatcagtactgggggaatggcaaaacagataaagtgcttgctgcatataagagaaggcaagcctcccaaatccacataaaattcagatgggacagtgcatgcagaaagtgaaaggagagaatacccagagggagctgtgtcgtcagactagcagaaacggtgagcgctaggctcagcaagagactctgcctcgatttctatgacaggaagtgcccaataccatttataattcatgcctgcacagtggttctcatacaaaaatgtgcgcctgcacatacatctgtgcccacacatattaatacacatatacagtcacatgtaccatatatatagatgtgcaaaagtagaattgctatatgactcaaaaatcatatgttaaataaacattaaaaaatgaaacatacatctcacagatgtacaatctcatatttatttattaaaataatattcacaagagctgtgtcatggaatcaacaggtgtgtcctcaagaactagtt

SEQ ID NO: 698 - DNA, 1200 bp, mus musculus
tacttttcctactgttattcctgtatttctgactctgatacatacaataaacaaaatagagagttataattaatggatatacattatactatctctgatgacaactgtatcattttcaatcaacaggtccattgaaattgtctcctctgttccagtcaatggatcaaataaatgaaactgtagcttttgaatttgtgttgttgggactctccagttcttggaaaaatacaatttttctcatgtccaccttctctttgctctatgtaagcatcatcgtgggaaaccttttcattgtctttttggtaattaatgactcccgtttacagtctcctatgtattttcttttggccaatctgtccctcattgatgttggactttcctctaccacagtgcccaagatgatctcagatcttctgaaagagcacaaagtaatatctttccacagttgcatgactcagatctgctccatccacattatgggaggagtggagatggtgctgctcatagccatggcgtttgacaggtacacggccatctgtaagcctctgcactacatgagcatcatgagccctagaatatgcatttcatttgtaattgctggctgggtcactggagtggtccatgccatgtcacagttctcttttgttgtgaacctgcctttttgtggtcctaacaaagtggacagcttttactgcgacttccctcgaatcatacaactggcatgcacggatagagacacatttgagtttgttgttgctgccaacagtggcttcatgaccttggggaccttcttcttgcttctcctctcctatgtcttcattttggtcacagtctggcaaaggtcttcaggggacttgtcaaaggcgcttgtcactctgtcagctcacatcactgtggttgttctgttttttactccatgcatgtttctctatgtgtggcctttccccacatcatcgactgacaaatacctgttcattgttgactttgctgtcacccctgctcttaatcctgtcatctatactttaaggaacaaagatatgaaggaagccataaaaaagctgagcaagcagagatgttacatcagaattttctgaacagatctgtcattagagtttatgactacagaaacctgtatttttcctgactatttgacatctccagttaacatgttgttcaggccagaatcagcactaaatctac

SEQ ID NO: 699 - DNA, 2400 bp, mus musculus
tgctggcagtaattcatagaatacaaatatttcttatattactttaagaaaactaaggcatatagctcaaaccattttacttgagaaggacttgtacggagttctcctaatcacagaataaaagtgctatatatgttttgtttattcaaatctgcataacttaattctaattaccagtaattactggacaagctgccatgttactttacttgtacaaacgtacatacatgtgggcaatataactttatcagcatctttatccaaatgagataacattgaatatgtacaaatgattttatggaactcatgtgaatctaatagataaaatatgcatttacataaaccaacaattatggaaattgaagaaaatattgaagtaggatgatcaacactttcatgtgttatttctagcctagttttcaatggtaatgtacattgtcattttagacatagactgtagtacttgaatcatgtagtaccagtgaatatccctcttttataataccataactttgttgccctagtagtcttcctcaaagaagttcattacttacagaaaaagacatgtacaatttatagtatttcaggagtcttgtttggttttttgatttgttttgtttattatcattaattaattattttatttatttacatcctaaatattgcttcccctgtcctgatcccacctagcagagttcttcccccatgcccctcccttcacctctgtgagggtgcccaaccacaggcatacctcctccctggggtatcaaatctttacaggattagatacatcctctcccacctaggccagacaaggcagccctctgctacatatatgctgagggctttggacaagtctctgtgtgtgctttgcttggtggctcagtcttggaagctcccagggatccagattagttgacattcttagtcttcctatggagttgccatcttctttggttccttcaatcctttcccaaactcttccatagggcaccctgacctccttccaatgcttggctgtgaatatgtgcatctgtctcagccagctgctggatagagcttctcagagaacaaccatgctaggctcttgtctgcaagcacaacacagcattagtaatagtgtcaaggtttagtgcccatcaatgagataaatccccagctggggtggtcttattttctaaagttgtactgccaaggcctgagaagctttcttaatatactagctctccagttgcagtgcttgaaaaaacaatgtgcttgaatccttcaaaagaactgggaacacagactggttaagaagcacatctagagacaagccttgaacgtgtttaccagattcaatttaaaattattagagatgtatctcagctcctttcaatttcttcctggtcattaaagctgcaaaataaacaaagataaaaaaatgagaacatcttgttaagcttcttatgatctgtgagttgtatcataggtattcttaactttttggctaatatgcatttatcagtgagtacataccatgcctatcattttgggtctggacaccaaaaacccactcagaaggggaacaaaataattatgcgaagtagagggagggaggaaattgggtgggatatgggagggggagaggaaaaagaggggcaggatcgagtatggggagaggcaagagggacatccagagggccgggaggaattgaaatatgaagcagtgagggttaggggggcaataggaacctctggaaagtcccagaatcctggggtgtgagaggataccagaactcagtggggacattagctgaaatgcccaacagtagacacatggaacctgaagagaccacctccagtagatagacatggccctcagttgagaaaggggcccgcccacccatcttcacaatttttgacccagaattgttcctgtctaaaggaaatgcagggacaaaaaaatggagcagagactgaaagaaaggccattcagtgacctgcccaacttagcatccatcccatgggcaggcaccaaaccctgacactatttctgaggccgtgttgttcttacagacaggatcctggcatagctgttctctgaaaggctcgaccaggaactgactgagacaaatgcagaaactttcagctaaccattggattgaggctgggaaccaatatggaagagttagaggaaggactgaggagctgaagaggattgtaaccccaaaggaagaacaacagtgtcaactaacccagacccctcagaactcccagagactaagccaagcagcgtgcataagctggatctttccttgttctctatagttagtattttgattattatgtgctaagagacttcctattttagtctaatctatttggtgttttgtatgcttcttgtatatttataggcat

SEQ ID NO: 700 - DNA, 1200 bp, mus musculus
gctcatgatattgatagtaatattatattgatagcaatatttatattgatagtaataccattcatattttgtgaagatttctatttacatctattaagtctcaagttgaatgtcaaattctataagtaatttgtactacacatccatccaaaatctttctttctctgtaggttcttaggacaaaatgaatggagtgaatgagtccacggtgtcagaatttgtgcttttgggactttcccgctcacagaatcttcaggtcttgctctttgtgatatttttgatactttatctgctcattatttcaggaaacattgtcatcatgatcttaataaccattgaccgccatctccattcccctatgtacttcttgttggccaacctgtcctttgttgatatatggctttcctcagttaccacaccaaaaatggtcatagactttctcagggaacacaaaaccatttcctttgaaggatgtatgtcccaggtcttctttgctcattgcattgctgcaggagagatggtgctgttgctggtaatggcatatgaccgctatgtggccatctgtaaacctctccactatttcacaatcatgaacctgaaaagatgcactggattggtgttgacttcctggaccgttggctttgtgcatgccttgagccagcttgtagcagttctgcagctacctctctgtggcccattggaaatagacagttttttctgtgacatgccactagtaatcaaactagcctgcacagattcccatgatttggacattttaatgaatgctgactgtgggattgtagttgtatcttgctttattatgttgctcatatcctacacatatatccttatcactgttcgcaggagctctaaggctggggcatctaaggccctgtccacgtgcactgcccacatcactgtggtgatgctgctgtttttgccctgcatcttcatctatgtttggcccctcaacatcacctggttggacaaatttcttgctgtgttttattctgttgttacacctctcctaaatccagccatttatacactgagaaataaagaaataaaaaatgctctaaagagatttaaaagctatgttatgaatcacaaggtaaatacttaatgcccaggaaatccaccataaatattttaagatgatatttcaatgaaatgaggacaggttaaaatttggggtattta

SEQ ID NO: 701 - DNA, 1200 bp, mus musculus; identical to SEQ ID NO: 700

SEQ ID NO: 702 - DNA, 1600 bp, mus musculus
ataagaattctaataatattttaaatttgtgaatattcttaattcttataataagaaattctaagaataggaaatcagtacttgaaaaagtataataaaacaatcaaaaccttatctaaataattaatgtaaaaccacacaatttatcgaggacaaactgatttgataaatttatatttacaaaaacttgaaccagaatatcacactcctactccctaaaataatacaatatacaatatgttacatgatgatctgcgctatgaaacaagtactacttttttaaaatcttacttttgagtggttcatatatgtgtacaatgtaacctaatcgtatccatccatattatcttcatccaattccccaagatttctttcagtatattttttgaagtggaaacttgagggttctttgaaagttggatggatggtgttttgctgaggcaaacacatgaaggaaaatttagctgaagcagacacaggtgaaaggatgttctgctaaagcaagcatgtaaaaggacatttgatgaaggactctttgctaacaacacacatgtattggtctgccttacattatgtagttgagctgcatttgtcaggattccatagagagaaacacaccaaaaaacttctggtgatgtgctgtagtttcttgaagcttcctcccactcgggctgattggcagtggtgtcagttcatacaggtgtacaatgtaacttaatcatatccacaggcaaatcctgtggaggacacgtgatgtttggaggatataaataggactctactggctaaggctgagcttggcttgcttatagagctagctgttcaatgcttgtgagtcttacgtcttcagtgatcttcccaccactgtgagaggcatctcctggagttcctccttgtccctcctgctgactcatgctaaggctgaggcctggatatctgtgttaggtcatgtcattgctgttgctaactcaactctacggaactggtagattagtgaagtgtttccgagtagattgaactgttcctgctaacctgtgaactgaattgtcgatttccagaaaacagagatgtgagttgctccaaagaatctttctaaaaagattcacttctcccatatcctttctttctcactatcactgctgggtggtgggctaagagggagtttaaagcatttaagaaccatcattaaaaataagctttgacaaaatttaagttccaacatcccttctaaattcatgttctcttattagtaaccatgtgagtacaattaatgctgccaaagcaaacatgagtgtcaggctaactactgggatacaagaaagcattaagtagacagccctcagagtaaaagatatttctccctgaatagttatctattataaataactgcttaactggagatgatttagaagctgctcttctctccacattgaaatttttaactggtttgatcttgctcttggttgatcaacataacaaggtagataagagctgtcagtataaacaggctagaatctcacatgacacaaaaccaatacattaggtccacaagctcagataaaatgtaaaaaagcacaaatgttgtgaaaggtcaacaatt

SEQ ID NO: 703 - DNA, 1400 bp, mus musculus
agtttaatttgcatttgtcttctcattagtacattccaaagtttagaatcagaagatccagaatatgggagaaaataagtatttgcacgcaaactttatatgccccagtacaggggaacaccagggccaaaaagtgagaatgggtgggtatgggagtgggggagagggtatgggggatttttgggatagcattggaaatgtaattgaggaaaatacataataaaaaaatatttttaaaaaaagcaaagcaataaacaaaaaataaatggatttatcaaaaatttaaaaaaaaaaacttcaaagaaaatcattgagaaagtgaaaagataagccacaaaactatttgcaaatatttaaaagtacttgcaaataaccttaaatctgataagaaacttatatttgcagtccaaccttctacccaaaatttgtcctgcctacaagaagtacagggacaaagatggagcagagactgagggaatggacaacctataactagcccaactttagacctatcccatgaacagaaacaatcccttatactattaattattaatactctgttatgcttatagacaggaacctagcataactgccctctgagaggttccaccaagcagttgacttaaacagatccaaagacccagagccaaacataagagagagctcggggactcttgtggaagagttgggggaaggactgaggaacccagagaggatagggactccacatgaagaccaacagagtcaactaaactggaccctttgtggctcccagagactgaaccaccaaacaaaaaagcagcttaatcttcatgcaggccccccaacaactatagtgggggcttaccctgactttgttgcttgcttgtggatcttgctcccctaactggactgccttgtctagcctcagtgggagaggatgtaccaagtcctggggtaacttgatgtaccagggtaggctggtacccagaggggatctcccctttctcagaggtgaagaggaagggggatggggcagtggcttgtaggggggaactaagagcacaggctttgatatggatggaaagtgaataaataaatatattaatgggaaaaaagaaaataaaaagttgtgcatttatgttcttaaaccacttaaaatatatatgattatacactattaatgattgtatagagttgtgaagtgatagaaaaaagtaaattgtaaactttgttttaatatttctaactcttccctaagcttgccttaagcatgcttcctctgattctttgtcttctttactcctcttgctttaaagttcccctcctgacctgttcctgatttgcaagctagcttaattaacttctctctctctctctctctctctctctctctctctctctctctctctctctctctc

SEQ ID NO: 704 - DNA, 1000 bp, mus musculus
actagagagataagcccacatttctctctgaaattttgtgtgctgaaactattcatgaatgaatgatggacaataaaacataaaatggcatatttgattcataagactggtttccagtctgcctaaccttaaccatatctgaccatcacatgatcaccacatgaccatcacatgaccaccacatgaccatcccatgaccatgccaagagtacattcctcctgctagcagacattatcaacttggcataacttcattccttctcacagcactcttcaccgtcagccaggctgttagtctggtccttgtcttactcttgcacgagaaagtgtaatataataaggaaacaggatgcatccatttgttgagtagtgatacaaaataaaatatgttaatgaacaaagatcaaatgctattttttccactctcctgaagataaagaaatgttccttgacacggggactaagcagttaagagcactggtacctagcatccatatggtttacaaccatctataactctaatttaagggaatataattcccttttctggcttttgtaggtgccagatatgcacatggtgtatatacatacatgcaggcaaagcacatacacataaaataaaataatggtaaaaagcgtgtgtcaggcctagacataaatctatacccaatgtcttatttttctgtagtctaatataaagacatactaacgagttttttgttaccttccactcaaaagaaaaatattctctcaaagaagagctgggctatgaaaatgtgcaagttatttaatattaaataactcaataagtgaaaattaccaagttcaaaacagataaggtagtcactgtgcataccttaacaagtttcaacagttcatagagatcttcaacctcgtcaccttcacattgcgtataaactcttcctgtctccaagctccttcctctgatggctctgcgatacaggggcagcgccattgcttcagcatacaagtcaatggc

SEQ ID NO: 705 - DNA, 1600 bp, mus musculus
atttattaattttttcatttttcttctgacacaggccacagaactaaaaaaatcagccactgtgtttcacataatttgagtttaaaatatgataagaaaaaagtgaaatagacataacatctaattatataattaaaggtgttctgtgtgacaaaccttacttctttcaatgagcttctatttgaaggaatggcctcatagtaatctctatatgaattttatgtgatgaagttatttcctttccttatcactaagtaataagtagacttatttgttgcttaatataatgagctacagatgaattcagagcaattttcctagccctctacaaagttgcacacacacacacacacacacacacacacacacacacacacacacacacggaaacaaactaactagcactctgctaaagagttttctccctctctcctccatccaatcaagattcccaaaggaaagaaggacaaagggagaagatgccccatccccgatgtcctgaagaaacagtatgccaaggtggtcgatcctttgagaaaagacccaagaaattcggcattgggcagagcatccagcccaaaagaggtctcacacacttcgccaaatggccctggtacatcaggctgctgcaacaaagggccatcctctgtacggaatcaaagtacctcctgccactaactagtttacccaggccctggacaggcaaatatcaacatacccacttatgcttgcccatgagtacaggccagggacaaagcagaagcaaagactagtggtggtgctcagaagaaagctgctggcaaaggagatgtcccaactaagagaccagctgtcctctggccaggagtcaatacagtcaccactttggtggagaacaagaaggctcagctggtagcgattgcctgtgggtagaccccattgagctggtcgttttcctgcctgccctgtgtcaaaagatgggggtcccatactgcaccatcaagtaaaaagccagactggggagcctggtccacaggaagacatacaccactgttgcttttacaagggttaactaggaagacaaaagtgctctagctaagctggtgaaagctattaggacaaactaccacaacagatatgatgtgatttgatgccactggagaggcaatgtcctgggtcctaagtctgtggctcacattgccaagctggaaaaagcaaaggctaaagaactcgccactaaacagagttaaatgtacagttaagttttctctacatataattacaggatcacaaaaagtgttatctttaatccccactagcaccttcacccctgcccagatacatacacacagtttggtagtactcattctaaacattatggaaactaaagcttaaaatgtattgaagatatcaaagagcagtccacatgtttcctgaccacagcacactcctttttaccttagaaactaagtcagaaaaggaattctcttagcttctttttgtttttctccttaccagaagaagcacagtagctatatgtgaattaaaaaagatctataaattatatttttggtgaatacctaaaatataattgattattcagattaatagtaaacattca

SEQ ID NO: 706 - DNA, 1000 bp, mus musculus
ccccaaaggacccaattcttttcgacaacctatgtcttggacagataaccatatctaacttatgaaattaagaatctctcagctacttggagagcagagcaggtagcaaacaacactgggtaaggagaatataatgggtatagatgagggggaggggagggagaaaagaaagatggaagaggggagggaaggagggaggaaataaccaggtttcagacttcctaaatgaaaggaagaggaaaaaagtttgcagagaagctagaagctgggcacctagggaccacaaacagaggtcatatttggattcccatcaaaggacaggttttcaatatagttgctaatccagatttttaaaatattcaccaaaatattttctactaaaaaaaaagatacacttaaaagctaatttatgcgagttatgctgacacatgtctgttatgccagccctgaggatactgaggcaggaggaacacaacttcaagaccatcctggcctgcatagcaaaatcctgtctcaaaaatatgtccgtccgtctgtctgtctgatatcatttatctatcatctataaataaaactaatttataagttagtatgaacctctcatctcaaatggcaacatatgtgaaaactgcccacctagttgagccaggcgtaggcagcaggtgccgctgtcctcagtgagccagcccgtctttatgagagtcttgatcagactgcagcaacctgcccttgaagcggtagtttaacaacctttgcccaagcactctctggctctttgcacatctttaatagtttccttgacagactatgaagaactgccagatgacagttctatttcattttttgtcagtggctggtgctccctttttctctctggcgttttctcaagggcacgattctgtaagtcagcgtggcaatgttcacggtggggattgctctttcaaccactgtaccgatgtagcaagagcgagtcacagacatgtcaagatttcaggccttc

SEQ ID NO: 707 - DNA, 1400 bp, mus musculus
tagatggttttgagttagttttttatgctttgtattttccttgactgttgtgtcaatttcttctctggtatcttgtatgcctgagattctctcttctatctcttgtattctgttggtgttgcttgcatctgtaggtcttgatctctttactaggttttctatctccagggttgtctccatttgtgatttctttattatttctacttctgtttttaggtcttgcaccactttgttcgattccttcatctgtttgatcatggtttttttttttttttttttttttttttggtttttttttcccacttctttaagggatttgttttctctttaagggcttctatctgtttaactgtattttcctgcatttctttaagtgagttttttatttcctctctattatattcatgaggtaggattttaggtcaatatcatgtttttcatgtgtttgggtttatccagggtttactgtggtgggagagctgtgttccaatggtgccaaagtatattgccttctgttgcttatgttttggggcttgcctctcaccatctggctatctctggtgttaactggcctaagtgtctctatctggagtctgactcctgtgtccctggttacagcagatatcctgggagactggtgaccctgactatagtaaatcctctgggagacctgcaaactgtggagtatttaaaggggcagacataacaatatgtcccagaagaagtgcagaccagaagggagatagggttccttcatatgggagggagtccgatgtctactggcctccttgggggtcccagctgctgcagttatgtgggtgagtgtcttatctgggtcacactggctgcagcaggtctcctgggaaaactgcagactgtgaggtgttgagagtggaggacatgtagatctacctcagcagaggtgcagacctgaaaggcactaatttccattttaatgcaactttactatagtgtagttcatgtatcataaaaatcatttacttcaggtgggatgaactgacagtttagcagctctcaaggtagtagagccatcaccataaagcagctttagaatatttttacacatactccatggaaacacctcatcctcacaaataattctcatttctgcccctcatctgcacacatataggaactagctttcatttcatttctgtctccacacatttgtactttcatatgtttgtaaccaggcatcatcctatcatatgtttatgcttgtctttttttattattattttattttcagaagtttcaagggcaatggttctcaatctatgagtcatgaccttttggggcactcaaacaacccttcacaggggttgcctaagatcattgaagaatacagatatttatattatgtttcataacagtagaaa

SEQ ID NO: 708 - DNA, 2000 bp, mus musculus
agagcctgagatggatgtccacactagctccccccagctcccgccatcccagagccatgggtacctcaggagcagggcctggcatctgtccaggatgctacgcgcctcagagtgtccaccctggtgcaggctgtgggctgtggcctccaatgcacggatcttttcggcctgggccttcaggccctgctcatgcctcttgagctttgacagaagggtctccacagtgaccaaggggtcctggtggaagcggagacccatgctaactatagggctgactccactccaccctgaactgtttccctctagagccagcctaacaaaccctttctacaaaatggttgttctctacaaagtgggtattatttaaaccccacaaggctaactatggctagtatccattctcagggcaggttgagtactgccctctcacctctatgctctgagtaagatctctgtcttactcattattctcccaagtccctgtgagttacacatatctgttactggagttagggtgatgttggaaggaaggcagaggcaaggagaggggtaggaaagagatcagagggaacaaccagctgggctctaagcccattcccttggctcctaggacacactctgtggacgctatccaagggtacaagaagtacttaggactgatgataactgctcagcagtgggaaagaccttgacccagagagcttgctgttctggctagcgattggtcttatctgtccttcctgctcctcttggacacctaccgccactccctcactagccagggaggcctcttcactgtcaagccagcgttccgccttttccacagagcccagaaacagctgatgaaaaaagacaagagaaattcagaagagggctacggactatctgggtgtgtctgtgaccttctctgcccagggattacctagtgtgtctgtgacctttttggtggttcaggttggagaacctgaggcctggctccgtgatacaggcacaggcagactggcagcaatactcaaggcagtcttttcagctttggctttgaccagagctgtggggacatcacaggccctgatagcagggtaggctggaagctggcatggggcctacctgctgctccaaggcctgctgtagctgctgttgccggccctgccaggattcccgcaagctactcaacccctgctctacagcggccagggtctggtgaatctcagaggcctgtgggtagccagatgcaagcagccgctgccccatgctttggaccaggttaaggctctctgttcggatgtccagctcaacctgtaataggcctgagatcagttccctgtgggctgaggtctaccagaagtccagcaggaaggggacaatggaaaaggacaaggttggccaagagacagagaaaggttctagcaggggtcagaggaaggggtggggtagtgaggggtgacatttgaaaggcctcgcacctcaggactgtggctcaccttgtatgcccggtactcttccaacatgtactggattctcacagggctgcagggggtgccctgtgtggccatctcagcctgtagtccccgggcccagtcctgcagatcctgcagcagggtctggagtttctgaacttcatggcccacatccagcaactccctcctgctcacagcactcattagtaagttctaggctcatgagtcccctttccctcatgcccagcgccctttaatcccctcggcacagaaggtctatgggatgggaattaattggtaaatgatacagaaactctggagaaagtaggggccaaacgcaagcgtgtgagccgggaaccagagggaggcccacgggctcgtaccacttctgggctttgctccagaccttccaccagctgtccatcatttcttgctgcttatgtctgaggctgtgggcaacctcgggactttccttgcagagccggccaatcctaccttcaagagactgtagggagaaaggtcagaagctgtaggcagcagggg

SEQ ID NO: 709 - DNA, 1000 bp, mus musculus
agatggcaaataggcatgcggttgccagaacaacacattctcacagtcgggataaaggtcaaagaggggaccagatgcttataactgatcaggtttggaagacgaggagaaagacaggcatcctctcctttgtgctcccctctcaagtgatgcgactgatctctttttttgtacattcttcctcctttgagccaaggaaatagaattcttggctcctcaaagcaaccttatgtaaccatgacaaacgttactgaagtttgactgccccaaccctggggaagggggagacagccctacttgccctttgcctgcttgattttcacctcctggttgcctctctggaaaggcacatatatatgcaatgctgctcagtctgtataatagtattgatctcagagctgaccacttgttattggttaattgatgtgctcttccctggggaagactgtttctcccactctgggcattccttagctgcctgtagttgtttgtgtagcgttgagggataatgagatttccccatccatgacagcatgcctcttggtgtcctccttgttcaggtctggtgtagacagccatgttgatgagacttcctgggtgtcgcttccctgtcatttctaggagatacaatcttacaacggactttctgttccttctggcccttacaatcttcatgtaaagattgtttttaaaaacttcctcctgaaaccttggctattcatgagggagccgtaaaactatggaactctctgagaaagagcctggaggaaggaaaggaagaagtgttttgctttgttttctaaggagtctaggggatttggttggactggcccacccgttagagacagcactcggggccagtgctcactggtttgaagacagaattcaggttaaaagtgcagtacttccacgacagtgcttatccagtggcctttcccacttcacaaagacccctttccctctccctctctcttccacggcctccttgaagacacacact

SEQ ID NO: 710 - DNA, 1000 bp, mus musculus
tgggaattccttccctccacctccctacagtactcagtgttgactgacttggtgaatcagtcccggaaccaagaatatgaattcccctggagctccccagcgttgttggaaggcctggcggcctctgtatactctcagcaggtagggcatactttcagtcaacatggaggaccgcgcccagttgacactgccagcactggagtgaagtaggtagggttaagggttgagagctgagaagaggaccctgaaggtgacaaggaaggaggagaaaggcagcccttagagcccctgaagagactgatatgttggtcccagcaactccatctttggccacagctgaatgtaaagctgcttctggacttttctttcctggctagctggctctttccagcctctcctgaggccaagtagcacagcctttcctgctgttttgcataaagcaggctggtagtgaagccagaggtcaaaagcagggaaacatacaggatgtgtttgactgtttgccttttcctcaaaactgtccctgctcatgatgtcagcctaaagctcaaagttcagaaaccaagacagggaagcaatgctcagacagccagctaggacagaggctagatggtgagcccagtcaggtctacacccctggtggcagacagttcccctccgtgtgccaaattcaagagctaagagaagactggtggggaagcttgctaagaacatggcagatgggatgtgctttccagacaatggtggacgccatgttgatgttgcccagcccccacatcatctgggtccaaagcctctgcacctcaccctcagctttaaaagctctagctgagtcagacactggctcttctttccttggcatctgatagtgggcaagagcgtagttggcattaccagcatgggatttcttggtgcatcctccaacctgaggagctgtttcttgcatccacatggcctctgagaggcagtgtatcatagcagattcattataggggtgact

SEQ ID NO: 711 - DNA, 1200 bp, mus musculus
caatttcttcactcatattagcacagccgtaattttcacgcttttgacgactgtaagttttagtcatgagaagtaaaagctgtcactgggacgtgacttcaggtagaaagcacttgcagcaacacctagtgtgcgtgtgcagggctgagtccaactggcaagggagagaggtggaaacaggagactgcctctccaagtgctctgaggccagtcacccagaacaacaaagaaaccctatttcaatcaaggtagactgcaagggctaacacccaaagttgtcctttgaccttgacacacatgcctcaacaagttcttgtctgcatcatacacacaaacacatgcacatatgcacatacattatatccaacacaaactcatgcatcatacatatccatatacctgcactcacacatacaaacacacacacacacatatgcgccgacatcacattcacatggcacaaatgcatacaccatacatacttacacacccacattcatatacacaaacgcatacacatgtgcacacacaaaggcaaatgtataacttgttcacacacatcagaaatacagacacacacaccactcacaactgaaaataaaatttgcaggtgattgttagctgctttatgttaaaagaaaacacttttttaaaaaagatttatttatttatcttatgtatgtgagtatactatagctgtacagatgtgagccttcatgtggttgttggtatttgaattttgagacctctgttcactccagttggccctgctcactctggtcaactcctctcactcagtccctgctctctccagcccaaagatttatttattactctacataagtacactgtagctgacttcagatgcaccagaagagggcgtcagatctcattagggtggttgtgaaccaccatgtggttgctgggatttgaactcaggacctttggaagagcagtcaatgctcttacccactgagccatttggccagcctgaaaaacactttttacttgatgtgggaagagtacctaatactgtcatcagaaactgactgtactatataagctcagatgaggtagcccatgcatgacccctagctactgaccactgaaaatgaggctagtctaagccaagatatgctgccaatggaaaatgcacattgacttttaaatatctagtataaaaatacttctataaaatct

SEQ ID NO: 712 - DNA, 1000 bp, mus musculus
taagtgacatgagaggaggactatttgggacaggaagtgaagcagcataaggtgggcagtgggggagaggaggcagctgaaggagtgcatgagtgagcaccaagcagactgatacagatgtataagatgccataatgaaacccactcctctatgtgctaaattgaagaaaaaaatcaaggcggtagacagtatttcttactgcacagcccaccgatccaatcaatctgttttattttgaaaaaaaaaaaaggttataaaatatgccaaaaaaactaaaaatacttcatcctttgatgaaaagcctggaaaagtctcagccatgaaagcatttccaaccacaaaaataagtttggttaggtgctctgaaaacctatggttatggaagacgaactcaataggtaaactgaagccttgaggtaaacaacaggcttttgcaccaaaccaggcagctgactgaggccgtcggaagacaaaggaagtgtacagtcactgttcacttagctcccaggcaaggcagccatcacgtttacttgtggaccatcatccactgtcctagatctgacctcactgcaccggaggcaggcagtctacctcacacgatgggacatgggcctgaaaacatgtccaggaaatcgcatgttttacctgcaaacatttaagcaagtatgacatcatttcagaagatagaaatgggaggattgaggaaagattaaatgttataaacactcaaaatttaaaaatccaacaacaaactacattttccttctctcctgtctcaagctgctcatttcatacatatgcatttcttttccatgtgtttcatttgttccacatctgctgtctgacatatgattagttgctcagagcctgaagagaggcttttgctcagctagagctgaggagggagcagaacagagcagaacagtggctgccggaaccacactggctcttgctctagagttccttcgtaagtcatttttaaaggtaaaagctcaaagc

SEQ ID NO: 713 - DNA, 1000 bp, mus musculus
ctctttaagggcctctatctgtttacctgtgttctcttgtatttctttaagggagttatttatgtccttaaattcctctatcaccatcatgagatgtgattataaatcatagtcttgcttttctggtatgttggggtaaccagggtttgctgtggtgggagaactgggttctaatgatgccaagtaatttttgtttctcttgcttatgttcttgtgcttgccttttgccatctggttatctctggtgttagctggtcttgctgtctctatctttggcttgtccctactgcaagcctgtgtgtcagtacttctgggagtccagttatctccaggaagaatttgggcatggagagctgtggtacagggtcagctctggagtgcagacagagtccagaaggatcctgtccccacctgattcttggttcctgtgtcatgatggctctgtgaaggtccctcttgggccaggaatttgcagggaagtggtagtcttacctgtgctagctggtatgtaagcactcctgagagactggctctctcctcgaagtatttgtgtgtgtagcactgtggcacaggatcagctctgggtgcagacagagactggaacctcctgtcccaggctgcccctaggttcctgtgtcccgagggttctgggcgagttcctctgagcagcagtagtggtcttacctgtactctcaaggctgtttgcactcctgggaggtttgctctctcctggtgctatttgggtatggagctctgtggcagaggatctgctccaggtggagacagagacctaaaggctcccttagttcctgtgtctgttaaatacattttttccctctcggcaggctgccattcatgctggagccttccagcagaactggcaccctaacctcatatttaatcatgtgtttcctgcttagctcatattcctgtcctcttgataattgggtagaaagataattctgtagatgagatcttgacctgtgattgttaattcata

SEQ ID NO: 714 - DNA, 1000 bp, mus musculus
acctttaagctctaccagcgggccaagcacgtgtacagtgaggctgcacgcgtgctgcagtttaagcaggtatgtgaagatgcgccagacaacgcagtccagctgctgggggagctaatgaaccagagccacagaagctgccgggacatgtatgagtgcagctgccctgagctggaccagctagtggacatctgccggtgagctgagagggccacgtgggagctaaaacatgccaccagggaatgttggtgcaatgaacaaaaacccgtattctcataatttagatgaatccttcctgtatgagggaccccagtcctcctgatgtagagctcccatgttcttcctgcatgtctgcagagtggcttgagacccggctttatggggcacagaagtcaatctgaaaccagtttcattgttagctgattaaacctctcaggaaggcagctgttctctgacatgggcattttatgtgtttcggaaacccctaggaacccaatggagttctgtctagaagagagtcaaaaaacggtcttgaccttgagagttctgctgaaggaggtgggctggaagaatcacttggaaagcccctcttgaactgccatatttattttgggcaattaggggaaatgaagaccaaagaaaggccagtttataaacttggctatgacagaagtgtaaagagagagcatctttcacaaaatctccagacctccctgtaattgtgcaacaatggggataatagagtccttcccagggaggtcccacactgaccttggagaactgaaagggaaattggagggaaatcagatgacctgtgttagctcactctgacgatgacacagccctgcacgcaactagcagtggaaatgtaattagccacttggcgcctgtggcttgccaggctcatgccacacccagtcagaaagtttaaacccagcggctagagtggatcacaaatggcatgtggaacctgcctggcccggccaggagcttgtactca

SEQ ID NO: 715 - DNA, 1000 bp, mus musculus
cgtagcaccacgtcacagaaatgaatctgtatttgtttgtttgtttttaaatttggtgaattattgacttggctttgtcaattagtgagaaacttgttttgaagtaacttctccaggtagtataacatgattacatgttcttaggaatgagctaaaactttaccatatacataagaaaacaaataccacagtcaacccaatgcttatttctttagacactcagcatttctttttcttagagttctaagtcagcgtttgttgaagatcacagtagcacttagctaacgtgcgtttctttgttttaggttgtacttgtttttcctgggcctcagtctatctcaatagaagatgtctctttccatctacaaaaaaggattgaaagtaagggtagaaacaaagctgacaaccttgatgtgccacctcggaaactcaagaggactacggacgaggaaggctgggatctgcatgagagcacacgccaaggccccgagttgaaaagagttgtctttattgacagcacctggagccagacaaaccagatcgcctctgatgagcggcttcggggtgaggatggagtttggggactttcttcccctgacagcctttatttagaaaaacttcacttctatggctccctcaaaagaaaagttctattcaatgcttgcatttgctccatttctcatctccctttctgtattctgtgtgtgtttatgcatctatatacatcgctggaggaaccctttcaaagtaagcagtaggctttgcaaaatggctctcaaaatactgtagatctgttagaaataagggcactcctatgtgataaataaaatgccgttggtgctcctaagagaatcaatagaacaatatataacctacaacctgtcttcacatctctccaatgtatacaataatggcttttgtagcactttctcctctgacagtatttaaactcagactttccgactttccgatgcttctatatctttagtttcttaatcta

SEQ ID NO: 716 - DNA, 1000 bp, mus musculus
gtttccaccttgcacctgttgcgatctctgctaccccccagtctctattctgctctgaactcagtctgaactactaagcaacaaatgaagtgcatcttgtcaaatacatcaatattattagacacaaaactggagacaggaggaaccaacctctgagatagcttttcgtacagcactccagtgggaatcagttctaggaagacaaaggagcaaggtcagtgcagggaccagctgtgcctatttcaactgggagtcaaaagaagagtgtggaatcaccaatcagctcgggaaactaaccagtcttctcaggggaggcccagctaggattcaatgccctaaatggattacaaaattaaagtagcaaaatttgccttccttataagaaagtgttgagttattaacagtaaaaataaagccaaaaacttctgaggctgcagatgatttagttggtaaaatgtttggcgtgcaagtgttttgagttcaaaacacgagagccgacattaggtgtggtgatgtaggtgtggtgatgtgtatttttaatctcagagctggcatgctggagacacaaggttcctggggctcactgtttacccagccaagcctaattagccagttccgagcccaagagacacccaacattaaaaagcacagtgcattactcctagggtacactatccaaggtttcacacacacgtgtatacattgcacatgcctgcacatacaacccactaaacacatgctcgaacatgcacacacaggtttaagccacctggatgccctctcccacctcgtacctctgcttcacctgggctccatctgcagtttcatccaccacctccacgtcctcctcaccgtcctcctcaccgtcctcctcaccgccctcctcgctgccttcgcttgactccagcttgtcttctttattatagggctgagagattgtggacatacaaagtgatgctcagtcaacacagaatcaaaccacaaagatgtatcagtactt

SEQ ID NO: 717 - DNA, 1000 bp, mus musculus
catcctgaccaagtaggttttattccagggatgcagggatggtttaatatacgaaaatccatcaatgtaatctcttgcgcgcgccggactggccagcagtaacgacactgcaacaggatccttctgcacacgtttattgggagagcttgattgtagaggcgaagagacttcgagtccagaactggtgctgcttttataggcctaggagaggcgtgtctcatacccggattggttatgcactaagcctcatttgcatgttcctcatctgattgactactctctctcagtacctcacagagcctcattatcatacctcatttgcatgtctcacatccgattggttactctcttagtaccttacagaacctcattatcatgcatcatttgcatgtctcacatctgattggctatactctcagtaccttacagaacctcattatcatgcctgggccaggcagtgtctttgcaaaaaactttactgcatatgtacacattggttgtttgtccaatcttatgcatggtggccagcagtagtcagtgccactcagcaacggcacatgtggcttcccacagtaatccattatataaacaaactcaaagacaaaaaccacatgatcatctcgttagatgcagaaaaagcatttgacaagatccaacacccattcatgataaaagttttggaaagatcaggaattcaaggcccatacctaaacatgataaaagcaatctacagcaaaccagtagccaacatcaaagtaaatggagagaagctggaagcaatcccactaaaatcagggactagacaaggctgcccactttctccctaccttttcaacatagtacttgaagtattagccagagcaattcgacaacaaaaggagatcaaggggatacaaattggaaaagaggaagtcaaaatatcactttttgcagatgatatgatagtatatataagtgaccctaaaaattctaccagagaactcctaaacctgataaacag

SEQ ID NO: 718 - DNA, 1000 bp, mus musculus
agacagagccaacgggactacgtaatgagtgtagtggtacagtcagggagagggtgagtactgagtgagcactgtatcttgtacttctctcctcctttacagtctcacaaattagatgccttggaaatgctgtgcccagtgccaagttggaccttcatcttgagtggaagataacatgtgctaaacagctctgtctcttttaagatgaggtacttagttaaattacctggctctggtatgggtaggcggagctaagtgggaaaaggtagggcaaaatatggcttattctctcccaaacggaaccaacctcctctctcccaggatcctttcatatacccatcgagtccaccaacctggtccttaccaagccatagtctctcaatcgaccccccttccctttattcacccctccctatgtccttccaaggaccccgctcaaacacaaacagctcctgcatgagaccttctccaatgctgccaaaaacaaagaatcgcctcacacgggctcttgcagaactttacgcatcacctgactggaacattcataccattcccttccagttttgtgaagcctgatgttttcatgatgtccttgtagctgaaaaccattgtttaactcattctttaaaaaacagttttgaataattctctaagaatttcatacagtgtatcttgatcatattcatccctctctcctaacttcccccaggtcctctcaatctccctgtccatccaactttgtgttcacttcccaacccccatcaagtccagtttgtgttggtcacccactcatttgccccaccgtgtggccaatgcatcaggtgtcatatgccattaaagaaaacggactgaacaaagaattctcacctgaggaataccgaatggcagagaagcacttgaaaaaatgttcaacatccttaatcatcagggaaatgcaaatcaaaacaaccctgagattccacctcacaccagtcagaatggctaagatcaaaaattcagg

SEQ ID NO: 719 - DNA, 1000 bp, mus musculus
acgatcaagccactcacactgcagtacaagttacttgaccctgttctgctttggggcaaggaatgacttcctggcgtggatgtctgggtccctgtgaagagctgtgatcatgttgaatttatgcttcctaacagtctatctcttatatttttggttgtgagcctagcctttaacggctgagccatctctccagcccacagtctatctctaaaggcttggtggtttattaccacgtacttgtgggtgaggctaaacagaaggagattaagatagcttcatgtagtatgactggactctgctggtagctgacccccatcaatgcgagtacaaaagtttcagagctcctggtgcctatgtttgataccagaaatcctaccaacaaggcaacctcaaggaccagggtctacctttgtaataaacattctaggattgtaatgttctggaaaaaaagcaaccaaacaaaaagcaaataagaaaatactaaatgtacagaacaaagaaagagtattaaactctgcaagggaaaaaggccaacttacatgtaaagacaggccttctgaaaaacttctgacttttcaatggagactccaaaagtaagcaggcctgaatggatgttctaccaactcttaagagacaacagatgctagcctagactattacactcagaaaaactatcaatcacaattttgctgactagttttatatcaacttgacacaagatagagttatctgaaaggaggaaacttcaactgagaaaatgccctcataaaatccagctgtatggcattttcttaatttgtgattgatgggggaaggcccagcctgttgtgggtggtgccatccctgggcaggtggtcttgggttctagaagaaagcaggctgagagagctaggaggagcaagtcagcaagcagcattcccttgtggcctctgcatcagctcctgcccgcaggttcctgccctgtttgagtttctgatttcctcaatgatgcactataatg

SEQ ID NO: 720 - DNA, 1000 bp, mus musculus
ttcatatacttgctgtgtgtctacaaggagaggaaagaaagaaaagaaacagagattgttaaatcaggtatcctgtgctggcccagtgccagcctgggatgcaattttctccctagatttggcaatgctggtctgtctcagacagctgtttacctagaatttggtcattaccaacactcagctggctacttttctcagggcatccccagaggcctttagatcagaaatgctatgtccaatgcaaaatgtaaaaacaaagatacattagctgttttttaacctttcctaaagcaagagtatatagtctatatgtatctatttcgacctaaaaagctctgccacaggggaaggaaagcagcagggttctgctgcctgagcctcagcttcccaaaggcactggagagagggaagaatgaagcaaggagctgttaagatttcagaggagaaaaaagtacagaagcagttgtggaccatgccaggaaacttagtaaggctaagtggactggaagccccagagcctcataccagaggactgtaggagcttcatctgcttctgaccagacccctgtcacctgaccacagcaccccatggttaggattgtagcaatcagtcacatggggcagtgcccaaagtccctccacatgcagatgaagcatccctaacatctcagaccaagccaataggaagcatctgctgtcagaaccaaccgaccccaaaatatatataacatcttatccagaagaaataaaggtgtgagaattactccatcacagatcctctgagagcttctgtcacataagagctgtaacacttcctggggaagagggctctctcctgagacctttgccactggaagctccctggacccacctctattactggtcacttcccacccagtggccctgaccttagttcctggccctgcacttcacctgctagctgagcactctcctcccctaaacactgctgtccagcctgaagatctccaaggatagcatc

SEQ ID NO: 721 - DNA, 1000 bp, mus musculus
ctaccacctgacgctaatctgagagttgctctgtgtactctaccacaggcttttccaggatcctgtttatgtctaaacccaacagtccagcctcgccagcctcttaccacatggaaaactccattgctcagagaaagctatgaatccgtatattcttatgctttaagatcctctgtgacatcccaaagcaaactccaggtaagcctaccagatgttttggggaggggagacaagggatagatgaataatttccattagcatagtactgttaccataaagatttaatgacttcattgatgtggtgttctgtgcttgtggaaaaagcgtaaggaccagaaagaaaacaatacgtatgagtacccatgaggccatttgaaaaatatactaaagaggaaaatgggatctcaagtcccccagacgaggaacagaatgctctcatttgagctgagcttagggacctgggagtcatccagagatgggggcagtaggggaacaaaggccagcaaagtgtcagtcccctcccctcctcccctgctgctgcacttcaagctagaattgaggttccactctgtcttcagaatacctgtgctttgcttgtccccttctacatccacatagagctatttttgctgttggtcatttgcaaaacaaataggaatgtcatgaaggatgaagatacctcacaagagacttagaacagtaccagaggcagttgatacactcaccagtcaccactactttcattattgtctctctggtatttaaaacaagttcttcgctttcatcagattctcaatttccttctcacttaaaggaaccaggttgcgctcactttggaattctcatccacttttaatcataaaaaaaaaaaaatgatggttttgaaatgtgcacatggattctgttctctgaggacccagtcccagatttttgaaaccaggtgcactgttcagcaggtgttaactgccagaagaatttagaagcaatgtcaccgagaggg

SEQ ID NO: 722 - DNA, 1400 bp, mus musculus
atctcacaaatatctgtaacttcactttgaggggatctgatgccctctgctcgatgctatacattcaggcaaatactcacacacataataaaataaaatcttgtaaaaaaatttaacaccattatatttcctggataaccacagaaaatttcaaattttcttgggaatttcagtagaatacaaactgatcctagagttactgtttagaattttatactgaagttgtttaaacaaaaagtccagtatctatggtgtattaaacttaaagatttacaggacatattaaatgtcaggtactcctgaaaaatgcctagagttgtgttagtgcccaatccatttacaaactatccctttacttttgctaaactgtttcaggataccatttgcctgcatcttctctctcccgagggtagaaatttcccttcaaagtactatttgtatctgaggatgtcaaattatccttgctataggcaacccacactacatcagagtgaatgaactgtgttaaacacagcacagaaaatggtcattagaaagggtgatcttcagtcctatctgtctccaacccttggatgataggcattttagttctgtctttgttgggtttaattccattttgggaaaagtcaataatgagtttgccaatcacggcacctgccctctctggtgttcagtagggtagactagacgtggaggagggatgataacccataagcatagccacccatgtcctgtggccaagccctgagcaaagaagcttatggatttggtttggggaattcactcccacatttctggcaacgcagctttttttttttaatttaaattcatttatttatttgttctttgttgttatttgatgtagatagaggtcaaaacataacttgccagacttggttcccttcattcatcacacgggtcctagcaatcaagaggcttaaactcaggtcctagatctcggcagaaagcaccttttacccacagaaacatcttgttcaccaaccctgccagttttcctagacctctgatacccgctcatggatttcttttgctcaagctaggtgttttctttcatttgcatgcaaacttagagtcattgctgatacacctggcagagtccctgacacaacagataatcaatgggtgctgtgacatgaataatcacaacctaagtgcatatcatcatcacatttgcaaaatagtgggttgttttatgatttcaaaaatttcagaaaggtattcaaggagaagaaaaaagcaatatttctacctgccagagactgtctttctgttttctttcaatgtttttataaacctacgtaatatttcagtgtcataaattcatgtgttatatgcagtaaagttacctgagcattcgatgtacaattatgtcattacat

SEQ ID NO: 723 - DNA, 1200 bp, mus musculus
atgtcaaggaatgctattttacttacaagtcatacaaagaatggctcaatagtataatagaaaatatgatggttggtatagaaatacactatacttctctcatggtaatttctatatacgttatacaaactagtgagttcaaagattcctatatcagaagaaaccaataatgcacaatctaaacaccttgtgcggactatttcattacagtgtagtgcagagcccagggtggctttgatggggacagagtgacatggctcttgtccctaggacagggccccagtgtgagcctatgtgaatgtccatggctgctgtgggtgtaaggcttgtttgtgtaataacatacatattttctgaaaccagtactagcagtggaggactctttccatgcaagaaatgtcctccctgttagtgttaatgactccataataattaggaagagcacaagtccagaggtcggggatatggctatgtctcttcaaaatggtaaaagttggtgtgatggtttgtatatccttggaccagggagtggaaccatctgaaggtgtggccttgttggaataggtgtgacctggttggaatgggtgtgtcactgtgggtgtgggtataagatccttaccctagttgcctggaagtcagtcttccactagcagcctttggatgaagacatagaactctcagctcctcctgtgccatgcctgtctggatactgccatgctcccaccttgatgataatggactgaacctctgaacctgtaagccagccccaattaaatgttgtttttttataagacttgccttggtcatggtgtctgtccacagcagtaaaaccctaactaatacagaagttggtaccaggagtggggtattgctgtgataggcctgaccatgcttttatttgaaagaatgtggattttgggactttggatttggaaagcaatggaatgctttaaatggggcttaatgggtcatcctagtaggaatatggaagacttagttgctgggagtaatttgaacagtgttgacctggcccaagagatttcttttttttttttttttttttccattttttattaggtatttcgctcatttacatttgcaatgctataccaaaagtcccccatagccacccaccccctctcccctacccacccactccccttttatggccctggcgttcccctgtactggggcatataa

SEQ ID NO: 724 - DNA, 1600 bp, mus musculus
ttaatttgttcccagcggcagttcattaccgacatcacaagcaaagcgtgctctctccctgggcacagagggcccaccggaaattaagcagacagggctgccatgcccctcagagcaaccatccagtcttgtctccttcagcaggctggaggcaagcacaggaaagtggcttttgaaaggattctgcctcctgttgcctgacaccttctgagacttccgctgagaggagcagtgcttctcacgaaggctgggatcatgctgttccttccacaacttgtcttattctggaaggagatgaaaaacagctcctgatttttaacacaaagaaagcttagctctgtcccttgtcttccaatgtgattctgcttcctgggtgcacagcagctttctggacttcaggaaggttgcttcctttattgatgactcatcagggggtcgtggaaaggaagtcagctgactctacaagaaaaagccgagccctggcaaatttagtttttgagaaactggtattttgatttttttattgttaattattagagagtgagacggcaagggatcaagattgggagctatatgtgaacacatgtgccacacataagtatggacgtgagagaacaacgctctgggattggtcctctcctcccagctttttgtgagttctagggattaaacttgtgtaacatgcctcatgactcactgaaccaactagcaggccctcaggaagccttagttttagacaaactccacgttctgactgagggaaggacaatgctttccgttactgttacttttgttgtcttcagagtcttgtcagtctctgggctacaacagatcaacaccatcctgacggcgactccgtcctaaccaggaacaaagcagggtgaactctgggcatctcagtaggccttgcccaagcttcactatctatcatcatttattttggctcttcgcttctctttcatgtagtgggcaagagagctgtggatgagatagggtgttggaaatgggtgctgtgtgctgaaagacagaatttagagggttgaggtcaaatcattgtcctcccctatcacagaaaatatgtcagtggtttctcatttatatcataaatgaaactgattaagaaaatttaaaatgaaaaggggtggttgcttcttaacattaagtaactgttaaaaaataatgtagatgggttcatagacaagaaaccaggataaattatccttcagatgatctcttaaggtattaataaaaagatattaagagtggcagtgtaaaggctgcaagaggctatgatggaaccctgaaaggagacggagggaaccctgatatccaaagaacaataagggtttagcctttaaagttttcagtggtgggaatggagggcttcattctgttttatgagtccaagactgtatgctagaagtcaagaaagcattagtcaaagccttgtacaacttaaggccagtttgagtcagaagagctgggaagggatttacaaagatgtgggaaaatggtcatctttctaggagccagctaacatatcatttgtctgtattacacttctataccaccgtgtcttacttatagtgtagtgcacatg

SEQ ID NO: 725 - DNA, 1200 bp, mus musculus
tttctctaaaatacatcatccaatgggacacaaaataagttcaacaaacataggaaaatggagagaattgtactatatctgagcacagtggtgtaaagctaaaactaggcaaaagaaactaacagacatatacaagacactgaagatttaacagacattttccaatctgagcagcgcagaagcagaggttcctgattgaaaaggtttcctgtcctggaccattattaaacctcctgccgtattctgaaccattgattccccttcttatgtatggaagaggggcttaggtgcttccttctgtcatttcacctgttcccttcacttcactgtctgattcttcatatgctctccatgcttagtgttagcagagatctcacataacatgtgctctttctcacatgctgcctgctgcaacaaagaacaagccaaatcttgcacctcaactttttttctacttttcctgaaaaaacaaaaaatcacggggcaacgtagaggacagtatcgttgaatccttttctcattgtgattcctctattacatgggttgtcagcccggccactactgtgtttcttattataaaaagcaacaggcattcaactgtagccatggcctgcttacactccattccacacgtgctaccttcagggacagtaccattttctctcttggcactttgaaagacattcctataatcccatgaccaatctcattaatcaagatgtcataccataccacagtacatagaggaatatggtcacccaaaaattctcttcaacgcatctccattttcagacagctcagaattgcttgcatgtcttacaacaaattcagggagcgtgcatctgacactacaggaaggatgcataccacatgggaaaggttgccatactgggattgcctctgtgactatttatatccccaggcaggtcagcctttattatatgtcctaacatccataacaaggtacatacaactgctcctccactactcatggcttggttcttttggtctctgttcaggcagcaatagttttatgtggttactcctggagggacatgcataaatgtttattaaccttagacaagacaccatgccagacatccaaatctatcttagtgaagcagtgaatttgctggagagttactagggaagcatgtttaaggtatgataccttctttataaaatttattttcagaaatt

SEQ ID NO: 726 - DNA, 1000 bp, mus musculus
attctttagcagcatgggaactggacttagaactccatgaaaactgtgacatgattttctcagcatttcaaccctagtggattaaggagcccatgagatgagcaaagtgggcggagtgagtgctcatccctgggtggtggctgtccttgcctcacgataatttatccctgtctttggttactgggctaccgtaattctcacatcttgagactttttctttttcttttcttttcagacagggcctcactttgtagccctgattggaactcaatatgtaggccagcctgaccttgaaactcacagaaatccacctgcctctgactcccaagtgctgacactactaaaggtatgcctggttccagtgatgttgtttctcttaagctatctagagttggttgtatggtttttacttggcttgtgtgtgtcctacagaggttcacatcctggaagctgtttccgagtatgatattgaccttaaagggtggagccaaagctggaggtaattaggtcagtgcaggcaccagcatctgaagagattggggctggcctttagtccgagtttaggtatgtctcctggaagtaaggccttctcatgcactctgcctcttctgcaagtgctcgattctctggttttctttttctccgtcatgttgtgacccaagaaaagggcctttcagaggctgagtggacaaggccacttgacctttgtgatggtttgtatatgcttggcctagggaatggcactattagaaggtgtggccctgttggagttaggtgtgtcactggtaggttataaaaccctcatcctagctgcctggaagccagtattctgctagcagcctttagatgaagatgtagaactctcagctcagcctgcaccatgcctgcctggatgctgtcatgctcctgccttgatgataatggatgataatgaatctctgaacccgtaagccagccccaactaaatgttgtttttgtaagagttgccttggtcatggtg

SEQ ID NO: 727 - DNA, 1000 bp, mus musculus
gctgaattaggtggctggcccacaagcttcctcttctcaggtctgtgggattcaagactcagttgctaagcaaccacttcctcactcttgggccaatgggcttcttggaagttcctttgaagttggaatgaagcttggctgggtgtttgggaagagcaggctatgagaagggaccctatttagtctgccattcttgtggttggagacgaaggctaaacttaaaataagtagaggtgacttcctaatacggaaggagataccataagcctagtatgtatgtttttatactaagttcaactgttcaggatcattggagaatcttcctttgtgttacctctagagacacatattatcgtttttaaaaaagatttatttattttatgcatatgagcacactattgctctcttcagacacaccagaagagggcatcagatctcattacagatagttgtgagtcaccatgtgattgctgggaattgaactcaggacctctagaagtcagtgctcttaatcactgagccatctctctgccccaccgccccctttaactatactatatgaagatgcttgaggctggataatgttatagaaaagaggtttagttcagttcacagtccagggtgtgcaaaagtgtaggagccacatcctgttagcaaagcccagacatagttatagggtatcacacagcagcaaaggcagggagtccaccctgtacaagcacatttcttctaggatcttccctttccgggtcacatttctttatttaatttgtaggaggtggatatacacatgccatgcgcaaatgtggcagtcagagaacaatttgagtgagtcagttttctccttccaccttgagagtcctgagggcatttacctcacgttgttgggcgtggtagccaggaccgttgcctgctgagccaccttgctggcctgctcttccccttcttataaagccaccacattcaaccatggggtctctacactgctgaccatatataa

SEQ ID NO: 728 - DNA, 1000 bp, mus musculus
tagttaacctttctttttccagactaacattttccttttcataatttctgtagggctccattagtagtcagaaaatgctcaaatttgttgttatcatgaaatgtttttcttcatggattgtgattgatggttttattcatatgtggtcatttagagtttgcagaacagatttccagcctcttttgcattttagagttttcactgaaaagtcagctgttactctaacatgcctgcctttccatgcgacttacatgagttgtggtgttagaggtgttgcttggtacagattgctcatctcttctttgctggattccattcttctgttgctgctgcccaatctgggttctagccaaatgtgatggctgtggggtccttgggttccagctcggtgtgagagtgtagggtcctggatatgtagctattctgcaggtaagtggagagccacaaaagactggacattagccagaaggaaaggctgaaggggacttccagggagaactagaagaatcctgcgtcttccctaagaggccagtccctggtgaatgaggacaggttgctaagcagggcttctgtgagcaggctgcagcaggacaatcttcatagcttcaaaacttgtaattagagattaggttctttgcatgatcaacagattaaaaaaatgacaatggcgggatccaggtgagaatacacacggggtttcatgactctttcagttctgctgtataaattaacattgttcataagagaacattaaggaaaataatatgcagttcagttaaatttctaaatgctcaacagtcttgaggtttggagatgtgggttagatgttgaggactctaagtggagttgaggatttgtgtgtgccttcagctcttgccttcagctgtggctcatctccctcctgtgtgttcatacagggcaccactgacacatgatagagtgtgcctactcgataaccttccagcatcactatatgcagcccttcctattgttactgagg

SEQ ID NO: 729 - DNA, 1000 bp, mus musculus
tttacttattttccttgatcaacattagactctattaaagtctttgaacattgagagctaaggagttatctccataaatagagtgcttgccatataatcctggctgcttgtatttggatgcccagtttttacccaaagccaggtgacatggaacttgcacgaaatcctagagcatttgagaaagatgtctgatatcaacttctgacctccatacctctgcatatagctgcatgtacacatgcatacacatgaatatgtatacatatctctctgggtattaaactaattctgaatatggataacatatgtataaataaatgatttccattctatagataaatttatcctatatataaaataataaagaagaggaactaatagacattcctcagagacatcctttgataaccaaatccaagcctttgactgaaaaatttcctcattggtttagattgagtgaatgaactaattactttgtaatttgttctgctgggaagttccactgatgtaaagagcaaagagaaatgctactaaccttgctgccaagaaaaagacaaaggaacataagaggcatctaattttttcttctattttcaacactttttcttgaggtatttgaaaactctcttttaacaggtatagtagaaatgacttctcaattcatcaaactactgtaatagtggaccccactgaaatggaaattgcccccaaagttcttagacttgggagaaggaaaagctgcagccagaaaggcgacttgcctctcagaaagagctttccaatagtattaaccacctgtcagagcacctgacaggctaagactgaagtccaggcaaggatgggtcagtattggacaagaccacaatttaaacaggactgcttggatctgcatcttcttgctcctatatttaaatgttaatctcacctcaggacctgaagattgacttggggaagaagctgaaattctttgtccctcttcccagtatggtcttattgaata

SEQ ID NO: 730 - DNA, 1000 bp, mus musculus
tacatccactttggaggcacagaaaatcacatcctggggaacaaattatataatgtgctagatggtaaagactatcagaaaaaatacaaaaataaaattaaaaagtaaaaaccagaagtgttgaggactgagcttctggggaaagaaggataggaaggaaggaagatgtgatgtgagacacggaagaccaggagggaatcagctccataaaagcacaagaaagagtgaccaagccagctgagtcagtcaccagggcatcaagggagggagtgaggactggtaaagaaaaacaactagacaaaattatagcaggacttcagcccacactgagactgaagcagctgtagttctctccagcctgcttttatatcattctaggtatatccaaaaaaacatggttagttcttagatcaaagacaaagtaatcaaagcaaagtagtaaacagagggatcacacaagaaagtaatcaagtaaagaagtaagcaaagagatcacataaggaagtaattcagcaaagtagcaagcaaagccccatagtcaccattcctaatattcttatccaagcctacttccttgtctgagcccagtgacaaatgccaaattcctagaagtggcacccaaagctctcaacaaaagagttttctaggaagtaggagacagaacaaaccattgttcagagacatcaaggaatccagtgtcacggatgtgactggaacagtgggagacaacaggagctgattgacaggagtcagcttttgtccgttaacactggaaccttagatttttcctttgacatccatggatgagcatggctgaattctttaccttcgttctgaagttgagacagggaaagaaactgaaaccttctcaaggaaggctggattttctcttcagtgggaaagcatggcctggggtcccagactggtcctgttggtggtggttaagtgaaagagcaggttaccataaccaggtacctgttattttcaaagcagaatgtgt

SEQ ID NO: 731 - DNA, 1200 bp, mus musculus
ttaaagatgataataactacagctactagaaagtctttagtagtaattatttgttaagctggttttatagtcctcacatgaaataccttcagtgcccacagagtgccaaaagagtccaaattctctcattctttccatgttccaatgagtgggaaatagtaggcaatgtctgttgatcagcaatgacttatcaccaggtactaagtgttgcaacataaagttggtgatgctatggcacatgttcttcacttactctgtgtatttaattcaaccagacctagagctctcataagtctgtttgtgctatgtacccaagataacagcagttagaagaattagaactgcaactagggaaagtgtgtatttcattttcattatttgcattttttgtctcagctaggcacttgaattaaaattctatcaccttgagacattggaggctgccacagaacaaagcacacttcaaatataccaattattgaggtcattggatggttaatgagtcatagcttgggggaatagcatatggtcagaaagagactatatgttaggatatttgtgttaaagtagagctggctgaaaaacactagaaaagggaaacttactagtgataatggttgaattggtaggaataggatattaaacacatttttaggttattttaaagatttattaggagcttaacatgtggaaaagtagaatttcaagtgccggttctttatgcaaatcaccaaaacctaagagatgttggcatactatcatctgaagaatgatgtgagagaaatggagataactggtccaggatctctgtaaatctgtaagctatgggtatttcaatagtagtacagtcctccactatccaaaggagccaccttagccaatgagagtcagacagacaagtggcagagtcatgcagaggaatggataagactggactttgatatgtagcatctggttatctgatcgttcaccatctgtatttttttcattgccatgaagctcacttggatcattattgcacaagtttaatgtggttaaaataaacttcttgggagataggtaaggaatttgtgaagaagttcctgttgtgtcagggttttctttccttgaactggagtgaatgagattcttctagagacaaacatctcaaaaaggatgctatacacaccttttccccataatttctcataattacttaca

SEQ ID NO: 732 - DNA, 1000 bp, mus musculus
gcaaagacaaatgtatgtatgtgtatgtatgtgtgcatatatatatattcagtttttctatttctgtactgtcttcagtgaatttttgtgtttgcccacatgcatgcatgtgtgcacatgtgtgtgtgtgagcacacatatgcatgtgtgtgcaaccactaaaataacacaaagcaatagatgatattgggaagcctttcttggcgtggccatatttcatggctgatcctccctgaagatgctgtgatagtctacccagatcttcccttcagggctaaataattcagccacttggttatcctgagacaatccaaatgtttctagcagcagaaagctgtcaccagcctttcaaggctaagaacacaggtgatagtgtgtatctatgtattcaaaaccaggctcatcagacagaaacctggataaaagatgaggggcctattgttgtcttagttagggtttcatagctgtgagtagacaccatgaccaaagcaagtctaataaaggacaacatttaattgaggctgacttacaggttcagaggttcagtccagcatctaggcaggcatggtacaggcagagctgagactttcacatcttcatctgaaggctaatagtggaatattgacttccagacagctaggattagggtcttaagcgtatgcccacagtgaccaacctacatcaacaaagccatacctccctgggccaagcatatacaaacctttgccatcataacaagtaaaacgtcagaagcatggccattggcaaagatatttcagagtcagaagagcagtagaaagacccaaacttttttctgactcttaactaccagccttctctttgtgatacccactgaccaaatgtcaaaggaacctacagagctacagtgggcaagggaccaacatgtgttgtcccctggtatggagcaaagcaaggaatatagctggggctggggggaaacattcaaattccagagcaaatagaagcaactaaaagtgaa

SEQ ID NO: 733 - DNA, 1000 bp, mus musculus
acttaaggttgggtaattaataaaaaatgtttagttagcccacagtttgaggcctatggttcaaagttgggcatttctatttgtactccggttatgaccttcaaaatggcacgggaaagagatcaaacggggagacaaggtcttgtagaaactgtcaggaagcctcaagaatacatgatcccttctgccataccccgcatccctatcactttcaagtcagctctacctcttaaaagagtgcactgtgtcatcgcctcattggggatcaccatgtgaacctttgggggatgcagatgctgtgcaccaactgttcagcaggtgaacattggtcacaagaatctactctggcaagagaaaagctgtgctttgtagtaatctgacctgcatcaaaactgctctaaaggggactctgctagatcagggtaggtacctaatttacaccacctcgacttctgtatctgtaaaagtggagaataggagagtagaatattgcaggggcttcactggagcgtgtgatagccaagcacataggtgataaaaaggaggcaccagcaggcagcagctgccaggaaacacagctgcagagcactcaggtgaacgcctatttatctttcctgaaagacaggcgtgaggtttccctttcacaggagtcagccaacttggaaacttctcaccaagagatcaagcagctggtgacaccctcagaacccaaactataactgtttggaattagtgtttcctccccctcccccaccctaatttccctctctaatttcctcactcctcccggcctttggattccagagagatggaacagagctgaccatggtagatactctcattgatcatctggggagagaatacatgcagggcaccaggcttgagctgaggtgggaagagatcaaagaaacatgacagcgatgtgctgtaggtactcctagccagctgcaaaggatgtcttgggaagtaggtataatgtctgtgtgatccatggattggg

SEQ ID NO: 734 - DNA, 1600 bp, mus musculus
gaccatcctcggagtacatcctccattagtggattttttctcaattacctcctgtgagcttctgctacatccactccagtagtgacccacgtgacaggcctagaaacctggacatagtcccgaggtgaaaagttcacaaaaacttagtctcctgggaccgtggcatcccatataacgaatgctccaaatctgtccttgctttagttattaaatgtatctgtgtgctttccctcaatattgctttattatcctcaatattgctttattataagtttctctaaggattgattttgacatatagctaagttagatttttcaccagtcctaggcagtccttgagctgatcctgagcatagatagctgagtcactgccctacacaagaatttacaatgacctaggaagaaggaaggttgtggtctaaggaggaactagagtaaacacttagaactatagataactgagtcacacccatacacaggaatttacaatgcctagggggaaggtggactatacaatagagtagaattggaactattctaagattaagctgataggtggggctgcttttgatcccagttgttaacattgaattttatcccagttggttcctgttagcttttaagtatgcatttgtctgtttgtgtaaaagtcacttaaaagactgatgctcactttgatagaaatacattcagatatagcacactcccttgtgtctgaatttgttagtcatttctcaccgactcctgcccacctgacctggaccctgatttctcctgcggattgaggtgggctgaatgaagccagtctgcagcaagcttcatcactggatgtgtgactatggcagccataccttcactctactgttgacagaatcatgatagataaaattacaaaaaatagttcaaagtgtggcacagagcctccagaaatcacttggaaaaacctcaatgctctatccaaagtggatatacataatcattccacaaaattagattgccatcccttccagaataagtgtaccagttttccacttgttcttgtaggcaaataagtgagatctttcataaaatgccagtgatggacaacctaaggacagctaagctgccacatcagaggaacatgtttccagtagtaaataaaatttgaagaggaaataaaaagcaggcagtacagtctcatgttttagccagcattcttaacacaatggttcataatgataatgatgatcatgtgagttgattcaagccctgctagatacaatgcttcttttatacccagctatttaagattcttcatatcactgaggcttctttgctgcacttcaaccagcattcaaacacaacactgtgcagggacatttcccaggaaaactataggactacagagaagaattagtttcttagttaaattaatttgtctgtttcagtgttgagtattcattttgaataaacattcagctatccagattcaaagtgtaatctccctactgatcctatttcttgttatgtaatagcttatgcacttcttagataaaaggcctatattctaattactatgcaataaagctaatacttaactaatcaatataaatattaaagt

SEQ ID NO: 735 - DNA, 1400 bp, mus musculus
ctaatctgagcatcaaatttaggaaatctgaagtcagtttaagttctatctttaaaaaaaaaagtagcaagcagaatagtgacaataggcggtattgcaccagaaataccagaagtaccagaagtaagaattgccctaccagagacttcacaatgtattatactcacaccaaacaattgctatacagccactagatctgctttgcgggagaagtgttgaacaatcctacccccatcttccagctcagccctaggtgctgtcaaaatccctcctgtctgtctggtaaagaccaatggtgccaatgtggttgccttctttatatactagccaactttgggcttagctagctatgaatctcgcttgctattttcttctcataataacttgttcaaggttccaattcttgccagacagcttgtcccagagagtgggaagaagctaagattacatactcagctccagctactaaaccaagggagcatctcgccatttatttaccccattcataaaaatgggggctttgcctcatcaatgtgcaaggcagcagacacaaggcacacacatccctcccaccttctttctctttcaggatctttgtcctggcagctgctcttgcaggcttcttcctgtccttcaggtttcagctcctctgaccacatctaatgcccattctccctcaagtcatccatcaccacctttcccttcctgccctaactcatcactttcccacaattacctggaagcctattttttcccctcatttaacatgcaccctgagcattcttcaagtcctggtctgccagtgaagagggactttgactgtccggttgctcaattctgtcaccagagaaatgcactataatcacaactccataaatgaaagcatattccttgcccccacttattactgatgtagctgcagctgcacacacctcacaggtgcctggcttaatacccagagcagctgctgcctctagccaccagctagctcttttctaggtcgtcctctgtattattcatttggtcgaatgagactccactccaggcaccagccctgatttttctctcttcctaaccagtcccatctcagcaccctcagcaccgagagatgagaaagtgaggaagagggggagggttcatttacacgatatgcctactttcaagaaggcacagattgatcagcagggttaagggaaaagagaaaacttgcaggtaggttctccagaagggtctaaaagaaacaccatcaagaagtcatgtgtggaagtggatgctcacagtcacctaatggatggatcacaggtctcccaatggaggagctagagaaagtacccaaggagctaaagggatctgcaaccctataggtggaacaacattatgaactaaccagtaccccggag

SEQ ID NO: 736 - DNA, 1000 bp, mus musculus
tactagaagggatgggtggggctggacaggaaggaggcacaattgagaatgcttgagtctcacttggaaggggaaatggaatgatcatggaaggcagatggagggagggaccttggagggatagggaaccaggagggtactcacagatttcagggtcagatgtcgggaggggtgggggatggccagatgaccaagagaatgaatggaaatctgcaactgatggggtggggaggtatggtatctccaggaatagatggagacctgggaataggaggcacccaagaatgagttgggtgtcattagttgtcactcacagcattggggatacggagcccaggaggctgcctcctgtggccaggcagggacctagtggattgatagggacaccaccttacctacaaaactttccacccaaagcttatactgtttacgacaaatgcagggattggggatggagtagagattgaaagaatgaccaaccaataactggaccaacctgagacccatctcatgggccagcaccagtccctaacactattaattatccttgcagacagaaatctagcatagctgtgctctgagaggctccacctaccaattgactcagacagatgtagacacccacagccaaacagtggacagagcttagggactcttatggaagaataggaggaaagatcacagccactaaggagaactccatagcaagaccaacagaatcaactaacctggacttttgggtctctcagagagtgaaccaccaaccaaacatacacggactggacctaggcctccccacacatatgtagcagatgtgcaggttggtcttcatgtgggtcccgaacaaatggagaagcggctatcccaaaaaactgttgtctgttcgtgagatatgttttcctagctgagtttccttgtctgacttcagtgggagaggatgagcctagcctcaaggaaacttgatgttccagggtgggagagggggagacacctgctcaga

SEQ ID NO: 737 - DNA, 1400 bp, mus musculus
tgcttcatgtgtgcagaaggtgtgatctctcagcttccaacacctgcctccatacatgttgtttagagccaaatgttctttccacagaagtgtctaatatctctggatcactaagtccaaattaactctctctttcttaagtcactttgggtgacagtatcataacaacagaaatataaccaaaacagaagtcagtaccaagagtaggaacagaacctgactgtatagtttttctgaagtaagtggaagaccttgacactttggactagaaaagtgttttgatgctttgagcaaaattatcagaccattctgataggaacctaaaacatagtagtgctgagagcaaagtgcactgaagactaccagctcaagaggtttaagatttgaacaatattaacaattaagctagaggccattcctgtgctgttttattaaataatttggctaccatctacccctgtccaaagaacttggctgaagataaagaggaaatggggcctacacattacagcctgtgtgcctcccaggagatcctcagtaaccaaagacacaggtgaaaatcttgcccaaatatgcacaccagctgggataaccagggacccagctgatatgggacagaccccctccccatcccctgagctccacttttcttctgatctgctttctacttgagtcagatcagctgactgatacctgcccacacactgaagcctgcatgccacccaggaggtcctcagtaatcaaacacagatccaaggtgatatagaacccacccaccctgcctaggtctgccttcctctggacctcttttccacccaggccatatcagcacccatacccttcccagacctacagcctatctgcctctcaggaggtcttcagtaaccagggacatagaagaccagttctaaccaaagtcaaaagaggcccaacctaaccagagacagtattgcctgcttccaaggagacaagctctacctgcctccaaagaggatggctccagtcagaggaacacaaaccatttaacatcagaaccagagtgccagaggcaagcacaagatcataagtgacaaaacctgatgcaatttggaaccatcagaactgagttctatcaccacaatatgccctggataccccaacacacctgaaaagtaagataataacataaaatccaatctcatgaagatgatagttgccttgaaggaagattaaaaagaactcccttaaagaaataaaggaaaacacaataaagcaggtagaagtccttaaagaagaaacaaataaaacatttaaagaaatacaggaaaatacaataaagcaggtaaaaaaaatttgaacaaaatgttccaagaactaaaattggaaatagaaacaataaagaaaatatacatggaagcaag

SEQ ID NO: 738 - DNA, 1400 bp, mus musculus
atacgggttatacttttgaaatatatagaaaagtctgagctggaagcctagaaaacttagtacatttacactgttgtcgttccgcttaaagtgggttgtattcattgtatttagtctttttctcaactggcaataacatagagttcaattaaaacatgtcttttgtcagaataacctaatcctatctatcctctttcctatgctcacattgtctttagcacctaataatcactaagcctttctccatttccatttacttgtgattttatatacattatctaagttgaatcattacatattgtatgcagtacttttgaattatcttttttcccagaacaattcccttaataaatcaatgtaattctgtaagtataaacagttctcttttatcattgattgaaatgtaatcaacatggatgctccatatagcaatcaaaatggcagtcattaagaaaacaaatatcagctcttctgaagacaccacagtctgaaggtctcccatgaggtttgctgcatgcagggaaactgaccccacaatctgaaggcttcctaggagttctgctgtacacagagcaatagaacccaaagactgaaggcctcccaggagaccagctacatgcagggtaatagcttgactactactctgaagacccaagagtcagaatgcctcccaggatatctgctgtagctagggcaacagatcagcagctcgtctgcttacctgaacaccccatagtctaaaggcctcccatgagagcatctgcagccaggccaagtcaccagtgaaaatgatcctctgaagacaccacaatctaaaggcttgacaggaggtctgctacagccagggccacaggcctcccaggagaactgcagcaacccagggaaacaagaggcagtctccagacagagacattcagaccagctaacacaagaaataaccagatggcaaaaggcaagtacagaaccataagcaacaaaagccaatgtactttggcatcatcagaacccagacctccctacactgcatgccgtggatataccaacacaactgaaaagcaggaaactaaccaaaaatcctatctcatgaagatagtagagttctttaaggaggatataaataactcactgaaagaaatacagggaaacacaggaaaacaggtagaagctcttaaagaagaaacaaatatatcccttacagaaatatagaaaaacacaatccaacaggtaaagaattgaacaaagcagtccaagacctacaagtggaactagaaacaatagagaaaacacaaatggagaaaactgttgaaatggacaacttaggaaagaggtcagaatacatgagatcaaagagaaaatctcaggtatagaagataccaaagcaggagtgggtaggctggtga

SEQ ID NO: 739 - DNA, 1600 bp, mus musculus
acgtcaccatttgtgtggctcccttaacacaaggccttcacaaagatcattctgtagttggtgcccaggatactagaccttccttgttgggcagagtgctgagcttaaaggagcaataaatttgattatgctcaatagctactgaattccttagtcacagctcaagatccaacctctggcattgtgccttccctggggtcagtaagggatgagccctgaatatttttcccaacaggaaggtagaatttgggagtcgctggctattattccttactgtgagatgccatttctgtagcttatttgggtgctagcctgccctggttttaacaatgttcctgccttgacggacagtgtgtggctctctgggtctcagatctgacttataatgaaagcggactgtgtcctctgggcaatgcactttcaggagttgctatttgcatggcctgctggccaccgagattgcaaaatgatcattagttgatcccggaggctacttgtcttgtcctggggacagtgcatggcctccaccccatgggcatagattctgcagagcagagcagagcagtatgtgagccgaccactaggaacctgactagccctgagttctagtgtgcattcaacctttaggatactaagcaagctgtgtgcttggaatttattcagcccctgggtgttgggtctgtcttctggtctgatttgtacactcctgtttattaggtttgctctggtgcagcattgaggaaaactcctgggtccttgatttggccccgaggccagcatgctgttgggactctcagtcctgggtctggcttcaagtcagcaaatgatcagcccctggtcactgggcttgcctgctgagctgtacctttaggtgctggagacctgatagtgttttgaggtgtgggtgtggtgcagtttaaaactccactcaatatttggccacaggataaactgtaattgagtccctggttattggacatacactgggctgaaacatgtgttctgggcctagtctgagatcaacaatgtgtcacgttcctgggtactagtcctgtactgtgagcaatgtataagatgtcttcttgagtactgcccttacattgtgtagcataagatcattcccctgggtactgagtcagaactgggaagaagtacaaagaaacctcatgggtactttctgcccttaaaacaacagcctatgggcaggcccctgagaacacgacatgccttaggctcaatattttgggtcctggccgggcaggaggtcagcactcaagcaacccgctgaatcttggtctttccctggtcctgccatattgcttgctgcctgggatgcgggccttcccagaaccagttagtcaccttatgtatgtgtgcactgcttagtttctgtcaacctaacactagctggggttacttggtaacagaggaaacactttttcaaaattgtctccgacagactgacccatggacaagtctgagctgcattttcttcattaataacgtgatgtgggaaggccccgccaaaagtggtcagtgtagcctttacgtagatgatcttgaattgaacaaattatctgactgctagcaaggactacat

SEQ ID NO: 740 - DNA, 1600 bp, mus musculus
tgggcaggggagtgggggtgggtggatatgggggacttttggtatagcattggaaatgtaaatgagctaaataccttttaaaaattgggaaaaaaaaaagatcatctacgtaaaggctacactgaccacttttggcggggccttcccacatcacgttattaatgaagaaaatgcagctcagacttgtccatgggtcagtctgtcggagacaatttttaaaaagtgtttcctctgttaccaagtaaccccagctagtgttaggttgacagaaactaagcagtgcacacatacataaggtgactaactggttctgggaaggcccgcatcccaggcagcaagcaatatggcaggaccagggaaagaccaagattcagcgggttgcttgagtgctgacctcctgcccggccaggacccagagtattgagcctaaggcatgtcgtgttctcaggggcctgccataggctgttgttttaagggcagaaagtacccatgaggtttctttgtacttcttcccagttctgactcagtacccaggggaatgatcttatgctacacaatgtaagggcagtactcaagatgacatcttatacattgctcacagtacaggactagtacccaggaacgtgacacattgttgatctcagactaggcccagaacacatgtttcagcccagtgtatgtccaataaccagggactcaattacagtttatcctgtggccaaatattgagtggagttttaaactgcaccacacccacacctcaaaacactatcaggtctccagcacctaaaggtacagctcagcaggcaagcccagtgaccaggggctgatcatttgctgacttgaagccagacccaggactgagagtcccaacagcatgctggcctcggggccaaatcaaggacccaggagttttcctcaatgctgcaccagagcaaacctaataaacaggagtgtacaaatcaaactgtaagacagacccaacacccaggggctgaataaattccaagcacacggcttgcttagtatcctaaaggttgaatgcacactagaactcagggctagtcaggttcctagtggtcggctcacatactgctctgctctgctctgcagaatctatgcccatggggtggaggccatgcactgtccccaggacaagacaagtagcctccgggatcaactaatgatcattttgcaatctcggtggccaggaggccatgcaaatagcaactcctgaaagtgcattgcccagaggacacagtccgctttcattataagtcagatctgagacccagagagccacacactgtccgtcaaggcaggagcattgttaaaaccagggcaggctagcacccagataagctacagaaatggcatctcacagtaaggaataatagccagcgactcccaaattctaccttcctgttgggaaaaatattcagggttcatcccttactgaccccagggaaggcacaatgccagaggttagatcatgagctgtgaccaagcaattcagtagctattgagcataatcaaatttattgctcctttaagctcagcactctgcccaacagggaaggtctagtatcctgggcaccaa

SEQ ID NO: 741 - DNA, 1200 bp, mus musculus
agacagaaagagagaaaaagaaagaaagagagagaaagaaagaaagaaagaaagaaagaaagaaagaaagaggaaggaaggaaggaaggaaggaaggaaggaaggaaagaaagaaagagagagagagagagagagagagagagagagagagagaaagaaagaaagaaagaaagaaagaaagaaagaaagaaagaaagaaagaaagaaaagaaagacaagctctggagtcaaccagtgtgcagagaactgatacagaacagtaccaaattcctcacaacaccaagaggatcttccagatggcacctgctggctgtgcctcctcaggaagagacacaagcttgtttagattttcttttaaacagtgatttggttgcaggaagccagggctcctgtcatcttggaagcctctccatctctagttcacatggcagtgcaaagcatcccttgtgccctaaagaaatctctgccatctcaacaggatatgaatggctgggcagaaatacaagctgtgggttacccagatttcaggctacaaaaacacagtgttttttgaacagaagtcagggccctggtgaacatctccatacccaattataaaaagattttgaaaacactgagataggacaactgcagaaggagttagaactcatatgaattgttccaaaccgagtcctttaacaaggtggctaccctacctccacatgtctattgaggaagaatatatttgggctttcaaatccaggaggtgcaacctgtcacaaaagtaccaagcattctaagcaggagggtcaggagttcttagccagcctaggctacatagcaagaccttgtctcataaaaaataaaggagagaattgtgcttaaattgagtagacttgaaggacattttgctaagaaaataatctacaaaacagaccaatgttgcctaattgaagcctaaaacacaaatctccactactgataaacaatagcatgatggagaaatgtttgcaggatgcattctaggcagtatgtaggaggaagagggcaaatatgtaatgcacaggatgaacaccacagtgcatcatgaagattagtgtgctctcaccgctggaagaatggtgcatttggaagacagacatgttaccttgttccagcatccagacgtttatacagatataaaataggacaccgtaacacacagttcaaacacagaaagtt

SEQ ID NO: 742 - DNA, 1200 bp, mus musculus
acagaagacagggaggcagtcacgcccctgccagcctcctctggtcacactgaggtcctggcagccacttctctaagcccagtccctcctagatcaggggagtcttcggagtccaggggtttcattagagatcagtcccccgtgattcttaagtatatccatctccctgaagagagtccagtgcacaaggacccgcaaggtgagcgcaaagcacctccagtggccagcaagaagcccagagttgtccctgaaggaaccgaggggcctgccctcctggggttggtgctcccttcaggaaagctggagacttcactccaggatagggaccaaggaggttcccaggaagacgttagcaagacctcagtggctaacaaaattcggatatttgagacccatggagccgagccttgcagagccagtcagggtgaagtgaggacccttccacatgagccgccttcggaagcgtccccaggacaggtggaggagcgcagtaagcctcgggacttgggctttgtccaactccagcctcctggggacttggccagccccaaagttacctgttcttctgtcatgcctctggctacccagcactatggggaggccaccccaactacctcccaccaggaaagatgcacagacccagagctcgtgtcccctgactcaggctgtgaaaccacgctggaggaagctactggggtaactggccacgtgagccctgcacccactaagttcccctttgtggaggctgagcgcatgctccgtggcaccttagaagcatgcctcagcggccctcgccattcctgcaatgacactgcttggtcatccttagaaggtctcctcctacatgggcctgagatagccgctgagagatggggtcatctgctcagcccttgttagcgcgttagagtccccaggctttgctgcgaccttatgtatgttcagaggatcgcacagtggccgcagagaaggagccaccaccagcagcagcagcagcagattacatacctgctttgccttgcccctcccacctgctggactcctcctgtcatgcttggcttatacagtggtcatactccacccttccccacccctgaatcccaccttgtagaagctgacagttcagaggtctcctccactctgcttccctctccaccttccttctacctccttaagactaactgtcttctctaatccagagca

SEQ ID NO: 743 - DNA, 1200 bp, mus musculus; identical to SEQ ID NO: 742

SEQ ID NO: 744 - DNA, 1000 bp, mus musculus
tccctgaaaaaaaaggaccatacttggccgggtgaaagccagccttccaccagacacagcaggggcctctgggacaagagggggtcggagagctgggaaacgctgaaggctccgcccttcttgccagtcttgacacctcaatctgcttccatgccccagcctgggccgacccagagaaaggctgcgtcgaggggggctattccaggggcaccccagcttctcagcctgcaagcagaggcctaataaggccgggctggctgcctcagccccgcccccaccccacccccgcgcattcttctgccttgtaaggccgggcggcctgcggaccctccagccccggctccgcccccagagctccgagcatcgagcatcggtcggagctgctgccagccaactctcgaagcaccgcaacagcgccgaggacttttcttctctgcagcaggtgggagcccactcagcacccgggcagctacagtaggtggtcaggctgaacctcacccggccttctgagggctgtggcatgcttagtggtgtgggctggggctactgccttgcttgggtcctaaaggggaccctggcctgggactgagcaactggtggttctgcgccccggaaaactggtctttgggcaaggaaacaaggatccagagtgtccttttgctaaagagcctaacacaccaagcctggaaactccaggctacctgcctgtagagatgccagtgagggggttgagggcatccctgacccaagaaactgtgtgtggcagaggaaattgagccctacggaagcacagcgctcacacccagttttgcaaaccctaccccaggagggatggtaaccacctcatgccttccttatctccagtgctgtgtgcactagagaacggtgggatgagggggtcttggcttcttcacaaccctccagccgccctggttgcttgatgagccggttggaaagcagggtatctggcacagccagctatggagactagtaatgagga

SEQ ID NO: 745 - DNA, 1400 bp, mus musculus
atgcgctgggccttctaggtagggtcctgcagttttgagaggtgatgggtctactgggctgtttgtggggcgtgcctgtacagcctattgtcttcctgtggccaatgttcctcactaccacgtggtggcgctgttgaacacctgacccaaaaagctgatggttcgtgtcattgtgcctcagcaagaaacagaccaggatatgcagctctagtgtaattagcacacctcatgatctccaggccctggtgtggaagacatcagttccaggctctccaggactggtgttggatctcactgagggctttgagctgtgtcctttctcaagacgtctggtgagactgcccaagactgttagatgggttttgcaggtatcaagtgggccccgaggcctctctgggctgggatttcattcaggcctaagtgcactctgtctccctcattctgtgactcctataggtatttcagattgtgtcacagccaatcacaagcccacctatagcaaagctggggttcctacacatcttccctcagcccatgagcctccacttctttccagatgtcagagctgtctggggagtttcagcatgtataaagtagattttctgcattcagttgcctaggtcacacactaattaaaaggcaccaaggctgaggaaacaaaacttcttcttctcatttgtcagccagtaaggtgcacctatttctatttgtggcggctagtggaggacccggcttaggaccagagggcatccagagggaataaaagggagagagtaatggaaatgagagatgaggctggtctgctctcaaaagctatgggaagcccttggagggttttgagcacaagaaggacacttccagggctgcagagatggctcagccactgagaatgctcgctgctcttgcagaggaccagaattcggttcccatgaggtagctcacatcctccagcaactgtgactgcaggcgattggatgccctcctcggacctctgtgggtacccgcatgcatgtgcaaatgccccaatacagacttacacatcgttgtttttttttttttttttttttttaagacacgatccaactcatttttgtaagtctatcctgggatgctctctaggaacatctgctgcacatagagaaagggccctccacccccgcaccctctctcccatcatttttgtgattcattaactttctggccactttccaacacacatggcaaccccgctctgccctctgaaaaaacaaacagtcacttctgggccctaaatggacaggcagagccacagttcctcccccaaaacatcccctctctactgttcagaaaagacagcaacatggggtctggtttggggcgtgtgtggctgtctgagccatttctcctccaggtggggcctc

SEQ ID NO: 746 - DNA, 1200 bp, mus musculus
atcaattccattgatcaacttatctgtttttgtgctactcccatgcagtttttattactattgctctacagtacaacatggaatcagagatggtgatacctctggaagttctattattgtacaggattgttttagatatcctgtttttaaatacgaatttgagtagtatttcaagttctgttggaccgtgaaaggcagcctgtgttttggttgagcgaagcttactctggagacccagcagaaaactctacaaggggtggaacagtgagccacgttcccagacataggcgcctaacaccacggagcccccaactccataatcctgtgactatcagtcacataggcaatctcccaagctcctggcactctggctagactccaccctcacagttaacctgacaatagccaggtatgctttttccccacagttacctggcaacaacaaggtagcccagcttgttctcctactctcattcctccctccttctccccttccctccctctctcctcatggccatggccggcctctctttttctaccttctctctttctctctgcctttctacaataaagctctaaaaccatggacagtctctgctcatcaagacccaccatgcttgaatgatggaataggcctttccctaaagagccgagtctaatctcctgagagaaggcttcccagcatttctagccaccagaccggaccaaggactcttgctggcacggagtccacccagcacccttctccctttggccccaggggcagacaaagctgaccccggattgctccctctctacccctgtggactggggttctgtggcttcccacagccagatagatgcctacccaggccacatggagagtgcatggctgtcccccacatccacctgcccagagccctggagctctggcaggatgtggttccccccaacccccactttatttccctgtgccttctttctgacaaagttctataacgacttgtgttgtaattttgataggaattgcattaaatctgtaggttgcctttggaaagatggccatttttactatgttaatccttctgatcaataagcacgggggatctttcaatcttttaattatttatcttcaatttttcttcaaagattcaaagttcttgtcatataggtattccgcttgcttggtgaaaaagttagaagggttactgattttgtttt

SEQ ID NO: 747 - DNA, 1000 bp, mus musculus
atatcttcaagaccatatgtagtccggaaataacattgtaagaaaaaatgggagccgggcggtggtagcgcacgcctttaatctgagcacttgggaggcagaaggcaggcggatttctgagtttgaagccagcctggtctacaaagtgagttccaggacagccagggttatacagagaaaccctgtctcaaaaaaaaaaaaatgtaaaccgaatcttacctgtaaccattgtacaaggcaaaatgatgatttgagtctaagcatttggaattcagagtttcacatgctattcctatgtattcctgagcgaccagtactctgtattttgatctacttgtatctttaaatttaagtagtactgaacctatgcatatattaaagtgtttgttaaatcaatatgtagaaaattgacaccagaattgaaactttcgaccaccaggaatattatagaaggtttttgcttgacaaacaatatttgcaattaaaagtcaaaaagttaaaccacaaagtggtgtgtctgtgtaagcgatgagatttattttgtgtatttaagatgagggttcacactgatagaatttatttcttggcccattagtttttccgcacatcagagcaaaggactacaatgcacccaagataagataaaagggaggcagcaaaggtgcatggttaagaagatataatcgagagctgagctggatggatacgatcttggtaccaccatccactcagaaacccactcggtgccccattgtgtggacagttttgtagtgaaagagatgaaatattttccactaattatttggcatattttatttgtcatgacatattttgtttgtcatgttctcctatgagccagaacatgaacactgtgaaaaagcctgcttggatatagggagacagactcgggcccagtgactgtccagttttaagtagcaacagcttcagggttatgggtgcaaagctaatgccgcagaagtgcacagaagtgagctctcca

SEQ ID NO: 748 - DNA, 1400 bp, mus musculus
aagacagaaattcagaacttgactcacatattatgtaagaatatgttggcaagaataaatcatacatgatctaggattaggcactaaacagttaactaacagtatgcctgtgtatataagactataaacagaagagagacagaaagaggaagagtaggaaatggagagtgagatgggggagggtcaaatggaaggaaggagttgcttcagagtggcaaaggggtgactgattttttaattttatcttttcttattaatttttaaggttcatttagtgcaacaaatatttattgagccactactgcacagcaagctgatggtagaagagtgtataaagaggtcccttttttcaaagaccttatggtttaattactagaaagttgtttattggcaataaaatgcaagggagaataaaatctaaaatgatccaagtttttaatggggattaactcatcaacaagcttgacctttactgaggctaagtctcagtattgcaatcccttcccacggtggaagtactggagctaggcatggcaattctcctgccctccaggcagagggaactaggaagggcttgctgtaagctctttgcctccagaagccaagataaggaaggtaaagaaatcatggcgtgctgaggttgctgccacaggactgtggctcctaagaccctggcctgcatctgggtcacctccctcctaggcagctgaagggttagccttggaggtaaagatgtaaagatggctggccttcagttagtaaaggacccaataacgtcttgctggaagtgcaaattggatggtgttccattccaacccattatgtcatggcagtggcttcccgttactcttggcagaaggcagaagccctcaggagttcctgcaaagtcttgcactgatgctgtctacttgtctcaggactcttcctgtctcctgggagacaaacatataccccatgaatcctcttcccttgtcttccaacatgcattttcccttaactggaataaccttccatccctgccttcatttctttataaaagcattcaattttcaaaacaaagcacaaacatcactgccttggatgtgtgttccaggatatataactgttcattaattacttccacttcatctacactatttagtcttatccatactagtttaacatagctataatgtaattcatttgattaacatctgcctctcccatgacagcatagacagtgtcttttacattcccttctcttctttccttcttttcattgattacttttgatcctagagttgtgtgaggcaccaagtagatcattaatacgattggtgggtgagctcagtagaccaggtttcctagagttccactggggaaggaaaactgattagaaccccagggtgagtacatagggt

SEQ ID NO: 749 - DNA, 1200 bp, mus musculus
gggaggggaggggaggggaggggaggggaggggaggggaggtaaggtaagggaagggaagggaagggaaagaaaagaaaagaaaagaaaagaaaagaaaagaaaagaaaagaaaagaaaagaaaagaaaagaaaagaaaagaaaagaaaagggctgcagcccccaatagaagccttcccttgtttagacatctgcaagagcaatgtatagagcagaggagagggccttttatttatgcattttcttgtgtatttatttattctgtcaaaagcattttcaaacttgtcactttaaccctaaggaatttttcatccattttggaatttcaatcaccatgtcactgagtggcgaagatgatatagggggagcccggctgctttgagcagcataaatcccatggccttggcctccaggtaagctagttccctggtgacctcctgccaaaaacattcaaccaaaggatgctggactctggccctgagatggcattcttgtgaacgatgcttatctgaatgatggcttgcttcctgtccttgagtcacgattaaaatctaataaaacaggctcttttcagggtctctaacttccagtgtggcaaataaaacctaaaaatccacctggccctgacactaggctgtgaagcaaataaatgcttgagagcagcagctgtgcccagcacttgcctgtttgttctcaggcatgctcctttgcctggctccatatgcataaggcagcatatggcaaattatagtctccccagtcccccagaactggcttctaattgggaaaggaaagaaaggaaaacaccagagactatcaccagctttcttcctttccagccactgactgccatactttcatggctcctacctgtgcacagtgacctatgtgccttggttcccgggccctgttagctctgcctcattcctttagagggtgtcacatctaagtgagtgatatcacatccctggcattctggcaccaagattcatgtagttaccaccatttttgtcttgttgatcttgttattttcatgtactttaaagttgttatgatcccttcaatgcaaagatttttcctgatctgttcttcttcgtcatagtgtagctgggtatttttctcactcatttctccagccatgaagtcaatggagcttggatctgagttgtgtaaggcaatacttagcttcccaaaatgtcc

SEQ ID NO: 750 - DNA, 1000 bp, mus musculus
tttgaacacctttcccctctggctggagaggtcagcacttggatccagtgagcccacagccttgtagttaatctgtgtgacaaaatgatatacaagcacataaatgtcctactcactaaccaagagaactcactagagaggggcagcaggggcaggatggagaagagaggtaagctaagccactatgtgacagagctgctttgtaccatccatagtacacacaaccacagccctgagttttctaccaacaagcccatggaacaaccatgtctaacccaatcagaacatgataccttaagctagagtttacagagagggcagctgtagaggagttacaccaagggagaggagacagtagcacaaaggtaaaattatgggtgggtagggaggatgctggagctggaggtgggaagctttaatcaggatgagggagggaagaggggaagatgggagaataggtaggggttaacaaaaagaaagaggacatgaaatgccacctaaggatagaaacttgctatctttgttatctcatgatccagtttacaaaacaaaaagaaatttgatggcagatgccttccatgacttgataatgtcagtcctaggagcagtgggccactaaacaaaatgtccagtgccgggtgtgggataccgctgtggctgttggttagggagactgttcctgaaggcaccacagatcttgaatgcaaagtataaaggaatcaaactggaattgagctagaagcttcctctctgctggagacttctcactattatgtccaacagtgctacagactgctgcaggaaggaaagatattaatggtttactcagctgtgatctctatgaactacactatcaacctgtcagagaagacgggctcactggtacaataatggcaggaatactatatgagcaaccgactgctcttggacttgaggcccactccatgagagaacgcatccctggtattgtatgcctagtgaaacatttgtaactgagcat

SEQ ID NO: 751 - DNA, 1600 bp, mus musculus
tgtgagaaattttctgcaatagttcaaaaacaaaaccaaatagcctaacttaaccacggtggtcgtggcttcctgcctttgtcgaagctatacatgcaaatacctgctatcttttatttttccactttaataaaatgattcccccagcgcccccaccattctaaaatttgctttctccttgaaaattgtatcagctgtgtggcccctttttggcccatgtaggtgtctataggcagaggtttgggttatatacattttcattttgtatgtatactgtgatggagcgttccattccttgacttcattagtcaaatgtgtcatgaaaactgcctctatttcaggcctgttgtagatgtagagaattcagtactaagccagaagagtctgcctttatgagcggatgctctagtttgagcccttgactagtgacacagttagagagcaagagcgacaaggaaacaaagccagaggacaggatggctctcgtagagggtcagggcaagcattagggttttctcaggtctgcagaggctcaacaccggagaagaagagtccagtaaggggactaagccaaaagggaccacaggacatctcagagcagagtggataaagggagagtgacaggtgagttgtcaaagcctcggctggctgagcaatgaggacatcagtgtcatcactggcacctgagtggacagtcatccactgttcactgatcccttgggatgcttgaggtgggtacaggattgggacaggaaaggagtgagctgaggaaggcagatgactctagaggagtttaatgaagagagagagagaaagacaggcagtcaacctagatgcaaagtgaggacagagacagcgtggcttgatgtgttcctaagtgccaggcagggacacttaggctttctttggtttctgcccagtgaagaccccatggggttcttgttactgaaatgtccttggaagggcatgtgttttgtcaacaagccaccttacagacttgtgtattggttcaacatttctatttggtgagaaaatgaaagactttgatactgtttactgcagtattcttgggtcaacacctccaggtcccttgaagtgtagagtctctaagaatgcctggcccacccactctcagtctattctgttccctcccctaaactgactagccacacagaacactctagaagacagttgctgtgttgatcccatccagtccctccttcctcagatcacctacccacccctctgatcccctgtgaggatcaggaccctgtgagaacttaaaggtcacgccaacagtaagacctttgtgagcttctgagatgtgagccctcacacagcagaaggactgtaacccagacaggtctgctttagggacagtgagcccatggggaagacctaggtagtcaagggctcagtagtccaataccaaggccagctggatggagagccagctccagcttttctgaagcatctacaggatattagcaggtgtgttgttctccatggtcatagctcaggtccctggacctctcctttagatcacattgtttgtctttatggtacctggataggcacatggttctaacagacagtatat

SEQ ID NO: 752 - DNA, 1000 bp, mus musculus
acacaccattttatcaccaccaccaccatcattatgggttatggaaacccttactgaggaaatggctttgtggtgaactatgaaagaagtttaagctgccgttaggcaaccgtggagagaacaagcattcttgaaggattagtatgtgcaaaagccttgtggcggggggacttgtgggggagacttgtgatgcatttggggagctgaacaaagctggtggggcctgggcaggctgatcctggggggatttgattcgagtaaggtcagagagacaggctggagcttctgcagttaggatctatgctctgtttccatcccaggcgcaggaactggcaatgaagggtttgagtaggcagaactaacatctgcttagcggtttgaaagtctcctctagtggctttagaagctgatgatggtgagctacaggtgggggtaggagccctagagaaaacggtgaagaagctaagaggcagaccccacaggagtcagggattgtaaggcggccagcggggagtattttggttgcttttccagttactgtgataaaataatccgatcaaagcaatttaagaaggaaagtctattctggctcatggctccaggttacactcacggcagcgagttgcagtggcaggaacttgagggagctggccacatcacatccacagccaggaggtcaagcagcagagagtaactcatgcctgctgctgcttagcttccgtcctccattcacacagcccaggatctctgctagtgaatggtgccgcccacggtgggcaggtcttctcacctcactcaacgagatcaagataatcccccacaggcatgcccagaggcccatttcctaggtgagactatagtctgtcaagttgacaatgctaaccattgcagtgagggagagaaagaaggccaggatggtgcctctctgttactctgcttacccacggggtgcaaggacggtgagggatgggcctgagcttcagtttcctcatgaacacac

SEQ ID NO: 753 - DNA, 1000 bp, mus musculus
gagtttcccagctgctgggaaccttgaggagctagaggacaagcctggccctgctcttgattctgccttgtgtcttggcaactggagttggctgcctccggcccccagccatcgtgattggttcatatcttctggctggggaaagcaagcctattaatgcatgggtgtaggcaatgtaccttattctgtgacaggtccaagtggccataaatgagtaggatgtgggcctgtggcccgtggagaactctgctagtgaggaagatagtgcagtccaagtggcaaggatgctgatcgtggggtgccacaccccactcattctctggcctgcctcatgtgagcgatatcctgccgtcgcagagctgcctttgtgttgctatatcatgtgccagcctgcaggaatggtgagcgagactccaaggcctgggcgtgtcccagtgacaatgcttggttgtccagattcagcttgtcatcccaagggctcagagcttactctgagcctctttgagtccaagtccaagtccaaggccacactggacttgggagcaggctgcactctgaagtcaaaaccaacctctcacttccttagacagctgtttgtggcttccagttctgacgaggggctagggttgtctctcgtggcaccagttggttttaatttctggctcttttcactgtctgcggtcatctgccacacttgtgatgacttagatggtggctgacctccacacaagaccgtgacctccgtggcatgctgattgtgaaccataccctccacagagttgtgggtgtgacccagaaagcactccgggaacactggtgtcatgtgtcaacgtggcctccttatttatcctttgaacctcaccttccctaacaggagagcagggtagttaaggacttctcatgaattcttctaggtctttttgctgtcaccagagggtctgcctaacttaaaagagacattaggagctgggtgtagtgatattcacctgagctcccagca

SEQ ID NO: 754 - DNA, 1000 bp, mus musculus
ctcgctacgtccggaagtggctgcttcttcagcatgctggcggagctcggcttcatccggaccatcggcgagaatgacgaggtgccggttgagcccgagtcggactccggagacgaggaggaggaggtaggagccggcgggagaaggggccgtgggcgggagcggccgggaaccagctgcgggccccaggccctcctcagcgtgctcaggtgtccccatgcaggccgtgtcaccaagctgtgcggagtcgaacttcgcaggcgaagtcagtcttgcttcctgcccagtcggggacacatgctcccacctatccatcaagcctcccaagggggttctagtgatgctaggcggtggggatgtagccctgagaaagtggctccagggtgagtggcgagagaaaaagacccaaacccaaactctcagtgcctcacaccggcgtcagccagcctcacacgacactaaggatggcccaggccctctgcagtccgattccgagaaagctgatgtctaaggctccagtctttaaggatgttgctgggaggtcgtttggagctctgctggtcagtttaggcgtctgtccaaggcttctatccctctgtccatccacactccggtctttgcaagtcccacccgcacacctgcaaacctgtgcccctcacatacttcagtttccagcttggtggtctccttaccaagtagctgagtggtctcagtggtctgagtggttccagccatgcagctaagtttttgtggctttcagagtcaggccaggctctgttgtcttttctgccatttgaccctcagcagccttccttgtcctggcaacaccgacataccattccatttcatgtcttagaaacttgtgttctttttctgctcagagcctttcacatctctacccagcccactcccccaggctttctctctatagccctggctgtcctggacctacctcggtagacttcgaactcagatctgcctgcctctgcctcctgagtgc

SEQ ID NO: 755 - DNA, 1400 bp, mus musculus
tttatccctgaagatgttccatatcccaggacagtcactggaaaagcacagcacacacagccatccctttgtacccgggaagggggcggtgcgctggctctcagaagataagactccacaaaggctctggtccttatccgcactctgtacctgctgagcccctccagcggcccaggagacgggaggcagcaagctctgtgcactcagttgctagactttgctagatgagcaaaccacgagtctctgtatgtctggcacagacatgttttcattcaaatagtctggatcagcagttagttaagtctgaaggtacagagctcactgatagagcagcccactgtgcttgacttgatgggttcattagagaccccaccccaccccttcctaagccagctggctctgtggagttagtagcaggagtttgccagatgtggcagagcaggcatttgccagatgtggcagagcacaccttcaatcccagcgctagggagacagaggcaagaggctctctatgagctggaggccagcctggtctacacagtagacgatctgaaataagagaggacacctctgtcctggggcgaaggcccggggtcttaccgatgaactcatggaggaacaccagggaggcaatgtagcaggccaggctgagtagctcggccactgtcatgagccagtgccacgtctggatggtgagcgccaccatcagtagctcagtgaggatgagggatgtgaaggagattgccacgatgtgtacaaactccgactcgaacagcagcagcgccccgtacatgatggtgctccctgcaaacaccacagacagcaattggaggcggtctatctgctgcccagctgccacccctggagcttttggcctcgctagtctgaggtgagggtgggaggggcagcacctagtgacagagcttcactgtcacctggacaagggactcacagaaaaaggaactgccatggaaattaatcactgcctttatgtttacgatctctgtgtttcagagctgggtttcacgaagccgtagctagccctgactttctaatcctcctgcctccgcctcccttgtgctgagatgtcaggtgtgagctgccacaccgtgctcacgtggtgctggggatcaaatccaggactctctttgtgctagacatgcactctgcaagggaactgcaacccagcctgtgactgcctttacaaacacggtgaggatgcaggaggcaggagagaggatggaggagagaggatcagtctttcgaccgatgcatgccttatgctctgacacagcttcaaatgccaaagaaatgtctcaccaaccgcctcatccccttcaaagttctgggctctgaacacttttgagtatgtcacccacaggggttaaaaacaggaagga

SEQ ID NO: 756 - DNA, 1400 bp, mus musculus
ttcccaggcttgggttcctcctacaccctgcaatgctgtcatctactgatgagtagatgacatccgagtctgagtcatggagacagcacagcttcctccaagctggatccacttgctctggaatgcagccactgtgaacataagggatctcatgtcgtgtgaaacagccacaaggaaagactctgaaacccctggtcctcagctgcactgcatagtcatgtgctcctgcatggcgagtcattccaaaatggaaaatgtcttagggtttctattgctgtgaacagacaccatgcccaaggcaactcttataaaggaaaacacttaactggggctggcttacaggtttagaagtttagtccattatcatcacggtgtggagcatggcaatgtgttggcagacggggtgctggagaggtagctgagaattctatatctagagcctcaggctgcaggaacagagagtgataccgggtctggtttgagcatctgaaaccccgaagtccaacccagtgacatacttcctacgacaaggccacacccactctaacacagccatacctcctaatagtgtgactcactatgggtcttttggagccattttcagtcaatccaccacagaaagactcaaaacagcaactaatatctcttccatacaagaggctgccatctggatggaactgtgcacagggaaggccccactccactccatttgaccaccatggctggtgaactggggctggagaccagctgggaaactgtcatgtcagagaagtgaggctttcagctccttccgatgaggtctgggatgacttgtgttgtggtgggcaggctctcagaactaataccttaagcttgactgatgctgccttactaacctctgacctggacccaaagacagacagacaggcagacagacagacagacaggcaggcaggcagcatcgcttgctcagaactttgttctttaaggcagacaagaagcttagttcaaagggggaagcacccttaattgtacatcttgagggaggattggaatgttctggaagggtatgccaggcaaaatccattatcacagcccctttgtagaagccacaacccgtcacagctggaaaggaagagatgagctcttttcaaagcacagtactttctgggccttgggctcttcctgggggaaagtcagtaagagggccacatgactcgtctagaattacaacacagaaggactgggcttcagggttcagctgtggcaagcaggcaactgtgctgtgttccccgacagaaaagcacctgaagagttagtaacacctcttgccattttctaaccatctatagttgtaaaaccatggaagctcccattaaggaaagatctagaagcagctagcagaagtgtgggagggaagg

SEQ ID NO: 757 - DNA, 1400 bp, mus musculus
gagaaggagaaggagaaggagaaggagaaggagaggaaggtgtgggagaggaaggagagggagagagctaaagaccagaagccaagacaagaagtatatgaggacatcaggagccactgggaaacagtaaagaagagaacagtagtcaggattctacagaggggcagcactaaacagattctctttttattcgtatttaaatttgcggtaagaattgacacacatgactttgggtgtcagcaggtctgagggtgtgtagttagcaagcaggacacccagaagagtggatcttacatttccaagaacctggttgagtctgaacaaacgctggcgaaacgtaaatagtgcctgagcaggcagggaaagctcttcccactcaggcttgctgtaaagcaaagctcaaccaagtgtccagacacgccgaggtccaggcaggttgacatacataatgagccatctgaaggaacaaggaggaatggcctgggagaagcttcaggttcaaacatctgcaagaaaaggaggcgggagggaaggaggagagggctggggactcagcaaagagctgagaaagcctcaggctgagggcggttgagtagcatgggctgactagcaatgttttcccatctggcagacgcagctttatggaaggtgttccctgctgtgaacagcactgcagatcctacagggtagcagctgtaaggtgtcactaaagatgaccctgcagacagcagtgtggctgtcacaggtctgctacagagaagagtcaggtgactccaggactgcacataggtctgtgaggtggaacagaggaagaggagggagctgtcctaggcaagtcctgttcttgctgtggatgcagggcaaagcaaggggcttcattagcgatctcgttatcatggtgacacaatgtcttaaatagtatgttttaaacacaagggggtggataggctgactgcttgaaagacagatcattagagtgtccatggagagtggccttcacattggtcagatcagtgggccgcccatcattacttcagcaggcacagggctcaagtgggtgggactgaaagcctggagactggaggcacgtatctaagggattctgaggactggctacagggaagagctccatgacagatctgatggtagtcatctagaggaaggcaaacatctgacacttcctagatttcctggactgtgtaaggagctggatggaggtagcacatttagaggaagccgactattgcccagcctgctctgatctctctctctcctctctcttctgctttctctctcattgtctttgtccccctgtctctctatttctttttccttactctctctttctctcttgccctctctcttcccctccctcttcccctccccctctcctccttcct

SEQ ID NO: 758 - DNA, 1000 bp, mus musculus
tccctggtcgcaaagctccacccctctccagggagctaacgccattggatatctgctgggggctggggaattgggttgctttaattctgggaccctggtgggttgagcacattcctcacatttgggtgggaagggatggggtgggatggagaagggtaggaacccacactgtgagaaattctcatggatacgtcaacatccttaaagataacaatcctgtcgtagatgtcttgcaaaacctggactgccctgactgagtttggtccggatgtgaaagctgataacactctatggcagtgaagaacgtgggatggatttttatagacacgagtttctgagatttagaatttggcctcagaccaagagagatttgaggaaacaggagccttagtttcccctaccactacggtgaggatgatgtgagctcccgacagtgagggtcagcaaggtttgaaagtcctgaggcagccaaggagcgcatccgagttgcctatgagcattgcaggtgcagcacaagagcaagtggaggcttgggtttaaaatcaggcagaagctagacatgaaacacagggcccgagcccatcatggagcactcatggcatgtctttgtcattgacattctctgtgtttcccgctgtgctgcattccctgtaggccattctgaaggccatccctgtcaactggacaggaatcttccttctttttgcatcaggaggaaacgacaaagagcaaattccttggaagaacatcaaactcaacgactccaccagaagccctgagctctggggaaacctccctgacactgtagagtccactcggatcattctgccaagctaccagggcttcgtcggccatctagaatgtaacccctagtctgtgactcttctccaaagggagggtcagttctgtctggccatcacctcatgggccttcctacctctggtcatgtggaagagaaggttagctgtgagttccttatctctatatgtgacctcatcac

SEQ ID NO: 759 - DNA, 1000 bp, mus musculus
cgcatgcgtgtgtgcactcaggcacaccacagcatgcagaaatcaggagtcagagaacagcctgacgtttgggtcctcagcttctagcctatttgaggtggtctattgtttgcctccggttggaacagaacagctaggcttctgagtactctcctgtccccaccctcaacctccccctaggagtgcagggattgcagaaactaatgctctaagcctctggcttttatttgggttctaggtgttcaaactccggtcctcatccttacacagccagtatctttacccactgagccatcttcccagtccagaaatggatctcttatttggctgatagatgcatgccgcctctgtccgggcataacatttctcaacagctctgcccttttccccactgagaccaggtgactttaggttgcaccaaggtgacatttaaagctagccatcacgatgagtccagttcctccataaactggccagcatgagtctttttttatgacagtcaacctagttgataaatcttgatttttgactcagaagtactgccttaaagcagacacccagtgtcgcatggagctgtccgtggccatagtgctgaaaccagcgtggccattcagtctggtgcgtcaaagcctccaccaaatgtaggcagcgctgttccttggtttgggttcctaaattgtattcgagaagggaagccagatgagagaaagataagacgcaagtgaggagccatgcattgctgtctgcttgtgactgtggatgtgacgggactagccactgtctctacacccctcaaggatggaccctggaacatggaactaaaggccaactaaaccctttctgcccccgaagtagtttcctaggggtattttaggacgacaccaagtgtcctctcaccctggccacttgaagtcccccttgtctgcatttttgccttccatagcttatatcaagatcagtcactctgggtattccagtattctcttgtttcaccctgccc

SEQ ID NO: 760 - DNA, 1400 bp, mus musculus
gggccgggctctatgttctgctcacctgactgcagtgtctggagtcactcctgaacagacaactcagtgtaaagcccaaaagattaatttttgaaccaaaccagtccggggggcttgctggctcccgtcaattcgtggcctctttgagcctcggtctctgtatccatagtatgagagctcttgtgatggtcaactagagagtgtatgtgtgtataagaatcttctccttggagctggaaatgtggctcagtgggtagagtcctcgcccagcatgcacaaaggcccaacaccacataaactggggaatgctggcagtgggatccggagttcaaggtttaacctaagttacatcatgggttcaaggccagcctgggctctgtgagaccctgttcttccatcttcccttacactaaccctgccagcaatcttagttctggggagattgagataagagagtggatccctggagcttcctggccagccattctagctgaatggactttctccaggttctgtgaaggacaggtgtatacaggagcctcaaggggcccagcagggggctgaccattgcctgtaagcagaggcagattatcaggcccacacccctgcagatacgcctccagctttctgtgtcctccactgacatctcaggttattcttgctacttattatgtctaccagttggattccaaggcttgtcagtggcttccctgagttcatcttggtgtctgtccctgcaacttcaggacactctgtgcttcggctgtgcacatctgagtcccagtgtggtcacagcacaactggatccacactggctactcagcatccttcctagcacctgtccctggtaccacgaacacagctgtggggtagccaggagctgaggcagatggtgggcaccaggaaagatgctcagagcctgatggagcactgctcagagcctggtggagcactgctccaagcctgatggaggactgtgagtagctcaaggcagagacgtctactgggtcctcttctctccctccttcctgtccctacttccaaagccttattctctctctctttgttttctcggagtccttcaatcctctgtaaacactctgcagtttttgcaccatgggccaacccagctcatctccccgactgggctgtacgtggctttgcaacttaagactggactcagtgcttctgtgtcctctcccttggaagcagatgcaatgaccatgggagaaataacatctgtgccagcagctaagccagcacaaagctcaggctttgggagactggatcatgttatacagacacagacacatgcacacagacacacagacatacagacacacacccacagacatacagacacacagacacagacacatgcacacagacacacagacaca

SEQ ID NO: 761 - DNA, 1000 bp, mus musculus
tgtttccctaatttctttctcagcctgtttatcctttgtgtacagaaatgccattaacttgtttgagttaattttatatccagctacttcattgaagctgtttatcaggcttaggagttctctggtggaatatttcgggtcacttatatatactatcatatcatctgcaaaaagtgatattttgacttcttcctttccaatttgtatctgccgaaagtagtctgcataggtgaaagtatggactacagaagctaacagcttctgggacaggcaggagccacagagcttctgaggcagcccccttttcaggccccagacatctggacaccttcccagccagaggataggtgtccgcccagcccgggagggctttgcctgagcatcagcggcagacatcttggttctaggactccaccgagagtattctgcacatgtgagagtgtggactacagaagctaaaagcttctgtcacagggcgaagcaacacagcttctgggacacgtcctgtttggggccttcatctttggccaggagggaggtccgaacgccagatatctgtgcaccttccctgtaagaggagagcttgcctgcagagagtgctctgaccactgaaactcagaggagagagctagtctcccaggtctcttaatagcgttctcacgcccggccaggaagaacacaacagaccagaatcttctgcggcaaaactttattgcttacatcttcaggagctaggagcgcaaacccccagccccaaaagcgaaaagccccttcaataacgaaaccgaaaccccttccctatttaggagagttatatttcgcctaggacgcatcactccctgattggctgcagcccatggccgagctgacgttcacgggaaaggcagagtacaagtagtcgtaaaatacccttggcacatgcgcagattatttgtttaccacttagaacacaggatgtcagcgccatcttgtgacggcaaatgtgggggcggctcccaac

SEQ ID NO: 762 - DNA, 1000 bp, mus musculus
cttccttctaatctctccccaggtattcttacctgacctaaacttttcctcgggttcaagacccttggaaaggcctgtatacttattttgtgtaccatattttctctttgctcctactctctctccccgctttacttctgatagattgtcctgaatttcatccagaatccgccctgccttaaccacttgataacatgtgaaaaggaacaaaagggcttctaacactagagaaagttcaaggccaaacatatcttataaagctattttccactttacttctgatagactgtcttgaatttcgttagaaagttcaaggccaggcttacctcgtaaagctgtactcactggtactctcgttccccagctgaaaagttctgaattcatgcagttgaatccttcttaacagtctgctttacgggaacctttattaccgcgacccgcagttctggttctggaatgagggatctcccttgcgccggtcccgagttttcttgtattttctcgtcccggattttttctcgtcccggaatttctcgtcccggatttcagcaccaattcttaatagcgttcgcgcgcccgacgaggaagaacacaacaaaccaaaatcttctgcggcaaaactttattgcttacatcttttggagccaggagggcaagcgcccagcgcccagccccaaaaacgaaagccccctcaataacgaaaccgaaaccccttccctatttaggagagttatatttcgcctaggacgcatcactccctgattggctgcagcccatggccgagctgacgttcacgggaaaggcagagtacaagtagtcgtaaaatacccttggcacatgcgcagattatttgtttaccacttagaacacaggatgtcagcgccatcttgtgacggcaaatgtgggggcggctcccaacacaggtctgctgatagaggctaacagaatcactggaggaacaatctctaatcagagacaactaaatcaactaactccagag

SEQ ID NO: 763 - DNA, 1000 bp, mus musculus
ctctctctctctcagaaattaacctgttattttatttgtatggttggtttgcctctgtttgttttgtttctgtccgtgcctgatggccacaaaggccaggaaagccagggaggctaccatgtctttcatgtgtttcctgctctgttctgaagcttgtctcataaccatcatgtggacttgcaggtgacctaaacccagcctgaagacagaccaaaatcttgttccctaaaatgtctctttaattgctaacattcttgtcacctgtccacttgtgggcacattggtaacttcaatgtaagttgattcatgggctatgtaagctatccagcttgattctaggaggaagtaggaggcatgcatagggagtgctgtggttggagttcagattgatctccaaatttgcaaaacagtgaacacagagacactgcccacaaagggaagtaacagacaattgagcagcatggatctggaatcttagttactccctggggcttttaggaggatgcacaggtactctattggagcaaaggcatgagtgctactcatctgcaaatctctagatctggaaaacaattgccccaggttggaactgtgtccttcagcacaccctaaccctaagggtagttaacatgtcactcaagactcttgagccaaccagaatctctacacagctggcagtcagaaaaggaggcagctcttcctggttccaagccagcaacttcctccctgtaattcatctgatctttgcgtttctgtggaatgtgttttgagggcctctactgagtgatgtgaggggacctagcaagctcagaactccagacatggtaagtgcaaagtcatctcccacagagaggaggagcaagcagcttagcaagaaatgcacttgtagttccacttcccagcacctggatggtaagaagcaggcagctagatgaggccacctgtgaggagctttgtggacctagtctcctcttggacccggctgtggcctctgaataac

SEQ ID NO: 764 - DNA, 1000 bp, mus musculus
ttcgacatgtttagcagtgttctcctgaatttctttaagtgagttattaatgcacttctgaaaatcctataccagcatcaagaaatatgattttagaccttaatcttgcttttcaggtgtgttggcatattcaggacttgctgtggtacgttctgatgatttccagtggtcctggtttctgttagtaagattctttcctttgcctttcgccatctggtagtctcttgtgttagatattctagctgtctctggttggagcttgtttctcctgtgattctttagcctctgtcatgactcttgggagaccaactctctcctgtgatcctgtggtcagaacatgctctgcaggcaagctttcctgttgcagagtatgtacacagaagtctggagctcatatccacctcctgattcctggggtcagagccctccctggaggctgactctcctcaggcagggaaggtgtgcagggctctgagtgttaggtcttttcatctagctgaggataaaggcctgaagggaccctgtccaagaagcttagttgcttctgctgcccacttactctcctgcataaactggtctcagtgatcccaagattctggatgtgctagggcctgcctttgtcctttgaccctgttgctgctagcacaagaccttctggattttttggaagtgatgttgcattccactcaccagtgatctcaaggacccgggtgtgctaatggaagtgcagcatggagaatcctctgaggacatttgggccctctgcctagatcatgccgaatatggcatgggggtggggggtgggggaggaaggagctgaccagaagttaaacccagctgctggtcaggctgctgtcctttgtccctgtttctgctaccacaagaccctctggattttgtggaacttacgttgcgctccactcaccagtgatcaaggacctaggtgtgctagtgtgccagccatgtggagactcctctggaaacattagggccctcatta

SEQ ID NO: 765 - DNA, 1000 bp, mus musculus
aagcaatgcctctacatacactgcatagtgacatttaagttccataccttcccactcccagggctaccgagcctctgggacccctgtaaaaccacactcaggaagagtcaaaggacaagggtctctgctatgatcactacatggaccaacagaaccacactctgacccacagtccatttagaaccagcagatcaaactcaattagctctgcagacttgctcctcctgtactgtcaatggagattactataataaccaggaaatggcttgtagtcttccaggcagcatttaacacatgcatctgaggagaatcctgtaaagatcttgtaagctaccttcccctagtgtttctgattgttaggcgtgaccatagtccctcattagcttggaaaacccagctgggcctcaggacaacagcagctccttcaccgttggatcacagagcaaatgactcaaacagctgaaaccttccaagctctgctgttccatcctacatgtggacatagccctagtctgaaaaatttacatgtaaaagaatgttctagtcctgcagaccaagtattttatatttaaaaggtccagggtcctttctttttatatttaattatgcatgcaatgtcctgtgcagccatctctatttcttaataggaaagtcttgcaactgaactgcaataaaattcatacattaacaataatttaaaagtaaaagtgactatgcattttaaaggttgaagcagttaatgggagagaaaagggaagacaatgaagaaataaaaagtaaaggataggtcccttcaggtcggcgccagcactgacgcaccttgggcggggagtctgcggacacccccaaggtccccagtggactccccacaggatcttaagacctctggtgaatggaacacaactgctgctccaatccaattgcacaggacttgagacagcattaattagggaagcagaaaaccaggctgaccagggtcacaagtcccttacagttggca

SEQ ID NO: 766 - DNA, 1200 bp, mus musculus
gtggaaatgcatgtctcttcatttgtggcttcttttggggactgccatttgcctttctctctgccccaatgggacgactctccctagagagatccatgttagggttaagcttttctgaagggacagctactgtcctggggaaatgctgactcccagagtcttgagttgccattatggcttgatgtctgatgtcctcgttttcctgatgctggctggacctgtgtcctcagacacacagagatcagctatgaccctgtcacatacgaggaaggaaagcacaaggtgcctactgcatgcctttcttctgtgggctgagtggggagtggtaggaaggacaaggggttcagcctaggtccattgcatctcagtgagtaaggctttggggctcttttgccccttgtgggtgaagatgggagtggggaagtggctcctttatcgccgtacaatggtcctctccacacaccacgtgtgccgtgtgccatttgttgaaattagggatgagactgttggagggtgtgctgctctgctcgcactggagttgagagacaaagaaaggttgagtgggaggggccggctgttctctgaagcgcctcagtcacaggccccttcactggggagaagctctgatctctccatattcctggctcctctttctgatttctcctagaacttcaaactcaagatttcttcattctccaattgcagagtggcaggtcagggtgcaggaacaggaaggaactctttaagggagcaactgagcagccttcagaacgactaaagccacaggggaaagcctcctcagatcgcctttggtctggtgtgatctttaaaggccacttccaaagtggcctccgtttagttaataaattacacgcgttacctccagggctcgctgacccggtcgtccacctggaaaggcactgaccagcaggaaggtaacagaaggcagatgagactttcaatttttctcacagccctgctgaaacgaagaggcaaattaatttcggtaataaagtttacaaactgagtatttgcataacacttcacttcaattgcactcggaaatacaaagggatgaatatttatagacatggtttgagcgcaccgctacatgggacagtggaggactgggtgaatagccctgatcctgatctgaggttactcattcctgtttgctaaacactaccaaattagtgctgg

SEQ ID NO: 767 - DNA, 1200 bp, mus musculus
tgaactcaggaactttgacagagactacaaactgatctgcctagaacatttcccagcacacttccctgcaaagccctcctcctcaagcggttggtttggaatgatgagcagctgcccccttctcagcctcatccgcccccagttcccagcctagcgctgggcctcagggaaactcactctgaagtctctgtgacaactcatgcactctaggctctcccgggagtccagtccatacctgagaaggtgcctgttgcaccccagcccagtaactgtcccatccatgcgtgttgagcaaatgcagaatgactttttcattatccacttcttcgcattggagtctagaggagaatgttctaaaccaatcagcatcacactgttaattagcaaaacctaaaacccagcccctgggcacaggaatgcccatgctcactgctctgctccggggtagaatgctcagtcttcccggtcctggaagcctcctgccaaattcaccttgaaacagatttgcttctgtttttacaggctgggtttagaagcttcaggcaacagggaacctggcctagggccgaagacagtaattcttaccagagggaacaatcccattaaagcaaggaggaagcagaggaaacctccacagagctgcacaaaacctcctctccacggggagccatcctaccgactgttttccataaatttcagctctgggcccagtaggagagaagggaggcatttgctcctccttgcaccggaatccgatatagagcaaccgctacagagcctggggcaaagtgtgtcttaaggagactactccacagcgcagatatcctcactcctgtcaaaagtgggctggatggtcaggaggctgagagatctgcaatgaaacccagaaatcttccagcaaagctcatgcccattcttcactcctgggcagctggagttcattaccttaaaaggagttttggggtctctggcctctcttcttagttctttgctcacacaggcaatgagctcacacagtcccactgtagggcaacccagaaagccttgtaaacctgtgctaacccaggggagctatttactcttcaattccttccacaggagcaaggattccttccggtggggagggtccctcatcggacagtcaatcccattgtcccctacatgtccacctgccctggaaaagccacagtgagaaacaca

SEQ ID NO: 768 - DNA, 1200 bp, mus musculus
taaaattagaattattcatataagtgaaaaaggcaacatgaaagttaaacataaaaccattttaaaaatcaatgtccgggagcaactgggagagccatcttggttcctggatccctcagagactactctgcttaggtgtgagtgtggactacagaaactacacagcttctgggacaggcagaagtgacacagcttctggggcagacgccatttcaggctccagacatttgcgcaccttacctgccataggagaggtgtcagcctcacccaggagggctttgccatagcacctggggtaccatctctggtcctggatatctcagagactagtctgtgcagatgagagtgcggactacagaagctacacagcttctgggacaggcagaagctacacaacttctaggaaaggccctgttttgggccttcatcttcggccaggaggcatgtccaaatgtcagatatctgtgcgccttccctgcaagaggagagcttgcctgcagagagtgctctgaccactgaaactcaggagagagttagtctcccaagtctgctgacagaggctaacagaatcatgagaagaacaagctctaaccagagacaactataacaactatttccagagattaccagatggtgaaaggcaaacataagaatcttactaacagaaagtaagaccactcaccatcatcagaacccagcactcccacctcagccagtcctggataccacaacacacccaaaaagctagacttggatttaaaagcatatctcatgataatagtagaggatatcaagaaggactttaataactcacttaaagaaatacaggagagggttacaagcccccttccagtgggctccaggaccgggtcatctgggcacagagttggcagaaactccgaggtccctagaggactctccacactatcttaggaccaccggtgaggggaacccaacttctgttccaatccaattccgcgggacctgaggcagcattagggaagcagaaaacccagcctgaccagggtcacaacttccttccggtcagtgccagcacctggacaccttaggcactcagtcaggggaaacccccaaggtccctagagaacagcttctgaagcaaaccccattcctggcttcagacatccagcacattccctgccagaggagaggtgtccgtcctgccctgaagggctttgc

SEQ ID NO: 769 - DNA, 1000 bp, mus musculus
acatctctgattctggatttctttcctatgatttctatctccagagtcgtctccctttgggttttctttattgtttctgtttccatttttatatcttggatgtttttgtgcaattccatcacctgtttgtttgtgttttcctgtagttctttaaggtatttttgtgtttcctctttaaggtcttctacctgtttagcagtgttcacctgtttttatttaagtgagttattaatgcccttctaaaaatcctctaccagcatcatgaaatatgattttaaatctgaatcttgtttttcgggtgtcttggggtatacaggactctctttgttggcatgctgggttctgatgatgccaagtgatcttggtttctgttaggcagatttttatgttagcttttcaccatctggtcatcttggtgttagttaaatgttctagctgtctgtggctggagcctgttcctcttatgattctgttaacctctgtcagcactcctgggagtccaactctctcctgagtcccagtggtcagagcactctgtgcaggtaagttctcctattgcaaggaaggtacccaaaagtctggagctcagatcaacctcctgggtgaagatgaaggcctaaagtgatcctgtccaagaagctctgttgcttctatggcccatgcaccctcctgtgcagacaggtctatgagagactggggatagaatatggagctctcacccgagtctctgggtgaaaaaactccctgaaggccaactctcctctggcggggaaggtacccagaggtctgggtctcagctctgcctcctggctgaagataaatgccctaaaggaccctgtccaaaaagttctgttgcttctgaggcatgtgtgctgtcctgagcagtctggtctctgagaaacctgggattcaagatggagctctcaccctaatcccagggttagagccctatctggaggctgactctcctcagtgatgtaaagattctgggtttgctagg

SEQ ID NO: 770 - DNA, 1200 bp, mus musculus
tatatatcttttaaatctgtgtatactcaaaaatatatatccttaccaaatatgaaacaacaaaaatcacttctgattgcagagtacttctgtttatatgttgttcaacatttttgaatgaagaaaatcttgtcaatttctaatctaattcaatattttataaattaatctaataaaatgtttttatattccccaaaacgagttaaccacaatatctataagaagagtagttatgtctttaggttggcaccagcaccaggacaccttgtgcctgaactaggcagacaattcccatatctccagaggactcccatctcacaggcaccttagtacacccaggatcttaggatcactggtgagtggaacacaacatatgctccaacagaactgagggtgcctggggacagctggagcacagacacaggaaccccacaagaccagtggctctggttccttctggtcaacactagcactgggccaccttggcctgaactcagccaacagtcccaaggtccctagagaactctccacccccatgcaacctagcaggcccaggatcttaggatcactggtgagtggaatacaccatctgttccaacagaaatgggagtgcctggggccacctggaacactgacacaggaaccccacgcgaccagtggctcaggttccttccagttggctctggtgtaccttggtttcaaactctgtggtcagccccacagtccccagaggaagtaccacttttaggcactctaacatgcacaggatcttaggatcccaggatcccaccatcccaggagcttggtcacaccaggatctcatggtctcagagaaagcttgacttccaagaactctgacacacccaaatctcagcatcacaggattctagaatctcaggatcacaaagagagctggattctgagaagttctgattcaactgcgaacacaggaaggacaggctccagtcagatatatcaagggcagggaacagttgagataatcagataaacaaaagcaacagaaaccaaggttacatggcatcatcagaatccaactctctcaccatagcaagtcctggataacccatcataccagaaaaggaagatatgaatctaaagtcacttctcatgatgatgatggaggacgataagaaggaaataaataactcccttaaaaaaatacaggagaacacatccaca

SEQ ID NO: 771 - DNA, 1200 bp, mus musculus
gactgctttcttgaccactgcatctcatctttatcagagcataagaatgagcacaatggggcttaaaataatatttagtctctgggtgcacaaaatgtgatggtttgtcaacaggagggatcatgagctcagtgggggacctggacctggacctggaggagtatctgtaaggctgactgagaatgagaacttctgtgattgtggaatgacagtgggtatgcctctgaaggagtatctgaagcagaaagagttgccctccatccgagccacaccttctggtggcagctctccaaacatcatccagacctccagtgtcagattgagactgcttcctggacgtatagcccctgggcagaggtgttctttgacattgcatacaagaagaaagataacaagagagcaaagtacatgtaagtttacctcatcacttttggcatgtctgacctctggcgaggacagaactgccaagagaaccaaggtcaagaagccaagtttctgccctaaccatacaggctagtttctgtctccattctcgtcattctgatagcatctgaagcccctcacagaaacacctgcccaccagatgttcccaacaacctacttcagtatgctttttgtagaacaccttttatgtattatttggttatttcctacaagcacacaatgtatcttgatcatacaaacaacgtcttcctcatgtgccactcagacacctacacccaagtctattttccactttcatgtcattttttgttccctgttttgctgcttgctggaatgttgactgatcgtgttggcttgactttggcatgtaaccatccttcagtgagttcatgagtacaggagtcacaccgtgtccagaagatggcacttcataacatgcttcatctcttagttcttacattctttctgttcaccatgccttgatgttcccttaggtacccacaacagtcacttagtcttgtcactttaacccattatatgtcttctgcggtgctagccactgcagagagaggtttctctagcaaaggctgaaggaagcactaatctatatgtataaacaaaaaatacttcaaaagcattttggcaacatgtttatttagcaaaacaacagtagtagtgttcctgccccacctacaacctatcccacccccaccacccaccctgtccttagggcctatgccatgggcttttaacctg

SEQ ID NO: 772 - DNA, 1200 bp, mus musculus
tctgtcttccctatttgtccttcttcctactcccatcctatgggaaccatatgtcttgcaatctctaagcattgaagtgctatttcttttcttcccttttgacttgatagctgcatttgtttgtttgtttgtttgtttgtctagtgttcttttgaaagatgtcctcctcgacttccacaaataagttctgaatgtggcagacaacactgtacatggtctgctagaaactcgagggaatcaggctgagcaaactggaaaacgactctcaaaagcagtaggtgatagttcaacaccaaaataaaatacggaaactcatagggaagagcagaagaaaaagtcctgagcttgcccaggaatgggttttgtttgagaagccccctcctgggggggggggcagcagcacacagcctgaccagagctgcgatttaagacagccttggtaaatctgcattgcacattcaatagtgtccatttttaaagaaaaggagcacacaaaaccagagggaagtgaggagctaaggaaaccctctaaaaatgacttccatgtcatttacaaagtcttttagcaagaaacatttggaaattaataactctaaagatatatttcaaacatagtaatgtttctatgtaggataaatgtccagaaataagtctttgaatatttcagtgaataaatacaaattataagtgaagtttccaaggttaagttgaatagttttaatttacaaataaaatttacaaacacatttttagggttgttgccatctgttacaaaagaagaaaaagtcagactttccttttgtcccacaaatgacagcacagtgtacttcccaaccttgccatctgtctagctaataaaaacgtggtatcatggacattcagcgtttttctgctaatggcaaaacagtataaaattgtatgttaatgagctgattttgtgtggactaagtttcttgtgtccagttttcaattccacctacttatctgtaagattatgaacaggatttcttcatttagtaatgaaataagtactttgtgactgtactagtctagagtcatagaacctttgaattgaatatgaatatatatatatggaatttattgaaatacaggctgcagtccaactaacccaacaatggccagctgtgaatggaaagtccaagaatctactagtcgctctgtcccatgaggctgggtgtt

SEQ ID NO: 773 - DNA, 1400 bp, mus musculus
tcttttgtgattgggttacctcactcaggatattttctagttccatccatttgcctaagactttcatgaattcatcatgtttaagagttgagaagtactccattgtgtaaatgtaccacattttctgtatccattcctttgttgagggacatttgagttctttccagcagctcgctattatttaggctgctatgaacatagtggaacttgtgtccttattaaatgttggagcatcttctgagtatatacccaggaatggtatagctgggtcctgtggtagtactatgtccagttttctgagaaactgccaaacttttttccagagaggttgtactagcttgcaatcccacaagcaatggaggagtgttcctctttctccacatccttgcctgcatctgctgtcacttgacttttttgtttttgccgttctgactggtatgagatggaatctcagggtggttttgatttgcatttccctacagaccaaatgaagctcaagaagaagaaagaccaaagtatggatactttagtccctgttagatgggtacatgggataagctactgagataaagtgtggatcagagactgaaagaaagaccatccagagactgccccacctgggcatacatcccatatacagtcaccaaactcagacactattgtggatgcctacaagagctttctgacaggagcctgatctggctgtctcctgaaagactttgccagtgactgacaaattcagagacagatgctctccgccaaccattgaactaagcacaaggtgcccaaaaaggaagctagagaaaggactgaaggagctgaaagagttgcaatcacataggagaaacaacaatatgaactaacaagtacccccagggctcccaatgacttaaccaccaaccaaagaatacacatggagggacctatggctccagctgcatatgtcaaagaggatggccttgttagacatcaatggatggagatgcccttgatcttgagaaggcttgatgccccagtgtaggggaatgccaggagagggaaccaggagtgtgtgggttgctgaggaggggaaggggagataggatagggggtttttggaggggaaacctggaaaagcgaaagcttttaaaatgtaaagaaaatatctaataaaaaaggaataaaatatatgacatggagagtcagcagactaaggtacttgccatgtaaatatgaggaactgagttcttatatttaacatccatactaagtcacatgcagtaacacaagtctttaaccctgcagctcttacatcaatatatatggtggaaatgggggaatcccaggaagattttgggccaattctgctatcataataccacagaaaacaagggactttgtttcaaacaagttggaaggta

SEQ ID NO: 774 - DNA, 1200 bp, mus musculus
ccaggatcctggcacaaggccacagtcctccatagatttttggccatcagtcacatacgggcaatgctgcaaacccctccacaggtagaggatgtgacctgtggtcacatagactcaagacagatcttcattttattggggtacctaaagggctggaggacttttccactaaactctccttcccagccacccatcctgaaaaaggcatttaatctcaggctcaccatgagaagtggtgtatggtttttctcatccactttccaccatgacaataaattgcttaaaaccatggactgcctcttttcatcaggagctgctatgggaagtcataaagcctataaaaccactgtccaatctcccaagctagctgcctgctgacaagccaagaactctcccctgggaccagccctgcaggatcagccagagctcccctcttttcccaacttggtcctagctaggtccagccccaggggcccccactccattcttagctcttctttggcacccagtggtgcctgggtgtctgaagggttgagaaccaggcatccctgacctccctgcatgcctggggatgtctgagacacctctggctgtcctgtgcttcaaagtgcacttccccacccttcgtaccccacagcttccctacagcctgacacctgctcagtggcagcatggggtaagcaggtcaacttcctgagtcctgcctccccaagctgaccaagccctgtggtagagcatatgcaggaccctacaatcctacacaaaatgtcattcgtagttatcttattgctatgtctagtagaacaataggtttgggtttaccatagatccctgagctatgtcatgtcaggttcttggtcacctaagcaacatagggtttgggttccatttcacagagctggttttcagtcaaatcagatattgctctgtctaattaatcctacaagttttatgccatcattgtacttgtatatctgacagtcaggataatattgtaggtccaatggattattagtatttacatttctcctttggtagtgttggagttccttcatatatcaaagactctaacaagtaccgatgaagactctttgtaggctgtagccactacctcaatttttccattgtcagtgagatatgtagaaatggaggtttgctgtcagtttgtggacagcaacctgtagtcttgaccacagcttg

SEQ ID NO: 775 - DNA, 1000 bp, mus musculus
aggtgtattttatcctgttatggctaggtgaacctgctcagtttggggaaagagatccgaatgcatgcaacagaactacagacagcccctgctcctgctgataggggtcccacatcaagactgagctgcataaatgttacagatgtgctaagggcctgagtccatcccccacattctcctgtttggcggttcagtctccgtgagcctgtactggctggttttgtgtgtcaacttgacacaggtggagttgtcacagagaaaggaggagcttcaattgagaaaatgcctccatgagatccagctgtaaggcattttctcaattagtgatcaaatgggagcgtcccttgtgggtggtaccatcttttggctgatcttgggttctttaagtaagcaatctgagcaagccaggggaagcaagccagtaagaaacatccctccatggcctctgcatcagctcctgcttcctgacctccttgagttccagtcctgactttctttgatgatgaacaggaagtgtaagctgaataaaccctttcctccccaacttgcttcttggtcatgacttatgtgcaggaatagaaaccttgactaagacagggtcgctatgagcccaggttagttgattctatagatttgcttgtggtgtcctagaccccactggcatctccagtcctttctcccctccacaggtttcctcaatctcaacctaatgtttggctgtgcgtctctctatctatttccattagtttctgagtgaagtttctgcgatgacaactatgctatgctcctgtcttcaagcatagcagaatattattaatagtttcaggggtgagcttcctgtcatgacatgagtctcaagctgggccaacattagttggcaatcccctcaatttctgctccacctttacccctgcacatcaaattgtgggtcaaagattttgtggctgggttggtgtccccagttcttcattggaagtcctacctggttttagaagatgtc

SEQ ID NO: 776 - DNA, 1000 bp, mus musculus
tggtaaaggtgtgtgtgtgcatgtgtgtctgtgtgtgtgcatgcccttttttaacttttctaatttgggattatttataatgaatggattattaaacacagttaaactctttaggttgaaatgtatcttcttgcacagtatgtaggggtggatttgtgtatagatattgctgaaatttgatttttatcatagaatgtcttattttgtccatctatggtgattgaaagtttttctaggcatagtagtcttgccaagtatctgtgatctcttagagtcagtcacacatctgctttttctgcttttgagtcagatgtaattctagtaggtctgtcttttatatgttatttggcattttactcttttaggttctaataatctttccttgtaatgtgtattcattgtcttgattattaagtgctaagaagatttgtaacttccccccacagcctgaagcagtctgagccagaccttgacttcattgccactaggagattacttagggtggagcctgcctccctggatcactctattgttcagccactgccgctgctgctacctgctgggagtcggcctagctattccagagcctacacatggtcacataggctcgaaggatgatttggctggaatgggctttcccctctcctttataaagtatgtccaccattaaaaatttgaaccttgagcagactagttgtcttgtttccaatatttctcaacccacctaggctccctcttttatttctgttccaagatgccttccaggcttgaacccagacatgagagccgcaggccggccccaacaaagatttacttttctcttccaatctatttggtgttctgtatgcttctactatactgataatcatcttctttatgttaagaaatttttttatataattctgttgaaaatattttctatgcctttgatttgggttcgtttctttcctctgtttctattagtcttagatttgttcttttcataatgtaccagttttcc

SEQ ID NO: 777 - DNA, 1000 bp, mus musculus
agccaagtatctgtgtttgtttacatctaatgtatagaatcacttgaataatacaattgaatcatgcatattttcattacagtcctgatttcaggattaagataaactattttaaagtaatagatatttataattcaatactttaacacatagtaaaaaataaatttatgtaaattataatattaaaatttaaaacatttcaccaaatgttaatatatatgattaactaacaataaattgatacttttttatttgctttagccaaaatttgatcaaaatcctaatgctaggtcagttattttgtttttctttcaactttattagcatgaaaaattatcactaccacattaataaaggtatttctcaaaaattctattatgtcaatggaatatataatggcatatggaaactttcttgtgtgcttttcatgtgtttactaagtccaattcaattttcaatgtgttttaatacctgtaattcagataatttcaaacaatatttttgcatctaaatattaggtatctaaagactgacctactgggatttagaatcattaagcaatatttttcaaattttacatatttatgttatgatgtttcttgttttaaattattataagctttaatggctattcctcgttgtcaatgtgaccattctgaactacaatcctgaatttgaagtctcacctgtgatccagatattgagtttgagagatacaagtttctgacctggatcttggtatggagatattgagccacagtggctatggatctctggagttttaggcaaggtcagctcaggacaaaacaagtcccagatccagatgtggtggtacacacctttaatctgggccacaccttctgttggagacctacataaggacatttgaagaaggaagattcgcctgcttgtatttacttgccagcacatcagttgaaatctattagccttgtggcactgagcaattactagatccttggacttcccattcacagctgac

SEQ ID NO: 778 - DNA, 1000 bp, mus musculus
tgggaaggaaagtggatggggaagtgtgtgggggggggtggggaaaggaacctggtatggtattgggtgaggggaaaggactgaagcactgagggccagcagaaagaatggaaacaggcaacatcagtagataggaggttggggggaatcctccagaatgtaccagagacctgggaggtgagagaatttcaggactcaaaggtagggggaccttagatgaaatgctgaacagtagggagagagaacttatagagcccacatctagcaggatgacaggatatcaagtgagagacagggttgccatctcatagtcacaacactgacccatagctgctcttttctgaaagaattacagggatggaaatagagaggaacatgaggacaagaaggtccagtgacaggcccaaagtgggatccagatcaaagggagtccataaggcctgacactattactgagtctatggagtgctcacaaaaagagacccataatgacagccctctaaaagacccaacaagcagctgaaagaatcagatgcaggtgtttgcacccatccaatttacagaagcagctgaccactgttgttgagttagggagggctgaaagaagctgaggagaagggtgatcttgaaggaagaccagcagtctcaattaacatggagcccagagatctctcatacactggaccaccaaccaggcagcatacaccagctgatatgatgcccccaacacacatacagtaaagtactgctgggtctgtgttcattcagttatgatgcacctaacccacaagagaatagaggccccagggacttaagaggtcaggttgcatggtgtttgggacattcatgtgaatacaggggatgtggaaaagtcagaagatggacaggggagggtgaataaaatatggaatgtaaacagaaaaaaatggagataatgtcctgaaataaaatctaatccttgggatactcttttgtaaaagatatcctttatataattctc

SEQ ID NO: 779 - DNA, 1000 bp, mus musculus
tgtccagagcataggaggaactctggacggaagtgggctatcttcccccacccctgttcccctgccccctgctctttccccaggccttttttagttcccacactctactttaatgccagtatttagatatacaagtgtgactatgttacaatgaaaaatgaggattatctctcctgtgactctctaagcttgcatctaggaagtgtctgaccccaggactcaggtgagattgtcattttctctctggagactatctaaggtgcgtccactcaggagatcacaggcctcagaagcagcagagcagtggagacagggtcctatgggcctacatctgcagccaggaggttgagctgatcctcagtcctctgtgcaccttacctgccagaggagtgcttgcctccagggagttctctgaccctggaactcaggggagatcacaattttctttctggtgactctctaaaggatccagacaggagtgcacaggcagcagaaacaacaaagcagctgagacagtgtcctacggacctacatctgtagacaggttgggctcttcttcagccctctgtgcactggtctttgttgcatccaactcgaccagcaaggaaaacgcaaccaccagttcttcttaatgcagtttactcaggcagcttttctctttaactcccccgagcctcggggtacaagcgtttttatgcactcaaaccacaaccacacctcaaccaatcaccacaggtcacatcacctcaccagacaggcttgttcagccaatcagggattaagggtgagccatctaccaaatatgggcttgtttactgcctggcacagatttcagtctgggatggccagggagtccagaatggcttcccacacatcttgccaggagagaactagtcccccaggagtgctgacacagctttacagactcatatgaggaacaagcaccagtcacaagcagcaagaacatctaacaccagagattaccagatggcaaaaggca

SEQ ID NO: 780 - DNA, 1000 bp, mus musculus
agcagacctgggagactagatctctcctctgagtttcagtggtcagaacactctctgcaggcaagctcttctcttacagggaaggtgcacagatatctggcgtttggacctccttcctagctgaagatgaaggcccaaaacaggacctttcccagaatctgtgttgctttggcctgccacagaagctgttagcttctgtagtgcacactctcacctgtgcagactacgttaggcggagttctggaaccaagatggctcctgccaatcctgacacaaaggcctcccagacagggtggacacctgtcctctggccaggaaggtggccagatgtctggagcccgaaaacggagctccctcagaagctctgtggctcctgcctgtcccagaatctgttagattctgtagtgcacactttaacctgtgcagactacttttggggaagtcccagaaccaagatgactcctgctgatcctgaggcaaaggcctcctggccaggtggacacctcagcttatagtatcttaaaactagacataatcatgtctaggtgagatggaaagaatccacttattgacacatggcatgagcctgaagagaaagttaatattggggagacaaggggcagtgtttctgttttttccacagaatgctgcagaagcatgctagcttccagaatgattcatgtgacaggctgacctgtgagttcctgagtgccctgacagtggtgacaggaaagccgtgttgagcacacagagaacaaggaatcagggagagcagccacttgcaaacaagatgaagaaacttcctatctctgccatgggctacagcaaggagagcagaagtggtgtcaacttggggacaaataaaaatgatgaccaatgaggcagagggactgctgcagtgtatttgacaagatttcatcagagacactgtttttggccattcagaccaactcccttatagctgtgaaagcttgtctaccttacctatatgctatattgt

SEQ ID NO: 781 - DNA, 1200 bp, mus musculus
agtgaattcttaatcctgtaatgactgaagaatgcttccacagtccctgacccatgatgaatactaaatacctaataaatggtgttattacataatatctattgtacttaatggtaaataatgcatgaaacgaaataaagtggggtattagtcagggttctctagagtcacagaacttatggatagtctctatatagtaaaggaacttattgatgacttacagtctccagcacaattcccaacaatggttcagtagtagctgtgaatggaagtccaaggatctagcagttactcactcctacacggcaagcaggcgaaggagcaagaacgagactcccttcttccaatgtccttatgtgaactccagcaggtgtagcccagattaaaggtgtgttccaccacacctttaatcccagatgaccttgaactcacagatctaatcttctggaatccatagccactatgcctcaagatctccacaccaagatccagatcagaaacttctatctcccagcctccagataagggtcacgggtgagccttccaattctggatgtttcacagtgggagtctgtatcaatgttcatgggccatgttaccagtaaaaggcatgcaaatgtccctggtctgggccaccatctgaggccatgttaatgtccaaaggtggcacagagctaggccagcccccacattgactgtggcacttgggaagagttagacccaccccttgcctgcacagcgcagaagagccaatcctggtgtcctcagagcatgagagctatagccccatacctctcctgggaagttcaggagagctggccctagtggcataggcatggtagacctggttctggcccttgtaataagtaggagagctgaccctcagcctggacattgtgggagaactggccctggcagtgtggatacaggagagctagcaggctgaccaactcagctactatccaggcccagattcagggctttgagttggcccaccccaacatctactcaatatatgaattgctgaagcacttgaagggctggtcctacagaaccaacgctgcatgtgtttctatgatacaggacaacaacaggctatccaagaggagtctgggtcaggatccagtattgatggcatagcaaaatgcagacttctaaccaaatcaatgacttcttgcaatgaacatttgcaagtaaggc

SEQ ID NO: 782 - DNA, 2000 bp, mus musculus
tataaagtttgcacgaccaatgggcctctctttccactgatggccgactaggccatcttctgattcatatgcagctagagacacgagttcggggggaggtattgtttagttcatattgttgttctacctataggattgcagatcccttcagctccttgggtactttctctagctcctccattggggaccctgtgatccatccaatagctgactgtgagcatctacttctgtgtttgctaggccccggcatagtccatttcttatattctgttgctgatgctcacatctatggttcctgatttctttcggaggatttctatctccagagttgtctcgctttgtgttttctttattgtttctacttccatttttagatcttggatggttttgttcaattccatcacctgtttggttgtgttttcctgtagttctttaagggatttttgtgtttcttctttaaggacttctacctatttagtcatgttatcctgtatttctttaattgagttattaatgcccttcttaaaatctatcattatcatgagatatgattctaaattcaagtctcgctttttgggtgtgttggggtatccaggactcgctgtgggaatgtaaggttctggtgatgccaagtggtcttggtttctgtttgtaagattcttacatttgtctttcgctatctgctaatctctgattttagatgttcatgctgtctctgggttgagcttgttcctcctgtaattctgttagcctctgtcagcactcccgtaagtccacatctctcctcagtcccagttgtcagagcagtctctgcaggcaagctctcctcttgcagggaaggtgcccagaagtctggagctcagatccacctcctgagtcccaggatcagatccctccctggaggcctactcttctctggcaaggaaggtgcccaggggtctgggtctcagctctgcctcctggttgaggatgaagaattgaagggaccctgtccaggaagctctgtttcttctgctgtccatgtgctctcctgtgtagactggtctcagtgatcccaagatcctgggtgtgctagagcctgtgtagttcaggcccaagatggagcagggctggagccaccagaatgaatcccagcctctggttgggcgggtttcctttgtccctgttcctgcagtgatcccacgatcctgggtgtgctaggtcctgcagagtttgttcccagtatggcacagggctgctgctgaccgtaaggaaccccagctccttgtcagatggatttcctttgtctctgttcctgctggcacaagagactctggattgttttggagcagatgttgcattccactcaccagtgatcccaagatcctggatgtgctagggtgcctgtggcatggagagtcctctgggcaccttgggaccctctgctgagttcacacccaagatgatgcagggcttgtctatttcactacaacatgccttttgaagtccttgtttcggctcatgttttgacagtctagatggtgagagtttactggtgtagtttcatacactgttaggagacacaattccataacaaattccctgttcttctgcccttatactacttctgaccacatttccacaggtttcctgaacattgggtgtcattgttttcttccttttatgaattatgcctggttgaagtcaagggctttagtgtccatgggtaccagtagcttctggagtttgaagactgcaatccttccataaactatgattcagaagctgcagagaagtatcacacttggcacttatgtagcactgatcgtaccaattcaagaccaaattctataaaagggaatttctcaaaatttagtcacagaaccagttttaaacaaaatgtgaattcaattttagcattagatcccagaactaaatttcggtagcattagagtataatccacaaaccttctttctgttagaacagtatgtttaactctatattcaaatatctgccatta

SEQ ID NO: 783 - DNA, 1800 bp, mus musculus
atatattactgatctcctacagaggagaggaaattacccagtcagaatagatatgtctctatagcctagtatccgcagcctaatagccacagagtttatcttagtccatatgaagctctgagttattaattgttttaatgatttcattgatttttgttactgtaggtaatgtgccttacctaacttggtagtttattttgcttttcaattaaccttttacttttgttatatcatttttattaaaaacaaaggttttatctgcattttaatgatatgcccatctaagtgtattatgaatagtatttggctgtacagcaatttccctgaatacttcagggtaatggcaaatcacagtgagtattctttatttcaggttattgtctatatgaaatattttataatgttctttgagtaaatgctagaatcttttccatagaaccaaaaatattttttaaagaatttcaaagaacatagccatgaatataaagttccgatttaacttgtgccccatttttttatgtttaagaatcataaaatttcgcgaaggcccgcggcgggtgttgacgcgatgtgatttctgcccagtgctctgaatgtcaaagtgaagaaattcaatgaagcgcgggtaaacggcgggagtaactatgactctcttaaggtagccaaatgcctcgtcatctaattagtgacgcgcatgaatggatgaacgagattcccactgtccctacctactatccagcgaaaccacagccaagggaacgggcttggcggaatcagcagggaaagaagaccctgttgagcttgactctagtctggcacggtgaagagacatgagaggtgtagaataagtgggaggcccccggcgcccggctccgtcctcgcgtcggggtcggggcacgccggcctcgcgggccgccggtgaaataccactactctcatcgttttttcactgacccggtgaggcggggggggggggcgagcccagaggggctctcgcttctggcgccaagcgcccgtcccgcgcgttagatgcagaaaaagcatttgacaagatccaacacccattcatgataaaagttttggaaagatcaggaattcaaggcccatacctaaacatgataaaagcaatctacagcaaaccagtagccaacatcaaagtaaatggagagaagctggaagcaatcccactaaaatcagggactagacaaggctgcccactttctccctaccttttcaacatagtacttgaagtattagccagagcaattcgacaacaaaaggagatcaaggggatacaaattggaaaagaggaagtcaaaatatcactttttgcagatgatatgatagtatatataagtgaccctaaaaattctaccagagaactcctaaacctgataaacagcttcggtgaagtagctggatataaaataaactcaaacaagtcaatggcctttctctatacaaagaataaacaggctgagaaagaaattagggatacaacacccttctcaatagtcacaaataatataaaatatcttggcgtgactctaactaaggaggtgaaagatctgtatgataaaaacttcaaatctctgaagaaagaaattaaagaagatctcagaagatggaaagatctcccatgctcatggattggcaggatcaacattgtaaaaatggctatcttgccaaaagcaatctacagattcaatgcaatccccatcaaaattccaactcaattcttcaacgaattggaaggagcaatttgcaaatttgtctggaataacaaaaaacctaggatag

SEQ ID NO: 784 - DNA, 1000 bp, mus musculus
tttaaggacttctacctgtttggttgtgttttcctgtttttctttaaggacctgtaactctttagcagtgctctcctgtatttctttaagtgagttatgaaagtccttcttgatgtcctctaccatcatcatgagaaatgtttttaaatctgggtctagattttcgtttgtgttggggtgcccaggactaggtggggtgggagtgctgccttctgatgatggtgagtggtcttgatttctgttagtaggattcttatgtttgcctttcaccatctggtaatctctgaagctagctgttataattgtctctggttagagcttgttcctcgggtgactctgttagcctctataagcagacctgggaggtagctctctccttagtttcagtggtcagagtattctctgcaggcaagctctcttcttgcagggaaggtgcccagatatctgatgttcgaacctgcctcctggcagaagttgtgttccactcaccagaggtcttaggatcgcgtggggaatcctgtgtgggcccttgagggtgtcggaagactccgctggcgaggcaccctggtgctcgagtggaccggaagggacttgtgccccaggtcaggcccgggtcatctgcttccctagttaatgcagtctcaggttccgcacaattggattggggcagacactttgttccactcaccagaggtcttaggatcctgtggggaatcatgtgtgggcccttgtgggtgtcgggagactccgcttgcaaggcaccccggtgctcgagtgattattgttttaataaaacaaatatcaacaataactaagttattattaaacacaacataatttagacattctccaacattatatattttgatttgcttttacagcttatttttatattttgttgttttgaaataataatacaggcataatctttttctgttacagctttcacatacattatggttaacgaagaaaccatgttggttgttgctaagctccagct

SEQ ID NO: 785 - DNA, 1000 bp, mus musculus
gcagagaatgacgtaaagaccatccagtgaaaggctcaactttggatccaccctgactctattactgatgctatgccgtgcttgcatctagcatgtctgtcctctgagaggcattaccagcagctgacagagacagatgcagatatttatagccaaatattgaactgaaattagggacccctattgaagaattaggggaaagattgaagaaacttaacagaatagcaacctcataggaggatcaacattatcaactaacccagatccctttggatcccccagagacaaagccaccaaccaaagagcatacatcgtctggtttatggccccgagctcatatgtagactgggttgtctggcctcagtgggagatgtgcataattctgtagagacctgattctacagagaagggggatggagataaggggtcagtggtggctgagtgtgtgggtgagggggtggaagggtgaggtggtggataggtgttggatcaccctctcaagggcaaagaagagggagacagaatgaagaaatctgatagggtggcggcaagaagaggggcaacatttggaatgtaaaaaatgaataatttttaaaaagtaaaaatgctgaacaaatacaaatttaaaaggaaaaagaaggaaatgctcacaactcattagtttaaaaatttaggccagagctgactgtgctgttccaggaggttattgaaaccttgggactcattaatttgctagctgaagaaggtcattctggattggacattaaaattatattcatcttcactcccagccaaactgtctagttttgaagcacaaagacttgagaagggaagggagaattaggctcactgccatgacagcccaagcatctgaccatgtgagacaaatcaacctcttccttaatatttctgccaaaacttgtattaaatgagcaacttagcttaaataaacagtaaaaataagccaaagtctaaaagcatgaagaagggaaatggtgag

SEQ ID NO: 786 - DNA, 1400 bp, mus musculus
ctagagctttaataaggccaagaaataccaatactgcgtatgaatccaaaaagttaaaataattaggttgaagaaacatcctcaaatatttattctagcattattcccagaggaatataagcaactcaactgaaagttaagaaatggactaggaatatactaatggaatgctacttaaactcagtaaaaatgatttagattttcagaaaagatgattcttaaaaacattatattgagaaaacaagctgggtacaggaacacaagcactctattatgtcttgtgtgaaatttggaaaagttaaactaagaaatagagagtagagttgtatctaaggctgagaaaagtgtcatcttagggtttctattgctgtgaagagacaccatgaccaaggcaactcttctaaagggcaacattacagattcagaggattagttattattatcatcacggcaggaagcatggcagtgtccaagcatggcactggagaggagctgagacttctacatcttgctttgaaaagaaccagaagactgtctcaagggcagttaggaggaggttactttcagagccactcccagagtgacaggcttcctccaacaagcccacatctgctccaacaaagccacacctcctaatagtgacattctctgggtcaatccacaacaggagtcaaggcaaaggaggaagtgctgaccaaagtacagaaagttgcacttagacaagaataacttcataatttattgcacagcatggtatagagctaacagctgtatttcaaactgctaaatgggaaaggattaaatattcccaatattcaattcttattataaaatgtgatatgtatgtgtgtatatatatatatgtgtgtgtgtgtgtgtgtgtgtgtgtgtaatacaaatatttattaaaacataattgaatactgaaattgcacataatcatttgttcatttacatagagatcataattctgtattattattcattgttattttgatattaatttattgggctttgaatggtctttacataagctatttcaacaatattttctttcaccctttgtcccacatttatgaaggtacacctttacatataaaataaaatattttttgtcatattgctttcaaataatacaaatgtaatactttgaaaattatgtttaattttcagttaagaatgttttaggcatattactttttacattaatcttggattaacagtcagtgtatctggaaaatattctgttttaaaatattttggattttaacaatatgtgaatttctaaattatgtgtcaaatgtatgctactataagcactgtcagccaaggaaatgaaattgatgcacatttctttacctcctaaattcttttatattttaaataattttaaaacttgc

SEQ ID NO: 787 - DNA, 1000 bp, mus musculus
agtgtttttatccactcaagccacaaccacacctcaacctttcaccacaggtcacagcacctcaccaggcaggcttgttcagccaatcagggattaagggcgagccatccaccaaatatgggcttgtttactgcctggcacagatttctgtccagctagccagggagtccggaatggcttcccacaattcccccttttatattctttgaagcaagctccatgggtgaagatagaggtctgatgcccagtgtgcagaaataggggccatgtacaggattgactcttaggctcacaggtttttacccagagcaaccctgacctgctcccatgccgtttatcctgggggaaggacactaggacactcaaccctcattcaatcagacatacctcccagagattgtcaaacagcttccagactaacctctgtgcagtgcttagccttataaccctgcggagcgatggcttcattgttcattcttcatggcaacaagctaaatctgaggtgactgccctgcttcctctgtggcaaaagcttgcaccaccatggtggcagtgtggacctgggcattccacaaccgacacatacaccatacacacaacatgcatgccagaacaagggccacaatgagggcaccaatcccagcccattctttcctgatgccaagccaggatccactagggtagaattcacagtgacaatcgcctagtgaagcttattcatcttgccatcaaaatttgcagtccaatttaaacaccgacagtatcccccatctgggttccgcacccatcagaggcagacacatgctcatcaccagcaagatcagcttgttcattttgacagcgtcgcactagctactacaaaacccacactggctctgctcaattctgtggaaacatgcaaacagaccctctcgcccaggccaacatgggatccggaccattccatgatcctgtaagcacatccttccatttagcataccccagtttactggggctggta

SEQ ID NO: 788 - DNA, 1000 bp, mus musculus
aaaagaactacaggcaactaaatcgtgctaagcacaggaaagagctatcactccttttttctcattttttgaccatgtatgcacaccatcccagttcctagctggcatggcatcattcctcacctaaactctataaaacctcccttgctttttagcccagatataggacttgactgacttccatgtgtaagatcggtgaacccacttgagagttgtcttctaataaacctgcctgtatctactttttatctcatcaaatctgccctagatctgcttcatggatggagagaaaattcctatcatcttggttcaaaatgcgggagaagttgagcctgcagcccagcgggcagggaccatggctgcatggggtctgctcctttctctccctttctctcttcatctgaaggatcaactttgaacttaccaagatcctctgccaagccatggcctagtatttggattctgagatatcctttacaaggtttctttactcctcactgttttaccccaggctaccaagtgggacactgtatcataggtcgccacaagtctaggagatgggcaacacggagtctaaacctgatcctcagacattcctggggtgactgctacaaaagttgtccaaattaggactgtctcagactttgttctatggcctcgcttcagtaaacggccacaagagagcattcttgatgttaaaattctccacggatcttaagcttaacatttcttttggtatgcgggcaaatggcctgaatcccttctggccaggtttgttgggaaccacaccctgtcccttcctctgtagccaatgttctaaggctcacgtcctactagcaaggatgttcactccaaaagaccccttgcctccaaggacctggatcccaaaccccaaacccctgtattgacagagcccagactcttcccacttcttctctttgacacactcaaccttttgtaactgcaatggttgctccaaaccatgctaatcctcccaaag

SEQ ID NO: 789 - DNA, 1200 bp, mus musculus
aaagagtcaaagatccatccactcagatgttaggagtcccacaaaaaacatcaagataacagccttaacacacatacagagaggctggtatagagccatacaagccatttttacagtttcagcctttgtgagcccacatgagccctgcttagttgattcagtgggccatgttatcctcttgcccttcacccctttgactctctcagtctttcctcctcttcttaaggactttcctggtctacaagggtaaaagcctaacaaagaccttatgtatcctcatgatttctggctgtgggttgctgcatcttctctcatccgctgccagagaccggacaaggcaccaatctaggaatataggagagttggttggctgctcccacatgatgtgtgccattattgccccggcatatcttgcaggcagtatggattataggtataggattctatggctgaattggtgtccaggtttctctttcaggagtctacagagtacttttcacatttaacagtgtagaatatagaggtgaagtttcctctgaggcaccgaatgaacctttcagacagtgagttatgtgaatgttgtcctttggcaacagagccttgctatcagcttttagagaactggccttctgtcctagcaacaacctgggcttcgagggatcaacacaggattccctaggccaaaaattcaatggaactggaagcttttcctttctacaaaagctggccaggtcagactccattattaccagtcctccctaaggtcacactcatagatttcaagaagtttttacagcactaggtttctacaccaccctccagctccagctgtctctcctcatactttcttccttcatccctccccacaagtctgatccttccagagccggtccctacaacacgcccaagtcttctttcaaaatcctttatatttccccttcctaaggagatacatgcttcctccctggagactttctctttacctaacctttctgggtctgtagattgtagtatggccatcattcacttaatagctaatattctcttataagtcaatgcacaccatatttatttttctggatctgggttcctcactcagtatgagttttttctatttgcatctttttgcctgtaaatttcatgatgttttcattgctccacattcatgccaacatgagttgtcacttttattattgatct

SEQ ID NO: 790 - DNA, 1600 bp, mus musculus
gaagtagaaaccacaatatatgagcaaataatactctttactctttctcttcctcagagtgcctggacccctgaagggagggatttggtggagatattccatttagggctgagtgttccaggggatgatatcagtattgatgaaaaatcaatcaaaggtaaatattcacattaaagagtgtttatgaaggccttgtactctaggcctaagaaactggaaataccacgtaggctcaaagacagtggaaagaacagggctattttattggagagtagcaagtaacatggcaagaagaaagagataggggaggcattaggaaaaattcaactcctaatattgattatacacccaaataattatgttgaataagcagacagaaagagaaatcaagaaccccatgccttctacaagctggctccagggctcagggtataaaggactgccctcctcagtgacagcactaactcctcttcattttctgagataagctcatgaccgggttgtaacagagtcagagaggttttaagggcagatttctttacagagagcctttttcaattgtgaaccttaaaattgtgtggaaggaaggactaccacttctcttgagtgcagcttcagtatgaccacttcaaaggttgctaccttttcctgttccctatttccctggaccaccagagagcctgttgcacgcagagaaaccatgaccacctgcaggacaactgggtgatctacctgtggaggagtttcatgctgccacaggggatgaactccaacagaactatgagactctatttgacttagaaatgatgcttcttacaagacatcccaggcagaggcagaggaggtcagaaattagatgctcttgagtgagttcaagtgcagagctgagaaaggtcccaaggctgcctggaaaatcaagtacaagacatgatcatgaggcacacagccctccagagggaagagaaaagtggctgaagaaatctcactgtgaatttccttctcctgtgtttggcttcctgctgtgaagaccagtggcacctgtcaggagggtacaaaatggatatggcactatgatacatacaaagcattgagcaccggaggagagccgaagcatgcctgctgtcacagttggcctctcttgccctaataccttctcgttgctatctgtatttatcagataaaagttcaacaggaagtcttggctgctcagccttttatccaggcaaggaaggctatgcctgcttctctttgaatctagcaaagactcttgtaaaaaacacatgttctaccagaacaacagaatgaaatcatcaaaagctctctgtaattttacagaggggaagtccttccacagtgatttaccaattggtttacagagttgcagtctcactatttagtccaggctgatcttacattgtacagtttctcttccttcagttctgagtactaggattggatatgggcaccactatgtccagctgaaagccaacattttgacctccattggtttgtccactgtggttcttttctcagttcccgtaaacccagtggtgaaaagcatatgtagcagtcgataaattcaaacttcaacaacatagga

SEQ ID NO: 791 - DNA, 1600 bp, mus musculus
gacatgttcctggcagatgccccctctgccctagcccccaccccacactgtcccctcattctcggccttctttcctccctccccaccctcccctgactccctgctctctgatcgaaaaccttcaagataacataccacagacccacagagatgaaaaggagtgatagggctgagccataaacctgatgcatcaggttgacccctgagcggaatctctggagtgtcattgagtggaggaccagagggggtcatgcatggcctttatcagggcgtggcatataacagataactaagaatcacatagggacaaaatgagttgaggtcttttgttaggagggtggggtggggtgacgtccttcctactccctacctgcctccaccccagctgagatcttatcaggggagggggtacagagacgccatagaaatggaattttccagagagtctttccattcctttacgaagcagaccaagttgctttttagtttacataatacagataatcccatcagaagaaattctgccccccagctgtcccccagaggagaaacagagcagaacctactgaaatgtctaggtcttggttcaagtgtgatgagtctgctttggagacctctctgcccgtggggtcacagtggcaggctgacagggtcatggcttttctacaagcttcggcagttccctgcccgtctgcccctctatactgcagctgtggtttctcagcacggcagcaggtgggctatgctgggcatgctcctgtgctggggctgcgggggctgaggcaggaggatcactgagagtttaaggctaacctaagctaagtatctctatcctgtgtcagatttccctctccccctcttccctcctccctctccatttatccaccccccccccccccatacacataacacaaatcggaggctatgtatttccattctgtgaatgatttggaagaaaatagcacctctagcttttagaaacaaagcaatttcctcccatagattcagtaaattcagttgggaggaatcttggggttgcctaccaagtatgggctgagccctctcagatagagccttccctgaagccaactaatcctcctttctggtcattctcagaccacccttccttcctctccttccaggtcaggcaacagcacgcagcctcagttttcaccccagagaccttggctaaaatctaccctctcggccttttcagaaagagcaaggaaactgcatccctttttagccctgcctggagaattggcatcggggctaactcagcatgggtttgggaaggagacccagagatcgtcggaatacagagggtaggatggcagcgttacagcttggctgccccttggcctttgtccccaggtactccggacgccattccatcatctccttcttactctgagtcctctctagctggtgcaaaccatttactttaagagtgccccaaggtggagagatggcagccaaacggtgaacgcagccctttccccagcattttttggttcagatgaggtcaagtcgagaagcagcctcccctgaggtgagatctaggcagctcagggggggccctgatccaaaatagtttcca

SEQ ID NO: 792 - DNA, 1200 bp, mus musculus
cagtttttcactttgttctttcaaaatctcagttcttcagtctggaggtttaggggaaaaaaaaaagacattcagaagtaggaacacatacttttttatgtctgaaaatattttggaagtagtaaatacacagttaaaactacaaagccaattttggagaggggcaaagtgggttccattcacacctggagttaggaatgaacgctacgtggagaaggctggcttccggggaaaggctttccaaccacggaaagaacgtcaggaaagtctaaagttaaatcgatagcatcgcaaacttcatggcaaagtgctgaataaagatgtggttacagattaaaaattgactctggctcaggggaaattcgtaaagaagggactcagtgcactgtgtcacgtgggtggcgcagcagcaggctggggggcgggagagggggtgctctccccgcagaacttgggacacaagttaagactttagaccaaatcagaaaggtgtccctctacccttcttaaccaagcttaatcttagatgaccctgggtgtcttcgtcactgttctattgctgtcaagagacaccatggccaaggcaacatacatcaaaaacatttaatggggagcatgcttacagcttcagagggttagtccacgtctgatcgtcaggaaagggcgcagggcagcaggcagggaggggctggagtagtgaggactggggagaactgggcctgatgtggccttaaatcctcaaagcccacctggagtgacacactgtctgccgcaaagcctcactccaactgcttcaaaacctacctgggatcaagaattccgatatcggacagccattgtcattctaagcaccacgctggagtgcttgctcagtccacacctctgctttgtgttggtggtggggactttgtttagtttcctttggtttttgggacagggtctgtagctctgccagtcctggaacttactatgtggacaaggctgaccaggaactcacagatatcttcctgcctctgcctgcctcccaagtactgaactggttgtatgccaccacaaacacctaggttacacttctgttttaagcataatttcagttaagagtaatatttgggctgaggtgaaatatgtatggttgtctttgtttatttttgttgtttttgttgtttgttttgttttgagacagggcttctctgtgtaaca

SEQ ID NO: 793 - DNA, 1200 bp, mus musculus
aacatctcatcttggaaactgtagaatgtcataatgtgtcccactgtgttcccttctgttcacacatcttcacttaagcatgttcattcagtgagtcattggtctgctttgagatctctgtcttctgtgataccatcaatactggatccttatccaaactcctggttatcctgttattgacctgtattatgaagatctgcagctctggaataacaatgctggcctttcacatgtcacaacagttcatagacaatgtagattctggagtgggccaattcaaaggccgagatctgttcttggttggtaggtgagtagtcatctaccttctcttttttatttgtatcaccagtgagagctctccagaactgctcaggctaggccacccaacgccatcattggcaagaggcaatgctctcattcccttagggctagatcaccagcatctaggcctccaaagccagatccaatgtgctgcccagtcaaggtatgggacctactctctcaagtgctgcagcctgacctagctctcctgctctcatacccttggggttgcctcccctgtgccttctccatcagggtcagctccattttggtgtccaggcaaggatcaggacccgttctcctggctactgcaggtggaaaagaggaggtgagggagggtatttatcttcacaccccatcaccttactccagaagagtggcggggccagctttcccttgctctgtcttttggctggctcagttgctcctccttgaccacggtcaacactactgtattgcccaggcaaggcgagggacccactctcctaatgctggagctggtgatggacagggacaggttacccagtctctggggtatctggagtattgaccaatctctgccggctgcagggagtgaggagtgagagaggggtggggggggcatcacccaaacacccatgttacttcaaggtaggcaagaggagggccagctctcctgcacttttgttttagtagtacgctagtatttcatgtgtcatatttttatttagcaaatatatgggttaccggtctcttctgtagtctgttttgtctgtggctgaagctctgttgttgcctttgatattcactgccagagtggatggtatagtctcccacttatttactttcagctcagcactgtctaccttttgttttataaacacatctccacgaaaatca

SEQ ID NO: 794 - DNA, 1600 bp, mus musculus
ttccccttgtgccaatgagttcaaggctctttctcactttttcttatattagattcagtgtatttggttttatgttgaggttcttgatccacttggacttgagctttgtgcaaggtgacaaatataggtctattttcatttttcaacatacagattgccaattagaccagcatcatttattgaagatgctttcttttttacattgtatatttttgccttctttgtcaaagatcaacagtgtggttttatttctgggtcttcaattttattccattgatcaacatgtctgtctctgtaccaataccacatggtttttaaaatttattttatttttattgtcttatactccatattttatcccctccccccatccattctctgactgtttcacatcccatacctcctccccacaccccttctcccacatggatgtccccatccccaaccccaactgacctctaaactccttggggcctccagtctcttgagggttaggtgtatcatctctgaatgagcacagacttggaagtcctgtactgtatgtttgttgggggtctcatatcagctgatgtatgctgtctgttttgtggtccagtgtttgagagatctcggggtccaaattaattgagactgctggtcctcctacaggatggtccttctcctcagcttctttcagccttctgtaattcaacaacaggggccagctgcttctgtccatttgttggttgctaatatctgcatctgactctttcagctgcttgttgggtctttcagagggcagttagagaagaaagcaatcacaagtgggaagggagggagggacctgggagggaaagtgagcagggtgagtgtagtgggggaaagaggggaacctgatctggtattgggtgagggaaaaggttgaagccctgagggccagcaggaagaatggaaactggcaaccttgtgaaataggaggttgggtagaccctccagagttcaccagacacctggcaggtaagagactcttaggactcaaaaagagggatcttagatgaaatgactgacattagggaatgggaacttatagagcctacctccaacaggaaggcaggacatcaagtgagggatgctcacagtcacatttctgacccacaattgttcctgtcggaaagaattacagggatgtaaatggagaggaacctgaggaaaagaagattcagcaacaggcccaaagtgggatccagctcaaagggaggtccgaaggcctgacactcctagtgaggctgtggagtgctcactaaaagggacatatcatgaccataggtgggtctttttgtttgtttgtttgttttttatcactattgctctgtagtatagattgaggtcagggatcgtgattcccatagaagttcttttattgttaagaattattttgctattgtggttttgttttttcattttcagatgaatttgagaattgctcttcccatgtctttgaagaattgtgttgggactctaatggggattgcatcgaatctatacattgcctttggtaggatggccatttttactatgttaattttgccaatccatgagcttgggagatctctctactttc

SEQ ID NO: 795 - DNA, 1000 bp, mus musculus
ttcttaaatccgagtcttgcttttctggcgtgttggggtatccaggactcatggtgggggtactgggttctgatgatgcccagtgttctttgtttctgttagtacgattcttatgtttgcctttcaccatctggaaatctctggtgttaatgttcaagctttctctggttggagcttgatcctcctgtgattctgttagcctctgtcagcactcctgggagtcccactctcacctgagttccagtggtcagagcactctctacaggcaagctctcctcttgcagggcaggtgtccagcagtcgtgagctctgatccacctcctgagttctgggggtcagaacccttcctgtaggctgactctcctctggcaaggaatgttcccaggagtctgtttctaagctccacctccttgctgaggatgaaggtcagaggggaccctgatcaagaagctctgttgcttctatagcctgtgtgctgtcatgtgatcaggaggtcctggtgtgcttgggatcctgcggggtggagagtcctcttgtgtcctagaagctcttgaccgagttcatgcagaagatggcggggctggccccgacctgaacggatcccagcctctgggtgggcagggttcctttgtccctgttcctgcagccatagaccctcagtgattctttggagctgatgttgcattccactcacaggtgatccccaggtgatcccgaggtcctgaggtgtggagagcactctagaacccttagcagcccccactgggcccagaaggaagatggagggggtggccctgactggaaaggatcccagcctctggttgggcggggttcctttgtccctgttcctgctggcacaagaccctctgcgattttttggagctgaagttgcattccactactggtgatctcgaggtcctatgatgtggagagcaccaatttcagtattttaaaaagaaatattttactgtcctataaaagaaacattttactgtccttt

SEQ ID NO: 796 - DNA, 1000 bp, mus musculus
ggtgcagattgctacccacctcagtggtttatgttcctgaatgaaagacacacacactctgcctcaggatcagcgggcgccatcttggttccgggactccgccaaacttaggaacttagtctgcacaggtgagagggtgcaccacagaagcggacagcttcagggacaggcggagccacagagccactgaggcagcacccttttcaggccgcagacagccggccaccctcccgaccagaggacaggtgtccgcctgactcggaagccctctgactcaggagcagtgggcaccatcttggttccgggactcagcctaacttaggaacttagtctgcacaggtgagagtgtgcaccataaaaacggacagattctgggacaggcagagccacagagccgctgaggcagcacccttttcgggccacagacatccgaccaccctctaggccagaggacaggtgtctgcccagcccgggagccctctgcctcaggagcggcaggcgccatcttggttccgtgactccaccgaacttaggaacttagtctgcacaggtgagagtgtgcaccacagaagctgacagcttctggaacaggtgggagccacagagccgcttaggcagcacccttttccggccgcagactgccggccacccacccccaccccccaacccccccccccagccagaggacaggtatccgcctggctcagaagccctctgcctcagaagcagcgggcgccatcttggttccgggactccaccgaacttaggaacttagtctgcacaggtgagagtgtgcaccacagaagctgacagcttctgggacttgccaaagcaacacagcttctgggaaaggtcctgttttgggccttcttcttctgccaggaggagatccaaacgcaagatatctgtgcaccttccctgtaagaggagagcttgccatcagagagtgctctgagcactgaagctcagaggagagatcctgtctccatggtctgctgat

SEQ ID NO: 797 - DNA, 3400 bp, mus musculus
gctatgaatatatgttatacatgtctaacatcccaccaccacaatatttgtagccaaccaacacgtctgcaaactaatgtagtttaaaattgagtttaaatgagttttttttttttttaaataagtcttcttatttaggtgcggcaatgcctgtcagtaacttgggaaggcgtggcagaaaaattataggtttaatgccaagtggggctaaatattaagacattgcttctaaacaagtaaatagtctgtatatttgtaactcttaagaattaccatgtaatgatgggaaaatttaattttcatgtatagtgctgtgtctatcaaaggaaaattgcactggaaaacagacaggcacagagaactgtggtcttgatgattgcaatgtataagagagaaaaaaaccccaacttttctgaagtgatggggaaggtaaagtgctggggtgactagcagagagcagtggatggtactggatcagaaggaacttgctggtgtgtctctgtttgctaatctgcacctgtcattcaaatgtagtcaatcccaatgggactgggagtatgttctgatggttatagttaagtgccccaaaggttactctctggtcctcgaaaaagacattgcagccttgttaaattctcaatagtttaaggaaaggttagtatttaaagacaagaaacgtctagcagaatgatttctttttttcaaaagtaaatttttattagacattttatttatttacatttcaaattttatcccctttctcatttctcctctgaacctccccatgctatccccctccccctgcttactaacccacccactcccacttccctgtcctgccattcctctactctggggcattgagccttcacagggccatgggccttttctctcattgatgtcccacaaggccatcctctgctacatatgtggctgaagccttgagtccctccatgtgtactctttggttggtggtttagtccctgggagctctggggttactggttagttcatattgttgtttctcctatggggctgcaaatgatttctgaagcaaatggcctaagtaaagggagacaagagcccactgtcagggacttacttgaagtcaatccaggcagaaagaaaagtagaactctcctagtcagtcaaaaatttatacccttttcttttctttacccttctctctatttattcatctattacccttctctctatttattcatctatctatctatctatctatctatctatctatctatctatctacctacctacctatctatctatctatccatccatccattcatcatccatcccctctctctctctgtacatacatatgtatatatatgtatacatatgtatatatgtgtgtatgtatgtatgtatgtaaaaagttttggcaatccctatctgtctgtctgtctatctatctatctatctatctatctatcaaaaaattgtcaagacatagaaagtactcctcatttgtaacatccaaacaataaatactcataataaacaaatagagaagatgaatgtctagctatattatcagtagaaaaaagttgtctgtagtagtataagttgcatatgtacataaataagtaaatgttatatatatatgttaggtatcaatatgctcttaaatgtctccaaatattgtggaaaagtgaaagcagtaaacataaagaatatagaatttacatgatttggggattggctatttggaataactctagacaacacaaaaataagtaaatgtataatatatatttgcaattcagtatatgggaaaagatttatatatttctatttaactgtatacacacacacatgtgtgcttgtggttatatacctgtgcatataacatgttaaaataaatacttatacatctaaatatgtatattctaaaatgctcactataattttatttcctttcttctgattacttactaattgttaacatataattttacaaatcaacctgaataccaacacctcactttttcccttcctacagtccttcctttttcctaatcttcatttcattgttttgtcttttctttaatttattttttcttggtggtagtgatttgttgtctggtcctttaatatgctaagcatgcagcccacatcttaacaacaaacagcctctcaaatgttaaaatttcaatttttcattgttagaagaaatgatacatgttatgtgttttttgcttccactgctgagaaagttggggttagatttaaatttagtgcatagtagttatagtgtaggtttatttattttctttctttgcattattggttctgagcaggggtgtgaaacacagaaagacatagcagaagggatatatccatgacacctttccacagattacttcaagtgtttataaaaaatggttgagcaagatacatttttttttgttttttgttttgtttttgtttttgtttttgtttttcgagacggggtttctctgtagccctggctgtcctggaactcactttgtagaccaggctggccttgaactcagaaatctgcctgcctctgcccaggtcatgttttattttattatctacaagtttaatagctcaattattcatatgacttttattcatttatgtcaaattctctccaggataatttatgttctatgatatttgctctaaaagcttatatagtttcttcttggacaattctagttaaaatgtcatttagaaagtggagtatggttaaggtcaacaaacagttattggacattatgatctgtgctgtgctgtatatagatatcagaatgagttggttttccttctgataaagtttgataggtagatgagtgtatcagaaagactaatctaagtgaagtgttgtacattgaaattatcatctgcagaggggtggtaactaaaggattatgggacaaggctaactgaatataaattctttgctttgcacctgaatatttatttggtgtttgtcaaaaggattaacttttctgcattttaatttattatgtatcatatgatgacaatattaactttattgtgtttatctggaatgcatacttactggaggtaacaagcttaaaacagtgctaagttatattgttagtaatattatttatcactgtggctgaagagatggctcagcggttaagaacactgactgcttttgcagacgtcctgagttcaaatcccagcaaccacatggtggctcacaaccatctgtcatgggatccgatgccctgttctgctgtgtctaaagacaggtacagtcccacataagtggaataaattatttatcaccgtgactagtagagattggatggttgaggagggctagggactgtttcttaggatgtgctcttgcagagatgattcaggaccttggagg

SEQ ID NO: 798 - DNA, 1400 bp, mus musculus
cagcatttaaaagcacagacataaactgtgctcaatatgactgatggtcatccttaatcattgtctccatgcccttctgagatcttgtgtacaaatgtgaggaacattatgtcggccagcagtgatgttgagggagacagggtgtgttaacagtggaaagaggcagtgaaagtatttaagaaatttgtaattaaaagtaggaatagtaatccattgtaatttcctgctttgttgtgggaatgttgtgccattctgttcacttcccataattattttaaatttaaaaaataagtgtattactgtgtatatgtgaataggagtgtgggactgtgaaaggcagcctgttttttggttgagctaggtttaaaccccagtgactcagcaggtgttcctgcaaggaactgaaggctgtttgccatgctcccagacaccaggctcctgataagagacctcagctctccataattctgtggccattagtcacatagggcaatgccccaagtccctggtattctgtctggaccccacccccacagttatctgacaacatccaggcatgctcctctccacagttactgggcaacagtgatgtaggcctggcccactataaaaggggcttcttgttccctcctccctctcttattgcctctcttgctcccagtctcttcacattccctttccccctctcttcacatggccatggccagcctacttctctactctctccctctctctgcctttctctgcctctcttatctccctttcagagacactcctccctgcaaaaggtttttaacctcaggtctgccctgagaaagtggggtatgttttcactcaaaataactgcctgccataacaataaagccttaaaaccatccactgcctcttctcattgggaccaattggggaacaatgaagcaggtcttcctctaaagagcaacacttctagtttcccccaggaggtctctctgcattcacagccattgtctccaagccaagccgcctgaacaatcctaggacactctcatcctcacgggacccagccagagctttcctccagcccttttcccttctgcctgggctagagcctgcccgtgggcacccagtggtgtctgctgtgccaagagcaagaacctgccttctctggcttccatgcagccaggggacccagaagcccaacttccgcagttccttggggacctcagactgtgcctcccaggcccccagagcagggtcctgctgtttttcacagcctgatgcttgcatggtggtggcatggggtgcacacagtcaaacttcccatgtcccacctggcccagaggccggagccctcttaacgcaggaccccattttaactcacacaggagtgtgcatgagtgggtatatatgcaacggaatac

SEQ ID NO: 799 - DNA, 1200 bp, mus musculus
gagtctcatttccagaagactcaaatttcaataacacaaattacagagtacaagaaaaggaggagcataccatttatcaggaaggcagaaagaacgtgtatgctgtgctgccagaaaaattagctggaaagacataaacatgaactgcctaaaaatgtagcactcaactaaaacctgagagtcagtgtttggagtttataatgcaatgccttgtggctattttgcacttggattttcaaataattaaatattactataattatatttttaggtgaaaattttctacttactagattgataagagcatataaagttataatatagaaatatgagttgcggtattctgcacaggcctcagacatccggccactttccccgccagaggaaaggggtccgcccagcaagggagcgctttgcctgagcatctgcagcagatatcttggatctgggaccccgccgagtgatttctgcccaggtgagagtacagaatacagaagctaaaagcttctgggacaggcaggagccacagagcatctaaggcagccccctttttgggccccagacagctggccacctcccaggcagagggtaggggtcctcagggtccaggagcgcttggcctgagcatcggctgcagacatcttggttccaggactcctccgagagtattctgaacaggtgagagtgtagaatacagaagctaacagcttctgggacaggtcaaagcaactcagcttcaggacaggtcctgttttgggccttcatctttggccaggagggaggtcctaaggtcagatatctgtgcacctttcctgtaaaaggagagcttgcctgaggagagtgctctgaccactgaaactcaggggatagagctagtctaccaggtctgctgatagaggctaacagaatcacctgaggaacaagctctaaccagagacaactataataactagctccagagattaccagatggcgaaaggcaaacgtaagaatcctactaacagaaatcaagaccactcaccatcatcagtacatagcactcccaccccacctagtcctgggcaccacaacacaactgaaaagctaaacctggatttaaaagcatatctcgtgatgaaggtagaggacatcaagagggactttaataactcacttaaagaaatacaggagaacactgctaaagagttacaagtccttaaa

SEQ ID NO: 800 - DNA, 1200 bp, mus musculus
agctctttcccgagagtaaatgataaggcgttacacactcacagatgatgttcttaaagctttggtacagaaagcttgggtatgagatgtaggggctaagaactaactgcaattgttgctagttcttgtattgttgtttttacacatttctccaaagtttatattcttttttaaaaattaatttattttttacactccatattccattccctgccctccatgcaacccctgactgctccacatctgatacctcctccccaacctcctgtctccacatggatgcccccacccctacctcacctgacttctaatttccctggggcctccagtctcttgagggttaggggcatcatctctgaatgaacacagacctggaagtcctctactctatgtgtgttgggggcctcatataaactggaatatgctgtctgtttggtggaccagtgttcgagagatctcggagttccagattgagactgctgatccttctacagagtcacctttctccagagcttctttcagccttccctaattcaacaacagggttcagctgctgctgtgcattggttgggtgcaaatatctgcatcggactctttcagatgcttgttgagtctttcagaggacagtcataatagagtcctttttgtgggtgctcatgtcctcagtgatagtgtcaggccttgggaccctcccttgagctggattgcactttgggcttgttgctggacctcctttcccacaggatcctctccatttaaatccctataattctttcagacaggaacaattatggatcagacatgtgactgtgggatggcagccatatccttctcttgatgacctgtcttcctgctggaggtgggttctgtaagttacctctccctactgtcagtcacttcatctatggtccctcactttgattcctgagagtctcttacctcccaggtctctggtgcattctagagggtcctccaaccacctatttcctgaggttgcttgtttccattctttctgcttgctgaccctcagggcttcagtcttttcccttacccaataccaggtcaagttcctctctcttcgcactccaccccttatggactttccctcccaggtcctcctctacctccccacttgtgattgctttcttctctctccccagagggacttagatgtcctcacttgggcacttcagcttgttg

SEQ ID NO: 801 - DNA, 1400 bp, mus musculus
ttgttttgttttgttttgttttggtgtggtgtggtgtggtgtggtgtggtgtggtgtggtgtgctttgctttgctttgctttgctttgctttgctttgctttggttaggtttggttttttgagacagggtttctctgtgtagccctggatgtcctggaactgactctgtagaccaggctagtcttgaactcagaaatccgcctgcctctgcttcgcaagtgctgtgattaaattcgtgtgccaccacttcctggcagttcagtgtttttagcagattgtagaatgtgttaaacatgggtctgtgattcttttgtccaattttctgaggaaccaccagactgatttccagagtggttgttcctctttctccacatcctcgccagcatcttctgtctcctgaatttttgatcgtagccattctgactgatgtgaggtggaatggacctggagggcatcatcctgagtgaggtaacccaatcacaaaaggactcacacaagacgtactcactgataagtggatattagcccagaaacttagaatacccaagaaataagatacaatttgctaaacacatgaaactcaagaagaacgaagatcaaagtgttgacactttgccccttcttagaattgggaataatacacacatggaaggagttacagagacacagtttgcagctgagatgaaaggatggaccatctagagactgccacacccggggatccataccataatcagcctctaaacgctgacaccattgcatatgccagcaaagttttgatgaaaggaccctgatatagccttctcttgtgaggctatgccggtgcctggcaaacacaagtggatggtcacagtcagctatggatggaacacagaatcccaatggagaatcttgagaaagtacccaaggagctaaagggatctgcaaccctataggtgaaacaataatatgaactaaccagtacccccagagctcatatggctagctgcatatgtagcagaagatggcctagtcggccatcattggaaagagaggccccttagttttgcaaactttatatgccccagtacaggggaatgccagagccaagaagtgggagtgggtaggtaggagagcagggtgggggaagggtatgggggacttttgggatagcaggatagcatttgtaatgtaagtgaagaaaatacctaattaaaaaattggaaaaaaaagaaattgagcacatatgcaaagagaaattagatatgagataaaaataaaaaatattcattaaaatgtgatcatattttaatataatttttagtaataaatacaaaatacatgctttattctgtattcattcagttcatgatttttttttttcttttagcaagtaacagctactaaaaaatgccttcaac

SEQ ID NO: 802 - DNA, 1200 bp, mus musculus
gtcttttatgtaattttgtcatgataatcaagtaaacactaaaggtcttcagactgtatgtttgagtggattgatgcatacaaatatttatatgtagataacactaaagaaaatccactgtgttacatatatatatgatatatatatatcatagactgtagaaattttttttactttttattaatctttttttatagtccagttgttatccccgccccgtataccctctgactgttcctcatcctacttcttccccttctcccagacgatgtccccacacactaccctacaagccctccccaatccatgggtcctcaagtctctccagggttaggtgcttgttccctcactgaggccagaccaggcagtcctgtgatgtatatggatccagggcctcagaccaactcgtgtatgctgcctggttgatagttatgtgtctgagaaaatatctggagtccaggttaattgagactgctggttttcttgtgggttcaacctcctcctcggcttcttccagcttttccctagtgcaatcccaaagattcttggcttctgtccattggtgaggtgtaagtacctgcatctgactctttcagctccttgctggatctcctgtctctaagcataccatagcatgagtaatagtgtcaggccttggagcctctccttgagctggatcccaacttgagcctgtcactgaacttcctttcccccaagtctcttctccatttttatctatgctgtttgtagtggctattcctggttgtcaacttgacaatatttggaatgaactacaatccggaattggaaggctcaccagtgacccttatctggaggcttggagatccttatctggatcttggtttgaagatcttgagccatagtggctatggattccagaagattgaatctcagagtttaaggaacacgcctttaatctgggctacacctttcatctgggattaaaggtgtggtggaacacacctttaatctgggctacaccttctgctggagacaatataaggacattggaagaagggagtctagctcttgctcttgctccttcgcctgcttgctgcgtgagactgagtaactgctagatccttggacttccattcacagctgcgactgaaccattgttggaaattgggctgccgactgtaagtcatcaataaattcctttactatctagagactgtc

SEQ ID NO: 803 - DNA, 1200 bp, mus musculus
tgtccgcttggtggcgatcaaggtctttccctaatttgttccatgatgcaatagtaagggaaccccactctgtccacttccttcacaaaacttcttaggatcttggttccaatttttatgccacatcgccctagaacggcctcaagtgtaggaatgactgattgtgatgatcccatagcgactgcagcttatctatgtcagtcttacaaccgccgagaaaatgaaagtaaacacaccatgcctgcggcttatctgcgtctgtcttatgggcagcgacttacacacaatgaggcccacacaccattcctttatctacaggaggtttatggtggagtcccagagggtgttgccgctcatatacctaggacttacagacaccgactgggtcaacaaaaaccaccgtggaaacagatgactaagagaatcaggacgaggacgacaaacatcacagcaaagatcaggctgaaccgttcagaaacagacatgcctctcctaacttacctccctgcagttctgaatcctccttgtatccaaggggtcttgttaggtgctaaggatgttgaagtctatcccgggttttcagcaccagatgatgtcccgcgctacctcccgccagcaggattaacagggcacacaggattcttctgcagtaaagctttaatgtgtcttgagagggagagcatcagcttacagagtgaagaccctgaatggcaaaaccccgtcccttttaaggagaattatcctcagtctcggatgtgtcgctccctgattggctgcagcccatccgccaagttgtcgtcacagggaaggcagagcacatggagtggaaaactaccccggcacatgctcagattacttgtttactacttagaacacaggatgtcagcaccatcttgtaatggtgaatgtgagggcggctcctcacagaacaacaatatgaactaaccagtaccccctggagcttgtgtctctagctgcatatgtatcagaagatggcctagtcagccatcagtggaaagagaggcccattggtcatacaaactttatatgcctcagtacaggggaaggacagggccaagaagtgggagtgggtggttgggggagtgggtgggggagcatgtgggggacttttggatagcattggaaatgtatatgaaatatatacccaattaaaaaatttaaaaaaaaagaaagaaagaa

SEQ ID NO: 804 - DNA, 1000 bp, mus musculus
gcgccaccaggctgggcttgaatgatttgttaaaagcaatccctttagactatgaaaactttggtttttacttaactcaatcgaatttatctggaaaatttacaattattgtttttcatcattttctttctttttattaatttatgtattttacttaatcattttccatcctgctcactgctgccctctctgccaacatctcccacaatccttccctcatacccccttctcctctgagctgctggggccaagctgggtatcctcccatcccccaccctgacactttatgtctctgctaggctaggtgtttcttctctcactgaagccagacaaggcagtccagctagaagaacatatcccacatataggcaacagcttttgggataggcaacattccagttctttaggaactacataaaggccaagctgcacatctgttacatatgtgaggggagtcctaggttcagccagtgtatgttcttttgttggtggttcagactacctgggataaaggaagcacccagaaatcagtggggatacttttagctgtaactcacaacagcgggatatggaacctgaaaaatccacctcctaagccagacaagaatcccaatggaacaaaagagacaccaacccacacagcaaacatttaaccctgaatatatcctgtttgtaagtgatgcagatattgggggatgaagcagagattgagggaatgagcaaccaatagctgtcccaacttgatacccatcccatggacaaacaccagtatctaatactattaatgatatgctcatgtttgcagacaggagcaagtgtactctgtgagacagcacccagcagctgactaaggcagatatagacacacatagccaaacagtggatggagcttggagactcttatggaataagagtcaactaatcaaaaggatgttaacatagacataacatgataaatgaggaaatttcagaaaaatgaaacattaacttcttactatct

SEQ ID NO: 805 - DNA, 1400 bp, mus musculus
agcaagttatattcttgaactttgtgagttagggaacgaagctctccatagacagtgcttccagagtttcacattctgaaggaatgtggaagagtctccaaatagagcactcttgtgtgtcagctcatcaatgtcttacatagcacactaccatttgtgacttggttgggaaggcaggctagcagaagtttttgcaggctggaagtctggtgttcagatttcattacacatttcacgctcagggttagcctactttgatgtgttatctgtgtttgctttctctcccctgtccagttcttgctgagtttttagatggcacacctgtgtgacattcactggtagagacaattgacaatgatccacatggacaggtgagcatagcgccagtcacggtggctgccagaagtcctacatgttagatgttcatttgttgtaatgtgtctgcaggtaacgcactggcagagacacataagggtaatctactctgtgacactggttattgtgagcaataaagttggctccatcaacaggcatccaaaactgtctgtggtaggaattctctggcatcagatcaaagctgatcagtccctgggtcagggattcaggaagaaaagattggtctctggaacagaagccctaggcttcctcctttccttcattacattcatcccatcaacactctgctttctttatttcaaagtgtaaaatgtggaatgcaaaataagattggcttaagttgggtgttttatattattttctgtgctttattttctcaaaaggctgtggatttgtgggtcagaagaacagtatgaattcatgtatatagggaagatcagtttataactatcagtgattgtctccataaggagtgtgtccttggaagtttcatcaaaatcaaaatgtagaacacctcctgttgatgggaaaagggaggttttatactggtttttgtttgtttgtttgttttgtttttttattgttcatcaaattatatactaatagaaacttataagaaaaatgatttaacctctagtctacaaatggatgcttgactagtaattcagattcctaatctcaatcactcagaaggcaaaggcataaagagcagaagagccaagacctgcctgggacaatcaatgactttaagcatagcatgggtaaataaaaagtgtgtcaagataaaaagtgaacaagaagctgtatggtagaacagtagaatgcatagggtgtttatctagcatgagtgtaacttagtctccctaccctgctacaaaagaggggtgagggaggggaagaaggaaggaaagaaaagattattcaaatggagccagaatctaactttcctactcaaatggcaaatagaccaatgtgagctgacatagccagttaaatttagagac

SEQ ID NO: 806 - DNA, 1000 bp, mus musculus
gatattatcatctgcgtgcaccaccacctttttgaggaattgtcaagatacaagcacttaagcagcttaagatacagagcttagtactctggtgctgcctttctcacctagtataaagaagcaatccatacagcaagtacatcggaaagccctgtataagcattctttattaggtatttcttcatttctcaataatggagtcacaacatctgtggagacttggctatctcatccagaatgaatcactgttccccacaataccaggaatgtcgagattctccggaatctttatggatgaacaaaagctaatgattgtatataccagatttttttttttttttttttttggacagggtttctctgtatagccctggctgtcctagaactcaatttgtagaccaagatggcctcgaactcagaaatctgcctgcctctgcctcccgagtgctgggattaaaggcctgtgccaccactaccggacatatagcagatttctatatatactagaactttggtgcaaagaataactgtcatggtttctaaaatactacgtgaataaaaggttcatagaatctgaattaatttgtgtatagcataaactgggctaagcatacatagtataagatgccttgtcatgcaaaatagccaaaaacatgagccatctgcttcatagaattcaagggaaatgattgaatgatagtactgaagtagtggcttgttggacaagtatgtctctggcagaatccagtggcatcccttgatttttccagccaatggtactttaaaacatttcttcatgttaaccctatcacactgaaataacttatcaggacttgataagacattgagtctgagctgggcagtggtggctcaagcctttaatcccagcacttgagaggcagaggcaggcagatttctgagttcgaggccagcctggtctacagagtgagttacaggacagccagggctacacagagaaaccctgtctcgaaaaacaaac

SEQ ID NO: 807 - DNA, 1000 bp, mus musculus
ttcctaaattcctccatcatcatcatgagaagtgactttagatccatgtcttgcttttctggtgtgatggtgtatccaggacttgctatggtggagagtttggttctgatgactcaaagtaaccttggtttctgttgcttcttttcttatgcttgcctcctgccatctgattatttcaagtacttgctgtcctcaatatatctgattggagcctgtccttcctataatctcagttgatttaggactcatcagattctatctttctctgtgattctttgattgtgggctcctgtgaacctgagattctggttatgtcagaattcttggcagtaaagttcctctgagaccatgaaatactggtccgacccagctcctgttattctgggatactgttgtcctaagatcctgggtgtgttacagtggtgtctcctttgaggagcgtggagctgtctggtcagtggtcataagattacgtggagtgtcctctaggaaccttgggggtgtctgccaactctgtgtccaaggtgaccctgtactggagccaactggaagggactcgtgtccctggtcaggccagttttctgcttccctaatgctttctcaggtcccgagcaattgtattggaacagaagttgagttccactcaccagtggtcctaagatcgtgtggagagtcctctagggactgtgggggtgtctgtggactctgcacccaaggtgacctggtggtggcaccaattggaagggacttgtcagcttttcaattttatgaggtcctattgatcaattcttgatcttagagtgtaaaccattggtggtctgtttaggaaaaaattccctgtgcccatatctatgaggttctttcccactttctcatcagttagattcatcacatctgcttttatgtgaaggtccttgatctacttggacttgagctttgtacaagaagataagaatggttcaaactgtgttcttatacatgctgagagctagttgaacca

SEQ ID NO: 808 - DNA, 1000 bp, mus musculus
ccgagttgggacagggactcctcaccaactgagggcctctctcttgctcagtatacttgctggggtgggtggtccagggttttttactccttggaggccatgtaggccaggaggtccaccaccctgtttctgtagccatattcattgccatgacaggaaatgagctttacaaagttgtcattgagagaaatgccagccccagaatcaaaggtggaagactgagatttgctgttgaaatctcaggaaacaacctggtccccagtgtaaccacgtgatgccctttagtgggccctcagatgcctgcttcatcaccttcctgatgccatcagacttggcaagtttctccaggaggtgtgtcagatctacaacagatacattgggagtaggaacacagaaggccatgccagtgagctaccctttcagctctagggtgaccttgcccacagccttcacagcaacagtggatgcagtggatgttctgggcagccccaatgccatcacgccacagctttccagagggaacatccacagtcttctaactggcagagatggcatggaccatgttcatgagcccttctacgatgccaaagttctcatggatgaccttggggggggggggggcgctaagcagttggtggtgcaggatgcattgctgacaatcttgagtgagttgtcatatttcttgtggttcacatccatcacaaacatggggacatcggcagaaagggcagagacggtgacccttttggtcccacccttcaagtgggcccccgccttctccatggtggtgaagacgccagtagactccacgacatactcagcaccagcatcaccacgtttgatattagcaggatctcgctcctggaaggtggtgatgggcttccggttgatgacaagcttcccattctcagccttgactatggggttgaacttgccatgggcagagtcagactggaacatgtacagcatacggttgaggtaaatgaacgggtcgttgatg

SEQ ID NO: 809 - DNA, 1200 bp, mus musculus
agaaaaatacatttcttctcatatacagaacttaaatttaaaatggtgcatacgtgaatgtatgtgcaggcatgtacatttgaaagtcataaataagacgagggtaatgaagaagagaccttaagggggcaggaaatagagtaatggaatccatataataggaaagcagaaggactaaggggaagaaacagctgtagaagggaaggccacaaggagaaccagtgaagaggataataaatgaaaccagaatagtgacatctacatgtgaggatatcgtgatgaaaaccattgctatgagtgctactttgaaaaaaaaaaaaagtcaaaatggaaaacattctcagttccactcttccagaggaggaaaaattagttacatactatgtatgctctttttgtaagtagctttgaaaaggcaaaacagaagagtataaaactaaaaatcattccactacacattccatgtgtaaatacagtctgtacttcctgtttgtaattattggatatagactttcaaaggcctttgcatcatcggtcatgagtgctatgagcaggagcatttaatcataagaggattaactatccttgaaacatctttttcagagctcccagggactaaaccgccaatcaaagaaaacacatgatgggactcatgactctagctgcatatgcagcagaggatggccttcttggtcatcaatgggaggagaggcccttggtcctgtgaaggctctatgccccagtgtaggggaatgccagggccaggaagtgggagtgtgtgggttggtgagcagagggaggagagaagggatagagggtttttggaggggaaaccaggaaagggattaacatttgaaatgtaaataaagaaaatatctaaaaagagagagagagagggagagagagagagagagagagagagagagagaggaggttaaaaaaaaggaaacatcttttaacctagaaaatgcagaaggtaaatgtttgtatgctgcgagcatttgaaggaaaaatagccaaacttgaatttagaagtgtggcaacaaagagttatgatatagaagcttttgatggaccactagctcaagggagatctaacctttgaacgttgatatcatctataatctttgaataagatgatttagtaaaactcactcagttatgcttgaagacataactcagtattagggcacttattta

SEQ ID NO: 810 - DNA, 1000 bp, mus musculus
tttccacccacacagtaacattttaggagaagaattggatagagaccaaggtctgtacaaacttctgaacaaggaaacactgcatacttcctggttggcaaaagcaccattgtgctagttacctgaggtaacttggagactgcctccagcccagacctggagggttatttcttctagtgtggtagtcaccagctgtgccctttgtgataaattaggaaacatcaataaaatgtctccctggtgtcagtgattgcagcaaagatgggagctaagatagagttgtgagagctataattttgtagccagttgatcaaaagtacagctgggggacagaagtggggacaggtagcaaccacatgatacttcacaaccacctgtaatgggacccgctgccctcttctggtgtgtatgatgacagtgacagtgtactcacataatcaatcaatcaatcttaaaaaaaaaagtataaaaaataaagtacagctgggctgggattgagaattgttttctgaagtagaggttgcttgtcggattggatcttttaacttatggactaaaactaagattgtgacacatcagggctcaattaaaataaactggagatgttggcaaatgggagacatagttgacattagaaaacactggcacataggggatggttcaaagttaatagtagattaaataaccaattctgataattattttctgctctctaataaagtactaaaaaaattaatttcacagtggatggatcatggggactcttatggaagaataggagtaaggattatagctccaaaaaggataggaactcctcaggaaggtacaacagagtcaactaacctggacccttggggctctcagagactgaactaccaatcaaagaacacacacaggctgtggcctccccactcatatgtactcagggggtcccctacccactcagaggagaacgggagaggggatggaaaaagcattgtgggaggggggtgatcgagag

SEQ ID NO: 811 - DNA, 1000 bp, mus musculus
aaccctctgcttcctgatgttgtcttctatcttgcttctagaagagcttcagaaattactactgattacagatgatcttgcttcatccaaactagatagatctagtgagaatttcatacaagccttgagactcctaaacatacagagattgtgtgctcttcccccagccttgagttggctaaacaagactcctccgatgctggagccagcctcccaacatttacatcttcctgcctgagaagtgagcaactacctgcccgctgagctgctgaagagctagcttgttttgaaacagaatccagctgacacaaagcaacagaatccagccagaacaaaggatgggcttttgggtttccccctataaattcagagttaaaaaactaaacattgagccttggtcagagaacttttgtagccgcctgtggccacacggactgggttcccgagtggaaggccggagctgtaaatgagggaacagcgagagaagaaacgagaccaacacaaagtgctgatcaaggtccagtgtttacaagcagtctgtgcttataaagggggaaagcccatctcccgctgatccactcttgttgcctgtcgccagcctgtaagcaattaggttgacagcactagttcggcagtaaggtgtcaggcgccagttgctggttgtctcaggaatttctcaggaaggcagattcagcttctcagcaggtagcagcgtcttggaatagagcagcagcaggtgacagacaataaagccatctaggtaggaaggctccaccccaggtggtcttattcacagtggcagacaggtggtcttattcacagtggcagacaggtctgaatcgggcctgctcaaggctgggagaggctacaaactttgtcttggcttattgtttctctcatctgcccattctattccatccccagctcttcttccagatacacccggttctccatggccactggacagttacaaaattggataactgatgccctattagct

SEQ ID NO: 812 - DNA, 1400 bp, mus musculus
tctccatggtgatctgtatctatcatcccttctatcattgttattcctttcttagcctgttagtttaaggacattagaagcccaaaatgaccaagggaaaatcttagcttccagttcaatggaatgcttgttgtggattctgataggagtattcgcccttccggatccaaagctcctatgccaacaggacctaggattgtgaggaaaggaagaaaaactttcctatagggttactaggagtgatagtgagtgtaactattcctttttacacaccttgattcccagacctgtggatcctggctatgagagacactttaccatataccagaagctgatgcaaaacatatactttcttctgaagaattctgcccagccctccatgctgttgctacgtcattagcactgtatctgtgtctacaagaggccattccatctttctatcatactagatgcttcaggatggtggggagcattgtagataagaccaacagactccatgattattgacccagagtcacacttctgtgaaatgagttcattggtcagaagcaatactgtgtggaataagatgacagcggataaggtattctgtaagtccatggatggtggtttggggagaagcattaaatgcaggaaagggaaatccattaccaaaataaatatgtacttcaataagaagagactgttgccctgtccacagaggaagtggtagaatgtaatcaacctgccaacaggttgctggctggtcacctcaaggaatggcatcatatctgggattcagtgttggtctctgctgttggcagatctgacattcagcagcagctgtagccaggtcaaccttggtaagtgtaagtcaatattgttgagctttacccattcggagagatctatttacatactaattacccaaatgtctttcctcacaaattttccaatcatgatcttcctaagtccctaaccagccagccaatccattggctatagcccatgaggcactgaataattgtacatctgaacccttcttcttccaaacaaagtttaaaaccatttgtactgcctggacttctgtccactgtgaagattttctttcacctgtatttttcaggcttgtcccagataggggttgtaatgctggagctgtccacttctgggtagcacgtacataacattcagaaaagtcagtaaaccaagtcctggaattctcctctttggtcacccaatcagagggactagaggtgcatgcttgacagccgatgacattgtaaaaggggtagaaaccataagcatttgaagagtatctttatgtaacttccttgttccagcaggacctgctgggcttgattgcatatacagtacttccattagctaatagactaccagtgtgcatgtcctactttata

SEQ ID NO: 813 - DNA, 1000 bp, mus musculus
aaaatggaaaaaaaaataaattaaaaaaaaaaagatcaggtaaactatctaaacaggaccatatcatacaaggaaatagaagaagtcattaaaaacttcccaactggactccaccaaaagtagtctgcacaggtgagagtgtgccctacagacgctaacagcttctgggatgggcgggagccacagagcttctgaggcagcgcccttttagggctccagacatccggccaccttcccggccagagaacatgtgtccaccctgcccgggaggcttttgcctcaggatcggcgggagccatcttagttccaggactccaccaaaagtagtatacacaggtgagagtgtggactacagaagctaacggcttctgtgacaggccaaagcaacacagcttctgggaaaggtcctgttttgggccttcatcttcagccaggaggaggtctgaacaccagatatctgtacaccttccatgtaagaggagagcttgcctgcagagagtgctctgaccactgaaactcagaggagagtgcttgtctcccaggtctgctgacagagggtaacagaatgaacagaggaacaatctctaaacagagacaactataaaaactaactccagggattaccagatggcgaaaggtaaatgtaagaatcttactaacagaaaccaagaccactcaccatcatcagaacccaggactcccacttcacccagtccagggccccccaacacacctgaaaagctagaccaggatttaaaagcatatctcaagatgatggtagaggacatcaagaaggactttaataactcacttaaaaaatacaggagaacactgctacacaggcagaagaaattaaagaggaaacacaaaattgccttaaagaattgcaggaaaacacaaccaaacaagtgatggaattgaataaaaccatccaagtcctaaaaagggaagaagacacaataatgaaaacccaaagtgaggcaacactggagataaaaac

SEQ ID NO: 814 - DNA, 1800 bp, mus musculus
ttttttttctctatttgtacagttgccatgggcactcttttcttagtgctctttccctactgctattaatctgcctttccatgggtccaatatcaagtggacaactgatggatcataagatataaaactataaatcatctctttattagctatagaaattgtattcctaataattttattatcaggaagctttctaacatagatactggactttgattctaaagtcttgttttatggtatttgtaagcagcttagaccactattttgagagatgatgtaatattagaaagttgaagtgaaatttctggtttctttggagactcagttgtgtcatgtgatggttttctgagagttgtttcataagaggatattttgataaatcagactggtgagaggatactttactgagagaagacatgtagtcttttctagaagttctcgtgtgaaagggcatttgatattttgctggaacagatgcttggcagaacagatgatgttgaaaagggtataagacaaaggaaccctgaccaaccagaagctgggatccattccagttcgggacaccccgccatcttctgcctgaacccagcagaggtcactaaaggctccagagtactctccatgccataggacttcgggatcacaggtgagtggaacacagcatcagctccaaggagggtcttgtgcccacaggaacagggaagaaggaaccccgcccaaccagaggcagggatccattcaggtcgagggccagccatcttctgcatgaacaggccaaggacatctaggaccccagaggactctccatgctacagcacccttagcacacccaggacctcatgatcacctgagagcacatggacgacagaagcaacagagcttcttggacagggtcctgtcaggacttaatcctcagccaggaggcagagctaagacccagacacctggtcaccttcattgccagaggagtgtcagcctacagggagggctctgaacccaggactcaggaattagatcagagctccagacttctggaatcctgacctgaaagaggacagctttcctgcagagagtgctttgatcactggaactcaggtgagaattggactcccaagagggctgacagaggctaacagaatcacaggaggatcaagctacatccaaagacagcttgaacattaacaccagagattaccagatggcaaaaggcaaatataagaattttactaacagaaaccaagaccactgggcatcattaaaacccagtattcgagtcctgaataccccaacacacctgaaaagcaagatgcagatttaaaaccatttctcatgatggtggtagaagattttaagaaggaaattaataaagaaatacaggaaatacttaaagaaatacagcagaacactgctaaacaggtaaaagtccttaaagaagaaatacaaaatcccttaaagaattacataaaaacacaaacaaacaggggatggaattgaacaaaatcatacaagatctaaaaatgatagtagaaacaatgaagaaaatccaaagggagacaactctggggatagaaaacctaggaaagaaatcaggaagaatatatgtgagcatcagcaagagaatagaagagatggaagagagaatgtcaggtgcagaagattccatagggaacatggacacaacagtcaaagaaaatgcaaaatgcaaaaagatccaaactcaaaacatccaggaaatccaagacacaatgagcaaaccaaaactacagattataagagcagatgagaatgaagattttcaac

SEQ ID NO: 815 - DNA, 1200 bp, mus musculus
caccaatccctgactatttcaacacagctaaatcataacaaaaatgatcataggtcctgaacaacttggaataccaggggaacctccattctgcatccacctctcacactaccttcatcagtaatgcaggtcctgagccatataggtaagcttccctttacagttccatcttcactgcttgctgagccctctgttctaagccaagctgtaatgacaagctggtatttcagggagacctccattcagctgccacctctcccctcaccttcaccagacctccagatcattaaccacacagataagcttcccttttcccaccaatcatgccttctctctgaatcatttgggctacaccaagttgcctaaacagtctgttatcccaggggacctccattctcctgtcaccattcctcctaccttcatcagacatgtgacatctgaaccatacaggttacctttacttcacatacccatcattcctgaaatctgagccctctgggctaagccaagtgctcttgatcagcttgctagcccaggtggaacattatttcttcaccacctgccctccactttcatcagactcctgaggaatacatgtaagcttcctttagaacactcatcattcctgatctctgagccctctggtccaagccaagctccaatgaggggcctgctggcccaggaggactttcatttttctgccacattaaaggcagctctctggctacattcatcaagtcctgcagctcctgtactgtatagacctgcagattcagaaccacacaaccaaatgatatccatcagtggcctatcacatcgggaccattgatgttcaccccctcctaatacatactacaacaagaaaatccaggacaaaaaccagacagatgacgactggacttttcaagaacatagtcaacaaaagcaagggcaatatgccaccgccaaagcacagataccccaagaacgcaagccctgtgtatcataacacaactgtaacacaagaaaatgacattaaatataatattataaagatgatagaggtcataaaagagaaaattaatagatcccttaaagaaatagaggaacatataatcaaatggatagagctctttaaagacaaaacaaacaagttgcttaaaatatatacaactaaacaagtgcagaaacttatttgaagagctgtgcaagacctgaaag

SEQ ID NO: 816 - DNA, 1600 bp, mus musculus
tctcaaaccaaatcctggaacacattaaacacattatacaccaaggttaagtaggtttcattccttggatggaatgcagggatggtttaagatatgaaaatccatcaacctaatccaccatataaaaactgaaagaaaaaaaatcacataattgtctcattagatgctgaaaaagcctttgataaaatccaacacccctttatgttgaaggtattagagaaagcaggcataaaggaaacatacctaaacataatcaaaagaatatatagcaattcaatggccaaatcaaattcaatggagagaaatttaaagctattacactaaattaagggacaacacaagacttccaactctctccctacctactctaggacttgaagttctagctaaagcaatacaaaaactaaaggagatcaaggagatataaactggaaaggaagaagtcaaagtatcactatttgcagatgatatgatagtatatataagtaatcccaaacttttatttgatcattcagaataatcaaatgaatttatttcttttttttctgtaaattatcttcctttatttattagatattttctttatttacatttcatatgtaatctcctttcctagtttcccctccaaaacccacctatcccctccccgctgcccctgctcaccaacccacccactcttgcttcctggtactagcattcccctacattgaagcatccagcattcacaggcccaagggcctctcctcccatggatgaccagcaaggccatcctcagttacaaatgtagctgaagtcatgggtccctccatgattactccttggttgatggtttagtccccaggagctctgggggtactggttggttaatactgttgtttcttctaggggattacaaacccctttatctccttggatcctttctctagctcctccactgggaaccctgtgctcagtccagtggttggctgagaggatccacatctgtatttgtcaagcaacagcagagcatttcaggagccagctatatcaggctcctgtcagcaagcacttagtacttaaagtcaagccagagcaattagataacaaaaggaggtcaaagagattcaaactggaaaggaagaagtcaaaatattactatttgcagatgatatgatagtatacttaagtaacacccccccctcataccacaaactttctaccaggatctcctacaggtgataaacagcttcagtaaagagtcgagatacaaaattaatgcaaaaaatcactagctttccttcacacaaataataaatgggccaagaaataaattacaaaaacaacaccctttccaataaccatgaataatataaaatatcctggaggaactctatggagcaagtgaaagatctgcatgacaaaaacttaaggtccttgaaggaaagagtgaaggagatattaggagatggaaggatcacccatacgcatggataagtagaactaatatcgtgaaaatttacattttcctgaaagcaatctacagactcattgcaaacctcatcaaaaatccaatacaattttgaaaaaaaccttgaaagagaaattctcacctttatatatt

SEQ ID NO: 817 - DNA, 1800 bp, mus musculus
cctcttgagttcatggaagtgagaaatttatggatggagaatagaaatgcaattgtttgaatatgttctttagttctccatgtattttaatgacttggtccctagaacagatttagtagaatattgtgaaacctttaagggaagagattggggaagtctcaggtggcttgtgacattccttctatgggtactgtggttcagtgttccattttttttctctatttgtacagttgccatgggcactcttttcttagtgctctttccctaatgctattaatctgcctttccatgggtccaatatcaagtggacaactgatggatcataagatataaaactataaatcatctctttattagctatagaaattgtattcctaataattttattatcaggaagctttctaacatagatactgcactttgattctaaagtcttgttttatggtatttgtaagcagcttagagcactattttgagagatgatgtaatattagaaagttgaagtgaaatttctggtttctttggagactcagttgtgtcatgtgatggttttctgagagttgtttcataagaggatattttgttaaatcagactggtgagaggatactttactgagagaagacatgtagtcttttctagaagctctcgtgtgaaagggcgtgtgatattttgctggaacagatgcttgacagaacagatgatgttgaaaagggtgtaagacaaaggaaccctgaccaaccagaagctgggatccattccagttcgggacaccctgccatcttctgcctgaacccagcaggggccactaaaggctccagagtactctccatgccataggacttcgggatcacaggtgagtggaacacagcatcagctccaaggagggtcatgtgcccgcaggaacagggaagaaggaacctcgtccaaccagaggcagggatccattcaggtcgagggccaggcatcttctgcatgaacataccaagggcatctaggaccccagaggactctccatgctacagcacccctagcacacccaggacctcatgatcacctgagagcacatggaagacagaagtaagagagcttcttggacagggtcctgtcaggacttaatcctcagccaggaggcagagctaagacccagacacctgggcaccttcattgccagaggagtgtcagcctacagggagggctctgaacccaggactcaggaagtagatcagagctccagacttctggaaacctgacctgcaagaggacagctttcctgcagagagtgctttgatcactggaactcaggtgagaattggactcccaagagggctgacagaggctaacagaatcacaggaggatcaagctacatccagagacagcttgaacattaaaaccagagattaccagatggcaaaaggcaaacataagaattttactaacagaaaccaagaccactgggcatcattaaaacccactattcgagtcctgaataccccaacacacttgaaaagcaagatgcgaatttaaaaccatttctcatgatggtggtagaagattttaagaaggaaattaataaagaaatacgggaaatacttaaagaaatacagcagaacactgctaaacaggtaaaagtcgttaaagaagaaatacaaaatcccgtaaagaattacataaaaacacaaacaaacaggggatggaattgaacaaaatcatacaagatctaaaaatgatagtagaaacaatgaagaaaatccaaagggagacaactctggggatagaaaacctaggaaaaaaattagga

SEQ ID NO: 818 - DNA, 1000 bp, mus musculus
ctctattgattatggaccaaacaataccataatatgataagacttttgctacgtggagggtcccaaactccccagaggaccctccacaccgcaggcacactagcacacccaggatcttgagttcactggtgagtggaacacaacatatgttccaaaacacatggagggttttgtgccagaaggaacagggacaaaggaaacccattcgaccagtggctggggttcattcaggatggcgccagctccatgccatcttgggcatgaactcaacaggccctagcacacccaggatcttgggatcactgagaccagtggatgcaggagaacacatgggcaacagacataaagagaatcttggacagggtccctttgggccttcattctcagcaaggagttggagctgagacccggaaccctgggcaccttctccatcagagagttggcctccagggagggctctgactccaggaatcagaaggtagatctgagctccagacttctaggcaccttccctgcaagaggagagtttgcctgcagagagtgctctgaccactgggactcaggagatagttgaactcccaggagtgctgacagaggccaacagaatcacaggaggaacaagctccagccagagacacctagagcatctaacaccagagattacaagatggctaaaggcaaaagtaagaatcttactaacagaaaccaagacaactcagcatcatcagagtccaatactgccaccacagcaattcctagacaccgcaacacacccaaaaagcaagattcaaatttaaaattatatctcatgatgctggaagaagaatttaaaaaggacattaataactcacttaaagaaatacaggagaacactgctaaagagttagaagtccttaaaaaaattataggaaaatacggctaaagaagtagaagtccttaaagaggaaacacaaaattcccttaaagaattacaggaaaacacaaccaacaggtgatggaa

SEQ ID NO: 819 - DNA, 1000 bp, mus musculus
tcagacccaaaaagacatgcaaagtatgtattcagtaataagtggatattagcaaaaaaaaaaaaatagagaatacccaagatacagtccacaaaattcaaacagatggacaaactgatggacccatgtgaggtagtctcagtcccacttgggagggagaaacagcaatcacaagtgtggagggaaagatggatctgggagggaaagtagacagtgtggaagaagaggggaccctgatcaggtattgggtgagagagaaggagtgaagccctgagggccagcagaaaggatagaaacaggcaacctcaggaggtaagaggttgagtagaccctccagaatgcaccggagacctgccaagtgagagattcttacaaccttagatgaaatccccgacagtagggagagggaaattatagattccacctcccactggaagacagggcatcaagtcagggatgctatcccaccaccaaaactctgactcataattgtttctgtttaaaacaacagcagggatggaaatgcagaggagcctgaagaaaagaagttccagcgacaggcccaaagtgggatccagctctaggagaggtcccaaggcctgacactactactgaggatatggagcactcacaaaaaagggacctagcatgactgccatctgaaagacccaacaagcaactgaaagagtcagatgcagatgtttgcaccccaccaatgggcagaagctggtgacctctgtgattgaattagggagaaactggaagaaggtgaagaggggagcgaccccgtaggaccgccgagatctctcaaacactgaaccaccaaccaggcagcatacacagctgatatgagtcccttaacacaaatacagcagaagactgctaggcctgggctcagtcagagaagatgcacctaaacttcaagaaacaggaggccccatggagtttagagttatgtttgagtgggtggtttgtggtggggacatcttcgtggagacag

SEQ ID NO: 820 - DNA, 1200 bp, mus musculus
tggaaaataaatggtcataattaaacattatgcaaaacatatagttgttaataaaggtgagaatatccccattgtcagagtagacctctttattattcagacttacattcaaattataatataaattttgttccaaaattctagcaaaagagatgacttctctaatggaaataattgaaaaattctccctaatatattcaaaatccttcagggaacctacgttttagagtacagaaataaggctagaaaatggacccttctcctttctgaaaatggttattgagtatacaatactttagagtctgttatatgtctaggactcagtgggctcagcaggggctgtggacagaggccctctgcactctgtgcattccagaaccacactagctctcaccttttagtgctcccccaggatgttcccgctatgagaatgattaatcttaactttgtcaataaaggaattgtctgttttgccagagactccctaggacatttgcttcacttgggtctgatttgaacagcttggttgatgagaacagaaatcacacatttaatgtgcggctgtgggtttctgcatttgtttccatcagctgcttggtggagccacacagaagacagttatactaggatcttgtctgtaaacataacggtgtactgttagtaatgtcagggactgtttctttcccatcagatgggtttcagttagagccagttggcttcatttgtccctgaaatcttgtaggtaggatacattttgggttgaaggttttgcaggtgagttgctatccttatcccataactgggagtcctgtcaggcaacagagagtggccacttcaggctccatatcccctattgctaagaatctcaggtagattcacttccatagactccctctggacagacatgccccacccacccccatcctaagtatgaggtcccttgcacagcccagatactccacacccatgtccatggttatttctgttcttgcttccttaaaagtgattgccccgaggcggaagcacagaggcgctgaggcagcaccctttgtgggccggggacagccggccaccgtccggaccggaggacaggtgcccgcccagctggggaggcggcctaagccacagcagcagcggtcgccatcttggtccgagacccgccgaacttaggaaattagtctgaacaggtgagagggtgcg

SEQ ID NO: 821 - DNA, 1200 bp, mus musculus
aatttctatcagagaattcctacagctgataacaatatctgcaacctggctgggtataaaattaactcaaaaaaataagtagccctcctttataaaagtggagaggatatggagaaagagggacactcctccattgctggtaggatttcaagctggtacaaccactctggaaatcaatttggctgttcttcagaaaattggacatagtatattatctgaggatactatacttctcctggacatatactcagaagatgctccaatatgcaataaggacatatgctccactatgtttatagcagccttattgataatagccaggatctcaaaagaacccagatgtgctttaacagacgaatggatacagaaaatgtcgaacatttacgcagtggagtactactcagcaattaaaaactatgaactcgtaaagttcttaggcaaatgaatagaagtagaaaatatcatcctgagtgatgcaacccaatcgcacaagaaaacacatggtatacattcactgataaatggatactagccaaaaagctacaaataagcaggatacaattcacagaccacatgaggtgcaagaagaaggaagaccaaagtgtggattcttctgtccttcctagaagaacaaaatacatacaggagcacatatggagataaagtgtacagcagagactaaaggaaaggccacacagagactgtcccacctggggatacattccatatacagtttccaaacccagacattattgtggatgccaagaagcacatgttgaaaggagcctgatatggctgtctcctcagaggcctggccagagccttacaaatatacaggcagatgttagcagccaaccattggactgagcatagagtccctaatagaggagttttagagggacttgaaggggttgaaggggtttgcaaccccataggaagaacaacaatatcaaccaaccagaactcacatggactaagccatcaacaaaggggtatatagctccagctgcatatgtagcagaggatggccttgtcatgcatcaatggaagcagaggtccttgatcctatgaaggctcaataaatgtgtcaatgtaggagaatcgagggtggggaggtggaattgggtgggtgggtcgaggaacaccctcatagaagcaggggtagagaggatgtgatagggtgtttctgggagaaaagga

SEQ ID NO: 822 - DNA, 1200 bp, mus musculus
ttgtctttctgggtctgcattatctttctcttgttgactattttataaccttacctttgcctgcaaatttaatgatgtcattatttttttagtgtgacacttcactttattacttagaatgttctgtaatcaaatctttttttattagatgttttctttatttacatttcaaatgttatcccttttcctagtttcccctctgaaaatcccctatcccctccccctccccctgctccccaacccactcactcccatttttggccctggcattcccctatactgggccatagaaccttcacaggacctggggcctctcttcccactgatgaccaactaagccatcctctgttatatatgcagctagacccaccagtcacacagtgtgttttctttggttggtggtttaatcccaaggagctcttggggtactggttagttcatattgttgtttctcctatggggctgcaatccccttcagctccttgggtactttctctagctacttcattggggaccctgtgctccgtccaatggatgactgtgagcatccacttctgtatttgccaggtactggtagagccactcagtagactgctatatcatgcttctgtcagcaagctcttcttgacatctgccatagtgtctgggtttggtggttgtttatgggatggatccccaagtggggcagtctctggatagttgttccttcagtttctgctccaaactttgtcactgtaacgccttccattggtattttcttcccccttctaagaaggattctgtgcttctgggctaatatccagttatcagtgagagcatatcatgtgtgttcttttgtttttgggttacttcaattaggatgatgtgatagtttggatattcttgcaccagagagtggcaccatttcaaagtgtggccttgttggaataggtgtgacctggttggattaggtgtgtcactgtgggtgtgggcttaatactctcatcctaggtgcctggaagtcagccttccactaacagtttttgggtgaagatgtagaactctcagctctgcctgtgccatgcttgcctggatgctgccatgctccctatgaattgcctatattatgcttagatatgaccattgtctccttaatcacttcacaacattgatcatgaaaggttagaatattttcaaatgatgttttcagcacctaatgag

SEQ ID NO: 823 - DNA, 1400 bp, mus musculus
ccaaactctagatagaccagagactatctagaaaatcacaaataccactggtctaaacaaagagaaataataataatacaatgaccccttattgatattctgttatattcacagatcagtgccttatttagccatcttcagagaggtttcctcctgcagcatacaggaacaaatacagaatatgcagagaagcaggggaggaagaggggaagaaagttcggaacatgcagctcactaggaggtgtctgcttcaaatccctcccctcagagcacagagaacctcaaaaggcaacaaaagagaacaaggccctcctaaaactcagacttacacagcaaacagtgttttctgttcagtactttttttttttcgagacagggtttctctgtgtagccctggctgtcctagaactcactctatagaccatgctggcctcaaactcagaaatccgactgcctctgcctccgaagtgctacgatcaaaggcttctgtttagtagttttatggattcactgcatatgggaatgagttggtctttgattctttatttttacactccatattttgtcatgcccccccccaaactaccctcctactgccccacatctcacacctcaccaccaacccctctctccccttggatgtccccacccccatcccacttgaccgctaaactccgtgaggccttcaatctcttgagggttagatgcatcatctctgaatgaacacagacctggcaatcctctgctgtatgtgtgttgggggccccatatcagctggtgtgtgctgcctgtttggaggtccagtgtttgagagatctcggtggtccaaattaattgagattgccatcctcctcagcttacttcagtctttccctaattcaacaacaggggtcagatgcttctgtccattggttgggtgcaactacctaccagacactttcagctacttgttgggtcttccagagtgtgtggtcatgctttttgtgagtgctccatagactcagtaatagtgtcaggccgtgggacgtcccgctgaactggatccctgttctggcctggcactgagccttcttttcctcaggctcctgtccacttccatccctgtaatacacacatgtccgtttggttctgaattaagtcaatcagggtgatatgttacacttccccttggagctctcttatttttcttttggcttagcttctccgacttcggtatgattttttttttattttcttatattttattttgtcatattttgttgtcttttcgaagcctgttcttttctaaagacagaaatggagtggttctggatgggagatgaagtagggagaaactggggggagtagacggagggtgaactgtattcagattatattgcataagaaaagaatcgatgttt

SEQ ID NO: 824 - DNA, 1400 bp, mus musculus
aatttcataatttaatttttcttagtagctgaattatatatttttctctttaaatacagctggtttcacttgttcacaccgatttgtagacatctagtttttttgttttgttttgtttagctttgtttccattacctcgctattatggatagaacaacagcgaagatggatgagaaggtaccccacagtaggtgatcccttggctatatcaccaagaataatatagctggattgtgtggtaaatcttcttattttctgttttgtttttattcattcattcatttgattttggaatttctatattaatttcagtagtgggttttcattgctagcaccagcgaataagtgttcccctgtccttatatccatgccaatatttgtcatcatttggcatatatgagtgtgtgtgtttgtgtgtgtatgtgtgtatgtagcatcattataactgtgataagatgacatcacaaattagatttaatatgcacttagtttatatttctcactgattttagtgtcatctttgtttaattccatgcccatttggttgggttgtctggtttataatatttagccttctatcaaaattatagctggtaaagaaaaaaaatcttgacccaggagtgtggacacacccaggcacacaggtgagaccaccattatgacaccaatatatgacctgactaggacctgctcagagcccaagggactcagataactccatgcagcaggggacccaatccttccactttccatccacactatggaccagaacctgtgctacaggcttcaatacccaagtccctctgagagaaaacttaaccccaaaagtgctgacaaaccaagactcacaggcccacagaaagagcttgaccttcaggagttctgacacacccagactcacagactcacagaagaacgtaggatccagtgacaatctgcaaggacaactatcacctgagaaaaccagatggtaaaagacaagtacaggaacataagcaacagaaaacaataccacttggcaacatcagagcctagttctcccaccacagaaaaccctgaatactccaacacacctgaaaagcaatgttctgatcttaaaaaacccatctcaagaagatgatagaggactttaataaggaaataagcaattcccttaaagaaatacaggaaaacagaggtaagaaggtagaatccttaaaaaggaaacacataaatctattgaaaaaaatataggaaaacacaatcaaacaggtgaaggaattaaacaaaaccatccaagatctaaaaatggaaatagaaacaataaagaaaccatgaagggagacaattctggagatagaaaacctaggaaagagaacaggagtcacagacacaagaatcaccaacaggatacaagaaat

SEQ ID NO: 825 - DNA, 1200 bp, mus musculus
gagtctcaggcatagaagatatgatagaaaaaattgatatatctgcaaaagaaaatgttaaatctaaaatttcctgacacaaaatatccaggaaatctaggacactatgaaaagatcaaacctaagaataataagattagaagattttcagctcgatggtccaaaatagatttttaaaaagtcacaaaagaaaatttcccaaacctgagtaaagacatgcctataaacatacaaaatatttacaaaatagaggaatagaaaagatcatcgtagttctggtcagcgccagcctggcacaatcttgggcttgaaatcagcaggccctagcacatccaggatcttgggatcactggtgagtagaatgcaacatctgttccaaaaaaatcccggaaagtcttgtgctaacaggaacagggacaaaggaaacccaccaagcagtggctggggttcatttccaactgtgccagccctgcaccatcttgtgtgcaaacttggtggagggtcccaaggtcccaagaggatccacgctgcaggcaccctagcacacccagaatcttgagaacactggtgagtggaacacaacatctgttccaaaaaacccagagggtcttgtgctagcagggacaaaggatacctgcccgaccagtggctggggttcattccagtcagtgccaacaccgagccatcttgggcatgaacacagtgggccttagaacaccaagtatcatgggatcactgagaccagtctacacaggagagccttcatcctcaggcaggaggcagagctgagacccagacccgtgggcaccttccccaccaagggagagtcagcctccagggagggctctgaccccaggactcagaaggtgaatctgagcttcagacttctgtgcaccttccctgcaagagaagaacttgcctacagagagtgttctgaccactgggactcaggaaagagttggactcccaggagtgctgacagaggctaaagaatcacaggaggaacaagctccagccagagacagctagaacatctaacaccagagattgccaaatggcattaggcaaatgtaaaatcttactaacaaaccaagaccagtcagcatcatcagaaaccagtacgcccatcacagcaaatcttggataccccaacacacccaaaaagcaaaatttggatttaaaatcatatctcatgatgct

SEQ ID NO: 826 - DNA, 1000 bp, mus musculus
tagtaaaaacaaacaaacaaaaaaccagaatacccaagatacagtgcatggaactcaaaaaggtcaacaagcaagcaagcaagccaaaatgcccaagtaaggacacttggcttactcaatcccacttgggagggagcagaaagcaatcacaagttgggagggagggagggacataagagagaaagtggatggggggagtagttaggggtagaggggaatctgatctggttttgggtaagggaaaatgactaaagccctgaaggccagcagaaagaatggaaacaggcaacctcaaggaaggaggttggggggacgctccagaatgcacaagagacaggggaggtgagagactctcaggactcaaagggaaggaccttagatgaattgcctgacagcagggaaagggaacttataaagcctacctccagcaggaagacagggcatcaattgagggcggcggcggggttggcgggggtgggggggggacggggggggcacgggaggtgggggggcatggcatctcacagttacaactctgacccataattgttcctgtcagaaagaattacagggatgaaaatggagaggagcctgaggaaaagaagttccagcaagaggcccaaagagggatccagctcaaggggaggtcccaaggcctgacactattactgaggctatagagcactcacaaaaagggacctagcatgactgccctctggaagacccaacaagcagatgaaagagtcagatgcagatatttacactcaaccaatgggtagaagcagctgacccctgttgttgaattagggaaagaccgatagaagctgaggagaatcagcagtcccaattaatctggacccctgagatctctcaaacactgaaccaccaaacaggcagcatacacataagcataagaccccaacacacatacagcagaggactgccaggtgtgttcattcagagatgatgcacctaaccctcaagagacaggaggccccag

SEQ ID NO: 827 - DNA, 2800 bp, mus musculus
acaaccactctggaaatcagtctggtggttcctcagaaaattggacatagtactaccagaggatccagcaatacctctcctgggcatatatccagaagatgttccaactggtaagaaggacacatgctccactatgttcatagcagccttatttataatagccagaagctggaaagaacccagatgtccctcaacagaagaatggatacagaaaatgtggtacatttgcacaatggaatggtacacaggtattaaaaagaatgaatgtatgaaatccctagggaaatggatggacctggagggcatcatcctgagtgaggtaacccaatcacaaaagaactcacatgatatgtactcactgataagtggatattagcccagaaacttagaatacccaagatacaagatacaatctgtaaaacacatgaaactcaagaagaacaaagaccaaaatgtggacacgttgccccttcttagaattgggaacaaaacacccatggaaggaattacagagacaaagttttgagctgagatgaccatctagagactgccatacctgggcatccatcccataatcagcctccaaaatctgacaccattgcatatgccagcaagattttgttgaaaggacccagatatggctgtctcttgtgagactatgccagggtctagcaaacacagaagtggatgctcacagtcagctattggatgggtcacacggcccccaatggaagagctagagaaagtacacaaggagctaaagggctctgcaaccctataggtggaacaacaatatgaactaaccagtacccctacacgcccccagagctcgtgtttctagctgcatatgtatcagaaaatggcctagttggccatcattggaaagagaggcccatcagtcttgcaaactttatatgcctcagtacagctgaacgccagggccaagaagtgtgtgtgtgtgtggggggggggggggggagatgagtgggggggagggtatgtgggaacttttggtatagcattggaaatgtaatgaagaaaatacctaattaaattaaaaatgtaaaaaaaaaaatacgtgatttcttgcaaatgatctttgctgtacctattaagttcttcatgagatttctgaccttgagcctctttatatgctatattgcacttaatgctttgtttatattgatagttctttgtatatcggcagggaagccaacttgattgtggtcaatatcttctctattttgaatttagttcataagaattttattgatgcttttaaaatgcctgttcattggaaaaatactctataattttatttagagttgtgcctttatcttattttcaatcatggtaatattgatattgtaaaatgagcatgatagcttacgtttcaattttatggggtagtttgagcagcattaatattagatcttaacgagctgatggaaatcagttgtgaatatattaggtctgaacttcatctaaatagctttaatttcatttactgtagaccaattaaatttgtttacattctttttatttaattttggtagaatattcatgtctagaaatgtatctatatcatagatatttaaaattgtcaaaatctacattttctttttttttcaatttttattagatttttcttcatttacatttcaaatgaaatcccaaaagtcccctataccctcccccagccctgctcccctacccactcccacttcttggccctggtgttctgccatggcccgggcctaatcagtccccctcaacccgtgggaatcagtgtttcagacagatggacatagagttggcgggaattgacagaacaaatgtcaaatcaagcatcaaactttttatacagtagaaaatagggatgttgggtgatacactggcaaggtacaaagaggttactgtattcttacacaaaacagaggaatgcaaacacggaaggagtgggaggaaccaactggggtaaaactctatgttatcaactgggatcaaaaacagctccacctaaggtccacttaatcttagaagccaggggcaagggcttcctgcccttgccatagttcctactctagtctattgtatagtccaccttccccctaggccatcgtaaatacttgtgtatgggtgtaactcagctacctatagttctaagtatctactctggttcctctttaggtcacaaacttccttcttcctagataatggtaaatttcagtgtagggcagtgacttagctatccatgcccaaggtcggatcaaggactgcctagaatctaacttagctatatgtcaaaatatcaatccttaggagcacttgtagtaaagcaatattaagggaaagcacacagatccgtttaccaactaaagcaaggacattggaacattctttatacaggatgccacgattccaggagactaagtttccgtgaacttttcgcctcgggacagtgcctaggttttgggggggcggggagggagggctgtcgccttgtcactactggagtggatgtagcagtgttcccctgtactggggcatataaagtttgcaagaccaagggacctttcttcccactgatggctgacagcaatactgggatggctgagtggttaaggcatttggcttaagatccaatgggcagagatgcctgtgtgggttctaacttcactcccaatatcagcggctgtactgcttgtctgactatgaaatctacattttaaatgcatgccttaatgatccttaaattcactgggatctagtgtaatgtttccctttttacctataacta

SEQ ID NO: 828 - DNA, 1000 bp, mus musculus
tttcagattctggacttctttagagttaagagtgtagctcagctgggtcaggcagaagccacagagcttctggggcagactgtgtttcaggctccagacacccagccacctaccctgccagaggagaggtgtctgccccgtccgggagggctttgccacagcatctgggggagccatcttggttccaggattctgcctagactagtctgcgcaggggagagtgtggactgcagaagctaacagcttctaggtcaggcagaagccacagagcttctggggcagaccacattttgggctccagacatccaggcaccttccctgccagaggagaagtgtccacccacccgggagggctttaccacagcatcttgggttcctggattccatcaagactggtctgtgcaggggagagtgtggactgcagaggctaatagattctgggacaggcagaacccacagagcttttggggcagaccacgttttgggctccagacatccaggcaacttccctgcaagaggagaggtgtccgacccgcctgggagggctttgccacagcatctgggggagacaacttggttcccggatcccgccgagactactctgcataggtgagagtgtggactacagaagctacacaaattctgggacaagccctgtgttgggccttcatcttctgccaggaggcaggtccgaacgtcagatatctgtccaactcccctgcaaaaggagagtttgcctgcagagagtgctaaaccactgaaactcaaaacagagctagtcttccaggtctgctgatagaggctaacagaatcagaagaggcaaaagcactaaccagagaaaatataacaactaattccagagattagcagatggcaagaggcaaatgtaagaatcttactaacagaaaccaagaccacacaccatcatcagaacccagcacttccacctcagccagtcctgggcaccccaacacacccgaaaagctagacccagattta

SEQ ID NO: 829 - DNA, 1600 bp, mus musculus
atatatccagaagaagccccaactggtaagaaggacacatgctccactatgttcatagcagccttatttataatagccagaaactggaaagaacccagatgcccctcaacagaggaatggatacagaaaatgtggtacatcctcacaatggagtactactcagctattaaaaagaatgaatttatgaaattcctagccaaatggatggacctggagagcatcatcctgagtgaggtaacacaatcacaaaggaactcacacaatatgtactcactgataagtggatactagcccaaaacctaggatacccacgatataagatacaatttcctaaacacatgaaactcaagaaaaatgaagactgaagtgtggacactatgcccctccttagaagtgggaacaaaacacccatggaaggagttacagaaacaaagtttggagctgagatgaaaggatggaccatgtagagactgccatatccagggatccaccccataatcagcatccaaacgctgacaccattgcatatactagcaagattttatcgaaaggacccagatgtagctgtctcttgtgagactatgccggggcctagcaaacacagaagtggatgctcacagtcagctaatggatggatcacagggctcccaatggaggagctagagaaagtacccaaggagctaaagggatcttcaaccctataggtggaacaacattatgaactaaccagtacccctgagctcttgactctagctgcatatgtatcaaaagatggcctagtcggccatcactggaaagagaggcccattggacacacaaactttatatgccccagaacaggggaacgccagggccaaaaagggggagtgggcaggtaggggagtgggggtgggtgggtatgggggacttttggtatagcattggaaatgtaaatgagctaaatacctaataaaaaatggaaaaaaaaaaaaaaaaaaaagtgggtcaaagccttgaagatatgagcacagggggaaaattcctgaatagaacagcaatggcttgtgctgtaatatcgagaattgataaatgggacctcataaaattgcaaagcttctgtaaggcaaaagacactttgaataagataaaaaggccaccaatagattgggaaaggatctttgcctatcctaaatcagatagaggactaatatctgatatatataaataactcaagaaggtggactccagaaaatcaaaaaccccattaaaaaatggggctcagagctaaacaaagaattcttacctgaggaatacggaatgactgagaagcaactgaaaaaaaaaaatgttcagcatccttaatcatcagggaaatgcaaatcaaaacaaccctgagattccacctcacaccagtcagaatggctaagatcaaaaattcaggtgacagcagatgctggcaaggatatggagaaagaggaacactcctccattgttggtggaattgctaccttgtacaaccactctggaaataagtctggtggttcctcagaaaattggacatagtactaccagagggtcctgcaatacctctcctgggcatatatccagaagatgttccaac

SEQ ID NO: 830 - DNA, 1000 bp, mus musculus
atactaaaccaaaagctcacagtacctatgatacaacccacagaccatgtggagcacagaaggagggaagaccgggggtggggtgggtgtgcttcagtcctgcattgagaggggaacaggatgattgtggaagatgggaggggagggggaaaggaggaggaggaaacaaagtggcagtatcagtttctgaaaggagaggtgagagaggtacagagggtctggggatcaaataaaaataggtagaaggggatatgaagaactggggacaaccactggagggtcccagacaccagagaaacatgaggatcccaggacccaatgggattgactttaggtgtaatgcacagaaaagggagaaatagaacctgtggagaccacctccagtagataggaacagcccctggttgagggatggggccacccacccatctcaaagttttttaacccagaaatgttcctgtcatggaacagagactgaaggaaggaccaaccgggaacagccccacctagggacacatcatgtctgcagacaccaaatccaacattgttgcagtggtcaagaggcacttgcggacaggaaccaagtgtggcagtttctggggaggccaggctagcaactgacccatgtagatgcagatgctagagccaattatcagattgaactcagagaatctggtcagggagctagcaggactggaggagcagagggccattgcaaccccattggaagaacaacataggctggtctgaccacccagttctcccagagactagaccaccaaccaaggagtgtacctagacagatccatggctccagatatgcatgtagcagaggatggccttgcctgacagcaatgggaagggaggcccttggtcccagtgaggtttgatgccccagagtagggggatgctgcagcagtggaatgggagagtgtggtgggtgggggatcactctcataggggcaaaagggagggtagatgtgggatggggggtttggtg

SEQ ID NO: 831 - DNA, 1000 bp, mus musculus
cctgggggggtgagtgacacctgtcaagaaataccttggtcaggccgagtagttcagactgcatccacaataggcaatcaaataaaattcttcccaggagacctagtaaacagcctgatatgtggacaagaattgtacatttcagggagttagaatagcctgggttatttgaacacaacgttatttgaattaatgttggggactgctgaaaacagggtgtgctaattccctagtatttccacactcacacacacaggaaaaaaactcctagaagaatccccagagaagtatcatctcagccacgttggtattgaattccttacccagggagggtttggagtccagaagaagccaagctgctggtgctgaaggcattgagggcattctattctctaaacccctgaagacttaaatttataatgattaatccatattttaggctaaaatttcctaaaacattaccaggtctagaatttcctttgtgaatccttttgtgattacaacattccatattttttttccttaaaatattgactacattttccattttgtcttagtttgaggcattgatttacaattagtgtgcttttatttttagcatgtttaaaaacaacaataatattgtttattttcctgataatgattacttgagtcttacttttttttgtgttgagccattttaggtagccttatggtgcccagtaaattactgttcatcaaggagctggcatgtagtcttcctgagtttctggtgtgtgttccttttctgtcatcagtgtcccttttattattactataccgtatcctctgcatttatctaagtatactaaactttgtagataaagtagcaacttgggcttgggaggcggcctcagcctcagcagcagcggtcgccatcttggttccgggactcagcagaacttaggaaattagtctgaacaggttagagggtgcgccagagaaccggacagcttctgggacaggcagaagcacagagccg

SEQ ID NO: 832 - DNA, 1600 bp, mus musculus
tatgccccagtacaggggaacgccagggccaaaaagggggagtggtgggtaggggattgggggtgggggtatggcagactttcgggatagcattgaaaatgtaaacaaggaaaaatacctaacttaaaaaaaaagaaactttactaaagctcaaaacacacattcaaccctaaccaataatagtaggagacttcaataccccactcaccaatggacaaatcaaagaaacagaaaataaacacagtgaaactaacagaagttaggaaccaagtagatttaacagatatttacagaacatttcaccaaaatccaaaagaacagagatcctctactgcagggcctcatacccaaatagcaccaggagggagtgagcctctcaggagtgcagagaggtctctgagtacaggtaacatgaccactactgtatagaagaacccaccaagaaccctcaggacacaggaacataagggtgccctggaatgggagccttctattttccttcatctccatctgtaccagatttctgccacagagatcacataaccacatagtaatatatccagagagcaagcctcccaagagtgcctgggaaaggagtcttgcagtatccaacttcactcaaagctgatcatgtgccacagaactacatatacaaatactaccaggagagacctggtctcccaagaatacctacaaacctgcgatcacaggtaagaccaccaattctcttcaaattcctgcccaagaaggaccctcacagagccatcagaacaaaggaaccaagggtcagctggggagaggatcctactggtctctgtctgtaccttacagctgaccctgtaacatagttctccatacctaatttccacctagagagaactggtctcccaggagtactgacacacaggcttgcaggagggacaagccaaagttagagacagcaagaccagctaacaccagaggtagccaggtggcaaaaggcaagagcaagaacaaaagcaacagaaaccaaggctacttggcatcatcagaaccaagttctttaactacagcgaaccctggttaccccaacacacaaaaaaagcaagactctgatttaaaatcaaatctcatgatgatgatagaggaacttaagaaggatataaataactcccttaaagaaataaacacaggaaaacaggtagaagacctgaaatagaaaaacaaaaatcccttaaagaattataggaaaacagaacctaacaggcaaaataactgaacaaaaccatccaggatctaaaaatggaaatagaaacaataaagatatcacaaagggagataacactggagatataaaagtgagtaaagacaccaggagtcatggatgcaagcatcaccactagaacacaagagatataaatgaatatctcaggtgcagaagataccatagaagacattgacacaatagtcaaagaaaatgcaaaatacaaaaagctcctaacccaaaatattcaggaaatccaggacacaatgagaagatcaaacctgatggtaaaaagtatagaacagagtgaagattcccaacttaaaggtccagaaaatatcttcaacaaaattatag

SEQ ID NO: 833 - DNA, 1400 bp, mus musculus
ctgcagaacaatagtgataaaaaccacatgttattggtacagagacagacaggtctatcaatggtatattttgaagacgcagaaataaacccacatacctaagacaattgcttttttataagaagccaaaaccatagaatggaaaaacaaacaaacaaacaaacaaacaaacaaaagcactttccacaattggtgctggtctgtcagtctgcatatagaagaattgaagttgatccatatttttaacattgcacaaaactcaagtaggtcaatgacctcaacataaaaccagataaactgaacctaacaaaatagaaagtgggaaatagacttgagcacattagcacagaagaaatttttctgaacagaataccaatggctcaggctataataccaaaacttgaaaaataggacttccagaaaatgaaaagcttctgtaaggcaaagaaaactgccttctggttcccgccaggaccagggtagcttgggcacggagtctgctgacacctgcaagctacccacaagacccgccacgagaccttcagacctctggtgagtggaacacagctgctgctccaatccaatcacaggggacctgagactgcattaattagggaagcagaaaaacccggcctgatgaggggcacaagtcccttccgtttccccaccagcaccagggtagcttgggctctgagtctctggacacccacaaggtatacacaggaccctccacgggattttaagacctctgtgagtggatcacaacttctgccaggaggcaggttcaaacaccagatacctgggcaccttccctgcaagaggagagcttgcctggagagagtactctgaacactgaaactcaggagagagctagtctcccaggtctgctgatagaggctaagataaacgcccaacgaacaagatctaaccagagacaactacaacaactaactccaaacattaccagatggtgaaaggcaaacctaagaatcttactaacagaaaccaagaccactcaccatcagcagaacgcagcactccaaccccacccagtcctgggcaccccaacacacctgaaaagatagtccctgatttaaaagcatatctcatgatgatgatagaggacatcaagaaggactttaataactcaattaaagaaatacaggagaacactgctaaacaggtagaagaccttaaagaggaagcacaaaaatcccttaaagaatttcaggaaaacacgaccaaacaggtgatggaattgaataaaactatccaagacctaaaaagggaagtagacacaataaagaaaacccaaagttaggcaacgctggagatagaaaacctaggaaacaaatctggaaccatagatgcaagcatcagcaatagatgatggaatacaa

SEQ ID NO: 834 - DNA, 1000 bp, mus musculus
aaagcatataagttttgaagtattaggtcctatataattgtattatgatttcctactgaaaacaaggtagccagaccaaaagaactttagcatgctctatgaaaaatcagattcactaagtcatataacttttacctaatatttttgtgtgtgtgtgtgtgtgcccgcgtgcgcatgcacatgcaagtgtgtgcagtgtgcatacatgaatattgattgtacttctctatcacacttcattctattcccttgaggcaggatttctcactgaacacaagggccactgttttggctaggatgactcccagcatccacctggctttgcctccctacactggagatatagatataatcagctatgccttggggaaaacaaaacaaaacagaaacaagaaccatgagattgagaaattcaaactcagacctttaagccatcttctcatcctttaaaaatagttttcagagaagaagctctgctcacaggtgctctaacatgcccaggatcataggatcagaggtgaggaggacacaatatctgttgcaacaccaggaggaactgggaccagtgggatccggggacacagtaaccatgcccaaccagtggcatgggttccttccattctgggccagtgccctgagcagaccttgggcatgaactccatagtcagtcccacaacacccagaggaagtgtcactcccaggcactctaacaagcctaggagcccaggagcccaggatacaaggagcttacgcacaccaggatctcagggtcccagaagcagcttgactcccaggagctttgacacacctaggatctcaggatcccaggatcccagaataacaggacaaaacagaaagctggactttgaagagtactgacacaagcaggattacaggaaggacaggttccagtcagatatagagagggcacgtaagactatagataaccagatggtggtaggcaagtgtaagaacacaagcaatagaaaccaaggttact

SEQ ID NO: 835 - DNA, 1000 bp, mus musculus
aagaaggaagaaagaagggaagaaattaaagacattttaaatttaatgaaaatgaagtagcatcataccaaaacctatgggacaaaaatgaaagcagtactaagaggaaaactcatagctctaagtgtctccaaaaggaaactggagagagcttacactagcagcttgacagtccacctgaaagctctagaacaataagaagcaaatacacccaaggggaatagatggcagaaaataatcaaactcagggctgaaatcaaccaaatagaaacaaaaggaactatacaaagaatcaacaaaaccaggaactggtttcttgagaaaatcaacaagatagataaacccttagtcagactaactaaatggcagagacagcatccaaattaataaaatcacaaacgaaaagggagacataacaatggaaaccttggaaattaaaaaaaaaatcatcagatcctactagaaaagcttatactcaataacattggaaaatctgtatgaaatgaacaattttctagacaggactgtagcctcttgtagctacatgaactggtttcctcagtgggaggctggagctgtatgggaggaaaatggagggagaaataatgagaccaagacaaattctgatcaaggcccaagagcttactaagagtctgagcttataaaggggaaaggcccatcccccactatgccaggctcttgatgctttgttgccaatctttcagcacttggtccaggctgttgcttatctcaggaagacaggttcagcctgtcatccggtagctgcttcttgaagaagagcgcaggtggcagaacaatagacctatctaggtcagaagactccaccctaggtggtcttgttcagagtggcagaacaggtctaagccagcctgctcaaggctgggggaggctacaagataccagttgccaaagttaaaacaggagcagataaaccatctaaatagtcccataactcctaaaaatgtagaagcagtcatta

SEQ ID NO: 836 - DNA, 1400 bp, mus musculus
ttcttttttcttctggccagtttgttgctatttgtggtttggtttttgtttgtttgtttgttttgtttgtttgttttgtttgtttgttttgttttttccccctcttaaagaattagtgcagtttgactgattggatgtatggttgtttatagccttacttagtttcacagatttctgccttaatctttctcttagtcagggtttctatacctgcataaacatcatgacctaggagcaagttggggaggaaagggttcatttagcttacacttccatgttgcttacacttccttccatcaccaaaggaagtcaggactggaactcaagcaggtcaggaagcaggagctgatgcagaggccatggagggatgttacttactggcttgcttctcctggcttgctctgcttgctttcttatagagcccaagactaccagcccagggatggtcccacccacaagggacctttctcccttgatcactaattgagaaaatgccttacagttggatctcttggaggcatccaaaaccagccagtgcaatcttttaacaccgtctaccacctgccgttctgtttttgttttggattactcttactgtttttccaggactttggagtgcattgttagttgatttttgatccccctccatttcggctcacatggacaaggtacacctgagtggcaggccggagctgaaagagggaaactaggcagaagagagaaaaatggagctaagtcaaggttcctgatcaaagctcaaatgtttaatggcaaatgcgcttataaagtgggagggagggggaggaggcccattcctgccaattcatccttggagcccagctgcaggcgacccaggtgcaggatagggtgtagcctaccagcaagtagcagaatcttgaaggagaacagcagcagtggctgaacaatagagtgatctagggaggaaggctccaccctggtaatctcctttgtggcagcagggtccaggtctggctcagcctgcttctggctggggggaggttacacccctccccaagtaagcactcactaaaaactgtcctcttagaactgccttagctgtctcacatgacctagcttttattagctttcatgtccataatctagaggctcttttctttactgaggttctcagtggtcatcttagggtgttttgttctgtctccatgtattcctgtagcttctttagttttctagtaattagtttctaattttattgcatgttgatatgatggataagagcggttaatttgatccttttgcttttggtaatagttggtttgtggtctgcaatgtgctctatattaagttttccttggctgttgagactgtttttgtttctgttggagtctctctgctgtaggtagtggttgcacacacta

SEQ ID NO: 837 - DNA, 1000 bp, mus musculus
ttgatttgtgtaaattttttgaatattgtaagagctgtcctgttgtctgtgttttacagtagtatatattaattatgcacagttcttacacgcgttctcgtgaccggccaggaaagacgcaacaaaccggaatcttctgcggcaaaagctttattgcttacatcttcaggagccagagagcaagagagcaagagagcaagagcaagagcaagagcaagaaaaagaacaagaacaagaaagcaagagagagcaagaaagcaagaaaaagaacaagaacaagaaagcaagagagagcaagaaagcaagaaaaagaacaagaacaagaaagcaagagagagaaagcaagagagagaaaaagcaagaacaagagagagaaaaagcaagaacaagagagagagagtggcaaaaccccgtcccttttaaggagaattatcctccgcctaggacgtattactccctgattggctgcagcccatcggcccagttgtcatcacgagaaaggcagaacacatgacgggaaaactgcccctgcacgtgtgcagattatgtttaccacttagaacacagctgtcagcgccatcttataatggcaaatgtgagggcggctcctcacagatcccccttttcttttaataagagcaataggccacccatattaatgagagtggagatagaggtcaaatccccagtgtgcacgtaaaggagccatgtacaggattagctcttaggctcacaggcttttacccagagcaaccctgacctgctcccgtgtcgtttttcctggggagaaggacacttggacactcaaccttcttgaaagatgacatgtctccctagaataggctcatatatgccgcagagcccttctactgcagtgcttagccgtgcaactctctcgggctgctgaagcacactcactctatcccgtgcaatgagactagcctcgtggggtgcaagagctgaatggccagcgacctattgcttaagcatagataaccat

SEQ ID NO: 838 - DNA, 1200 bp, mus musculus
atgtactggctaattttctgccaatttgacacaagctagggttatctgaaagaagggagcctcaattgagaaaatagctccataagatacatctgtacttcagtgacttgatatggcaggatgggttggtacacaggggcccttcctcttctcagaggaaaaatgggtgggagatgtattggagaaaagactatgtgaggggtagaatggaaagagagggggtaataaagaagtgaagttaataaataactaaattaatggaaaactatgatgtgaggcatttttttaaattagtaaccaataggggaaagtccaggccattttgggtggtgccaaccctggatgggggtcctgggttccacaagaaagcagggtgaccaatccatgatgagtaagtcagtcagcagtagccatccatggccttaacatcagttactgcttctaggttacctctgagtgtgggaactaaaagggggctaggggaaaagaggggtaaggaaggatagcccacatctggtcagagttcctcctatgctctgggcaggcagacactgcaggactaccgtatgctttccactcagcccctggtaaacatctaagccactgacaccacgcaacagggggtggacaaggggcagcccccaaaaccaggggcctacagcaacatcctgttgccctggggttatagaacagagggctgaggagagaggttcccacacaagtgagagtctgcacagctggccttgatgagcagagaccttctatgattttcgagctttattatagaaaggcggtgtggggggggggaaggtagaaagagagagagagagagaaaggggaaaaggagagagagaagaaaggttagagagtaagagggagagagggagaggagaggagtaagagcaagagagtgagagaatgaggaggggccaacagcccctcttatagtgggctgctttatcttactgttgctaggtaactggggaggagttaagcctaaaggtcagaagcttgggacattgcctatgtgactactaaccatgcttctcttgtgggggctgagggggtggtaacttagacaggagccagagttccaggagtcatgagagaactccttctgtcccatgtaggtcaattatcatcaccgggtcctggggttcagatctcagctcgtctggagatcagactgtctttgcatag

SEQ ID NO: 839 - DNA, 1200 bp, mus musculus
gaacattttttattcattttctgcaactgttcatttgctttatcttggctttctttaagaaattcattcatttcttcacattttttttcttgatttttttaaagggatttgttaattttctctttaaggacccctaaaaatctcagtttaagtctttttcttgtgcttcagccagatgtgttggacttttcagggcttgctctagtaggttagctaggatctagtgctgccatattgctctggctctgcttgattgtcttcttatgctgctatctaggcatctgagttgggggcaaatataggtctaggtggcagtaactgaatttgtccttgttggatgagtgcccctcccccccctttggtttctgtttcctcaatggtattcttgtcagagtggcctgtggttgagtaggaaattttatccaggttgggtgctagagttcagacagctggagtgtactctgttccagatgagattccttcctggagttaggtcttgtatgtggtgatggggatgtatggggtgaatggggacaggccagatgggcactcagtaaggacagctctgtggtggatgggttacctcacttactgagtgtcattgtgcccatgccctctcatacaacagggtgcttcttctggagttggagaccaaaacttgggggtgggataggagaacattgagaaagtgggacttgtctgtatgtaaagagcctacttggagtcctggtggctagagtggtctctactggggtatccaccagagttgtagaaagagagttggtgctaaagagaagggggtctgagggaatgttagtagtctgtgtgtggggtgggggctcaactggggttctgggtgttggcttcagatagaacaagagacttcttctgcatgtttagatcccatttatttttgaactttgatcattatatttactcttctttttatgcttaagtgtactcttgattctaccttaaatgacctaaaatatatgatatatatgaacctatgagatactttgtctctggaggtctcagtaattttgttagcataatggtacaaaagacaaaagtcttattctttggtgtccttgaagcaactaaccagctgttctttttcacaccctctttctctttcaaagttatggccaggaagcaccacctggactgggaaaaaagttaataagtgtttcatttccc

SEQ ID NO: 840 - DNA, 1400 bp, mus musculus
acaggtgaaatttctgataaaaaaataaaagaaataatctgcttccatgtcttagcagcaaattctccctgatgtttctaaaaattaagtgaattttcttaaaaatacaaattctagattttattacttaagggatttttttgacaaattgaaagttttaacacttgcttaggtttgtgtacagaatatacctttagattcaaaaatatttaaaagtttactttctgtggttaatgttgtgtctggaggagagatctgttgttttgtttgttttgattaggttttgttttatttaaccaaatgttttaaacattatttttttaaaagatttatttattatatgtaagttcactgcagctgtcttcagacactctagaagagggcatcagatcttgttacagatggttgtcagccaccatgtggttgctgggatttgaactccggaccttcggaatagcagtcgggtgatcttacccactgagccatctcaccagccccaaaagttttagtagactgtgaagcaatttggttttaaaagatagcagttgtcaggagtgggattcgaatccacgcctccaggggagactgcgacctgaacgcagtgccttagactgctcggccatcctgacctactaaacattattttaaattaaatctttgagaatttaagacaatatatttgagtacattcacttattctatagacattcacccataccttctgaccttttagttttcttttatgccctcccatccattttagtttgggttacccaactagtcttaggagtagagcctgccttggcaagtgtttgatcagtcacaggtcacaaccttaaagaacacagactctcttttcagaagagttaaatgtcagtagctcctatgttggtggtaggatttcttccattatgtctaaaaaataagtttctgaatgaggaggattgaagcaggctcacttcatttactcacggagcattttaattgagaataatgccttttacaacatagaaagggaactggattaatcaaggccatgtgctttttggattcttgaatcatttctttaatactattattttcatatttaagaaagtcaaattattttgttcaagaacagaaccaacctagtcactcaaagtcaaagttcattccaacatcattcgaaaatgagaaacaacactaagcaaggaaaagtgccaacagacaccaaactcatcccagaggatacctgaaaggggtgttcctttttcttacttttttagaacaaaacttaaattcatttaattacttacaaaaatataaagtgttcaagttattaatgacaaccatcattgctgtgggtgaggaataaattgtaaaatgacatttaacatttaagtaagctgccttctgaattt

SEQ ID NO: 841 - DNA, 1400 bp, mus musculus
atttgttatagtagtggaagtttgaagccattaatttgcaataaaaagtttcacaccagattgtaatgagaatatattactttgtgagcctgaatataagagtgggcagaaaagtcataatttgacatttacatattgaaaaggtttctttctcttttcaacagtttttcttttgttattattaattattttatttatctatatcccaaatgttttcccagtcccagcaggccctcacagagttcttccccctcatcttccttcccttttgcctctgagaaggtaccccatctggactccatactccctgggacatcaagtttctacaggattaggcccatcctctcccactgaggccagacaaagcagtcatatggtacattagtgtagggtcctcaaactagcctgtgtatctctagtctccggaagcccccagaggtccatattaattgacattgttggtcttcctatggggttgccttctcagtcagttacttgaatccttcccctaagtcttctagaggggttcctaaccttggtacaatgcttggctatgagtatctgcatttgtctcagttgagtgctgggagaacctctcagaggacagttatgctaggcttctgtctgcaagcacaacatagcatcaataatagtgtcagggtttgagatgatgcctacccacattgggcctgtcactggttgtccattcctacagtctctgctctttttttttttttttttttttttaatgtccctgtatttcttttagacaggaacaattttgtgttgaaaaatttgaaggtgggatgacctccccatccctcaaccggggtctctgtctactagaggtggtctcttcagattctgtgtccccacagttgggtatttcggctaaggttacacacactgactcctggaggcctcccacaagtcaggtctctgggactttctgagtttccaccaacccctccccctagcagctgcacatatccatttattctctggctctctgctttctctcctgtctcacccacacaactgatcatgtaccccttttctccccccaccccgccatcccactcaggtccctccttctctctgcctcccataattattttgttttccattctaagaaagattgaagcaagctctcatttggccctttcttcttgtttaacttatttgagtctatggagtgtatattgggtatttagtactttttggctaatatcctcttatcagtgagtacataccatacatggatttttgggtctgagttacctcacacaggatattttctagttccattcacttgcctgtaaaatttatgctatccttgcttttaatagctgaataattaatattccattgtgtgaattaaccacattttctgtatcagt

SEQ ID NO: 842 - DNA, 1200 bp, mus musculus
tttaaatgattcaatccgtagtttatttcaagaagagaagttaactgctatacacagctattgaatgtttattcaaaatgtccaaaatatttatccaaaatcatatatatgcttgaaattatgctttccataaaaataggaataataaaaacaactgacaagagtccattgtactagacagtgctaaatcctttgtcaagtgacaagggggactcttcctgcattcaaaagaggcaaggctatttgaaagttcttgctggactttcagataatctcattaggactaatgatcctgatggagcagctagatgagtcactaaggagtttcttagctttcctgagatacattcaagttggtataccagatgtcatagttactttttatattgttgtgattaaatatcctagtaaaagatagttagtggaggtaggtttttattgactcagccgtggtagggattgggtctaatgctgtctcaattcaattcggtacccaaaggaagaggttctccattctcagctggatttgactggcaataaagaattgctgtacagccaatggctgggtaggtagactgaggcgtgacatggagattcacggtcctgggatcccagggacagggagcagaaatttgccatgatttgagctgcaaaaagaaaatcatcagaaatgtaggtgagaaggaatgtgccctggaagggctgcccagaagtatcctaggcagtaatgactagatagccacccagaaggggccagggcaacaaagataaaatatagaattaaagggctttaagccaggattacaggaggaaaatgtgtgctactggtggggaggattagaactgtccagcctttgagctagtcaaggcacattataattaactctctctgtgtctctctctgtctctctctttctctgtatgtgtgtgtgtgtgtgtgtgtgtgtgtgtgtgtgtgtgtgtgtgtgtgtttcatgtgcaaatccagaaagctcctgagtaggtgtgccctggtgcaacttgccaggaaccaaatcagtgtagctaaacttgtagcaacagtagaaacccaaagcacctgatcacatgacatctaaaatcaagaagtaggcaatgaagagtgcatgtgctcagctcattttctctttgttttatagtagagatcatagcccagggaatggttcaacctagagtgggctg

SEQ ID NO: 843 - DNA, 1000 bp, mus musculus
taaatttgtatgtatataaactatcagttgtatgtatatcaacttaaacacaatagtctaaaattttgaaggaagaatgcacatacaagaaaggatcttggagagcgagatgattggcacaagatcagactagtccccctttcgctgtgcacagagggaagacatgctcctgtggtttcaggtgtcactgacagagcaatgggtgctgtgggcagggatgtctttttcttcagtggggtagtcactgataaattacccttattttagtaaataccctcccattattgctccagcaaaccaccttaattatgatcagtgggttgtttaaaaaatgacattaaataggaggatgcctgtagggaagtgaggttctgtaggaggagataatgcatggatttaaatgacaaagactcagtaaactcatataaaattatcaacttatgaaacataaaggtcttttattgttccccttgaattgaaattagattatttttaatatattacatcctgattagagttttccctccctcttcttctcccagttccttcccacctccccttccatctggatctactctctttctgtctctcatttgaaaggaacagatttctaagaagttacagcaaaaacttaactgactatggtagctgactgtaacatctggaatcccactggttgctcggattgattcagctgatctggctggtgaggtgggtgtccccttcctccctcactcctccatttgtgttccccttggaactacatgcttaagatggcagccttctctgagtagaaagagaatgttcttcagtcagttcttcagtagcttttctcccctgctagaacctccaaacaaacctgctaatggtattttgttgttgttacttttgctgttgttgaaatttcttctttttcttttttcatcagtttgtgtgtgggggtttgtagggtgtgtgtgtgtgtgtgtgtgtgtgggtgtgtgtgggtgggtgtgtgcat

SEQ ID NO: 844 - DNA, 1000 bp, mus musculus
taagtggacattagctcaaaagttcagaatatccaggattcaattcataaatcatatgaagcccagtaagaaggaagaccaaaatgtggatacttcagtgcttcttagaagagtgaatgaaatactcccaggagaaaatatggagacaaagtatggagcagaggatgaagaaaaggccatccagagactgccccacccgaggatccatcctatgtacagctaccaaacccagaagctattgtggatgccaggaagtgttttctgatgggagcctgttatggctgtctactgagaggctgtgccaaagcctgacaaatacagaggtggatgcttgcagccaacctttggactgagcttggtgtccccaatggagaaggtggagatgatactgaaagagttgaggggatttgcagccccatgaggagagcaacagcatcaacaggccagatatcccagacctctgggggactggaccaccaactaaagagatcacatagagagacccatggctctggccgcatatggggcagaaaatggccttcttgtacatctgtgggaggagaggtcattcgtcctgagggtgttccattctccaatgtaggggaattccagggaggaaagccaggagtgggtgggtgggtagggaagcaccctcatagaggcagaggtagggaggatgttataggaggttctgaaggggagacacagaaagcagaaaacatttgaaatgtaaataaagaaaatatgcagaagtggatggtcacaattatctattggatggaacacaggacccctaatgaaggagctagagaaagtacccaagaagctaaaggagtctgcaaccctataataggaacaatgatatgaactaaccagcaccccccagagctgtgtctctagttgtacctgtagcaaaagacggcctagtcagccatctatgggagaagaggcccttggttttgtaaagatcatatgccccagtacagggtagtgccagggc

SEQ ID NO: 845 - DNA, 1400 bp, mus musculus
ggtgcagccttgcaggaggagagaccttactttgggtgagctttgagggtttatatattcacaacactttcagtttgctaacttagcttcctgctttaattagagatgtactctctcttaaactcctgctgtgtcttcctatagtcatttctctccagctactatgtgccccacccccaccccccaagccataagcccaaagaaaccaatcttcctagggatgcttcagcttatggtattttaacacagcagcagaaaagcagtaaaacattaagtaaaagctagagtctgttatgttgtaagctttttaaataattaggaaggaagtttttaattaagttgttcaaagtttcttttatatatcctcaaaatgaagaaagtgtaatatgtgtgtgtgtgtgtgtgtgtgtgtgtgtgtgtgtgtgtattaattatagtgatttttaagcaataaacatagaagtaaattcaattctgtgtatattctttattttaagataacaatgagaagctgaacaaaagtgtttccataagaaagtaggttttcctcccagtcctttctgttggggcagacatgtagctggtctgctcctgggaagacatcacatcctgactcatcccagaagatccactgcactcagagaagtcaggcaactaacaccacagtctgaggcatcctgggaaatatgctgcccacaaggcaagaaagaaactgattgccagctagagaaagtacccaaggagctgaaggggtttgcagccacctggaaggaacaacaatatgaactaagcagtacccccagcgctccctgggactacaccaccaatcaaagagtacacatggctccagctgcatatgtagcagaggatggccttgtgggtcatcaatgggaggagaggcccttggtcctgagaaagctcaatgccccagtataggggaatgccaggacagtgaagctggagggggtgagttggtgagccggaggagagagaatgagatagggggttttcagagggtaaacgaagaaaggggataacatttgatatgaaaattttaaaaatctaattaaaaaaaaagaaaacaggtttaactgaattaaaacactagtactttaaaataataataacaatttatagcagatattttaaggaaatataaaatattgtgccaaatttaggggaattaaacttgttaatattaaaaataacactagttgcttaaaaaaaattctctatactacatagcttagcaaattttgggttttgctatggctgagccaaagcctgtgacctgctatttattaagtctttatcctctctggactttagtagaagtacaaaaaaattccaataagaattttgagcttgtgaggaataaccatacttgcatccaacatgga

SEQ ID NO: 846 - DNA, 1000 bp, mus musculus
aaaacacttcacaccaacatctctgctaaatggttactatgtgtcagaaattacaaacatgcaagaacagagcctgtggtgtagttcagtggtattttgcttgccttacaggcaaaagcatttgatctctgaagcagactttttttgaggaaaaatattagactgtgggtgtagggggagaggggaggaagagagcccacatcctgccagagttccagtgtgggcagtccgggcagacactggaggactgccagatactttccatgcagccccgggtgggcatctggctgtgtgaagccactaaccccacacagtggggggtggacaaggggcagcccctggtaccaggttctcagtctctggcatcccatgctagatacagcaaaggagctgagaacaggataggggccgcagggcaacactctggtcccagaggggaaagcaagagaggtcaggagagggggggcttgcggttcccacacaggcgagtgtctttagttcaggccttgatgaatagagatagtctatggttttagagctttattgtagaaaggcagagggaaagagagaagataaaaagagagagagaccagcatggtcaagagaagagaaggaggaagggcaagagagaaagagagttagagagtaagaaagttgaaggtttagagagagaggtaaagcttagagagagagtaaggaaagtaaaagcttaagagagggaggaggggccaagcagcccctcttagagtgggctgtattatcttgctgttgctaggtaactgtgaggaggagtctagccagaaagcaagaagctttggacattgtctacatgactgctagccaaatgcttctcctgttagtgctgtgggggctgtgggggcagtaactttgacaggagccaggggtccaggagacatgagggaacaccttctgttccatgtaggtgaaaattaatcaccaccaggtcctacgggggttcaagacctcagctcaactggaa

SEQ ID NO: 847 - DNA, 1400 bp, mus musculus
ttagaaaaatacttttttcccccattttagtctttgacttctatggtatcagtcaaccttgagtttgagatcaactgtggagtcaaagtcttaaagaacaggatattgaggaatgcttctgtttgtgtgaaagaggatgttccaagcataattcatcactcaccattgccacccaaattaagagccctgaatatgggaagaggaccatgagaaatcatgtttgaattttttctaaagctttgccctacaaatacctcttgctggttttaatttgtattctttttctagccatgagtaaaattgatttcaaagctgtgtgtatgttactgaacctgaaaacgttttgtgattgcctcttcccaatatatagtttgtgacaaaaatgaattcaatttagggaatccctgtcttccatgttagtaattggctagatcttattgtatatgtttgaaaacatagctgtgatgctttgtatatacttggctcaaggagtggcactattaggaaatatagccttgttggagtgagtgtgtgatggtggccatcctggctgcctggaagctaatcttctgctagctacctttggaacaagaagtggaattctcagtgtcaccagcccaaagtctgcctggttgctaccatactcctgcctttatgataatggaatgagcctctgaaattgtaacccacctccaattaatagtcatccttataagaattgacttggtcatggtatctgttcttagtagtaaaactctaactaagacagaagtttataccaagagtaaggtattgctgtgatagccctgagcgtgtttttgtttggaaaaaatatggatttgaggacttaggaaagcagtgaaatgctttaagtgggggcttaatgagctatcatagaaggaatatggaagcctttgttgctgaggctgacttgaactgtggaagcctagctctagataatttagaagagaagagttttaataggttgctgagagactgttcttgtgatatgttggtgaagaatgtggctgccttttacccctgtctgaagagtctactgaagctaagatgaaaggatttatataaatttttttggcaaaggaagtctcaagaaagtccagcagaaactttgttctctgattaaatctcatgaagggctttttgaacaaacatagcaagcttaaaaaggaaaaaaaatatataatatatggtttgagtattaaaggggcaccaggaagtggagctgaatccagtgtttaaggatattaaattgaattaagggagcagtgactttggggcaaaatcctacctagctaagtttaagtccaggcatggtactgcaccatttacaatagccccaaataataaaaaaattcattgtgtaactctaaaccagcaag

SEQ ID NO: 848 - DNA, 1600 bp, mus musculus
agtcatctgtgggactgtgataggcagcctatttttgttgaatgaggcttgctccggtgacccaggagaaaactctacaagggacagaaaagtgagccacaatcccggtcaggtgcctgacaccacagagcccccaactccatgattctgtgactataagtcacacagacaatgtcccaagctttggcattctggctagacttcacccccacagttacccgactatcgccaggtatgctcctccccacagttacctgatagcccagcccactataaaaggagctgcttgggccctccttgttcttttcaagctttcacctttcttactctcctctttagacctccttctttctctccccacccccacatagccacagccagcctctctctctctctctctctctctctctctctctctctctctctctctctctctctctctctctctttctctctctctctctaacttctctccttccccctgcctttctacaataaatctctaaaaaccatagactgactctgctcatcaaggcctgccatgcttgaacgatggggataggctttcccctacagagctgcgtctggaaggccttcctgtgctcaagccacagaccggaccaaggactcccgctctgatgggaaccatccagcgcccctctatccccctgcccattcctccttttggccccagggctaactgagccgccctggggtactcattctgttctccacccttccgcagtgtccagcagtgtctgggatgctcgcagctgagaacctggttcctaggactgccccttgtccacctccactggctgggtcagtagcttcccacagccaggcacccgcccggggccgtgtggaaagcatgtggcagtcctcctgtgtctgcccgtccagaacaccagaactctggcaggacgcatatttttttcccattccctttattcccctggagcccactgccccgcagtcatccaccacttctgcctctcacatttttttagccttctttttaaatagccttaggaggatttcatggtggcatcccatttagttctactctgtgctccaatgtcatttatattctttacatagttcaatagtgggtctgtgggttaattaccacctactgcaaaaagttgtttttccgataagagttgaacaatcctctaagtcattgggagtcattttattgttaaattcctttagcagaataataaaaggtatttctcaaaccccataacctatttagtttcaaatacttggttactttttcagtatcaggtatgggttgcatattatggagtgtgctttaagtctaattttttattggatattttgtttatttacatttcaaatgttatttcctttctccgaccccccctcccggaaactccctattccatcccctccccctgcttctatgaggatgctctcccatccacctacccattcccacctcacagtccttgcattcccctacactggggcatcaagccttcacaggatcaagggcctctcctctatttgggaccctgtgctctgtccaatggttggcaggaagcagcggttggttatttccatagcatttgtg

SEQ ID NO: 849 - DNA, 1000 bp, mus musculus
atgtgtgtttctatacttacacacatgaatacacaggtgtacatgcacaactacattaccccatcacctgaaatatctccactgcagcttcatggacagtaatgctggatagggactttgtagtagagatgaatacaatactctggtatgtaaagtcaacggaactgtatgtttgggtggctgatgctttagctgcagtacaacacccacagagtctggacttctagcacgtccagggtaccaaagagaacaagggaaaactaatacgcagtcactcccatactcagtgtattgctgcaatcttgcccatttttgagcacagctggcatgcctactcatggaccattctgccataggagtctgaaggcaagctttccactcctcctctccactgcatgtggagatgccttgaaatcattgaagtcatggctcctattctgcatacatcctcaactcagtccctgcctttccttggtccttgtgtcctgtgtatgacatttacactaagtaattaaagtatttccttactaaattttatgttagtttcttgagtgaaatagtaagagctttctttctcctttttttgtgagtgtgtaagtgtgtgtgtgtgtgtgtgtgtgtgtgtgtgtgtgtgtgtgcatgtgactatgtgttcatgtagaggcccaaggttaacatccagaattctcctctatctttcctacttcattcttttgagactaagtctcttgatcaaaccaagttgcatatacagctaatctccctaggcagtttgctccacagtccccctgtgttagccttaggaagctgcatccacagtgaggccacatccacccagagttgtgtgagttaagaatgtgaactcctgtcccctgtttgtccagccagtgctttaacctctgattcacttcctcagccccagggctttcttaattaaccttgatcgaataaatagcatagattaattgaagctctcaatcttttgacttctttccaacat

SEQ ID NO: 850 - DNA, 1000 bp, mus musculus; identical to SEQ ID NO: 849

SEQ ID NO: 851 - DNA, 1000 bp, mus musculus
acttaggataggtaaagatcctttcccaatctgttggtggcctttttgtcttattgacagtgtcttttgctttacagaagctttggaattttatgaggtcccatttatcgattcttgatcttacagcacaagccattgctgttctattcagggatttttcccctgtacccatatcttcgaggcttttccctactttctcctctataagtttcagtgtctctggttttatgtggagttccttaatccacttagatttgaccttagtacaaggagatagaaatggatcaattcgcattcttctacatgataaccgccagttgtgccagcaccatttgttgaaaatgctgtcttttttccacaatggagaccttaggttcttgatgttattttaatgtaaaaaaatagaatttgagcaatcaaatgttttcttcttattgctattatatgtctctgtcagttcttcagaaaatagagtccaacttaagccttaataatgacttagaccgcccggcctgggagggctttgcctgagcataggcttgcagacatcttgattccgggactccatcgagagtattctgcacaggtgagagtgtgcactacagaagctaacagcttctgtgacaggccaaagcaacacagcttctgggacaggtcctgttttgtgccttcatcttaggccaggagggaggttcgaacgccagatatctgtgcaccttccctgtaaaaggagagctagcctgcagagagtgctctaaccactgaaatgcagaggagagagctagtctcacaggtctgctgatagaagctaacagaatcatgaaggaacaatctctaaccagagacaactaaatcaattaactccagagattaccagatggcgaaaggtaaatgtaagaatcttactaacagaaaccaagaccattcaccatcatcagaacccagcactcccacctcacccagtctagggcacctcaacacacccgaaaagctagaccca

SEQ ID NO: 852 - DNA, 1000 bp, mus musculus
ccattgcaggaatctataactagtcaaaattcagagaacttatttgggctgaccagccccagaagataaagctacaaaacaactgtacacatgaggctcaggaaacatcttggaagaggaagaagaagaagaaagattgtaagagccagagcaccaagaagtctctataagacattgtcccctagaaatgacaagggacctacatctgtgatacctcaacaataaggctttctaaacaacacatgaacaatgacaactaaataagcatgctaatgtggaaaggggaagtctcatgatgagactacccctatacaaagaacaacacacaactaatgactactgggagagagaaaattggtctttaccagggatgaatcacctgatccatatcaatttgtcagccctgaaagtgtgtgtgtctgtgtgtgtgtgtgtgtgtgtgtgtgtgtgtgtgtgtgtgtgtgtgtgtgttttctacattttgcttcactgctgaggtgtcagaatgccactcggggaaatgaaatgcaggggtgcttggctacattccattgtccttgttggtgtgctggactcctctaacactgacacagctcaagggagatgaaacacagcttaagataggtgccctagcccaacataggtgccccagcccatatttctctgagagagaaacaagcagacactggggcaaaaccaagctgaaggcctgaggtgagcccgaggcagggtgaatctgatttagctcagggtgagtgcctggagtgcagagggcccttctgcaatatgaggaaggcttcctctcagcatggcagtccttgaagaagaagacagtacttgctttgtccaatctgtttatttatcttcttggaaatggatgcatactacaaaataagggtgaaccagacatttgcaaaaaggaatgtccaggaagagaagcttattggataaacccttggagcccatctcattatcacggagaactctaggttctatgtta

SEQ ID NO: 853 - DNA, 1200 bp, mus musculus
taataagtttttcttggaggatcactgccttccctgagttcttccatgaaagtctccaaggtcacttgccacagaagagaacagtttattcctgggaataccagggatttcagtcctgattaaaggctctattttcttttctcttcttttttcttctcttcttttcttttcttctcttttcgttccctttcttttcttttctattctgaaagatttacttattttatgtatgtgagtacactgttgctctcttcagatacaccagaagagggcgtcagatcccattacggatttttgtgagccaccatgtggttgctgggaactggactcaggacatctggaagagcagtcagtgctcttaagcactaagccatctcttgagcccaccatctctattttcttatgcagaatgagaccagagattgtgtgagtgggaaagaatgaataaaatgtgtgtcaaaaggaaataaactgtgtgcacccgaggcaggcccagggctgcctggcagagctcccctgacttgtttactgtgtgtacactgatgttcgtgcatggacaatgaaaacttcctgagaaagactttggagttgccttgaggtacagatgggccaggcctgaaggtgaaggaggccttccattcggaagacaaagtgacgtgtctaccaggccctctttctccagtgaccgatcaggctaccctccagtggtccagtgggaaagtgctcctttggactatgctgtgcaggctgaaatctactttaaaccattctggtgtcttctgatctcctgccctcatcccctttcccctggttctttgacatggatggatggcatgttcactgttggggtctattggaaagataagggttttgttgctgttgtttttttttgtttttgtttttttttttgttttttgttttttgtttttttttttgttttttggtttggtttggtttttgctgttgttgttgttgttgttgttgttgtagttttgtactctgaggaactgttagttgaattttcttattcactatggccaggcctcgattaagaaattatatttggaaattaactccaaaaatataaaaaataaaaataaaaaaattagtctcctgctcctgacctttcctctttgaatttgtagaaatgctgccaaagccatgactctaactaaggaagtgaaagatctgtatgataag

SEQ ID NO: 854 - DNA, 1000 bp, mus musculus
ggccctcagaggccacttgctgcaaggtactcacatccaagagggcaaggctacatctcaagctgacagctgaccttggcattgcccacttggggcccttctcacaggtgtttataatataggagttcagatatatgaagtcttgtatcaaggatacagaaaagaatccaaggaggccatatgacatatagcaggcgcagctcgctccactgaggttcagaaaggctagagcctgaagctgtgtgttacagtagagacaccagggtgctagagacgccgagaacttttactatggatttttacaagcatcaagtttagtagctgtaccaaaagtttagtatctataccaaaagcctatgtgtgttgtaggcatgagggttaggggacccaaacctgttagagggcaaatgatgccaccatagtctgcagaccctataggctttggagctggccctcctcatctgtgctgttcttttggtttgatttgtgctcactggccttccagttctccttttggaactagaatgtattctctgtcccagtgtatactggtagtaacttacttttaatataccagttaatgatagaagcagtgtgaaagttagactaaatgtactctgcattatgagatggtggagcctgcaggtctgggagcactgtgttcaggtttggatcttacacatcctcaacaggttcatgtttgaacatttgtcccctgtttcctttatgggaggttaggggacctttaggacatgtggcctagctggcagatacagaccaccacttcagagctaggtcactggttcctagtctgataaaatgtaaaggaacggacacacaccatcactgtttgatggagcttgaccagtacccacactgtcctaccatgagagacacctccgaacccatgagctgcttctgtccagtggttttggtcacgtgttaggagaagtgatgtaacgagcacagtagcattatgacgatgaaagtgttttgagca

SEQ ID NO: 855 - DNA, 1000 bp, mus musculus
aactcggatcccacctcagaaaaccctcctctccccacgagaattgagaagtttgacagaagctcttggttacgacaggaagaagacattccaccaaaggtagcatcagtgctgctgggtgtctgtgtcactgctgccattgccaccatgtgccaccatcccatcccttttacagtttagagaatttgactgtgcaacaacaccttccttctcacatgcgtctcttcctaagctgagtgttggctagtcattaatcatttctgatcttcatcttcccaaggggacaaagacagagaagtatgtcttaaaacagaattataactctcaacaccaaacattctaggccgttttgctgtccgcattagccaacagactagtgggtattttcagtgattattgcatttcttgctagacaaaccaaatcaataaaagaaaatgtgcttacccttatatttaacaacacaaaacttgagcagatttcaagggttcagaaaatggtatgggggctgggtagatgactcagtcagtaacatgcttgccatacaagcatgagaatctgggttcaggtccctggcactcaagtaaaagccaggcatggtggcatgtgcatctaagcctggtgttgaggatgcggaggcaagaagatccttagccaaaagagtctagctagattggtgagtttgtggttcaatgagaccctgttatacacacagaaagagagacagacagagagatggagagacagcaggttggagagacagaaacagagacacaaacagaaacacaaacagaaacaaacagaaacagaaacagagccagagagacagaacagagccagagaaaagcagaggaaggagagggagagattgagaaagatacccagcattgacctctgacctccataggtgcatgcatgtgcacgcacacagacacacacacacacacagggtgtcacactcatgtatacacatgtgaaaacacacatacatgcacagacagg

SEQ ID NO: 856 - DNA, 1000 bp, mus musculus; identical to SEQ ID NO: 855

SEQ ID NO: 857 - DNA, 1000 bp, mus musculus
aaaaaaagaaaaaaagaaaaaaaagcaagggtttattttaactgctagtttccagaaataaggtccatagtaaagaagtcacagttgtgttacctacaatggaataggattactatggaatagcttgttcaatttcaaaagtttcttaatttgatactattgctatggtaaaacactgagaaaaagcaacttatggaggacgggttagacttcaggatatacttctagttaccaactgactactgagaaatgtcagggcctaaactgaagcagggcaggaacctggatgcaaaaactgaagcagaaactgagtaggagtgcttcctcctgtcctgtacctcacatatttcctaactaaagctcaagggtggccccatcctagagagcttggccctacaaattccattgttaatcaagacaatattccatagacttccctacacaataggtcaatgtagtggaggcattttctcaactgtggtccctcttctcaccaacctcttctcttagtcatttttctattcctgtaataaaacaccaggactaaggtaactcatagaagtaaatgtttatttgagaattagagatgtagagagattagagtccttcaaagtcctgacagaggagcacggctgcaggaaggaaggacaaccaaacaggaagcagagacctatggctttcatcttaggcagcaaacatgaaacacagagagtatactacaaatggctcctgaattctgtaaacttaagttctaaccaatggcatacttcttccaggaaagccaagccacttaacccaccaaaaatatgtgtcaaagataatatcatatactgtgaagtctggaattagacaggcatcccattcaaaccatcaaaatgaaactccacctcctcttcacacccctgcaaaaagtcaccagttcaaggaaactttgaagccattaatttgattcactcacagttattctggcagcatgtcagttctgaaatgttactttgct

SEQ ID NO: 858 - DNA, 1200 bp, mus musculus
actgcatggatcaacagtttctcaattagaagaagatagacgagaagataaagtattcggtgactgcgaagctttagcagcagctgagaaatattcggggaacatctggctggaatctatttcttcttaggtaagcactcctttttgcaacaagcatacataaagcatgaaattggcatccacacctcttcccaacaagaaggaagcttgatttagtactcctctgatgcaggtatgcaaaaactgaagtgtcatgaggcatggccactaaagcccctccaaagctttgagctcttctctgggggtagcatttgtcaactatatgcggcctggtttttaagatcctatctagtctgtcagtataaaaaaatagctgagaaaaataaaaagaactcaatttgtgatgattttagatttttttcatgaacttttttttgtgtgtgtgtctgagcaagggttattattaatactaaatttcttttattttttttgaaacgggcacttttcatagctaatttattctcttgctttgctaattcaataatgcctgccactttaggcaatgaaggcaaatggttttctctatttccagcctcaattgtgtgatcacaataccctgaaacctgggagccgtattgttgctttaatatgaaagattgtaactgggagattccctattgctcatcaatcaaaccaataaccagtcattttctatatgtgtgcatacatatgtgctgagatccatgccttctctttcgtgggtgatgaggacacacatatgtgcatatgtggaggggagaagttaccatcaggtgttcctcaagacctttctaccatgtttttgtttgtttgtttgtttgtttgttgttgttattgttgttgttttaaggctctctcactggtactgggagcttgcaaatcaggctaggctggctggcctggtgagccatctgtctcagtctccccagtgttgaccatgatcatcaccaggttttgctttgttacttgggttctgaggctcaatctccagtcctcctgccggctctccaagaaactcaccaattgcattatttctgcacccccttgctgcttgcttttaagatgtatcggtgtgctacggaaaggggagctgaagtcaaaccaggttcattcagttcatggaaaaatatgaatacttaggccagctcatgtagtgatgta

SEQ ID NO: 859 - DNA, 1200 bp, mus musculus
ggaaacagtgcagataacccgaattgcaccagagccatttcatttaaccagcttacatataaaatactattttggggtgagtttactgggtcttttcttgctttagtcttctatcttctgctgattctatctatattcccagatgtgctcttgtggcccatgaaatcaagcttgggtgagacctggtgcagaacaggaaggcgacccatacttggtttcagtggctgcaagaatgactgcatggtcgacaggatgcctttgatgttgcacaggccttccaggaaagaagccattgaaaaccttcaaccagtgttactacactcagatacacaaaagaaatgaacacagtccatgctccaacatgatcatttatttctctaaccagattggaaccagtagcagtgaatgacactgttcatgatatttgaaaagcagtgttcagggcctagagctatggcttgggaaactgcttgcaaaagagcataaggatcctagttcgaatcctcagcacatgggtataagcttagcatagcagtacacacctataatcccaaaccagggtctcagagaccagcagacaccgggggcttactagccagccagcccagcctaactgacaggccagtaagagatttgtttcaagaaacaagatgggcagctccttaataaggatgatggatgttgacctcaggcctctacacatatccttcacctacccaatactgtttgtaacacaggagcttcttcatctcggaagagttgagttgtgtcccccacgtgcattctgaccttcctgttcagcctgtccctcttcctccacttctgctgtggctgtcactctgtcaaggggtcttttcctgtccttctatgtcagtggcttctcttcctgtacttctactgggacattgagtttgtccaaggtcatgggatagttccttggtaaactacagatgagcagacagatatgcaaaatatcagccaactctttttctcaaaacctctactcacatattctgcctataaggtcacatttgtttgtttgtttttaaagaaaaacccagttagagatctaccagaagccgacttttctgtgtaggtgattgaaattatttcaaattatccttttgagaggatcaagagaaacaaacaccctcagggaaataaagtttgcatcattaaatatttgttcatgtatgtatt

SEQ ID NO: 860 - DNA, 1200 bp, mus musculus; identical to SEQ ID NO: 859

SEQ ID NO: 861 - DNA, 1000 bp, mus musculus
tagtaagattcttacgtttacctttcgccatctggtaatccctgtagttagttattatagttgtctctgtttagagattgttcctctggtgattctgttaccctctatcagcagacctgggagactagttctctcctctgagtttcagtggtcagagcagtctctgcaggcaagctcacctcttacagggaaggtgcacagttatctggcatttggacctccttctggctgaagatgaagggctaaaacagaacctttcccagaagctgtgttgctttggcctatcccagaagctgttaatttcagtagtccacactctcacctgtacagactactttctgtggagtcccggaaccaaaatggctcccttggatcctgaggttagggcctccccggccaggcggacacctgacctctggccgggaaggtggccggatgtccaatgcccgaaaatggtgctgcctcagaagctctgtggctctcgcctgacccagaagctgttagcttctgtagtccacactctcacctgtgcaggctgctttctgccaagtctgggaatcaaggtggctcccgcagatcctgagtcaaatcctagcctcccgggctgggcagacccctgtcctctggccgggaaggtagccggatgtctggagcccgaaaacggtgctgcctcagaagctctgtggctcttgcctgtcccagaagctgttagcttctgtgatccacactcttgtctgtgcagacaactttctgcggagtcccggagccaagatggttcctgacgcaaaaacctccctggccgggtggaaccctgtcctctggctgagaaggttgccggatgtctggagcctgaaaatgtgtaccacattttctttatctgttctttgagtgaggaatatccagattgtttccagttcctgtctattacaaataaaatttctaatgaacatagttgagcaagtgtctatgtggtatggtagaacatccttggcatgtgtgc

SEQ ID NO: 862 - DNA, 1000 bp, mus musculus
tctagagacagtctagtgcaaagtttctgcgtgtatctacagctctggtcttcttttgttctcccccttccccctctcttcctcacccccctccttgtcccaacaatgatcctcaaaacgctcctgggcctggaggatgagcaataacctagaaacagagatcctcaggctgtctcagaccagctgagttaaaacttcccagggctcagactggtactctgtggtccaacagaccctgcaggaacttctaatgcaagctaaaatttaacaactctttcagtccccttctgttgctgtgacaaatactagcaccaaaagcaacttagaaaagaaaagggattgtttggctaatatttccccgtcacagtccatcactgaggaaaggcaaggcaggaactcaggcagaaaccatggaggaatgctcccagacttgagatgttcagtagcttcttctacagccaggatcatctgcccaggaacatgtgctgcccacagtggactgggctctttttatgtaatgaagacaatcaggaaggtctggcacaggaatgccacagaccaacctgatagaggcaatttctcaactgagatttttcaggtgatgctaggctgtgtcaaattgataattgaggctcactagggcaaaaccaagtggcagaaaagcagtttccaccagcccctctcaatccctacggtctgtgcactgcatggagaaacagggagagggccaccaccatcatggaagaggatccaggcccatctgatcccagtactccatccgcaggccttgtgcacctctaagattttatagaaaccttattctgagaattagagttgataacgctcatcatcttaccaccatcttaaccaggcagtctcagtaagataaacacaccctgctaagtctcaaataaatacgtgtatattgcagagtttatagaagtggggctagaaaagtttggcttagctttgtttgaagtgaaccgggttaatttatggg

SEQ ID NO: 863 - DNA, 1000 bp, mus musculus
cataaaagtctgtatacaacttatctaatatcccacacccctttgtaaaacaatgtggtaggatctagagtagggaagagtgttgcccatgatccttccctgtcctctgtccatcatgttgactgctcataaggctgatttcactagattccatcagacagcctccctttccccatatgccagtcaggttctgctgtaggaaccagcaccagatcaaggaatgaggaagaggatagaagcattgattccttcatcccactcttcatccgtcatggagcacacagctcagccaagggttcatctcccatactgacagccacattccccacccccaccccaagtcctggattctcataagcgggctcctctccatatcctttcagacctaggtctgacaaaactcccaaccacagctacatcttgatgtttcccttgatcttcccaacacccgggaaagtttgtgccgtttgtatgctgctggaaccctgcctcagactgcagctagaaaggcttagtaatgagtagcttagtgagacatgtaacagaaagatgtatgtagacacctgcctccaggctaatatagtagttcaggcggcctcctcaaggctattagaactgaaggagtgttgtatctcagctttacatagtagcatgctctttctgcagcacgcccggtgttctgggttataagcagagaaaagatcttgtttgtgagcaatgactttgcagaagaacccagtaactgaagcaaaagaaatcccaacaccagaacagatctgagtgagaaaatgctgtcagctggagcctctggagcgagggatgtaaccggaacaccagtgcccactctcactgctgcctaccaagctcggagacatttgaaaccctgcacagatgctgtgagaacatttagaaatggatgttttccacaatgtgggtcttccacagagacccaccactggacaccatgcagagagactttggagcaagcacccagacctaa

SEQ ID NO: 864 - DNA, 1000 bp, mus musculus
actaaaaaattgaaatccaaaatggaggaaaatatcagttactatgaacagatatgaacctgtggaatgaaatctctgtctgaaatggagacactaagtcttttgcaacttactgaacctaggtaaaatttcatacatattgcaaagaatggaagaactactagagcaaagtaacatttcagaactgacatgctgccagaataactgtgagtgaatcaaattaatggcttcaaagttttcttgaactggtgactttttgcaggggtgtgaagaggaggtggagtttcattttgatggtttgaatgggatgcctgtctaattccagacttcacagtatatgatattatctttgagacatatttttggtgggttaagtggcttggctttcctggaagaagtatgccattggttagaacttaagtttacagaattcaggagccatttgtagtatactctctgtgtttcatgtttgctgcctaagatgaaagccataggtctctgcttcctgtttggttgtctttccttgctgcagccgtgctcctctgtcaggactttgaaggactctaatctctctacatctctaattctcaaataaacatttacttctatgagttaccttagtcctggtgttttattacaggaatagaaaaatgactaagagaagaggttggtgagaagagggactacagttgagaaaatgcctccactacattgacccattgtgtagggaagtctatggaatattgtcttgattaacaatggaatttgtagggccaagctctctaggatggggccacccttgagctttagtcaggaaatatgtgaggtacaggacaggaggaagcactcctactcagtttctgcttcagtttttgcatccaggttcctgccctgcttcagtttgggccctgacatttctcagtagtcagttggtaactagaagtatatcctgaagtctaacccgtcctccataagttgctttttctcagtgttttaccat

SEQ ID NO: 865 - DNA, 1400 bp, mus musculus
taccttagagatatggttatagtatggaccatacttcattgttatgaagcatttcctgactctgcattttatataaaacttatccccatcatcttctggttggtcaataaagagatgatcaccctataactgggcaagagaggataaagtgggatttccatgccctgagagatgggggaggggtgggcacaggaagggtcaccaacatgacacagatataaaagggggtactagagcaagaccaagatgacaggtaaccacgtggttggagattggctggtaagtaggccagcaaacatagtttggctagaatagttctgtatataccctgctatagagtatgaagcttataaacaaatgcaaaggtctctgtgtcattatttgtgaacaagggtgggcatagaatataaccctatttctagatttgcttcccaacatgttaggcacagaatccaaacttgagacagattgaagctcagaaacagataagttcaggacatgggagacagaccaaaaaagccagcaaatagcaggagaggcataacgcagctcctctcagagcctttgataggctagctgctgggtacttggatgggtttcatgaagagctaataatgaacacagcagctaagctcatccatgctgttctgaagagaaggttgacagagtggaggctcagggaaaagctgctacaggttctcttggagttgacacagaaaagtctgcacagtccacccctgtgggaacatgggggctcagctgcagccctcagaagcatttccctggggtaggaaaatttggtagtcaccatctacagatagatatatggagacagtacacatctttcctgtaagcagaagggctagggtagagccagccacagtacaaggtctgagttgaacaacagaagataggtaaaaacacagaagaagaaatccaagcacagctgaacttctaatcaggtaaaaatgtttggagttatgattaaatgctatgaaaaacagagactgagtataacacataataaataaatatgaacagtttggaatcaataaactaaagtccttaaagagaaaactacataaaattaaaaacaataagatatgtaaggatgaaaataacaacaaaacagagtttgtacatgacataatgctattttattttagatggcttaaatatagagataatttggaaagataaatatcttaacagaaagtgatacaatgaaaatgtgttggtttgagagtgcttatcccagggaactatattgttaggatgtgtggctttcttggagtaggtgtggccttgttggaggaagtatgtcacagaggaggtgggttttgagactctactcctggctaccttcagttcaaaatgtaggactctcagctcattctcca

SEQ ID NO: 866 - DNA, 1400 bp, mus musculus
ttgttgaaaagtcaggtataattctaataggtctgcctttatatgttacttgacccctttccattgcagattttaatattttttgttgttttgtacatttagtgtttttattatcatgtaatggatgggtggttattttctggtccaatctgaatagtgtgctgtaagcttcttgtatgtttgtaagcatctcattctttatgttggggaaattttcttctttgattttgttgaagatgttttctgggcctttgagctgagaatattttgcttcttctattcccattattcttaggtttggtcttttaatagtgtcctaaatttcctagatgttttatgtcatgaacttttttgattttgcatttttcgactgatttattaatttcttcaattgtatcttttatgcctgagagtctatcttccatctcttacattctgttggtgatgtttgcatctatacttcctgttctctttccgaggttttgcctcaaattgcctcagtttgtgttttctttattgcttatattttcattttcaggtcttgagcactcttattcattttcttcactagtctgattgcattttcctgtatttccttgagggatttattgatttcttccttaaagacctttatcatctttataacattgggcttaagatcatctctttattactttttcaggatatccagtgcttgctgggctttgttggtgccatgttcctctggctccttttgattgtgttcttaccccggcctttagccttctggttgtccctggtatcggctgtatgttcctgattctgacaggactccttaaggcaggcagagccttgggtctaacattggagttcaaggaacagcatgctgctcatcactttggttgtatgccaggtggacaaggcaggcaggtgatagagtctaacctgggtatttctggcaggcaggtgatagattgggtctaacctgggtatttctgaggcctaaaggcctggatgttcttgggatccagtggcctcctctggagggaaggtgatggagctctggtagacagaattttattgtttttatgactaagatatatatatatatcccacattttacttgtccattaatttgttattaatttgtttatggacaaatagattactccctcaattggttgttatgagtagtgtcacaaagaatctgggtcctgtgatatctcttcaacatactgatttaatatccatggacacacaccaaagaatgagattgtgaccacattgttgttctatttttacttttttttttaaggagcatccatattggtttcatgatgagtatactaacttacattcctaccaacaatgcagacacaattagttttagcaaaattacacaaaagtcattcctgtgataa

SEQ ID NO: 867 - DNA, 1400 bp, mus musculus
ccggacagcttctgggatgggcagaagcacagagccgctgaggcagcacccttggcgggccgcagacagccggccaccttccggaccagaggacaggtgtccgcctggcttgggaggcggcctcagcctcagcaacagcggtcgccatcttggttctgggactcagcagaacttaggaaattagtctgaacaggttagagggtgcgccagagaaccggacagcttcggggacaggcggaagcacagagccgctgaggcagtaccctttgcaggctgcagacagccggccaccgtccagaccagaggacaggtgtccgcctggctcgggaggcggcctcagcctcagcagcagcggtcgccatcttggttccaggactccctggaacttaggaatttagtctgcacaggtgagagtctgcaccacagaagctgacagcttctgggaactgccaaagcaacacagcttctgagagaggccctgttttgggccttcttcttcgaccaggaggaggtccaaaaacaagatatctgcgcaccttccctgtaagagagcttgccagcagagagtgctctgagcactgaaactcagaggagagaatctgtctcccaggtctgctgagagacggtaacagaatcaccagaagaacaatctctaaacagagtcaactataactactaactccagagattaccagatggcgaaaggtaaacggaggaatcttactaacaggaaccaagaccactcaccatcaccagaacccagcacacccacttcgcccagtccaggggaccccaacacacctgagaacctagacctagatttaaaagcatatctcatgatgatggtagaggacatcaagaaggactttaataaatcacttaaagaaatacaggagaacactgctaaagagttacaagtccttaaagaaaaacaggaaaacacaatcaaacaggtagaagtccttacagaaaaagaggaaaaaacatacaaacaggtgatggaaatgaacaaaaccatactagacctaaaaagggaagtagacacaataaagaaaactcaaagtgaggcaacactggagatagaaaccctaggaaagaaatctggaaccatagatttgagcatcagcaacagaatacaagagatggaagagagaatctcaggtgcagaagactccatagagaacatcagcacaacaatcaaagaaaatggaaaatgcaaaaagatcctaactcaaaacatccaggaaatccaggacacaatgagaagaccaaacctacggataataggagtggatgagaatgaagattttcaactcaaaggaccagcaaacatcttcaacaaaattattgaagaaaacttcccaaatataaagaaagagatacctatgaacatacaagaa

SEQ ID NO: 868 - DNA, 1000 bp, mus musculus
attcccctggcctcagtgactctccttaaccgcagaggaatattccccaacccctctattcctatatccctcacgactataaagccagaattgtgtgattcatgctaccaaatttatctgcttgcttaggatagaacctgaagcccacctgttttttttattattatttaattttatttttaatttattttttacactccatatcccattccctgcccgcccatccactctcactctgctccacatcccacacacctcttccccaccccacccctgtctcctcgtggatgccctaccccctcccaccccacctgacctctaaactccctggggcctccagtctcttgaggattaggtgcataatctctgaatgaacacagacccggaagtcctctactgtatgtgtgttgggggcctcatatcagttcgtgtatgctgtctgtttggtggtccagtgttgagagctctcaggggtccagattaattgagactgttggtcctagcccttctcctcagcttctttcagccttctctaattcaacaacaggagtctgctgcttctgtccattggttgggtgcaaatatctgcatctgactcagctgcttgttgggtctttcggagggcagtcatgaaatatccctttttgtgagtgctccatagcctaagtaatagtgtcaggccctgagggccagcagaaagaatgtaaacaggcaacctcaggaagtaggaggtttgggggactcccagaatgcaccagagacctgggaggtgggagactcccaggagtcaaatggagggaccttagatgaaacagtagggagagggaacttacagagcccacctccagcaggaagacaggacatcaagtcagggatggggttgccatcccacagtcacatctctgacccataattgttcctgtctgaaagaattacagggatggcaatggagaggagcctgaggaaaagaaggcccagggacagggccaaagtgggatcc

SEQ ID NO: 869 - DNA, 1600 bp, mus musculus
tcagaggagggcctgaaaatctagacctagaaaataatgcagattgtattttacctgaactatacagtaaaagtcaagtgtctgaagaagtttagtaacttttcaaggttttaagggaatcatgggaaatactatcatagacataacaactcacttaacccaagacttgcaaactttgtgcatggaagctcagatgtctgtggttggccttgttcaacatgaaacaaactcaacaggataaggagtgaaattatggaaggtgcaaaccatcttactatattgtgaggtctgagggactcgcagagcctgtctgctcacgtgtgtttgttctgtgctttcactactttccctgttgctgggaacaaatatttgccaaggaacaacttagaatggtttgcttgggctctggcttgagggccctctgccacggcagggatgtgaggcaactaacaggtcatgttgtgtctgccgtgaggaagcacacagaggccagggctgctctcagctctgtctctcctttgtattgagtccaggacctcagtttatagcatagcactgtcaacactcaagagcggggctcccctcctcaggtaaagtcttctggaaacatcctcagagacaactcagaggagtgctttccatggtgattctaaaatgggcagggttgacaggaagataagtttcacattctaagactcccagcctgcagtcagcagctgtcaatcataaaactaaggtcacagtcagtaatgtaacccctggggcggaatgctctcttcagagtggaaaccactctgaagctcccagcaccctaagcccgactggctgagcctgtggaagccaatccggtatgctgatacccttaccctgggtcattacactctctgaagcttgctatcctctgaagacaccgacctgccagtagctataggtatgagtctcttggatagaataaccacatactttaggtagtaaaatatctttgattaggcatccgactgtgaatgacacacagtcagacgactacagttcaatggagcctcagagaagtggctgggacaaatagaaaagccgtgctgctctcaggtatccaagaccccagtgttaggaagcacaggttgacacatgttttcgataaagccattctacgtggagaatcaggaaactcaaaaatgtgaacgatctttaatttggtgacttgcttctaaagattctaaactggggggaggggggtcctccagggctagagagagagtgcagtgtataaagatgcctgcggccaagcctggtgatctgagttcaatccccagcacacgcacatggtggcgctagagatctgatttctacaagtctttgggtctctacacatgcgccacggcacctgtgcgcctatttccctctgctctgcaaataactgaagagatgtcaatttgttaaatgtaaagacttagttttacaagggaaatattggaaacatctaaaactgttgtcaggaattaataagtatgttttaagggctttgttagctagttctaccaaagttggtaatacaggggacatattgtaatatgctgtagaaatctcgcgtgtgttttacagt

SEQ ID NO: 870 - DNA, 1000 bp, mus musculus
catttatcaaagatgttgtctttcttattagcatataattttggagatctttgtcaaatatgcgatagctgtaattagtcttctgtttgatcccactgatctacatgttcatgtagtttttattacaaaaactttctgaatatggcttgaaatctgatatgatattgccttcaggattgtttcttttgctcaggatttctttaggtatctgtggtctttgtgattccatatgaattttagttattttttctatttctataaagaatattatgagattgagattagagtatattgtaactgcttaggaggatggtcattgtcttagtgtcctattgttgtgaagagaaaccatgaccatagcagctcttgtaattgagaacgtttagtttaatacagtttcagaagtttagtccattattgtcctggcaggaagcgtggtgccacacagatacacatggtgctggagatgtagctaagagttctgcattcagctccagaggcagcaagaagagagaaaaacgctgggcctgccttgagcatttgaaactccaaagcccacctctagtgatgtgcttcctcagcaaggtcacacctacttcaacaaaggtcacattctacttcctgtcaggtagaccactctctaaggaccaaacattcagatcgatgaatctgtgcgagccatttttatttaaactaccggtcactttcacacgataaattctaccaattcatgagcctggaatatctttccattgttccaatctcttcagaggattaaagttttcaccacagtgatccttcaggtagggttacacccattttttgaaggctcttgtgagtgggagtgttttgagggttttttcttgttttattttcccttcccttcccttcccttcccttcccttcccttcccttcccttcccttcccttcccttcccttcccttcccttcccttcccttcccttcccttcccttcccttcccttcccttcccttcttgg

SEQ ID NO: 871 - DNA, 1200 bp, mus musculus
caacaatttcatgccaggatctacacggtaggagaaccagttcctagaagttgtcctctgacccatggctcatgtgtgtgcacatgcagagacatacatacatacatacatacatacatacatacatacatactgttgtgaaaaggaaactgaaggtttaaacaactatttacagtgttttctagttcttgagctacaagcataagccatagcactgaattccctggctacacgctccactggggggaactaatacaagtgtatgagcttctggaaacagatgagctgtagacaagccaaaggaactgtgactctcagaagagcaaatgctttttagccaatttcaggccacagcatctgtattagggcacagcctttcaagtctggtgctgaaaatacataaacaaataaataaatgggaccatttagaataccaacaacaaaatgaaatattcagaggtaaacacaatataacatggaaaacctgaacactcaaaagtataaaaatattgttgagaaaaatcaaagaactaagtagatgtactgaggccacaggtcagcagagtcagcactgcagacagcagctctcaccagtccctcttcagactcaaaacattttctttcattttcccatgaggctttgttttgtttgtttgtttttaagaatagacaaagtgaaaaacatagaaagaaagagactgagtgccttagtgttgtactactgtggagaggcaccatgaccacagtgactcttgcaaaagaaagcatttagttgggacttatttctattttagaggtttaatctatgctttcatgtctgggaacatggcagcacccaggcggacatggtgctagagaaatagctgggaattctacatccagatctgcaggcagcaggaagagagatacactgggcctggacaaagcttttgaaaccccagtgacacacttcctccattaaagctacacctactccaacaaggccacaccttctaatccctttcaagcatcaccattccatgatgactcagcattcaaatacctgactctttgggtaccattcctgttcaaaccaccacagggaagataacctatcttcccatcaggcacccatagagttcctaaaaagtcatttataatttatttggaatatttctccaactgatctatttgcactacaatgattacttaacatattgt

SEQ ID NO: 872 - DNA, 1000 bp, mus musculus
ggcttttttgtgtttcctctttaagagcttctacctatttacctgtgttctcctgtatttcttttgtttgtctgtttatttgtttgtttgttttttttttgagtctcctgtatttcttcaagggagttatttatgtccttcttataaacatctatcatcatcatgagatatgtaactttaaatcagagtcttgcttttctggtgtgttggggtatccagggcttgctgtggtggaagaactggttttcgatgattcaaagtagccttggtttctgttgcctaggttcttgcccttgcccctcgccatctgtttatctgtggtgctagctggtcttgctgtctctgactgtggcttgtcctacctgtgagcctgtgtgccagtattcctgggagaccagttctctccaggaggaatttgattctggagagctgtggcacagggtcagctccagggtgcagacggaaatcagaaggatcctgtgccctactgtttcttggttcctgtttcctgatggttctgggcggatccctggggccaggaatttgagcagaagtggtggtcttacctgtgcacacaggtgtgtcggcactcctgggagaccagctctctcccagcagatttgggtaggtagtgctgtggcacaggatcagctccagatgcagatggaaagtggaaggatcctaaattattacttttaaagttctagccatctcaaacttctcccatgtatgccagaaaggcacagacatccaactgttgtcttcattctatgccttttggatttggctcaatgattcttgacctcatattataatatctaaagacttggtgctgggctaccttcaaaccaataaaatccaaatatccaaggtagcatccacaccccagcattcttagtcttctcaggctatcatacatgcaaccaagagccactgacatgcagatcaataatcttgctgttacttgaagtttcttggaagtagttttgtgctacactgg

SEQ ID NO: 873 - DNA, 1000 bp, mus musculus
gacctcagtatattcaggtttttgcctttgccaatcatttcctattttattcaaggctttataaagacaactgacagaaagccaactcaaattactgcaagtaaaaaaataacacattggcttatgtaatactagtcccagagctgctcaaccttaaaggaacaagaataatatatgttcacgatgctatcaatcattgaaaagtactttccctccaaacctgacctcagaagaacagggccacttcttttctcccaggcttcttaccagatccattaacagataaccctactcaccttctctccacaaggtttctaaatgtgcataacctgatgtacgtaggagaaacaatagccaacgcagttgtgctttcacataccccaaatcccagtatttagaaagctgaggcaagatggtcatggctttgaaatcagcctgcactacataaccagagcctgtcttaccaggtcagaccaaacccaacccaacctaaccccaaagctcaaggcaaagtgatgtcctattgggaagtcatcatcaatgtctgtagtggatttggcctaatgctgcttgtatcctaaggttaatttgggtcccctaaacttcttacctgagtatctgcaagtagcttctggtaacccgcctccacttggttctgattggtaaataaagatgccagcagccaatcgttgggcagagcagatagaggcaggaccttaggattcccaggcttgagaccaggaaaagaaaagggagaaagaagtctgccagactaagagtgaggaggaaagaagagatgccagcctgagaagagtgcaggacaggaaggcatggccaccctgtgaaggaactgggagagtgcagcctagttaggcagccccctgggtcccaggcaaccaaggtagaatatagagtttagaaggaataactcagggataccagcaggaggtagattcacatcatggaggttaggcagtcgcccagctactgcactgttgaa

SEQ ID NO: 874 - DNA, 1200 bp, mus musculus
taataatgtaaaatatatttagatatgagataatcacagttgaagctgttgcactaaattttctgagtaagaactgggcacatagcgatgaaacagctgccctgctaggcatggatgcagaaacgtttgatttagctttagcagaggagaaatggaggaaccatagactattaaggatgaattcaggaaggcctgagaccatggaaaacttgcctgcactgtatactatttttcaaggagaggttgctatggtgacagaattatcaaaatcccaggctgtaggaagcaaggtctggttcatcgaactcccatgtcgtcctgtcgagtggataagccttctgcaatagtggatgttggagacaaagtgtgggtgaagcttattggctgagagatgaaaaatgatagaataaaagtgtccctctccatgaaagttgtcaactaaggtactgggaaagacctcaacaacaacattgtcattgagcaagaagagaggcacagtcagtccttcaggattacactgggcagaagatcacccttgaggccgtcctgaacacaacctgcaagaagtgtggctgcaaaggccactttgcaaaggactgtttcatgcagccaggtggaaccgagtattctctgacccctgaagaggaagaggaaaaagaggagacaaaggcaaaaggacttgagaagcctgatcccacaaagaattcgtccaggaagagaaagaaggaaaagaaaaaaaagaaacatagagacaggaggtcatctgattgtgaaagctctgactctgagagtgacacgggcaagaagatgaggcattcatcaaaagacagcaaggccaccaagaagaaaaagaagaagcagcagcacaaggaatgagggtggaacaagccacagcagccctttctcctgcaaggactcactagtgagagtgtagcctcctaccctactgacttgtcccgacggtctcagatggcttctcctcatgcagcaagcagattggggccccgcagggcacctaccaacattgttttcccttgttgctcctgatcctttgcaagcgaaccctgcagccattgcattcatgcactcagtgtcttcatttcggcagaaggttctagtcccaacccggctgccactgcccaagctggactcctctgcaggagtccatgctagagcctcaggtgctgctgtggagggaag

SEQ ID NO: 875 - DNA, 1000 bp, mus musculus
tttcagggctctcccagcctgcagggtcccactaatgacacagcttcatagggtgttccttgtgcccaggatgatggtgcctttttaatctaggttatctggcagttccaacaaggggtgagctgggggtgggggactgaaagggtaaaagctagttcttgtatgtcttcagatataacagacttcagcaggaggtctaacatgctaacctgaggtagaaaagggctgagcctgtaaggccttcacagaaagtgtagtacagggattcgacatttagcacagataactaaaccttgacagttgtgatgtcttggaacagtgaaagcagcagttagttatgtttgaaacagggatgtgtgggccatcaaacactctcactgagacactagcactgcactgaaggaagtctataggagaggccctgtgagcacctgtgagttgacgtgagctttgggttttactgctatcttgtaggcagtcagattccttgtgtgaccagagaatggggctcctgccatctgatctatctcagcactgcactggagtagttcctaccctcttctgctccatgatagctgttttcttttcaaaacccctttttatcgtgttatggtgggtccattgaagctggaaacacttaaaatcccataggaacaaagaacattccggatctttccagccccaaacttctacaagatagatagtttatctgtgtgtaaattttcctttgtgtttttgttttgtcttgagatgggggtctccactacagcccacgctggcctggaactcactctgtagatctaaactgcaattcttgcctcacattttaaaggataagtgcttcgtgcgacccataattaatcccttctaccacgcagcgtggctccctgagctgctagtggctgtgccaggctcgcctccctgtatctgtaaagttcccatttcatctgccccctactcctgccgagcctgctgcgctgcttcagatccacctttcaag

SEQ ID NO: 876 - DNA, 1200 bp, mus musculus
ctctccagaggcctctggtctgcctccgagctccaccatgaccacatacagctcaggctgcaggcagaggcctttctagggacatgatgctcttgccccattaaaaaacaaagcaaactgaaaaacaaaacaaacaatcggaacagaacataacaagcaaacaaacaaatacaaggtttcatacaacctaggctgggctccacttcactgtgtaaccaagaatgaccttgaactcctcatcctcctgcctccacgtccagtgaattgcagatatacaccgccaccgtctcattgagcagtgctgagactcaaacccaggaactcaggcatgcatgctaggctagcactctccccactagttagttatacttttgctcacgctcaccattgatttattaagttattttgtatgtgtatctgtctatgtgagtgtatgtcacatgtgtgtgatactgtgcctacagaggccaaaagagggcattggatccccagaaccagagtcactagcagtgctgagctgccaggcatcagtgctgggaacagaactttataccctttggaagtgcagcaagtgcttttaaccactgggccacctcccctcccctgcccgcagacatcgttatacacaaaacttctatgactcccacaaatgtgcacagcagggtagaaagctgaactgctgttcttagataaaaaatgaactattaaaagatcaaagctactgccaagtgcactgcaggtcaattatgttagatgctatttcactgttgttcatcaatgtgtttctaaaaactgcccccccccgaattccactgaagggtgggaggaaggattgaaggagccagagaggtcaaggacaccacaaggaaacctatgggatcaactaacctgggcccacaggggctcacagagactgaactgccaacccaagggcatgcacaggactgacctaggccctcagcaagtttgtaacagctgtgtaacttgatcttcatggtgaacccctaaggactggagcagtctgttgcctgtttttggattcctttcccctaactgggctggctgccttgcctaacctcaatagaagaggagcctagtcctactggaacttgatatgccaaagtgtattgatatccatagaagaccttctcttttctgaagagaaagagaggaagggaggatgggggagggtgggcagga

SEQ ID NO: 877 - DNA, 1000 bp, mus musculus
gcttccttcttagcctacagtgttgcactaatggccttatctgctcccagtcaccccaggctctgacctctgaatgcagctggctccatcattctcttaatacctccgagtggggagccagcataagtcttggggtcagaatccacatctgatatgcacaaagggtcatagccgtctttaatctttagcgcactacacagacagtccacatcaagtatctagacatccccaactgcctttgttcctgtcccatagcaaggaaacttgggttcagaaagaagacacatgctttctccaaggattccagcttatgggcaatggtaactagacatctaggcaaattttcctgaatgcaaagtcttacttccttatgagagcatagcagccaaactagaagtcacctgatgtcccccaggactgaggtaagccacacatgcccaaagatttttttctccatatcgagtagccaggaaattcagccatacaatggaaacatttggagaaagccagcctgatggtgaggctggaggggccagcagcactctgtacacacagcagccaatgccagcctggccatctgcaaagcagcttagtatccttgggtactgctcctggcacacacccctttgggagctcttttccatgacacactctccagggatggtctcagaatagcaatgtggtgactagtctacgctgtgtgtatgtgtgcgcgcgcatgctggccacacaggagccacggaaaatatgagaaagagattgtgagacgggtgtggtaggtgtaagcacagccatgcagaagagtccctgaactttggtgcaaagagagagaagctttgttttgtgaagggaagcgattgcagaaagatgccattacagagaaataaggagaaaggaaagaacaaaaaactcagagcggggggagaaagaaacccttcaggtacacagggaaaggaaagtacaatcagattccccccaacctctgctcacgtgcttggag

SEQ ID NO: 878 - DNA, 1000 bp, mus musculus
gtgccttttttttgtttgtttgagaattcagtccactacaccccagcattgtgggccactgggaaataactctgtagagagcctttctctggtattgtcaatctcagagagaaaaagaatggcatttgggttttgttttgtttttaatgagcataagtgtatatacacctgaaattaagagggggagacagggtcaggttctcctatgttttgtagcccagggttgaactgaaaatctcactccgttgcttgactgagcctgtagctggaagcggagctatgagaggaaaagcaagctattgttacagtgtaaataactgtcagcttcacagccatatttagagagccccctcctaatcattaccctctgttctgacatcgagtgtgcagaatactcaaaacacccagagattcaggcctttcagtgaaatagaggcgaaagccacagatatggaaacagagacagagtgaactgttgatacatccctcagaccatgttaaatatacatctctcagcagtcagttctcactttactttcagaatcatattcttgaccccaatctctgcagcaggtcctgctgctctatgaggcaagaaactatatccctccaggaagcctgaaaaagtgacttaatttgatgaagaaataatctcgctgtctcccttcccatcctccctggccaatatcaatcttgaaatagaatactctatcctcatataaatctctcaaatctctctcaaatctgaatagctggggaaggcacattacgtaatctacttgtggacaactgtggctgtcctactaaacaaatacagaacagagaatataacagacgcctatttttatccttcttaaagttatgaaaacttgcaagccccaccttgcatcagaagctgaatttaaaataaacatgttcccaaatggctcagcacaatattccagcaggtagagaccatagcttatttaatcgtaaaggaaaaataaaagcttgaatgaca

SEQ ID NO: 879 - DNA, 1000 bp, mus musculus
tgttttgagttaggatctttttgcattttacattttctttgattgttgtgtagatgtgctaggaagactgccgcctccccaggggatgcccaggggagtggggagagccagagacatctggttgtctccagagatgggtcagagggatcaagttttgtttatgaaatggaagcttatctgcctgcttgtagaagacaagaaagggtcgcatgtgtctagatctgttggtttttgttttatgtgttttgtgtatgtatttagagccatgtgaaaatttagagaagtgctagggtgactggagaagtcctgctgggagctgattgcaaacacagctcttaagggggcaggcagcctttgcttgtaacagaaagttagcttaaaattggtaactcagagttagagtcattctaaacaacatgtggcaggagtgaacccaggaaaacaggtctttaaagatacttcaaaataaggataatcttttggccaggaatctggcagactgcttagattgagaaatgcttgcgtttgggtcaatgcggagctcagcttggagcagcctcagtgaggcttgtgtagcatttcctttgtttcacaaactgtgactagggaagttctgagaacctccccaatccctgccttcagatttcttttagctataagagcacctttacagacgttgttttaaatacagtttaaattctaagtttataaaaggtcaatcaggctgtagaatttatcaaggcattgcgatttgacttgcctactttatataaagttattatagatttaaaagtttgtttttttcttttacatctagataaattgtaatgggtttgaatctagtgagctgtaatcaagaagctaagagtttgactctttcagtgtatattgttttctaggtggaaattattttattagctaatgcatctcaagagaagtttactttaaatccttgctctcacacaagaagtttttaagttctggggagtagctgttgctc

SEQ ID NO: 880 - DNA, 1000 bp, mus musculus
tctcaaaaatatatcctgatcacagtttcccctccttctactctgtccatgtcccacatatctccactacccacttccctagatctactccctctctattctcattctttgtaggcagtcatcaatgcattggggaaagttgtcattttagtgacagcaccagtgtcctttttgactatatgtgcatggatgagaagttaaaatgtaggggatgattaaaggtaagctgtgtgtggtaaattgcatcttttttgaaattctggctctaatcctgtgcccgtgccaacctgatctctgtgtgcagatgacagaattagatccaatgaggtgataaaaacatcagtattagaatataacttccccagagttgcactcaattgcttggttcactgagccatgatggttctgacctgatcctagtatgttgtaggaattttaaatatctcttagccaaattagagaagtggttcatgggatcataatactttcctctctaaacaatcatgtttcttaaactttgaaataaagtagcaacatctattgacctgcagttaccagtcccaaataaaagtgaatcagataagggctgaaatgtgatagatgcaatgctctgtggcttgcctgaaagtgtttagactgatttaattgtctgacattctcctggacatcttcctaccttgtatgtatacttaaggcaccaatggttacttttatgttgatacaggcaacttgttggtcaaagttaatcacaaaatatttacatctctattattccaaattcagacttattacaccagctccaaatacaactccaaatgcaaatggctgtgaccagtgttcagttctgtacaaccttgacaatcatggaggacttagtagagcttagcagttatctgtttgctgttggtcgatgctattgactttagaaaatatctgaaaacagagactgcagggtatttttctctctcaattttcccacaaagtccttcttctttatttc

SEQ ID NO: 881 - DNA, 1000 bp, mus musculus
attagctatggtattgctcccaagatgactctcagggaacaggagagtcactatgcacacaaccctcatagcagttggatcagttttgtcaaaatccttaatcctcaccttcaagaaacataaaccatatcttaggggccagagggtttttgtttttgttttcattttcatatcctcttggttttccttcttcccctcttgtctcactagaagctgccaccagaaccaagataattcacaagttaccttcatctcaagttcaaagccccccccatcatcccaccagcaaacaaaaaacaaaaactaaacaataaaacaaaacaaaacccaacaaacttaaaattaaaaacaaaaataaaaacaaaaaaaaaacacagaatgatcatacacacccatatcccagccaattttatatcagactgtttccatcctaattatgttctcattacttagaatttctggaaccagacaattctttgagataatcaacttaagaagaagactctttttggctcacaaatattagagatttcagcatgtggttggtgaatgaaaataaataaataaacgaaaagaaagggaagtaagtgacatggctgttcttaggtatggtggagggggaactttattgcagaaatgtgagagagcacagccagaaacacacacattagggaaagtcctgacttgtcatgaccccgaatcaagtggagagaggggaagagcaagggagaaagaggaaccaagcagccaggaggccaaaggtacaaaaggaaagccttaggtaaccaaattgtctggattatataggaaagagcagcccaagcttctgggctgaaaaatttagtgtagagagcagggaaggacctgcaatgggtagggactggaggatgctgggaaaacctggaggccaggttctctttgatatgttaaataagcccctgagccacttttccagagtttgaaacttatgctgtccctatagcttctgctcctctggaga

SEQ ID NO: 882 - DNA, 1200 bp, mus musculus
tagtactccattgtgtaaatgtaccatattttctgtatccattcctctgttgagggacaactgggttctattcagcttctggctattatgaataatgctgctatgaacatagtagagcaggtgtcctcaagaagaaggaagaccaaagtgtggatacttcgttccttcttagaatggggaatgtacaataaatatttttttggaatgatgaacataaatggaacattttcttttgatacctaaatagaggaatcaaaatacccatgtaggagttacatagacaaagtttggagctgagatggaaggatggaccatacagagactgccccatccaggaatccatcccatatacaaccacccaacccagacactattgcatatgccagcaagattttgctgacaggaccctgatatagctatctcttgtgaggctatgccagttcctggcaaatacagaagtggatgctcacagtcatctattggatggaacattaggcgaagtgcccctagtgaaggagatagagaaagtacccaagaagctgaaagggtctgcaaccccataggaggaacaacaatatgaactaaccaataccctcagagttctgtctctagttgcatatgaagcagaggatattctagtaggcaatcagtgggaggagaggcccttggtcttgtgaagattatatgccccagaataggggaatgccagggccaggaatcaggagtaggtgggttggggaacagggcagggggagggtataggggacttttgggatagcatttgaaaagtaaatgaagaaaatatataaaaaaggagtcttttatttctacagaatgaagttggacaggagcagtgtaacccagttcacctcattcatgaagtctaggaactctaggaaaagtggtaagagaggtaatttaaagagcatgtacttagacttctctctgtgaccagggtttgctcaatagcctaaagcacacagaaattccacctgaaagaagaatataggcttaatgcagttattcctcagtagaatgtgaactgctgtctcccaaaggtgaaaaatgaattggtcccatctgaatgttatttctctagtatctctttgaatctctaaatattacaaacattcaagtcctctcctcctttacattttattatttttttaagttcataaaatgctgtttaaatggatagaa

SEQ ID NO: 883 - DNA, 1400 bp, mus musculus
gttgtgcaaacattaagaaagataggaagaaaggaagacaggaaggaaggaaggaaagaaggaaggaaggaaggaaagaaggaaggaaggaaggaaagaaggaaggaaggaaggaaggaaggaaggaaggaaggaaggaaggaaggaaggaaggaaggaaggaagaaggagcatataaatgaatatatgtttcataagctaaactgggtcaatacattagttgctcagcaaatgtttacctaggaaatgaatgaatatatttcaaataatagcaagtgatagaaatgaataatatattttccctgttcttagatggctgaaataaaatgtagccttaaaaaaatctaagcatcacagttgattgagtgaatgagacaatatttataaactagttctagatgttgaaacagagttgatgatagtctttcaaatagaaatcaaaataataaattattaaacatacaaggtaaaagagatgagaatgaaatgtgctcaaatcatgatggaagtttttgtattatatttgtgaggagcaggtacatccgcctccccaagatggcgcccgggacagctgccaggtcttatggcctgcgcctgacttcctcattatctcagacttagtcacatcccagctgcctgcactgtgcagatgccatgcctcatcagctcgcctgaggtgtcttcacttgctgtgaacctatggactgctgttacttgactggggtgattgggaggagtcagtagggtatttaaggggcgccccagggttgtttgagggattcctgttcctgcattgcaatgctaagtgttcctgaataaacctgcttgaagaaggacaaagtggtgttgcatctttcctgctggtggggtggatgcgacatatattcaagaaaagctgtatcattgaaccacacatcacacataccgtgattttcttgaaaagtaatcacgaacttgaaatctatttgtccaagtcttaaatttcaatatttgtatgtaaatctcagaattcttgtcaaattaacccaagaaaaagacaactattatttttaatcatttggataattatgtaaaatgcttttaatgatatttatagttatctgttaagttagcacttcacactcatacaatatatgaaattttacaaatcaataatccagatactgccccacatggggatccatcccataaacaaccaccaaacccagacacgattgcatttgaaatgtaaatgaagacaatatataataaaaattttgaaaaaattccctcaagagtgaaatatgtacttttatacaggcaagaatttaaaacatgagtgaatattaattagaggatctactatccagagcaaatcatttacattaaggtatttcttgaacagggcatgtggctgagtt

SEQ ID NO: 884 - DNA, 1000 bp, mus musculus
attattattaatcattccattcatttacatctcaaatgatatcctccaccaaataaccatcccacatctgccctcttcttccactttgcctgtatgagagtgttcccaagcctcgaacaattttctgcaccaacattccaccatccccttatggtggagcttcaaacctccccagaaccaagggcttcccctcatgttgctgtcaagcaagaccattctatgctacatatgtatttagagccatggatccctccaggtacattccttggttggtggtctagactttagaactgggtggtcaggccagcttatgttgttcttccagtggagttgcaaccctgctctgctcttccagtccttctgccagctgtcccaccaggttccctgagctcagtcatatggttggctcaaatcatccacatctgcactggtcagttgatggccggttttcccaaggagccgccacactaggttcctgtcagcaaatgactcttgacacggcaacagtgttgggtttggggtctgcagacatgatggttcccctggttgacccttccttcagtatttgttccattattttgtccctgttcttcctttggacaggaatatttctgagttaaaagctttgagatgggtagatggccctattccttgaacaagggccataagtttctactggaggtgatctccacaagttctatctcccccttttctgcacaatttggctaaagtcattccaggtgggtcttgggagcctcatgtttgcctggggtctgagacaatcctaaaaccactttggaaatcagtctggtggattctgagaaaattgaaagtagttctacttgacgatccagctaaatgactcctgggcatatacccaaaagatgctccaatatataacaagaacacatgctccactctgttcatagcagccttatttataatagctagaagctggaaacaacccagatgtccttcaagagaaggattggtatagaaa

SEQ ID NO: 885 - DNA, 1000 bp, mus musculus
ccctcctccttagcttcttccagcctttccctaatttaatcacaggggtctctgacttcagaccattggttgagtgcaagtatctgcttctgtctcagccagctgcttgttggacctcttggggagcagccatattaggcttctgtctgtaagttcatcatagaatcagttatagtatcaggccttggagcctccccttgagatcagtcccaatttgggctggtcactggacctcctttccctcagtctccatttggttgatgcagttcttttagacaggaacaattctgggtcagagttctataatcttcatgtctgaaagttgtgctttaggatttataatactttgtgcaatttatgaatatgtgcaaacacagccaatgaccatcattcttcagtctattgatcactttttacaaaaaatgagattatctacttttataatgttaacaatatcattaatacaatgtctatgttcttactcttagccctgatgtttatattgttatctttaatttttgaacatttctttgtacatgctcatgtatcattttaaaactaatatttattaagcaaaataagttgtcttacttctaaacaaatgactctcagtcacatcattattcacagatataaattataaagttctaattcatgaaaaaaataaatttctcatctttccttaagtaccacatttaaatacttaacctactgtctctcaggatatctattttattaattatctactctcaaattgggggttttacccctcctttgattattcagttcccagataaaaggcacacaatctttatatttataagcctttataacaatagggctgggcagaatcgaccctctaaactattgtaatttatttcccataaataaccccgagttataacttgccatgttcaatctgggctgctcttaacttcagttggtcagagatcatggccatgctttcataattcacctacctaatggtatctccactctt

SEQ ID NO: 886 - DNA, 1200 bp, mus musculus
ttgctgcaaaataaatagctggtgcaatataaaatgaaacgaaaacctaatgtttattttctaatgtttattctagcattttcttagaaaacacatctaatcaagtctaattttatggaatctatgtatcaccatctgcttttctgctgctttgctattacattctaaaaatgtcgtttaaactattaaattctttcattttactgtgtgttgtggggcattgggctatgcacagacaggctggtcttcagttgaactgaggtctgaaccccaaagggtgattattcaccttcatggcactgtagtcattctctcatgctcctggaactctggctcctgtctaagttactgtcacccacaggtcccacaagaaaagcatggctagaagtcacccaagcttctgaccttcaggctaaactcctccccagttacctagcaacaaggagataagacagcatactttaaaaagggctgttcagcccctgtttgctctcttacatcactctcttacttcttactctcaccctctctcctctttcttttttcttttatcctctctcctcttttatctcctctcctctatcttactctctttctctccagcctcccccccccatctcttttctaccttttctctttacccctgcatttctacaataaagctataaaaccatagtgagtctctgctcatcaagatcccctgcactcactctccctggagatgggaacctctcttgcctcatcactcacttccataaccccctgtagctttagcaaagtagctccagtactcccaggtaggaatgccccttgccttcccctgaagagtgggtcagagggttagatgcccacccgaagatgagtggaaggtagatagcagccctcccaggcctgactgacaagtgcataggtggaactctggggggggggatctttcacttctccattttccccagcccctccccctttttagttcccaacagtgtgtaactcttcccaactcttttattctttcttgtttatttcagttctctttctaatcatagaccactagactgtgagcttataataggcattatttcagaaataattttgtaatagataaatggtttaatgtaaaatttctatgcttctaaaaatgcttcatgttagtttatgaagcaaattctgggggtaaaaaaaaaaaagacaaactataag

SEQ ID NO: 887 - DNA, 1000 bp, mus musculus
tagagaaacccaaacctagtgacacactatagaaattgactctttactgataagacaaaggaaagtaaatatattctaggctacactaacatatgagagatttctcaagataatgtatttttttaaaagtacagttttgaatgaagaataaaatgaattataggtaataaggcaatgatattatgtttccagttttaacaatgatataattataaaaaatgattacattaggcatgccacaagaaagatatatgaatatttcttttattttgaacaatatatttgtaactctagagtgattttcatgtaaatagttaaaagtcaggtaaagtatgttaggattcagtaacataattgtgactttgatgtctatgaaatgaatattgatttttcccttcagtgactctctaagatgggacatctcaggagtgcactggctgtagaagcaacagagcttctgggacgggttcctatgtgcctacatatgcagctagttggtggaccttatcctcagtcatctgtgcactttccctgccataggagactttgcctccagggaggactctgattctggactcaggggaaattgccattttctctccagtgattttctaaggcagctccaatcagcaatgcacagggcataacagaacatctgggacatggttctatgggtacatctgcagccaggaggtaggggagttcttcactcctatgggcactggtcttgacaggagagagcttgtctcacagaagtgctgacatagcatcacagattctcaggaggaagaagctccagccagagaaagcaagagcatataaacaccagagattaccagatggcaaaaggcaacacaagaatcttaccaacagaaaccaagactacttggcatcatcagaacccagtacccccaccacaataaatcctggataccccaacacaccagaaaagcaagattcagatttaaaatcatatctcatgatgctggtagaagatttt

SEQ ID NO: 888 - DNA, 1000 bp, mus musculus
gatttattctttattggatagtttatttacatttcaaatgttatgtcttttctgggtttcccccccgaaactcccgattccatgtccccttctcctgcttctatgacagtgctcccacacctacccacccactcctggcaccccgcactggcatccccctacattgggacatcaaaccttcacagaaccaagggcccctcctccaattgatgcataacaaggccatcctctgctacaaaagtggctggagccacgggtccctccatgtgtactccttggttggtggtttagcctctgggaaatctggagtgtctggttggttgatattgttcctgtggggttgcaaacccatttagatctttcagtcctttgtcctttggggtccccatgctcagtacagtggttggctgtgagaatacacctctatatttgttagactctggcaggagacagctctatcctgtctgcaagcactttttggcatccacaatagtgtctgggtttggtgtctgtacatgggatagatccccaggtggggcagtctctggatgtccttttcttcagtctctgctccacactttgtctctatatttcctcccatgaatattttgttccaccttctaagaaggactgaaacatccacatttttgtcttccttcttgagcttcatgtggtctgagaattgtgtcttgggtattctgagctttggggctaatatccactcatcagtcattccatatcatgtgcgctcttttgttactgggttacctcactcaggatgatatttttacttccatccatttgcctaagaatttcatgaagtcgttgttttttaatagccgaatagtactccattgtgcaaatatataacattttttgtatgcattgctttgttgagggacatcagctttccagcttctggctattataaataaggttggtatgaatataatggagcatgtttctttgttatatcttttgtgtatatgcccagaggtgg

SEQ ID NO: 889 - DNA, 1000 bp, mus musculus
cctgtaattctttaaaggcttctatctgttcagcagtgttctcctgtatttatttaagtgagttattaatgcccttcttaaaatcttccaccatcatgagatatggttttaaatctgaatctcacttttcagttgtgttggggtatccaggactcgctgtcgtgggcataatgagttctgatgatgcccagtgttcttggtttctgttagtaagatgctgacatttgcctttcatcatctggtaatctctggtgttaatgttctagcagtctctgactggagcttgatcctcctgtgattctgttagcctctgtctgcactcctgggagtcaaactctcacctgagtctcattggtcagagcactctctgcagcaaactctcctcttgcagggcaggtgtccagaagtctggagttctgatccacgtcttgagtcctaatgtcagagccctccctgtaagctgactcttctctggcaaagaaggtgcccaggggtctgggtctggctgaggagagctaccttcttgctgaggatgaaggcctgaaggaaccctttccaagaagctctgttgcttctgtagtccacatgatctccagtgattatgaggtcctgggtcttgcagagtggagagtcctctggggccctagatgccctcaccccggttcaaacagaagatggagggctggccctgacaggaagggatcccagcccctggttgggcagggttctgttgtccctgttcctgctggcacaagtccctccttgatctttagagctgatattgcattccagtcaccagtgatcccgaggtgatcccaaggtcctgtgttgtggagagtcttctggggttcttggcaggctttgccagttttaggtggaagatccaatttgtacattcattgtatatttagatataggtttttatgtaaattatattttcattgttccccttttcagtccacttttgaactcatctcatgttcccctgaatatattctca

SEQ ID NO: 890 - DNA, 1000 bp, mus musculus
tcacatcattaacccctgcttggtctgccctccaactgtttctcatcccagtcctcctccttcctctccaagaggatgtcctcaccccctctcccacatcccatctgacttccccactccctgggggatcaagcccctctctagggttaggtacttcttctctcactgaggccacaccaggcagtcctctgctgaatgtgtgttgggacctcttacctgttagtgtatgctgcctggtaggtggctcagtgtctgagagatctcaagggtccaggttacttgatattactagtgttcttgtggacttctgccacagcttcttccaacctttctctaattcaacgacaggagtcactggcttctgcttattgcattaagtatctgcatctgactcttttagatgttagttgggtctctcagaggacagccatcctaggctcctgtctataagcacaccatatcatcagtaatactgtaaggctttggagcttcccattgtgatggatcccaatatgagcctatcactagactatgttttgctcaccctcttctccattttagcacctgcagttcttttagacaggaataattctgagtcagaatttttgagtgtgcaattgcaacccattttttccacttagtgcaactgatctgggaagagctctattgtttttggggtcctccacataaggactaagctgctcatctgctgtatgtatgcagggagcctaggcccaatctgtgctcacagttttgttggtaaatcagagcctccaagggaccagtttttctttcatatatatatatatatatatatatatatatatatatatatatatatatatatggtattttcttcatttatatttcaagtgctatcccaaaagcccccatactctcccccacatctctcctatccaccctctcccacttcttggccctagcgtccccttgtcccggagcaaataaagtttgcaataccaaggggcctctcttccca

SEQ ID NO: 891 - DNA, 1000 bp, mus musculus
ctaggtagaacatcaagttctatactgagtaagtaaagcaagagtgggggatcttgtcttgttcatgattttaatggaattgctttaagtttttatccatttaattaatgttggctatttattgtagccttccacaagcctgaagcaggctgagccaaaccttgactttgttgccactaagcagattacttagggtggagcctgcctccctggatcactctgttgttctgccactgcagctgctacctgctgggagttggcctagctgtttcagagcctacacgtggtcacctgcagctgggctccaaggatgatttggcgggaatgggctttcccctctcctttataaagcgtgtctgccattaaaaatttgaaccttgaatagactagttgtcttggttccattatttctcaacctgcctaggctccttcttttctttcaggtccaagatgccttccaggctcgaacccagacgagccgctagagggcccccaacaatttatctactgtgtattaactgcatttattgtttttatgtatttaccttgtatccctgatctgaagacatttataataaacaggtattggatctttttcaaaggctatttcagcatctattaaaactgtcattaataagattttctttcagtttgtttatatggtatattatattgaaagacccacaacgtgaggactctcccacattctgattcaggagaggcgacaccccaaattcacccacaagaaacgggtcttgctgcaaattgcaagaggatttttattcaagagcgctctcgggcccatggtcatacaccacgcaggggtagaggaccgtggcgccccgagtagctgagtaagggggtatttaaaggaaaaaaaccacaactcaaggaggtgggaagggtgttgttggaaaataccaaaaataccagttaagagtcacaaggaagtacaaagtcacaagtgtcaggtgtctcaagactaagagcccctaacaat

SEQ ID NO: 892 - DNA, 1000 bp, mus musculus
ctcttgcgaactttctacctggttactacagccaacatatatatcaaggtgatggggaatgatatagatcatcacatatagagaaaaaataagtgtacaatcttattgtctgtgcaaaaacagatgtctataataactgtcaagagacaagttagaagaatgcaagtaaatccattctaatctccttgtacaaaactcaagtccaaggggatcaagggcctccccataaaaccagatgcactgaaattaatagaagagaaagtggggaagagctttgaacacatgagcacaggtggaaattttctgaagagaacaccaatggcttatgctctaagatcaagaaatgacaaatgggacctcataaaattgcaaaacttgaaagcaggatgggggagccatcttgggtcccaggtccctcagaaaccaatctgctcaggtgagagtgcagactgcagaaaaaaaacaaagcttctgggacaggaagaagtgacacagcttctgaaacagatcctgtttcgggctccagatatctgggcaccttccctgccagagaagatgagggagccatcttgggcccacatccctcagagacctgtctgtgcaagtgagcacacagactgcagaggcaacacatcttctgggacaggccctgtattgggccttcatcttcagccaggaggcaggactgaacacttgacctctgtgcaccttccctgcaagaggagagcttgccaacagagagtactctgatcactgagatgcaatagagagctgaactccaaggactgctgacagaggctaacagcatcacaggagaaacaagctcacaccagagacaactataactactaacgtcagagactacctgatggtgaaaggcaaacgtaagaatcttactaacagaaaccaagaccactcaccatcatcagaatccagcactcccacttcacccagtcttgaaaacaccaacacaaacaaaaagcaagacttggatttaaaa

SEQ ID NO: 893 - DNA, 1200 bp, mus musculus
aaattccaactcaattcttcaacgaattggaaggagcaatttgcaaatttgtctggaataacaaaaaacctaggatagcaaaaagtcttctcaaggataaaagaacttctggcggaatcaccatgccagacctaaagctttactacagagcaattgtgataaaaactgcatggtactggtatagagacagacaagtagaccaatgggatagaattgaagacccagaaatgaacccacacacctatggtgacttgatcttcgactcttacacgcattcacgcgacatgccaggaagaacgcaacaaaccggaatattctgcggcaaaagctttattgcttacatctttaggagccagagagcaagagagcaagagtgcaagagagagcaagaaagcaagaaaaagaacaagagcaagctaaagaacaagaacaagaaagcaagagagcaaaagtgcaagagagcaagcaagaacaagagagagaaaaagaatggcaaaaccccgtcccttttaaggagaattatcctccgcctaggacgtattactccctgattggctgcagcccatcggcccagttgtcatcacgggaaaggcagaacacatggcaggaaaactgcccctgcacgtgtgcagattatgtttaccacttagaacacagctgtcagcgccatcttgtaatggcaaatgtgagggcggcttcctacattcgacaagggagctaaaaccatccagtggaagaaagacagcattttcaacaattggtgctggcacaactggttgttatcgtgtagaagaatgggaatcgatccatacttatctccttgtactaaggtcaaatctaagtggatcaaggaacttcacataaaaccagagacactgaaacttaaagaggagaaagtggggaaaagccttgaagatatgggcacaggggaaaaattcctgaacagaacagcaatggcttgtgctgtaagatcgagaattgacaaatgggacctaatgaaactccaaagtttctgcaaggcagaagacaccgtcaataagacaaaaagaccaccaacagattgggaaaggatctttacctatcctaaatcagataggggactaatatccaacatatataaagaactcaagaaggtggacttcagaaaatcaaataaccccattaaaaaatggggctcagaactgaacaaagaattctcac

SEQ ID NO: 894 - DNA, 1000 bp, mus musculus
cctctgagtttcagtgctcagagcactctctgctggcaagctcttttacagggaaggtgcgcagatatcttgtgtttggacctcctcctggcggaagaagaaggcccaaaacaggacctttctcagaagctgtgttgctttggcagttcccagaagctgtcagcttctgtggtgcagactctcacctgtgcagactaaattcctattttccgcggagtcccggaaccaagatggcgaccgctgttgctgaggctgaggcctcctccagagccaggtggacacctgtcctctggtccggatggtggccgggtgtctgtgtcccgcaaggggtgctgcctcagcggctctgtgcttccgcctttcccagaagctgtccggttctctggagcaccctctcacctgttcagactaattcctaaggtccgtggagtcccggaaccaagatggtgaccgctgctgctgaggctgaggctgcctcctgagccaggcagacacctgtcctctcatgttacatatgattttaaatttaaaaaaaaatattctaaagtaagctctcatgaaagagatctgcaaccctgtaggtgcaacattatgaactaaccagtatcccggagctcttgactcttgctgcatatgtatcaaaagatagcctagtcggccatcactggaaagagaggcccattggacacacaaactttatatgcccaagtacaggggaatgccagggccaaaaaatgggaatgggtgggtagggaagtggggggggagggtatgggagacttttgggatagcattataaatgtaattgaggaaaatatgtaatattaaaaaatattaaaaaaaagaactgtaacatatttaaagagaaagagcaaaagacatttacccattggtctgaatgtggtacatgtcaagtcattaaaccaaacactatgctgcattctcatgagcactggattctctgactggacttgcaccacacttcatttatcttctgcag

SEQ ID NO: 895 - DNA, 1000 bp, mus musculus
ttatgcataccttgctaaatacttttgttagtggtttctggccaaatgcacgtttatcaaatatctttttctttaaataacattttatgtttcatatttgatgattagaggatggcttacaatatctgtatagttgggactgttatctttcttcatctccaaagaagagaaaagtgtggcattggaagtatgctcatgagcatatctgcctttttgttcaaatgttatcaccctttccagttaacccctccaccacctcccccatcccttctacttttttgagggtcctcccccacccacacaccccatccaacctcagcacccaagcattcccctaggctgggtcattgagcctccacagaaccaaggggctccttcgcattgataccggataacgtctgctacatatgcagctggagccatgggtccttccatatgtactatttagtgggtggcttagtcccactggactttggggtggggtggagtctggttggttcatattgttgttcttcctgtggggttgctaacctcctcagctccttcagtccttcccctaactcctccattgggatccccttaattagtctgatagttggctatgtgcgtccacatttgtattggtcaggtgctggaaaagcctctcagggaacagccataccagacctgtcactaagagcttcttggcattaatgatagcatttgggtttggtgtctgcagatggtatggattccctaagtggggcagtctctggatgtcctttccttcagtctctgctccactcttagtccctgcatttccttttgtcaggaacaattctggattaatatttttgaggtaggtgggtggtcccatccgtcaaccagggggcatgcctatcgactggatattgtctttgctatgaccttcaatcccattgataattccaataaattccataataatttataactttaataagcagtactttttattgttctatattattttaaattttgt

SEQ ID NO: 896 - DNA, 1400 bp, mus musculus
gtgagaaggtatgaagataactccatttagttcaaaattttgttgcattcattgtgtctccatttagtttcaattttgatgacatatccattggtggtgagagtgatgtgttaaagtatcccatcattattgtatggggttctatgtgtgttttcagctttagtaaagtttcttttataaacatagctgtgcttgcaattggggcatagatgttcagaattgagaattcatcttggtgggtttttcctttgatgagtatgaaatgcccttcttcatctcttttaattacttttggttaaaagtctaatttatacaatatttgaattgttactttgtagggcagtgagctacgcacagacaacctggtttccactccagcataggtcttgaatccggggagacctatgtgggacaaaagatgttcaatcttgtctcctggacccctggcttgttactgcccccacagcccccgcaggagaggtaagtaactctcagtcacacagacaatgtctcaagctcctggcattctggctagactccacccccacagttacctgactatagccaggtatgctcctccccacaattacctgatagcccagcccactataaaagggactgctcggccccttctcgctctctttaagctctcaccctttcttactcttctctctagccctccttctctctctctctcctttccccccgtctatccacgtggccatggctggcctctctctaccttctctctttcttcctgcctttctacaataaagctctaagaccataggctgtctctgctcatcaacacccactgtgcttgaatgatgggataggctttcattcccctaatgagctgcatctaacctgccactggaaggccttcctgtgctccagccacgactagaccaaggactctcgcccatgtgagaaccacccagtgtcctctccccatgacctctcctccctttggcgctggggctaattgaaccacccctgggcccccattctgttctcagctcttccgaggtgtccagtgtgagatgcgaagaataagaacctggtaaggatggccccttgtcaaccccccaataagctgggattctgtggcttcacacagccagacatgcacctggaaccatgtgaaaagcccactccttttattcccctggtgccttctgcccaacactactccagcttgtttcttgcttctttttgcttgtaaaacgtttaaccagatctttactctgagatagtgtctacctttgctgcttaggtgtgtctcttgtatgcagcagaatgatggatcctgttaaatatgcattttgttaacctgtatcttttcattggtgatatgattctagcgattctgagagaaattagtgaccaatgattgtgag

SEQ ID NO: 897 - DNA, 1000 bp, mus musculus
tgtaatctttcaaaaacagttcatcagcaagttactaaacatatgcgtatgtgagcctaagaaggacattttccctcatcacaatgagggaaggctatggcttctgcccatcacatggtccttctggtcattcctgcttttgttgcaagaacttctctgagctatgaaatcacaaggaggaaactcattggagactagaacatatgggcaagctctaagaaaaagtgagtagaaaacagtctagcaaattcaagttttataatctgacagttattatttttcttgatgttttggggtttgtaagaatctgtgcttggagctgggcatggtgatgcacacctttaatcccagccctcgggaggcagaggaaggctgatttctgagttccaggccagtctggtctatagagtgagttccaggagagccaaggctacacagagaaaccctgcctagaaaaacgaaagaaccccccccccaaaaaaaaaaaatctgtgcttgggtctgtatatatttgtgttcactacagaaaaatctatagattctttcttatctcactctgtactataatgattttttaaaaaattattattaggtattttcttcatttacatttctagtgctatcccaaaagtcccccataccctcccccactccccttcccacccactcccacttcttggccctggggttcccctgtactgaggcatataaagtttgtacaaccaatgagcctctatttccactgatggccgactaggccatcttctgatacatatgcagctagagacatgagctccagggggtactggttagttcatattgttgttccacctatatggttgcagatccctttatctccttgggtactttctctaggtcctccattgggggccctgtgatccgtccaattgctgactgtgggcatccacttctgtgtttgctaggccccgggcatagtctcacaagccacagctatatctgggtcctttcagcaaaatct

SEQ ID NO: 898 - DNA, 1000 bp, mus musculus
ttacagtgtactcatataaataagagatccatgaaggagtcacagcctctatactgcacaccaggtgacacttgtatgcacgtgtgaagtgaccctccacatggccacataaaaatatcaaatgaaagatactgagttacattgctgctcattttgactggatttttgtttgagttcctatcccttatgttgcaaatagcagaggaacctttcagcttaccagatttctctcatatgtttctagtaccattcaagagaatgcaggatgaagcaaactgctcatgtagactcagaggaatcctgagggtggatgatgcaaggactttccctaccttgaatatccaggccacatcattcaccgagtgcttttttatatccacctcttccccagagtccaatttcttctttagtgttttgcaagatgtctcattgggaatgatcatgaatgtgcccttggttgtaggacttttctcgctgaggattgagaggatgtcctgagaggaagaaagggaaacacctgtcactcgacatgctccacaaagcactttttgcttgtgagaaccagactaattgtgtgcacaggtgcagtgcaaggctggcatggacaaggaggacttcgaactgcttttgtggatcaatcgtttcatgtacacatcccactcgagtgttaaacctgaaagatcgggcaacacttatttttgaacagattttccttaggagagccagaaatgaaccctatgagacccaccgggattgctgtgggccattgccttcttgacatacagaactcaattctttaccaaagagtgtctgtctgttaacagtctggacagtatatacttgctccttgcggggcacagagcccctgtgaaaacatgctgtccaagacggactttttttcttgtgaggtcttttctttccatctaaggaggagatgaggacattactggaatagtgtaatttatatggctctttaattaaacaaatttcaattgcataa

SEQ ID NO: 899 - DNA, 1200 bp, mus musculus
tcaataaattaacttttacaaagattattttatttttcctacaagtatgcttttcttttttttcttttattattattattctttagtcttttttttttatagtccagtcactatccccctccctgcctgccctcctactgttcctcatccattcctcctttcttgtcatcaagaggataccccccaccactctgaccccaccaatctctcctctccctagggccttgtctgttgagggttagctgcatcttctctcacccaggccagaccaggcagtcctctgatatatatgcaccagagacctcatatcacctggtgtatactgtctggttggtggctcaatgtctgaaagatcttgggggttcaggttgagactgctggtcctcctatggtgttgcctacctcctcagcttcttctagcctttccctcattcaactacagggcgtccctggcttctgtctgtttgttggttataaatatctacatctgactcatttggctgctggttgggtctctcagatagcagccatgctaggctcctctgtaagcacaccacagcatcattaatagtgttaggccttggagcctccccttgagcttttcttttcttcttttatttttattagatattacatttcaaatgttatcctcttttctagtttcctcctcgaaaatcccctatctcctcctccctgctcctgctccccaacctacccgttcctccttcctggccctgacattatcttatactggggcatagcaccttcacaagaccaagggcctctcttcccattgatgatcgactaggccattctctgctacatatgcagctagagacatgatacagctgtctcctgagaggctctgccagtgcctggcaaatacaaaagtggatgctcatggtcatccattggacagaacacagggtccccaataaaggagctagagaaagtacccaaagagctgaaagggtttgcaggcccataggaggaacaacaatatgaattaccccagagctccctgagactaaaccaccaatcaaagaaaacacatggtgggaccccttgtgcttttctatgtggtggtatgtatatgtgagggcagggccaatgtatctgttatttcaggaggttgtgaaccaccctggtagtatgttgggaacattgctctggtagtctacaggaccagtacattctctt

SEQ ID NO: 900 - DNA, 1000 bp, mus musculus
attacctgggaaagtgactatgtgtattacaggagaatagagaaaataaggacagatttatccaatgaggccaagaaaaccaagcaaaactgcagtgattctcaatgtggagtaaaagaatgaaatgtgtaccagtggggcatagggaaccagaggtagccactagaaagtctcagatgccaaggaagcaagagattcccaggacccaaataggatgacattagctgaaatccggtagttaggcatgacctcccgtgtagactatcctcagttagaataaaattacatctcaaaaatattaacccagaattgtcccagtctaaagtaagttcagggacagagtagagcagagactgaagaaaaggccattgagaagccccacctagtgatccatcccatctgtaaataccaaacccagacatgcttgctaatgctaagaagtgcttgttgacaggagtcttttctctgagaggctctgccagaaactgacaaatacaaatgtggatgctggcagcctaccatcagaatcagcgcagggacaccaaaggaggagttagggaagagactgaaggatctgaatgggattacaatcccataggaaaaacaacattttcaaccaaccagacccctcagagctcccggagactaaagcaccaatcaaagaatacacatggagggacttatggcttcagccgcatatgtagcagaggattgccttatctggcatcaatgggtggggagacccttggtcttgtggaggttcgatgtcccagcacaggggaatgtaagggtagtgaggcagagtgggtgggggagcacccacatagaggcgggggagggtgggtgggatgggaggttgtggagctgcaactgggaaggggataacacttgaaatgtaaataaataaaataaccaataaaaaaggaaaaaaggaaagtttcctaaaacactggaaaaaaaaaaaaagaaagaaagaaaaattgaatgaactcctagaaaa

SEQ ID NO: 901 - DNA, 1400 bp, mus musculus
tagaagtcattttcttttcatcaagtgatttcctctttcttttatctctgtgcccagactgagttggaaggattaattcccagtagatgttctatttctatgcatatttattcagcatttgacttttccctccagagtatcaaatttgttttgcatacagttcagtcattgatttttcctcttgccacagctcactcagatctattctaagcaagcatatttgaaggcagttttggtttctttctttcttcaaagctgtggtaatggaggttacttttcactaaccacatttagtcatcatcttctttatatcacatcgaaagatctaaaattctcccttgggtctaaaagtcgttctagattttacttctatccattagtcaatctaatccacccaaacacagcatcatgaaatatattattcttaaatttaaagatgcaaactttatattgattatacacatgtataaatattcacaagttagttttcaaaggaagattaaaaatttatttacttaaactattcatgttggtgtaagcaagtgtggtggtttgaatatgcttagctcagagagtagcgctattaggaggtatggtcttctgggagtaggtgtggccttgccgatataagtgtgacactgtcagcatgggctttaagaccttcctcctgaccatgtgagagccagtcctcttctagtggtcttcaagtaaagatgtagaactctcatctcctccttgtaccatgcctgcctagatgctgccatgctactgccttgatggtactagactgaacccctggctctgtaagccagtcccagttaaatgttgttctaagaagagttgccttgatcatggtgtctgttcacaatagtaaaagcctaactaagatagcaggtgagagaaaaatcaaatgcttttgaaataaacactcagaaatcttgatttattttttgacagaaaagcactagtttatactttccagacatttatttttaaaagaaagtatttgctaactctgaacaatgtacatattcatgaaagtgaactggccttagatctctggacaaatgagagatttatgttgagaaattcaagaaaaagtaatcttgataaatatgtgacatgaattgcagatcaaagaaatcactgaaaatatgatgaaaattaattattttaagtatacatagaaaaagattatctttaaaaattagaagtacaaatttagttctggctcagttgtgagtatttcacagctaagaaatttcaagaatacagctatttttgaaaagtgcatttgcacatttttagacagggccattacaatttaaatgacatcctacaaattgaagaaagaaataatttcttggtctgcctgattgtgaggtttgtacatgaaacat

SEQ ID NO: 902 - DNA, 1200 bp, mus musculus
aaatataaatgatgaatgatggagctcattgcaaatgtggccagtcattgctatcagcaggatttttccccatctttaaaaaaaaatttttttatttgtttacattttaaatgatatctcccttccaggttactattccacaaaaatcccatcccatctcccctatacaccctcccctttgcctctatgagggtactcctccacttacctatttctacctcactgacctagaatcctcttaagctggggcatcaagactccacagttacaagggcttcacttccctttaatgtcagataagggtatcctctgcaacatatgtatctggagccatgcatcctttcatgtatactattggttagtggttaagatcctgggagctctgggtggtccagttagctgatgttgttcttcctatagggttgcaatcccattcggctcctccaggtcttcctccatctcttccattgaggttcagggctcaatcatatggttggatgtgagtacctgcatctgtattgttcaggtgctggtagaacctctcagagaacagccatacaaggctcctgtcagcaagcacttcttggcatcagcaatagtgtctgggtttggtggatacagacgggatgaatctctaggtagggtggtttctggatggcctttccttcagtctctgtcctactttttatctctgtcttccctctagacaggaacatttctggtttaacaatttctgcagaattttaaaatacgaattcttccaaagaaagtcataacagtggctgctaagtgaagatgcatctggaggtgtgaatagtattctgaagcatccactatagtcccagtcttgatgaaaaccattagctattacaccccaggaaacacatgtttttgcactgatgataaccattattttttacaaataactctaaaaaggtattcctatgatcaaagcattggctcacttaataatacttcatgatccaatgtgttactgaacgcattgttaactctgaaacttgttgggaagcaagagacatgtcagtgaatccagaaaagaatgacacacacaagactacatatggcctcagcaatcacatttgcagaaatgtagccccaaactcaagaacatcaattattctctgtgagaaaacatcctatccttcaacattatttcctttggtaggctttataataaat

SEQ ID NO: 903 - DNA, 1000 bp, mus musculus
atgacatatagaaaatgtgcaccctctctttcaaaataactacctaaagtatccccactattcaactttgcttttgctaactccttagattaccaatgtataggcagccgatgcctaaaagatggcgccggtttccagtacactgtggccataaacaaccttactgtgcctgagatagtcactacttggcgccagcccctcccgatcgagtgaatgctaatgaattgttcacaggccgaccaatcccaggaggacacatagccctccccagtgctgggttgtatataaggagtcctccctgggtgcccaaggtccccgtagcagcattgagatgttcctgcaataaaggctgttgagaagaatccgaccctgttgagtcttcctgaggtgggcgcgacatggtccactgtcttctttgtttcttttaaacaacagcagcagcaaactgtgaatgaacgttctatttctaataatcagaatatacaatgaggtgaccctctgatattttccctgttgaccataaaaatattagagttgtggaacttaccttaatttatgtcaatccatctacacagactatcattgtttgcacacaaaaatgcattcatacacaaattattctttcctaaatgaatagtacattttggggggggaatttaaaatttctattttgacttttaaattctatgacacttatgtttattatgatgagtgtttataacaaatcacaaatacccatatgattccacagatattgttataggattaatacatttaagccaacatttgctgtggttataactatgtggatgagccattgataaaaaaaacactctaaccttacatacacacacacacacacacacacacacacacacacacacacacacacacaaacatcccctatcctctttcccctcccccggctccctaacccacccactccagcttcctggcctaggttttcccctataccggggcatagaatctttacaggatc

SEQ ID NO: 904 - DNA, 1200 bp, mus musculus
gccatttcatgttttccaaccatttgcagataatagagatctggtggtggaccaactaattcagagcactgggtagaggattgggtagtagctgactgaactcctcagccctctggatcttcctcatctgcaacaccatgttgaactgtctagcattgctcatgctaggcaaccaagtgtccataagcagtaggcaagttaagccctcttgctctcactccctcagggctggctcaccctcacccatagctccagagtcagctccactgtgctgcccagtctaggttcatggctcataattctaagagctgcagcatgctaggggctgggcctgctcttctgttttcacaactttgggtctggcacacctgtgccttaccgttaagttccagctccattgtattatcaagcagaggctcagggcatgctctcccaagtgctgcacccaaggagtcggctcctggtctaacaacctcagggtcagttctccctgctactggaagtagtgaggaattaagacatatcaaccccacacctacaccagtgaagtgatggtccagttttgctcagcccatggatgtccatgtgacctcaggcagctgccctaactaggaacatctcatgttctgtaatggtaatataagccattgaaatccacagcaaccccggccactgtgtctttggttggagacatgggcctaagtggcagatcttgttgggatctcaccactgtcccaagtagatctggccattcatgacatgctcttcctctccactctcacatctccagttccacctttcatcaaaatgctcaaattgtttcccttctcttactcttccatctgactaggacacacttgcacattgtggtggctcctgttgtaggatggccttatagctggtgggcctctgagtgacctttctccatcttagctgctttggtatggtggtaagtgagtaactatggcctgcctgtttcgtagggtaaagggcaggtctgtgggtagcacataggtagagctctgtctccctcttcctgagctgcactgcatgaatttgatttgatttgatttgattttttataagtccaaggcataagacagctttggacaccaagccatgtatcaaggtgagaagaacaaaggactgccatctgctctgcccctgtctgatataagtacaacaccataaacaagcttt

SEQ ID NO: 905 - DNA, 1400 bp, mus musculus
aatattaatatttagaaatatactacatattgtatatatcaacataaaacagtttctagcattccaaattcaacaaagaattcctttaccaagttgtcagtagggaaggggaatcctctatcattctttcttttcatacattgactcaaagcaatgaatcaacggtattcttgaagtcacagattagagataggtagaattttcccttaatgaacaactataaaggtaaagacatagtcaaatggtccagtatttgtacataaaaaagatcttaagtcatagttgctttggttttgctagtagtagtagtagtagtagtattggttattttatttatttacatttcaaatgttattcccttccaagtttccccttcacaagccccctatctcctcttccctctccctgattctctgaggatgatcccctacctgtctacccactcctgtctcagtgccctagtgttcccctatcccaagcctccacagaaccaagaggcttccatcccagtgatgccagataaggcaatccttggctacacatttagcaggagcaacccttccctcctgcctccccccacctccaatagtctttggttggtggcttagtcattgagagctttgggggggggggttctggttgttttatattgttgttcttcctatgaggttaaaaacctcttcagcttctacagtccttgccctaatttcttcattggggtcccctttctcaatctgatgttttgctgtgtacatctgcacctgtattggtccactctggcagagcctccggggaggaaagccgggtatagctgtcccatagttgctttgtaaaagggattccagtatgacaatttcatcaaatctgaaagataataaagaactcacaaatggtgatggtaaattcagaattttagttatgaaattaacccttcttcattagtatcagttaaaatatagtatgttatctcctcatagctgttttgccaaaaaaaaagaaaaaagaaaagaaaaagaaaaaaatgaaaaagaaaagaaaaatgttctaattagtaaatacagagcagatgcaggaattacagaggaaacagaataaagtcaagcagaaaggataaatgctcggtaagagaaatgataaaccaagttatccttcccaaagtctttgttcatcccacattgtcctttagaaaagcactctgtagctctctctgtgtttgaagagttaatcttcctctaaatctaatgcttctacataaaagagcattgagcctttatcctggtccgaagagattgtggcacaaatcccttcttttgcatccctgactttaatcttagatattttctcctagaacagcagcttcttatacatttttaaaagtcatgataaaccattgggcttag

SEQ ID NO: 906 - DNA, 1000 bp, mus musculus
cccagaaacctagaatatccaagatacaacttctaaaacacaagaaaatcaagaaggaagaccacctcgttgatacttcattcctccctagaagagggaataaaatatccatggatggagtggcacagacaaagttttgacctaagacgaaagaatggaccatccagagactgcatcacctcggggtccatcccataataagccaccaaatgcagacactattgcagatgccagcaagattttgctgaaaggaccctgatatagctgtctcctgtgaggctttgccagtgcttggcaaatacagaagtggatgctcattgtcatctattggatggaacacagggccccaatgtaggagctagagaaagtacccaagagctgaaggggtctgcaaccctataagtggaacaacaatatgaactaacaagtacccccagagcttgtgtctctagctgcatatgtagcagaaaatggcctagtcagccatcatttggaagagaggccccttggtctagcaaactttatctgcctcagtacaggggaacgtcagggccaagaagtgggagtggatgagtaggggagcagggcggggagagcgtataggagactttcgtgataacatttgaaatgtaaatgaagaaaatatctaataatttttttaaaaaaagaagggatagagggaagtaagaagggggagctaagaagggagggatgaaaataaaacaaaagataattttttataaactaagtagagctccatgtatcagagtgcatgctacaattaagcaattgtattttaaaagaaataaatacactatcaaaatcgatcaaatatgtgtagttatcatctctaaagttgtccattgctgaaacttgccaccagcctgagtgtgctgatgtactccgatggtcacagcgcactcaagtctgtagttagatatctgcacagcccagatcatttattaaatctgtctgaaaaaccaaacacaaccaataataa

SEQ ID NO: 907 - DNA, 1000 bp, mus musculus
atcatacaatctactcaagatcaagggcctctcctctcaatgatggctgattaggccatcttatgcaacatatacagctagagacataagctctgggggtactggttagttcatattgttgttccatctatagggctgcagaccccttcagctccttgggttctttctctagctcctcaattgggggcgctgtgttccatccaatacatggctgtgagcatccacttctgtatttgccaggcactggcatagcttcacaagaaacaactatatgagggtgctgtcaggaaaatcttcctggatatgcaatagtgtctgggtttgttggctgtttatgggatggatcccagggtgtggcagtctctggatggtccttccttccatctcagctccaaaatttgtgtctgtaactccctccatgggtattttgttccccattctaaggaggaatgaagtatccaaaatttggtcttccttcttcttgagtttcatgtgttttgcaaattgtatcttgagtattctctgggctaatatccacttagcagtgagtgcatatcatgtgagttcttttgtgattgagttacctcactcaggatgatatcctccagatgcatccatttgcctaagaatttataaaattattgtttttaatagctaagtagtacttcattgtgtaaatgtaccctattttctgaacccattcctctgttcagatccatctaggttctttccagcttctttctattataaataaggcttctatgaacatagtggaggatgtgtccttattacaagttggagcatcttctggatatatgctcaggagaggtattcctggatcctcccgtagtactatgtccaattttctgaggaaccgacacactgatttgcagagtggttttaccaacttgcaatcccaccaacaatggaggagtgttcctctttctccacatcctcaccagcatctgctgtcacctgaatttttgatcttagttattct

SEQ ID NO: 908 - DNA, 1000 bp, mus musculus
ggagtctaactctcttctgaatcccagtggtcggagcactctctgcagacaagctctcctgttgcagggaagttgcacagaggtctgaagctcagatccaccacttagcagaagatgaagatccgaagggaccctgcccaagaagctctgttgcttctgtggcccaagtgctttcctgctcagactgatttctgagagacctgggatacaagatggtgcttttgcctgagtacctgggttggagcccttcctggaggctgactctcctttggtggggaagttgcccagagttctgggtctcagatctacctcctggctgaggatgaaggatctatgggaccctgtccaagaaactctgttgcttctgtggtccacgtgctctcctgagagtccaggaatacaagatggtgctctcacctgggtcacagggtcagagccctctctggaggccaactatcctcagtgatcctaagatcctgggtgtgctagggcacctgcagtgtggagagttctctggtgaccatgcgactgtccaccaaattcacgctcaaggtggcacagggctgtcactgaccagaatgaacgccagcagttggtcgggcgggtttcctgtgttcttgttcctgctggcccaagcccctctgggttgttttggaacagatgtttcattccactcaccagtgattccaagatcctgggtgttctagggtgcctatggtgtggagagtcctctggggaccttgggactgtccactgagttcactaccatggtggcacgaggctgctgcagaccagaaagaaccccttctcagatttgtaatgctccaatttactgggataatccagttcaatgttcacagatctaaaaagaaaaaatgatatttgtaacttgtatgctatctggaaaatgttaaagcatgtgttagatatcatttgaaagctaatattttatataatgactatctgtgtataaaattttcaatcattcctccatcaagca

SEQ ID NO: 909 - DNA, 1200 bp, mus musculus
gtcattgtcaaccattatcaaaaagaaaacataatccttttgattacttctgctaattttacatcttatggtgttatctctcagtttgtttattgacttgagatgtagtcctttgtgctcacacagcagagtctagtttacttctccttatatgactatccagtgtttcaaacatcagagatattttttaaattattattttaaatctttatttacagtccagtcatcatccttcctcctgatctgccctctgattgttcctcatctcactccttctctcctatttccaagaggatgtctccactccctcaacccaccagaccttcccattctctggggcctcaagtctcttgagggttagatgcttcttcactcattgaggccagaccaggcagtcctctgctctatatgtgccaggagtctcatgtcagctagtgtatgctgcctggttggtggctcaatgtctaagagatcttcaggatccaggtgagttgagactaatggcctttctatacagtcaccctcctcctcagctttctccagcttttctctaattcaacctcaggggtacccgacttctgtccattggttggttattactatctgtatctgactcattcatctgtttgttagacctctcagagagcagccaagctaggcacttgtttgcaagcacaccacagcatcagtaataatgtcaggccttggagcctccctatgagctagatccgaatttggaatggtcactgaacctcctttccctaagtttattctccatttttgttcctgcagttcttttagacaggaacaattctgggacagagattttgactgtgagatggcaaccccattcctccacttgatgctttgtctttctactgcagatggactccttcgccccactgtagggcatttcatctaaggtccctacttttgagttctgagactcacacctcccaggtgtctggtacattctagagggtcttgcccccacttcctacatactgagaatgcctgtttccattctttctgctggccatcaaggcttcactcctgttcccctaatacctgattatgcccccttaccccctccctgtcccctctcccacctagtcacctccttcccactgccattcatgattactttgctctctctcccaagtggaactgaggcatcctcacttgggccatttgacttgt

SEQ ID NO: 910 - DNA, 1600 bp, mus musculus
attttctgccttgtcaatagatgctgattaagcaacggctggcaggataaagaaatgggtgagacatctcccaaacaaaagaatgagagaggaagagaaagattcacatcagctaggaggatggaggatttgaaagcatgaggaagggatctggagaaagatcattgaaacacacccaaagcccaaagagccagatcaattataatatgcaagtatcttgccatgggactggcaggtagcaagatttgcataggatattaatatagatcatttagctctttgtcaaagttcaagtaaccataggtgtgtgggttcatttctctgtcttcagttctattctattgatctacctgcctgccactgtagcaataccatgaagtttttatcatgatttctctgtagtacagcttgaggtcagggatggtgattccaccagaagttcttttattcttgagaatattttcgctatcctggatttttgttattccagattaatttgaaaattgctctttctaactctatgaagaattgagttggaattttgatgggaattacactgaatctgtagaatgctttagacaagatagccatttttactatattaaccctacccatccataagcatgggagtgtgggaagccacatgtgctgttgcagggtggcgctggctacagctggccaccacacataagtttgggtaaacaaccaatgtgtacatatgcagtaaagtttttcaccaagtcactgcctggcctgggcatgataatgaggctccatgagatactgagagagaataaccaatcagatgagagacatgcaaatgaggtatgataatgaggctcagtgaggtactgagagagaataaccaatcagatgaggaacatgcaaatgaggtggaaagcataacgaaaccaggtgtgagacacaccactcctaggcctatataagcagcaccagttctgggcttggggtcttttcgccactgcaatcaaattctcccaataaatgtgtgcagaaggatcctggtgtggcgtctgctttgctggcaagtggggcgctcacaagatgggagatctttccatcttctgagatcttcttcaatttctttcttcagagacttgaagttcttgtcatacagatctttcacttgcttagagttacatcaagatattttgtataatttgtgactattttgaaaggtgttgtttctctaatttctttctatttatcctttgagtagagaaaggccactgatttgtttgaattaattttatatccagccacattgctgaagttgtttttcaggtttaggagttttctggtgaaattttttcggtcacttaagtatgctatcatatttttggttgtgagcctagcctttaacggctgagccattggggaaaagccttgaagatatgggtacaggggaaaaattcctaaacagaacagcaatggcttgctctgtaagatcgagaattgacaaatgggacctaatgaaactccaaagtttctgcaaggcaaaagacaccgtcaataagacaaaaagaccaccaacagattgggaaaggatctttacctatcctaaatcagataggggact

SEQ ID NO: 911 - DNA, 1000 bp, mus musculus
taccatcatcatgaggtatgcttttaaatccgggtctagctatccaggtgtgttggggtgcccaggactgggggaggtgggagtgctgcattctgataatggtgagtgctcttggtttctgttagtaagattcttacatttgcctttcaccatctggtaatctctggaggtagttgttatagttgtctctggttagagattgttcctcttttgttagcctctatcagcagacctgggaaactagatctctcctgaatttcagtggtctgagcactctctgcaggcaatctctcctcttgcagggaaggtacacagatatctggcgttgggacctgcctcctggcagaagatgacggccggaaacaggacctgtaccagaagctgtgttgctttggcctgtcacagaagctgttagcttctgtagtccacactctcacctgtgcagactagtttcggagggatctggggaccaagatggctccaccaggtactccagcaaagccctctccggcagggtggacacctctcctctggcagggaaggtgcccggatgtctggagcccaaaacgtggtctgcctcagaagctgtcctctagggaccttgggggtatctgccaactctgcgcccaggtgacctggtgttggtgccgactggaagggatttggaccctggtcaggctgggttttctgcttccctagtgctgtctcaggtccttcgtgattggattggaacagaagttgtgttccactcacctgtggtcctaagatcgagtagagagtcctctaggggacctggggggtgtcgttaggtatatttttatgaaaatagtttctataataccagctatctgcactaagcattataagtgtctaggaaacaatcccttaaataagaaaaacaacagaagtatcctctagctatccataaaatcaagcttgaaccaggaccaaaggaaaccatttcataagtcatctctttcacagagattttatttttttt

SEQ ID NO: 912 - DNA, 1000 bp, mus musculus
attatgaactgattcggacttaataaggagaagaagatgtttatactgcaggcttctaacgtcctgcttttattttggttgatggtttggacagagcctatgaagagtatttataaagagaaacagatgctcctggtaaatgagagtccatttgtggtccttacactgtgcctccttcataactgcacagttcaagttttaatttagtttttaagtctttcaaaaatataacagtaactaccagacaaccaggcatggaaatgcctggcaagtaattaattatgaattttattataaacactgcaaagctactagctactctaaaagaggaagattgagaagggtcgcttaaaacattgcagagagaaaatagccaattggcatttctctagacgtttttttcagaaattatatttcaggaagggtaatgtgaatatgagtaacacgtgggcagagaattcctgtgagaaatcaagagcgactgactgcatggtgctgggagaggcgttccatattcagacacttggcaggaaactgagtctctgaagagggggtgtggctgctctgtatccaatgagatgcagtacgataattcactatctaaggcacaggatcatatgaccagaataataaatggtgttagtctgattgttctttcagtggatgagatcttcctataaaaatcaatgtgaaaagagacatggtaagtattttctggagtttccctacatttggcccaaggatctgtagaagagagatttcttcgtggagctctatggagctcttatgaacaaaaatatgagccacaatggatcacgtaatgctttctgatatttgtgactgctgagtacagagagcatggcaaaaggtttgatatgtctccctcaagacttgtctgagaggctcttatgccatgctgggttctactgctgagtcaagattttgagagctgcatacaagatgagagaaggagaaggagggggaggggggagagggagaa

SEQ ID NO: 913 - DNA, 1000 bp, mus musculus
cccagctgaagagttctgaatccacgcagttgaatccttctcaacagtctgctttgcaagaacacttcattaaccactcaatccccgtgatgcagttctgaatcatccctgtaacaggggggtcttcgctcgtgccttaagatgttacttcccaggtttcggcaccactttgtagacgcctgattcgccagcaagaaaaacaccacagcaggatccttctgcaacatgtttattgggagagcatttactgcgaaggcgaaaggccccgagccccagaagtagtgctgcttaaataggcctaggagaggcatgtctataactgattggttatgctttcggtaccccacccacatgcctcgggccaggcagtgactcggcaaaaaaactcttacgcacatgcacacattggttgtttacccatattcatgggcgtcggtttattgaaaccagcgccatcttgtaatggcgtttgtggcttcccacaagaatttctgagaaatcaccatccctgacctcaagctgcagtagtgatacagaccgcacgatattggaacacagacagacaggttaatcaatggactagcctgttatagctgtctcctgagagactctgccagaacctgataaatacagaggcaaatgcctacattcaaccattggactgagcacagggaccccaatggatgagttagagaagggctgaaagagctgaaggggttcgcaaccccataggaagaacaacaatatcaaccactcagaccccccacagagatcccagggactaaaccaacaaccaaagagtatacaaggagattcccatggctccagatgcatatgtagcagaggatagcattgtctggcatcaataggaggaaaggcccttggtcctgtgacggcttgatgccttagtataggggaacgtcagggataccagtgacaagggagtgggtaggagggagggagaacaccctcacggaagtagggggagatggaatggggg

SEQ ID NO: 914 - DNA, 1000 bp, mus musculus
gacaataaactaagaaatttatatgttaagtagtgaccgagagagttggggaatgtggtggctgattttactgtcaacttgataaggtctagagatggacctatgggcatgagagtgaggtttctgattaggttcattgaagtgaaaccccccactcactatgagtggcatcatttcctagcctagaatcttggattgtataaaaaggaaaattaaggctgagagccagtgttcatcaccctgttccatttgttgacaatggatgcaatatgactagttacctagagctcctgctgttatatctttccctgaaactgtcagtcacaagaaagcctttctccacatgaaactcaagaaggaagaccaaaggtggatacttcgctccttcttagaacggggaacaaaataaccatggaaggagttacagagacaaagttggagctgagttggaaggaaagaccatccagagactgccccacccagggatccatcccataaacaactaccaaacccagacactattgcataagccagcaagattttgctgatatagctatttcttgtgaggctatgctagtgcctggcaaatacagaagtggatgctcacagtcatctactggatggaacacagggtccccaatgaaagagctagagaaagtacccaaggagctaaaggggtctgcaaccctataggaggaacaacaatatgagctaaccagtatgccccagagcttgtgtatctagttgcatatgtagcagaggatggcctagtcggtcatcaatgggaggagaggcgcttagtcttgcgaagattctatgccccagtacaggggaatgccagggccaggaagtgggaatgggtgggctggggagcagggcttggggtagggtatagggaacttttggagaggaaactaggaaaaaggatagcctttgaattgtagatgaagaaaatatctaattaaaaaaaaagaagaaagaaaggaaagcctttctccat

SEQ ID NO: 915 - DNA, 1200 bp, mus musculus
gttaccatagtaaaatattctggcaaaagcaacttaggagagaaagggcttattcaacttacaacttcaggttacagttcatcacttcagggaaagtcacagtgacatgatcaggagatagctagtcatattacagatacagccaatgtttgagaaaaatacacttatacatgtttacatgtgctcagtcccatctttccctgcctagggaatgatgccacctaaagtgggctgtgtctttccacaccaagtaacaaatacttaagacagttcccccacagacctgcccactggtcaatctaattgaacagtcctgctgaaactcttcccagataattctagaatagcaaattgagagtagaagaaaataatcattactagtaatgttagtcctcacatggtccacacaccacagctagtggaaacaaaaacatttacagtttcacactcagccactgtctgatttcacctctcagatagtgtcttagtcagggtttctattcctgtgcaaacatcatgaccaaaaagcaagttggggaggaaagggttgatttggcttacacttccatgctgctgttcatcaccaaagaagtcaggactggaactcaagcaggtcaggaagcaggatctgatgcagaagccacggagggatgttccttactggcttgcttcacctggcttgctcatcctgctctcttatagaacccaagactaccagcccagagatggtcccacccacaaggggcctttcccccttgatcactaattgagaaaatgccttacagctggatctcatggaggcatttcctcaactgaagctcctttctctgtgataactccagctgtgtcaagttgacacaaaactagccagtacagatagattgagaaattaagataatatttattaacaactcggcatcaatggaaagtatctaaagggtgtttatagtctgaagttcaagtttttgacccaagaaactttggtcatgtcagaaaaacatctgtgaatagatgttgagatgaagagacttgttccaggtttaaatcaaccccaccagccactccttcatgaggttgcataaacatcagatgaattaagcattagttttgtactacagtaaatcttggttactgtaaggctggagaggtggctcagaagtcaactgtccttgatcctttggtagagaaccagggttgagt

SEQ ID NO: 916 - DNA, 1000 bp, mus musculus
ataacaaacttgctcaacaaagacaatgttagggaattcacatacttgaagtccagctttcaccgtgtaaaaaaaggcaatgccaagggctgtgaaggaagctgtatgtagagtgtggaagctgtatgcagagtgtgtcatgcaggccttcacacactagcaccagaataaggaagctattgcacactctgatgctacctcagagtcctcagatctctgagcagggcttgggagaaagaggactggtagagagcagggaaattggtaggggcatctctgagacaagctgaagacctggggcagaggaggctcctgaggtatggggatgaccatagatggatgagtctcttagaagtgaggggtatggatcctgaaatggccacctctggtagccaggcaggactttcagtgaaggaaaacgaaacatcaacccacccacaaaactgttgacccaaaatttgccctgcatacaggatgcacagggtaacaatgaggcagtaattgggggaattgccaaccaatgactaatcaacttgagatctaccccatgggagagagccaacctctgacactataaatgatactttgatatgcttgcagagccgtcatttgaggggcttcatctggcctcagaaagaaacagacgcagagactcacagccaaacatctggcagagtttgggagtcttgtgggagaagaggaggaaggactgatggacactgagggatcaaggacaccataaaaagacccacagagtcaacaaacctgggcccgtgggggctcacagagactgaatagtcatccaaagatgatgcataggctgaacctaggtcccctacacacatgcagcagatgtgcagcttggccttcatgtgggatccccaacaatcggagcaggggtggggcttgtctgacctcagtggaagaggatgcacttagccctgatgaaacttgatatgccagggcaaacgttggtactcagtggagagtcagggtgtaa

SEQ ID NO: 917 - DNA, 1200 bp, mus musculus
gagcctgggctcctaaaatcctaaaagagggctcagaacacagcccaggggtggagcacttatacagagtgtgtaagatctgtgtttggtcaccagtagtccccaccctccaaaataacaggggggagagtaaaagataattttcctaatttactaaatactgcgggtctttttaagccaccctatacacaaccagaaaaaaatggagccagtttggctgtgagcccacagaatcctgattgctgtttataaacaactccgctgtacttgtgctccacaggcacacagacctctagctgccaaggaagtcctgcagcctcacccccatggctagcccaccaccgtcgtcgaaagtgctgtcccgaatggccatgctcagcacagagccacggggtgtatgcctatcatagctcacaccttaatttctgcagctgcccaggaattttttccccatagtccaagaacctagatcagtgaggaggaaataaattgtctagatatggtatgtgagagtgaccaagattaaatttctctgcctgcaagatgtactctgatagcagattaataagattacatctccacaccggagcaaagtgccacctttaatcatttcccagcgtgggccacccagtctctcactcgttaggttcatgaacaagaggaaaaagatcaccaggcagggtcaaaggtcaaaacaccttgtctctgaaggccttttcctcacgaagggttctatgaatcaaagcaagggtataaccaacctcatatttcaaacaagggaagaagaatagagccccccgtgagtttataagggaagcggggcaagctgctgctctcagaagcagaccacattcgcaaggagcatctgttgttaagttgtatgcatgcgtcatggatggaacgaagctgaggtcagcgcttatggggtgaactgtggacccaactgtaaagtgagcccctagggtcttctacctgtttatgagccgtggctactgggaaaaaaaactagtctgtggtcaggatgcaaagcaaacctcttgcctgagtaagtaaatttcaccatgaacaaggtctggagatagaatctatgcccccaggtgactgaattcttttggtctaggtcaatgctagctctgttcctgtagcaacagtgttctcttctttctatcttctcctgtggaaagccggtacgtgctgcga

SEQ ID NO: 918 - DNA, 1000 bp, mus musculus
cgaagaaaaggaagagattgagaatcaaaggttgggccctgagtctagctcctccctaaggaagtgttgtgtactgccaccacgtggagagccagataaagagtctagcatggccttgcctatctgggactgagcttcacctctttggaagatggacacacaccaggaagagaggcaagaagacttcagtgttgccagagcaactgctaggagacaccttggagttcagatgtcacatctcaacagggatgcaggtcagtggtagaacatgtgcctagcatgcacatgactgtgttcccacctcagcaccagcaagaaaaatcacacgagaacgccacagctgaatctcatttacaccaacctttagtataatttgagcaagcattgctttcaagttccacaacacgttataattaagcaattagaatgtaagaaagaaagaaaggaaatttaatagaacaggcatttcatgtgtattttagcccaacagcaggcagtggtatactggggtgattgatacactttaaatattattaagcagcttcacggggggcctcagccagccagtagatagcagcttctgcactggtgtttaagacacatgggccctcaacttctttttctggcttttccaatggccaatggagaaacaagacacactggctcggcaagaacaagagacagcactgaaatcagcatctaagagttcagtatactctgggaccatcaaatgtagatgactaacatatctcttctgccagaaagttctcaagcctttgggaaaccaaggaaacctgcagcttccctgtatgtaggcttcactgtgcaggaggcagcagcacacactcggggaagggcccagaccataaaggagcttgggttccaaggtcactttgccttctactagccatgacagtttgatcattcactgtgttccatttttctcgtttgaaataaattctcatggcaatcatattacctccttcagggagcttgtttg

SEQ ID NO: 919 - DNA, 1000 bp, mus musculus
taagggagttttttttttttttttaatgtccttcttaaagtcctctatcatcgtcatgaaatgtgactttaaatcagagtcttgcttttctggtgttttctggtgtgttgggtatcaagggctcgttgtgatgggagaactgagttttgatgacgccaagtagcctggtttctattgtttatgttcttagcccttgcctctggccatctggatatctctggtgttagctggtctttctgtctctgagtctggcttgtcccttctgcaagcctgtgtgtcagtactcctgtgagactagttctctccaggatgaatctgggtaaggagagttgtggcccagggtcagctccgaggtgcagatggaaacctgaaggatcctgtccccagctgttccttggttcctgtgacctgttgactctgggctggtccctcttaggccagaaattttagcagaagcggtggtgttatatgtgtaaacaggtatgacagcattcctgaaacaccagctctcttcaggctatatttgggtatggagtgctgtggcacagtatcagcttctgtctgtggcacagtatcagacagaaactggaagaatcctgacccagggtgctccttggttcctatgtcctgaggtctccgggtggatccctcagagcagaagtgatagacttacctgtgctcactggtgtgcctatactcctgggagaccagctctctcctggaattatttgggtctggagcactgtgggacaggatcagctccaagaaagacattttttaattgttaaatttaacacaactttatcaagaataggttaaactgcacataagaaacaaatgatttcataatcacaaaatagctaaaggaactgacttttgccaaatatcttaaatatccccatgtgtgttgtcttaatgaaaaccctctccatctaaaatactaaactattttccttttatgataatcattttcttctctttatagcttcacaacctacat

SEQ ID NO: 920 - DNA, 1200 bp, mus musculus
aagattcagaaatcatcagtttggctagggtcaattttaattttagtaattaataacttgttgtaattatttattcatgtatatttctcttttatataatgtaggcctctctaaggccctggctgacagaagttacgatgcctccagctaagtatttagccatagttgctctctaatatctttttccatacaaatttataaaggattttgctgtcttgtgttgtgttgtggactgggtctaatgctacttatgttaatatggctccaaaacttacacaggaacctgcacatctgcctgtaagatgcttaggtccctacccccagttggtgttgattggtaaataaatttgtcagtggccaatggctgggcagggagacagaggcaggacttttagcatttctggggaaggtacacagaggaagaagaactgccatgcctgagaaggagaaggtccaggcctgagaaatataggatagagggacagagaggcaaagagactgccaacatgcaagagtaggggatcgagacccagggggctgcaggcctgggtccagggtagccagtttaggaagtaatagttcaggtatatcagatggggagaatgtgctagtaatgtggaggattgaagtggcccaaccattgagctaactaaggcatatttaaatataaggaagtgtgtgtgtgtgtgtgtgtgtgtgtgtgtgtgtgtgtgtgtgtgaatgtgtgtgtctgtgtgtttcttttgagaactcagaacattggggctggtagcgaggaatttgtgccactgctgttgagtgatttgagaggacttaatcacctaatgctacagtcttgggtcaaaataattatggtattgagtttcttttccacagaaaaggtccttaggtcctctgtgcaagtagattccctgcttctaaaacattctcattcaaaatgtctttccagagaaagttatccccatctctcagttggttgcttggtcattcttcaagcaaacagctttatgatatcatataaatatagtcagagcttgattgttcagcttttcaagatgtgatggattgtctccttccttgagaggtgactatatcactgccacataaatcttagtaatctgctttgctctttgtcttaagatttcaatgaatagctcatagggaggtacattcagtcagggtgtcaggagagaagtgcag

SEQ ID NO: 921 - DNA, 1000 bp, mus musculus
tctgttttctgaggctgccattggaggtgaggtacaatgacaactgaacaggtatgtgagctctgagaatatgaactccagacttcaagggctgaaactccagggcctcgaacataaggaagttcacatggcaaatactttaactacagagtgatctacccagcccatcacggatagatattgatgggcaatggtattgaaaacttgtagaaaccttaggaagcaggacctgaatcaaggccttccttacctggggtggtcggaataaatattgatgaactggccagagggacccatgcccctttggtgtattgtcttacctccccctctgtgtctccccccccccatttttagcaggaaatgaacagttattctatgatatcctccatcaaaacagcagggccaatccagcttagattgagacatttgaaaccatgagccaaagcagaccttgtcttttaccagttgaatgtagcaggtgagcaattcagcaagataagcttgtgggcacagaaaattggtaccaagaagtacatggttgattctggtttccatctgcacccagagctggccctatgctctgatccccatacccagatcccgccaggagagagctgatctcccaggagtgctgacacacctgtgagcacaggtagaaccacttctgctctgagtgacccgtctagaatacacagggcacaggacccaaggagcagcctgggacaggatctttctggtttccatcttcccttggagcagaccctgtgccacagctctccatacccagatccttccagaagagagcaggtttcccaggagtactggcacatgtgagagaacaggtgagaccaccatttctactcaaattcctggcccaagagggacctttgtagagccatcaggacacaggagccaaggaatgagcagggacaggatctttctggtttccatctgtgcttcagagctgaccctgtaccacagctctccatatccacattcc

SEQ ID NO: 922 - DNA, 1200 bp, mus musculus
tgctcacttctaaatggagcatttaggatcacgtcctttcaaggctcagagaacatcctggaagaggctgtgcaaagagggtgcttaaaagccagagaatgggagaatcaaagcaaaaagatgactcctgcatatgacatagctgtcattcatgaacccactgcagctgtggttcatctgcacagaaccggccgggctacagtttactacggattggggagagggcctgtgaagccccatccctccccgagggactactgccaatcaacagtgttggaagaagattagtttccttcaggggtgagatctcccctacaacctcccaagccataggctgttgaccaggtttgcagaaccaggcacagttctttcttggacagcatgcctcacatcagacactaataagttccaatacagaaagctagctgggcgtgccacatgtctttaatcccagcactgggagagagaggcaggctaccaggcaagagtacatgtgagaacttgcctcaaagtaagttttactatgaaaaattaaacttagtttcagattctgggatctctgtttaaaagagatttatgcttaacatacaaattaatatataaaatatacttctggcaagctgagaattgattcatagaattcaagcaatcagttcaaaatgaataaaagggttagaaaaatttacacagaggctatctagtttcaagactaaagtacttccaggtcttaatccaatgaagaataggtcggtgacaaaggtgacaggatttgatgttcagcctggagaggtcgaaccatccaccacgtctcacgcacaccagctgctggtagcttgactaacagtgactcatgaaggaaggctgggcccgtgattttctggtaagaccgttgaactactggacagtaactaccccaaagccttggtctccttgtggagaactgtagacataatgcaatccttctgcctttgcagaagtgtcacagctaacctaagtggacacatcttgacgaacagcttagatattcaagcccttagaattttaaattaggttttggggcaggagagatggctcagcagttaagagcactgacttttcttccagaggtcctgtgttcaattcccagcaaccacatggtggttcacaaccatctgtaatgggatcagatgccctattctggtgtctgaagagagcgatagt

SEQ ID NO: 923 - DNA, 1000 bp, mus musculus
cactatgagagccatgacaatgatgactcttaaaaaggaaaacattgcattggggttggctttcaggttcagaggtttagtccattattgtcatggtgggaagcatgaagtcacatgggcagacatggtgctgagctgagagttctatacccagatcagcatgcggcaagaagaaggagtaacacgaagcctggactgaccattcaaacctaccccactaacacactttctccaacaaggctacacctacctccacacagccatatgttctaatatgcaactcctcatgacactgtgggggccattttcagtcaagccaccacattacgccaaggtatacagccaaaaacttgcctactttttatttaaaaggagatggctttcattcccttataaaagagcaaggacaatggcttagtgctattcttagtcattgagactgttcattaaagaaaaaaaaacatgtaagacaaattatgaaacatgagaggaagattttccagaggattaaggagaacaattgttattaccagtcttactcagctgtgctccctgtatggtacacggctgaccgattagcatgctatacacactaatccagtattgtcaggtcagtttttttttttgtcacacaggtatttcatcctgtatgtggagtgggtcttacatctaatcagaaataggttggtcacttccacgactttcatgccactccttcctcagctgccatatcttgtcaggctggtcatcactgtagctctcagagttcacagctgggttacagtgttaactacttttctcctccagtagagtgcatagcaccttctagtgctatgaaagctagcaagaaggggcgaagcttccagatcaggagcagctttatctcctcacattcttgactcaaatgtttggtcttttcagccataaggtcacattgaaaaagaaaacctgtcactttgtaatctaatttcagacaatccaaggcattcagacatatttt

SEQ ID NO: 924 - DNA, 1000 bp, mus musculus
ttcctgtcacatgcatgaaggaactgctcatctttccagctggggtctagttttccttggcatgaacactgttacatgtatcagggggcatcatagaatccaggtgggatcttgtcccaagagttcagaggagcttccacagagcagagcagttatactaggcctcagccaccaatttctgatgggagaggctcctgcccacaggtgctggcactccctggtagaccttcctctcccaagcattgcctctgcagcctacaggtacttgattgcacaactccgggtctgctctagttaccatttgcccttatgtggctatattgaaactataaatatggttttattcctcccactccaccccaattcctggtttctcttgcattagtgactatcatttagaatgctgtaaaatgatcctagttctctagtcatcagaaagaagtcggatgtgctgttggggattgccctcggggcttctgtagaccatataactggtacacaccgagttgtctctgaaggtcacacctaagacttcactcctgtcgtattggagctagccttaggattaatcctctactgtggccctttggtgaagcttaagatcctgaccctactgttgaactgcttctgtgatcggaaagatgggtgtcctgatcttaccacttacttacaagtggtggagcaggggccagtgttggagtctctgctctccaggagggggctggaatgaccagacatcattcctcaagcagaaccgggatctgctgctgtgggcactcagctctgtagtcctcacatctctgatctgctctcaaacttgttgggttggatctcagcctgggtggggagctgcttgttcaagcaggggaacctccctcgtgggtgggaggagcctgcaggtgtgtcctgctggactacggctgtgggcttcataagttgcgctattgccagtctaagcagtctgaaagatgaatccccgttaaagtacagttgctgctaa

SEQ ID NO: 925 - DNA, 1400 bp, mus musculus
acagcttgtatttacctatctcaaattacttccctggacccttacaatttacataaactttattcaatcatttaccatgcgacccagggggttgattactgagagcagtcattgaaaagcaagttcatttaaataagggaaaatcgtaaagagtagatttttagttagagatagtagtatgatatctggagtttgtttttacactgaagtttgttgtgggagtctcttttttactgtgtagcctgtaagagaggtaaaactgtcatgtgtctgcctttctcagcaggagacctagttgctctggtaaagcaagacctgatttttttacatctgaaacagattgaccagccagccagctgcagacttgcaggggggtggaactcactaaaaagtaggcttactgctgctaaactgatgaagctcaggctagccatcaacaccatcacaggtctgagaaggataaatttgagcacgaatataatctaagtggcctctgtattggttaaaatggcagagactaactggactgacagcctgaacttgtccatggtgatctctatgacttgcttggggtcaaaggtcaccaatttttgactatcacacaggacaacatcaagtcttcagctaccagacccagaatatttgagagattttcctatggaggacaagcctgggaaaactgacctgtcttggtgacgttgagtagagcagtcagccagctctgtccccaacttgggcagcatccaggtggcaagcaaggcatccgattgagcagctctttgcccagtagtcattattacttcgctccagttggagctccttgctaaccatcttctttggacacctacgcttgttctctgtgtacataaatatgaatgatttaagaagccgggtggtggtggtgcacgcctttaatcccagcacttgggaggcagaggcagacagatttctgagttcgaggccagcttggtctacaaagtgagtgccagggctatagagagaaactctgtcttgaaacaaacaaacaaacaaacaaaaaagaaaatagtgaatattaagtactaagtttaaagtaccactctgtagacggtaaaggtcacctagtagaaatgcacggaatgttttagacagatttgtaacaatttggttttttggttggctcaagtgcaaggttatagaagactttaagaaaagtaagtagggtgcagtctggtttccaggtttccttaaggaatgcactgtccttagcttagtactgtggattggtagtagcatttcatatctgctgcagtcaagttacctcgacatagttactcagttactatcattttcaaatgctcttcctatgcctgtgaatgactgatgctcatattgttaactgtggtgatgagtttgaaaga

SEQ ID NO: 926 - DNA, 1000 bp, mus musculus
attctctgtctgtttctaattcttttcatttttgatactaaatacatgcaaaatgtgctctatgttccaaggagacaagaattataatgcagagttgggcttcattatatacattttgaggagacagaaatttttttctgttttaataaatctttattcttattacataagattggttctgtatgccagacccgccatctgcctgaatccagtggaggccactaagggctctagagtactctccatgctgcagtacctctgcatcacctcaggatcacgagcaagtggaacacaacatcagctccaaacaattgtggagggtcttgcaccagcaggaatagggacataggaacctggcccaaccagaagctgggatccattccggttggagccagaaccagcatcttccctgtgaactagtctaggtccacagaggaccctccaagccacaggacccctagcacacccaggatcttgtgatcatgggagagaacatgggtgacagaagcaacagagattcttggtcagggtcccttcaggccttcatactcagcaaggaggcagagctgagacccagacccagacccctgggtaccttccttgccagaggagagttggcttacagggagggctttgactccaggactcaggaggtggatcagagctccagacttctggacacctgccctgtaagaggagagcttgcctgcagagagtgctctgaccactgggactcaggtgactcccaggagtgctgacagagtctaacagaatcacaggaggggtccctttctggtcggtgccagcaccggggcaccttgtgcgtggagtcttcagacacccccaaggttcctcagaggactctccatgggatcttaggatctctggtgagtggaacacaacatctgccaggaggcaagtttgaatgccaggtatctgggcaccttccctgcaagaggaaaccttgcctgcagagagtactctgaccactgaaactcag

SEQ ID NO: 927 - DNA, 1200 bp, mus musculus
tgtcttttctgtgatactcctaataaacacctgtactttagtgacttagtgcagcttctcctgttttctcagaaaataggaccacaggaggctgttttatggagtccttcaactacaaggcaagtaaatcatgggtagtcatttcttctcagtgtttccttagtttaggggaactaatgtacatgtacttttgtgagaccccaacttagagtgtttctccctggaaggtaaagcccatggatgttccccaagcttgttttccctgatttctaaaaatacagccagaaagaagctctttgttctctatagccagcaaaaagcctttttgtttgtatactttacagccagagatgcctgccttcctgtgctgaggacatggagataaaaattcagaaagagctcactccccactcctgccttataaatttcatcaaggacaccccgaagaaaagaactctcttcccaactcctcccaagtcttcccaactcctcccaactcttcccaactcttcccaactcctcccaattcttcagctagctgttaaaagccccctactgtcaccactcggggtcaaactcccctgccctgcatggcagagggacttcgtcctcagctagctgataataaaacctcttgcagtttgcatcaggtgtggttttctctcgggacactggggtgctggccagctcattcccggacttgagcagaggcccagctttgggggtcttacactttcatgcctctgttttcccttttgcctgtctgcaactagcagatcttcatgcactagctttgtggataagttttctgtttcatcagtttgtaaattttttataaacaatttaagatgagcctatatcagattgattaatgtctaacattaattaatgtaactgtctttagagtctgaatcaatgaaatgtctaacataattaaagtaaggggcttactttaagggaaagaaaataattaatttgtcttaaaaatgggcaagggacttgagtagacttttttttttcacagggggcacagaatgtacaattgggcatgggaacaactattgaatactgccagtaacacgatgaataaaatataaaagttaaacaataggatttcactctatacatgtgacaacaatttaaaaacaaaaatatttgtgacaatttgaagaaaaagtaaactacattctcctttatggg

SEQ ID NO: 928 - DNA, 1000 bp, mus musculus
aatataatcattaaagtgtcctttacttgttactgaattttaaagcaaatagcctttaatgtttctgtacctactgtgaggttgttctaagctggagtaggcaacacacactagatttttttaaagatagtcttatgactgaagggaggccaaagtgtggatacttgaatccttcttagaagggggaacaaaatactcatggaaggagttacagaaaaaaagtgtggaacagactgaaggaatgtccatcaagtgactgcaccacctggagatccatcccataaacaaccaccaaacccagacactattgcagatgccaacaagattttgctgacaggagcttgatatagctgtctcctgagaggctctgccattgtctggcaaatacagaagtggatgctcacagtcatccattgaacagagcacaagttccctaacaaaggagctagagaaagtatccaaggagctgaaggggtttggagccccataggtggaacaacaatatgaactaaccagtacccctagagctccctgggactaaaccaccaaccaaagaaatcacatggtgagactcatggatccagctgcatatgtagcagaggatggcctagtcggtcatcagtggaggagtggcctttggtcccgtgaaggtcctctgccccgctatagggaaatgccagtgccagaaagtgggagtgggtgggttggggagcagggggagagaataggggataggagatttttggaggggaaactagaaagaagtataacatttaaaatgtaaataaagaaaatatctaataaaaaatcttgctgctatatcagatcaagtgttccgattacagacattcactaccttgcctggtttacaaacttttaaatgtattttattactatagatgcattgtagacataatagatttcactgcacatagcatattttaaacatatttaggcctcacacttttcttacatattttaacagatatatttaaaatat

SEQ ID NO: 929 - DNA, 1000 bp, mus musculus
aaagtccttcttgatgtcctctaccatcatcatgagatatgcttttaaatccgggtctagcttttcggttgtgttggggtgcccaggactaggtggggtgggagtgctgcattctgatgatggtgagtggtcttgatttctgttagtagttttcctttcaccatttggcattctctggagctagttgttatagttgtctctggttagagcttgttcctcaggtgattctgttatcctctatcagcagacctgggagactagctctctcctctgagtttcagtggtcagagcactctctgcaggcaagctctcattttacaggaaagctacacagatatctggccttaggacctccctcctggccgaagacgaaggcccaaaacaggacctgtccctaagtctagatgctttggcttgtcccagaagctgttatcttctgtattctacactctcacctgtgcagaatactcttggaggagtcctggaaccaagatgtctgcagccgatgctcaggcctagcgttccaggcccgggcagacccctatcctctagccaggaaagtggccagatgtctggggcctgtgcagaatactctaggctgggtcccaggaccaagacgtctgctgccgatgctcaggcaaagcgctcctgcaccggatggacccctatcctctggctgggaaatggccagctgtctggggcccgaaaagggggctgccttagaagctctgtggctcccacctgtcccagaagcttttagcttctgtattcagtactctcacctgtgcagaatacactcggcggggtcctggaaccaagatgtctgctgctgatgctcaggcaaagcgctcctgggctgggtggacccctttcctctggcagggaaagtggccagatgtctggagcctgtgcagaatcgaagttaatattgttagccactcaatttatgtttgcaagtcagagagacacagagacagagacagagacagagagacagaga

SEQ ID NO: 930 - DNA, 1000 bp, mus musculus
ggaagacaggtgacagaaacaatgattcagactaatcacatgattacaaagctgggtctccagcagggtttctggtggtcaggtgcagatgtctaagcgagcagtgacgtgggaggggcacgcactgggccggacttgagctacctggatgacatcaaggatggagggccaatcagctggtggctccagggatctccagtccacgctttacttggccaggggggttcctgaaggacctgccagcaaatctggcttttttgcccagctcttcctcaattctaaggatctgattgtacttggccaggctctcagatccgcaaggggcatgggtcttgatctgcctagtgcagagccctaccaccaggacggtgatgaaagtgtcttcagtctctccagactggtgggacaccatgacgccccagccattggactgggcaagcttacacgcctgcagagacttggtcatgaagccgatctgtttcactttgagcaggatgcagttgcatgacttcttgccttgacaatcttcttagggttggtcactgtgaggtcatcgcccaccacctggatgtctacactagccatgaacttcggccaggcaccccagtcgtcctggtcaaagtggtcctcgatggacaccactaggtagttctagatgaaggacttgtacaggtcagccagctggtcgagtgtgatgtacctgctggggtcatccggagacttgaagtccaggtcatacttgccagacctgtagaactcggaggcagacacatccatgaagcttcatggggaagggtgtctcaaggctgttgagcacatcagtaacactattgcacctgctctggttagcaagaaagtgaatgttgtggagcaagagaagattgaccagctgatgaccgagatggacagcaccgaggataaatctaaatttggtacaaatgccattctggaagtgtccctggctatctgcaaagcttggaatgtttacagatattgttga

SEQ ID NO: 931 - DNA, 1000 bp, mus musculus
tccttgatgtcctctaccatcatcatgagacatgcttttagatccaggtctagcttttccggtgtgttggggtgccctggaccgcgcgaagtgagagtgctgggttctgatgatggtgagtggtcctggtttctgttagtaatattattacatttacctttctccatctggtaatctctggagttagttgttatagttgtctctgtttagagattgttctctggtgattctgttagcctctatcagcagacctgggagacaggctctctcttctgagtttcagtggtcagagctcactctctcctcttacagggaagctctcctcttacagggaaggtgaacagatatctggtgtttggacctcctcctggctgaagatgaaggcccaaaacaggacctgtcccagaagctgtgttactttggtgggtcacagaagctgtcagcttgtgtggtgcactctcacctgtgcagactatgttcggtggagtcccggacccaagatggctactgccaatctagaggcaaaagcctcccaggctgggtggacacctgtcctctggcctggaaggtggacggatgtctggtgcctgaaaagggtgctgcctcagtagctctgtggttcctgcctgtcccagaagctgtcagcttctgtggtgcacactctcacctgtgcagactaagttccttcagcagagtcccggagccaagatggctacctcagatcctgaggccaagggctcccgggccaggtggacacctgtcctctggcctggaaggtggccggatgtctgggccccaaaacgggcgctgcctcagaggctctgtggctcctgcctgtctcagaagctgtcagcttctgtggtgcacacactcacctgtgcagactaagttcctaatttcggtggagtcccagaaccaagatggcttctgcctgctcctgaggcaaagggctcctgggccaggcagacacctgtcctctggccggaagggtggccagatc

SEQ ID NO: 932 - DNA, 1000 bp, mus musculus
tccgtgcctctgttgagggacatctgggttctttccagcttctggctattattaataaggctgctatgagtatagtggagcatgtgtccttattacatgttagagcatctataaggtatttgcccagaaatggtgtggctggatcctcaggaagtactatgtccagttttctgaggaactgccaaactgatttccaaagttgtaccagtttgcaatcccaccagctatggaggcgtgttcctctttcctcacaacctcgccagcatcttctgttacctaagtttttgatcttagccattctaactggtgtgaggtggaatctcaggattattttgatttgcatttccctgatgactaaggatgttgaatatttctttaggtgcttctcagccatttgatattcctcagttgagaattctttgtttggctctgtaacccatttttaatagggttaattggttctttggagtctaacttcttcagttctagatactgagggaatgaccatccagagactgccccacctgggcatccatctcatatacaatcaccaaacccagacactatgctaacaagtgcttgctgaaaggagcctaatatggctgtctcctgagaggctctgccagtgcctgacaaatacagaagtggatgctcacagtcattggatggagcacagggtcccccaagaaggagctagagaaaggaccctagaagctgaaggggtttgcagccccataaaaggaacaacaatatgaactaaccagtacccccagaactccctgggactaaaccaccaaccatacagtacacatggtggaactcatggctccagctacatatatagcagaggatggcctagtcagtcaacattgggaggagaggtccttggttctatgaaggctctataccctggtgtagaggaatgacagggccaggaagtaggaatgggtgggttggtgagcaggaggatagggggaggggatatggggttttcagaggg

SEQ ID NO: 933 - DNA, 1400 bp, mus musculus
aatacaggtccgtaacacataaaaacaaagagggttcagggaattccttccctttaggaacagaaaggatggatgagaaggaccaggtgaaaagacatgtgagagacaggggtgtgtcaatggaactcagagaccgaaatggcagtaagaaccttgagaggagagacggagaggaattataggtaggacagagagtccagcatcgttttaccatcctaaaagactcttgaaactgctgattactattaatttattctacacggagaaaatataaataaagattttaaaagtacacacttaaatcaatttgtgttctccttaataagagtaagtatgagtttcacaataaggttgtcttttgctagagccttactgtcgcagcagtcagagacttaagtacaataaagataaatggtgactgggtcagtggatagcttcctaacatgggctgtggaatcaactgagcagcttctcctgcttccctgcatctgaaggactatcctatcagccttttaaatagtaaggttaaatgtggtccacataatatggaagttcatgtttagacctagaagtgttggtggcttatattatagaaaacaaacaaacaaaaaaacctgtgttagctgattttgtgtcagcttgacccaagctagagttatctgaagaaaataaacctcagttgagaaagtgcaactataagattaggctatagagtattcttaaattagtgattgatgggggagggcccagcccactgtgggtgatgccttccatgggctggtagtcctgggttctatgagcaagtagggtgagcaagctgtgatgagaaagccaataagcagagtccctccatggcctctgcatcagctcctgtctccaggttcctcccctctttgaggtcttctcctgacttccttggatgacggatgtaccgtaatatcgaagtgcaagctaaataagtcttttcttctttttgctcctggtactgcatcacaatagaaacactaactaagaaacttgtcttatttagttagccccaaacccaagcctttgatgaagttattttttataactgaaatggaagagttaaactaaccaaatgtggaaaggcaagaaaaatctaggtccttaattatttgtgtactctcataatttgctaaaatatcttatgattggagatttaattaagatattttcagtctcttagtcaattcctgtaaaataaatataatttagcctttttaatttcatatgcctgtgtttactgaacagtgctatcaagtttaaatcctcaaattagtctccagaatgtgtcatagttgttaaaagtatggtagaaaaatgctaagttttatatatttcaactaaatactattgtgtcttcaaatcgtaacaaaggt

SEQ ID NO: 934 - DNA, 1200 bp, mus musculus
attttatatgtcaattaaacttctatttaaaaagaacaagtaaaactataaaatgaaattacaatactttttgtatcatttaaagtgaaaggaaaaagaaagatgaacagacagaagggcagtatgatcaaaatttacgatacacttataaaaaattgtctttatagaacccaatgctatgtacagtgaatggtgaatgcataataataaagacaaattgcaacaagcaaaacatggccagaaaccaaaaagtaagaatagtatatgctacctgattggtggctcagtatctgagagatctcaagggtccaggtaagttgagactgctggtctttctatggggtcaccctcctcctcagcttcttccagcctttacctaattcaaccataggggtccccaccttccgtccattggttgggtataagtatctgaatctgcttctttcagcggcttgttgggcctctcggagggcatccatgccaagctcctgtctgtaagcaaacacagcatcagtaatagggtcaggccttggagccttcccttgagctggatcccaatttgggcctgtcactgaaacccctttccatcagactcttcccatttttgtctctgcagttttttagataggaacaattctgggtcagagtttttgactgtgggatggcaactccaatctcttaacttgatgtcctgtctttctactggcggtggactctgaaagttctctctccccactatagggcatttcatataaggtctctccctttgagttctgagagtctctcacctcccaggtctctgatgcattttggagggtctccccacctcctaccacctgatgttgcctgggttgcctgtttccactctttcttctggccttcagggcttcattccttccctcccacccctaaaatacttggtcatgttcccctttcccctccctgccccctctcctactcaggttccccctccccactgattgctttcttctctcttccaagtgagaatgaggcatcctcacttgagtccttgggtttattaatcttcttgagttctgtggattgtatcctgagtattttgtgctttttggctaatatccacttattagtgagtacatagcatgcatgttcttttgggtctgagttccctcactcaggaatatattttctagttccatccatttgcctaaaaactcattc

SEQ ID NO: 935 - DNA, 1400 bp, mus musculus
cccagtaacacaaacaagacagtcactgtgatgaattaaagtgagccttcatacaaatttcttttatgacttttaaattatttcataatatcaaaaaatgttaatatacatatcatcaaatacagccatcttaatgtataagctattatttttattgttgcttttcaagttataatacatattccctttttgtaaatgaggttcaggttcagttagagaccctgtctcagaaattaaggtagaagatacccaacatccaacatcaacatctgttctctataagtacacacccatctcccccccgtctcaacacatacacacactcacacaaatatatgcatgcccaggagaaaggggagagggagaaatattgtgtattaccaaggaggattaaactgcattttaggggtaaaggttgaaagatggctcagccattaagaaacagtcctggtcctccagaggacctgacctgaattcagttttaagcaccgaggttgttgactgcctaccacctgtcactctggctcaagagaagacaatgccctcttttagcctccatgggcgcctgcactcacaagcacagtaaccacccccacctctgccccacggctgctgccataacacctccctcttctctctgaaatagcaaacagacacttacatgtgaaacaagaacaggtatggtatgctagcattaggaaagtcaataggcagacactagggcttctggccagccaacctagcttacttgctgagctccagaagagcgggagaccagttctcaaaaagcccaaggaggggccagacatggtgatacttctttaatcttaacactggagaggaagaaacaagcagacttctgggagttcaaggctaggcagaggtacagagactctgtctcaaaaacaaaacatcccaggtgggtgatttctaaggactgatacttctggcctccacacgcacacacccacactcacgccaacaaaaaattgaattgtaaatatgcctaaattttaatagaaatgaagcatttatcagtgactgggaaaaaggaagattttttttttttaatgctagagcatctatctacccatctgaattttgtgcaaagagacagtaaccaactcttcataacataaaagttctcccagtctaaagattctaaattaactgacctcattacgtctcactcaccagcgtccaaatcgtattgcttcttgtggtcattaaagagctatataatttggaccctggtcaattttagctaatctacaagagaaaattcaaccttgatcaaactgaccaataggttaaacctttctcaaagattcagtagtgtgcctgctcaaaagtagcactatatatttacaagatacgaactccagaaaaccagatattcc

SEQ ID NO: 936 - DNA, 1000 bp, mus musculus
ttctgttagtaagattcttacgttgtctttcaccatctggtaatttttagagttagttattattgttgtctctgtttagagctttttcttctcatgattctgttagcctctatcagcagacctgggagactagacctctcctgagtttcagtggtcagagcactctctgcaggcaagctctcctattataggaaaggtgcacagatatctggcattcggacctgcctcctggcaaaagatgaaggcccaaaaagggcctgttccagaagctgttagcttctgtagtcagcactctcacctgtccagactagtcttggagggatccaggaaccaagatggttcccccaggttctctggtaaagccctcccgggtggggtggacatctctcctctggcagggaaggtgcccggatgtctggagccctatatgggtcctgcctcagaagctgtcctctagggaccttggggttgtctgccaacttcgtgcccaaggtgacccggtgctggccctgactagaagggattagttaccctggtcaggctgggttttctgcttccctaatgctgtctcatgtcctccatgtttgggttggaacagaagttgtgttccactcacaggtggtcctacaatctcgtggagagtcctctagggaaccttgggggtgtacactgactctgggcccaaggtgacccagtgctggagctgaccagaagggatttgtgaccctggtcagtcgggttttctgcttccctaatgctgtcttaggtcccgtgcgattggattggaccagaagttgtgttccactcaccagaggtcctaagatcatgtggagagtcctctaggggaccttgggggtgtctgccaactctgtgcccaaggtgaccgggtgctggcgctgaccagaagggctagaaatgttgtctagtgctactggtgttcattcataggatggcttgacattgaatttgagcaaggaggtgatagagacttgggtatatc

SEQ ID NO: 937 - DNA, 1000 bp, mus musculus
agtagatggaactagaaaatgtcatcctgagtgaggtaacccagacaaaaaagaacacacatggtatgtactaactagtaagtggatactaacccaaaagttctcaatgcctatgatacaacctacagaccatatagagcatagaaagaagaacaccagggggtggatgcttcagtcctgcattgggggcaggggtgtgattaggacgattgtgggagatggaaggagatggggacaagggagggagaaaggaggtggaggaaataagggtggcagtatcagaatctggaggagatgtgaaagaggtaaagagggtgaataaatcaaataaaaataggtagcagggaagatgaggaactggggatagccattggagggtcccagacaccagagaaatgtgaggctctcaggacccagtgggattgactttagccataatgcacagagaaggggaagatagaacctgtggagaccacctccagtagacagacacaccccctggtcgagggatggggccacccacccatctcaaagtcttttttcccagaaatgtttctgttgaaagaaatgacagggtcaaaaaatggaacagagactgaaggaagggtcaactggggaatggccccacctgggaatacatcatgtctgcagacaccaagcctagcactgttgccatggtcaagaggtgcttgcagacaagaactaagtatggcagttcctggggaggtctggccagcaactgaccaatgcagatgtggatgcttagagccaaacatcagactgaactcagggaacctggtgggggagctggcagaaggactggagaaccagaggtggattgcaacaacattggaagaacaaaatagtctggcctgacaaccctgttgtctcagggactagaccaccaaaaaaggagtgtgcctcgagaaatccatggctccagatacatatgtagcacaggatgccttgcctgatagcaacagtaggggaggcccttggt

SEQ ID NO: 938 - DNA, 1000 bp, mus musculus
aacataatgtttgatctactataacttgtaattgtgagcttaaataaaacttcttttctaaaaaaggataataaaaacaagatagtgtgataccatacaattgacatgcaactaatgatttaagaatatgtttgtggacaagtcccttccggtcggcgccagcactgggtcactttgggtgcggagtcggctgatacccccaaggtcctgagaggactctccacaagatcttaggaccacctgtgagtggaacacaacttctgttccattccagttgcacaggaccagcattagggaagcagaaaacccagcctgaccagggtcacaagtccctttggtcggcgccagcaccaggtcacctgggcaaggagtcagaggacacccccaaggtccctagaggacagcttttgaggcagaccccgtttctgactccagacatccaggcaccttctctgcacaggacagatgtcctcccgcccgggagggcttagccagagcacatgggaaagccatcttgattcccggatcaagactagtctacacaggtgagagtgtggattatagaagctaacagcttctgggacaggccctgtttcaggccttcatcttctgccagaaggcaggtccaaatgccagatacctgtgcaccttgcctgtaagaggagaacttgcccacagacagtgctcagatcactgaaactcaggagagagctagtctcccaggtctgctgatagaggctaacagaatcacgggaggaacaagctctaaccagagacaactataacaactaactccagagattaccagattgcaaaaggcaaacataagaattttactaacagaaaccaagacctctcaccatcatcagaactcagcactcccacctcacccagtcctgggcaccccaacacaccgaaaagctagaacaggacttaaaagcatatctcatgatgatggtacaggacatcaagaaggactttagtaactcactgaaagaaa

SEQ ID NO: 939 - DNA, 1800 bp, mus musculus
gtgtgagacacttctcacagatccgtaaggttgtgcctgtgtagcgaagcaggtgtttgatacttgggagtaggagtacgcttggtcagtacatcactgcctgcttgagtacaatagaccttacatacttgcctgtgatgacttctatgcttctgcaatcacagactttagaatccgtggtgactctattctaattatacacctgctacctcatggaaacaatgtgcagtgggaaccacaagtaagaagccaagctaggtgaccttcaccactggaagctctccagtgcttgtctccagtaggctctagcagacgtaggctcctgaacatctccaatactatcaactaggtgagttgaaagcaaaaggtaagaaaggcttccaaagaagctacgcagcaaagttccgtattgaaaactgtaaagttttcaagatggaaaaaatgttaacatcaaaggcattactttcagtaaaagatgtgctgaagcaaaatagatactttacaaactatttcttttttgtttttacatacaacattacattatttattgacagcatggaaaagtaaatctttatgtgcatctacctgttaagcgtctatcttttggactgcttatggtgagatgtttttctactttgcttttcattgattatattgtattgtattcttatattggggtttttatttgtttgtttgctgaaacattttctttttaattgattaatttatttattcattttatatccagttagtattccccatcacccccacacacagtcctttccctattccttttttctcttctcctctgagaacggggagcctcccctgaccccaccccaggtaccaacccaccctggcacatcaagtcactgcagatctaggcacatcctttcccacttcctgtggtctccacccatgcaagactcacactaaggtctgtccctactgggctacgtctccatggtccagtagcagggatggagatctaaactattttctttactgtgttgctttttctccaggagagctctcaaaactagagttctcacacatttgaattaatagtctttccattttgccaacaaaataaatacaccaaataaaagggatccctaatttcacctgatactgtttaagtacttctgagaagttaaataattctggttcattctctccacatgacaacaacattactactgcaggaaacccatgtgagcaccatagagtcccaaacctttgaaaggtagcattaaaagaactctctatctctacactcattacctgcatttcttgaaaaatacaaacattggactgattagcagaaaaatagcaaacacacggggttaaatgatatcacctgatgaactcctcagatctcctgcataaaccatcctaactcccaacatggttgggagtacctacatgagtcatctggcagaacgggaatataaactgtgcttagagaatgaaatcctccttcagccacataatgggttctttggtgcttttcctcccagtcctttgaatatggacacagtccaaagggcccatcttccagtccaccctctccttgctagtgaacaccattccttctagaagaatattagttctcacaggaagaatgcccatgttcccagaacttccctatgagaccactgggaaacactccatgatctgagactttctcttcgggaccagccctatcctacatgcccaatcctggcatcccagttcctggatttatcattaggggaaaaaaatctttcttcctatatctaaagaagtaataacttaaag

SEQ ID NO: 940 - DNA, 1000 bp, mus musculus
tatggtttagcagtataatatctctgtatcaagagcctggagaatgtttagaataattccattccccttactccacattccctatgtaaagatacaaaagttcacaagtctttctttcttttgaaaatctcagcctagtagagagactggatggtcaggctctaaaagttaaaagttaaaagtttatgttacgaccttgggcgcggagtaggcagacacccccaaccccaggtccttagaggactctccacgccgtcttaagaccacctgtgagtagaacacaacttctgttccattccaatcgtgcgggaccagcattaggaaagcagaaaacctggcctgaccagggtcacaagtcccttcctgtctgcgccagctccaggtcacctgggtgggagtcccaaaggtgtctagaggacagcttctgagacagaccccatttcgggctctagacatctgggcaccttccctgacaaaggacaggtgtcctccccacccaggagggctttgctggagcaactggggaagccatcttggttcctggataactctgagactagtctgggtaggtgagagtgtggactacagaaggtaacagcttctgggacagtccctgtttcagtccttcatcttctgccaggaggcaggtccgaatggaagatatctgtgcaccttccctggaagaggagagcttgcctgcagagagtactcagaccactggaactcaggatagatatagtctccaaggtctgctgatagaggttaacataatcaagagaggaacaagctctaaccacagacaactataacaacttactccagagattaccagatggtgaaaggcaaacataagaatcttactaacagaaaccaagaccactcaccatcatcagaacgcagcactcccacctcaaccagtccggggcacaccaacacacccaaaaacctagacctgaatttaaaagcatatctcatgacatcaagaggacatcaagaagga

SEQ ID NO: 941 - DNA, 1000 bp, mus musculus
agatagagtccacagaattctaaaagttcaacaagctgaagtgtccaagtaaggacacctcagttctacttgggagggagaagaacgcaaccaagagggagagagggaaggagggagggaactcggaggcaaaggggatggaggggagagggaagcatgatctggtatttgttgggggaaaaggactaaagccctgagggccagcagaaagaatagaaacaggaaatctaagaaggtgggaggatgggggactctcaataatgtaccagagacctgggaggtgagagactctcaggacccaaagggagggagctagataaaatgcccaacagtaggcagagggaacttatagatgcccacctccaacaggaagacagggcatcaaaagagggagggggttaccatccctgagtcacaaatgactcataattgttcctgtcttaaagaacttcagggatgaaaatagagagaagactgaagaaaagaaggttcagcaacatgcccaaagtgggatccagctcaaggggaggccccaagacctgacactattactgaggctatggggcactcacaaaaagggacttagcatggctgcactctgaaagacccaacaagcagctgaaaaagtctgatgcagatatttgcacccatccaatggacaaaggttgctaacccctgtgattgaattaggggaaagttggaaggagctgaggaggagagaaaccctgtaggaagatcagcagtctcaattaacctggaccccaggcctataagaccaccaacagggcagcatatatcaactgatatgaagctcccaacatatatacagcaggatttccaggtctggatttagtcagagaaaatgtacctaaacctcaagagacaggaagccctagggagtttagaggtctggtggggttggggatggagggcagggacaccctcgtggagacagtggtacagggaggagttatgggatatggaataggaggagcatgga

SEQ ID NO: 942 - DNA, 1200 bp, mus musculus
ggaaggtggccggttgtctggagccgaagatgttgccgcctcagaagctctgtggctctcgcctgtcccagaaactgctggcctctgtattccacaccgtcacccgtgcagcctgccctccgcggagtccaggagccaaggaggctcccgccagggcctgaggcacaaacctctcgggccgggcggacccctaagttatctttttaaaattaagacaattttagcatagaaaaatttagctccaaattattggtgttttgattattctacaataacggatacaaagatgacttttaaatacctaaatagtcttggtcaaggcaatgtcatcagggaagagtacacaatgtgaattggaagagtccttgaggaatattataacgaggagtagtgtgggaacagagaacctaggaaaggagataagggaaccagggctgtgaagaggtaagagcttaaagaagcagctgagttaggtctcaacagagagaacttgggacagtgaagatagagacaaagtcactgttcccacaggaattgaggagagtggtgccatcagaacccagtccagcaccctattgatagtatcacactcactgaatgactcacctctgtgttccagaacagagctctcaaaagctctaatcacaacatttaaaacagtgatgatatggagcaggtgtgtgctgcctgagggcccttagcattaaactcatcatggatgagcatgtgttcagttatctgtggacaatgctaaatgaccagtacagctttgcatccttctaaggttgctgttcttgtctattccagtctcgaatgtcagcttctcctgtctactcatggctccactctttcctgactgtgaaacctcagacaattatttcatctcctctattcactttccttaagtactgtcttagttagggttttattgctgtgaacagacaccatgaccaaggcaagtcttataaaaacaacatttaattggggctggcttacaggttcagaggttaagtccattatcatcaaggtaggagcatggcagtatatattcaggcatggtgcaggcagagctgagagttctacatcttcatccaaaagctgctagtggaagactgacttccagacaactaggatgaggatcttaagcccatgcccacagtgacacacctatcccaacaaggccacacctccaaatggtgc

SEQ ID NO: 943 - DNA, 1400 bp, mus musculus
ctgttttatcgaagcagtagataccctgcatcaatagataccctaagacaggaagtaaaatcatttaagtgactgtaagtctaggacagttgacttagttctcagttctgtcaggtaagctgcaactcaagtctccattctttcactggtgctagcttttcactctccatctttcttgttattgttttcctttcttcttccattctgaaaatctgcttgggtttctgaatttgccaagcaggatgctgggcagcagaaatggaaggaggcactagaaccagatcttggcctcatgacactttcagaaaagcggatgtgttatcactggtggtagaggttgtactgattgagcattgctgtgagacaagtctatccaagtctaatagcttaagttgtatttgttgtggtaccatctctggggattagaaatccaaatgagacttagctcagttaatgtcagaaagctacactcaagttactgacctgagcagttggcatctcaagccttagccaggaaagacccagttccaaattcactaggatgctggcatgccttggctcctctctggctcttggccagagttgtctctcaatacctgctgtatgaacctgtctttggagtcaaaagggagagtcaacaagaaggaagccaatcttctgtggcacagtctactattgcacacttcttctcaactcaatcagctaagagcaagtcactgagttcaggcctccacactcagagggaggagataacacaaaggatctctcctctgggaggccaggaactaaggatatgttagaggcttcctactgtggagtcactgatgtctctaagagcatttaagactcaaatcaactaggccaaaatcagcaagctaaaaacatcaaccatcacttccataagatatagtgaggaaggtgataaaccacagggggattagaaggaagaccaaagataaaataaaaatctcattgttcctgggtttcttatgtttgcccaaaggggcatctgtgtctctaaagaaaactaaaatgaccttatcaattcagtataactaagaatatccccaccccaaacaaaaactagatgagtgccagtaaggtaagaaaattattcttccttgattctaggaaaacaaaggtactataatgtgtaatgtacctaacttaactgggtatgtttgtattcaatttcctacccataaaacttgtgaccttatgcatactataagatccaaatgaaagatatccatttaataatttatgctcagttaatattcagtttctgtgccaatgagagatcaaaggcatccccagctggctgccttggtaccatgcatttgaatggtaccaaggcatggatggatattcagtatctatcgagtttggtgcatagaagc

SEQ ID NO: 944 - DNA, 1000 bp, mus musculus
agttattaaagttcttcttgatgtcctctaccatcatcatgagatatgcttttaaatccgggtctagcttttcggttgtgttggggtgcccaggactaggtggcgtgggagtgctgcgttctgatgatggtaagtggtcttgatttctgttagtaggattcttacgtttgcctttcaccatctggtattctctggagctgtgcaggatacactcggaggggtcctggaaccaagatgtctgtgcagggtacactaggcagggtcccggaactaagatgtctgctgccaatgctcaggcaaagcactcccgcgctgggcagatcccaatcctcagaattcttaagctcgcatggctggtgttgtgggtatctgggggtagtcagccaactgtgcgccctagctaccccggtgctgctgggactggaaagggcttgtgcccctactctgacagggttttctgcttccctgactaatgcagtctcaagtccctcgcgattggattggagcagatgctgtgttccactcaccagaagtcttaagatcgttcggagggtgttgtgggtagctggcggtagtcagaggactgtgcgccctagctacccccgaccatgactcttaataaacagtttttatgttgtgttgagcaagacgttaaaggaaaggaatatattagtaagcttccctaaaattaaacagatattgtcatctcaggacaatggtggtgcacacctttgatctcagcatgaagaagcagagactggtggagctctgagtttgagggcagcctggtctacaaattgagttccaggatggccttgagctacaaagagaaacgctgtctagaaaaacaaagcactttccggttaggtactgattctatttatttttaattttagaaataattattggtctttattggaatattcttgttattttaactctgagcttatgtgtaaataaatttaaattttagcagtgaattaaatgttacttcaatgac

SEQ ID NO: 945 - DNA, 1000 bp, mus musculus
aatctgctgggcgtggtgatgcacacctttaatcccagcactctcgagttagagtcaggtggatcttggtgagtttgaagcaagcttggtctacaaagtgaactccaggccagccagggccacgtagtctctgtgtgttctctgattgaaagtctttcaaagccccagtagtgtgtgatttcagatgctaatattaatagtgcagttagtctgtgtgtgaagactttgacagtggtgtgttcctgtatctggaaactgcagcatgcagtctattcagaacctcgggctggccgtcatcgctatccttgctggcatgatcctggactcgaagggatacttgctgctggaggtgttcttcattgcctgtgtttcttgtgagtgtgccccgtggcagcgttgggtttcttacaacagattcaagtgttgatgtttttacagttgggctttgtcatactgctgaaactaaactagacagtgtgcctcagcaggtaagggtgggaagccaggctctgccttggtcgctgaagtagctctcggcttctaggaagctaagggtaaagttctgattttgttcatttgtaaaggcacatggttttctcagatagaaatccctgcagaactacttcttagaaatgacaaactggccaggtgctgccaattctggggataagaagagaggaagaagggtcagggcgggtgctggttgggggtgtcttggctcccactcctatagggctattctgccactcctgggctaagaagcagtggtttcctagggggaaaaaacgctgtggcactccagggctcccagaagcaaagatgaacagtgtgttttagattccgattaagaggggtttggtctgtgcttgcgtttgatgcgtcggtgtcacttacaagcgtgccttgtgtttcagtgtcactgctggctgtggtctgtctgtacttggtgaaccgtgcccaaggtaagcacttacctttctttctttgtctcaggtgggcc

SEQ ID NO: 946 - DNA, 1000 bp, mus musculus
ggtcacttaattagttctcagcacatttctgtccttatgggtcggctaaaccaactgtggtggcacacgcctatcctcctggccctcaggagccagaggcagaggacgatgaatatgaggccaggctgggctacagtgaaaaatcctgtattgagcaggaagaaagaaagaaaaaaagacacagggaacaaaacaaccaaaattaattaaatgtcaattacccactcataataacaaaatgtccccatgaacttatttcattaattttttaagcccatgagacacagattcaaagaaaagtgagatataactcaggaataggagaggttcccagaaaggattactctcttcagtaattttaaatcagtaataactaagaattcaagagcagtactaaagtgtagttactctactggcaatgcaaggttcctcaaaacaccatcaaaagcatctgcactgactctctagggagaacatctgtgccctgtccttagctgacaggagcaaaggagaagggctcaatagcacacgagaggtctgcactaatgaaaagcttctttataacatgtatcccgaatagactgcccaacacctgtattttaaagacttgttaagtaaactttagaaacacgtgcgagtagctcttgtttctagaacattaaaatttacaattttccccgggagcactttgcctgagcatctgcagcagacatcttggttccgggaccccgccgagagtattctgcacaggtgagagtgtagaatacagaagctaacagcttctggggcaggccaaagcaactcagcctcgggacaggccctgttttgggccttcgtcttcggccaggagggaggtcctaacgccagatatctgtgcaccttccctgtaagaggagagtttgcctgcagagagtgctctaactactgaaactcagaggagagatctagtctcccaggtctgctgatagaggctaacagaatcacctgaggaacaagctct

SEQ ID NO: 947 - DNA, 1200 bp, mus musculus
tgagatgcttctgattttaaaattatgaagtgatcatagtatgtattcatatcaaaacactcatgatatttgcaatgggcattcatgtacagctatattctttgctacagctatattcaaggctctaggatccttgtagttaataatttcttaaatattttatggccaatatatgttttctttgaaaatccacacattataaacaataatgtgtaaaacaaagacatctctgtactaaaatccattcaaaatagatctctacctaatatagatactgacagtaaacaagggatgaatacagcaaacattttaactaatgttttcatccttggggatggaccctggctctacatatgttagacaaatgctctgtgagtgagccattcgcagagctactagttcactttgtgtgtgcacctgtatgcacctgtgtgcatgcaggcaggcaccaactctattagctcaccagatatgtaggtcccaaggcaatctcaggttagcccttctgccttgtttgagaaaggaaccctgtgctctacagagctgctaccccaggttagctgctaccccaggttagctggcctacaccaggttggctgctacaccaggttagctgctacaccaggttggctggcctacagacctcagaggctctccttctgcagctcccactcaccagagactggaacgacagatggctggccactactgtactcagctcactcggggtctgaactctgatcctcacatttgtgtgacaagcgttttgttcaggaagcaatctctcccacccctaactcacctttgatgggcattttatttcaaattattcattgttgttgtactttgcggggagcaggggaagagatgtgagacagggtctttctatgggacagacagggtaccctggctgtcctgaactttttgtgtagatcaggttggcctcaaactcagagagatccatgtgcctttgtctcgaaagtgctgcgattaaaggcatgtgcgtgtctggctcttattcgctgtttttaaaagtgtctacaatgtacatttgtctctgtctacttattttaaaatatactttctagaatcataacttcaggatcaaagagcacataccttttaaaatgaaattaatgggtgtatactacacctatatttgtatttctaatgaataaaaaaagtacacactctaatact

SEQ ID NO: 948 - DNA, 1000 bp, mus musculus
tagtaagaatatttatccagaattaaaataaaggattgtgtaaagaggggttgagagcagcagtgagttggaggaagatcatctcccggtaggacctatagtgcagccatatctccaggtcacgctcaggctggcgctcacgtgtgggtttcatcagtgtgggaacgatgctttttactgccaggaggtttgtagacgacaatctcactgaaagccgagggcagcacaaagtcaggtttctgcactgggatgctggacttctcacctcaatttaagagaagttttatccgagctctggaccatctaagagtgagtcgctgtctgctgtttcagtcataatgagccgaaattgtgtctctgtcactccagggtggagaggactcttccacagccctgtggagcttgcaatctgtgattgcttcgtaacaggttgagtgtgcacgtcactgtgttaattacgcagtgtcctatgtgcgttggacagcatagaacacaacacgtgggacctaacttgcaaggattgggtcttcaacttcaagtgcaatgtgtatgaaaaccaatctgagccttgtattctcgtaaatatttattttgtaatttttgttaccgcacgagctgttccggagaagggttctcgggtcatttcagaggtgcgtggaggcacactcagcaatactgtgtcagccgtgacatccctcagtcataccctccactgcacactagtcctctgacatactccagctttgtaagttcagtgatttttacttacacatttaccatttttgtattccaaaatgtgtttgttttaagttatatggaactgacctcctgatgcagtccttggtccccaggcggggcagaagctctgtgcctgtggacacctgggtttgggttaaccctcgaagggctcctcatagggggttgcttttttttttttttttttttttggagggaaatgtttgaagtaaacctttgttttctgaaactaccttggctaaaa

SEQ ID NO: 949 - DNA, 1400 bp, mus musculus
atctaatttgatattggctattggcttgctatatcttgcttttattatgtttaggtatgtgccttgaatccatgacctctccaagacttttaatatgaaggcatattggatttgttgaaggcattttcagcatctaatgagatgagcaggtgattttcttctctgagtttgtttatattacactgatgaattttcatatattaaaccattcctgcatcgctgaaatgcagcatactagattgcagtgaatggtgcatttgatgagttcttggatttggtttgtgcgaataattttattgagtattttggtgttgatgttcataagtgaaatcgttctgaagttctctttcgttgttgggtctctgtgtggtttaagtatcagggtgactgtgacctcatggaataaattaggcagtgttccttctgtttctgttttgtggagtagtttgatgtgggtctgtgtactggaggctttccgtggagatttctggcccagccaggtgcaagggttcaggcaaaggggagagaatatgatcagggagggaaagtcccctcccctgtctcaactgctgcagctgctttgacctctgccattgcctcctgaattggtccaagatgctgcactggttgccctgcaccaggtgccctgcactgagctcataaaagtcctactagccagtgaggagtgatggggagcttccggctgtgtttcaggagagaagatctcttcccaagcagcagtggtacagctcttatgacagaagctctcagacgacagagtaattctcacaccttcgttccttccagataggattcttatatgcagttttggggtgggtcaggggctgagagcagatactccttatctgaggtcttggggataccttatctgcatgtgggagggcttggtgctgctcctaagtgactgatggccacagacctttctacagggtgctatgggaggctatagctatgtgacaagtgccacaggcccaggagagtggcaaaaacaccctctgtcccttcagggtcattgtgttttcaaccaggaaccaggctggctctcacagcccactgccccacagtttgaggagtattgtcactagctcttctttcaaagtctggtagaattctgcactaacatcatttggccctgcactttttgagggctgggaagtttttaatcatcgcttttatttctttatatggtttatgggactgcttagatggtttacctagtcttggtttaacttttgtatgtggtatctttggtttatatttttcagttttgttgagtgcaaacatttgaagtaagagctaataattttttgaatttcctaaatttctgttatgtttcccttttcatttctgattttgttaatttggatactgtctctgta

SEQ ID NO: 950 - DNA, 1000 bp, mus musculus
gcctgcaaaaacctgtttcctatcaagttatatttagagtttcttatcgtagttctttttatcataaaaggcatgctggaaaagctgtgcacagctttgagatcatactagagagaaatttaatttgacatatactttatagtgaacacatatgtgaaaagatttttatcatttctgtgtatagttataaatagtcttgtattgctagtaaataagtcattagactgtttggataaatttgagctagtggtactactgaaaataaacttggattaaacccctgcttatacatgtgttccttatgttaacacacacacacacacacacacacacacacacacacacacacagagagagagagagagagagagagagagagagagagagagagagagagagagagagagagagagatattgagattaagcatcattcctttaaagctttcgtgttttatttacagaatccatctgtcttaggtagggttttactgctataaacagatatcatgaccaaggcaagtctcataaaggataacacttaattggggctggctgacaggttcagaggttcagttcattatactcaaggtggcagcatggcataatccaagcaggcatggttcaggagccgacgggtggtctacatcttcacctgaaggctgccagcagagtactggcttccaggcagctaggatgagggtcttaaagcccacactcacagtgacatacctatcccaacaaaggccacacttactccaacagggccacaacttctaatagtgccactccctgggccaaacgtatacaaaccataataccattgtcttgtgttgtatacagagtttcctgtttctccaaccactctagtgactgtatctttagaggcctcgtgcagatctttacttggtacactctctaatatttcttaatagttatatttcatatctctttatttatgaagagtcaatattttagtacctatttcaatatgtagagta

SEQ ID NO: 951 - DNA, 1200 bp, mus musculus
agggagaaagttggcagccttctctagtccctgattttagtaggattgcttccagcttctcaccatttactttggtgctggctactggtttgctgtagattgcttttattatgtttaggtatgggtcttgaattcctgatctttccaagacttttatcatgaatgggtgttggattttgtcaaatgctttctatgcatctaaggagatggtcatgtgggttttgtctttgagtttgtttatataatggattacattgatagatttccttatattaaaccctccctacatccctggaatgaaacttacttggtcatgaaggatgattgttttgatgtttccttgaattcggtaggaaaaaattttttcataggtatataaactatttattaacagcaaaggcccagagactcatttcttcttggatacacccacagttcggcccctgcagccagtggtcttggtgtgctgactgcagacaagaaggctccaaaagtggcacggccctctatgggctcaaattttttttcagccgctccagttcctcatgcagcttgttgtctagacctttggccagaacctggatgtacttcctatccttcaaatccttaagtctgttcaggaaccagtctggaatcttgtactgtcgtgggttctgcatgatggtggtcactcactccacctcatcctccgtgagttctccagccctctttttaaggttgatgtctgctttcctcaataccacatgagcatagctccgccccacacccttaatggcagtgatggtgaaggctattttccaccgcccatcgatgttggtgttgactactcacaaaatgtgctggaacttctcagggatcactagagacatggtggcagcacagatggcagcatgtaggcctcctgtcggttagcaagtattttattgaggatttttgcatcgatattcataagggaaattggtctgaagttctctatctttgttgggtctttctgtggtttaggtatcggagtaattgtcacttcatagaatgagttgggtagagtacattctacttctattttgtggaatagtttatgaagaactggaattagatcttctttgaaggtctgatagaactctgcaataaacccatctggtcctgggcttttttgggttgggagactattaatgactgcttctatttctttaggggatatag

SEQ ID NO: 952 - DNA, 1600 bp, mus musculus
catattatatgttcaacaaagttaattttcataattattaccctttggtgacataattaattgtggagtcattcagatagtagttcagacaataaatttgtacattaggttgatatcacataaaaaaactgatcatataattcaggtaatgttatctaagaccatggtggtggcccagcctatactacaacctggagccagatctcagtctatggccctgtagcagcaagggtctgttactaccaaaggtcaggctgatgttgcagttgctggccagggacattctgatgtctgaaggctgagggctgtgcaaactggcctcattgctcacctggccaacctggagagagctgatcctggggacacgagagcaagagctctaaccctgatcctagccagctgcagtagtggggagagccccataccttgtgggtgttgtaggtaagctgaccccagggtgtgagcatgggggaactggccctgctactcatttctggtgtagtgggatttgggggtatgactgagggatagcaggccctatcaattgtctttcacgactttgcatgagcaagggagagatgccccaaccgttatcctttgccaactatggcaggctgaaatactggcttcgaagtcatagaagtgagatagatggccctgctcctcacctaggcaacacaatagaactgatcttgatggcatggagtacagttgactccagaaggtgagagtgtgggagacctagcctagcaacctctctgctgcagtacaaggaaaggagagataccctccccgaaccctgacacttaaccacgtacagcagtgggcagagcgaggcctcaggtcatgagtacaggagggctagctcaccatgcctcttgtgttctataaggtggacgctgccttcctctactccctcatcctttgcacttataacaggcagaagagctggctctgaggtcaggagagtgggagatctggccctgtctcacaccatctgcaactttttggagagcaagccctgcactttgcttgggcagtagagtagagttggccctggttgtgggaattgttggtgagctggtccaagggcatgagagtgggagagctggcaggttgagcagcttagatacctctctggtttctaagacctctctgagcagagacctgggctttgaattggcccaccccaatatctactccactgttgaactgctagagtgcataaagcttgccctatggatctaaaactacagcctctccatgaaacaaggtaaaaaacaggataccaagaagtgccccagtgaggctccaataatgatagagtagcagaagccagaggccttgtaccaggctgagtcattgcaatgaacatttacaagcaaaaatagtgtagaaaaatggtatcctgtaggacacactgtgacacactacagcttccacaaccagatgtttttatctgttttgggagatgctgtaagtgtaaagcgttcataagaggggaaggtggatgaatgggacttgggcgccaatatgaaattcacaaagaaccaataaaaagcttaaaaaatgcaaaatttccatgggctcaaatctatat

SEQ ID NO: 953 - DNA, 1400 bp, mus musculus
ttttcattgacttaaaataacagattttaatatatatgatatttaaccaatcatgtatagtttacttaaagttatgaccatgattaattttttttatcattcttccacttcctcttccattgtcaaccctttttcttcttctttttaaatttatttatttatttttttgtttacactccacatattattttcctcctgatccaccttccaactcttccacatcccatgcctcctttcccaaccctgtttccacaaggatgtctcagccctccccagcccttaccccaccagacatctaaactccctggggtcttcagtctctggaggttggttaggtgcatcttctctgactgaccagcagtcctctgctgtatatgcattggtgtcctcatatcagcagatgtattctgcctgtttggtggtccagtgtttgagagatcccagggttccaggttaattgagattactggtcctcttacagggtattcctcctcctcagtttcttccagctttcagctaattcagccacaggactcagcagcttctgtccattggttgggtgcaaatatttgcatctgactctttcagcttcttgttgggtctttctgtagcagtcatgataggttttttgtttgtttgtttgtttgtttgtttgtttgttagcctataggctcattaatagtgtcaggccttggggcctccccttgagctgaatcccaacttggacctgttgctgaaccttcttttcctcaggatcctctccatttccatccctatagttctttcagacaggaacaataatgggtcagagtttttgactgtgggaaggcaaccccttccctcacttggtgccttgtctttcagctagaggtgggttctataagttccctcgccctactgtcaggcatttcatctaaggtctctccttttgagtcctgagagtctcttaacttccaggtccctgatacattctcaggggtgcccccaacctcctatctcccaaggttgcctctttccattcatttctgctggccctcagggcttcggtccttttttcccaactgatacctcatcatattccactcttcacctcctttccgctttcccacaaggatctctcccttccttcccagtcctgtgattgatttcttctcccttccaggtgagaatgagatatcctcacttggacccttcagcttgtcaaactttttgagttcagtggactgttatactgggtattctttacttgtttgtttgtttatttgtttttgactaatatctacttcttagtgagtacataccgtgcatgccattttgggcctgagttacatcactcaggatattttttattgggtattttatttattaacatttcaaatgttattccctttcccagttcc

SEQ ID NO: 954 - DNA, 1400 bp, mus musculus
ccaaacttataatacacacttaaagcagtgctaggaggaaaaatcatagtactaagttcctttatgaaaaaattagagagatctcaaactttcctcttaatgggacatgtaaaagctgtagaaaaaaaatggaagcaaacacaaccaacaggagtaggtagcagtaaattagcaaactcagggctgaaatcaatcacttgaaaaacaaagaaaacaataaagaagaatcatcaaaagtaagagctgcctctttaaaatataaacattattgctgggaagtggtagcacatgcttttaatcccagcacttgggaggcagaagcaggtgaatttctgaattcaaggctagcctgttctacagagtgaggtccagaacagcaagagctatatagagaaatgctgtctcaaaaaaaatatatatatatatataaataaaaataaaaaatatagacaaactcctagccaaactaactaaaagacagagagagtacttaaattaacaaaatcagaaattaaaggaggatgtatgggacaatttcagtgtggacactttgtcccttcttaaaattgggaacaaaacacccatggaaggagttacaaagacaaagattggagctgagacaaaaggacagaccagactggagttcctggcccggggagtctccagacacctgcaaggacccacacaggatccccagggatcctaagacctctggtgagtggaacacagtgcctgctccaatccaatcgagcaggacctgagactgcattaactagggaagcagataacccagcctaatccggggcacaaatcccttccagtccactgcagcacctgaattccttgcccgctgagtctctggacacctgcaaggacccacacaggatcccacacaggatcctaagacttctgatgagtggaacagtgtctgctccaagccaatctctcgggacttaagactgcattaattaaggaagtatataacccagcatgatcagtggcacaagtcccttccagttcactgcagcacctgggttccttgtgcacagagtttctgaacacccccaaggtcctcacaggactctccacaggatcttaagatttctggtgagtggaacacaacttctgccaggaggcaggtttgaacaccagatatctgagcaccttccctgcaagaggagagcatgcctgcagagagtactctgaccactgaaactaaggagagagctactgtcccaggtctgctgatagaggctaacagaatcacctgaggaacgagctctaaccagagacaactataacaactagctccagagaaaaccagatgacgaaaggcaaacataagaatcctactaacactcgagccccgggctaccttgccagcagagtcttgcccaaca

SEQ ID NO: 955 - DNA, 1400 bp, mus musculus
aattctcaactggggaataccaaatggctgagaagcacataaaaaaaaatgttcaacatacttcgtcatcaggaaaatgcaaatcaaaacaacccgagatttcacctcacaccagtcagaatggctaagatcataaactcaggtaacagcagatgctggcaaggatgtggagaaagaggacactcctccatagctggtggggtcaaactgatacaaccactctgtaaatcagtttggcgttcctcagaaaattggacatagtactgcctgaggacctagcaataccactcctgggaatatatatacccagaagatgctccaatttgtaataaggacacatgctccattctgttcatagcaaccttatttataatagccagaagctggaaagaacccagatgtccctcaacagagaaacaggtacagaaatgtgaagcatttacacaatggagtactactcagctattcagcagatggtcccatggaccccagaggactcccatgcaccagacaccccagcacgaccaggatcataggatcactggcgagtagaacacaacatctgtttcaaaccaatcctgcaagcctgtgccagcagcagggaaacaagagaccctgaccagggtctcacgtcccttttggtcagcaccatctcctggccaccttgggcacaaactcagcagaaggtcccgaggtctccagaggactttcaaaccaatcttaatggacctgtgacagtaggagcaaggacacaggatcccagtctggccagtgactcaggcatgggttccttctgatcagtgctaatataccttggttttgaacactagagagccccatggtgcccagaggagacaccacttccaggtgttgtaacatgcccaggatcttaggattccaagatcccagaataccaggagcttggtcacacaaggatctcagggtctcagaggaagtttgactgcaaagaattctgacacacccagaatcttagattcacaggatactggaatcacaggataacaaagaaaggaggactatgaggagtcctgaatcaaccaggattataggaaggacaggctccaatcagttatattgagggcagcaagcacttgagaaaatcagatggcaagaggcaagcataagaagagaagcaaaagaaaccaagtttacttggcatcatcagaactaaactctcccaccatagtaagtcctggatacaccatcacaccagaaaagcaagataaagatctaaaacttctcatgatgatgatggagtactttaagaaggaaataaacaactcccttaaagaaatacaggagaacacaagtaaatagctagaagcccttaaagaggaaacacaaaattcccttaaagagttacaggaaaacattaccaa

SEQ ID NO: 956 - DNA, 1000 bp, mus musculus
actatcgtattaaacttagtaaagtaaatatattaaaatcttaacgcaagaattcaataattaattttaacttagtattttttttcaatcctttagttaaaatctagagacttctgagtgctaggaataatactttatcactgaaggaaatcctgaagcattaaatttggtatttactttaaaaaaaaatccttcagatctgtgactgtgccctgttcagaccttgagtgcttgttctggacccagtctcagaacacccagagcaagctcaactctccggtgctctaatatgctcaggatcagaggtgaggaggccacaacatctgccccaataccaggagtaactggaaccagtgtgatccagagatccaggaaccccacgtggccagtggcactggttccatccttctggggagaaccctgagcagaccttgagcatgaacactgcagccagtctcaggacacccagaggaaactcccaagtgctctaacactctcaggatcataggaaaacaggatccgaggagctcagacacaccagaatctcaggatcccagaggcagcttaattcccaggagcctgacacatccaggttatcaggatcataggatcccaggattacaggatcacaaagacagctggactctgaggagttctgacccaccaggatcacaggagggatgggctccagtcagagacagtgaaggcagatagcactagagataaccagatggcgagaggcaaagataagtacataagcaacagaaaccaaggttacttgctgtcatcagaactcaattctccaaccataacaagccctggatacactatgacactggaaaagcaagattcagatctagtatcacttctcatgatgatgatgatagaggactttaagaaggatataaataacccccttaaaacattgcaggagaaagctggacatggtggtgcacgccttgaatcctagcacttgggaggcagaggcaggcagatttct

SEQ ID NO: 957 - DNA, 1600 bp, mus musculus
gcagaacaaaaatgaccacacgctaccccatcccattttatatgtatagaaaataatccttacacctaaggctcattcagagaacatcacagaggattgggggaaagatgataagaagcagatggccaggaagtctgattcaatatttttcttttttagatatgacagggaagctacacctttgtaattgaggaaaatacgtaataaaaaaaaatttcaataatatggttgccaaaacatgacctgaaaattgagagtaccccttaaaccaccaacataaattggctttagtctaagatgaagagatacaggaaattaatgactcttgagaggaaaataatcttatttagtaatgaagaccctgactagttatctatcaccaggtggtcagctctagaatcatgcattctggtaacactgaatatatttcttaagttgtatttttatttttttacatgtgtgtgtgtttgtgtgtgtgtgtgtaaaatattaaataagaggaggccataatttgagacagagtgagggagcataggaaagtttatttttaattaaaaacatactttaattaagcaaagcaaaactctcttgagaaaaagcttattattttcaataaaacaacttaattttgtcatttataatgtaaatggtgtttctaaattttaaatattttagtgtcaaaagtaaatgattattgtgggaagccgcaaacgccattacaagatggcgctggctaccactggccaccgcccatgataatgggtaaacaaccaatgtgcgcatgtgcataagagttttttgccgagtcactgcctggcccgatgtatattaatgaggtactggtagcataaccaatcagttatggacacgtcactcctaggcctatataagcagcgccatttctgggctcagggtctttttgcctctgtaattgagctctcccaataaacatgtacagaaggatcctattgtggcatcgttcttgctggcgagtcgggcgcacacagattatggatttcaaattctttatatgagatattttctttcctttctagcagaaattttggttaggaaaaagttcattcacataaattatatgaataaaataataagtcagttgcttcaatgtgtatttaccaggatattatttcataatactttgtggacttcattgatatttatatatttattctttgatcaaggatagcaatgctttatgatagtgattcttgaaagctacattgaattttcctcttgattttaaaataatatcgtataattgatttgtagcacaaaaatatggtcattcataagcctgtatggatttggtaattcatacgcagtgtaaccattgtgtttattttccacttcttataagtagcatttatggagagtgtgaaacagctacttagaatgtatgtagacttcatttactaggatgaaacatatgcagatattatctatagcttacatattttgagacaaaatgaatcctattttaaggttaagcattagtagggctctgtcaatacaattacaagatatataataaaatacttgttaaatccttacagacttgaactttaaatttttatataaa

SEQ ID NO: 958 - DNA, 1200 bp, mus musculus
gtacatgaagcctagtgaggagggatgtgaaaaatgcaaagagaaatcacaatggaaagtacaatgcttgaggcatcaagaccccagaaacagtaggaagagtataccaatgggttaagcaatactaaatagtcatcccagagaagatgaccataagagaaacattgtgtagactttgtaggtcatatttatatatttaggaatatatataaaggcttatgcaaaaaagaaaaaaatgagcgcataaattttaaagatagcatggtggaagtaaggttcatggaaaggtttgagaggaaagagagaggaaaatatgtaaacattacaagtcattcatcccaaattattgagcctctggcattatgtgataaatagtccctttctcataataacatagactgttcataagcagtagcacctgaggttgacctatgccccccaaatgcaaacacaactgcatatatccatgtaccacttcacatacaaacttttacacacatctgcacatacacacatataaaattaaaagtttaaacgtcaagcaaatttattttgcttgaatgatatgaatacaacagcatttcaatattaaaaccaatacacattatgcatatgcatcgaacataagttaactgcaatatttttcagctctttaaaaaatgtatagctgtctcctgagagtctctgccagagactgacatacacagagacagatgctggtagccaaccatagaactcccccaatggaggagttaaagaaaggactaaggagctgaacaggtttgcaaccccttaggaagaacaacaatatcaactaacaagagctcccagagctcccagggactaaaccaccaaccaaggagtacacatggacggacccatggctccagccgtatatgtagcagaagatggctttgttgggcatcaatgggaggaaaggccctaggtcctctaatggatcgatgctgatgtcccagtgtaggggaatgcgagagtggggaggcagaactgggtgggtgggtggaggaacactctcataaaagcaggaggaggggggatgggataaggggtttctcaggggggatttggaatggggataacatttgaaatgtaaataaataacacatccatttaaaaatgtatagtgaatgtatactttgtttcccagaattttaaattaattaacatttgtaaaagcaa

SEQ ID NO: 959 - DNA, 1000 bp, mus musculus
agctccagaatgggcaaagatttttaccagctacatctatgatagagagctatatcaaaaatataaaaagaattttattagtcagacatcaagaaaactaagaactgaattaaacatggggtatcaatctgaacagggtgttctcagaagataaaacacaaaagggtgagaaacagttatagaaatgtttaatattctactcatcagagaaatgcaaatcaaaactattttcagatttcatcttaaaccagtcagaatggccaaaatcaataaaacaaatgttggtgcaagctggcaaagatgtgggtgtaaagtaaataattattcaatgttgatggaagtgaaaacttgcattgccactatggaaattagtgtggcagttcctccggatatctatctatcttcagatctagctacaccacacttgggcacatacccccaaaaaccttatttcaaacataaggcaagatggaatgtaaaaaaaaaaatatttaaaagtttattatagagaataactactgcctttaaatatattcttttacattaaacttttttttccatttttattaggtatttagctcatttacatttccaatgctataccaaaagtcccccatacccacccacccccactccctacccacccactccccctttttggccctggcgttcccctgtactgggtcatataaagtttgcaagtccaatgggcctctctttccagtgatggccgactaggccgtcttttgatacattgcagctagagtcaagagctccggggtactggatagttcatgttgttccacctatagggttgcagatccctttagctccttggatactttctctagctcctccattgggagccctgtgatccatccattagctgactgtgagcatccacttctgtgtttgctaggccccggcatagtctcacaggagacagctacatctgggtcctttcgataaaatcttgctagtgtatgcaatggtgtcagcg

SEQ ID NO: 960 - DNA, 1400 bp, mus musculus
ggtagtcattagtcctcttaaggagtcttctctttgccacagacagagaccactgcagaaaaccaaaatataaaaaataaaaatcattctaagatttattaatatatgtttgttgttttgtgtatattgcttgactctccccccctctctctgtttgtgtgtgtgtgtgtgtgtgtgtgtgtgtgtgtgtgtgtgtgtgtgtggtatgtttagaacataactcgcaactgaaaggaaatctgtttgggagcttgcaatgttgttaggttgaagcccacctccttttaaacagtttcctgttgtaacatgattttgtggtaagcttgatataaccttctctaacctttgtgtttacagccatgcatacttctagattcaggttaccttgaacagctaaaaactgcatttccatcaaggaaatgttgacaaaaccttcgttgagaaacactacatcagtaatatttgcccacaacaaccactaaaatgtgaaaaaacatccagctgcccacagtgcctagagcttccagggctattgttctgtaagtgtagatgaatctaaagtcctgacaggcgccaaaccaaaactgagatggatacaactgcagtgttgccaggctccttcttgtggctggacagcttgtcaaagccttccgtctgcaacaagccagagcagagaacaggaagaaatggataagaaagcacaagtgatttttggtacccaatgttgaaattgcagactagacatccgggaggaatgcttaccactattgatttgttagcttggacaggacaacaaagtcatttggtgttttgtaacgctactcaatgagaaagcacagtgagcccatggacagatcctcttcagaagtcaatagtgttaagagagaagacattgccataacctttggtatgctgcgtgagaaagctatagacactgcgaattcttcttcaggttacctttaaatctttatgctgttgctcacttggataatttataagatcccccctcctttttttttaattctttacttgccattgcaaggaagagaaaatgttatagatcacattttctgaataatctgaaatgttttggttgggatggctacagaaaagctttagaattacctttactttggcactgaagatgcaaataaagaataagaaaacattttaagaaaatgacgtacctggaaaaaatattttttattcaggcaaaatgtaaacactggaattaaacaatatgttcacattatcacaatagcacagaatcaatagtgaatgttttttttctttaactctccatagttattcagtgtttatttcatgtaagactttgtaagaaacatcatgtataatatttctaccaatcatcactttcaatgattcttatagaaatagac

SEQ ID NO: 961 - DNA, 1200 bp, mus musculus
tctttgaggacttctacctgtttgcttgtgttttcctgtttttctttaaggacttgtaactctttagcagtgttctcctatatttctttaagtgagttactaaattccttcttgatatcctctaccatcatcatgagatatgcttttaaatccaggtctagcttttcagttgtgttgggctgtccaggactaggttgggtgggagtgctgtgttctgatgatggtgattggtcttgatttctgttagtaggattcttaagtttgcctttcaccatctggtaatctctggagaaatttgttttagttgtctctggttagagcttgttcgtcaggtgattatgttagcctctatcagcagacctgggagactagctctatccttagtttcagtggtcagagtactctctgcaggcaagttctcctcttgcagggaatgtgcccagatatctggtgttcgaatctgcctcctggcagaagttgtgttccactcaccagaggtcttaggatcctgtgggagattctgtgtgggtccttgtgggtgtccggagactccccaggccaggaaccctggtgctgcagtggactggaagggacttgtgcccctgatcaggccgggttatctgcttgcttaattaatgtagtctcaggtcccccgtgatcagattgcatcagcagaagtatttctttacttaacctctgttgagaaaagcattcgtaaagtacatttgtgattatttgatgtttctgagaaataaattgcaatattcgttttttagcaattctttttttaaaattaggtattttcttcatttacatttcctattctatgccaaaagtcccccaaccccccccccactcttctccccacccactcccacttcttggccctggcattcccctgtactgaggcatataaagtttgcaagaccaatgggccgcccttcccagtaagggccgactaggtcatctgatacatatgcagctagagacaccagcacgggggatactggttagtttatattgttgttccgcctatagggttgcagacccctttagctccttggttactttctctagctcctccactgggggccctgtgatccatccaatagctgactgtgagcatccacttctgtgtttgctaggccccagcatagccttgcaagagacagctatatcagggtcctttcagcaaaatct

SEQ ID NO: 962 - DNA, 1600 bp, mus musculus
aggatcttatacccaaacccacagtgacacacccattccaaccaggtcacacctattccaacaaggacacaccttcaaatggtgccactccctggtccaaggatatacaaaccatcacagcaggtaagttttcagtgagtaaagaagtatttatacttaagctgggtacccaaatgtaaatgcataataaacaaaacagttatattatgataaagaaatcttacattttgttttattagtgtttcattgattttttaaatcaagaacttaatagtgaaatttctgtttgataaatgtcaccagatgatatgactagtagtaaatgttaaatacagttcgtgtacatagtattaaatatttaaatagtaaaactaagaatttatttgttgttacatatattttacaaatgtaattgaatacaatatgaacctcaaaactttccctgtgaatctgaaaaacaaaggattcatttaagtttatatgtaagcaatgaactcactgaatttaaaaataatttacttattctttatggagtagttttaaggaccatgatgaaactgagctgtattcaaaacaatgtagaaaaaccatgagaattgtattttatttagtattttagagaataccataagaataaattattacggtcccttccagtcaacctcagcaccaggtcagcttgggttcagagttggtggacacccccaaggtccccagagcactctccacgggatcttaaatcctctggtgagtggaacaacaacttctcttctaattcaatcacgcaggacctgagacagcattaattagggaagcagaaaacctggactgaccagggtcacaagtccctctggtcagccccagcaatgggtcaccttgggtgcagaggcggcggacacccccaaggtccccagagcactctaaaggagatcttaggacctctggtgagtggaacacaatttctgccaggaggcaagttcgaactccagttatctgggcaccttcccttcaagaggagagcttgactgcagagagtgctctgaccactgaaactcaagagagagctagtctcccaggtctgctaatagaggctaacataatcaactgaggaacaagctataaccagagacaactataacaattgaccccagagattaccagatggagagaggcaaacataagaatcttactaaaagaagccaagaacactcaccatcatcagaatgcagcactcccacctcacccagtcctgggcaccccaacaaacccaaaaagctagaccaggatttaaaagcatatctcgtgatgatggtagagggcatcaagaaggactttaataattcacttaaagaaatacaggagaacactgctaaagagtaacaagtccttaaagaaaaacatgaaaacacaaccaaacaagtagaaagtccttaaagaaaaacaggaaaacacatctaaacaggtgatggaaatgaacaaaaccatactagacctaaaaagcaaagtagacaaaataaagaaaacccaaaatgaggacactagaaaagcaatctggaaacatagatgcaagcatcagcaacagaatacaagagatggaaga

SEQ ID NO: 963 - DNA, 1000 bp, mus musculus
tctatctatctatctatctatctatcatctattttctatctatgtccattaaaatgggcaatatcaatttgacactctgcatgtacattctagtcaaaattatttcatgtctctgtacaaggaatcctctggggaagatgcaatgaacaattatctgcagaaactatacagctgtttaagtaattttttgaacctgaacacacacacacacccatacccacacacaaatggcagttcttttgaaatatactagaacttcatagatgcttaattgttgttcctagttcagagtatcccacatcacctgcacgcatctgggaagatgctggaaattttgatagtgcagttaacctgaggttgattatttttcttttatattttcagtttgtagcagtttcagtacaaggtgtagaaggccttgaaatttgtagacacccggctcgccagcaagaaggacgccacaacaggattcttctgcacacgtttattgggagagcttgattgcaccctgagcccaaaaaccagtgctgcttatataggcctaggacaggcgtgtctacacctgattggttatgctttcagtacctcatttacatgcctcaggccaggcagtgactctgcaaaaactctactgcacatgcgcacattggttgtttacccgtacttatgggtggtggccagcggtagccaacgccattttgtaatggcgtatgtggcttcccacagaaatttagtgatgcaaagtatatatgtataaatttaaataagctccatgaacatatggaaacatgttttgaagcttaatttatcttatgttgttggcaataatatgaccaaatcacaataggtaagtgtgatgacttcaaacctaagggtgtattcccagtgaagctcaacttactgtgggcaggtatgttgctgcgactgtgagtacagcaaataagaaaaaaatgttgatccatctttactttatctaataatagagatcataggccataat

SEQ ID NO: 964 - DNA, 1200 bp, mus musculus
ttgtaacaaaaaatgaaattatgtagtatttgtctgactttacaacttttatcttagagaaagcaaccattttcattggccacagaaaatgagagaggaatccacaaagagaaaatgcttaaaagggagatctctaatttccctttaaaaactcaagccatgagtggtcaagtgagagcaagtcatgcaatgttaagtaactgtcctttttagagttttactgctgtgaagagaggcctttaccaaggccagagaaggcagcctagctagtagaacataccctacagacaggccacagcttttggggtagcccctgttccagttgtttggaacccacaagaaggttaagctgcccatttgctacatatgagtgaggagacctaggtccagctcatgtatattctttggttggtggctcagactccaagatccccaaggaaccagagtattttactttgttggtcttcttgtggagttcttatccctttcaggggtcacagtccttccttctattcttccataagagtctctaagctccatctactatttagctgtggcctctcagagaacaacatgctcctgtctgcaagcataaatgtattattagaagtgttagggattggtgcttgcccgtgagatctgtctcaaattgggcttgttattagttggtcattctctcagtctctgctccctttcctgtgcatgtgtaacttgtagacaggataaattttgcattgaaagttttgtgggtaggttggtgtctctatcactccactgagatttctgtctggctacagggggtgtcctcttcaggtttcatatccccaatgtagtgaatcacagctaagtgcaccccattgattctcagacaccttctttatcccaggtctctgtctcatcctggatgtggctccccaacctcctcagccccgtcaattgcagattttcttgcaagcaaggaagcttgaatatcacatagaaaggggaataaaatactcataaaaggcagatggagggagggaattgaaaaggagggagggtgggaagggaaatgggagatgcaggatcaggtatggggaaggacaggagagatggctgggtggccatggaaataaaatagattttatatatgcatttaaatgtgaaaggaatgtaagaataatgaatacaaagaatgtaacccttacgacactagtgtta

SEQ ID NO: 965 - DNA, 1200 bp, mus musculus
tactgtgaacagaatacataatttttgtactaagtgctaaaagtaaatataaagaaattgtattcttttaaaaagtgtatatcttatatttttgcagttgaattttctttttttttcttttattggatattttttatttacatttcaagtgttaccctttccatttctcccctctagaactttctatcccatcctcctaccacctacttctatgaagttgtgcccacacccacccactcctgtcttcctgccctggaattcttctacactggggcatctaaacccctcagacacaagggcctctcctcccgcttatgtccaacaaggccatcctctgccacatatgcagctgaagctgtgggtccctccatgtgtattctttggtttgtggtccagtcccctggagctcagggatagggcgtgttgacactgttgtttcccccatggggctgcaaaccccctcagctccttcagtcccctctacaattcccccatcggggtccccgtgctcagtccaatgcttggctgtaagcatccaccttcatatttgtcaggctctgccagagcctctctcaggaggcagccatatcaagtttccaacagcaagcacttctgggcaagcacaatccaggtgtggcaactctatatgagatggatcccaggtgggccagtctctggatggcctttccctcagtctttgctccacacttaatctccataattgttcccgtgattattttgttcccctttctcatactcacactttggtcttccctcttcttgagcttcatatgctctgaactgtatcttgagtattccaaactgctgggctaatatccacttatcagtgagtgcataccatgtgtgtgtttgtttgtttgtttttgtttgtgactggatgatattttcaaggcccgtccatttgtctgcgaattttattaagtcaattttttaaatagctgagaagtattccactgtataaaagtaccacattttctgtatccattcctctgttgaaggacatctagattgtttccagttcttaaatgaccatcagatgttgaaagggatcttagacatctgagttttctgggttttatgccatcacattccaagaatctgtcaaggtaattatctcataacaggtctcatttatagttggtgaattcagttcttgacttcattaccttccagcaaatt

SEQ ID NO: 966 - DNA, 1000 bp, mus musculus
tatttttacagtccagcatttaccccctcctggtctgccctcccacagttcaacatcccattcctcttccccaagtctttaagagaatgccctccatccacaccatgcctgcttctccctggggcctcacttctctcatgagttaggcacatcttctatcttctctcactgaggctagatcagatagtcttctgttgtacatgtgtcaggggccctcggaccagatcatgtatgctgcctggttgatagctaagtgtctgagagaccatgggtgtcagggttagttgaaattgctggtcttcctatgtcctcctcctcagcttcttctagccttctcagaattcaaccacaggggtctccaacttcagtccattggttgaatgtaagtatctgctctccatctttctcagtcagcttattgttggacctctcagaggacagtagtactaggctcctgtctgtaagcacaccatagcatcagtaatagtgtcagccttggagcctccccttgagatggatcacaggttggaccagtcactggtcctcctttcactcatttcttctctgtttttgtcccttcatttcttttagacaggaacaattctggtcagtgtttttgactgtggaatggcaacctcatcccttcacctgatatcctgtctttctaccagaggtggaaagtttcctctccccactgtagggcatttcatctaaggttcctccctttgagagttgctcacctcccaggattctggtacattctaaagggattcccaacctttaaacctcccccatgaggtagcaaaattccactgtttctgctaaccctcagggcttctcttctgttctgccccaatacctgatcatgttcccctttcttctccccattaccctcctccctcccacccaggtcactccctcctgctgcctcatgtaattgctttcttctccctaccaattgggactgaagaatcctcacttgggagcttctgcttgttaa

SEQ ID NO: 967 - DNA, 1400 bp, mus musculus
gtatttagtttagtaagtatagcaagctgtttgatttgtttgtacttttgaaaaacaacttgttcattgattgttccagggtttcttttcatttgtacttatttttttctgatattttctctttttaaaatttttgattggctctttgttaatttcacatcgtcaacttcaatttcacttatctccgcacccctcttatctcccattcccccatgcaagcttgcaaatcctgcccaacagaaaagaaattttcttatggaagtagtaatgtgccatgttgtattctacagtataaccatacccttttattcacacttctttcttgcaaatgtccattgcaatgatccttttggcttgctacaaagcctctgacttttggtactttactaatactggaacctctttgggactcctcttgaatatcctgttgttgccctgtgccgtggagatcctgaagtttttggatctgtaagatcagctccctcatgcacttttgcagttagttcatcgatgtggtagatgttaggctggaccattcaatctgggcccgataggtgtgagctggtttgctatcatgcacctcaggatcagctctactcttctgcccaagtgaggtgcagggcctgctctctgaaatgttgcagccagtgtgagatagatgatgagggatgagtgaaaggtagagctcctccgtgctcacatccttgggaccagctcatctacaactcccacaatatgtgggccgcctttcagagtactgcagctggctagggtagggttagctctcctgctttcacaccccgagagccagctcttccagatgcccagttaatgggctgggtcatttctgtacagctctcagacatcaccatgtcatctccagggcagcagatcagaccagagacattcacctggcctttggtggtaacaaacctttgttgctgcagggggaaggactcagacataacccccaagtggcagcacaggacaggaccctaccatagttctagattggatcaatcactactcaatattcctcactactctgagttatcagttctgcctctcttcaatgtgtcccatccttctgtttctctttcttttccatttctctactttattgctccacttaagtgttgcctgaggtccccaagtgtctggggttatcttagtattggtttcagacatggttggttgcaatcttagtattgttttaaagcatggttggttgcactagtatattatcttcatcatgggctctcacccccacccaattacacatagcctctctcttatctgccacctacagatgagacaaagaagctacaactgccagacctttaggggtaggtctgatatttattttcttctattgttttggggatttgtctggtctccat

SEQ ID NO: 968 - DNA, 1200 bp, mus musculus
aacagtaaatgagaagacttgtctgtgttaccctacttctcatcagatcagccctttctcctaagatcctcaattctttgcttttcttttctgtttcttttttgttttgtcttttgctattgcttttggtttgtgtttgtggggtgtgtgtgtgtgtgtgtgtgtgtgtgtgtgtgtgtgtgtatctttgtgtgtgtgtttggttttttatttgtttgattttttgttttgttttgttttcatttcttcttcccgtttttgtttctttaattggagagtggagctttgagaagacatgattgggcattacaagtgtttgttgctattgggttctagttaagttaggccagcagctggttaaacaagacaaagaatatgcatgtgacttcatggtgtgtgtttgctatgagggcaaacatgaatgcaattcctgactttaattttatttatgagcatctgaatttatattcattactagttaagaattagttgtgttgaaaggctctcaattccatccttttgttgcagattatttcagcccattctcctttctctctataaacgattactccaattgtaaagaacattactctaacaacacaatgacttctctgctaaaattcaatatgtatttttaaaagtgttccaattattgactaacagcactctacacactaaacaaggatgttgcctggaccggccctgctttctgttttcactgctacttagaggagtatcttgcacatctctttcagtgacttcgttttatgtgatttttatattaaatagagataggacctcactttatatattgggatggtctggtacttgctatcaaacccagagattcatctgcctctgcatcaaaatgctggaattgaaggtcagccaccatcatacctggccttgtttcatagatttttagtgagattcactgttttgctattatattccttccctgggtttcagttcatcattttttaagatctgcacatgtgatagttagcactattgacaaatttaatcaaatcaagaatcacattggagagagaaagaaaagtaaaggaaggtaaaggagaaagaaaatttgtacacagtttagagctacgcttatgaactatatagagttaattttaatattggcattgtatcttgagatgttagtaagtttacctcattaagtttatatacattggtatt

SEQ ID NO: 969 - DNA, 1200 bp, mus musculus
gagaagacctgaaatttgcataccagctttgcttacctactggatgcttttgcagtcaggactgccaggttcctcgaaaatgcctcatgtatttggggacttggacaaggcaagtaataggttagaaggaaagttctgtataatctatagagatggagatgaagagaagtggggaggactgctgaagattgtctataaagagctggtaatgagactggaccattgaacttggagaagaggagggagaggtgaagatttgtagttaacatcccagctttcatggcctgagtgacctgtgggttcacagagaatgcctcctggggttaggacttgagataaaggacataatgttgggcaaggtaggggagaaggtgtgcatcatcctctggcattgctgtcagaaaggacggtgctgccacagcaagtggtttgttacagagttggggtgagtgtgaggtactgaatttggaggagagaaacataactaaaacagactctctacctgggactgtcaggggccacagcaggctgggactcaaatcagtgtcttgctcagtcaccatcagaggagcttcctcttgaagtaaatgggaactcatacagagacccacaatcggatgatgtgcagtgagtgagagactttagtactcagacctacaagggatgtcttcatcaaacccctcctctcagggctcagggatctatgcagaagaggctcagaaatttgctaagaaccagagaggatggactgcagcaaggaaacctcgtcttctgtacacaaccgagctggtgagctcccagggactacagcagcgtgcacagggcctgcacaggttaaagtcacaccagattccatctctgagcgccacacaggggcctatctctgtaagagggaagaagacgtgagctcctactccctagccaagaagttattgccaagtgacaactgtttgcaaaggaaagactaattttctctagtggagtctcactgggtatatacactaccgtcaagggcaggtaccacacccagaagtatatagccagcacagaacaaactcagggatgtttttgtagacttttgtttttgtatcatattgctttgtttgggcacttttttatcttattgttcttttgcttgtatattatggtttccaagtctgggcttttacgggtttagggatgtgtgtgtgtgtgtgtgtg

SEQ ID NO: 970 - DNA, 1000 bp, mus musculus
taacacaatccatcaacattgatattaaaacatttatttttctttctgtttaattttatttttgcaaaaacgattcccccagaacagcagcagttaactgctaaaagccaatataacatttcatcatgcattttgattttgatattctctttggtttcagattcaatgtttgcttgaaagaaaataattcataacagaacatttatacttttaaagagggctagtacttgaggtataaaatgctaataaataaacctctttacagttttgagtctggagaagagtatatacatgttatttttagtattttaattggcttatttaatcagtaaatgccaacctatattacttcaacatgagttgatattttaaaatctgaaaaaaaagtgattttaaaagtaaaagtatcaaaatgacatttcataataatcccagttctaaacaaagaactacagagaagtaatcactactgggagaagcattagatgttttcagatataacctgcctacatggttgtcgaatatagagtattcagccttgaaattacgtgtgtgtatgtgtgtgtgtgtgtgtgtgtgtgtgtgtgtgtgtgtgtgtgtgaaccaccaccagaagaagattcagaaagttgtgtttatggttttgggcacacaaacagcatgtatatgtaacaatgttaataaaagaaaaagagggtatcaagttgagagggccattgagtggggcaggagagggtgtgtgggtgggggagcaccctcatagtggcaaagagtagagaggagatggcgaatattgaatgcgggggtggttgtggaggtataaccagaaagtgggatatcatttaagatgtaaatgaattgaaacattaattttataaaaagaaaaaagaacatcaagttataaaaagcgagtgtgtgtgtatgtgtgtgtgtgtgtgtgtgtgtgtgtgtgagagagagagagagagagagagagagagagaatgttgggttgggttgg

SEQ ID NO: 971 - DNA, 1000 bp, mus musculus
accgctccagcaaccatctacaccgggggtatctaacttccacaggaccaagtgcctcctctcccattgctgtcaggcaaggccatcctcttctacatatgtatctggagtcatggattcctcactgcacactccttggtttgtggtctagtgtctgggaccaccagtgcgtggtccagtcagctgatgttgttcttcctaggggtttgtaatcctcctcagcaacaccagtcctttggtcagttttctcatggggtccccgagctcattcagatggttgctacatctccattggtcagttgctggctggacctcccaaggagcggccatatcaggttcctgacagcaagggcctcttaatcagagcaacagtgaaaagtttggtgtctgcagacaagatggattcccctgatgggacaatcccaggatggctcttccttcaggctctactccatttttttgtaccttttcttcctttgaacggaaacatttctgggttaaaaactttgagatgggtgagtgtcccatctcttgaccgggcgccattcctatctgttggaagtagtctcaagaggttctatctcccctgtgcatttcaactagagccatccacattaggtcctgagagctttcttttccctggtgcctgggaccctccagtggctatccccatttcctcatcaccccctgattcatattttttcaatttcctgtccttctgtgcctctatcccatcctctccagtgcctgatactgcctccttatatcctccccctcttctctacctcccaagccctcctcttcctccacttcccattattctttagtattcaggttcataccaaagaccagatgagacattcagccctatggtgtgagcagatactgtgtccttggacaatctgttcattcacagtcattgttgatttatatggaccacagagaaatatatatatattcagggtaagttaatatttgttcagagggaatgataaataat

SEQ ID NO: 972 - DNA, 1800 bp, mus musculus
aatgagcattattatttattaacttttaaataatttactgtataccacggttgcttcattttcaatgatttatcttatcattgacttggcaactctacttatcaaagagtttttaacataattttaggacttctaattttttgcattatttatatttgccatatgttaattctatgatgatgtaaattaaccttgcttcaaaggtataatcttccaaccttactctctccagtgttgcaattacaagcttttgaaacaatatccatctttatatcaaatattacttacttagtctaatggaggttgaacatgtctctacaaaagacatatggacttcttcatccctggcatttatgcgatgatagttgaaaaaaaaaaaagttaggtcttgtaattagctgagtccattagctggaccatataggtgaagtgaatgctttctttgtcatgaggacaaacacagagataagtatgcacagagttatacctttgagtatcacagaaggagaaggtactcaggaaactcaataatgtgatatataagatgaaaatcaggagttgcaaaggaagctagaagtgtgaagacaattctattctgagttctcaatgaagaatataacttgtataatcttgtaattaggaagttctagccactattactttctgaaaaaaatgttatattaatccatccaggtttcagttatctctttttttacttgaatttctttttttttaattgcttattttatttatttacatttcaaatgttgtccaactacctgatttgccctctgcaaaccccctatcctattgccctcacccctgctatacgagggtgctctctcacctactccagactcactgccctagcattcccctatgctgaggcccagtgccttgacaggatcacgggtctcctctcccactgatgccagataaggttcctctatgtgtgccctttgattggtgttttagtccctgagagctctgggaggtttcgattcttgttttagctatgggaaattaacatactttacaaaatatattttgaaatctgcatctactctcctaattgagtcataacaaaataaatgtagaataatatgtagttctctttttatccggaacatcctgtaaaatattttattttttattgtaccatttttcaattttgggaaacttcttgcatcctaggaacatccttgtgtaaatgaagctagaaagtaataaggtagatagcccatcctcttcaggaacccctgtactgtgtggataatgttccttgttaacacacactgaggcactttttttatctttattctggaacaggaatttaaagatatttttcattttagtgcattttaatcaagaaaattttaggtgagcctatatatgcagatatataaaattagtactcaaaacagatatttcatgataataaaccataaagaactttatttcaaaacaattctgtagtatacatatatgatttaacactgatgaaatgaaagaaaattaacaaacagtaagattgactcacttatatataaaattgtatctttgctcaatactttacagttcagaatccaaagactcttcagtgattttattatatgtgtttttatatatatatatatagcaatcaagtcatcaatgctgagattgtaacttcatatccaccaatgtggcaaaaagtggcagaattattttaatggccaatttgaaaattgtttgaatttctatctaattttaacatatttttgttttgtttgctaataagtgtcatagtgtgatgtgcca

SEQ ID NO: 973 - DNA, 1200 bp, mus musculus
gaatttcaagtgggattgcattgaatctgtacattgcttttgttaaatggtcatttttactatgttaatcctgcctatcagtgagcatggaagatcttttcaacttctgaggtcttctttgatttctttcttcagagacttgaagttcttgtcatacagatttttcacctgcttggttagagtcagaccaaggaattttgtatattttgtaactattgtgaaaagtgtaaatttccttatttctttttcagcccgtttatcctttaagtagaggaaagccactcatttgtttgagttaatttcttatacagactccaggaaccaacaaggatgacattagtcaaaatacacaacaaaagggagagacaacctatagagactatatccagtgaataggcaccacccccggttgagggatggggccaccaaccacctcaaaaatactaatccataattcctcctgtcaaaaggaaatacaggataaagagtagagaagagactgaggaaaggccatacagagattgtcccacgtaggatccatcccatctgcagacaccaaacccagatactattgctgatgccaagaagtccttgctgacaggagcctggtacagctgtcccctgagaggctctgctagagcctgaccgatgcagatgaggatgcatgctgccaaacatcagactaagcacaaggattccaacggagaagttagggcaaggactgaaggagttgaaggggattgcaaccccataggaagaacaacagcatcacctcaaccctcccagggactaaagcaccaaccaaagagtacatatgggggcaaccatagctccagatggatatgtagcagaggattgccttactgaaatcaatgtgaggggagtcccttccttctgtggaggctcaagaacccagcataaggtaattctagcatgatgagtccggagtgggtggatgggtgggggagcaccctcatggagtcaggggagaggatggggcattgtggaggggatactgggaaggtagataacttttgaaatgtaaataaataaaaccaatttaaaaactaaatggcaaaaaaaaaatcttatcacattctaataagaggaaactaaagggttttatgtatcaaaatgaagcaaaatattaacggtatttaacactagattaatcaggtcatttatatgtatatgtattcc

SEQ ID NO: 974 - DNA, 1200 bp, mus musculus
attataattaacttcttttccaactactaaataatgcctattggaattattttgttgatgagctaagttgcagctttaatatagccttaatcaccttcttctttaaaaggcttccaatatcttttagccttgttgctgtcgttgtttaatcagttgtaaagaaggtagtatgtgaatattgatgctgattaccactggctcctcatgactttatcaataccataggaaacctaaaaataattaatatgtgattgacacagcaaactattttcaatttacagcatttcattttgtgtcccgtccagcaggacctagttattcgtgggtgcaagggggacggcaaacctgggagaaaatgggagggagagaagagaggagaggagaccaaggagggaagtcctgtcaaggtctcagtttattaggctgaaacacagggttttaaagcatacatcaaggggaatagggaggggttgagggggaattaacaaagaataaagaagtgggcatcagggaacatgagggctgaagtcaggctctaggcagcgggcactctgtgtcttatctccggaatttggattctcccttaacagccttagatgtcaggccagactcagcatgtaactcatatccttggatgtcatgggagtcaggaagagataaggaagaggggattctaattttgcttttacagccccaggtgccaggaatggaacagggagaagggagtgacgactggctcctagcacaaggccatttggcttgtcagggtgggagactgtgaaaagcttgttttctcatggtatggtctccaacaattttgttcttaaagtttcgtttgaaagaaaaatactactaataaagttaataattagataaaattacatattactttaaataatataaagtgagtggtatagttctacatgagagaaaaatgggtaaatatatatctagaaaaatcaaaaaaatatatctttcataaaaatgctctttaagctagaaaatgaaggccaaacaagggtgagaataatttttgtggcaaagtttctgctataggagatagtttagctctagagaaatgtgaagatggttgaggcagtagtggggcagggaattcttggcattaggttgcagtatattgcatgaaagtttgttgaagaggataggactttgtcttgaagaccattgtgtaatttaaga

SEQ ID NO: 975 - DNA, 1000 bp, mus musculus
ccagcagtaacaatatagagagacccagtcattcccctgcaacatatagacacaaaagtgaagtaaaacaaacaaaacaaataaaatcttaaattgagaattttataacattattcacaaaagtctcaaatgtgaaggcaacaaagataaccataaaatgttgaatggatgaataaactctggtactgtaacagtgctgctacttgtccataaaaacgagcgaaatactgaagcacagtgacaacttagaacatgaaagtaaggtaatctgatcacaagtcacatcgtattggaaatcaggctaatcagtaagagagagaaaaatagaagaatcaggaatgaataggaatgccagagtaggactgttgccatgaaggttcatttgagtttcactttgacctgatacacatgctcaaaattaactagactagtaattacacatattggcaagaacactaacatccactaaactgtacaccttacacgattatatccaaggtatcttctctgtaaaattatattttctctgtgaaaaataaccctatcaattgttggcaggaaagtatttttattggttttcatatcagtagaactttgaaactctgagtgtatgatcaaacacttaaatgaaacactgagcaggcattctgcctgagttgaagtgtcagactgccaacgctctcaccaagctggacagcagttaactcagaaacaggcatattggcttgccagcaggacagcttcagagtttgttctgagaggggccctgtgtaggggtctaggcataagcagagctcctgtatgtataagatgcctggctttcatattttattttccggggagccaatgtgcacttcttggcttctcaaaccccacaggggctgcagcagttacaaagttctctgcaggtaggcagctctatttacctctgtctgcagtttttccctgctaaaataaaacttggcttgtacaagtcatatttattataaatatgtttcac

SEQ ID NO: 976 - DNA, 1200 bp, mus musculus
taaaattgcattctaacttatttttctttttttactgtttttctaattttcttttggtttgcaattaatttatttattcactttatatcccaattgcacctcccttctcttccaagatccccccctcacacagccccttgctctcattcctcaatctccttctcctctgagaaaaagaaagaccccctgggaaccaactcaccatggcacatcaactcactgaaggactgggaatatcatctcccacttaggccagactcagttaggcaagcaggattcacaggcaagcaacagagtaaggaccagtctctgcttctgttgttggggtacctacatgaagactaagctgaacatcagctctaattgtgcagtggggactagattctgcctacaataaatgaaaggaaaagaatggagcagagactgaaggaatagccaaccactgatcttcccaacttgagaccaacccttgggcaagaactaatccacaacactattaatgatactctgttatacttgcagacaggcacctagcataacagtcctccgagagggtccacccagtagctgactgaaacagatgcaaagacccacagctaaacattagagagagctcaggacatcttgtggaagagttgggggaaggattggggaacccagaactccaccgtaaggccaacagagtcaactaacctggacctttgggagctcccaaagtagtagtgttttctattcattaaagtagatttttgagacatccggccaccttcccagccagaggacaggggtctgcccagcccaggaggctaggattttgactcatgattggcaggagccaccttggttcccgaactctgcagaaagcagcctgcacaggtgagagtgtggaccacagaagctaacagcttctgggacaggcaagagccacagagcttctgaggcagagccgatttcaggctccagacatccatccacgttcccggccagagcacaggtgtccgcccggcccgggaggccctagccacaggatcagctgaggatccattagatgctgagaaagcatttgacaaaatccaacacccttttatgataaaagtcttggaaacatcaggaattcaaggcccatacctaaacatgataaaagcaatctacagcaaaccagtagccaacatcaaagtaaatggtgagaagctggaagca

SEQ ID NO: 977 - DNA, 1200 bp, mus musculus
ttattcccggaaggcatcatcctcatttcatgtaactaatatcttaatgtctgatatacacctggaccagagtcaggatttaatattctcagtgtctaaaatgatggatacttaatttacttttctcataggaaggagggaagtgtcatatttcctatgatttggcttggggaagagctgccttttagacatactgagtttcttcttgtctaatacatggcttggccacataccattcaggacacatggattgtgtggaaatggtgaacaatgacagaatcacctaagagtggaaagagtccccaaagaagaagcgcaatgctgagtttcttgtctggtgacttcctagagtatttatgcagaagatggataaagactaaggaaatttaaactgtggtttttcattttcagtgcatacctcaggcccagtcagtgtggggtaccacttttttttcttttttctttttcaatttttattatatattttcttcatttacatttcaaatgctatcccgaaagtcccctataccctcacaccccactccccgccctgctcccttacccacccactcccacttggccctggcattcccctgtacgggggcatataaagtttgcaagaccaaggggcctctctccccaatgatggctgactaggccatcctctgctacatatgcagctagagacatgagctctgtgggtactggttagtttatactgttgttccacctatagggttggagactcctttagctccttgggtactttctctagctcctccattgggggccctgtgttccatccactagatgactgtgagcatccacttctgaatttgcaaggtgctggcatagcatcacaagagacagatatatcaggggtaccactttttatgcataccattctggctccaaacataatcaagggatattcatgatgtactgttcagcctatttatggaggttgaagtctatctctgctaacaaatcacttgctttgttagtggctagccttggctctgcctcgggccaaagcaacactggctgtccttgacaggcatcatccttgcatggtttcatggtctccaacattggcttttgttttctttcttgtcaagttcatgttaccagcttatacgtatgtcatgacattttgctttcctacatatggtggtctaactcactagctacaccattttc

SEQ ID NO: 978 - DNA, 1600 bp, mus musculus
aaatatgcaagagtaaggatatcaacaacaaaattatttttttacatcaataagagttttgacagagataataggtgatattttacaagacagacatttattaataatatactgatagataatttcagctaatagattatatttcaagcaagatttaaattgtggtctggagctgctaatactcttgtctcctttcaagttttgagaatatctgcaggctactctgcacctggtatatgcagtgctgtggactgaactcatgacttactaggataaataagcacattttagactgagtcacatccccaaacctgttctaaaatgttaaaagaacatttatctaatagataagcaaacatgatgagttaatttggaaccaatcccaatttcacacatgatattcttataacattgaaagcatctgggtggtttgatgaactaagtttctgtatcttttagcaagtgggcatgtttatgagactatgaaggcaaatgtatataaatgaggtcaaaggtcaatcccaagtatttccccccacccctcaggagctctctaccttcatttattagatatcatccttatttacatttcaaatgttatcccttttcctggtttcccttatgaaattcccctccccctgctcaccaaccctcccactcttacctacttcctacttccctgtcatgaccttcccctacactggggcatcgagccttcacaggaccaagggcctctcctccaattgatgtcaaacaaggcggtcctctggtacacatgcagctggagccattggtccctccatgtgtactctttggctggtggtttagtcctcttttgtgtgttgaggatcaaacacatgttatgattgtgatgctgatgcttacacccatagtctggatccttcacacagagcttacatcgtctctttgatgctttctgtgtcagtagttgatgttcctgatatttttgttagtagataaaaatggatttttcatggtttttttttgctcgctcttactgtttcagatactcaaatatttttaaccatatgcaaacatatattttaggaggcattccctgtaacagtgatgggaatagagtatcaaaattattgttcaggtgtgacaatatcttgatgaatacattaaccaatataaatttcaattttctaatataaaagaggattgccgaaaaccacacacaatcctgtgttttgtactactgaaatcttggggctttcacttcccagttagcatgcatgctctgcacagctcctctctcctttcttagctattttgagcaatttatagtttgatttccatggcactcctggaaatctgtggtaaaagccttgtttacagacttaaatgttttgttctccaaatctgagacaatatgacagtcataggagtatgattttttaaatatctctcattctcatcttttcctatattcaaattttacatacattcatataaaagaagtccctctgtgcttttaatctttattctgtagtatgatagattacaaaagcattgtttttgaagtgattttcatttctcttaattaatgttcaactggaaaacactggattgtaca

SEQ ID NO: 979 - DNA, 1200 bp, mus musculus
aatttaattagaaagacaggatccatgatgcagattattatcatcctattaacaggacaaaataattcccaatatttttgaaagcatagttatattagtctaagatctaaaatgtttacccatgatatatcattctattcatagcaccaattacctaataatgtgataatgtttttcaagttgtatacttatgtaagattgccaactttcaacctagtgcctggattcgaggtatcagaaaagtgtatttgataaatgttatccatatatacctactcactattgtttatatattatcatactaaagtatcatgagggctccagacatccgaccacctttggggccagaggacaggtgtccgcccagcccggaggcttctgcctcaggttccgtggaagccaccttggttccgggactccgaggagggcagtctgcacaggtgagagtgtggactacagaggctagcagcttctgggacaggcgagagccacagagcttctggggtggcaccgttttcgtgctccagacatccggccaccttcctggccagaggacgtgtgtctgcccatcctgggaggactttgcctcagggtccggggagccatcttggttccaggactcccgggagggtagtctacacaggagagagtgtggactactgaagtgatggcttctgtgacaggccaaagcagcacagtttctgggaaagatcctgttttgggccttcatcttcggccaggaggaggtccaaacaccagataactgtgcaccttccctgaaagaggagagcttgccttcagagagtactctgaccactgaaactcagaggagagagctagtctaacaggtctgctgatagagggttaacaaaatcaccagagggacaatctctaaacagagacaactataacaagtaacgccagagattaccagatggcgaaaggtaaacgtaagaatcttaccaacagaaaccaagaccactcaccatcatcagaacccagcactcccactttgcccagtccaacacacctgaaaagctagacctggatttaaaagcatatgtcatgatgatggtagaggacatcaagaaagacttatataactcacttaaagaaatacaggagaacactgctaaacaggtagaagacattaaaaaggaagtacaaaaatcccttaaagaattgcaggaaaacaccacc

SEQ ID NO: 980 - DNA, 1600 bp, mus musculus
ttcagaatatgccatattctgcacaaaccaatgattagaaacaaatacaacccacctggggatccatcccataatcagccaccaaacccagacactattgcatatgccaggaagattttgctgaaaggaccctgatataggtgtctcaagtgaggttatgccagtgtctggcaaatacagaagtggatgctcacagtcatctataggatgcaacacagggcccccaatggaggagctaatgaaagtagctaaggagctgaagaggtctgcaaccctacaggtggaacaacaatattaactaaccagtactccagagctgttgtctctagctgcatatgtagcagaagatggcctagtcgtccatcactggaaagagaggcccgttggtcttgcaaactttatatgccccagtacagggaaatgccagggccaagaattgggagtgggttggtaagggagcagggcactgggagggtaaagagaacttttgtgatagcatttgaaatgtaaatatagaaaatatctattaaaaaatgttctcaactatcttgacagagaaaaaaatataaaatattcaatgtctaaaattaaacattgatttttagttgatgttaaagaatagaaaaaatatatattataatatggaaaactacctgaatatgttacattcagaattgcagtcaatgtttattaatttttagtacctgacaaatatatggttcaagaattacaagaccccttccggtcagccccagcaccaggtcatcttgggcgcagaatcagtagacacccccaaggtccccagagcactctccacgggaccttaggacctctggtgagtggaacacaacttcttttccaatccaattgcatgggacctgagacagcattaattagggaagcagaaaacctggactgaccagggtcacaagtcccttccagttgaccccagcatcaggtcacattgggcatggagtcagcgaacacccaaggtccccagagcattctccatgggatcttaggacctctggtgagtggaacacaacttctgccaggaggcaggttcgatcaccagatatctggccaccttccttgtaagaggaaagcttgcctgcagagagagacctgaccactgaaactcaggagagagctagtctcccaggtctgctgatagagactaacagaatcacaagaaaaacaagctctaaccatagacaactataacaactgactccacagattaccagatggagagaggttaacttaagtatcttactaacagaaaccaagaccactcaccatcatcagaatgcagcactcccatctcacccagtcctgggcacccgaaaacacccgaaaagctagacccagatttaaaagaatatctcatgatgatggtagaggacatcaagaaggactttaataactcacttaaagaaatacaggacaacactgctaaagagttacaagtccttaaagaaaaacaagaaaacacaatcaaacaggtagaagtccttaaagaaaaacaagaaaacacatccaaacagctgatggaaatgaacaaaaccatattagacctaaaaagcgaagtagacacaag

SEQ ID NO: 981 - DNA, 1200 bp, mus musculus
accaggaaggtggccggctgtctcttctttttttttttaactttgtattttctttgactattatttcagtatcctctttggtatcttctacacctgagattctctcttctctcttgtattgtgttggtgatatttgcatctgtgattcctgatctctttccttgggtttccatctccacggttgtctctctttgtgatttcttcactgtttctatttccaattttagattctggacagttttcttcaaatccttcacctgtttgattgtgttttcctttgttctttttaaggaactcatgtgtttcctctttaagggattttacctatttacctgtgttctactgtatttcattaagggagttatatatgttctactcaaggtcctgtatcatcttgatgagatggaattttagatcagaatcttgctcttcaggtgtgttaggttatccagggcttgctggggttgaagaactgggttctgatgttgccatttggttatctctagtgttaactggccttgctctctctgacgggagcctttccctcctgtgagccttgttatgttgggcctcctttgatcaggctgtctctgggtgtgagagggtatctacagtgcctggtctgtggcaggcctcctgtgagttatgctgacccctgtgtgggcagggtctagggtgctggaacacacaatctgctccagggttcagttgaggaccagaaggaagatgttttctccatgcagggcaggaggtcctatgtcctatgatctccagggggtgagggtgttccagttaggtattgggtcaggcagaactcaccagtgagcttggtggtgtcagaactctgggaggtcaagctgtctgtatttgggcaggtggtgggtgtgggactagagcacaggatctgctcccaggcatagttgcaaacaggaaggaagatgtgtctctggcagggtgggaggtcctatgtcctctggacctgggggaggagggtcccacctagatcaggtattgggccagaatgggagattcacatatgtcctggaggacaacttgtctctgggtgtaggcatgggggtaggggattggtgcacatgatctgcaggtagaattatatcttgcttaaatttctgtgaaacaaataaactttcttattagtgactatagagtttttgtaattttacagcatgaatagtagtt

SEQ ID NO: 982 - DNA, 1400 bp, mus musculus
atctactatatagaatagaatctaaaattcctaacttccaatatcctttatcaattatgagctatttttaactttatatttagtctctaaatataatatcacgcaccccaatcccactcatctcccatacccttcctatctactttccacccttgcaacctcctgccacacccacccccaataaaataaaatgagatagaatttttaaaaaattctgttgttgtcctgtgtcatggagatcctgcagctttggatctgaaggactgaccctttcacatgttccagcatatcacaggtagggtagatattgggatggctcaactccaagccctagatctgtgcctggtaggtagctgagtgagtcagcccaccggctctcctgccactttaccaccagggtgaggtctctagcactgcaatgtatagctcacacaaagccacaaataggaacagacaggtcaactctcttgcacaccaagttgggtgggtgacaactctccttgaccaagccactccattgcagaccagctctccctcatgtatgccttaggagctgactcactggcgagtccccctgctgtcaggtctatcaataatagatagtccaggtgagagggtaggaccagctcagcacagtgccttacatgtcagtacagaccagagatatcttcatggcctttggtgataacataggcctagggcatcaacagacaatggctgccgtagaccacagatgcatggatcccagatgtccccatggtctcagatgacattgcagaccactcagatcagcatgtccccccatagcattacagccctcagataaccacatagtctctagtggcagcccagatagtgcacatccaattggcccttttggtaacttgggccacagtcattgatacagatcacaactacagcagaaccaatgacccagacatgggcccttggtgacagcctgggccaggatctccccatggcctcttcaaatctgcctctgccttttcttcactgtcattgagtcttcagttccaacttcttccacagtatatcaacccctgtgtgttgctttctcttcagtctccccactccctctttcccatctctccatcaaacataaatccatcatagtgctgtccaaggcaggtgcttggatgtctttcttcaggccagcctaggtctgaatggccagaatgggtgcttgagtgtctttcctacatttatttacttatttattttttgataactagaaccattcatagcacctacagcagctgaaatgtatgtactatcagtttaaaatttataaatacacatataatttgcatgctagaagatgatgtaaaagcaagtaaccagaatataaaaagtttatgaatatttgcttttagaaccaagta

SEQ ID NO: 983 - DNA, 1200 bp, mus musculus
atcagtcagaagcatagcagatggcagtcctttgttcatcctagcttgatccttggcttagtggccagagctgtcttatgcttaggactcataaaaaatcaaatcaaatcaaatctagatagtgccatgcagcaggaagaaggcagaaacctgccaactgccatgccacccacagacttgccgtccagcacaaggcacagggaagccatagacacttgcttcccaccatccatgtagcatggggagagggtgtcacccagggctccttcagccatgtggccagcctgcagcaagagccagcacagtgtgcaagtatgtggtggtcagatgggagagaaagaaaggtggaacagattgagtagtatgaagagagatggaactgtagacctgaaggtggagagaaataatctgttgtgagtggctgccacctatagccacagtgtagtccctgctgagggccatgtctgcgtctgttactatgcagcagcaaagatcagtgtttatgtctgtagttcatattactactagagtatatgggaatatctggttggagcagctgttagggacaatgtggatatccaggatctgtgcataagtgatccctgctctcaccagaagcagcagtctatagaactggctccatctctcactagcagcagcattcaggaaagcaggccgtccaccttgcccaggcagcacagtgaatctggccctggtggctagtgtgtgggtgagcaggctctgcctcctgcctcccctgaggtggtatgggtatgagggtaataatccccctcttgcctttcagtacccactatagtcaggggatctggtcctggggtgaagacagcagaagaactggccctgcaccttgcctgggaagcacaagtcggcctagcccttgtcaaatgatcatgagtgagccggtctgtatggtgagagcactggagagctggccctgatgctcatctgctaggaggtggtatgagtatggggaagatacatacatacacacacacactcacactcacacttgtggcagtcaagagaagtggcctctggaggggtttgggggtagtcaagggagaagaagaactggccctgtccattgccttacagctgtagcagccagaagaaaggatcctgtatctcatgtgggcaacacgggagtgttggtcctcatggatggggagcaggtaagga

SEQ ID NO: 984 - DNA, 1200 bp, mus musculus
agtacagggttctggtgatggtgagtggtcttggtttctgttaataagattcttacatttcccttttgccatctgataatctctggagttagttgatttagttgtctctggttagagcttgttcctcaggtgattctgttagcctctatcagcagacctgggagactagatctctcctctgagtttcagtgggtagagcactctctgcaggcaagctctcctcttacaggaaacatacacagatatctggcattaggacctccctcctggctgaagacgaaggcccaaaacaggacttgtcccgcggctgagttgctttggcctgtcccagaagctgttagcttctgtattctacactctcacctgtgcagaatactctcggtggggtcctggaaccaagatgtctgccgcagatgctcaagcaaagtgctcccaggccggcagacccctatccactggtctggaaagtggccggatgtctggggcccgaaaagggggctgccttagaatctctgtggttcccgcctgtcccagaagctgttagcttctgtattccgcacactcacctgtggagaatactctcagcagggtcccggaaccaagatgtctgctgccgatgctcaggcaatgtgctccagggcccggcagacccctatcctctggccgggaaagtggccggatgtctggtgcctgtgcagaatactctgggcagggtcctggaaccaagatgtgtgctgctgatgctcaggcaaagcgctcccgggccaggcaggatgtaatgtattaaaaacaagaactatttccaataaaacaaacagaggcttcaaaagaaggggtcaggaaaagcaaggtaagatgggagtaatcacattggtgccagaggtaatcaaaatggagagaatgcagcatgaaatgtgtaaaagtcccacaggaaaacctgcttctttgtaagctaatttttaagattaaaaataaagtatcaagaacaaaagaacagaggcatccttaacaatccacaaatcctttgagttctaacatgaaacattttagatgaacctagagttaactgcatctatattgagaacttcatggactctcacctccttcccaccaccatttaccctaaacatttagtattatttcaagtaatatatatattatacacacacacgtacacgatacaattagtatgtttttccc

SEQ ID NO: 985 - DNA, 1000 bp, mus musculus
acaggaattaataaccattggtcattaatgtccctcaatattaatggactcaactgcacaataaaacgacatggactagcagaatggatgtgaaaacaggatccatcattgttctgcatacaagaagcatactgccttccagtcagcaacagcaccaggtcactttgggcgctgagtctgcggacacccccaaggtccccagaggactctccactcaatcttaggacctctggtgagtggaatgcaacttctgttccaatccaatcaagcaggacctgagacagcattaattagggaaacagaaaacccggcctgaccaggcgcacaagtcccttcaagtctgtgtcagcaccaggtcaccttgggcacagagtcatctgacacccccccccaagttcctagaagagtctccaagctatcttaggaagtctggtgagtggaacacaacttctgcaaggaggcaggtttaaatgctagatatctgggcaccatccctgcataggagagcttgactgcagagagtgctctgacaactgaaactcaggagagagctattctcccaggtctgctgatagaggctaaaataatcaccagaggaacagtctctaaccagagacaactataacaactaacttcagagaggcaaacataagaatcttactaacagaaaccaagaccacgcaccatcatcagaacgcagcactctcacctcacccagtcctgggcaccccaacacacccgaaaagctagacccagatttaaaagcatatctcatgatgatggtagaagacatcaagaaggacattaataactcccttaaagaaatacaggagaggggctggagagatggctcactggttaatagcacccgactgttcttctgaaggtcctgagttcctatcccagcacccacttggtgactcacagccatctgtaatgggatttgaagacagctacagtgtgctcacatataataagaataaatgaatctttaaaaaaa

SEQ ID NO: 986 - DNA, 1200 bp, mus musculus
ttggaaacaaaacacccatggaaggagttacagagacaaagtttggagctgagatgaaaggatggaccatgtagagactgccatatccagggatccaccccataatcagcatccaaatgctgacaccattgcatacactagcaagattttattgaaaggacccagatgtagctgtctcttatgagactatgccggggcctagcaaacacagaagtggaagctcacagtcagctaatggatggatcacagggctcccaatggaggagctagagaaagtacccaaggagctaaagggatctgcaaccctataggtggaacaacaatatgaactaaccagtactcaggagctcttgactctagctgcatatgtatcaaaaatggcctaggcggccatcactggaaagagaggcccattggacttgcaaattttatatgccccagtacagggtaacgccagggccaaaaagggggagtgggtgggtaggggagtgggggtgggtgtgtatgggggacttttggtatagcattggaaaagtaaatgagctaaatacctaataaaaaatggaaaaaaaaagacaaaggcctagtgaacagacctgttgaaggaagaaagactgaagagtgtatttcatcatggagataaagcttgtacctgagagaggaatcaaaatagtgaccaaagacagcagcgggcacatatgggaaatatccaacagaaaagaattgtaaaatgacaagctaactcttgcccctgtcaaagagtagggtcatctctgaggaactagttgtattcacatgagtggtttgtgggggctacgatatgtgtgatgtgcttttgaggtaatagacagagcagtgttatttcctaaataatgagaattttctgttttggaaaggtttcccagaagaacataccacgagtttgtcatgtacctggccctaaacaatggccatcattttgagagcccttttgactctttctctaagccagggcatttgttcattcttgtctggaagtgctttgccactgaagtatatacccaaaaacccccactctaaattctaaaagaaagtctaaatgattaagatgttagctgctaaataattttttctttaggtttatgtagcagaatctaaggtagtcttgagataatgccagaatgtataaggcctctccttgttttataaatctatgcctct

SEQ ID NO: 987 - DNA, 1000 bp, mus musculus
gggaaaacaaaatagtcacgtaattcagaagaagggagagaccagggtggaataagggagggagagttgaaaatgggggcaggaccaggtgttaggggagacaggaaagaagcccagaagcccaggagaatgaatggaaatatgcagctgccagagtaaagggtgggggaacctctggaaagttccagagacctgggataagggaggtacacaggacccaatgtgggtgaccttagctgaaatgcccaaaagtggggatatgtaacttgaaaagtctaccttgagtagttagacagggctcccagtggagggatggggacaccaacccacctccaaatttttcaactcaaaattgctcctatttaaaataaatgcatggacaaaaatggagcagagactgaatgaaaagccgaccagtgactgacccaactttggatccatcctatgggctctcactaaaccctgacatcattactgatgttatgtcgaccttgcagacagaagcctaatatagctgtcctttcagaggctctgccggcagctgattgggacagatgcagatacttacagccaagcattggactggggtcaaggacctttatggaagagttatgggaaggattgaaggtactgaggaggatggcaacaccattggaagaccaacagtgccaactaacctggatcccaggaagctcccagagactaagccaccaaccaaagagcatacacaggctggtccaggcccctagcacatatgtagcagaggactaccttgtctggctcagtgggagaggaggagcctaatcctgtagagacttgatgtcccagggaagggggatgccaggagggcaccctctccaaaatgaaggggagacaggagggggatgtaaataaataaaataattaataataaaaaaagactcctggggaaactaaagatacagggatatatatcaacataataaaagcaatttacagcaagtccacgggaaacatcata

SEQ ID NO: 988 - DNA, 1000 bp, mus musculus
gaggcatagctatatggtttgttagatcatatatgttagaagcactgccactttaagagagcacatgttgcatctccatcactttagactcagcagtcaagaatagagccctgctgtgactattgtgggtattctggctgagatacatctggggaaagctcatccacttttgacagggtccataatgcttaaataattgcccttccttattagtgctttcctgactcagagaaagaaagaattcaagacatgaagtatagctatttacaaaagccatatattatctttttttgatctgttctgtttttgatctttgtttttttaaattaggtatttatttcatttatatttccaatgctatcccaaaagtcccccccaaaactcccccaacaactcccccacccacccaatcccagttcatggccctggcgttcccctgtactgaggcatataaagtttgcacgaccaatgggcctctatttccactgatggccgactaggccatcttctgatacatatacaactagagacaccagctccaggagtggggggaatactggttagttcatattgttgttccacctatagggttgaagatccccccgccccatttccttgggtactttcactagctcctccattgggggccctgtgatccatccaatagttgactgtgagcatccacttctgtgtttgctaggctccgggatagtctcacaagagacagctatatctgggtcctttcagcaaaatcttgctaatatatgcaatggtgtcagcatttggaagctgaatatgggatggatccttagatatgccagtctctagatggtccatccttttgtctcagctccaaaatttgtctctgtaactcctcacataggtgttttgtttccagttctaagaaggggcaaagtgtccacagtttggttgtcgttcttcttgagtttcatgtgtttcgcagattgtatcttatatcttgggtattctaagtttctgg

SEQ ID NO: 989 - DNA, 1000 bp, mus musculus
attcaaaggagcaaatatggaggtaaagtgtagagcagaaaccaaagaaaaggccatccaagggctgtcccacctgtgtattcatcccatatacagttatcaaacccagacactattgtgcattccaagaagtgcttgctgaaagcctgatattgctgtctcctgagaggctctgccagagccttacaaatacagaggcagatgcttgcagtcaactgttggactgagctcagagtccccaaaagaggagttagagaaaggactgaaggagttgaaggggtttgtaaccccataggaagaacagcaatatcaacaaccagaccccccagagctcccagggactaagtcatcaacaaaggagtacacatggctccagctgtatatgtatcagaggatgggccttgtcatgcatcaatgagaggagaggtccttggtcctatgatggctccatagatgactcagcataggggaattgatggcgggaagatgggagtggatgggtgggtgtaggaacaccctcacagaagcagggggagggaggttagaatagggggtttccgggaaggggggaaaccaggaaagtggataacatttgaaatgtaaataaagaaaatatccaataaaaaaagaaaaaatgtttagaacagatgagaaagccagggcagtttctggggtttgatgtggttgcctagctaacagggcattgtttgctgaggtattatctgagcaaacaccttccagatacacaaaagtgtgtgcaaacaaaacaaaacaaagcacaacaccacaccacacaaaagccgtcacccaggttgaagaaatagggtacaatccccagagaatgaactagcgtgtatggggcacattaagacagcagatataaagcaaaaggcatggtggtaaggaggaagagaggtgaaccacaggccagatcacgtgtggcttgaaggccctgcaatttcatttaggagttttccgtgattctgactttcctgggaca

SEQ ID NO: 990 - DNA, 1000 bp, mus musculus
tcttatgtctgccttttgccatctggtaatctctggagtcagttattatagttgtctcttgttagagcttgttcctcttgtgattctgttattctctactagcagatctgagagactagctctctactgagtttcagtggtcagagtactctctgcaggcaagctctcctctttcagggaaggtgcacagatatgtggcattcggacttgcctcctggcagaagatgaaggcctgaaacagggcctgtcccagaagctgttagcttctgtagtccacactctcacctgtgcagactagtctcagggggatccaggaaccaagatggctccctcagttgctctggccactttattgtttctatttccatttttcaatccttgatggtttgttctattccttcacctgtttgattgtgttttcctgtagtttctgtaattctttaaggatatttttttgtgtttcctctttaaggaagagcttctatgtgtttacctgtgttctctgtttttgtttgtttgtttgtttttgtttttggagacagggtttctctgtatagctctggctgtcctggaactcactttgtagaccaggctggcctcaaattcagaaatcttcctgcctctgcctcctgagtgctggcattaaaggtgtttgccaccatgcccgggctttcctatattttttaaaagggagttattcatgtccttcttaaagtcctttaccatcatcatgagatgagattttagacccgaatcttgcttttctggtgtgttggggtatccagggcttgctctggtgggagaactgggttctgatgatgccttgtaggattagttcctgttgcttatcttcttgtgattccctcttaccatctggttatattcggtgttagctggccttgctgtttctgactggagcttgcttttcctttgagcctgtgagcctgggtgtgtcggcacaactgggggtcaaggtttctctgtatgggactgggacagt

SEQ ID NO: 991 - DNA, 1200 bp, mus musculus
gcatattcaaagtttctcacatacccaaagtaaaatacttcaaagttcccatcaggtcagtgctctggcatttttacatttggggacatttacatctgaaaagatttaaatttcagttaaggaactattctttgaaccattccctgaacacaaaagacacaacatggtggccctgaggctctttagacataattgtagttgtgtgatctcagtgcctcccttggtaccgacctcctggctcttcatagctccttgtgctctggatatcagcactcaagccaagcctagcacactttgtgtgcgaaggcatgctgcttaatgaaaggtgagattttatctttcaaatatgggaattacagctttcacatgaggtggagcctactgctcacagccagggtacaaatccattgcaacccttttcttacacacaattttgcactaaattctactaacatcattttttatatccgtttcttgtatggaatcagatctgtatccttgtgacaaagtgcttgaggtaacttaaagcaatggcagttttattttggcccacagttgcagctatctaagtctcagatcacttaggtcagctgcatttgtgtgtgacatgtgatcctgtaaagtactcagagcatgtgacaagagtagagcttctcacctcatggtgagcatgcctctgggaagcaaagggagttagagaagagatgtggggctccatattcccctcaaagcagtcccatgctgagtaacctcctcccaccagactcgttgttttaaagatgagcacatcaactttaacacatagattttgagaactttaaagaattgaattatagagctttgtgtgtttctatgtgaaacaaacatacttctatctagtcagaaagcctgtctagatagtttctctaataccacatattgcatacaaatattaagtacttttgagtattactaatgaaagactaacaagaaacttaccatgttcataaatgactgtaatcccaacacttgagaagtatgtggagacaagagaaattcagtctcatgctacatagctacataggtagatagcaagttctaggctatgctaaataaaactctgtttcaaacaaacagggataaaatgaatatttataatatacaaaaagctgagatacatgtattttcatcagatatttgtactctttatattttacactt

SEQ ID NO: 992 - DNA, 1200 bp, mus musculus
ctttcaggaatcatagcattaaaatagatacaaatttaaaatcaaattccccaaattagcagcctactcaaggaacatcataacataatttcttctctctctctctctctctctctctctctctctctctctctctctctctctctctctctctctctctccctctcttcctctctctttctctctccctcttaattagagttattatatttcagctattagatttttaattattcttttaaaatttttatttgatctattttttacttattcactttatatcctgctcattgcctctcacccagtcaccccctacacacagttcttccccattgtgcatccccacttctcctgggagtgggtaagcattttcctgggtatcccctcaccctggcatatcaagtctctgtgaggctagctacttcctcttccagtgtggcaaaacaagacggcctagctagaaggtcatatcccaaacacagtcaacagcttttggaatagcccctgctgcagttgttaaggaccaacatgaaggtcaagctgcacatctactacatttgtgcagagatgcctaggtccagcctatgtatgttctttggttggagattcagtctaagtgagttccaatgatccagtttagttgattctgttggtcttcctatcccttacagggtcacaatacttcccctattttttcataagagtccccaaactccatccactgtttgcctatgggtgtctgtatctgtctgagccacctgctgggtggagcctctcagaggtcaaccatgctagactcctgtctgcaagtataacacagtatcattagtaacgccagggatttgtgtttgcccctgggatcagtctcattttgggttggttattgattggccattccctcagactctacttcatccctgtgtctgcgtttcttatagacaggataaattttgggttgaaggtttttatgggtgagctggggtttctgcctggcttgttacttctattcttctattctcatgtaggaatctgaaactcacatatacatgatggaaatatttcatattaaatttccattgaatgaattaccttaactttatggctaattattctctgcatagctactttattaattatcctcataagattatccctaaaatgttcaacagaaagcagtctgttttcaatataacccctgcc

SEQ ID NO: 993 - DNA, 1000 bp, mus musculus
attgcaatatcaagacacattgactctagggactacaggtgtcacccagtgctggtcctgtacttcatcataagagttcccatgtttacaaagaatcctccctcccaaatttgtttggttatagttgcatatgaataaagcagggaaaacagccaaatatctagacacagacatgcttgtatgcatcagaaaaaaatgaagttaaaaaggctgttaaactcaagacccaagctgaccttaaatattagttaatatgtcagcaattttattagatattttatttatttagatttcaaatgttatcctcttttctgattttccctccagaaaccccctatccatcctctttccccgtatcccacccaccaacttgcacctcacctccctggccttcccctacactagaacatcaagccttcataggactaatggcctcccctcccactgatgaccaacaaggccatcctctacttcactgcagctggagccaggggttcctccatgtgtactctttggttggtggtttagtgggagttctgagatttctggttggttggtattgttcttactatggtttgcaaaacctttcaactccttcagtcatttctctaactcctccgttggggacccagtgctcagcccaatggttggctttgagctctgactgagcctctcaagagacagctatatcaggatcctttcaccaagcacttcttggcatttgccttagtgtctgggtttgatgtctgtctgtacttaggatggattcccaggtggggccgtctctggatggcttttccttcagcctctgctccacactttgtctcaattttcctcctgggagtatttagtgctcccttctaagggttgaagcatccactctttggtcttccttcttcttgagcttcatgtggtctgtgaattgtgtcttgggtactcagagcttttgggctaatatccacttaccagtgagtgcataccgtgtgttgttctatgactt

SEQ ID NO: 994 - DNA, 1200 bp, mus musculus
ttgtctggctgtaggtctttgtatatctttccatctgccacagaaggcagcttctccagtgagcaaggcactaatgtgaggctagcagaaagtcattagaatcactttggaattacgcttacagtttctaaaagaagctggtcatggaacacagaaggaggagatacctgaggaggaattagcagaggatgttgaagagattgaccatgccgaaagggagttgtggcgtggccagatcttgtggtttagaggcctgaacagagtccaaacacagatccgaggggtgaatgcatttcgtagttctttatacgaagggttagagaagccagaatcaagaagttcaatccacaactttatgacacgccctgagtttaggatagaagattcagagccgcacatcccccttattgatgacactgatgctgaagacgacgcccctacaaaacgcaactccagacctccaccctctcctaacaaaaataacaatgctgttgacagcggaattcaccttacaatagaaatgaacaagtctgctacctcttcatccccaggaagcccactacatagtttggaaacatcactctgattgtaagctgaatggtaacacactagctgcattgtaaagaaacaaatcgaaactgagtcttttcacatattgtgacggacaagatagtattcttgtctctggacttcaacagaagatacacttgtacgaatgtagatttatttaaaaaataaaaaacaaaaaacaaagctttctgccagactgagggtgcttttttggggtgtgggagaaacgaactgacagataaacagcggtgactcggcatgagtggcctgtgggtcgtcagtggtacctaacgttgtcctgactagcagagctgtggtttatctcagttcatgatggcagggagggaggagtgactctggatgagacagagagccctggatcattgagtgaatactttaatttctgctgttggctgttaataatttggattatttacgtttataaatgatacagatctgtttacaaggtttgtagataatttttttgttcttcatagacgggaagtttccttatagtaatgcagagaaaaattagtccttcaaatactgctgtattttcagtgaaaaaaagggggggtgtttctattgaaactgtaataaaattttgcctacaatttatcttgttacata

SEQ ID NO: 995 - DNA, 1000 bp, mus musculus
gcaagctctcttcttgcaaggcaggtacccagatatctggtgttcgaaccagactcctggcagaagttgtgttccactcactagaggtcttaggatctcgtgtggaatcctgtgtgggcccttgcgggtgtcaggcgactctgctggcaaggtagcccggggctcgagtggagtggaaggggtttgtgccccagatcaagcccgggtagcctgcttccctatgtaccgcagtctcaggttccgcgcgattggattggggcaggtgctgtttccactcaccagaggtcttaggatcccgtggggggtcccgtgtgggcccttgcgggtgttgggcaagactctgctggcaaggtagcctggggctcgagtcgagcggaagggacttgtgccccagatcagggctgggaagcctgcttccctatgtactgcggtctcaggttctgcgcgattggattggggcaggctctgtgttccactcaccagaggtcttaggatcccgtggggagtcccgtgtgggcccttgcgggtgttgggcaagactctgctggccgtcatgcttagtctttatctttttgctttaatataactgaaatacagcagagacactttctaatggataacactttagaacgattcttatttgctaaagttataaaagatagtattcatccatcaccccgtgttgttccaagtaacagtagattccatgtcttcttccatgaaaatgactcgtgaaatatcagctccaatatgaggcacttagtgtaagaatttatttactctaccactatgtggtcagaaatttggactagtgcctgtgtgtattcttccgaacttcttagtggtctatgaggtagacgaggtgccagctaaaacaatacagatagtgagatcaagtgttctcatcatctaacagaaaaacatgggcatagtcttacacactatcaaaaagaaagaatgaaagcaaaggcagttggataagtctctgcttgtgtctctg

SEQ ID NO: 996 - DNA, 1000 bp, mus musculus
aataaaactatggcagaggtttcttatctgaaggtacaattaagggctgaacatgtgatctcagcacatggtctctggcagcctggagatcctgaaacatctgtttgggaaccatgggtggttttggatgctgccagaagccacctccttctcatccttcatgtgtggacctccacagagacgtctcaggtcaggccctctgacatagaataagctttatgatggcacctccaaaggtttgtggagcaagactgaagtgctcaaatacattaaaaattattctgtggtctttactgctttgaagagaacttgtatgttttaaagtccatgcagtaaacaactgaggagaataatggtagtgaacagtagtatttacaatgacacatgttgagaatgtcttttattagtcttgaatctcaacaggaccataacaaacttttgttcacttgctgaacttctcagtccaatgtgagacctcggatatttactagaataagcaggtaatgctttaggaataaagcacattttaaaaaatatatgggcacatagggtaaaatatattaaaaattctttttattaaagtttcctgaatattttattttactagggagttattatttgtgcttctatttattaaaagataaagctggattttgttgcatccagttttcttttcttttctttatatttttattagatattttctttatttacatttcaaatgttgtccccttccctagtttctcttccccaacccccctatacctccccctccttcagcttaccaacccacccactcctgcttcctggtcctggtattcccctatactggggcatagaatcttcacaggaccaagggtctctcctcccattgatgactgactaggtcatcctctgctacatatgtagctagagccaggggtttgaaggggtttgcagccccataggaggaacaacaatatgaactagtcagtatttccagagctccctggaactaaac

SEQ ID NO: 997 - DNA, 1000 bp, mus musculus
tataggcacacctctaattccaaactttttttatataggcacacctcaagtcatctgaagaaaaaaatcttttttacatatttaattttatttctaatgcatttttccacgccgtattccattccctgcccatcccatctaccctccgactgctccacatctcacacctcctccccacctcatcccatctcttcgtggatgcccccaccccctaccccacctgacttttaaactccctggggtctccagtctcttgagggttaggtgcttcattaattgagactgctggtcctcctacaggattatccttctcctcagcttctttcagccttccctagttcaacagcaggggtcagctgcttctgtctattggttgggggcaaataactgcacctgactctttcagctcctttttgggtctttcagagggcagtcatgatagatccctttttgtgagcattccatagcttcagtaatagtgtcaggccttgggacctccccttgagctggttctcactttgggcctgctgctgaaccttcctttcctcaggctcctctcaatttctatccttgtaattctttaagacacagttctttaagaaacaattatgggtggaaggtgtgactgtggtatgacaacaccttccctcacttgatgtcctgtctgctccactatgccacaggagcacctttatgttcatagaggacttatttgtgataaccagaagctggaaacaacctagatgtctcacaacagaagaaaggatacagaaaatgtggttcatttaatggaatggaatactactcacctattaagaatgaggacatcctgacttttgcaggcaaatgtatggaactagaaaatatcatcctgaaggaggtaactcagaacccaaaggacataaatggtatgtaatcactaataagtagatattagccaaaaaagaaaaaagaaaaaaaaacccatacagaatacacaagctacagtccaccgaattca

SEQ ID NO: 998 - DNA, 1000 bp, mus musculus
tattcatccaaccatagagaagggggttggcaaaggtggagcacatggcgataatgtggaacacggtgaagatgagtttgtactccttcaggtccaggacgtggctgtcgatgtccacagcgagttggaaggcgtggaggggtagccagctgactgcaaacaccactaccacgcacaccagcattttggtcattttgtgccttcgctgatggtaatggtcacttgcagctccaggactgacgtggttcctcagcttactccagatacgggtgtaggagaaagatatgatgcccagaggcaaaacgtacaggatgagcagggtggaaaggctgtagactgtaccatacacactcttctcttccccaggccacttctcggtacaggccacaatctcaaagtcaggaatgatctcaatcagggagtattcccggaagatggccagtggacttgccagcagagcgctgatgccccaggccaggccaatgatcaggaagctgattcgcttggagatcttgctctccaggtggtagacaatgcaacgatggcggtccagagcaatgactgtcaaagttattgtggacacttgtaccgccagaccctgggcatagggcaccaaatggcacaagaccggacccattttccactctcccatcaaggtataggtaagagtgaatggcaggcacagggtgttcaccaaaagatccgccacagccaggttggcaataaaaaagttggttactgtgcgcatgctcttgaatttgattaccacatggattaccagggagttgccaactacccctagcaagatgatggagcagtaggccaatatgaggatcacctgcacctcgaccagtttggtgctgtctatgagctccggctccggatcagggggcaactcacctctaggagtagtgtgccctggcccatagggctccactttcacttctacagtttgattctcatctgcctctgcacctaccgggcccatcttcagaaccag

SEQ ID NO: 999 - DNA, 3200 bp, mus musculus
atagaaagctggacttgcatatattacaaaataagtcctagtcttggacctttagaatgaccctcagctgtgccatctcttcctgctggtggtccatctgcctgctggcgccagcatgcttaattttccattagaatgaccatactttcctttgttcatgaatgtcttggtctccttttgtcaatcatgcttgctcagtcaagctaccttctgggtatactacagttaaaccaagttcatctgagtccttgctggaatgcatttgaacgtagctctaagtggtgaccttatcatgataagcaggatataagaattgtaccaccaccacaaccacctcctctacctctaccatcaccaccatcaccaccatcaccaccacatcctccatcatcaccatcaccaccaacgacaactctatcatcttttccagatcacctcagtgtcggctatcaatgaggctgttttaaaattttctttcttattagatattttctttatttacatatcttggcttcccctccaaataccccatgtctgctcctccctcccccctgcacaccaacccacccactcctgcttcccggccttggcattcccctacaaaggggcatagaaccttcacaggaccaagggcctctcctcctattgctgtccaacaaggccatcctctgctacatatgtagctagagccataggtacctcaatgtgcactctttggttggtggtctagaccctgggatctctggtggtactggttggttcatattgttgttcctcccatggggctgtaaatcccttcagctccttgggtcctttctctagttcctctactggggaacctgtgccagtccaatggttggctgagagcatccacctctgaatttgtcaggcactggcagagcttctcaggagacagctatttattgaaagaagattactttcttgctttttctagggtgtagtttctctccacgtgttggcgttttccatctattatcctttgcagggctgaatgtgtggaaagatattgtgtaaatttggttttgtcatggaatatcttgttttctccatctgtggtaattgagagttttgttgggtatagtagcctgggctggcatttgtgttctcttagggtctgtatgagatctgcccaggatcttcttgctttgatagtctctggtgagaagtctgatgtaattctgataggtctgactttatttgttacttgaaccttttcccttactgcttttaatattcttttgttgtttagtgtgcttggtgttttgattattatgtgacaggaggaatttcttttctaatccaatctatttggagttctataggcttcttttatgttcatgggcatttctttctttaggttagtaaagttttcgtctataattttgttgaagatatttactggccctttaagttgcaaatcttcactctcttcttttttttttttttttttcccgagacagggtttctctgtgtagccctggctgtcctggaactcactttgtagaccaggctggcctcgaactcagaaatccacctgcctctgcttccggagtgctgggattaaaggcgtgtgccaccacgcctggctcttcactctcttctatacttattatccttagatttagtcttctcattgtgtcctggattttctggatctgggggggcaggtggagctttttgcattttgtgttttctttgactgttgtgtcatgttttctatggtatcatctgcacctgagattctctcttctatctcttgtattctgtttggtgatgcttgcatctatgactcctgatctctttcctaggttttctatctccagggttgtctccctttgtgatttctttattgtttctatttccatgtttagatcctggatggttttgttcagttcctttacctgtttggttgtgttttcctatgattcttgaaagagtttttgtgtttcctctttaagagcttctacctgtttacctgtgttctcttgtatttctttaagggagttatttatgtccttcttaaattcctctatcatcatcatgggacttgattttaaatcagaattttgcttttttggtgtgttggggtaaccagggttcactgtggtgggagaactgggttctgatgatgccaagtagtcttggtttccgtagcttatattcttgtgcttgcctttcgccatcttgttatctctggtggtaattggttttgctgtctctgactttagcttctccctcctgcaagctgatgtgtcagtactcctgggagaccagttctctcagggaggaatttggatatggagagctgtggtactggatcagcactggggtgtagaaagaggtcagaatgatcctgtccccatctgatccttggtttttgtgtcctgatggctctgtgagggtccgtcttgggccaggaattggaagagaagaggtggtcttacctgtgcttacaggtgtgtaggttctcctgggagactagctctcctggtggtatttgtttatgtagcaaggtagaacaggatcaactttgggtgtagatggagactggataactcctgtcccaggcagctccttggttcctgagtcctgagggttctgggcaggttcctctgagcagcagtggtggtcctaagggcactcacaggcctgtccatattcctgggaggctcgctccctccaggtgctatttgggtatggagccctatgacagaggatctgctacaggtgaagaatgaaaccggaagtatgtttagttttcttatggtcttggattttatgcctaataatgatatagttacttcatcttatttgattacttactgtctttattatgtttctattggtgctataagtcatgcccacgggtgacttgtgaaaggattcagatcacattctatcactgagataagtcagggcagaagttcacatcagggtcctggataaggagctgatgcagagcccatgaagaagtgctgcttactgcttgttccccattgcttgcccaacttgttgtttttatagggccctggaccgcaagccctggggtggcaccactctatggaatgccctcctgtattaactgttaattaagataatactttttagactacaggccagttttttagatgcattttctcaatcctggttcccttgtcttaatcaattctggcagcttt

SEQ ID NO: 1000 - DNA, 3200 bp, mus musculus; identical to SEQ ID NO: 999

SEQ ID NO: 1001 - DNA, 3200 bp, mus musculus; identical to SEQ ID NO: 999

SEQ ID NO: 1002 - DNA, 1000 bp, mus musculus
tggatattttagtagggaacgaagtgaagcaagaaaaaaatatgttgtgatctaactgtcctcattttcaaacacagctcggcaatctgttattggctgtgttgtgattggctgtagtgctctctgatacagcacttaaatgggcatggctgagtagttcagttttttgttaagttcattggaaggccttcatcagtgcatttaggagtgccaggtggccaccaggagagttgttgatggccactctgtgggtttgcaaagtgcaaacctaaaagaccaagagatgagaaatgcattgctatttgtgaatttacgttttatctcacttcacttgaaaatttatgagtagtgtggcttaagggtgctggacttgtgtgttccagggcttgcccccactgataacacccttgttggcgtgaaagtgcaatgcaaattatgacagttacaaccttctgttttgtttaacctgtcagtagatttcctggctcagtgctgagggcaatggtgtgttcagctagtccatattcacctaaacttaaaaggtcaggtttctacaggcaagcctagtcaaagcctaattgatgaggagggcagggagacagaatttactgttctgttggctagtttcatatcgttaggttgtcctgaaagcatcaggcagtcacagcccctttcatgtaagtgctgaccctagacaggagctgacaatcaaaggaggcagccacaggaaccagtgcaagtaggctattgatttttcagttaggtctaagtagtttgtagtatgggtaatgggtgacagaggcaggtatgtcattatcaatgagctccagaacagtagcgacaacctgccctcatatttccttcagcactgacagtatgcatccagaggcggttaataaatcacccaacccttaactgacaagtgactgggaggtttaggttgaggaatggaagttacagagctaaacttctcttcttgaacatatataagagtcaacaa

SEQ ID NO: 1003 - DNA, 1000 bp, mus musculus; identical to SEQ ID NO: 1002

SEQ ID NO: 1004 - DNA, 1000 bp, mus musculus; identical to SEQ ID NO: 1002

SEQ ID NO: 1005 - DNA, 1000 bp, mus musculus
ttctaatactggcttatgcataaaacatgaacaacaattataagacatataaagagtaagttgccaggtgtggtgatgcacaccttcaatcccagaactccggaggcagaggcaggcggatctctgttagttcaaggccagactggtctgcaaatcaagtaccaggatagccaagtctacacagagaaaccctgtcttgaaagctcccaaatataatagtagtagtagtagtagtagtagtagtagtagtagtagtagttgtagtagtagttgtagtagtaataataataattttattaaagttaaggagctgaaatattataatagaatgttctagattttaggtaagctatatttatatttgtcagattatgttgtaattttcaaaatggatactgaaaaattgccctgaatgattactgtatgagtccccccatcatcaatagtccccctataatacttaggaaatatacatttaattatttaaaagcacaagttaaattttcacatatgttttgtaccagttgcaataaatatattccagtaaatataaagctttagctgggcctgatagcacagtactgtaatcccagctacacaggaggctgagacaggagcacatgctcagagcctgactgaaaactcaaggccagcctacccagtgtggccaagttaaaagaggagctccagctcctggcttgcacatttgcatatgtaaggtcctgaattctgtcctctgtttcacaaagacaaagaaaaaacagcagcttcttacagcaccagagagaccctgagaaaaagtaaggtctcccatttaagtgacagcatctccctcttcttttccttggggcccactaaggtactctgcttattggcttacttcctctcctgggctcctctgcctcttcctgtgaacacatttcacttcctcccctcagtcgcactcactacacagtggtttcagttgttctaagtctttctaagtgacaccttccctgtt

SEQ ID NO: 1006 - DNA, 1000 bp, mus musculus; identical to SEQ ID NO: 1005

SEQ ID NO: 1007 - DNA, 1000 bp, mus musculus; identical to SEQ ID NO: 1005

SEQ ID NO: 1008 - DNA, 1200 bp, mus musculus
tttttataggaggagacagacatcagcaagtcaacaaagtcactagtaactatgtctctgtacaggggtcttcccccatgctgaaggggctggaaagtggtcatctgtgccagctagacagtaagaacatagtaggatatgttttgcaaaacacacacatacatgcacacacacatgctgttctgcttagttggtctggctgcactgtctcatgctggaacccagcatatggctttttctttggtatttagaccctgaggttcaaagagattaccgacaataatgatcttcctgtggcaaacgtaatgcagtgtcaggccattttcataggtgctgtgctgtgttgttgtttgtttgtttgtttgtttgtttgtttgtttgtttgttttcaccctcctttctacttcttaggatgaaaatggaaactagaatcaaagcagccacagttttctagctacctctaaaggagtagctactcttccatccagatgatacaagcaaaaaatgaaaagaaagaagacaataatgaagcaaaaaggatgctttgttattgtaatggcttctttctgcttcatgtcactgagcaagatgagaaagatactagttttgtagaaacttccacagtactgtagcatgacctcacccagggtgcactgaccaggtgcctagggatcccgtagaaacatgggttgattttcagcatgaaactagcaacaagtatgaagtgatattttagatggcagtcactgtcctgccagtaattagcaactcttaaccctcagacttgtctatgctccttacaggctgtggaagctcagatccgaagttttggacagacgccttcgcaactgctcatagagccccaccctccccgaggttcggccatgcaggcggtgagtgctttcctctggcctcttcttcagctctctcactctccattaccagtgtctcacagtgcatgaggttctctaccatgcctgggcctactctcctcatacagtgccagcctgctcacaaccagcaagtaccggcatattctccctaggtcatgagaaagcaaatttagctacagtgctcacatttcatcagctcgtggtttctgttgcaaggttcaaaggaccacagttgtcatgtctcttcatcgtagagtaaaggactccacgcataaaaccaaagctttttttttttttctaatttgat

SEQ ID NO: 1009 - DNA, 1200 bp, mus musculus; identical to SEQ ID NO: 1008

SEQ ID NO: 1010 - DNA, 1200 bp, mus musculus; identical to SEQ ID NO: 1008

SEQ ID NO: 1011 - DNA, 1000 bp, mus musculus
tttgttccgtccacttgtttttctaacatgaacaccctgtatactgcaatgtacttgggttatttctttaatccatttgaccaggtttaatctctttacatgtaaatgactggctgaggaaggacttgccatttgcaggctgggtccatgtgctgtgagagttcgatcttcttttcctcttctgtgttggccttctgcactgttagaagtacaggaaggtactcagcataacttgctaagagctggccctaaccaaactgtgcaggggaggggttcacgtagcagagctccctgtggctggtgtccatctgtccctgcaccatcttctcaggagagcaggcagctcctgtctgtagtgaccactacatcaggtcactgttacaaggatcagggccctactcagagtataggctggcccaggcagcattctctcctctccctccctcacctccagtggcaaccgctttgtggggttctcctctgagtctgatgcctgtaagcactgtttgcactgtagaaatgattctgttcacaggtcagtgacaggctgtgtgttctagcagtatccaaacctttcacagactacggaaggtctctgtgctgtcaaaaccgagcttacttgagtgtaccaaaactgtcaccagcagcagcaaatgcatccctataaccaagccttctccatcttcctctaggtgcatcatttctggaatggcttcgggaagcattgtcctgttttacaatgactttaaccgctggcatcatgagtaccagacccgctactgaggggaacgaatgcaccgtggtcctgtttcagcccaagcaaggaaggacttcaaacaccactctatagaaatagctatcacatctgaatgtaacttaaatttgcttgaacaagcaaaatattttttaaagttaattgctatttttgtagactttgctcgacattttggggggggggggggtgggaacagcacaagcagggaactggctgctgggttct

SEQ ID NO: 1012 - DNA, 1000 bp, mus musculus
ataccagagatggatcagtctgtaaagtgcttgaaaaaccttctaatcacacccaggaaagagactcatgcactttaaaccccaggagtgggtctggtggtctgggctatcatggtagatgagaaatacacaggacatggaggctgtggcctcccctggggtcacaccaaagccacagcagtttccttttctgcaggtacacgcagtgagaggtccaagatggaggcagacaggagatggcagcccaagagaagcctccacaggagaaagccttgctatcctgctgcctaggtggcatctactggctggctgtgtcctgctgacccccaacatttttatgtccccagtgtgctcttcccaggctgttctggactcactgggaccggcccctaaaatgaagcattacagctgagaggcaaagagccagggctgtgctcaacccacctcccttcagccacataccagccatgcaatcatgagcaagatgccataaccctttgttggctagaacttgacctgctttttgctagcatgatcagtttttcatttctgcattgcattaggtaacaaatacttaagtaacttgatcttcattaacccgtactcatgttcctcttttcaatgggattcaaaactgacagcaaagagggtatccctatgattcctcagagaagcagcaagaggggaggccagccacttcctagtgccagctggtcctctgtgcctcaaggctgctttcctgaacatctctgatccaccctaggccttgtgatgacacaaatttccatgacgaaaggtcacaggcatgacgatttctgactagctcagcacaatgtcatgaggaaagaggaaaggggcattatctagggaggtcctgctgtgttgggaagaatcctcaccatggctggccatcattgtactgagctgccctccatgaaggacattgtcatgatggagaagtctctctctctctctctctctctctctctctctctctctc

SEQ ID NO: 1013 - DNA, 2000 bp, mus musculus
gtatctaaagtggagagttgaaaggggtagatgaaaggaaaggagctctttggtttttctgtaagccaccaccacctcctgtgccccgcacaccccagctctgaagtaaagccaccagtaagctcttagtgacgttctggtaggcagtcatatgccaatttgatcaggactataacttgcatagtattaggattcatagggacgtggctctggggtagaacaagacagatctgagttcaaaattaggcttggccaccaactgactgcatgctggctccatttcataacctgttagtggttacagccagaatgcatgtgtaagtgcctggcattcgcagcagtggttataaaccacacatttcctgggggagcctgtcaaccccttaaagaagctgcaaaggaggggtgcagatatcagacttaggctctccagcactctagatgaaatattctgccactgaacgacgctcctggtccacgactctggaattttacctataccctgcatgtgcaggaggtcaagagaccacacactgagaaggatccatgtgaagtgccttcttcctccccatcccctcccttcaatattgctgccattagggagaggatagcacaagaatcagggattctctctctctctctctctctctctctctctctctctctcataggtgcacatcaaactatttgagtcactgatttgagtcaatgttttaaatctcctatgccagtgatttccatatcagccatttgagtggctggggttactgtaagaccacagcagtccctgctgtcactgctgactcagagtggcaggtggcggctgttcatatggaagcagaactggtccagggaagctgctgtcttggactctggcccctggcctcctcaccatgttctttagccttgggattcctgggttctggatattcaaggccaggacggcctctcgagcccccacatagagagtgttgccatcgtcactcaggagcagcgtgtcaaagtctcggaggcctttttgttggaagaagctgagggccctgtgcccgtctcctgttgggaggcaatgacaaggagaggatgagaaggagctgaccactgaggcaaaggtgggggaggggtggcaggcctcagcagctgccccccttcactggcggcacccccctccatttccttcatccttcaacagcagggcatcggaactttgtggattgagtccccagaagtgaaaagttccaaagacagggtaatggtagcttgggtactgttggtggtgttggggggagagcctgctcaagacacagacagaaaatgaagtgaggctagaagatgcagtctcaggcctggggggatgcagtgaagcaggatgggagggggagagctgacaggtagacacaggaaggggttctcagccacaggcaacggagatagctgtcgtccgcctcaagatttgtcgtagttacagatccctgccacccccgtttcctctgtctcctcccctcactctgcgatagcaattgcccaccaccagcaatgcccactgcagcagaaaaggctgcttcctctcggtttctgagccccatcagtgtgggcattcctgggagccacctggacagtctgaatatgttggttagtagtgcatgttcactacatatcttggtggtggcatgtgtgcacatacacacacgtgaatgtgtgggttcctgacacactggcacatcagcaaggaggaaagagcacctcagataagtctctagtgagcacatgtggacttttgctttagtcagaggacaatctggctgttactcttttggcctcaggaagcctggaaaccaagaggaatccaaagacaaaatggaaacaatactgcctagattggcttctcctgaactctgaagagagctcattgtacttccccttgaaacgcaggcttgtttgtgcctgcactcccatcccacccagagatgccgctctatccaccgactgctacatctccttta

SEQ ID NO: 1014 - DNA, 2000 bp, mus musculus; identical to SEQ ID NO: 1013

SEQ ID NO: 1015 - DNA, 2000 bp, mus musculus; identical to SEQ ID NO: 1013

SEQ ID NO: 1016 - DNA, 2000 bp, mus musculus; identical to SEQ ID NO: 1013

SEQ ID NO: 1017 - DNA, 1000 bp, mus musculus
agctcaaaacacaaattgaaccccacacaataatgggaagttcaacacgccactctcaccaatggacaggtcattgaaatagaagtgagaggatcccgcaatacctcacctgggcatatatccagaagatgtttcaactggtaataaggacacatgctccactatgttcatagcagccttatttataatagccagaagctggaaagaacccagatgcccttccacaggggaatggatacagaaaatgtggtacatttacacaatggagtactactcagctattaaaaacaatgaatttatgaaattcctaggcaaatggatggatctggaaggtattatcctaagtgaggcaactcaatcacaaaagaactcacatgatatgtactcactgataagtggatattagcccagaaacttagaatacccaagatacaatttgcaaaacacatgaaactcaagaagaacaaagaccaaagtgtggacactttgccacttcttacaattgggaacaaaacacccatggaaggagttacagagacaaagtttggagctgagatgaaaggatggatcatctagagactgctgcacccagggatccatcccataatcagcctccaaacgcagataccattgcatatgccagcatgattttgctgaaaggaccctgtctcttgtgaagctatgccagtgcctggcaaacacagaagtgaatgctcacagtcatctatgggatggaacacagggcccccaatggaggagctagagaaagtacccaaggagctaaaggggtttgcaaccctataggtggaacaacaatatgaactaaccagtacctccagagcttgtgtctctagctgcatatgtagtcggccaccattgggaagagaggccccttggtcttgcaaactttatatgccccagtacaggggaacaccagagccaagaagagggagtgggtgggtaggggagcagaggtggggggagggtatggtagactttt

SEQ ID NO: 1018 - DNA, 1200 bp, mus musculus
attctttggaaagtcaattggatggtattttgatagggcaaacatgtgaaggaatgtttagctgaagtggatacaggaaaaagcatgtttggctaaagcaagcacatgaaaagacacatgatgagagtttctttgccaaagacattcatgtattggtataccttacactgagtagttgagctaaacttttcagaactccatagagaaatgcacaaaaaacttgtggtggtgtgctgcagtgtcttgttgcttcctgggactcagtctgattgaaagagtgatgtcagctgagacagacagactttggaaggcaagaactgtggaggacacctgatgtttggaggtagtataaaagggatttgtgagcagtgatgaagactgagcttggcttgcctatagagctagctgtgcaatgcttgtgggtctctcatcatcgatgatcttcaattctctgagaaatgaacagccaagaatttttcctggtgttcctcctagtcccttctgctgactctacctgctgttgctatcctgactgtactgaactggattgcaggtgtatccacgaagttttgccaagtgaatctagctgtggctgctaacctgtgtactgaactgctgatttccagacaacacagacaggagttggtccaagaacagtttctaaacaagtccacttttttcatatcctctcttttctactacctctggtggtgggctacaagggagggtaaaacatttaagaaccatcattaaaaataaggtttaaaaattgaagttacagtgtggaatacaaaatattgagttccatatcctgagacattctggcttgcttaagttgagtagctagagatacttcataaataactgcattacaatctgtccataagtggctgtgttttggtcagggtatagtgaatatatgtaggttgccaataggttccacacctttgttgcctacataccagaatgatttatttatattcttgagttatttgtcctggggctctgtaggcacagcatatatactgtagtttgatattttaaaatttcatttcattgttggctctctctctctctctctctctctctctctctctctctctctctctctctatgtctctcatccccctttcttacactgtcatagatgttttatagatcatctaccactccattgaggctgtgaatttttaatggtgc

SEQ ID NO: 1019 - DNA, 1200 bp, mus musculus
aagttatcaagtgtgacgaagaaggacccttcatatgcatcaaggggaaagccaccaagagaaagttttatttctgaacacctatgccccaaatgcaagagcacccacattcataaaagaaactttagtaaagctcaaaacacaaattgaaccccacacaataatgggagagttcaacacgccactctcaccaatggacaggtcattgaaatagaagtgagaggatcccgcaatacctcacctgggcatatatccagaagatatttcaactggtaataaggacacatgctccactatgttcatagcaggcttatttataatagccagaagctggaaagaacccagatgcccttccacaggggaatggatacagaaaatgtggtacatttacacaatggagtactactcagctattaaaaacaacgaatttatgaaattcctaggcaaatggatggatctggaaggtattatcctaagtgaggcaactcaatcacaaaagaactcacatgatatgtactcactgataagtggatattagcccagaaacttagaatacccaagatacaatttgcaaaacacatgaaactcaagaagaacaaagaccaaagtgtggatactttgccacttcttagaattgggaacaaaacacccatggaaggagttacagagacaaagtttggagctgagatgaaaggatggatcatctagagactgctgcacccagggatccatcccataatcagcctccaaacgcagataccattgcatatgccagcatgattttgctgaaaggaccctgtctcttgtgaagctatgccagtgcctggcaaacacagaagtgaatgctcacagtcatctattggatggaacacagggcccccaatggaggagctagagaaagtacccaaggagctaaaggggtttgcaaccctataggtggaacaacaatatgaactaaccagtacctccagagcttgtgtctctagctgcatatgtagtcggccaccattgggaagagaggccccttggtcttgcaaactttatatgccccagtacaggggaacaccagagccaagaagtgggagtgggtgggtaggggagcagaggtggggggagggtatggtagactttcgggatcgcatttgaaatgtaaatgaagaaaatacctaataaaaaattggaaaaaaaagaaatgagaca

SEQ ID NO: 1020 - DNA, 1000 bp, mus musculus
ggttcataaaactaagtataggtttcatgacctcattccctcaggacaactatctcaagcccatgccagacaaggttcaaggccactcccctgaatacagaagccaacagtggatattgcctaatcacctgaaccacccaattaagaagtggggccagctttcctgaaggctatagctagttaagagatatggaggctcttcctctcacatgccttcaggggccacatctcccaaactgcccaggaaagtagtaggacctgtgaggagccgccctcacatttgccattacatgatggctctgacatccgttgctcatagtaaaatgtgtgcaggcgtcagggtatcgttccattacctaagccctgcctctcttgtggtgttaactgactgatagtgggcagccaatcctgggggtgcacgtctccaactgttttttcgcagcctataaaagggaagggttttctgctctctgggtctcctctcctgaagctgatcatctatctctccagatgtattaaagctttactgcagaaggatccgagtgacctgcgtgcgtttttctggcaagtcggtagcgtgggtcatctggtgccggaatcccgggaattaacatcgctggtgttggggagtactcccgaagatggggcggattcagaactgcagggaaaaggtaagttcagagagatatatctgatcgtgaacctcttatcccttttgatttcggtcttcaccctaagaaggggtggtagaagctctagtgttggttgctgtctatcgagtgtggtgctgaaatttgctatccatcatggctggtgctaaaattttctgtccattgacgctggtgctgaaattttatttctgtccatcgaggctggtgctgctgtccatcgaggctggtgttgaaatttcaggtgtggtcagtccgacgtagataagcggcagcaccgaggtatctcgtaagcctcccatagataagggagcagagcaccgtgtttactt

SEQ ID NO: 1021 - DNA, 1000 bp, mus musculus
gtgatgatggaattctgtggaatctctagaaagctgtcagtctctgtagcccctcccccttgcacttggctttgagctgtgtgtcaggcccaactagacagtgactattctaaactctatgtctcttctaaactctgttgcttttaacactgcagcctctcaccaccaatagcagagcacaaatgtgaaagtgctgcccatgccaagtttcagaccctgccccctgcaatagagctgtgggactgctgacaaagaaacaaagacagggctggctgaggtctggtaaacaaggcaaggcagggggtgggggtgggggaagagggggcgggcacaataactcctggtgggcagacagaagtgggcaaggggtgggcagggcaaaagagccaaggcaaatgctgcttgggcagggtgaaagcacctgctgaggcctgccaggcaggacaggcactttgcctaaaagcctttcacttaaccctttcctttctgctttgaaaaaaaaaaaactgggagaagaaaggttgcagggtacaatgtacctcccccccaccatccatatcagtcctggaaaactgcattgaagctgtgctcctccacaggaatacctgaatcataatttttaaccgcaaaattttttgctttgctttctaaattttttttctctctctagtattcatgatatatctcaaaaattctttcaacttgtataaacttttctatacggtgcaaaagtcatccaatccttaattaataaccagttttcttttacagaagaactgttaactgcctacccagtggcacaataaacatgatattttcttttttagccatccaaacagacttggatgtgctcctaagcaaaccattgcaggcttaacttttgctatgcactctatcaagataccctctgctggtgtatggcccctttgttataattactaaactggtctatctccacaaggggcctgctgccacagatccacctgagacagcaccaact

SEQ ID NO: 1022 - DNA, 1200 bp, mus musculus
cccaaaataatagtttcagttttatttatttacttttttagaaccaaggttgttgcaaaatcttagaatatagattgggcatttatacctttcttttttgataacactgtattgcattttataatctactctcttattgcttatttcttttgttactggttgtttttctatgacatatataatatagaaactgctaatttgttaagacatttttctcccatcctatatcctatgtcttcatccaattaataccataatgttgggaacaaaataaaggggggcccagggggagcccgggggaagtgggggaaaggaaaagaggcccattctccgccagaatttccctattctctggtcaatcaggcatgggagggctgctacctatcctatccactcatccctgggtgggcattcctgtatcccagtattcagggggtatccaaatggcaggcctgcctggggaaccccctcccaaccactttgctaaagccaccgggttgtaggagagaaggatgagtggaagaggctcccagcaatgaccagagtggacagcaggccttgaaagtgcagagaccatctatggtttaagatctttattatagaaatgcaggggaaagagaggaagtggaaaagggagagagagagaaagaggcagagagagagagagagagagagagagagagagagagagagagagagagagaaagctagagagagagagagaaagctagagagagagagagaaagctagagagagagaaaaaaaggagaaaggagaggagaagagtaagaaaagggaagaagagcaagaagtgagagaagtgagtggtaagaggaaaaaggagtaagagagcaaggtggggggctgagcaccccttttttatggtcttcattgttgctaggtaactggggaggagtttagcctgaaggtcagaaccttgggccattgcttacatgactactgaccatgcttctcttgtgggggttgtgggaggtgataccttaagaaggggccagagttccaggaacatgagggaatgcctaccatattatgtaggagaattatgaccattaggtttcagacctcagttcgactggagaccagtctgtaattccccacactataccttgttttagagattaattttaatttcatgatgttgtacttgtcaatagttgaccttatttatctagttcccc

SEQ ID NO: 1023 - DNA, 1400 bp, mus musculus
ctaaaacttattctttctctctcatgttcaaattctaattcttaatctccttcttctgggaattctgccagagaagggagaggaggcacagtggtagcttctgatagttactccccaacaagaaaagatggttgcagggaccacatcgggaccctcattagctagtttatcatttaaatctctgcctacgttttgccattttttatggtgtagctctgccccatcaattataaaccaggagcaagcttgatctataaaaataaaaatgtttatcaaatcttttttcttaactcgaactcccctttccctgagagaagctttcaggtctctgatgaagaccgctgcgtttgacagtttagttgccatttcttagcggagacaaatcactcactgaggatggcttctcctatgtgcagtaagagcgctcctcacaacagcttattcttctattcgagatgaacttctcttggagttagtctccggggtttcctccgggcaaaggtccttgtctggaacctcacattgaaggcaccactggtcccatccagcaagacttagttattccgtaggtcgagaaggaccagggcctgaaagagaaatgagttgagaaagggaagcaagaccaagcaaaaaggtgtcaaggtctgtttaatgaaggcaaagaaccaggttatacgcacacagtgagagaaaattggaaaggggtcgatggggtataattaaacacagtgaaagggatggacatctggggcagatgctgattacaggcttcttgcaatttatcttggaaagccggccctaaaactgtcgcaggcagccttcaaacattctgcagtttatcttggagtgccagccctgaccccacagtcccaggaagccatcaaacatcttgtagctatcttgtttatctagtttatctgccataaacagtcccaagcaccaaacagagacatggaggtgtaggtgaagcttccttaatctaagcagttctaggtgccaagtgaaggacagagtggagctggcagtctcaggcaccaggtggaggcaatgaagtagggggtgacataattcccttcaaagggtcagccggattttagggtgagagtaactgtgggacttagtttccatggtttggtctctcatatttaactaatttaatagtttttaattaggagcctgacccattttatgaccagcctagaagcagttttccactgttgtaacagatttcctcctcataaggttatggctataacagtcacttgtagccttaattttcctatctgaaacctgcacatttaagccacttggtgatttgctgtatttgtaagaaagtcttaactcctagaaattgaatatctacctcttaaagtgaacaacctgaagaccaagattttgga

SEQ ID NO: 1024 - DNA, 1400 bp, mus musculus
gcttctaacatcttttcaaggttctgtctccaaacttaattttcctttcttcgtttctaatcatgacctataaaatcctatatctttaattacagtgtttgctaacctgttaccgagtcttaaatttgcctgtttgttgatcagtttcatctatgaaattctgcattttttgttctaacctcttttctacctctggtctccaatctccattttccaacttgtcacttattatgatgtgtaaaatcccctaataccttctctatggctcataattttttttctctagggtccaatcttttgagaagacctggtaaaccaagattacaagtaacgttgtaataatgataactggcaagataccaagttcctttaaatccatcctgatcagaccacacaaaatatcatcccataaaacccaaaggggggcttccagttaatgctagtgccatcccaccttgggtccaaacttagcagagagtcccacagtccccagaggactttcactccacaggtgccccggaacacccagaacttaggatcactggagagtggaacacaacatctgttccaacagaaacttgagtgcctagggccagctggagcatggactaggaacccctccagactactggctcgggttccttcaggtcaccacccttctacctcaggtttgaaatcagtggagatctccatggtccctagaggacataccacttccaggttctctaacacacccaggatcttaggatcccaggatcccaggagcttagtcacatcagtatctcagggcctcagaggacacttgacagccaagaactctgacacacacagaatctcaacatcacatgaacccagaatcacaggatcccaataaaagctggactctcagaagttctgactcaactgggattacaggaatgactggctccaatcagaagcagagaggacagggaacacttgagataatcagatagcaggaggcaagcataagatcagaagcaacaggaacaaacgttacttggcaatcatcagaacccaattctcccaccaaagcaagtcctgtttacaccatcacaccagaaaagcaagatatagatctaaagtcacttctcctgatgatgatggattagtataagaaggacataataactcccttaaagaaatacaggagaacagatccaaacaggtgaaattattgaagaaaaccatccatcatctaaaattggaagtagaaacaataaagaaatcacaaagggagacaactctggaaatagaaaacctaggaaagaagtctagagccatatatgcaaacataacaaacagaataaaagagatggaagacagaatctcaggtgcagaagataccatagaaaacattgacagggctatcaaaaattgca

SEQ ID NO: 1025 - DNA, 1000 bp, mus musculus
tttgttttaagcagaagttttgaaagagtctttgacaaatacctgatgggctatcaggttttatacagagactaatggtaccttcagccaacactagagagttactaaaaccagaggattcagttgtcccttcagcttgtttaaatcaacacaatggagaaaaggaatagcttagtagaaaaggacaggttgcttaaagccagaattgagagagagggagctcacatttctgtggaatctgaagttctgttgaattgtccgaagaactgggtaaagtgtgtcagctgtccttgctccaagttttatgccaggtattggtttttgaaccagggcactatactgcagggatccctatgaagcatatttggaagcactaagtgagattgacagtggtagaccaggccagagcaaattctcttctactaggtattactgctaaataagacagacaattccagacagtctttggtgaagtaattcattacttcattctttgaagatagtgacttatactcatttagaggtgatttagggtagaagagaagacactatttccttagtttgagatgttatgcatacctcatcttcataagcaggacttttgtgtcttgctcctaggtgacggattttaacaatcctctcatgggatagtgtaagtatatgttccaagacatgaacctggtcagaagtagattacatgccaaagattcttagatattatggagatttataaacccacttgaacttaacaagttttatgtatgttgtcatggtccattgagacacagaaaagggaagaaaagaatttttaaaagagaagaaataaagcgataaagaaagatgaagtgttatacatgaagagagaagatactaactcactctggatgaagcagaaaagtagagctccaactttttacaggcatacatagacataaacttatatatagaatggagcatagcctcatgaagaaaggtccagtaacctgaaattttttgttct

SEQ ID NO: 1026 - DNA, 1600 bp, mus musculus
tatatttttaaggaggtcagttggcaggacatctgacttgagcaagttgtttcttgtctaaattatgtttgatgaaataaattttgtggtttctgaagcaaaagactttaactattcctcactaatttattttaattggtgactgcaataacatgaagagctcactttgctgggtttgaaaggcagtgagctgagtgaacagtcaactccaatacttgtgaggtatagttttgagcatattctttgagaaatttcaggaaaatgacttaaacttttgtgcatatgttcttacatgtctctatgatccttcataaaaggatgttaggggtccttacctaaagcatggcaaaaggaggagatcaaagagtgaactatgctgaatgttatcaacaattttcctcgagaataagggcccttaacattcttcatgaatgttgaagaataaggaactcacttggctgtgccccttacttctgaaagtactacattcaatgggaggatgtccaacctgcctcaactcaaaacaaagtcgtaagacccagtacactcatctacaaaaaataagccacaagtttgtttagttcctttattgtatgaatgacaactacaaaattatactactacaattgaaaatgcctcaactcttgcatatgcatttcagaaaatgttttaagtgacaagtggagtatgcctgccatcaactcggagctccgacaatggaccagcaatttgtggagattgtacaaggtagttgtgcattacactggattcaacatcttcacaattacatagctcctgaaatgtgtaagtgttcctaatatatctgacccagatgctggagcttggtagtcaaagaagctgccatgcaattctaggtgtaccatttacaaaatgagcagacatatgttgtcagtgacctccggggttgcttaccacactccttgttggtgtacagtgtacataggaacaaccttctcaggcttcttctctcaaatgctttgggactcccaccatggacataaggctccactggctttgctattttgtgacgttgccatggagcaaacaagatactactcaaattggtgtcctgccagtatgtgttatactctacaaatatgtactttgaggtttctatgattttttaaaaatagtcaatgctaacaatctttcctaattactttgtggtttaaatttattgtatagtactaatcatttttgttttaataaaatccattaaaaaagcaatgcaaggaatgatcgctttacctcatagttatacaaactagtctctgatatcaaagagatgtggtggctggtgtttagagcatttggtaactttattcctagcaaggaaataaatgaatggatgaaagtgatcatcaagggttttcttattttatcatgtctagcacaataatagatgcatgaatctaacaattcaacttactaagactagattatcccctataatttgtaatgttcagtgattataaatcctgttaaacaaaaataagcaaatcattaatcatatattttcaatgtgattggcttagaattgtatttataaaacaatgaatagttaatatgccaccctgtt

SEQ ID NO: 1027 - DNA, 1000 bp, mus musculus
ttaggatgtatggttgtggacctggaggtttctatggttcaggaacatctgatccactgaaggtgacaagtgaggtggttggaaaatgaagaaccccctgtgatgagggctgcgcagtgcaacttggcttggcctagagggctcagagcacaggaagtatgtgttggtcaaggaaagcttacctaatttgctcaggatggaggagagatgtaaagaaagtagagttccccttgggagagcagtttcctaagggtagcatgccttagccaagagaataatcaaatttccaatgtctggatatttaaactatagactgaatatatttgataatttgcagtaattaagacaaaggatgagaccaggtccttcattttaaaatagagataatttagaatgatttaaatgttctttgtaaggcaaaaataaaaggcatttagagaactacttaatatttcaattatttaaacctgaacttcctgattacttatttgcaacatgcccctttaactccaaactacatctgataataagaatgctccttattcctttcgcctctctggttggcgccagcaccaggtcaccttggaagcagaatcggcagacacccccacagtacccagagggactccacacttaggaacactggtgagcagaacacaacaatcggttttaatcctatctcataggtcctgagacagcagaagggaagcagaaaaccagcctgaccaggggcacaagtcccttccagtcagcaccagcaccgggtcaccttggaagcagaattggcagacacccccacagtccccagagggactccacaccatcttagggtcactggtgagtggaacacaacattagttctaatccaatcacgtgggactgagacagcaaaatggaagcagaaaaccagcctgaccaggggcaaaggtcccttccatttggcaccagcataggatcacctagggcatggatttggctgacacccctacagtccccagag

SEQ ID NO: 1028 - DNA, 1400 bp, mus musculus
cattcctccttgcaaaagatatttaatctctagcccaccctgaggaattgatatgtaaccattttccatggtgaacaatcaataaacagtttggaatcaaggactgtccctttcatcaagaatcgctgcagtgtggacagagaaagccttcaactactgagccactacctaagtctcccacagaaggcctctctgagcttccagaaaaacgttcactaagctaaagactttctaagcaggagctcccatttccccagctggctcatcattgtttttgtccccaaccagctgggggcaggggtggaggtggcggtggggtggggtgggccagcaaatccatttccaactcttcacaacccaaaagtgcctggatgtctaggagtttgacagcacttgatcctggccttatcacaggcctgtggaccctgacactttgttcccaacttctctcaaattttccagctgcaactgatgccaggcagtcagggaacgtcagcttcggcctcccacatcctaggctttgtttgcccaccctatgagcagtgtctcatgagtccttaaggcccaacacctggcagaggcagcggtgcagggtaaataaaagcagtctagcttcctgattttcatctctccagctgagcttccacactccagagatggggcagaatgcagactcacagtaaccctcatcagctacttgactccatgggaatctaataaggacctcctccatttagtcaagcttcatccacttccttgcttttagttaccttcccagccatcccattgcacatggcctagccactaggtccagaaaggggccagtatttcaggcatgactctgatctctaccccaccatagactcttcttcagctgatcttgtccatgtggttcccataacagaccattttcaataggacagatcctattgagactcctccaagacgctcaggccaccactctgacttgaaattgtagccaattgggttaaaaagaataaaaggcacaaccaacatcctaactctaaatgcctacatgtcatcgtccaaaaccaagcaatacacaaaaacaataagtatgtcttctacaaaatcattaatcccataatgatggtatactggctggttttgtgtgttaacttgacacaggttggagttatcacataactggagcttcatttggggaaaaactccatgagatccagctgtggagtattttctcagttggtgatcaaggaggggagggcccattgtgagtggtgccatccatgggctgacagttcttgggttctataagaaaacaagcaaagcaagccagggaaagcaagccagtaagaaacatccctccatggcctctgcatcagctcctgtttcctgacctgcttgagttccagtcctga

SEQ ID NO: 1029 - DNA, 1000 bp, mus musculus
taaacaactggaaccttttgtgtagaagttaattatttttcacttctttatttacctattcatttgatatcccaattgcagccctctttctgccagtctgcttttgacattacacagctcctctccacgcttcctcaattttttccctaagaaggggaagctcctacctctgtgggtatcaaaccatgctggcacatcaagtcactgcagaactaggagcatccttttccactgaggccagacaaggcaatccagttagaggaacaggatccaaaggcatgcaacagagtcaaagacagcctaggctccagttactgggggacccagataaagaccaactgcacctctgctatatatgttttggggacctaggtccagctcatacttgctctttggttggtggtccagtttctgggagcccctaaggttccaggttaattgacactgttggtcttcttctggagatcctatctcattcaggtccctcaatccttcctccaaattacaagactcacctagctccatttaatgtttaactgtgtatttctgtatctgtttccattgactgctaggtgaagcctctcagcagacagatgtgctaggctcctgtttgcaagcatgacagagtatctttaatagtgtcagggattggttcttgtccatgggattggtcccaattttggccaataatttggaggccactcccttctctgctccatctttgttcctacacatcttgtaggcaggagacattttgggtaaaatgttgtgttggtgacttagtgtccccttccctccctatttgaaaccccacctaggtaaaggaggtgacttgttgaggctccatatctctcactgataggagtctcagctaaggtcacccctgtacactcctggcagcctccctatcccagagatgccctctactaattctggatctcttcctagcacctcctccacacctgataccctccttttaactccctccataccacctttc

SEQ ID NO: 1030 - DNA, 1200 bp, mus musculus
cagaaagatccgccgggaccaagaactccgccagggactggaggaagagcagctgaggcgccaggaacgtgacagaaaattccgtgaggaacaagagctcggccaagaactggaggaagagcggctgcgggacagaaagatccgccgggagcaagagctccgccgggaacgcgagcaagagcagcggcgccgcctggagcgtgaggaagagcagcagcgtctccatgagcgtgaggaagagcagcggcgccgccaggagcgcgagcaagagcagcagcggtgcctggagcgtgaggaggaacaatttcgctttgaggagcagcagcgccgccgccaggaacgcgagcaacagttgagacaggagcgcgacagaagagtccttgaggaagaagagcttcgtcaggaaagggaggagctgctgcaccgccaggtgggtggcaggaaattccgggaagaggagcgactccgcctggaaagagaggaacagcagcgtcgtctccaggagcgtgacaacagaagattccgcgaggaagtagagctcaggcaagaaagggaagggcagcagcttcgccaagagcgtgacagaaaattccgtgaggtagaagagcttcgccaggaagaacagcgccgccgccaggagcgtgacaggaaattccgggaagagaaacacccacgcgaggaacgcgaggaacagcagttgcgcagggagaagcgagatggtcaatacctggctgaggagcagtttgccagggatacgattcgtcgccaggaacaagaactacgtcaagaagaggaacaaagacgtcgccaagagcgggagagaaaattccaagaagagcaaatccgtcgtaggcaagaggagcagaggcgccgccaaatcctggagcctggtacacgccagtttgccaatgtcccagtgcgttccagccctctctatgagtacatccaggagcagaggtctcaataccgcccttaaaagatgctgcaaacatcctggcaccagccaaagcttcaagcaaaagaaaatgagaaacactagggtatccagcgataactcaagtgtttctggttgtgggaaaactctctgatcttagaatgtgtcttttcttacagaatcttaaactatactaatttcatttcctttaattcctgtctttcattcttccacaggtagttcttttttgcaagatgtctttgttc

SEQ ID NO: 1031 - DNA, 1400 bp, mus musculus
ttcagttggggtgaggcctccatgagatacaactgtaaggcattttctcaatcagtgatcaaggaggaaaggccccttgtgggtgggaccatctctgggctggtagtcttgggttctataagagagcaggctgagcaagccagaggaagcaagccagtaaagaacatccctccatggtttctgcatcagcacctgctttctgacctggttgagttccagtcctgacttctttgatgatgaacagcagtgtggaagtgtaagctgaataaaccctttcctccccaacttgtttcttggtcatgatgttttgtccaggaacagaaaccctgactaaaacagaggtctaataggttatcatcatggtgggaagcatgtcatcatttaggcatgcttggtgcttgaaaatccaacagctctacatcttatagcagactctaacctagaaccacgtgatccaagctgcccactgctgctgattgctggcactggaacatgctccctttgcttcactgcctaggcttggctggcttagaaattgttctgtaatctgaccttgaactcagagatctgcatgcctctgtgtcctgaatgctgggattaagagcctgtactactaggcctggacataatccactacatttttacaagatgcttataaattctgggctgtagttccttccagatagtcaagttgacagttgagaagagctatcactgctgtcaagaagcaactattctttggacctaatagttttggccactggtggtttgagaaatctgtgtagagagaggacacttaggaaaggagataggttagaagtttgaaggagttcccagtagtggggagattctatcagaatctgcttattttgtctccttggaattcagggctggtgggggagtaccctcatagaggcaggtagagggtggtgggaatagggagcttccagaggggaggcctagagaagagataacatttgaaatgtaaataaagaatatatccattaaaagaaaaaatcacttaaaaaagtgtacgtacccttatgaatacatcaaataaaaaagaataataaacttataaaaacaaaaaggaaaagaggtcatcccagaaggattgctatagagttgggcattagactggtaggtgttctacaaaaagtaatggataggggaagatctatagacatcttccatgtttcacattcaggattagtcagtgagttatcagtgagtgcatgctggagttacgggtagaatacagcaaggaaatagggggagagaccttataaagaattgtcagtgggactcatatgagatgtagtcaggcagaaagaaagagttcagctgtgggtatgatatagctctatagatgaacataggcgattgaagttggcgtggag

SEQ ID NO: 1032 - DNA, 1000 bp, mus musculus
cgtgagtgagatctctcggtgttcacagaaatctcatcaactttagtatcactcactttcttgttcttttgagacgaggtctcttgcccaggctggcctccaactcagtctatagctgagattgaccttttagcctctggacctgttgcctccaccactcaagtgatggagttacatgtatgttccagcaagcccaacttattctcactttaaaggaaactgaggcacagagttcagtaactgctcaagattgtgtttctagtatgcaaagtcagggttagaattcaggaaaactgtcgccagagctataaagtccccactgtacttgacttcagttaaaggagacagtggtcacagttgtcatcaatggggacaatagcagggcttcacaacaaagacagtctttatggttgagtgtttgtgggtggagttttctcaggctggcagagagacccaccctctgtgaagagtgatggctgacaggtcctctgtatgtttctcagggccagtgtggttcctgttgggctttcagctctgccggggccctggagggccaactcaagaagaaaactggtaaactcttagctctgagtccccagaatcttgtggactgtgtgactgagaattatggctgtggaggcggctatatgaccactgccttccaatacgtgcagcagaacggaggcattgactctgaagatgcttacccatatgtgggccaggtgagaccaccgtagtatgtagccgtgggctgctccttccccgggcatggttttgttttctgttagcatatcctgctcctttccattttttttttccttttaattttgagacaatatcttactctgtatcccaaactgatcaactaggtatcctaggctggccaccctttttttgagacaagatctcatatagcccatgttgtccttaaaagtactatgtagctgaagacaaccctgaattcttcctacctcaagcttccaacaggcctgggttccag

SEQ ID NO: 1033 - DNA, 1000 bp, mus musculus
ctaagggactcagtgtcctctcctggccccaacataggcacaggagcactgtgtatctatttaaaccacacacaaataaataaaataattttgatcatgaggaaaaacatgatcaaaatgtatgaaaatttttttcccaatttttttccctcttccttcatcagccgggtctcatgtgcccaagctggtcctcaactcatcgtgtagccaagtatgatcttgaatccctgatcctcctgcctctacctcccaaagagtaaaattatagacacgtgtcactagaccctattttacattttttaaatctcggtagacatcatcttttttgcgtttttgttaacttgacacaggctagagtcattttggaagaggagacctcaactgagatgatgcctgccgcagcctgacgcctaggtctgcatcttcatggatgatggattgggaggactcagcccacggtgggcagggcccccctgggctggtggtcctgggtacgataagaaggcaagctgagcaagccagtaagcagtgttcctcaatggcctcgatcagctcctgcttccaggttcctgccaaggcatccctcagtcatggactgtgctgtggaaccataagctgaaatacaccctcccctcccaagttgcttttggccatagtatagtgttttatcccaggagtagaaaccctagacagtgctcatttcacaccgaggaaaatgacccatgtatgtttgggtgtgcaagtgcatatagagggaaccaaagctaaaagcacccccctccacacacacacacacacacacacacacacacacacacacacacacacacaaagaagggatgaaatcagatctgtagggctcagacagtgaagtgtgtacctcaccagccccaggaactgggatgggaccacagaaaccaagtaaacactctgggcatatcatgccctcacaatcccatgctcaagggcaagcagtggtattctggggctccctggccag

SEQ ID NO: 1034 - DNA, 1000 bp, mus musculus
agtccagcaccccttcatgataaaagtcctggggaagcccagcatggacgtgtatgcctttaatcccagcactcaggaagcagaagcaggaaggtctctgggttcacttagaagtgagggatgctatagaattggttgctaaagctgatggacaagcccgacatcagtggaggaaaacagattttggaagaggcggtgtttgtgttcaatagatacttgaacattaacggttttccctcagtggtagagaaatgggaaggtaaaagtgcttgtgatgtcttggttgccaccctgattacagctggaaggaactaaaacccacactgggtgtgcctgggttacaccttccaggttgatatgagctccaccttcccgtggcagcctgtgtaagaacttggaagaaggaagctggctctttgtcggcttgcccttgctcttgctggaaagtcctcacttcagtggcacagaagcctgcttcttcaggattccagcgtgtactgaagacagccgagacctcctgcctcatggactgaacaactagtggattcttggtaaacattgttggattagctggctgtagcctgtaagccactctaataaataatatgtatactacattaatatccatatgagttatatactgtttatgtgaatagataaatacgcattaatatacatatatgagtatgtatagaggatcagctctgctcctctagaaaattctgactaatacagtgcagtttgtgagatgactagagatgtgaaattcagatgctcacatttgaatgtcctaaggcctgcatagggagttggggaaagatttaacggagtggtgtcgttcctgtgggaggaaattctggctggcactaatgcccctgactgggcacacagactgggcacctcagggttgccccacaggtttgtaatggcaatgagagcattgtgcatgagcaggcatgtgcggctttcaccggagctaggaaacaccgggggacttggt

SEQ ID NO: 1035 - DNA, 1000 bp, mus musculus
gcccagaattcttcttctttgttttctattttcttccagcctgtctgaatttgttttctatcctttccaggctaagtctcttctgggtaggttagcttgatcatctcaggccatccttaggctgtccatcagctcttgcactgcctgagatgcctgggttccgctgccattttcatgagaacctaacagagcacacgacagggactgtgtgtccagaacacagcctagcatgtggtggactttcagaactctggtcatcacgaattattaggcatgggtaaaatgcaaatatggaggcgtgaagcatgttcatgtctccagttggcctctggtgtagaaggaggaccaggaagaagttgattttcttggtaatggactgtcagctccagctgggaggatgcagggcagagctgtggcaggctgttttgtgtgtttgtgcaacatgaatgatgtgaaagttaatgatttcaggtggtgtgggtggggcccctgcttcagctggcgtgtccatcctcactagatctaggaaaggcccttttactgtacagctaagaaaaccataggggttgcctgggtgccagcagggcgggaaatagaaaagagaaagtcaggggtgaagaagcacctctgataatatcgccgtgagagtgggaatagtcgcactgtgggatgcgtttgggctttacttcagcaagtagggttggtggagctgtctgtcctccttgggtgggcccggctgtcagctgccatgagaaacagtcttctggcaggcagctcatgggatagctgtgcttagctgcacagcaggtcagattctgtgcattcgaaggctaggggtggcctttcttcaaggaggtgtattacatacgtgtggccttctgataccttgtgtaggatcctgccatagagtaccaggcagcaacccttcttcctgggcttctttctaagaaatgtcccacttccgattcagggccatgtgctgtcacgtggcttgcacact

SEQ ID NO: 1036 - DNA, 1400 bp, mus musculus
gaactctcaaaacctttttttttgcggattacacatttttattagatattttcttcatttacatttcaaatgctatcccaaaagtcccctataccctccccccaccccaccctgctacacaacctacccgatcccacttcctggctctggcattctcctgtactggggcatataatcttcacaagaccaagggcctctcttcccaataatggtgcaactagagacagggtttgacagcaggtacctctcattggcttggactgagagtttggggaaacggtttttgcatgtgggaatgcttggtgctgttccaaccaggctgataggcatgcctctcctgtgggagctgtggggatggtaacttttacagaggtcagggatccaggagacagggtcagaagcctgccatcccatcttacgtttgcctttggccatctggaaatctctggtgttagatattctagctgtctctggctggagtttgttcctcctgtgattctgctagcctctgtcagcactcctgggagtccaactctctctcctgagccccagtggtcaaagctctctttgtaggcaagctctcctgttgaagggaaggtacccaaaggtctgggtctcaactctgcctcctggctgaggatgaaggcccaaagataccatgtccaagaagttctgttgcttctgtggcctgagtgttctcctgctaggacttgcctctgagagaccggggatacaagatggcgctctcacctgagaccgagggctagagccctttctggagcccgactctcctcagtgattcttaggtcctcggtgtgctaaggtgcctgtggtgtggaaagtcctctgggaaccatgggaccatctgccaagtttgtgcccaaggtggggctgggctggcgcctactggaaagaacccctctccaaagctttttacatgaatggatgctgtattttgaaaaaggccttttccacatccaatgagatgatcatgtggtttttttcctatgtttgtttatatagaggattatgttgatgaatttccaaatattgaaccattcttgcatctctgggatgaagcctacttgataaaggtagatgattgttttgaaatgttcttgggtacagtttgcgagaattttattaagtatttttgcatcgatattcataagggaaattggactgtagttctctttctttgttcggtctttgtgtggtataggtaccagtgtaactgtggcttcatagaatgaattgggtagtgtaccttctcttactgtttcatggggtactttgaggaatagtagcctttgaccttctttgaaagtctgatagaattcttcactaaaatcatctgtccctggacttttcttggttgggaaacttttaatgactgcttc

SEQ ID NO: 1037 - DNA, 1000 bp, mus musculus
cacagaatgaaccagtctgggcaacttaatgttttggtctggagatatggttaggttccatccctagcactaaaaataacaataacaacaaaagaatgaatccagtgatacttagtatcattggataagaggttatcaaatctatgaaggtaagagcagacataacatcaggaaactgatctgaaagtcccctttggctgcagacaggcaagggtgctttagtatttcaatgttgcatgtttcagtgctgcatgtggacctagatggacggccagctttcagaggaccctattatctgatcctgtaaagatatgatgcttaggaggccaaggtcataggtttgttctctttgtgggtcacttcactttgctccagcccatgcctcagacctgccccctgcaacctcagctggctgccttgtaaatacacttaggctcaaataatacaggagcatgtgataggaacaggacacatctatcattactagggcagcagctgaaaacacagtctgcaccatcagtgaggactgtcagtagcgtgcttccaacttagcatagcactttgtacaggggctcaattcaaggcatctatgactagcacatgcagacctgagctcattgacctgggtaaacttaatagagcagcaactctgggcaccatagcttctgcacagagcagaacacaagcagcattcatgggacttcagccttttctaaagatagttttgccagagaacacatggggcctcctggcatgacctagagcaattgcttagacttggagatatgagcacctatctcttgattgacctgtctgctgtcaatgtttacgtccacatgcgtatacgaaggtggtatgttttagttctaggctgaagctcagtcctatgctcttcgctgaagcactgatgacagaaaagctggtctggaatctccagctacacaaataaatactgcagcaaggcctaacaggaagaccctcactacccaatttcttccag

SEQ ID NO: 1038 - DNA, 1200 bp, mus musculus
ttgttctgttgaggaatatttcccctgtgcccatatcttcgaggctttccccccccactttctcctctataaggttcactgtctctggttttatgtggagttccttggtccacttagatttgaccttagtacaaggagataggaatggatcaatttgcattttctacatgataaccacaagttgagccagaaccatttgttgaaaatgctatcttggacagtactgggtcaccttggctgccaagtccactgacacccccaaagtcctgaaaggactctccatgcgatcttaggatcactggtgagtggaatacaacttgtgttccactccaattgcaggggaccagctttagggaagcaaaaaacccgacctgaccagggtcataagtcccttcctgtgagcaccagcactggatcacctgggtgaggagtcagaggacacctccaaggtccctagacgacagcttctgaggcagaccccgtttcgggcaccagacatccgggcaccttccctgccagaggaaaggtgtccttcccacctgggagagttttgcaggagcacttggggaagtcatcttagttcccagatccttctgagactagtctgcacaggtgagattgtgtactacagaagctaacagcttctgggacaggccctgtttcaggccttcatctctgccaggaggcaggtccgaacgcaagatatctgtgcaccttccctgtaagaggagagctcgcctgcagagagtgctcagaccactgaaactcagaggagagatctagtctcccaggtctgctgatagaggctaacagaatcacgagaggaacaagctctaaccagagacaactataacaactaagtccagagattaacagatggcaaaaggcaaatgcaagaatcttactaacagaaaccaagaccactcaccatcatcagaacacagcactcccacctcatccagtccttggcaccccaacacacccaaaaacctagaccaggatttaaaagcatatctcatgatgatggtagaggacatcaagaagggctttaataactcccttaaagaaatacaggagaacactgctaaagagttacaagtccttaaagaaaaacaggaaaacacatccaaataggtagaagtccttaaagaaaaagagaaaagcagatctaaacaggtgatggaaatgaacaaaaccata

SEQ ID NO: 1039 - DNA, 1400 bp, mus musculus
gccccagatcaggcccgggtagcctgcttccctatgtaccgcagtctcgagttccgcgcgattggattggggcaggcactgtgatccactcaccagaggtcttagggtcccgtggggagtcccgtgtggacccttgcgggtgttgggcaagactctgcttgcaaggtagcccggggctcgagtcaccctgtatttctttaaaggaccaatttgtttcctccttaagggcttctacctgggtacctgtgctttcttgtattttttaaaggcagttagttacgttttctttaaggttttctatcatcttcatgacatgagattttaggtcatagtcttgcttttcaggtgtgttagggtatccaggatttgttatggtgggagagctgggttctgatggtgccaagtagagttggttttttgtttcgttttgttttgtttttggcttggtttggtttgggtttttttttttttttttttttttgcatatgttcttgtgattgcctctcaacatctggttatctcaggtgttaactggcattgctgtctctgatgagatcctgtcccgcctttgagcctgtgagtctggttgtgatgaaactccggggagtcaacttgtctctgggtgtgggagggaatctggagcaccaattctgccccaggccaagttgtgggcaggaagaaagatgtatctctggcaaggcagggcagatagggccttcttccactgggccatgtgggggtccaacttaggccaggtattggggtggggggtatctcaccagtgaatctggttgtgatggagctcctcggagtcaagctgtccctgggtgtgggagggggtctggagatccagctctgccatgcactgatttgtggggatagaagcatcttttaatggccagaagttctaaaagaaatgttcaatgtccttagtcatcagggaaaggcaaattaaagtgactctgaggttccatcttacataggcaactactgaaccaccaaccaaagaacatgcatgtgatagacctaggcctccgacacagacacatatgtatcagatgttcatcttggtcttcacatgggatccctaacaactggaacaggagctgtctctgactctgttgcctgcctttggactactttcccctaactgggctgccctttctagtctcaatagggaaagttgtgcctagtcctactgcaacttgataggccaaggtgagttgatatccatggtaggcctcccctctctgaagagaaagggagagagggatgataggagggaagaggagaggagagggagggactgagaggagaagagggaggggaagctgcaatcaagatgtaaagtaaataaataataaacaatgaggttataaggctaatgctttgatgtgtag

SEQ ID NO: 1040 - DNA, 1200 bp, mus musculus
cagccatataaaattcccccaaattgtggaaaagtacagacataagagaatctctcatttgacactccagtccttggcctgggacagtaagaaaaatgttcccaaggactgcagagatctttcccattgttcaactcagcattccacacaggacttaatgacagaaggcgttgcagttgtaattattctcctctgggtcctaccccaaccaccctgcaacaggctctctgcagccctgcccaatcccggtagaagggaaaaggcacaaagagggatgtttgtggccagacagtctccaattagtcaaaatgagaacaatgactggcttttcctctgggccagcctggaaaaacatcctgcatgtttgggtgggtgaggaaaagaattgcaaatggcattcttccggggtgtataatgtctgtgacccacgccaccccagtggtcagagcctcaggattcaaagacaccttggacaggaggcctagaaaaagtcagatgtggtaggccaaccatttcttgcatcagttagtgaggcaaaagcatcacctctgggcttaggatgcgaaggactgtcttggagttgagtcccaactctagaatgtagtcattagacacagaatagagtgggaacctacgatctgaaattttatgagagagagagagggagagagagagagagagagagagagagagagagagagagagagagagaagacacggctgctcctaggtattgcggagaagaaagtttattgtagatacaggggagaagagcatagctagaagctagaacttgggaaagtcccaagttgacatgaccctgaaccatctgaggagaggcagaggggaagggagagagggaaatgaggtgcaacaacctagagggcaaagggtaaaacaacagggtggtaaccaaaatggccagattacatagggaagagcctctggggaaccagcagcctagcccctaggttggagagttcagggtagagggtgtgccagccatcctgtaataggtctgaccactgagggattgagtccactttgatatgtaaaatcggcccctcaacatttgtcccagggattgagacctcatactctcttttctttccctaaaataattcttttccatgtgcttggcacactaacatttgaaaagacaggactatcctagatagctgatggagatgggtttctaag

SEQ ID NO: 1041 - DNA, 1200 bp, mus musculus
tgtcgcacatgctctcttcactgcagcatcagtgaccatctgaaaatggtcctgaccatcaggacatcagaatagataaagatggcattctctgctctgtcttcatccaatcctggctttattcatgtcattttactttctgtttatatttataattctgtcggtgttaacaattgctaacagttccttcccttccttgttaatgtttctagaatgtgattccttgccttccataccaatatcacctgaatcttgcactgtttctagcacccacactttggatggtcccgctttatcttctccataactcgggaactgtataaaatgttgagagcatcacagacttcaagtagacctggatgctatatattaagtgacatctcattttactttacatgtttttctttattgagtcacactgagttgattctttctgctcatgaaagtgttccagttcaatttttcacaaaagccaaactcacaaatagttgctggtgttagtaaaaatatttctctgagaatccattcagtttctgtctgcaccaggagctgatcctgtgccccagctctccatactcaaatactgtcagtggagagttggtcttcctggagtgccaacacacctgtgagcacaggtaagaccaccacttctgctcaaattcctggaccaagagggacccaaccagaaccatcaagacataggaaccaaggaacagccagggacaggatccttctggtttctgtctgcaccccagggctgaccctgtgctacagctcttcatacccaaattcctcctagaaagaactggtctcccagaagtactgacacacaggcttgcaggaaggacaaactacagtcagaaacagcaagaccagctaaaaccagagataaccagatggctagaggcaaggacaagtacataagcaacagaaaccaaggctacttggcatcatcagaacccagttctcccacaacagcaagccctagatatcctaacgcatcagaaaagcaagccctggataccccaacacatcagaaaagcaagactctgatttaaaatcacaccccatgatgatgatagagaactttaagaaggacataaataactcccttaaagaaatacaggagaacacaggtaaacagctagaagcccctagaggaaaaacaaaaatcccttaaagaattataggaaaacagaa

SEQ ID NO: 1042 - DNA, 1000 bp, mus musculus
ttgaattaatattacataaagcccgactctctcccgcagcataaatgcaccacatcggcccactgtgtaaggcagtctgttcaggaatgggggcacatctgtgagtaaggcaaacatgatcgggctcatcttctaggagtgagagacagtcactaaccaggaaataagtcaagcagaaagcatggtggaaggccataaggaagagcgcagcaaagttgctcagggcagagcagagaggccccttcgcacaaaggagataagggacgtctttctgaaaggtgatatttgagatgacttacaagaagacactagtggtgggactgagggtctagggtgtggtcagtctgcagagaagatagcaatagaaagctgagagatgagtgaacagccccctccctcaacaggaaaaatgggtgtggcccaactgcctagggttttatagagactttggacttaatgccaaagaagtcagttttgatagatgataatcctgacggcaaacattgtgttcctttcccatgtaacccgagcatcttgttgaagtttcctttaaaactgctgctttgctggcaggtaatggttgctagggaaagggagtttattttcttcagtggtatagccgctgatgttacccgtgcgcctgtaaataacctccgggctaagcaagactgagctcagtgagtcacagggaagcaaagcaaaccaaccaacacatgtgcttaaaaactagctccttttattttttttttagaaattatttgtgagtacactgtcgctgtctaaagacagatcagaagagggtaactagatcccattacagattgttgtgagccaccatgtggttgctgggaattgaactcaggacctctggaagagcagtcagtgctcttaaccatcgagacatctctccaacaccccctcccccccaaacaaaacaaaacaaaacaaaaccaactggctccttttgaaaacaagcatggctgatgcaggggatatcttt

SEQ ID NO: 1043 - DNA, 1200 bp, mus musculus
ttattattattattattattaatttcttttacccctggtttaaaaagctccagcaatgaaggtccgcataagctcgcacaagctccagaaataaagaatttgtggattcacgcaagcagacaagaagggctggagcagggcaggccatgagcgacggtggtgagctgggagcctggacagccctgactcccccacccactgcttggtctctcccctgctgactcctaggcagctgaattggaagccaacctggggctagggttgctggctcaaaaagaaagaataaatacaagaagggaaacggtggtagagtaaagccattgacagataaaagccccccgcccccagacatccgggttaagtatatcctgctctgcgcatccttcatttgttcccctcggtctccttaaagctgggagtttagtgtcccagatgtcttctgccttggcaacttggttgtgaggatagataacccttggatacaacttttccttgctgtgaggttgcataaaacatcagtggggatgggagcaaagggggtggaggacccccctggcctgtgcttttcacagctcacataaactatcttaaacatgtctggatggtttgtgtatgctcggcccagggagtggcagtattacaaggtatggccctgttgcagtaggtgtggccctgttaaaataggtgtgtcactgtgttggtgggctataagaccctcatcctagctgcctggaagtcagtcttccagtagcagccttcagatgaagatgtagaaccctcagctcctcctacaccattcctgcctagatgctgccctgcttccaccttgatgatgacggactgaacctctgaacctgtaagccagcccaattaaatgttgtcctttataagacttgccttggtcatggtatctgttcacagcagtaaaaccctaactaagacatatgtccttggcctttggttgtgaccatgaatggagactggccatggagacagattctcagtgcttgggctgtggccacagagtcagcgtttgaaatcccccagatctctatttgtcactaaggacacagtgagcaaaaccataatgaagaggccaggctacacatgccgtgacaaagcttccctcctgtctccctccatgcgaagtcccagatccacaggacccagtgacaaagcagctgtaagttttaggccttt

SEQ ID NO: 1044 - DNA, 1000 bp, mus musculus
agaacaataatcaattcccgatgcaaaattgccagtgtctaagcacataagggtggcagagcaactgaccctttacaactttgtccctttgccagaaccggaagcctgaagagccaggaaatgggacagccttccggggacaaacaggcagttctgtctctggggatgtgcttagcgctctttggtgcatatttcactgaaggtcctgttatcaggattcctgatgccatcacaggaaggagcctgaacacaacggaagcctaggaaacagatatcctagagctccagatgaacgtccccatgcctgctgtgctgtacagctgtgcctctaaaatctgagggtgggagctgttcaaggatacatcctggggtccctgtaccctagaatccagagcctggatcacacacacactgcaggctacaggaccaagaatgctctctggtcacaagccttttaggagaacttcgccatctcaaggctacatctggttggaaagattagagtaaataggtgaattaaataggatcggatccacgttgctgccagaggccatctgtggtctgggttgccagtggaaggcctgttgatggctgtgatccgtgctgccaccaaggatcaggttgatggccgtgactcgtgctgccaccagaaaccatatggaagtccatggtccgtgcttccaccagctgctatgggcaagggagcttcttttgaagtggcatcgatgactgcagactcataaaggagaatgagggacattgaaggctcctgtgacacaccccaccctccccaaaagaaatggtccacactggaagctattgagcagtattcttaaaaattgtgttaaggatgctgatgcgtagctcttcagttgatggcttccggtgggggtgggaaggacggttttctttaaggggttgacctactgggcgtttgaccatgctccagtgagtatatgggcaatataaattagacttggtggagttttttgttttcttt

SEQ ID NO: 1045 - DNA, 1000 bp, mus musculus
aatgtattgtgatgatggctatttttatgtcaacccaacatagctatagtccttttagaagaggaaacctcaactgagaaaatgccactatcaggtaagcctacagtacattttctttattgatgacctggaaaggcccaggctattgttgttgggaactattaagacaacactattgtcctgatctctgaattgggcctctcccccgaccccttgagaagaaaaagggggtcaaaagagggccacggacacaccactccgagaacaaccacagattgttccagccctaagtcagtgctggatgtcctgacctcaagatgtaccctgataccaccaagttcctgcttccctgtgtagttgccaaaagaaaaatttccactgccccatcgctcctgctgagaagtgcttcctcctttgcttgtgcatttccgctgccccattcctcctgctgaaaagtatttcctgtttgcttgtgaatttaagccttgaaccttgctaatacagtgagaccttgatgtgactcagactgcttccatgtgtcgttcattgcacaaggttctcatctctctctacccccccatttggttcttaggagaaggtccccttgagaccctcaaataactggacctgctagacgggtcatattgtatgtggtgccatcactgggtagtaatcctaggggtacataagaaaacaggctgatttccagagtggttgtacaagcttgcaatcccaccaacaatggaagagtgttcctctttctccacatcctcgccagcatctgctgttacctgagtttttgatcttagccattctgactggtgtgagatggaatctcagggttgttttgatttgcatttccctgatgattaaggatgctgaatattctttcaggagcttctcggccattcagtattgctcagttgagaattctttgttagaaaattggacatagtactaccggaggatccagcaatacctctcctgggcatatatccag

SEQ ID NO: 1046 - DNA, 1400 bp, mus musculus
catgactactctcctaatctgttggtcttgaaacaataattttttaatttttgtattgattctttgtgaatttcacagcttataacccaatcccactcatctccctgtccttctatatccactctctgcccttgcaacctcccacaacagaaaaaaataaaataagatttaaaacatgaaaatcttgtggaaaccgtggtgtgttatagtgtgccccacaatatacccttctatccacacatctttacttgcaaatgttcattgcagtgagtcattggtctggcttgaggcctctggctactgctacactatcaatactggatcttcacagagtcttggatagcccgaggttgccctgtgtcatggaaatcctgaagatttgaatctgcaagacctgccccttcacatgctccaacaaatcatagatggagatgttggggtgagccaactcaaagccttggatctggtcctgggaggtaactgatttgatcagtgcaccgactctcatgtgctcacaccactagggcaaactcagccagcaatcagggccaggtctactatactgcccagttcacgtgaagtgcagggcgaccagtcaggggtggggacagctctcccactctcatgatcttggatccagctgaccctcctacctcgccttatcctttctaccttacaaataaatgagagtcagtctatggttattttatttggctttgacaattacttggggtgggggtggggggctaatctacttttctaactgctggcctggctgcctccccagtggtgttccccagggacttgctgtttctcctggccacgtgatcacggtccatctccatttgtggagccttctcttctctttcctcttgcttcttcacccccaatcaggcaacttaaaacccacctacctcgccgggtagtggtggcacatgcctttaatcctagcacttggaaggccgaggcaggtgggtttctgagttcaaggccagcctggtctatacagagtgagttccaggatagccaagtctgtacagagaaaccctgtctcaaaaaaacaaacaaaaacaaaccaacaaaaaaagacaaaaaaacccacctatctctaatccctccagtaataggctgtagccaattttatttaaccaagagtttcaaattaaggagccaagtttgcacaacaaaaccttgtaaacctgagacctcactcccaggcctagacctttgattacagaatttagcaatctacaatctacaatacatagtcacaatctacaatacatagccacagagcaaacctcaacaatcccccttttttgtctaaataaaaaggctttttctcttacagtaataaacaacatactgtaggaacaattgtgaagtaattatgaaaatta

SEQ ID NO: 1047 - DNA, 1200 bp, mus musculus
ctatcttaatactgaaacttactcctcatttgaacattacatgtcctccaaatatctgtaagatacgggcttaggccctagtctaagctacactggaagatggctgagacattaggatgtaagtcctagggagaagtgcttgtgtcacaggtgctctcatagaagactgtgagactttggtctcttcaccccttagccatgtgctgagtgatcttactctactacatgactcccaccagaatgaactgccttgccacaaccctaagccataaggccaacaaaccaccagttgaaatctctaaagcacattaataatggcttaattggttcttcattttcattttctaacaaattatattggctctgggacctaaaaagttttaaggtgtctcattaggcatctaagtaaaccgtatgttgcagctaacatttctaaataatcaggggaaactgctgcactaagcaaatcaactgcaaagagctaatgtaacatgtagaaccaatctgtaggtggaaatttttacattttaggtcccaatttttaaaaaatgtaacggaagattgtttcaagtattgaaatctgaacttttagcctagttaggacattccatggattcaacaaaggaagacctttatgatgaaaaggctctgctccttctgatagaaggaaacagccatgtttaaaagtgatgcctgatcgaggggcagagaaagatttgatagaatgagtcagagacaggatatgctgaactctcatgagaacagacaggaaagagaggaaacttaaaataacagcacaggggcaggggttgttttacagagacgggctgcaggtgaagatggaacgggccaaagaatgaggagccaaaaaattagaacagattgccagagttagtacgaggccgtgcagagcaatccattctgaagctgagagaagcaggtccgttgaatcagtcagtttggagagtttgggccaaaacagctaagttgaatcagccagccacagttcagaaagagccagaaagggtgagcttattcagcagtaagcctccaagacaatcacatctagccaatgaaagatacatttacaggaaataaatgatcagtcatctaattctaccaaataatagatttgacctgaaagaatttaaataaggcttaagcaaaacaaagttgcttcaaaccctacaaaaaagttca

SEQ ID NO: 1048 - DNA, 1000 bp, mus musculus
atgggtaggggagtgggggtgggtgggtatgggggacttttggtatagcattggaaatgtaaatgagctaaatacctaataaaaagtggaaaaaaaaaagaaaaaaaaaaaaaagaaagcatacacacaacctctacacgttcaaaccaggaaaaatcccatcatggaaaaaggaaactggacataatgtctcacccacagctaagaagtgtttttgcaattatagctgctgagagaggggaaatcagttttcttcagcatagtgacactaaaaaaaataaaaataaaaataattgtaaaagatactgttaacaggaatctgaatggcaggaggaagacttgcagaacatcctctgcattgtgtcccagtaccagggaaagctgcaaataagagcctgtgagatggctcagcatgtaaagatgtttgccatctgacaaccttagactgattcttgggattcacatggtggaagtaaagaactgattcccctaaattgcccacttaagcatggtggcatatgtggatataaacacaaacacacacgcgcacgcacgcacacacattaaaaatttaaatagagtaccatcatctttaggcagttgacgctgaaattgtgtagatccattatcttttccttttttttttaatgtgagaaggggtttggaggtaacaggtgcacaggcacttaagcatttcatgtggagatcaaaagacaacctcgggtgtcaattcttgacttccagcctgtctgaaggtaggatctcttgttgatcacagatgcatacaccaggtaggctaacctgagcttccagtgatcctcatgtttctcattcccctcttggcataggtaccctgagacacagacttatgctaccagtatatccccgctttccataagttctgaggatctaactctgctcctcacacttgggtggtaaaaatatgttaatacctaaatattatataggaacacagttaatttactcttagattttcctt

SEQ ID NO: 1049 - DNA, 1000 bp, mus musculus
gtaaggaatgtttttgagtgggctgaagagatggctcagaagctaagagcaagtacacacacacacacaactagttcatgtgtaccacacacatgtaaggtacctacagacaccagatcccctggaactggaactcgagttataagctgtcttgagctgcctaatatgggtactgggaatcaaccccaggccctctacatgctcttaacctcttcgtcatctctccaggtccaaatctgagctgtcaagaaacgctggctgaacaacgcagcagaggtagcaaatccaacaggcccaacagccttgtttcaggcattaccacaagccacatgacacccacattggcaatccctgttctttgacgactgacctatgtattttcgtttcctttaagccaccttgtgataaaatttccctggtaacaaactacaggcttcccatcccagactagaaacacagcaggcatgggaagcaaatctgcactcatcggataaggagccaggacatgggggaggatgctgagcagcaaagtcctttcagttgctgctggccaggggtggttttcaagttccaaatattccatatcactgggctaaaaggaaccctgagatgagtaaaaccagcccccgtggtcccagtcccagtcccagtggcactgacagtcacagaggtagcaatccagaaggccacagactattccaggtcacacactgtacttgtcatttgtccataaaaaatattatacattcacacacacagagagagagggggggggagagggagagggagagggagagggagggagagggagagagagaaactgtgcagaagtcagaaatgttcataaactgacaagagtacctctcttaaatatataaaacttacacttgcactttgtgtgtgtgtgtactttcatgtgtgggggtgttcatgtatgtggaggccagataaccttggatgctattccctggtagtggtcctttttaactctgtattttta

SEQ ID NO: 1050 - DNA, 1200 bp, mus musculus
ttttttttaaagatttatttatttattatatgtaagtacattgtagctgtcttcagacactccagaagagggaatcagatctcgttacagatggttgtgagccaccatgtggttgctgggatttgaactctggaccttcggaagagcagtcgggtgctcttacccactgagccatctcaccagccctccttgaagttttttatcatcagtaagaagaccctattgggagagcaaaagaatggcaactttcctcagctagtgactggctgacaggaatgtgacctgttgagactctgaaatagtcagaacttttgtgaagtaaccgcggattgctcagtcaagcagaaattacctaaatataagaaagctcaccccctggctctctagctcacccgccgactctctagctcagtggcattcttgaaggcaaaatgaacatgccagcccagatacaggtgtatcatgccagggagcagaactgtggttgttgatttttactgatgtaatagttactttaagcaccagctcaaagggcttgtcttacttcagttaccttgaaactctctgaattgaccatcctaagatgaaaatatttagaggaaaatgtgttactagccatctgtttctgatataaaatataaaactaaacaaaaggacaagaaattggataaagcagaacatgtatgaggaaagcttgggaaatgagactctagagaatagggccttgaaaagcttccgcacattcctgggaacctcaaagacccagttgttttgtttttttttttgtttttttttttaaagatttatttatttattatatgtaagtacactgcagctgtcttcagacataccagaagagggcatcagctctcataacagatggttgtgagccaccatgtggttgctgggatttgaactcaggacctttggaagagcagccagtgctcttaaccactgagccatctctccagcccaaagacccagtttttgacagagttgggcatgctgagaaaatacctggttttcaagtctttttaagcccgtatattaccttaattcatgaaaaaaaagacaaaatccaacatcattttatgataaaaatattaaaaaatgttagttatgtaaggaatgtcctgcctagataacatttattttggacaaaagtggaaataaaatctctgatggttgtgaaatacctga

SEQ ID NO: 1051 - DNA, 1000 bp, mus musculus
cgcctaggtcaattctagccacagctgtgaacaactgtcccagcagatgtttaaagatggtgtctgtggcagaactaaactagctggagtgagctcagttctatcacccataggccacacacaggcccagtctaacactggcccaatgctgaacgtcactggctagcaaaacagaacccttagagctcctgcttctctgaatccgttcaacttctcagaccataatgaagagaagtagctgcatgcagaaacccactaggaaacaaaacaacaagcagccgaggctgcctgcgagagcagagaacagtccttactcactccacacacttggcctgaaggactgcggcagtcttagggcaacacatcaccgcagtcattttatttgttcgacaaatatttggtgctagggatgtggcttagtgactgaacatgtattcagcgtggtcacagccctgagttaatcttcaacaacaaaaattactacaacaaatatttaccaagtatctacatcaagctctgtcaagctttatgggagagtaaatggcagagtgacacatgcagcaggtgccggtctgtgaccttcggtctgtgaccttaggctagggaaacttgtcagagcacgactcagggcatgctctgcttcttttcatcccaggtgtcatctccccaccagttctgaggggatgaaggcagatgaggaggggaggaagacccagcaacagcaggtaccaggagggttcgggatgggctcaaaccttggtacttctgttctcctcattatcagatgaggacaagaaatgggaaggtgtcctgaggcaaatcaagtcggcctttcaagtcagcggaataaataaataaactaataagcataatagggctggagaaatggctcagtggttaagagtgccgactgctcttccgaaggtcatgagttcaaaccccagcaaccacatgatggctcacaaccatccgaaatgagatttgatgccctcttctgggt

SEQ ID NO: 1052 - DNA, 1000 bp, mus musculus; identical to SEQ ID NO: 1051

SEQ ID NO: 1053 - DNA, 1000 bp, mus musculus
aatgatatttaatatgacaactaacagtttgagttatctctatcagaaggaaaatagtaatgcaacagatgaattcatccttttctggcttcattaaaaacatgtacaagagctgtgcgccatcttccctgggaacccagcagaggccccaaaggtccccagaggactcttcactccgcagggcccctagaacagccagggccttgggatcactggtgaggggaaagcaacatcagctccaaaacattccggagggtcttgtgccagcaggagcagggacaaaggaaccccttctaaccagaggcctggatccattctagttggggccagctggtcgccatcttcccagcgaacccagcagagggcgccaaggtccccagaggactctccacacctcaggccccctagcacacccaggacctttgtatcccttgagagcacgtgggcagcagaagcaacagagcttcttggataaggtccctttgggccttcaccctaaaccaggagacagagctgagacccagaccccaggccaccttccttgcctgaggagagtccacctctagggagggctctgattccaggactcaggaagtggatctgagctggagacttctggatacctttcctgcaagaggagagcttgcctgaagagagtgctctgaccactgggactctcactgggtgagagttggactcccaggagtgctgacagagactaagagaatcacagtagaaacaagttccagccagagacagctagatcatctaacaccagagaagaacagatggtgaaagcaagcataagaacaatactaacagaaaccgataccactgggcatcatcagaacccagtacgcccaccacagcgagtcctggatactccaacacatccgaaaaacaagactcggatttaaaatcatatttcatgatggtggtagaggattttaagaagggcattaataactcacttaaagaaatacagaagaacacagtgaaa

SEQ ID NO: 1054 - DNA, 1000 bp, mus musculus
gttaatttatataatttggatattagccctctgatgaagtgctctacagtggagagggtgaaattgtactgtccacctcgagtggtggggcaggatatcaactagagggaggagattgctatcccactgtcaaaagatctatcttagaatttctcctgactgaaggaacaaaaatagagaagaaaatgatagaatggagatccagagaccagcccaaattgggttaaagctcaaggaggggccccagggcctgacacttttactgatgctgtggtgtgcttgcagacaggagcgtagcatgattggcttgcaagaagcccaacaagcagcagaaagattctgatgtaggtaactagcagccaaccaatggactgaagctggggacttctgtggttgaattggggataagctggaggaggagggcaaccccatgggaagaccagcaatctcaactaacctggaaccctgagaaccctcagacactgagccaccaaccaggcagaatacaatatgttatatgaggccaacaacacatatacagcagagactgctttatctgccctctgcccttggtgagaaagaatgcacctaaccctggagagacttgaggccccagggtgtgggtaggcttgctagggtggaggtatgtgggaggaactataggatggggagtgctcagggggcaggaagggtgggggataaagaatggactcttaaaaagaattaaagaatataaaaaataaaaatgaaaaaaaacccacaaataattcaatgtaatcactgtcagcagtgggctttgaagttagaaactagggatagatatgacactcaatgggtctatctcttagttactcttttctaaaataaaacctataatgtgaatgatcaaatgtgtcaaaaagtaaggaattatattgtttttcaactttaatgcatatctctatatatctgtgaattcataatgtatatttaaaatatagaatatattttaaaagtaata

SEQ ID NO: 1055 - DNA, 1200 bp, mus musculus
cagttttgttttgttttgtttttgacgtctgactattggctattcatattttgagacatcattccatctggataaatagaatatgactgacatgaaaaacataaagactttatcacattgaggccccaatctaccatttcaaaagcaagattagactgaatattatactgtaggaccctgaaaggcagcctagttccttgtccagaataggcttgaaaccttggtaaccccgaaaggacagaaggcattttgccatgctcctggacaacatgttcctgacagaaggccatagccctccatagctttgtggccatcagtcatacagggaaatcctaatcccctccataggtaaaggatgtgaccacaggtcatgtagcctcaagacagatctccatcttaatgacgtacctaaaggcctgaagggctcagccaattaagctttccttcccagacactcctccttgaaaaaagaatttaactcaggcctccctgaggactgatgtacagttttttctcatctaatttctgccatgacaaaaaaagccttaaaacactggattgcctcatttgattaggataggccatggggagcaatggggtacttctcctagatatctgggcatctaatctcctatggagggttctgtgtgtccccagtgaccaccaagccaagctagtagcagacaagccaaggattatcctcaaaggacacagccagatctcccccacttgtcctaagtcaccaggccagatcagtcttggggcccccagtctgttctcagctcttttgcagaatcctatggcacctgggtgtccagcagcctgagaattatatggccttgtcacagaccttcggacccccgagccatctctggttgtctcctggacttcagactgtgctcccccacctgcagaatggtgtttcacagcttccccatagtccaacacccccaatttaccagagtgggctaagagccatcaaactcccatgtccttcctttccaagtggcactagccttgtggtggggcagatgcaggaccacaacaaaccctacataattcaagaatcaatagcatcacaatttgtacaaaaggaaaaaggagggaaaagaagataagagatggaaggatattaaaaatttacgtttcacaaggaagcctgctcactactcagttttaccttatataaccatcaatatc

SEQ ID NO: 1056 - DNA, 1000 bp, mus musculus
tcaatggaaaagagaggccctgttctgaaatttcaagaatgggttctgctgaaatcatggcagacaagagagcttgaagagtggcatataaatggtaattttagggaagaatgttaataattttgtagaaatcaatatttaataaaacaggcataactttccagactcccaagaacactggtactgtaaaagtttcatactggttcttcctgccagttccatgctcacagaaataagagtcaaactcaaaatgtattcataaatcccttgtccagatatcttgactcttctctaattagatataacataaaagataccatttattctaacctatattctgtcacatagctagttacctgtgtgcatatagtatgcatccatctcattgccccattgtctcatcttcccagaaaatatctagtgcctggtactgacctagaatcttccaagcctcctagaagccccacctcccctttcttacgtaagatataggttatcaaagttattatcacctggaaccacatccatacagaaacaacatattttctctatattgtaaggtgcttatgtacaaaattttcatcacctttgcatattatataacaccatgtcaataccatacagaaaatacacataatattctttggaaattctacagaaattaagaggaagatgttatcaataaatgataaagaatggatctgttattgagttttaagaattaatataattcggattggaataaaaacttacaatggactatgtgtgcagagtcttgcccaacacccgcaagggtccacacgggactccccacgggaccctaagacctctggtgagtggatcacagtgcctgccccaatccaatcgcgcggaacttgagactgcggtacatagggaagcaggctacccgggcctgatctggggcacaagtcccttccgctcgactcgagactcgagccccgggctaccttgccagcagagtcttgcccaacacccgcaa

SEQ ID NO: 1057 - DNA, 1200 bp, mus musculus
tgatgttttatttatctacatttcaaatgttattccctttcctggtttcccctccggaaacccccccttccatcctctcttccactgcttctatgaggatgctcccccacccactcacccacccacccacccacccactcactcctgcctatccaccctgttattcccctacactgggccattgatctttcacaggaccaaggacgtctcctcatattgttgttcaacaaggccatcctctgctacatatgtggctggagccatggatttctccatgtgtactcttattccaaggcaatattgaagaatcaaactttacactaatgtgcttggcattgtgtccacacatacagtagatgttgtagctaacaggccaacaggagcaaactccctcactgtttattctcagagatatgggaatgggcaagaaaatacaagaggctgcaaagactagagtattccataatctgtgagtggggagtgtgaattcagtgattagtgtatgatcatggaaaagaaatgtccagaagaaagttcggtaagaccttaaatcaggaggggaactttgaagcaattcaaaggacacacaaatgagaaagaggatgtagtattgagagactgaactgaacatacattcagggtctgatggctaatagtgttattggagctaaaaaggtttgcagtctcattgggggaggaacagtgtcaaccggccagataccacagatatcgtggggaatgcatcaccaaccaaacagtacacatggagagacccatggctctggccacatatgtgacagaggaacactttgttggacatcagtgggaggaacagcccttgggcctgatgttgttcaatggctcagtgtaggcaatgccaaggcaggaaaatgggcataggttggtaggagaataccctcatagaggcagggtgagggggttgtcacaggggatttctgaaggggagaactggaaagggggccaggtggtggtgacgcacgactttgatcccagcacttgggaggcagaggcagtagaatttctgagttcgaggccagcctggtctacagagtgagttccaggacagccagggctatacagagaaaccctttctcgaagaaccaataaataaataaataaataaataaataaataaacaaacaaacaaacaaaataaaataaaagagaaaagaaaaaaga

SEQ ID NO: 1058 - DNA, 1400 bp, mus musculus
tccctttagctccttgggtactttctctagctccttcattgggggccctgtgatccatccaatagctgactgtgagcatccacttctgtgtttgctaagccctggcatagactatgccgggactttttagaatttaatgacaatcaagacacatcataccaaaacctatgagaaacaatgaaagcaatggtaagaagaaaatggatagctctaagagcccctataaagaaactccagagaacttaacattagcagcttgacagcacatctgaaagctcgagaacaaaaagaagcaaatacatccaagaggagtagacagcaggaaacaaactcagggctgaaatcaaccaagtggaaactaaaagaactatacaaagaataaaccaaaccaggagctggttctttgagaatatcaacaagatatataaacccttagccagacttactagagggcacagggacaacatcctaattaacaaaatcagaggggcttcctggccagcagagttgcctgacacgcgcaagggcccacacaggattccccacgggatcctaagacctctggtgagtggaacacagcgccggccccaatccaatcacgcggacctgagactgtggtacatagggaagcagactacccgggcctgacccgggacaaaagccccttccgctccactcgagccccaggcttcctggccagcggagttgcctgacacccgcaagggcccacacaggattccccacgggatcctaagacctctggtgagtggaacacagcgccggccccaatccaatcgcgtggaacctgagactgcggtacatagggaagcagactacccgggcctgaccggggcaaaagccccttccgctccactcgagtcccgggcttccttgccagcggagtcgcctgacacccacaagggcccacacaggattccccacgggatcctaagacctctagtgagtggaacacaacttctgccaggagtccggttcgaacaccagatatctgggtaccttccctgcaagaagagagctttcctgcagagaatactctacccactgaaaccaaggagagtgctaccctcccaggtctgcttatagaggctaacagagtcacctgaagaacaagctcttaacagtgacaactaaaacagctagcttcagagattaccagatggcgaaaggcaaacgtaagaatcctactaagagaaatcaagaccactcaccatcatcagaacacagcactcccaccccacctagtcctgggcaccccaacacaaccgaaaatctagacccagatttaaaaacatttttcatgatgatgatagaggacatcaagaaggactttcataagtcacttaaagaattacaggagagcactgctaaagagttacagg

SEQ ID NO: 1059 - DNA, 1000 bp, mus musculus
attagctgaccccctcagaaggacaggacacctggtacttgtctgccgtctcacttttgccttgggctcctcactctcttaggagtttggtaactgtaagtcaatagtcaatacttcttgaacctgagcaactgcaagcatgtttgtgattctgtctaatggctggggctgcaaagccaggcaagggctgtctcttggtccacagtaaactcgctaaggagattctcccacctctaccaccaacagatgccaagaaggagatcactctatccttcaagctctggccacactgctgccacggcccagcagagctgccgagcagagaggaaggcctgactgcagggcacagacctgaaaatccagggaagctcagtgaaagcccagcttcctggactgggacctgagaaccaaccgagggaggctcatttgaatgtatcctaagcgtcccagaaggaaaccacctctgcaatccggttttgacccacagccaatttgagccctgctgctccccctagcgggagaaggaagcagtgagctagagtttgaggatacacaaggatttgtaaacacttggaggctggctcaccccaagggaggactcatccatccctggcagggcaggatcctgagatccaccagggatgccatttcccttttatctttctctcctctgggatctggagagtgattgagataatttaccatttaatgtgggcagatggcttaattaggctcaatcgcaagacattcacagtggctctgagtgtgtgaatgactgggggcgggggtgggggtggataagaccagccagatgtgtcttcatcctctgccctgtcacccaggctggcccaaaggttccaggatagtcacagggtcattctgagtaggaatctagccttggtcagagcagctggacagcccctagctcatgcaacaggagattcctctggtttttttaaactcataactagttcttgtgatagcagcaacaaccaaagcc

SEQ ID NO: 1060 - DNA, 1600 bp, mus musculus
ttaaatttaaattttaggttttagaaggtccaaacgcagtcacaaccaagtgaggggacctagggttacctggtctgtgaaccaggaataactcagaagccacagctggagaagctcagccttagaaacgggtgagaggcagagcagagcagttgcaggcctggaaacagctgggagaaggggtagtggggaggggctaacagcagcagtcttgccctggggagaccctgggggcatcgggctgcacattcccacagggagtgagagacttgggcagagacctgactctactaggtggagagactagtcagcctggtcctccaggatacagggtaggacagatgtgactctcagaaaaccaacccctctgactgccccacgccagacccctgcagccctcagaaggtgagcatgtagattatgtggtaaattgccatatgttgtttgagctcactgagaagctgactctgaaagatccaagcatgtttgtctcatatcacagagctttggggggcaggggatgggtgtgctgcttgaagtttaatgataaaaataaataaaatatttttaaagtaaagaacagctatgcagagacatctgtatagtataaggctgttggcctgtgtgccggggctgttcctcagctagcccatctaagcttaactttgccattgcttcccgtttgccttttcttcttgggcaggtaatggagcgacaagcattgactcatcctgctagcctggcactgctcacccagcaactaaacactgagaacacagggacccacttccatagccagttgatccaatacgtgtgggctatcccaacagtctcagtttcccccaaggactcctccggggatggcaccccatctctgctacaggagggaaggaaagagcaaaacagccctagagtaaagacacacttgggaaatgctagaaggtgaaccatgtgcaacagaggatgccattgtgtaatcccaacatgtaaaaaggagaggctggaagctcagccagaggaggccatccaaaatgagaaagttcaatccggaacttcagttggctgtctcagttttcctagccactttttccctggagttgtgagcccttgattttctgacatcatctctgtttgctgctattgttcctgtgcctagaagcctcatccaaggggtcaatagcttttcctcagggggcttctgatagatattttgagtgaccaatttgatgatattctgctgtctatctatctacaccttgctactctttcaacttggcttactacgtaagtgataaattcactcattcaaaacaaagtacaagccgtagatacacacgcaccactcttacagaggacctgaatttggtccccaaaattcacatgagcaagttcacaactgcttttaactgcagatcccagaggatctgacacctttggccccatgcaaccacgtgcaagtatccacaaacacacaaccgcggacatccatataaataaaaatagggctgtgtgtggaggcacactctaaatgccaaggcttgggaggcagaggcaggtggatctctccgagttcccatgtttccactgctagaacaagggg

SEQ ID NO: 1061 - DNA, 1000 bp, mus musculus
ctatctatctatctatctatctatctatctatctatctatctatctatctatctatccatctatccatccatccatccatccatccatccatccatccatccatccatccatcgagagctaacccaatctgtaagttgtgttacgctagagaaccctgactaatacagttgtgaagcagtgctgggactcagttgtgaagcagtgctggggctcagttgtgaagcagtgctggggctcagtggtagagcacttgctgaacacggtgagagcctgtgttaaatccctagcattggaagaaacaacaacagtgattccatccactaacagtgtaagcaagcacacacatgctgtgccactggtagcaatttgcattatggaatatttatgtaagttggcagacattcacatccacagaatgcagcattccctgtaaaaataaaagtctgcaggagcaattcaaagttagaatgctctgaggtcaggcagagatctgaaataaagactccctgtggtggtctgaataggtatggccctcagagagccatgtgtttgaatgcttggcccacagggaatggcactcactattaagaggcatggccttgttggagtaggtgtggccttgatggaggaagtgtgtcactgtaggggtgaactttagggtctcctatgcttaagcaccatccagtgtggaattacagtctattgctggctgccttcaggtcaagatgtagaactctcagctcctccagcaccatgcctgcctgcatgctgccatgcttcctgccctgacaataatggattgaacctctgaactgtaagccagccccaattaaatgtcttttgtaagagttgcctggtcatggtgtctcttcacagcaatagaaaccctaactagaacactctcttctgtaatgcagatacctatgggcctatgtatattacccaacctcacagataatacattgtttttgaaaatcatcaggtattgtattcatggga

SEQ ID NO: 1062 - DNA, 1200 bp, mus musculus
caaaatacagcttcctggttgcatttttcccccctaagaaatattactttcaaaacataagataaataaatataaaacaacagtttttaaaaataggtttttatgaccctttctaggtgctacacaggccctgggtgggagaccacaccagagatgacccctgcctggtgccacacagcaggaaacaacactctgagagcacttctgagattaccccagccccccagaggcccccagcaatactaagatgagcaagcaaatggtgacaagatggaagagaaggagaagcagaaggatgtgggcacaatgaagcgaggcagagctggagactcgagggtattgagtaataacccgatatgatgccagtgatgccacctaaggccatggtaaggtcctggcctgtgctgtcactggggccaggtctaagtctgtggccctgcagcagcaggggtttggtaccactaaaggccaggtctaagctgacctggggccatgttgattgtctgagggctgtgtagaatccctttcctgggcatcattggtgagctggcctcaaggccaagagagcaagagagctggccccttcaccagcctggagtacttgggagaatggccccgcaccttgcttgggcagcacagtagagctggccctggttgtgggggttacaggtgagccagccaagagggcatgagaactgaagagctggcactgccccttgccggctgcagcacgtgatgacagcctgggcaggaccgacaagttcactccagtggtgtgggtgtgggagagctgctgggctgacctgctcagacacttctcaggcccagattcagggttttgagttggccaactcccaacatctaccccactgatgaactgctggattccacgaaggggctgattctacagatccaagaaacgataggatctccatgacacagggccaacaacgggctatccaggaggagtcccagtaaggcttcactattgataatgtagcaaaagccagagcctcaaaccggaccaatgattccttgcaatggaagtttgtaatgaaaacctgaagcaaaaagggtatattgtagaaaacgctgcgacacactacagcttccacaatgagatctattttttctttgggcgggggaggttgtaaaggcagggggtgggcatgaagggtcagcatgacaagtgggatttgc

SEQ ID NO: 1063 - DNA, 1000 bp, mus musculus
gcagtacacatatggtcatatgtgcagcagaacacagatggagacatgtacagaagtacacatatggtcacatgtgcagcagtacacagatggacacatgtacagcagtacccagatggacacatgtacagcaatacacatatggtcacatgtgcagcagaacacagatggagacatgtacagcagtacacatatggtcacatgtacagcagtacagagatggacacatgtacagcagtacccagatggacacatgtacagcagtacacagatggagacatgtgcagcagtacagagatggacacatgtacagcagtacacagatggacacatgtacagcagtacacagatggagacatgtgcagcagtacagagatggacacatgtacagcagtacacagatggacacatgtacagcagtacacagatagaaatgtaaatcagtacacagatggagacacattcagcaatatatagatggagacattgttgaatggttaaagagatgggaatagagccaggagggcaaagtaagaaagaaaatgtcctattgtgtgcaagaaatgcaaagatggaagattgtagttcttatttcccagaatgttacagacatatagaatcagcctgcagagatggtatgatgttgaaaatagtaaccgtcacttcagaggttttactacagagcagggataatcatgggtcgctggattagggagagtgcaaaagcatgcggcaacatttgttggttgtgatagggtgctgcacacatgaatccacagcagctgtgacagcatgaacaagacccgtggaaaatcaggccagctaaaattacagcacagacaggggaggctccctcatgaaacgccatctccgaagagctattggagaaatggacggctgctgtgggagggggagagctctctccaaggatgtgagcctgagactcgccctgtgctgcaggagatggccctgcacccatctcatgcatgtagcatcaagc

SEQ ID NO: 1064 - DNA, 1000 bp, mus musculus
aatctaagatgaccttaagtcacctaggttcagaccccaaaccagagctccactttagtgcaaaggcctctttccaataagcatttcctgggtcgctccatgtgaccttgccgttgatctcacgtcttggctctgtcctcagcatagtcacgctctgtcttttatgtcttccctccctaaatgctggtcgttcagggtcttgacttccatttcagatgagcttgttaaaattcttcacaaagacaaagattctgtcaggttttccttcagatccaagtagaatgtcccctgtgatgggcaggtgctaccttgggagctaccttggtctctccaccagtacccctactcccacatcaacacagacatgagggcagagaggccatagccccaaggagttggctcacgtggggtctggatcctcccccctacacttccagagctcaaggcactgataagactcttccatacttatcaactagaccatcatgggtctctccctcaccttcttctcttcttgaggactaataaagtacgggggtgtccatccttgggatttagagatggctgtgggcagcttttgagtataaactcataggatgaactgagttaatctacgcaggagtgaggctcctgtggtgtgggagaggccagacttatggggcaaagtagatgtgggtcaggatcaggaccaggctggatcatcctgaacttccacattctgacaagaaacccctcccgtttctaatttgcattgttagtcgtgaaaagtatttcaaggtgaaagctcggagcatattgtatcagactattcgtctaaatcgtgacttttgaacacgtaggtatggacggcttccgtgtccactcttggtccacagttcaccaacgcacagctgttgtggttgcctgcataagagcaagccagccaacattctagcacggaggaggaatgtgttctccagggtccactactagctacagaattacggacagtcgtttttgt

SEQ ID NO: 1065 - DNA, 1000 bp, mus musculus
atttcacagaaatgggcaacctgacatgatcaaaagaccaaagtgtgttacaagttctggctgcagtgtctagagattgtcctttctagccagctatttggacactaaatacttcatctgaaaggaagaagagttctctttatagaaggcaccaagcaaacaccccactaagtgcagagcataagagcagcagtgcctgatttgcagtatcaaaatctagactgtatttatgttgagttatatacagcaagaaaaagagaagggaacaatgttactcatgtcaagagatcaactgtatcaatttctggtttgaggatttttaactggaaatgataaacagtcacactcatttgtgcttttatataagaaacaggacacaggtcaaaatcaatacgtccaaaggcatgtaaagcaatgtttaaaagaaatattaattttattattaataatacattaatatttattattaaataagcaatattagaccctttaatagatatttgtaggagcaatttatttacgttgcttctaaagacaacacatatgaagttttcttatccaagaaaagttgataatctgttctaggtgaattaattgggctttcatacaagtatcatcagctggaaaagtataccggaaatctagttcacacataaaaacaaagacacacacacaaattcctttctgtgactagcgacctcatcttgcaataatatccaagttttcaaatattggacaaggtccatttctatcagttatgcagtttttcccccttatagctccaaattcaatccagggccagacatatgatagcagacactctgctggtctgctctacctgatcctttgactcttgcagacttggtttttgcccggtaactcggaatgaccttgacatccgagggtaactcagttgatctttctagtgtaacttctttgacttcctggaataacctcctctaagtcctgaaatttcagatgtgcatcaccacatcattaa

SEQ ID NO: 1066 - DNA, 1200 bp, mus musculus
ttaagtctatatagaatataaaatagagatacaaaactatatagtatttctaaagtttataagaaataaatagaatatatcacaattatttgaatatttcatacttgtagtctgatgttatgaaaaatgataaaattctgttaatattctttttatttgtttatatctagaatgctttatttatttacattccaaatgttgcctcctttcatggtccccacttcaagagttctttacccattccctacatctttgcctgtgggagggtactttttcacttacctatacccacctgcacaacctccacactcacttcccaatccacccaccgacccttacctcactccccctcatgcaactgtagtccctgaagcatcaggtctttataggattaggtgcatcttctaccactgaagccagacaaggcagtcctctgttgcatatgtgacgaaggcacatgtgtgttctttgattaatggcttagcctctgggagcacccaggggaccaggttaattaatattgttagtattcctatggcgttgccatttccttcagttccttcaatccttccccgaactcttccactggggtcccagaccttggtccaatagttagctgttaagtaactgcacctatctcagtcagctactggtagaccctctcagaggagcaccatgctgggctcctgtctgtaagcacaacatggaattagtaatcgtgtcagggtttgttgcctgcccattgaatggaacccaagacacattagtcactggatggcctttctttcaatgtctgctccattttgtccctgcatttcctttaggcagaaataactctgggaaaaatattttgaaggtgtattactgactttatcactccactggggaccctgcctgtctactggaggtagggtcctcaggttccatctccccagcattggacatttcacccaatcttgcataccagatctctgggtttttctagaggttcgcctcctcccacctagcttcatattttccttcattcacctgtccctctgggatcctctacattctccacctataactgatcagagggctaatatcggaaatatgtaaagaactcaagatattagactaaaaaaaaaaagcccaaagaatccaatttaaaaatgaggtacagtgctaagcagactattctcaacagagaaatcttgaatg

SEQ ID NO: 1067 - DNA, 1000 bp, mus musculus
ttgtttacatttcaaatataatccccttttccaggtttccttctacaaactccctaccccatgccccttcctccatgcttctatgagagtgctcccccacccatcgcctcagcaccctagcattcccctatcctggataattgagcctccacaggaccaagggtctcccttcccactggtgcctgataagtcactcctctgctacatatgcaactggagccatgggtttatccatgtatacgcttttgatggtggtttagtcccagggagttctgggtggtccagttagctgatattgttctttatacggggttgcaaccccttcaattccttcagtccttcccctagctcttccattggggtccacgtctatgtttggctgtgagtatctatgtctgtattgataaggtgctggcataacctctcagagaacagccataccaggctcttattggtgaacgcttcttggcattaacaacagtgtttgatttggtgtctggggataggatggatccctaggtagggcagtctctggatggccttccctctagtctctattccattatttttttttttgcccctgcctttcctttggacaggaacacaggaacatttccggattaagaattttgagatgtgtggtgtccccctcaaatgggggcatgcctacctacagaggtggtctctacaggttgtatttcttctttgttgtgtattttgactaaagtcattaccattgggtcctgcaagtcttttacttctgtggagtttgggagtttttctctatagagtcttctgatattttttggttatgttgctatttcctgggtactctatattaccccacttgacaataacacatgtcaatttgtttcttctattcagggaacttatttgagaatttggagtaacttctggatgtggttaatcaagggcttgggtggtgaactgacacttagggaatttagagtagcttaaaggtttttgtgtctggatgtgt

SEQ ID NO: 1068 - DNA, 1600 bp, mus musculus
tctttcaatgttgaggaacacgacaaagatgggaatatagtggttcttgagggtaaaggaaagaatctagctttgcaagataaaagtgcaaggtggaatttcaagacatgatggagaacactgaatatctatgatggttttgttacattaacacagcgctgaaatgttgcatcttcatattaaatgccagtgatacttgcagactttttaccagccattactcttcatttcttggtggttcttgttctcttctggtacctcctcctttttctcctcttcctcttcctcttcctcttcctcttcctcttcctcttcctccttatcctcttcctttttaaattgttttatttatttacattccaaatgttgcccccttcctggtcccccttcaaatagttcttaacctcatttcccctcctctttgccactcaaatggtgctccctcacccattcacccaacaaccacccacccaccctcccttgtctcaaagacccactcccaactcacatcccttcgcccacatccacttaccctggaacatacagacactacagtattaggtgtatcctctcccactgaggccagacaaggtatttctctactacatatatgccagggaccacagaacagtccatgtatctttggttggttccttagtctctgggagttcctaggggttcaggttagttgatagtgttagtattcctattgggttaccattgtcttcagctcctaatccttcccctaattcttctgcgggggtcccaacatcaacctaattcttggctgtacatatgtgcatctgtctcagtcagttgctttcctcagtcagaggaaagcatgctagagcattctgtctgcaagcacaacatggcatcagtaataatgtcaggttttggtgcctgctcatgggatgaatcccatgttgagctgatctttggatggccttttcttctatctctgcacagtacttttctctgcattgcctttaaacaggaataattctgggtcaatgattttgaaggcagtttggtgaccccatccctcaacctggaggtggtctcttcaggttgtatcttcccagtcttgggcattttggctaaagcaatcctcatatcccagatttctggaacattatagaggatccctctgtccccaaccttcctctgagctgcatatttcaatttattcccttgatcctctggacttgtatcttcacatacctgattctaccctttttcccttccccaccctcctgccaccttgttctctccctccctcttcttcccttcgttaatttgtagccacttctaagtggaactgaagcatgctaacttgggccttcttgttaaatttcttattgtctgtaggttttatcatgggtattttgaactttttgactaatatacagttattagtgagtacataacatgcatttccttttgagtctaggatacctctctttgaatgactacgataatactttgttctcatggtttatttgaaattcctttaacatataaaaataatttacctttaaaaattgtgtaatttcactacaactgtatacttttatcttgtaatttatgaatcaactct

SEQ ID NO: 1069 - DNA, 1000 bp, mus musculus
atgataacatgatccagggcacaaactttgctgtcagtcccatggtccccagtggactctccactacccagacaccctagcatgcccaggatcttagttaggatcatgggtgaatggaacacaatatctgttccaacataactgggagtgcttgggaccagtaggagcagggacacaggagccctgcctgaccagtggctccagttcattcaggtcaacattggtctaacttggtttcaaactcagcaaacagccctacggtcccccaaggaggttccacttccatgtgtccaaacatgtccaggatcttaggatcctaggatcccaggagcttggtaacaccaggatctcagggtttcagaggaagctttattgccaagaactctgatatacccacaatctcaggatcactggatcacagaataacaggatctcagagaaagcaagactctgaggagatctgaatcaactgggattacgggatgaataggatctgatcagctatatcgagggcagagagtacttgagataatcagatggaggggtgcaagcataagaacagaagcaacagaaactaaggttactgggcataatcagaacccaactctcccacaacagcaagtcctggatataccatcaaaccagaaaagcaagatatgaatctaaagtcacttctcatgatgatgatggaggactataagaaggacgtgattaattcccttaacaaaacacaggagaacacaggtatataggtagaagctctcaaagaggaaacacaaaatcccttaaagaattatagtaaaaaaacattcaaacaggtgaaagaattgaacaaaactcaagggtcaggtgttggtggtacacatctttaatcccagcacttgggtggcagaggtaggcggatttctgagttcaaggtcagcctggtctacaaagtgagttccaggacagccagaactatacagagaaaacctgtctcaaaaacaaaacaaaacaaaac

SEQ ID NO: 1070 - DNA, 1000 bp, mus musculus
tctagtacttttttttcaggtcaataacctctgcatcaaagagtcttggtgtggtttgtagtactaggtataggttccctcatattgaatgtttctttctttttttttttattacgtattttcctcaattacatttccaatgctatcccaaaagtcccccacaccctcccccccactcccctacccacccattcccattttttggccctggcattcccctgtactggggcatataaagtttgtgtgtccgatgggcctctctttccagtgatggctgaccaggccatcttttgatacatatgtagctagagtcaagagctactgggtactggttagttcataatattgcacctacagggttgcagatatctttagctccttggatactttctctagctcctccattgggggccctgtgatccatccaatagttgactgtgagcatccagttctgtgtttgctaggccccggtctagtttcacaagaggcagctatagacagtggtttcatttccctgaagctattgtactgctggggacttttttcactttagtccttgttgtagtttgcaagctttacagttcattatgattcttgatttttttcttcttctccttgacagtttgcacagtatattccaagaggatgagatccaatttccaggtatgaagcttccaggaaagaagcttccagggcagttacttcttcatttctccaaattctgtgtcaaaattttaccagatacaaccagctctatctgcaatcccagaaggctgttgacatcagggacaacctgcttaacctgcaaccccagagccctgcatctataaggcacgagaccaaaggctagcataagaacataatcaatattagccagggctatgtgacacacgcagaacccagcctccctacaactgcaagctttcatatccttacacactcaaatcataagaaaatgaccctaaatctactattaagaagattctagaggcctttacag

SEQ ID NO: 1071 - DNA, 1000 bp, mus musculus
aaccagtaccccggagctcttgtttttagctgcatatgtatcaaaagatggcctagtaggccatcactgcaaagagaggcccattggacttgcaaactttatatgtcccagtacaggggaacgccagggccaaaaagtgggagtgggtgggtaggggggtgggagggtgggtatgggggacttttgctatagcattggaaatgtaaatgagctaaatacctaataaaaaattaaaaaaagaataactggtgtgtgtgtgtgtgtgtgtgtgtgtgtgtgtgtgtgtgtgtgtgtgtgtgtgttgtgtgttttcttttttttttttaatttttaaaaaattaatcgttcctttccttttttttactggatacatttttaacttacatttcaaatgttatccccttttctggttttacatctcaaatgatattccatttcccctttacccctccacaagtcccccatctcacaacctctctcctccctctcctccatccccttctacccatccaccatctcctgccccactcctctagcatccccctacactgggacatccaacctcttctacaaggccaagggcctcccctcccattgatttgagacaaggccattctctgctccctatgtatctggagccatggatcccttcctgtgcactccgtggttggtggtctagtccctggaagcactgggtagtccatccagttgatattattcttccaatggctttacaatccccctcggctcctccagtccttctgccagctccacaaccagggtccctgagctcggtctggtggttggatctaagcatccacatttgcattggtcagttgctggctgaacctatttgctgatctgagatggcccttgggcaggtgcacatgtgcaaccagccaggaacttaaagagctgtagacaaaactacacagtacaatggttcatccaaggaacacaggtaagaactctggaatgagagtactctgtgatttcagca

SEQ ID NO: 1072 - DNA, 1000 bp, mus musculus
attttgaagagcaggagaatatattttaacaagaatgttattgactgattagaacaccacttacaaattaaattataaacagaaatcaatataataaaacagatataaaaggcatttaagggccaggcagtgatggtgcacacctttaatcccagcacttggaaggcagaggcaggcaggtttctgagttcgaggccagcctagtctacaacgtgagttccaggacagccagggctacacagagaaaccctgtattgaaaaaaacaaaaccaaaaccaaaacaaacaaacaaaaaaaaaggcatttaaggaatggggaaagactggcagtaatgaatttgtgttaaggtaaatttgtgtttgttttcaatttttatttagatacaaaataattttaaacagttgcaagctgttttgagattgaatgcaaatctgcaagatactatgttaatgattcactcttttcttggtaaaacttatactattctttaaaggttacgatttgcctttgtagctacatttttatattcgttcaacaaaacattctaggaaatgttatgtaattataattattaatccataggtagctacaatatttcaatctttttctgtaaaaatgaccaaaaattagacttcagttctggatcttctcagccctgtgctcccaaacataagattcttcctctgccattgtctaggtctggactcgcctctcagaccagaggagatttgcaggaccccaagagtatcctagctcctgtgggaacctgtggcagtctcagaactaaccagctcagaaccctgccaaaaaacccatcctatttggatacattggacactccagctgaatctgcctaagccacagcaaacatagtaggataccctgatatccatgtctggaccactgcttcccccatcaggatcatccaaccaactgaaggaaaaaacagatgcctaaagggacaggataaaaacataatcaacaagttccagggcaatat

SEQ ID NO: 1073 - DNA, 1600 bp, mus musculus
aaagaaatgcttcatgcactactacacaataagtagcaggattatataaaacagtatattaatcttaaaattgtcaaattgaatgttacacattatgaaacacagtaaaatatgttttttgttttatattgacataagaaacaagtttactttaactcatgtaaagattctatgataaataatataaagtattaaatgaaataataaataagggaaattcaattatcacaatatacatttattatgtgacagcaaagaatttgctaccaaatattagattggagatagaaagtattgaaaagcgtctctgaccctaaaatgaaacaatagtgaactgctggattcagaagaggtaactccccaaagacacctcatcctgtgatgctttattataataagtagtcaccagatttcaaaactacatctgattttttttctggtaggtttttaactgttatatcattaaagcagaaaaagttttgtactccatctgtaacataataggccagatgttgggcagatagataaaaaagcatgtgtcatctacctttttagaagacagtaagtaatttgggtagaaatcacctagaactcaacttaatcatattatattttaatataataaaatatgttaaataaaaactgtaacacttccggtctggacctttacctgcatccttggcatatctgcatggctacccctagacaccaaagcttgcctgtctcccaggaggtctgccttaaccaaggacgcaggagaactactctaaccaggacacaggagtcttgctcaaaccacagacaacactgcttgcctcccaggatgcctcttctaactcagcaccatctgcctccaaggattcctgctataatctgagacaaccaggccagttaacatcataaataaccagatggcaaaggcaagtacaagaacataagcaacagaatccagtgtaatttgacaccaacagaacccagttctaccacagcaaattgaagatatgttaaggcacctgaaaagcaggattcagacctaaaatcccacataataaagatgatagaatcatttaaggaggatttaaataactcccctaaagaaacacacacacacaaatgcaatcaaacaagtgagggaagtgaaaaaagggtcccagagattaaacaacaaagaaaacataaatacatgcaaccctggtgatggacaacttaggaaagataacaggaactacagatataagcatcataaacagaatacaagagatagaagtaagaatctcaggtgtagaagataccatagaaaatattgacacatcagtcaaagaaaatgcaaagtgtacaaagttcctaactgaaaacatccaggaaagttgagacacaatgaaaagaccaaacctatgagtaataggaacagaaaagggtaaagattgctggttcaaaagactagaaaacatcttcaacaaaattataagaaaactctgctaacataaagaaagaaatggccataaatgcacaagaagcaaacagaacaccaaatagattggaccagaaaaaaaaatcttaccaccacatattaatcaaaacactaaaggtacaggacaaa

SEQ ID NO: 1074 - DNA, 1000 bp, mus musculus
cattatgctgctcatttcttccaaatatttccttcttccttctttccttctctccttcctaccttctctttgcctttcctgctcccttctttcttctttgtccccaaagttcctctttctatcattctaggatctctaacacacacacatactggttctgacataaacaaatctcagtttcttttgacctattcttctgagaaggaacatctagtagtatttattagattgtatgggtggagacagcaaagaggctcagagagtcaagagactaaatggaaatgggatgggggaggttcccaggactcaatgtgggtgaccttaggtaaagtgcccaacaatgaggatatggaacctgaagagaccacctccagtagaggcatagggacaccaacctacctaaaaattttcaacccaaaattgttcctgtctagaagaaattcagggacaaaagtggagcacacactggaaaaattgaccaaagaatgactggcccaacttagagtccatcctatggacaagtagtaaccccttatgtgattactgttgttcttacagagaggagcctaacatggctgtcctctgagatgctctttcagcagctgacagacagatacaaatatagccaagcactggactgagttcagggaccctgtggaatagttagaagaaggattgaagaaactgaaggggatggtaacttcacaggaagaccaacagtgtcaactaacctggaaccttagaagttcccagagactgagctaccagtcatagagtattcacatgctgtagcacagtaatgtcttctctggcctcagtggagacttgatgccccagaaagggaggataccagttggcagaggggggggtcaccctctcagaagcaaagggagggaggttgagggaagaactctgtaaggggaaacttgtaaggaggccaatatttggcatataaataaacaaaataattattttttaaaagttcctgtaataatttaaa

SEQ ID NO: 1075 - DNA, 1000 bp, mus musculus
gtttgccatactgctgttccctaactagatctcctttcagtttgtcccaagaggcgacagttaacgaccctgagcaagcataccatggtgccacacggtctatctccctgacaaatccctctatagtcttagtggcgatttttaggccacactgcttcaggaccgaccttaacgccactattacaaatgagagatactgccgctgtccaggcctaaccgctactgaaactggtcgctgtccaggccttaccgcaactgaaactggtcactgtccaggcgctgttcaggcctgaccgcgactaagaaccagtcagcagttccagtggtggaagcaaaatgaaaccgaaaggaaaagtgcaatcactgtgcaaacaatcaaaagggcatctaactctggagaaatttcaagactgtacgtaccttacagagccttacgtgttcctcagttctggttctgccccgtgaatgagggatctcccttgcaccagtgtgatggtataaagttcccgggttcctcggcgccacttattgccctggcttttgtccccgccagcaagaacacactcaggacaactggaatcttctgtggcaaagctttattgcttacttctcaggaagaccccgaacccagaaaatggagtcgcttatatagccctcagccatggcgtttcagcacctgatgtggcgtgacagctcctcattcgttgctcacccatcaccccactactatgccccgagatgggcagtgcctaggagtgagttcactctcgcacctgtgtacaaggcttgtttactagttaggcacagcggaggccagtgccatcttataatggcgattgctcacggcacgcatggctctccacagcgattgctctcagcacacacagctctccacagcgattgctcgccgcaggcacagctctccacaaataatgggaacagattcaatgaatcaaaggtctgttgtgaggttcaagtttgccacccacaatatgatgct

SEQ ID NO: 1076 - DNA, 1000 bp, mus musculus
tgttaaaagttctttgaggagtcactttatcgtaaatatgtgataaccacttatacaaatactctgctggatcaggaggggagtaggggtagggaggatgggtgggtggccatgagaatgaatggaaatctgcaactgactgggtggaggttggggaaggcatcactaggaagagacagagacccaggataggggacgtgccaagaatcaatgagactcataccactgtagatatgaactggggaggttgcctcctatggccaggcaggaatcctggtggagtgatagggctaccaacctaaccataaaactttcgacccaaaacttatcctgtctacaagaaataccgggattaggatggagcagagactgtgggaacggtcaaccaataactggccaacttgagacccatcctatgaagaagcaccaattcctgacactattaatgatactgttatgtttgcaaacaggagccttgcaaggctgtcctctgagaagtcccactcagcagctgactcagacaattgcaaacacccacagccaaagagtagttggagtttagggactcttattgaaaacaagaggaagaaactccataggaagactaaaagaatcaactaacctggaccctttagagactgaagcaccaagaaaagaaaacacacaggctggagctatgcctccatgcacgcacacatctagcagatgtgcagttgttcttcatgtggatctcaaacaactagagtgggagctatcccaaatgctgtagcctatatatggggtatgttctagctgggctgcctcatctggcttcagtgacagaggaaatgcctagcctcccagagacttgaagtactagaatgggaggagaccgagtgggcccccaccccctcagaggagaagtggagggggaaagggagaaggattgtgggaggggttgaacaggaagggggcagtgagtgggatgcagaatgaatgaatggataaataaataaataag

SEQ ID NO: 1077 - DNA, 1200 bp, mus musculus
cccatgtatcctatcagataaccatggactaaagctagacttcaataacaacaaaaacaacagaaaacatacatacccatggaaactgaacaaccttgaactattcaaggataacttggccaggaaagaaataagaaagaaattaaagacttcttagaatttaactaaaactaaggcacaacatacctaaacttaccggacacaatgaaaacagggctaagataaaaattaagcactaagtgcccatgtgctacggactggcctcagttggcccctcaatccacaggagaatcagagtcctggtacaggtgggcaggggttggagtcggtgaaaaggtgacaaacagatgtggacacaagggagtgctgtatctgaatattatttctcaaagcaagcaccagacttataatacagaagaaaaacaagaaagctgggcgaatacattagccaaggtacatagagatgcatgatggttctttacacaaaataaagaaaatgcacacataaaaagctagtgggagccaagcagtgtttacaactgagataggaacagccctatctaagatcagctaaacattggagccaggtgaaagatctgatggaatgctagtctattgttaaacccaccactaggagttccttagtaaatacctaattatgcaattcctccaggcctagtgaaaaacatgcaccaggggaattccattctactaaccctttcatgaataatacaatactgtagttcctccttaaaccccaacccaccttctttctactattatgtaatgtaggctgccgttcatatctgtaatgagaattctaagtttactattttgaactagccctgagaatacttgctcctattcggcaaactgagatgcctgattactgtcaacactggggcatttcctctggatgaataacattcttacaaaattccaagcccagggtcagctcaaggactgcttaggacattggtgaaagccagaccgtagacttcaacctgatttaggtattagtaaaatcatttcttggaatcacctataataaaacaatgctgaaagaaagcgtacagattcgtatacctactaatgcagggacaggtttggagcgttcctgccaaggttccaggagagtttgtttccatgaaactctttgcctctggactgcatccaagcctttaggtctgtcacacagtt

SEQ ID NO: 1078 - DNA, 1200 bp, mus musculus
tcacttgtttggatatgttttcctgtttttacataaggacttctacctgtttggttttgttttcctgtttttctttaaggacttgtaactctttagcagtgttctcctgtatttctttaagtgagttattaaagtccttcttaatgtcctctaccatcatcatgagatatgcttttaaatccgggtctagcttttcagttgtgttggggtgcccaggactaggtggggtgggagtgctgcgttctaatgatggtgggtggtcttgatttctgttagtaggattcttacgtttgctttttgccatctggtattctctggaactagttgttaagttgtctctggttagagcttgttcctcaggtgattatgttcgcctctatcagcagacctgggagactagctctatccttagtttcagtggtcagagtactctctgcaggcaagctctcttcttgcagggaaggtgctcagatatctggtgtttgaacctgcctcctggtagaagttgtgttccactcacagaggtcttaggatcccgtggcagatattgtgtggtccttgtgggtgtccggagactccccagatcagggaccccggtgctgcagtgggccagaagggacttgagccccagatcaggccaggttatctgctttcttaattaatgcagtctcaacttctgtgcgattggattggagcaggtgctgtgttccagtcaccagaggtcttaggatcccgtggcagatattgtgtgggtccttgtgggtgtccggaggctccccgggccagggaccccggtgctgcagactttccttcaaaatattataactggtttcttttttctttcatgttgtgatattagaagagttagagagagactaaatgtttgcatataatataattctctttcaatactacttaacgacaataatagaatacatatgttagtaactttttgttttagaaaagatttggaaatataaaattcttgaaacaacagtagacaggtagaagtccttatagaaacaggtagaagtccttatagaaaaacaggaaaacacatccaaacagatgatggaaatgaacaaaaccatactagacctaaaaagggaagtaaacacaataaagaaaacccaaagtgaggcaacgctggagatagaaaacctaggaaagaaatctggaaccatagatgctagcatcagc

SEQ ID NO: 1079 - DNA, 1000 bp, mus musculus
tttaaagctgaattactccagagtactaaacaatgaaagtgagtactcactggggctgcaaaatgtagctagtgcaggaagttgaatttgcctgagacttactaagatgttgcaattttatctttctgtctaaacctgtatccaactgatataaatgtccaatattggaggtgcatctaaggattgcattgggctgtcagatgaaagtcaacggagagaactcacttctgggtttgcttacaatttgagaagtagtacttgacagcagtgaataccactgctctcctgagacctagtgaagtgaaggggcaatagtaacaaagaaacaatgagcagttcttcaaccagatgaaagagaattccatttatgtttatcatagagtctcaatagtggttctacaatgtttactgtctgtaagttacatgggaccttagaggatagtgtttcagatcaatgaacatgaaatttcataggcttgaatattataaaatagaattagtaccagttgtatgtaaaataatttgaaagtatttttaattgaatttttaattggatattttctttatttatatttcaaatgttatcccctttcttggttttccctctgaaaaacaccctcctcctttcccctaaccacctccccctgctcaccaacccacccactcctgcttcctggcgctggcattccccacactggggcatagagccttgataggaaaaagggcttctcctccaattgatgtctgagtaggccatccactgctgcatatgcgtctggagctgtgagtcccaccatgtgtgctctttgattggtggtatagtctctgggatttctgggggtactggctagaactcctggcaacatgtacttataagaaaaatgacttgatatacatagaattatgcgtaattttgagacaatgactgttgctatcctgaagaattaatggctaacaggaactttcaaaagtcttcatagatttggggaaatgcagtaga

SEQ ID NO: 1080 - DNA, 1200 bp, mus musculus
ccttttctactttacatgtaagataaaaaatgttattaaattattaagccacattacctcttttgatttgaagaccattgtacctatccttttctccaaaattttccattttggttctattttacatagatcttttaaaatatagtttgcattattctttaagagtttcaaaccattttgatcatatatatcccaatctctcctttacattcaccgtccattgggatccctgtttgtgtgtgttgctgtttccgtattggtggaatagaagtggtataactaataatacactcagtatggtcaccaaattactcattaaatattataattcacagtggcccacaaaaatacaacaagggaaagaagataatattatattttcacttgcaggagcttagttattatggaatatttaagctaaattagcttcgatgttgccttacttttttttccttttttattagatattttcttcatttacgtttccagtgctatcccaaaagtcccccataccctcccctctactctcctctgcccccacgtccacctcttggccctggcattcccctgtatatcccctgcatataaagtttgcacaaccaatgggcctctctttccactaatggccgactaggccatcttctgctacatatgcagctagagacatgagctcggggatactggttagttcatattgttgttccaactatagggttgcagatccctttagctccttgggtactttctctaggtcctacattgggggccctgtgatccatccaatagctgactgtgagcatccacttctgtgtttgctaagccccggcatagtctcacaagagagagttatatcaaggtcctttcagcaaaatcttgctagtgtatgcaatggtgtcagtgtttggaagctgattatgagatggatccccagatatggcagtctctagatggtccatccttttgtctcagctccaaaatttgtctctgtaactccttccatgggtgtttgttcccatttctaagaaggggcaaagtgtccacactttggtcttcattcttctttttttttttttccattttttattaggtatttaactcatttacatttccaatgctataccaaaagtcccccatatccacccacccccactcccctgcccacccactccccctttttggccctggtattcccctgtactg

SEQ ID NO: 1081 - DNA, 1200 bp, mus musculus
gtcactacaagttgtggagagagacaagcagtctgaaatcttctgatgtaacttgacaaaggataggcgattgatcaagaagctatctataggagcagcagagattaaagccccatgtgctttctaagaacacaactgtccctagaaaaatccctcaagctgacatttttctcagaaggcagataaccatctacttgagactcacatctggaatgaagctcagcacctatcagtctataaaatgaaactagaaattaaaatctgaaatataaattaagaagtacaagaagcaggaaacacatctccaaacagggttaggagacattacctttagaacaaaatctgatagagacaacaggaaagaaaagcttccagccaacaatccatgtgaacccagatcaaagaccatttaatagaacataggcaaaccaattacaaacatacatagggtgaatatttcataaccaattttcattaaactgggaatggagggaaacttgagaaaaactgatatattgcttttacagtacaaggagtgaaggacaccacaagcaaatctacaaaatcaactaatcagggcactgaagagtgcacagtgattatatccccagccagggaacttgcataaagatactgaaatatattaatggtcattagtgaagctgtagaaagtgggaaacaggccattgagaaagagcacatgccatagagtttccattgtatggtatccactgctgaagataggacggtaccttgggtactttctctagctctcaatgggatgagaggcccttagtcttgcatagattatatgctccagtacaggtgaatgccacagccaggaagcagtagtgggtgggttaggcagcagggcggggatggggaatgggtataggggacattcgaaaaggaaactaggaaagggaatagcttttgaaatgtaaatgaagaaaatatctgattaaaaagaaaagataggacagtaccttcctgaagagtggacagtgcaattaacacaccatcctagaaagcatgtagctttacatataaatagtgaatctttcctccatttgtatttgaaattacacagatatcagttttaagtaaatgttgaccctaacagcacaacagacacagtatagaagagattttgaccccgtattttaaaacaatatctaaaatgcaagacagaaagcattt

SEQ ID NO: 1082 - DNA, 1600 bp, mus musculus
tttaatggcatgactccagaggaaggattctgtagagatttacaagcccttttcttcaacaaaagacttcctagtaacatgagatgctctgtcactgtgtttgactataatgcatatgtaacataatccacaaatgcttgttgccatttacaaacttgttcacataagttaacaagagcaacacaatcagtaaatgtaaaaatcaaaaaacttggcaatacaatattatgagtcctgtgctagaaagttatgcatactgtcagaaactatgcgttcaatatccgtaagtagttcattatgtaagcaaccaaatagaacaagatccagagaatctgagaattctttgataaaaacctgcctgcctctgtgcattttcggctaaagagaagagggagatagaacctgttgagaccacctccagtagattggcatggctcctggtggagggatggggccacccacccatctcaaaaatttttaacctagaaatgttcctgtccaaaggaagaacacacacaaaaattggaacagagattgaaggtagagccagatggaggctgccctacaatcatgtctgcaaacaccaaacccaacacttgctgtggtcaagaggtgcttgctaacaggaacctagtgtggctgttccttggaaagtaccgccagcaaccgaccaatgcaaatgtggatgcttggagccaaccatcagaaggagctcagggaacctggttgagcaacaggcggaaggactggaggagcagaggggaattgcagcacaattggaagaacagcataggctggcctgaccacccagttctctcagagtctagaccaccaaccaaggagtgtacctggagtgatccatgactccagatacatatgtagcagaggatggccttgcctgacagcaatgggagaggaggccattggtcctgtggtggtttgatgccccagtgtaaggggatgctggagcagtgggacctgagagtgtgggtggatgggggagcaccctcatacaggcaagagggaatgggaagggaagatttgggatggtggtttggtggaggtggtaaccgggaaatggggtatcatttgagatgtaaacaaatggaatgattgaaaaaaaaacctgtctgtcccttagtttatatagaagatatcatgatgctgatttacaaatctctgtaggacttaaagcattaaagctttgctgaacactttgagggtggtggtccttggatattcttacccgcgttctcgcgaccggccaggaagaacgcaacaaaccggaatcttctgcggcaaaagctttattgcttacatcttcaggagccagagagcaagagagcaagagcaagaaagcaagagcaagaaaaagaacaagaacaagaaagagaaaaagaacaagaacaggaaagcaagagagagaaaaagcaagaacaagagagagaaaaagaatggcaaaaccccgtcccttttaaggagaattatcctccgcctaggacgtattactccctgattggctgcagcccatcagctcagttgtcatcacgagaaaggcagaacacatggcgggaaaactgcccctgcacgtgtgcagatt

SEQ ID NO: 1083 - DNA, 1000 bp, mus musculus
gttatgctgactcttcacagcacttaaaccttaactaagacaccccctctagttcttccccagctttgacatatagaatctctgcaggcctaggcgtttttcccactgaggccagaaaagacagccaagttaggcaaatggattctacaaagaagaaacatctttaggaatagcccacctcctgttgtgaagaaccatatgaacatggatctacacatgtgctgcatatgtgtatgtgtatgggggagctaggtccatcccctgtattctcattgattggtggttccgtctctaagagcccttgagggttcaatttaattagctacatttatcttcctctaaaattcctttgtctttcctcagtctttccctaaatcttccataagagctcctgagctccattcaatgtttggctgtgagtctctgtatctgtctgaagcagctgatggatggggcatatcagaggatagccatgatagactgctatctgcaagcataacagagtattgtttatagtgtcagggattggtgcttgcacatgggatgggtctcttgttgggttggttattgtttggcaattccctcagtctctgctccattccctgtccctgcattttttgtaggcaggataaattttgggttgaaagttttgtggctggattggtatccctattgctccactggggttcctgctcagctacagaaagtagcctcttcaggtgccacatccccactgctgtgagtctcagataaagtcatccctacagattcttgggagcctcccctatcccaggtctctagcaggtacttgagatgcccctcacctcaacgccctgaagatgaagattctattcattgtcaaggttgtctgggcatctcccaggtctctcttcacacctaatcctgaaccctcacccctttctccaattcatcccctttccatctagttctcttcctccatgtggctccaactattttattccccattcaagtatccttg

SEQ ID NO: 1084 - DNA, 1000 bp, mus musculus
gggacacttatccctaaacaggatgtctccatcaaattcttcccttcagtactcagggaatcctgaggagatgagggcagaagattcaaaaatgctagaggtgttggaggacacctaggacacaagggcctctatattaataagactgacacacatatgaactcagaaaggctgaggtggcatgcaagaacctgcataggtctgcctcagatgggctcctagagctagaaagaagtggacatacacataccagtccacaacacagaagctatctccaattgataacttgaaaatgaaagcttcctccaaggaagtgtctttgagaaaacaaactactcctaagggtaggcttcatgcccagcagtaaagggccgacagagtaaatggccagtggagcatgatcaaccaaccaggaaccacatttgggaatctgtctttcccagcagcaattggttgtcagtagttattatctgtggatgagactttaagcccagcccctttctccatgctggtattcttcctggattgaaattgcaaaggtcttcagcccaacttgagatccatgaatgggcaccaaagcctgacactattactgatgctatgttgtggttacagacaagagcctaggatggctgtcctctgagagactcccagcagctgtatgaaacagattcagatacatacaaccaaccactggacttgaggtcaggaacccctatggaagagttaagataagcattgaaggagctgaagaggatggcaaccccataggaagtccaaaagtattaacaaacccagacccctgagagatcccagaaactaagctatcaaccaaagagaatacatggactggccccaggcccttggcacatacatagcagaggactgccttctttggcctcagttggtgaggatatgcctaatcctgcagagacttgaagccctagggtggggagttgcccgaggagggggtagaggggagcgcactcacagaggcaaa

SEQ ID NO: 1085 - DNA, 1400 bp, mus musculus
ttaaatactttattttatagaaaattgaactagtagacaatgatttaaaatttactaaaatatcttcatgtacattggcttatgaaagaatctttttccaaggtttcattttatctatgatgttgaatgtaactccacacaaagcctgccgctgagaagctcttacagttgagtagcaatacaaggcttgttttcctctcttcttactttcactctagttgaataaaaagatgaaacagaggcctgtaacaagagataatcaatggtggtgactttagcagtgattctctacattggggatgtggaacatgaagcacctacctcctgtagccagataggaaccccagtggagtgatagagacatcaacctactcacaatactttcaaccccaaatttatcctctgtacaagaaattcaggaagaggaaaaggagcagagactgagtgaatggccacccaataaccagaccaattgagaccaagtgagacccattgtgagcaccaatccctgacactactaaagatattctattatgtttacagaccagagcatgttgtcctctgagagtctgcacccagcacatgactcagacagatactgacagacacatctaaacaacggatagagcttggggactctcatagaaaaataggaggaaggattgatgctcccaaaggagattggaattccacaggaagaccaacagagtcaactaatttggaccctttagctctcagagtctgaaacaccaatcaaagagcatacaaaggctgaacgtaggactccctgcacaaatataacagatgtgcagcttgacttccctgtgggtcctgaacaactggaatgggggctatcctcaaagctgttgcctgcacatgagatatgttctactatctgggctgccttgtctggcctcagtgggaaagaaagcctctagttttcaaagaggcatgaggtaccagagtggggtggagtgatacacagggagatctcacccactcagaggagaaggggtggggattggagaagaaatctgaaaggggttagctgggaggggagcaatgagtgggatgtaaagtaaataagtaaaaaaaaaattaaataagtgaaggtaaatttttagtaattccaagaatgctttataaataatactcttcaaatagttgatttctacatctttagttctttctttgcctccttgactcatatttattaaatcccagagtgattattttgtttgttaatatgtaggtgtgtattctaagtattcactaccaataaaaccacttacctactgaaccagatcttgattctgactgtcaggccttagaattcccaagacttatttttctgaaaaaaatttaaaaattatcaatatcttctgttaaaatacagtcca

SEQ ID NO: 1086 - DNA, 1200 bp, mus musculus
tatactatatgtcatatacgatatactatatatctgattttaagtacatagaataattttgctttattcttttaaaaaataatatttaatcagtacttggttcacattatgtgtactatatacttcaggtagaattatgaaaaacagagctcacaaattttaaaaatccccattcattctaaatttttaatgaattcctaaataaactccaagtttccattgactttattttaagaatatacactcattcaaaagaaaacgatcccatctaaaaaacttttaacacaaaacttaccgtgtttataagaaatgcaggcactgggagggagcagagactgagagaatagcaaaccaaaaaccaggccaacttgagacccatcccatgggcaagcaccaatccctgacactattgatgatactctgttatgtttgcagacagaaactgttgtcctctgagaggcccacccagcacctgacccagagagacccagacacccacagtcaaacagtggatggagcttggggtctcttatggaagagtaggaggaaggattgcagacctgagagggataggaactccacaggaaaaccaacagagacaactaacctggactcttgggtctcagagagtctgaaccaacaaccaaagaacatacacaggctggacctaggcttcctcgctcacatgtaacagatgtgcagcttggtctttatgtggatatcaaacaactggagctggagctatcccaaaagctgctgcatataatgtggaatatgctcttcttgctgggctgccttgtctggcctcagtgggagaggatgcacctagcctcaccaagaattgaagtgccaggatgggaagatacccaggagggaccccactcactcagaggagagtgagagtgggtttgggggaaggattggaggagagggtaattgaaaggcggcagtgagcagaatgtaaagtgattaagtaaaataaatacatttttaaaaattagaaatactaaaatattctgttctttaatatatctagatttaaaaaattcagctttgtaagctcttagtggaggagtatgcagacatcaggaaactatttaaaaatgttatcatcagaaaaatcagtctcttttgattttcaattacaagttttatttctacattatatctgggaattgaattcctatgtgttgattctat

SEQ ID NO: 1087 - DNA, 1800 bp, mus musculus
cacagtacattggaaatcatttggcctcttcctagtaaccctaaatactcatattctgtttctaaatatgtgttgtgtctaatgtccactggtgttgcagggagagcatcatgagatgatatacatgctctacttcattggatgactaaagtgacatcctcagcaaaacatgaagcaggtactacatgtctccatatttccaacaaatatttcaaaatatatcagaatgcaatgtcacttcaacttaaaaaagaaaagaaaaaactctattaatgtctattttaggccgaggatgcacctcaatggtggagtgtgtgaggagccgccctcacatttgccattataagatggcgctgacagctgtgttctaagtagtaaacataatctgcacacgtgcaggggcagttttcccgccatgtgttctgcctttctcgtgatgacaactgagccgatgggctgcagccaatcagggagtaatatgtcctaggcggaggataattctccttaaaagggacggggttttgccattctttttctctctcttgttcttgctttttctctctcttgttcttgctttttacggggttttgccattctttttctctctcttgttcttgctttttctctctcttgttcttgcttttttctctctcttgttcttgctttttctctctcatgttcttgctttttctctctcttgctcttgttgttcttcttgctcttgttctttttctctctcttgctctctctcttgctttcttgttcttgttctttttcttgctttctttctctctcttgccctgacacttgctctcttgctctctggctcctgaagatgtaagcaataaagctttgccgcagaagattccggtttgctgtgttcttcctggccggtcgcgagaacgcgtgcaagagttggtgccgaaacccgggacgggacgagaagacccgggacgagaagacccgggaagggaaatcctgggacgagaagacctgggacgagaagacctgggacgagaagacctgggacgagaagacctgggacgagaagacctgggacgagaagacctgggacgagaaaacctgggacggaaactaccatcaccagcgcaaggaagatccctcattccggaaccagaactgcgggtcatggtaatgaagtgttcccgtaaaacagactgttgagaaggattcaactgcgtgaattcagaactcttcagctggggaatggtggtaatgaagtgttcccgtaaaacagactgttgagaaggattcaactgcgtgaattcagaactcttcagctggggaacggtggtaataaagtgttcccgcaacacagactgttgagaaggattcaactgtgtgaattcagaactcttcagctggggaatggtggtaatgaagtgttcccgtaaaacagactgttgagaaggattcaactgcgtgaattcagaactcttcagctggggaacggtggtaataaagtgttcccacaacacagactgttgagaaggattcaactgcgtgaattcagaactcttcagctggggaatggtggtaatgaagtgttcccacaacacagactgttgagaaggattcaactgcgtgaattcagaactcttcagctggggaacagggtacccgtaagtatagctttacaaggtaagtctggtcttgaactttctaacgaaattcaagacagtctatcagaagtaaagtgggaaatagctttacaaggtaagtctggccttgaactttctaacgaaattcaagacagtctatcagaagtaaagtgggaaa

SEQ ID NO: 1088 - DNA, 1000 bp, mus musculus
ttatgtggggccgtgaaagacagcctgttttggttgaatgaggcttgctccggagacctagtagaaaactctataagtgatggaaaagtgagccacgttcccagagacagatgtctgacaccacagggcccccaattccataattctgggactatcagtcacacagataaagcccaaagctcctgacattctggctagacttcacccccacagtttcctgactatagccaggtatgctcctccccacaattacctggcaacatcaaggtagcccagcccactataaaaggagctgcttgtttcctcctcgctctcttaaactctcatctttcttactctcatatctactcctccttctctccctcccttcccccttctctccatgtggccatggctggtctccctctttctaccttttttctttctccctgcctttctacaataaagctctaaaaccacagactgtctctgctcaccaaggcacatggtccttgaactatggaatagtctttcacctaaagagctgcatctaacctcccatggacactccagccatagatcggaccaaggactttctcctgtatgggaacttcccagcactccctctctccctgtcctcccctcccttcaagtcctggggatgaccaagcctcccctggggccccaattttcttctcagctcttctgcagtgtccagtggcatctgggatgctgaaggctgagaacctgtaatctctggcctcagtgaggcccagagacttctgactgccccttgcccaccccctgcaggactgggttcagtggcttcccacagccagacacccacccaggatcgcatggaaaaagtgcagcagtcctccagagtctgcctacccagagcactggaactctggcgggactggggttttctccaattcccttgattcccccacgcccagtgccccacaatgttataaggaaactctactgaaatgcaatgtattttgattttcttttcctg

SEQ ID NO: 1089 - DNA, 1000 bp, mus musculus; identical to SEQ ID NO: 1088

SEQ ID NO: 1090 - DNA, 1200 bp, mus musculus
tgtgcatgtatgcatttatatatacatatgtattcctgaacataacttgtttaaccaatataatgttacttctctctctctctctctctctctctctctctctctgtgtgtgtgtgtgtgtgtgtgtgtgtgtgtgtgtgtgtgtggtgtgttttcaggggtaactatttggcattggacagccagctgatatgttcttctctggggaagaccaccttgcctcctcccagatttcctgtagctatctatagctctttgtgtaggattgaagctctctctctgtgtgtgtgtgtgtgtgtgtgtgtgtgtgtgcgtgcgtgcacgtgtatgcgagagtacgtgcatgtgttgtctttttttcccccatccagtttaactaacatgatcattcatgtcatacttgctcacgttcaggtggtcatgtcgatgaaaggagtgagtctgccccatactctgcagatgctacctccgccaggtctgatgctgcaatcattaccatagctagaaaacaaatgcaacctaatggggttgcaaaccccttcagctccttcagaactttctctaaccccataggaagaatggcaatatcaacaaaccagattcttcagagctcccagggactaaaccaccaaacgaagagcacacacggctccagctgcatatatggtgaggataccatgaaccttcagaaatagggctcagaaacccctgagctggaactgacctgaatgtcccatccctagggactagctttcatggcactagaaaaggtgacatgcaagcttccaaagatgagcagcaatcaatagtcctaccctgctactatgccttatgaaccacatcaatggccagcagagcacagtactctaaagctgcagtagtggcacacatactttggcagtagccaacagctctataattggatggaacacttgctcaacaatggctaaaattttcctggtactggaaatgtggctaactattattaagtgctagtgaacttgtgattattggaggagaatctataaccactaatttaccaaaccaagataatccgtaaaaacaatctataaatgtatgcctttaaacccaaagataagtgtagtcttcatccctcatcaaggaaatttctctttgcaacagatggagagagaccacaagagaaaaccacaaccaatcaatatgcagagttttagattt

SEQ ID NO: 1091 - DNA, 1000 bp, mus musculus
tcaagaactcagggtaggagtttggagacaggagccgaagcagaagacatggaggaatgagtcttactggcttgctctctgtggcttcctcttcttatgcaacccaggaccacatgccccgtaattgtaccacccacataagctgggccctaccacatcaatcatcagtcacgaaaatgcccctcagacacactcgcaggctaatttgaaggaggcgattcctcagcttaagtcctctcttggtcaagttgacaaaaactgttcagaacaggagtggcgatagctgaggtcattcattccagaagtattctccacacttgtgataatggaaggctagtccttagagagcagaaggggtctgaggtaacaggcattgtttctctttgagataagattgtgtgcttcaaggctgatctttttatgcatggtctttgtgtctatacttccttaggtcttggattaactgtctcgcctaatgtagaagacttctcattgtatgttgctctttgttctggaagaagagtgtcatgttgcagtatcaggggtctctgctactgatccctccccaccccctctcgcttctggcaggattttactatgtagttggaattggcattgaacttgtactctccctgactctgcttccttagtgtcgacattagacacatgcttcactgtacacagttcatgctatggaatagtcaaaagcagcaacagctgtaatgtgcctaacaagtagaaatccaggttgttgctctacatgtacattacacactctggcactacagtacccatgccagttgtaggtggctggtgacaaaaactagctagcatcaatggccaatacatttcaataatacttagtgctttttgctggtagacatttgctaatgggtattatgcatggaacaaaaggcttacagaatggtgcccagggacacacagcttctgcaatctcagcagtggactgaggcaagacgacaaggagttcaaggacatt

SEQ ID NO: 1092 - DNA, 1200 bp, mus musculus
atgaatgatgctgtcagtcacagcagaggggtgtgcttgtcacacttagttacttctcaaggccatcctggggccaagggcagctagacaaggtacggctatgagtagagcgtttgagggcgcagggaaagagacccagatctgactggaaccaattctcaactttcccaagggaaactccttgagtgtggcaagacgttaagcacattggttctagtgcagaacgctggcccttactacttgtaagaacctgtcaaagagctggttgaagcacatatccctagactcgtgtccaaacatttggatttagtgagtctagagtgtggtgaggtttgcttttctaacaagttccagctattgatgagccagcatgtggatcaacggccagacggcctgacctccggcactgtctccacctcttaccacagtcatatgggtccctcagtcagcttctccctgaaatgagttagtggcttcctatttcagaatgttttggggtagggttagtgagggaagccatgtaagcaagagaacaaacctgaaagcaagctcaatacataaatattacgtttgtgaaatactttaaatagcactctatctcactctccagaatgaaaaccaaagctctgctagtctgagtagctgcctgttcatccctgagggaaggagcagggaaacagagagaaatttctgggcaccagggccatctcagggcacaaggctgagatgtcctgcaaccttgtgcagacgctgaacacccacacagtctgaaactcacgaccttcacgtaggaaatgaatctttttaaacaagtgtgagaagcagatattgatgaagtccgtgcctcacttctgccaaaggaagagaacacactgtccagggtcatcaagatgggaagttgaggccgtactgaaccagggctagagccctaactgggatgctggcattactctctccctgcaggggaggaggggctgatgacagcacacgtacatagctctccgaggaggccaagaagtgcagtcacagtcccaagcttccaacaggatacttggggtagccgagttacagccaagatatgtctgtgtctgactgctgagaaagagaaaaaattttaacttttgctttaataaaatgcacaatcatgcatttaaaaaaaaaaaaaaaacaaaccctcttttgagccaatagaacatgata

SEQ ID NO: 1093 - DNA, 1000 bp, mus musculus
tgggagatatctaatgtgaggaaatagtggaattaatcaatataccaataggtaactagagaagaattactacagaaactgtgggatttcttccttgaaaaatacagatgagatgaataaaaatatatattccttcaacttttcatgacaataaataaagtccaggcttctgtgatgaagaggacttactggtcttgcagaagatctggatttaatcccattacatacactgtacagctcccaactgcatgtaattcctgcttcaggtgatctggtgctttcttctggcctttgtaccccccccaccaccaccacacacacacacacacacacacacacaccactgtcatagacatagatacacaaacaagagcaaaatataacttaggaaagaattcaggcttccattttagtgagagatagctgtagtgcctcatagggagtgccacaaagaggatgtggccttgttgaagtagatcaagccttggaggaagtatgtcactgttggggtgggctttgaaggctcaggagttcaaactacaccaagtgtggctgacagtctcctgctgcctcttaatcaagatgtagaactcagcttcttctccagctccaggtctgcctgcatgctgccatggttcccaccatggcaataatggactgaacctctgaaactgaaagccagcccaattaaatgctttcctttataagagctgctgaggtcatagtgtcttctcacagcaatagaaattctaagacaataactgaaaactctccttgtctccagcaaatttacaagcctgtctagtgaaatttacaagtctgtctactgatcaaatgtaacaccactttagtttgctctattaactatgtgtttaggtagccttaataggaaaactatggctcttctctctctgttctcttagaatcagtctctcagtctcttccctagtactaaaacagatcgccagctgcagcctcccttaccactgtgcagcacatc

SEQ ID NO: 1094 - DNA, 1400 bp, mus musculus
actctctccaaatttaacaagctttccagtgtcctatgatcaaagtctgcttaataaaatgttctttttaaattttttagtacttattacattgtgtgtttgggtgcacatgccttatcatacatctggacatcacaggacaacctagaggcattgactttctcccagataagtcatgaggattgatatcaggattcttatgtgctgagtcatctcaccagcccataatatttatatatgaatggtcaatatatagccatgaagataaagaccttgtggtttattttttctggaagaagataatcatttattatcctgatcattcaaacgatacttttgtgaaaatcataaatttatttttaattggatattttctttatttacatttcaaacatcatcccctttccaggtttccccttcagaagccctttatcccactaccccctccccctgcttatgtgaggttgttcccccacccacctactcctgactccctgccctttaattcccctatactagggcatctagccttcacagggccaagggacttttctcccattgatgcccaacaatgttacatatgtggttggagccatgggttcctccatctgtactccttggttggtggtttagtctctgggagctctggggggtctggttggttgatattgtcgttcttcttatgggtttgcaaaccccttcagctccttcagtcctttctctaactgttccattggggaccccatgctcagtccaatggttggctgcaagcttccacctctgtatttgtcagactctgtcggagcctctcaggagacagctatatcagattccttcagcaagcacttcttggcatctacaatagggtctgtatttggtgaatgtttatggaatggatcgccaggtgggcagtctctagatgtcctttccttcagtctgctccatattttgtctccatatttcttccgctgagtattttattctccctcctaagaaggaccaaagcatccacactttggtcttccttcttcttgagcttcatgtggtctgtgaattgtatcttgggtattgtaagcttttggtctaatatccacttatcagtgagtgcataccatttgtgttcttttgtgcttgggttagctcactcaggatgatatatatatatataatatagtgcactatttcaaatatccactacttttattatttctctacaggtgtattgcatttaagttttagtctgcaaagtataaaggcatcttcttgctctgaaaatttcttcagattttgcattgtagtaaaattttgctacttatcttgtaaagttaataaaagttttatgctttattcttgttaaacagctcctgtataaatcacagggcaagccaaagagtttatac

SEQ ID NO: 1095 - DNA, 1200 bp, mus musculus
ctctatctatctatctatctatctatctatatatatatatcatctctatctctatatttgtggactatatcaaaggtattaaaaatccagtttatatcaattatcttttgttaagttataggatgtttacaggatgacttggtgacttgcaatctatgtggtgatctgtaaccccttatactacaagaatatcttttacagaatattcctcttttttttttttttttttttttttttgtcgagacagggtctctctgtacagccctggctgtcctggaactcactttgtagaccaggctggcctcgaactcagaaatccgcctgcgtctgcctgacaagtgctgggtttaaaggtgtgtgccaccactgcccggctacagaatattcctttacagaagaaaaaaatgagatatttttacagttgattctaactttgtcccactttctttttgtgtaattaaaacttagagcaagtagataaatagcctttgcttgtgctttgaaatgattttaatagctgaaaccaaattaaatacacacatatgtgtgtgtgtaaacatagacacagacatacacacacaatctgcatatgtgttctagaaatttgatgttttgcatacattcacagaatcagcttaccttatgtatttgttattatggacctaattttagatggctcttatgaccacatttatttggcgttttagaaaccaagtttgattaaattgaggacaaagcaataaggaattcaaaaaatatgataccatttatattttttttctgaataatccattacactgctggagcgttcatatttctgaattgctagcagtaagtgttgtggggtcagggactaaccagtgagtgaaagtcagaactcaaaatgaagtgtcttttctgtttagcactgggcacccgtagaaactgataatgtttgattaatgaatgccaggctagcggcagcaaaaacatctgcaaaaagtgatttattatttcaaaggtatcagaagcgtgtggtatcttgcagatttaagtatgtgtgcctgaataaaataaatgagatgcaacatgtgaaaaatgaaaacacattactggtacaggatgtgtcacaagcagggtacttttgttcaagtacactttgtcatggggacttttaatgctgttctgaatacaaatcatttagctggttcataaaatctc

SEQ ID NO: 1096 - DNA, 1000 bp, mus musculus
ctgccagctatactgtgtacacattttcccatggaggaaaaacttcagaaataaggagtactctctttatccatcccaacagctgcactctcacaacccctagctcttggcaggaagtcatgtcagatttaaatgggtcactgaaggaaagacttattcttcacatgggaactggaaacgagttttggcctttggagacagggagtccatggagagatggggagggctattaaatccccaccctacatggtaaatcaatggaataagcagaaacttctgaggatctgactgacatctgcctccagcctcccaagtagccaggcctgaggcagaactctctcagcttttctcctcagaggcatgaactcatccacagtgtctcttctggtgttttgtgcctcctccgtgttttgaacaccccgtctatgtaaaacttagcatgggctgagcacatcctccctccctggatatttgcattttaagccttttatctctagctatagattgaagggctttggttacagttaaaggaatttcaaacagttgcaactagatggatgagattagtttgggtcctgaggggctcttctttgtccctaaaaatcctcgtattgtcagctatactagatgcagacatgaataggctttgttctgacaccattctataagctctgtggaaacacagtgcctactgtgaccaccagtgtcaaacactgagaagagtcctcctgcctctacctttctcttttattctttgaaccttctgagacatctattggcatctttcaaattttttgcttcctggtttgtggcattttcttctgtctcacagatgaatttgttggtctcatgagtaattattgctttgacatcttcagagcatgacttgcctcctgttattttttatgtcaatggttatatcttacttctattactttacagaaattatggtttttatctagtttctctcctcttgtgtcataagttggtatggtttcgg

SEQ ID NO: 1097 - DNA, 1200 bp, mus musculus
taactcttttgcagtgttctcctgtatttctttaagtgagttattaaagtccttcttgatgtcctctaccatcatcatgagatatgcttttaaatctgggtctagcttttcaggtgtgttggggtgcccaggactgggtgaggtaggagtgctatgttctgatgatggtgagtggtcttgatttctgttagtaagattcttatgtctgccttttgccatctggtaatctctggagtcagttgttaaagttgtctctggttagagcttgttcctctcatgattctgttagcctctatcagcagacctgggagactagatctctcctgagttttagtggtcaaagcactttctgcaggcaagctctcctcttgcagggaaggtgcacagatatctggtgttttttcctgcctcctggcagaaaatgaaggcccgaagcagggcctgtcccagaagctgttagcttctgtattccacactctcacctgtgcagactagtcttggagggatcaggcaaccaagatggctcccccaggtgctctgtcaaagccctccagggcaggatggacacttctcctctggcagggaaggtgcccaaatgtctggagccagaaaaggggtctgcctcagaagctgtcctctagggaccttgggggtgtctgctgactccgtgcccaaggtgacttggtgctggcacagactggaagagatttgtgaccctggtcaggctgggctttctgcttccctaatgctgtctcaggtccctcgcagttggattggaacagaagttgtgttccactcaccagaggtcgtaagattgagtggatagtcctctagagaccttgggggtgtccgaagactctgagcccaggtgacccggtgctggcactgacctgaaggctttgttgtgcttttaacatacaaaaggattcatttacaaaaataattaaagaaagaaaaaggtcagggtgaaaaacgtaggcaaagtcatgttgttatatcccacagagaagcaaacctggaacaacttgcaagctaacttgtacattcttaacctggataaaaggcttgtttgctcagaggtaatcatgctaattgtgacaaagagctcttttaagcactgactaattgtgttgtagatgccatctacatgaaacataatttacttctattggctgagtgggacaatgatgtgagtcaagg

SEQ ID NO: 1098 - DNA, 1000 bp, mus musculus
tttgcctggctcagctctcctggaatgtccaaagtcgattctccaaggctcagtgcaccaagacactgctgtctcttccaaataccctaagctctccaatatcctttcacttcatgcattcaactccagagcatcctgggactagtactgcccctgcctcatctcacctagtgttggggtgatgggcaagtgccaccatgtctcacagttctcttagcacttagtaaataactctgcctttcttccttctgtctggcttgcgttgcatgtagaacctggagactgcagggccctttaaactgtatttccgatcctggatactgtaataatcaacaatccatgcaattctttttgcctcaatgatttcagtggctagaacatggtctcctataggcacaattacatgttttgtgaataaatgaccaattgttttatgataaaaaaacaaaagaaatcctacttgctcttctggcttccatgaaagtctgtgcttatgtgcatgtagtcacatacaagcagacacacatgtacatgattaaaaataaaatcttgactcaggagcgcacaagctgtagaagcagcagagcacctcggacaggctcctacggcctacatctgcacccgtgaggtgaagctgatcctcagtcccctgtgcaccctccctgccagggaagagctggccgaccctgggactcaggtgacattgctatttcctctccggtgactctctaagacaggtccactcaggagctcacaggcctcagaagtggcgttctgctggaaagggtcctatgggcctacatttgcacccaggatggagggctgttctgcaaccctctatgcactgctcttgccaggagagagctggtctcccagaagtgctgacagaggcttacagactcacaagaggaacaggctccagccagggacagcaagaacatctaacaccagagattaccagatggtgaaaggcaaatgcaagaatcttaccaacagaaac

SEQ ID NO: 1099 - DNA, 1200 bp, mus musculus
tattattgatgctatggtgtgcttgcagacaagagcctagcagtactgtcctctgtgtctcagttagcacaacaagcagctgactgagacaaatgcagataattacacccacccattagactgaagttggggaacccctgtggttgaattatggaaaagctggaagaagctaaggaggagggcaaccctatagatagaccagcagtctcaactaacatgtacccctgagatctctcagacactaagccaccaggcagcatacagtagcctgtctgaggctcttgacacatatacagcagatgactccctggtctggccctagtgggtgaagatgcacttaacactaagagacttgaggccccagggcgtagggaggcctgttggaggagggatatgctcttggagacaaagggaggaggaataggatgagagactacaagagggtgcacatggagggggatacttactggactgtgaaaaataaaagtaattaaaagaagaagaaggaagtggaagaagaggaggaggagaaagaggaggagaaagttagccaatgcttatgaagacaatgacaatctattaaaattatcttctacactaagctaaacaaagaaaatttacacaaagctaccaaaaaatgtatggagatcctcattcttcttcaagagcaacactgctgaagccgacgtggtttcgcagctctgcttcttgacccctctttgtttctcatttctctagaatagaacatgcatggaagtggctccagactttcgcatgacttgccgtctggaggtaatggtgacctggcctgtctggccaaacagtgctgcaaaatccatgcagcaggtgcttgggggaaggaatacaacctatgcgcctgcataggaaccaattgaacttcaccctggcacccaagagggggaaagtcatttgtagttgtgaagtccttacactgacacatatttaaatatagaattgttatatgccatttatttttatttctcttctcactaatattgaagcttagttagagacctggttttgttcaggacaacagtcgagtggacaggatagatcctggaacacagtgacattttgtgatggaattcatgaaattataatgtggtacacacactcacacacacacacacacacacacacacacacacacacactcactcactcactcacactactggc

SEQ ID NO: 1100 - DNA, 1000 bp, mus musculus
ccttcccagtctcagacattggtttctatacggtagctcaatggcctaggctgaacacagttggccctcacaatgcactgcataaggtcacttgagacacagtaagttgtgaggatgaggactgttccctcttagtgagccacagtcgaagcaggaaggtccttttacagtcactactcctcctactctgtcacactagctcgtggtaattgtgtatcgttcaacagggtcctgtagctatgcaggcaaaagaggtgaaggaaagacaaagcggaatgatccactccaggcacactggcccctgctattcttcacaccaagtctactccttccaaagacttttcatattttgtggagagccgcaatagcttccgccattacaagatggcgccggcttccgctgtgcctgcaggaattttccagtaaacaagcattgtgcgcatgtgcaaaagagtattggcgccaagtcacagcccatcaggggcgtatcaatgggatcatgagcaagcagccagtcaggtgtggacacgccgcagcgcctctttggggctctgggtcttcctcttcatgctgaagctagcgtaataaagcattgctgcagaaggatccggttgtctgcgtgtgttcttgctggcgagacgatagcggcgggacaatatttgttttctcattgatctcagatagcctctctccagatagccaagggccttgcaatcccttctttttagtcttgacttcaactcattttctcatagaagccttctctggtcaccctatttcttgttttatttgttttccttagcccacatagctatctagcatagtatatatcttacattttcctttccattgtgcatctccatccctggactataaacaccgtaaggggaggagtatgttccacatgagtgtatccccatctcttagaatctggtacacagccagattcctaataaatacctgttttataaataaacagatatcaaccacatctaaaaaa

SEQ ID NO: 1101 - DNA, 1000 bp, mus musculus
tatccagtgaggagtgccgtgggacctcaggtggttgctccgggaaaagatttcttcccaagagttacagctcttggaacaaaagactcagaggacagagtagttctcatgcacctttacttccctggatatttatatacagttgtgggcgtgattcagggttcgacagcagatacctctcattggcttggacttagagtttgggggaaaccttatttgcatgtgggaaggattggtgctgctcctatgtgactgatagacacacacctctcctggggggggggggggggtctgtgggagtggtaacttcgacaggagcccggggtccaggagatatgattgactgtctcccatccgtcccatgtaggtggaaatcaccacccacccggaaccccccccacaccggggttcaaaacccatgctcaactggagaccaggctgtctgtgcgcagcccactgccccacactaatcctctgaaactctaagtgttttcttttataagcattgccttggtcatggtgtctctcctcagcaataaaacagcgatgaaacaaagcacattggggggttgtgtagaaactttcttgggtgaaaagagaacatgaatggagactgtttaagaagccctggtggaattgcatatactagcaagcgtttgctgaaaggaccctgatataactgtctcttatgtgagattaggccggggcctagcaaacacataagtggatgctcacagtcagctattggatggatcacagggcccccaatggaggagctagagaaagtacccaaggagctaaagagatctgcaaccctgtaggtacaacaacattatgaactaaccagtaccccggagctcttgactctagctgcatatgtatcaaaagatggcctagtcggccatcactgcaaagagaggcccattggacatgcaaactttatatgccccagtacaggggaacgccagggccaaaaagtgggaatgggtgggtaggggag

SEQ ID NO: 1102 - DNA, 1200 bp, mus musculus
tgcgaagacacaacttgacactgtgccagagagcatggggcaggcagcacatcagcaggggacaatcacctcagagaggcagaggaccagaggttggaggtgataaagctcagccctgacctcctgcagctggggctatagtcccgatgacaatgacctttaatgtcactgtattataatcccttctcagttcagctcgccacacacaattctcagctctggtttctgccccattttaattttcactaaaaccacagtaaaccaaggaaaaggctaagaatggccagccctgaatcttaagagtctgttcttggtttgataaccacgtagggtatcttcaatttgtcatatgtattctgtccctgggacagtctaactgtatttgtcagttcttcaagaaagaaataaacaccctggcaggtgacttaagaaactgaaactcacctctggttaacagagctctgtaagatgatcgctggctgaccaaaatgtaacagtaggaagagaaagtaagactgtcacacggaaccaccatggtcacggaacagcactgccaagaaccattcctcccagtcctaggaaggagaccaagtagatgtatgcctgctgtgtaaatacaacagcctgaagtcaaatccctaacactcatgcaaaagccaagcccaatggcacacatctgtaagcccaggactgcatgtgacacaggaggatcccaagggtttgaggtcaaccagctgaggctaccagtgatctccacgctcagtgagagatgctgtcctaaaaagaaagaagagctgaagagatggctcagagcttaagagcactggctgctcttccagaggacccaggttctgttcctagcacttacgtggcttggctgttcacaattatctgtaacttcagatgcagaggctccaactccctcttttggcctccttaggcagtacacatatgtggagcacaggtacagacataggcaaaatatccatatacaaaaagaaaaattacataattttcttaattaagaagaataaaatactgggctagagagctggctcagtggttaagagcaccatctgctcttccagaggtcctgagttcaattcccagcaaccacatggtagctcacaaccatctgtaatgggatctgatgccctcttctggtgtgtctaaagacagtgacagtgtactcacatacat

SEQ ID NO: 1103 - DNA, 1000 bp, mus musculus
atttgaaatctcccaactgaaaaaaatcccggagtctgatgaatgtagtatcgaattctaccaaaatttaaaagagaaacttattgaaggatcttacatatttctctctctatatttaatgatgccactactaccctgataccaaaacaacacaaagacacaacaacaacaacaacaacaacaacaacaacaacaacaacattataggacctgggagtgacctgaagagagacatccaagtggtcacccagggtccctggtaggtgtcagtcattatgctgagtgactgagtgatggagagatgggaaagagagtatagctgtggagagatgggagagaaagtgaagccaattggttcattctctgtgtagaaaggtggaactggagaagctatggcagtcagacacaggccgatatgagaagcttgtacaacaacgggggccatggtgatgtctgactcaggctgctgccaagggcatgtctgggtcaacggttctattgcagcttggatctgtgctgatatctatggcccatgttaccaccaaaagccatatggatgtacctggtttgggctgctgccaggggccatgttgatgtccaagcactgtgctgagctggccctgcctcaacacatttgggaacatggccctgcctctcttgccttggcagcatgggactgctggcagtggtggtgtgggtatgggagacatggctcttatgaatgagtacaagagaactggcctcactccttacctgggcagcacagttgaactgaccttgatggcatgggtgccagagatctggtagactgaccaacttaggcctcacctaggcccagatccagagctctgagttggcttaacccaacatctaccctacctatgaactgctggagcacatgaaagggctggtcccccagaaccaaagcctcaggttctccatgacacaaagcagcaacaggatagccaagaggagtcccagtgaaaatcaagtattgata

SEQ ID NO: 1104 - DNA, 1600 bp, mus musculus
gactctagctgcatatgtatcaaaagatggcctagtaggccatcactggaaagagaggcccattggacttgcaaactttatatgccccagtacaggggaacaccagggccaaaaagtgggagtgggtgggtgggagggtgtgggggacttttgggatagcattggaaatgtaaatgaggaaaatacctaataaaaaatgtatataaaaaaaaaaaagaaagaaagaggagcctcagttgagaagataccatcaccaggttgcttgaaggcaactttgtaaggcattttcttgatgaacctgtgatatgggaggagccatcccattgtgggtggtgccggtcttggacagggtgtcctggggtgtataagaaagcaggctaagccagagggagcaagtcataagcagccttcatccatagcctttgtttcggttcctgcctcgggtgcttgccctgacctgctcagtgatagagtatgacctgggagcgctaagatgaaacgaaccttctttcccgggttgctcttggtcttcatacttcatctcagcaacaattgatacatgagccgtttctgtgcattctaggaggtaatttgaaactcttctggattcagctaggaagctgtctactttagcttgtagctagctgctcggacccatctgccccctccggagcctagagacttccagtcacctctcatttgctcctgacctctcctggtccatggggaaacacataccatttgtgggcacgaggcagcaaacttcctggttctttgccaaaactgcttgccaacctgtgttctccctttccagatttcctgagcgtgtcaggtcacagccctctctgacccattagctgtcctcacaccgcctttcaggtcagctcatctcagactccactcaaaaattcttctcctacatggtctgaagtgaaggccagggtttctgagcccctgccctccactgtctgtatccacgttctggtacgtacagtcacagggacctggctgaggatgcgagccctgcagaagtagcgcgccattgttatctttgtaaagcctactgctctgttctgaactcgggttagtgcgcagccgctcctctctggggtttcttggctaagacgccagcttcactatcgttctgcatgcatgcacacgccatttccagccagctaagtacaaagccctttatcatagttttctgtgttaaaatatgggctaaacatggaatagaattttagtctacaaattattttcaaggaaaacgtctagaaactttcaatggtcttaagaggagagactttacaacttgcgcaggccctgccttgcagaaaaggactaatttccttccagggcatcatgcatccttggcctggggacttcctccttatactgaaccacacctccgttcctggctttacctggttgttgatcctggtgcctcagaaacacaatctctcaacactctttttctcttctttctccttctccccagtggttggttggttggctcaaagcagggtctcactctgtagctgaggttggccctctgagtggcccttctattttagtcccttgagtgctgggcttacagaca

SEQ ID NO: 1105 - DNA, 1200 bp, mus musculus
taatttttgtcattatataataatatagaaatgagaagtaattatacacacacacacacacacccaagcacacacacatcaactcaaagtatcaggaaaaaattctatattgctcaaaaatactgttgttattttaacttaattattttatttatttaaatttcaaatgttccccttcccagtctcccttccacgaattcccaccacattccccctctccattttgcctctaagagggttctctccacctacattcctgctcccacctcacacttctagaatatcccttcactaggccatcaagcctccacaggactaagagccgtccctcccactgatgccagatgaggcatacctctgttatatacgtagcaggagctatgaaaactggcccctatatacagtctttggttggtaccttagtctctgggacctctgaggagtgcagttagttgatacttttgttcttcctatgtggttgcaataatccttcagctccttcagtccttatcctagatcttccatcggggtcctcaggctcagtccaatggctggctttcagtatctgcatttcccttagtcaggtgttggcagagcctctcagaggatacctataccagactcctgcctgcaagcacatcttagccttagcagtagtgtcagggtttggtgtctgctaataggatagatctcaaggtgggttggtcactggatggcctttccttcagtctctgctccattttattttttgtcccttcatttcctttagataggaacaatcctgtgttaaaattttaagatcgatggatggcccatccctcaactgggggccatatctatctattgggggtgccttcttcaggatctatctcctccattgttgtgcatctcagctaactcatctctatttggtcctgagaacctcttccatccctggcaacagggatgttctagtggttccacctgttcaccacccctaaatggacttctctcctgtctccctcattcctccatacatgatcttggccccttttttggatccatctaccctttccaacccaggttcctctctgcctctgtcacccgtgaataatttgtattaccgttctaagtaggattgaagcatccacattttggtattctttcatgttaagcttcacatggtctgtgagttgcatcataagaattctgagcttttga

SEQ ID NO: 1106 - DNA, 1200 bp, mus musculus
tttgtaaatggtagatatttaaagactagagtatacatgttatggatggtaagtgtaataacatgccaattaaggatcaattataacatacataccatggcaatagaagttagaagggtgaatttaagggaagggtgatagagaacgtatgtgaattcttgctacttgtgatactttatctcaatgaagttagtatcactctgaaaagcacctggagagatggactggtagttaaaaatacttgttacacagccatgagaattggaactcccatctcagcagtgaaatgataagccaaggcgtcctgaatatgtctgtacctccagctgtgagagatttgccactctctctgctcttcaagtgcacagaaacagtgtgctcgcacacatactggcataaactcaaacgctaacacacacataaataataaaccttttaaaaactgcactgaaaatatgttgaattatgagaaggctttatctaagcttaccttatttacatttgtaccaagaggaggcattatgtttttttcctgtttttccccaaattaaccacattgatcatttatttaactggtcttgctaaggtatttgtgtcactatttatttctaactcatcagacaaataacaaaatcttgtaaggaacactgtaaaacattgtaaaatggactagcgtgctggggtgtagtcctgacaaatcactgtagcggacagatggtttttcattattggctacatggaaatacaagcctgcaacttgtttgctacggatgcctactcatctgtgagacagtaaagtctgtgcggcttggccggagcacacaataaatcttccctcccatccgcgtgagcatctgcgggaaacagcgtgagagtgtatatttgctgggaaagcacattccatcttaggtctttctgaggcaagttacaagaaaaactagtgggatgtttattaagatattaagggctactctttaaatatatctttttaaaaaaacataaatatttacggttctttgttttgctgactcatatttctagtgcttaactttggaataagctgttttgctatgaaacaatcccttggaagaaataaacgcatcttcatagttacttaaatatgttttatagatagaaaaaaattaaataactaataacattttatgcaacatacatataaaaatatatgtgcttactaca

SEQ ID NO: 1107 - DNA, 1000 bp, mus musculus
ttgttgttcataacagttctatagtttttttttttttatgagagcactaataaaaatagcttaggcatgtattattatatttgaaaggtgaaagacaataagcaggtaatgagattggtatatcagaagacctacctgtggggcagtgggctgtgcacagatagccttgtctccagttgagcatagtcttgatccctggggaatctgatggggggtgatttccacctacatggaatggaaggcgtttgatcatgtctcctagacccctggctcctgtcgaagttactgcctccacatcccccacaggagaggtgtgtgactatcagtcacatagacaatgtcccaagatcctagcattctggctagactccactgcacagttacttgaatatagccagatatgctcctccccacagttacctgatagcccagcccactataaaaggagctgcttggttcctccttgctctctttaagctctcacctttcttactctttagccctccttctctctcacacttccctcctcactccacgtggccatggccagcctctcttcctctttctacattctttctttccccctgccggtaagaacacactcaagacaaccagaatcttctgtggcaaagctttattgcttacttctcaggaagaccccgaacccagaaaatggcactgcttatatagaccgcagtgtgacgtttcagcacctgatgtggcatgacagctcctgattcgttgctcacctatcaccccattaccacgccccaagaatgggcagtgactaagagtgagttcactctcgcacctgtgtacaaggcttgtttactagttaggcacagcagaggccagtaccatcttataatggcaattgctcgcggcatggctctccacatctccccctttttattttattaaaatgaggctggactaggtctgtgtaattatgcccatctgctgtggctcctgtcttaggtcgtttctccaatgtcacagc

SEQ ID NO: 1108 - DNA, 1000 bp, mus musculus
tattcaagagagtaggagggcttcctaggcccatccggttattatggtggtctgctatggaaattgtgagggagatgctcagtgttgggggccaagttgggatagggactcctcagcaaccgagtgcctctcatttgctctcagtgtccttgctgaggtgggtggtccatggtttcttattccttagaggccatataggccatgaggtccaccaccctgctgctgtagctgtattctttgtcataccaggaaatgaactttacaaagttgctattgagagcaacgccagcctgaatatcaatggtggaagagagagagctgttgttgaagtcgcaggagacaacctggtactcagtgtagcccaggatgcccttaagtgggatctcgggcacctgtttcaccaccttcttgatgtcgtcatacttggcaggtttctccaggtggcaagttagattcacaatgtatacattgggagtaggaacatgaaaggccatgcctgttatcttcccattcaactctgggatgaccttgcccacagccttggcagcaccagtggatgcaggtataacattctgggcagcccacagccatcacgccacagcttttccgaggggtcatcaaaagtcttctgagtgacagcgattccacgggccatggtcatgagccctttccaaagccaaagttgtcatgccaaagatgaccttggccaggaggactatgcagttggtggtgcaggatgcattgctgacaatcttgagagagttggtatatttatcgtggttcacaaccatcacaaacatgggggtatcagcagaaggggaggagatgatgcctcttttggctccacccttcaagtgggtcccagccttctccatggtggtgaagacaccagtatactccacaacatactgtgagcaccagcatcaatcatcccacttgatgttagtgggctctcactcctggaagatggtgatgggcttcccattgatgacaagcttcc

SEQ ID NO: 1109 - DNA, 1000 bp, mus musculus
caccactgggtatctccccaccctcgcacttcaagtctctgctacagtaggtgcatcctctgccactgaggccagacaaggcagcccaaatagtagaacatacccaacgtaaaggtaacagcttttgagatagctcccactccagatcttcaggacccacaagaaggtcaagctgcacatctgcaatatgtgagctgggaagcctacaaccaacctgtgtatgttccttggttggtggttcatactctgagagtcccaaggtccaggttacttgacactgttggtcttcttgtgaagttcctatctccttcagggctgcaatatttcctcctattcttctgtaagagtccccaagctcaatccaccgcttgaatgtgggtgtctgtatttgcccgaattagctgctgggtggagcctctcagaggacagtatgttcctgtctgcaagcataacagagtatcattaatagtgttagggaaaaatgcttgcccacggaataggtctcaagttgggctggttattgtttggtcattccctccgtctctgctccattccccatgcctgtattacttgtagacaggatatatttaaggttgaaagttttgtgggtaggttgatgtccctatagctccactggagttcctttctgaatgcagaagatagcttcataggttccacatccccaatgtagtgagtcacagctaaggtcacccccattgattcttgggtgtgcctctcttgccccaggccatgtctcatgctagagaatcctccgtctcctcactcctgtcagttgcaggttccctttcgtttccatggccatctagccatgtctcctgtcttttcccataactgatcctgaataccccattctcctcctcaaactcctccctctcagttccctcctccatctgcttcttatgactattttattccctcttttaaatgagattcatttgggccttccttcttgtttagcttctttgggtctgtggagtgc

SEQ ID NO: 1110 - DNA, 1000 bp, mus musculus
ttccctatgtaccgcagtctcgagttccgcgcgattggattggggcaggcactgtgatccactcaccagaggtcttagggtcccgtggggagtcctgtgtggacccttgcgggtgttgggcaagactctgctggcaaggtagcccggggctcctaggcttaaattcttgtattcggttttcctctttacagaaagggatcgcatatatttatttagctgtataatggcgtgagaggcctcatccctcaccacctttggcatttgggtgagctgagagcctgcccctgctcctcactggctgcagctctctggagagcaggccctgcaccgcatttgatcagtactctagagatgacccttctggaaggggtgcagatgagccattccccatggcatggacacaaaagatgtgatcctgccatttgtctgcagtgaggtattcattcagtcatgtacttcctacctcatccttttccacctgtgtcattcaagagagtgagagagcagtctctgaacctcgtctgggcaggacagtagagttggtcctggaggagggggcaaagggtagctagccccgtgggagtggacataggagagatggcccagccccttgctggctgtaggagttcagagagtgggctctaagctttgactgggcagcttcgtgaagctggcgctggaggtgcaaaagtgggagagggagccctcggggcaagagagcagacgaggtgaccttatcttccaccaatggctgcactgagtggtctagctgaagcaacaccagagagctggccctggtgatactaataagggagatccggtgggatgactggtgctcagcttgcacccactctgagatccaggacttggagttgacccaccctcaaaccttcatcatctgcaaactgttggagcatgtgaaagggccagtcccgctgacgcaaagctgcaggatcgccatgaaacagggaagcagaataacagggaggaggtcctgtga

SEQ ID NO: 1111 - DNA, 1000 bp, mus musculus
caccgttattcccggccctgggcaggaagattaccatgatcttaggcgtgcttcagtgacatagaaagctccaggttggcctgggagatagagtgagaacttgtctcaggaaaacaaaaacaaaaaattataaaaaatttaatcttaagaatgtgtgaagcctggccatcttgagtctgaaagtcttcaaatctcaagttctaaactccaaaatgttgagaaccatctatcagctgctgcagtcatatttgtcaactcatagatttttctttgccttatttcatatagtcttcttcaagaaaagtaaagggaaaaggaaatagaaaggatcttgaactggttgttcaaggttcaggttttctgtagaaaccctgggtcacaccaattacctgtccagctgaagccaaggtgatcagcgatgtaagccagcctttcttccatccgctcctgctcatcttggggatctacagaaggtcaaaaacagaatggccaaagagtgtctgggacaagaggggaaccatagtactgatcatccaagaaaggaattcactcgatctaatatctaatagttgcacaaattagctatcgtggcttaggtcctatgaactggtatgttttctgatttctgggataaaatggggaatgaatcccatgtggtgatttgcggaaaccatctgcttccatatccctttaatgaagacttgtaactgaacagaatgtctagttatctcaggactttctttttatgcttttgaagaaggagaacaaaacaaccgtccactcactgaatacatgaaaccccagagaaatcagagatgggctacggaggtggagaaactgaactgtgctactcatgccctgtggacctgtcagtcaccaccacgtccgatctgaaagaaagcacaagggattatctgaagcctggacttaaactgaggccaggaagatcaatgtcctattgacctttggaagaaggcaggacaaaggcatatgagctttt

SEQ ID NO: 1112 - DNA, 1000 bp, mus musculus; identical to SEQ ID NO: 1111

SEQ ID NO: 1113 - DNA, 1000 bp, mus musculus
aagaggtataagaaaccagcataaaatatgaaaaacattatagtaattaatacacatctgtcaatgataattcaatattaattagaaaaaaaacagcatccatcttcttactgcctacaagaaaaacatcatccacaataaatattcactttgtggtaaaaggataggaaaaggttagaataaagcaaatgaaagtaagaaactaacaagtgtagttgtcctaatatccgacttaaaaactaaaatattcagaagagatatggaagaatatttcacacctattaatagagaaatataccaagatgatatcacaactctaaatagttatgtgctaaacacagtccctcataactcgatagaagacatacactagaactaaagccatatagttatacccacacagtgattgtgagtgactttaaaatcatactctcatcaaggggtcatcaagacaaaaactaaatagacacactggaattaaatgacgttataagtcaaatagacccaacagagatctacagaatattctacccaaatgtcacagaatagatattcttataagaaaccaatagaagctgaggaggaaggtgatgctgtagaaggaccagcagtctcgactaacctggatccccaagatctcagacactgggccaccaaccaggcagcatataccagcttatataaggctcccaacatatatacagcagaggactgctgggtctggactcagtcagagatgatgcacctaatcctcaagagactggaggccctagggagtagggaggtttggtgggttggggattcagggggattgggacatcctcgtggagacatgaggagggggcatgggatttggaacagtcagaaggtgggccaggagggggataaaatctgtattgtaaaaaaaattaaataaaaattttaaaaaaagaaaccaatagaacattccctaaaatctatcaaacattaggacacagatcatgtctcaagatatagaagg

SEQ ID NO: 1114 - DNA, 1200 bp, mus musculus
ccttccctgaccaagtgctgcaaccagcacgacagatgctacgagacctgcgggaaaagcaagaacgactgtgacgaggagttccagtactgcctctccaagatctgcagagacgtgcagaagacgctcggactatctcagaacgtccagggtaagggtggcctgctggctgggctcggatggcttctaatagtgcagcgaacacatcaggagagaaggtgtgcttctcacaggcattcactggcatgatccagctgtgccgcttgcctgcagggaggagcgggctgaccatctttgtaatctaaaattatacacggccacaaaagcaaagtgttccgaaggagaatctgaggcagagaagggaagaattcatctcccttagatatgtagagctactcgttcagaaactaaatgccgaagcctggaagcaagctgtcatagtccgcttgggatgctgtagtaaagtgtaacaagctgaggttggttatagacgacaaatacttcaggaggtaggggttacatgctgaaggcagaaatagccatcatctggcaagtttctctgcttggtttatagaccacaccttcgagctgtatcatgagacatggggaaaggactaggcaggtctctgggattccgttttgtctgcacttctgttgtgttgcagtactgaggattacagaagtgtcttgagtgttagacaagcccttcactgttgagctatgtctggaagttataccgtttttaatgtgacttatcccgttcatgagggcactgccccggtgacccagttatttcccagagtccttcctaccctaatttctttaccttggaggttaagacttcaacagataattcttagaggaacatagatattcgtatagacagacagttgtagcaccagtgacttttagcgtgtagtgcagctgctacgttgatggctcatgtgcctctaaccccagatcaggaggctgcacgttgcttggcttttcctggggatgtgtaaagaagtgatgttcatactagattgagcaccagtaacagcccaaagaaacaatcacatcaaagtccagcaccagtgaggtcatcgaggagcctacaggagctcaagcaacgcagaatcagctacatcacctcaggttccactctggcatgggtgacaaggacttgaggaggttgcttcattagagccctgccttagt

SEQ ID NO: 1115 - DNA, 1200 bp, mus musculus; identical to SEQ ID NO: 1114

SEQ ID NO: 1116 - DNA, 1000 bp, mus musculus
tttctctggcctatcaaacactaaaacacataactatttgttggcttactgagggaagaggcgattttgcttccctttattaatgagtcaaaggctgaccattcttggctagttatcacctgtcaaccaaagccatttgtcctgagaaggttgtagaaataaactgtttgtctgtattgtgctcatcacctgaaacatgtgtgaccagaggttgagatgagtagggtaggttattttccattccagcatttcttgattgtctagaagatctcatttactagactctagtgactggacttaaactatatgcatatttgtaatgtggtggtatcttttccttttatctgaaatatactctggatagccttgctatggtgctaacataggtaataaaaattttatcaaggacaatattgagattagtgtaaaatgaaagcacattatttttgttcccctagccaacgaaaccaaggtttggagatgttacttcaagctccctagactggttgtgggtgggtccagactcctataggcctggggtcaccctgacacttcctcattgctgaggtggccccagtttctgctttctgagcttcctaagtctcatggctgttagttcactgacttggtaatgggttttgctctttctcagacccgtgcctcacatcaccaaacactcatggaattcttcaggatgggaccaacatttgtgtttgctcatagtaaccattgttttctctccactttgagatgctttccctttcctggtagagggttgtatcgctttcccatatggcatctgcaggggaggtcctctctggactctatggaactgaattccagccaaggtatatgtgttagtcatgttcctctgaaagccacagggcatgggctggggtgtagagtggtgggaaacagggatacgggcctaatgttcaatggggaagacacacaagaaagtcagtgtttacaatagcaagcctggaagcaagccaaatgc

SEQ ID NO: 1117 - DNA, 1600 bp, mus musculus
gagtataattgtggcttctggggcagaccttgtttcatggccccagacacctgggcaccttccctgccagaggagaggtgtccgccctgaccaggaggactttgcaaaagcatctgggggagccatattcggttcccagattccaccaagactggtctgcgcaggtgagagtgtggactgcagaggctaacagcttctgggacaggcagaagccacagaggtaatggggcagaccacattttgggcttcagacatcctggcaccttccctgccagaggagaggtgtctgccccgcccaagaaggatttgccacagcatctgggggagacatcttggttcccggatcaagccaagacaactctgcacaggtgaaagtgtggactatagaagctacacagattctgggacaagccttgtttcaggccttcatcttctgctaggaggcaggtctgaataccagatatctgtccatcttcactgcaagaggagagcttgcctacagagagtgctctaaccactgaaactcaggaaagagctagtcttccaggtctgctcatagagactaacagaatcatgagaggaacaagttctaaccagagacaactataaaaactaactctagagattgccagatggcaaaaggcaaaggtaagaatcttactaacagaaacccagaccactcaccatcatcagaacccagcactcccacttcagccagacctgggtaccccaacacaccagaaaagctagacccggatttaaaaacatatctcatgatgatggtggagaacattaagaaggacttttgttgggagccgccctcacattcgccgttacaagatggcgctgacatcctgtgttctaagtggtaaacaaataatctgcgcatgtgccaagggtagttctccaccccatgtgctctgcctttcaactcggccgatgggctgcagccaatcagggagtgacacgtcctaggcggaggataattctccttaaaagggacggggtttagccatttttctctcttgctctggctcttgcttcttgctcctgaagatgtaagcaataaagctcttgcgctcttgcgctcttgccctcgctcttgctctcttgcgctctggctcctaaagatgtaagcaatagagctcttgcactcttgcactcttgcactcttgctctcttgctctcttgctctcttgcgctctggctcctaaagatgtaagcaatagagctcttgggctcttgcgctctggctcctaaagatgtaagcaatagagctcttgcactcttgcactcttgcactcttgctctcttgctctcttgctctcttgcgctctggctcctaaagatgtaagcaatagagctcttgggctcttgcgctctggctcctaaagatgtaagcaatagagctcttgcactcttgcactcttgctcctgaagatgtaagcaataaagttttgctgcagaagattccggtttgctgtgttcttcctggccggtcgcgaacgcgtgtaagagactttaataactcacttaaagaaatacagaagaacactgctaaagagttgcaagtccttaaaagaaacaaacaaacaaacaa

SEQ ID NO: 1118 - DNA, 1200 bp, mus musculus
tgtttcctctttaagatattctacctgtttacctgtgttctcttgtatttctttaagggagttatttatggccttctaaaattcctctatcatcatcatgagatgtgatttttaaatcagagtcttgttttctggtgtgttggggctagccagggttcactgtggtggaaaaactgggttctgatggtgccaagtagtcttggtttctgttgcttatgttcttgtgcttgccttttgccacctggttatcttgaatgttagctggtcgtgctgactctgacttggacttgtccttcctgtaaacctgtgtgtctgtactcctgggagaccagatctctccatgaggaatttgggtatggtgagctatggtacagggtaagcttttgggtgcagagcccagaaggatcttgtccccagctgatccttggtacctgtgtcctgatggctctgtgagagtccctcttgggtcaggaatttgaagagaagttatggtcttacctgtgttctcaggtatgtaggcattcctgggaggctccctccctccctggagccctgtggcagaggattttctacaggtagagatggaaacaggaaggctcctgtccctgtccttgacacccctaggttcctaagggttccatgcaggttcctctgagcagcagtggtgtttctacctgcattcacaggcctgtccacactcctgggaggtttgctccctcctggcgctatttgggtatggaaccctgtgacaaaggatctgctacagcagttttgggttttcaagccagctttggttaccagtgttataaggtctttaaacacccaatctaaaacaaatcaaaaacacaggataaacaacattctgaaatgaatcattttgagaagatacccagaattctgataagccagttataggctaatcaactgtatgtgtaataaatacagtagtaggcatacacgatcttcagaaattcccaatgtacttatttttttcaggatattactaaacattgtcttgacctaggaatgagagcaaactaatgaggaaacaaatctgaagtccagaaaagatggaattgttaatacaggagcagtaagaagagaataaaaataaaatgaacacttttacacatctaaataaaactcaagaaacagctgtatttaggtagatgaaagaaaatcccaaaaactatggttaag

SEQ ID NO: 1119 - DNA, 1200 bp, mus musculus
tgaaactctgatctagagatttctgtcactcttcaagtgctggaattacaatggtgaccaccactacagcttcaaagcaaacttatggctacagagacgtcctaatgaatgtgtgtaaagtgctatcacatgaaactggtcattctacccaaacagggacaacacacaacaagataagataggtcttttggatttcttaaattattttttaaataactgaacaaaaaaacctgaggtcattacattctagatgtgtaaatttacaaatctttctcaggagaattcttcatgattattttggtgggatggaagattcttcataaatgggaaaggaaaatccagccgcactagtagcaatccatgtagcctgatgtaaaggagaagcttctggaaatggcagagtcatgtaagtctcacctgtcagtcaactttggcaggagtttcatgggacaagcaaaggcgagtgcctccaggactgagggaagatagcagaaatgaaataaattccttggttcttatatatttccccaaatgatcacatgacccaggtcagaggattagagaaccccttgaaggcgcatagacctagtaaaatgttacttacctctgtgagctgatgagttatagggacatttgaaattccttggagaccactaagcctccactaacaacacagaaactggtctccaaagcctaagaagagaggaagggcctacaggagagaagaagaaaaaggttgaaaagtgggggctggggcaggtcggtcagcaacagcagaggaagaggccagcctggtgcacaaagctagtttccctagtgcaacaaaagcttgtggcagggctgtgaggcagtgaatgatctcaagcaagtttgagaactcacagccaactgccaattgtagagtctgtaaggagaattctaaagctgtcttccaagtgctgagactcacaggcctactagcaacttatttgtgatgccgctctcaaaatacctgatgcatgaggtgatgatgattctcactgaagccatggtgatgtgcatcccagtgtagaaaacagctcagactgactcagaccttcttaggaatctgtcagtaggacagccataccctttcctggggatattttctccagactgtactgtcttagacatctaccgtaacaaactgaaacatctaaagaagcagggatatttgactct

SEQ ID NO: 1120 - DNA, 1000 bp, mus musculus
acaaagtaaaatgaaacaaaaggtcccccaaataccactatgttttattttatgttgaccaactactcctgggagtgtgattgatatacttagtgattctccacgggagaaaattgatttttctcattgccagcagatgttaattgcataaggattgctaattagggtgagaccccatgtctgctttcccctctcagtgctgaaatcctgactggcttgaacctgtgcttgtgtgtgctgtcttgtgtgtgctgctacagtctctgcctgcatgggtcttagggcaagagtaacaaacctgagatccttctatggcataggaagcaggattcagggcagactaagcttcacaactcccagttttttttttttttttttttaaataggatctcaagtcctttccaagttttcagtgccagatttctaattgagtgtgtgctctaacacaggtatgggataaaatgtgtcatttgattttcagaattcttggtcatatactgaaagaagctgtcttagttagggttttactgctgtgaacagacaccatgaccaaggcaactcttacaagggcaacatttaattggggctggcttacaggttcagaggttcagtctattatcatcaaggcaggaacatggcagcatctaggcaggcatggtgcaggaggagctgagagttttacatcttcacctgaaggctgctagttgaatccacacagctatggtcacttgatctttgacaagcgagctaaaaccatccagtggaaaaaagacagcattttcaacaaatggtgctggcacaactggcggttatcatgtagaagaatgcgaattgatccatttctatctccttgtactaaggtcaaatctaagtggattaaggaactccacataaaaccagtgacactgaaacttatagaggagaaagtagggaaaaacctcgaagatatgggtacaggggaaaaattcctgaatagaacagcaatggcttgtgctgtaag

SEQ ID NO: 1121 - DNA, 1400 bp, mus musculus
tctgtatttccaattatagtctcctcaatctgtatgtagactaaaaagccagaaaccatatttctctatcataaatattttatttatatgaacacaggaatttactccatttcctttctgatgtctttttaacacttttttgtattcttattttatttcagcagatatcagaaagattttcctctacagctttgcttaaatattagatcctccaatgactctagctccttctatgtccccagctttcccttgtggcattcccaagttcataactttgtcaaattattcatatgcctcccaacctctctttagtttatatttaaaaatcatatggagaatacttcattcccctttagttctcaagagtaattctgatattatttctgtctggttattttattatcctccaaaatgatgtgtcagtcttctataaacctctgagatgggattcctaaagccctctgctttaatccagcattaattagggaagcagaaaaacctggcctgaccagggtcacaagtcccttctggtcagcaccagcaccaggtcaccatgggcgctgagtcagcaaacacccccaaggtccctagaggactctccacgacatcttaggacctctggttagtggaacacaacctctgccaggaggcaggtcagaatgccagatatctgagcaccttccctgcaagaggagagcagaagagcttgcctgcagagagtactctgtccactaaaactcaggagagagctattctcccaggtctgctgatagaggctaacagaatcataagaggaacaagctctaaccagagacaactataacaactaactccagagaataccagatggcgaaagacaaatgtaagaatcttgctaacagagaccaagaccactcaccattatcagaacgcagcaatccctcctcacccagtcctgggcaccccaacacacccgaaaagctagacccagatttgaaagcatacctcatgataatggtagaggacatcaagaaggactttaataactcacttaaagaaatacagaacactgctaaagagttacaagtccttaaaggaaaacacaaccaaacaggtgatggaaatgaacaaaaccatactagacctaaaaagagaagtagacacaataaagaaaacccaaactgaggcaacgctggagatagaaacactagaaaagaaatctggaaacatagatgtgagcatcagcaacagaatacaagagatggaagagagaatctcaggtgcaaaagattccatagagaacataagcacaacaatcaaagaaaatggaaaatgcaaaatgaaaaagatcctgattcaaaatgtccaggaaatccagtacacaatgagaagatcaaacctatgaataataggagtagatg

SEQ ID NO: 1122 - DNA, 1200 bp, mus musculus
gtcctcattggtgagtctagggcagtgagctgctcccatttcctcacagtgagaggaccatgcagaaggcgaaagccttgcttgggattggaggtactgggagaaaacagatgggaaacaatatgcaatcccagtcctcactgtgcctcgaagcttagtcggccatcactgggaagagaggccccttggtcttgcaaactttatatgctgcaatacaggggaaggccaggaccaagaagtgggagcgggtgggtaggggagcaggtcggggtgtgtgtgtggtaataggggactttcaggatagcatttgaaatgtaaatgaagaaaatatctaataaaaaattggaaaaaatacacataaactaggaaaaaataagaaaagaaatggagagagggttaccccgaaaacgtcacagcacagccatgttcccaggaagctatcctactttcttccaggtgaaacctgaatagcctgtagacagcctattttcctgacaactatgggtgtgtatgctttgtgggaaaaccttgtagaagattcatgggtcaaccacagaactgttacaataatccagaacatattttcaaactctatttacatcatgactaacaaagcaataatgatttcagaaacatgcactgcaaaacattttcttcttgtatgctaatgttaaaatatatgattcagccatcagaatccattggtacagtacatgtcttcatccatgcactgatccattgatggatttatgcattgatccactgatggattcagaacttgaatagaactgggaactggaagaactatggacggtaggctattggaagaaacaggtccctgggggattatccttaaaagacaagttttctccagtctattgtggcttctccctgcttcttggctgccagaacaggagcttctctggtccctaacagagtcttttgcatggtgtccagctttgctgcagatccactgctgtgaaaccagccaaccagcattaaactctgagacaaaatatgtcctttctttactttaagtccactttccagggtgtttgtcaaagtggcagtacaagtacttaagatggagggaacggattcaaacactacaatggcccatctataagaaaaactaaaacagaaacagaacaggccaacaaagaatagaaaaataaacccaacattttatgtgggcatttt

SEQ ID NO: 1123 - DNA, 1200 bp, mus musculus
ggcagtctttcagaagcatgtatattagcgtttgaaagtcaccaactattttttctattcgtgaaaatacaaaatttgaaatcaatttatcttgcctctatgtgctatgtaaaaagttacctgttttgtggaaaattgatcacatggatttgccataaattgaaagcacagtaagccagactgatgaggccctattagttccatgaagcagacgagtacacttgtacgtccaacaatgctgcatagccggacatgtgacgaattggtatcttgcaacctagtggagaaaatccctgcagtgtatgggttccatgactgggtcatgcatcctaggtcagttgtcatttatgctccttgcactttttccccatttatatcctaatgcaaaaatgatttttcttctgaaaaagtagactatggctttatttgcctagcaatgcacaattttgtttctagagctgatttttatagttgcgaataactaatggttaaaaccaagagatatgcatgatctcatgaactccccttgctccaaagtttgctccatctgggcccccagcccaatgagctgtgcctcctatattcagggcaggtcttttctcctttaggccatcaatctgcatgccaatctctgtaaatgcccacacaaacacaactaaaatgtgctttgcaatattccatgtgtttgtatagtcaagttggctactaggatttcccaccataggaagagaatggagaagccacaactgttcagcggagcaaatgaaatagatagttatagctaaccatactgtaatgtggaaaaatgcaagtcagaaaggtaagttaagggtgcaggttcaagcactgcgcagagtgggtaccctgggcccatttcatcatgtctacccagatgggaaatgagcctcactagggaaccaggtggaagtcttgccattctgggccagggattctcatccttagcactattgacagtttaagggagatgataactgctggtgatggcttgtatatagttagatgctaaactgtgcttggggcgactagctactgaataccaacagtagatttctcttccaggttgaattatcttatgcttttagctgtcaagcattcactgggaaacaaaatatctcctggataatgactgctatataccaaccaagaagtgttaaatatgtaaacagtggctcagaagct

SEQ ID NO: 1124 - DNA, 1200 bp, mus musculus
tgggccaactaggccttgaaagagctagttcttaaaaaactctacatgaatacaacagttagaaaactcagccttacggtccttcatcatattaatggctggggaagacaaattaccactcatattgcgtgactcagaaaatggattttatgaaattcataataagtgataaaacttgtctatgactcataatgaaaatgccacatgtaatttttaaaaacatataaaattgtgaaaaagaaagatatgctccttaaaatgatgatggcagggaattttgcctttaccatcatgctgtaacaagctggattgcccaactcaaaaacctaagagaaagaatcaaagaacttatacattttaaatcaaaagttcctgtctccttctgcccagtcgttgctgctggggcagactcctagttggtctgctcctgtgaagacaccaaatccagatccatcctagaagaaccactgccctcagagcagttggtaagaacccactctgcacccctgtcctaaactgctgctcggagcctggaggactcaggaaccataacccaacaaaaaccccaccctcccaaataccactccccttctgtcccttccaccctttctgcctggtcctcgttgctggggcagattcctagttggtctgttcccataaagacaccatattctgatccggcctagaagacccactgcactcagagcagttggacaacagcttgactgctccactgaagacccaacagtctgaagatctccaggagatctactgcagccaggacaacagatcagcagcttctctgcccctgtgaagagccctgagttgaaaggccccagaggcagtctgacacatctagggccgcaggcctaccaggagacctgaagcaacccagggacaaaaatggcagactctagacagtcacccagaccaacaaacaacagggatatccagatggcaaaaggcaagcacaagacccttagcaacagaaaccaaagtacatgggaatcatcagaatccagttctcctaccacaggaagccctgaatatagcaacacacctgaaaatcatgaatctgtcctaaaatcctgtctcaggaaggtaatagagtcctttaaggaagatatcaataactcgctggaaaaaatacagaaaaacacaggtaaacaggtggaggaattgaataaagcaatccacaac

SEQ ID NO: 1125 - DNA, 1400 bp, mus musculus
gactttgaaaaataaaaagatgtataaattgtgtgaagtatttataaagtcagaactgtttatgaacctagtgagggcattctgtcatgtagtaccttctcataaagaatttaaaaatcagacagagattcaagccaggcccacataaaaatcagggaaccttagtgtaacatcagctatgacatgggatgtcagtgaagaaagcaatgatttcattgaaggtatgtgggcatttatctgtctgtctgctgtctgtctgtctatctatctctctctctctctctctctctatctatctatctatctatctatctatctatctatctatctatctatccatctatctatttatctatttgcttccactgctttcaagcaatcctgcttttggaataagaaagaaggactctgtgagcttctggagagctatgagtcttgtccttactgttgttacttagtgttactttttcatccaaagactgaggtgaccaggactggacagcattagctccaaacgtgcatgaaactcagtgttccatcaggtttccatagctgtgtgctgcaccgtcccaagcagctcttaccatatcttgaggttgatcaagaaagcctttgttaactgccagattggtacgttgacctaaggaaatgagcctttagctcctggaaatccattgtgccaaccacaacattcctaaatgcatatggaaggagagatcattgtcttggtctacctcgtcatcccacggatctgctgagtcttggcattccactcaggctgaggttggtgaagtgagagggactcgggggaccacttgaaagtctttcccagcttaattaggtcataaagattttccaggaaactgaacttcatgagagccagaagtgcctcagtattgctgacctgacacatttcaaaaatagatgcacagggctccatttccaaaagtctaccccttccacccgatcaccaccatcaaattggccgtgacttcagctcttcttctgtcctctgaggcacttgcagtggactgctgctcaagctcttgcctggtcaaacctacacacaggagacagatgggttattttaaattattttttttttaatttttttttccattttttattaggtatttaactcatttacatttccaatgctataccaaaagtcccccatatccacccacccccactcccctgcccacccactccccctttttggccctggtattcccctgtactggggcatataaagtttgcaagtccaatgggcctctctttccagtgatggccgactaggccatcttttgatatatatgcagctagagtcaagagctccggggtactggttagctcataatgttgttccacctatagggttgcagatccctttagctcct

SEQ ID NO: 1126 - DNA, 1000 bp, mus musculus
ttattttaaaaagcataattttactgcaggtatcagataaaacagtactctctttttttattagatattttctttatttacattttaaatgttatcccctttcctggttatccctccgaaaacccctatcctatcctcacttcccctgctcaacaacccacctactcctgcttcactgtcctggcattcccctacactagggcatcgagccttctcagaaccaatgacctctgctcccattgatgtccagcaaagccatcctctgctacatatgcagctggagccatgggtcactccatgtgtactccttggttggtggtttagtccctgggagctctaggggtactgattagttcatattgttcctcctcaaaccccttcagttccttctgtcctttctctagctgcttcattggtgagcttgtgcttagttggctgaaagcatcacctctataaccccactctcaatcacaaagttccaaatatataaagcaggatatcatctttcctataaaattaaaaataataaatttttcctcttaagccaatctcttgtaataacacagttaattgctaatatatttcatgtcttcttcattgcttcccacaattaattcagtttccaaaatgtataaaactagtctcatattgaaaattcccaaacaatggagttaattttgcacttgtattgtgctcaacactaagcaaaacttgactattaggaaacaggcaaaatcagttccctttaatgttgctctagtactggtttgactacttcaagcatgctccatactaaattttcttattcctactcctatacagataaaactgatttctccttgtctcttgcatatgctacatacaccaagacctgagatttcaaatgacatggacttgaaaaccataggtgttaacaataaaagtgataatatcttgaggttacaattctcctgtaaattaaaatacaaaccaaaaggacattgagatagccctttacctc

SEQ ID NO: 1127 - DNA, 1200 bp, mus musculus
ttggggggggggctctattccagcgagagacagagataagcaagaatgctaatgagaagctaaactgtaaagtttatgagacagaatgattgcagagttgggagctggggagtggccaggttggcagtattgctacactggacatgtgcagtctggacacagtgaccacaagactgtgacattacactgtgcagtctggatgtcagcagcatggcattacactgggcaggacatagtggatacgagactgtggcattacactgggaagtctagacacagtgggcatgagtctgtggcgttacactggacagtctggacacagtgggcacgagactgcagagttacactggacagtctggatacagtgggcactagactatgactttacactacgcagtctggatgtcagcagcatggcgttacactgggcaggacatagtaaacacgagactgtggcattataatgggcgacctgaacatagtggacacaagactgtggcgttacactgggcagtctgaacatagtggtcataagactggtgttacactggacagtctggatgcagtgggcactagactatgacgttacactgcgcagtctggatgtcagcagcatggcgttacactgggcaggatatagtagacgagactgtggcgttacactgggcggcctgaacatagtggtcataagactggcgttacactggacagtctagacgcagtgggcacaagtctgtggcattaccctgggcagcacatagttgacacgagactgtggcattacactggacagtctatagcacttaccttgagcttgcagccttcattctgacacagcttcctgaccagggctccaatgatgatcataaccgactctctgatgtcgttgcttgcaaaggaacctttgaacttactctgtagccaaacaggggtcaaataggtcatcaggacacttcagctttccaaagggacacttcccagctaataaagtaaccatcatctggggaaatgactttgtgtttctagacaacaaactcagaattttgtttttgagacacttagaaatgtgttgtctagttttgcatgaaggattgctagactgcctggccccaaatgatcttagcccctccttccaccactcccccccccccagtctgtgaaccattcagggttcggggatttgattgttcagttgttcta

SEQ ID NO: 1128 - DNA, 1200 bp, mus musculus; identical to SEQ ID NO: 1127

SEQ ID NO: 1129 - DNA, 1000 bp, mus musculus
gtgaacaatcacagttttaaacttacttctcagccttacctcccaggatggcacctggcgctaccctgtaagacactgagtgtgacaactgtggctcctctgcacagctgtaccaccaagcggagtcactccctgccgcacagtgttctcttctgtactcaggcctgaggcgactgtcggtcatttatctttagatgaggcatctgcctggtccagagccagggattagccatgtgctgcccattcctttgctgtgcgttctgctgtttttccctacttaggctttcatcttacatcctttgtgctagcccttgttcccagcctctccctgttccgaaaagcatcaccttccatcgtttgccatttgacttttctcattcattgctttgtttggaggaggaagcttgtaatctgatgccttaccctggagacttcaagctgtgcatttttagtgtgcttttccatatagcatttgtatttattctctgagaatttcacacacacacacaatacattttgatcatagccggctgtcttttccttcctttcagctcttcctggattccaagtctcccaccccccccaccccccacccccacccccgcataataattttttaattgggtacttcccaactttcagcttttgacatttttttagctagtcgattctggggagagatggattggtaacattaagaccttatttaacatcacctggcagattaacatgagaatagtttacttttcagactaatatgttatgaagtcttgcaaaacccttaaggagtttatcaactgagaaacttttcctttgtgccagccccacccgtgttggctctctgctgccttggagccagctccacccttgttagttcttttgcctctgttctgaggaaaacaagcttttgttgctgagtctgggcttggtctttgatggttgagattcagaatgtctgtctgtccgtacctgcctatctcttgtccgcggtgcctacaac

SEQ ID NO: 1130 - DNA, 1000 bp, mus musculus
gtggtgctgggttggacattttttggggggatcctgataggtgtggctactggggggctcttggtcaaatatgtttctaggtattgagtggtgacatataggaacagagacgggctatgtggatcgggccgaaggaatccacaggaggaaggaaagcaggatgttccatcagaatccgcttagtttcctgggaaaggggacagagagagaagaaggatgacagcagaaagtctgctacagagctggggattcgaatggggaattggattttgaggactggaggaggaaaaggtgaagatctgcagctatgctacctgctttcctggtagagtagcctgtggaccccgagaaatgccagctgggtctgtgagctggaataaagcaatgtgtgaggcagggaatcgggaggggaagatctatgtgaccccttggtgatgggagtagcagggatgtggatggaaaggccacggtagtgggtagtggtgtgttacagtggtgggaacgagcctgggggatcagatttggaggagataaggaagaggtgaggagctacactagtctacctgtttcccttagcaacgtgtttccagggagtgcaggaagttaggagggttcgatctgtgcgatccacagatggtggggagtggagaaggtggcagcagctagcagtctgctgcagagctggggatcatttggaggaggtgaagatctgcccctgcctgtttgctataggcttccctggctctggtggcgtgcgtgctgggcctgggggcagggagagtaaggacagatgtttgagggaagatttgtatgatctgctgcagatgggggtggcggagaagggagaccacagcaaggtcatccagtgcagtcttgggactgaggctggggccctggacttgggggagctgagggagaggagatctccctcttgtatctacagttggcctatctgcttcccacactgatatttttcttaagagatccctatcaaatattc

SEQ ID NO: 1131 - DNA, 1200 bp, mus musculus
aggaaaatacctaattaaaaaaaatagaagggtggatcattaaaaaaaatgagatgtttttgtctcccaggtccctctgagaccagtctgcacagatcaggtcatggactgtggagggtgagcaaacagactgcagaagcaacatagctcctgggataggccctgttttgggctgcagacatccaggcaccttccccatcagaggagaagcggccacccgggagggctctgacccccagagcaggtgagggagccatcttttctctcaggtccctctgagaccaatctgcacaggtcagctcatggacagggactgcagagggtgagtgagctgactgcagaagcaatacagcttctgggacagacccctgttttaagctgcagacatccaggcaccttccctgcaagagaagaggtgaccacctgggagggctcagacctccagagcaggtgagggaaccctcatgtgtcttgggtcccttggagaccagtctatgcaggtgagagcatagactgcagaggcaacccatcttctgagacaggccctgtttcaggccttcatattcagccaggaggtagatctgaacaccagacctctgtgtaccttccctgaaagaggagagcttgcctgaagagagtactctgaccactgacattcagaagagagctggacacccaggacagctgacagaagctaacagaatcacaggaggaacaggctccagccagagacaactataacaactaacactagagattaccagatggtgaaaggcaaatgtaagaatcttaaacagaaacaaagactgctcaccatcatcagaaccaagtattcccacctcagccagtcctggatacctcaacacacccgaaaagcaagatttggattcaaaattatacctcatgatgctggtagaggaccttaagaagggcattaataactcacttaaagaaatacaggagaacactgctaaacaggtagaagtccttaaagaggaaacacaaaaatctcttaaagaattacaggaaaacacaaccaaacaggtgatggaattgaacaaaaacacccaagacctaaaaagggaagtagaaacaataaagaaaacccaaagtgagacaactctggagatagaaaccctaggaaagaaatcaggaacagcaacagaatacaagagatggaagagagaatctcaggtgtag

SEQ ID NO: 1132 - DNA, 1000 bp, mus musculus
aaggagctaaagggatctgcaaccctataggtggaacaacattatgaactaaccagtaccccggagctcttgactctagctgcatatatatcaaaagatgacctagtcggccatcactggaaagagaggcccattggacttgcaaactttatatgccccagtacaggggaacaccagggccaaaaagggggagtgggtgggcaggggagtgggggtgggtggatatgggggacttttggtatagcattggaaatgtaaatgagttaaatacctaataaaaaatggaaaaaaaaataaacatccaaaaaaaaaaaaaaacaagaaagtgttaggcgtatttttcaaaacaactaagagcaagatgttagtcacagtgtaggtattttttctgatgacaacaattttatagtaattagtttaataatagtccaggtggagacagtcaacaaaacgcctcctaatgcatcgttgctttatggtatacattttaaaatcatatttttttgctgttatgtatgtaacagacacctaagttttaaagaaacatagaatggtagaagcagataaagtctcgacagtgagaaagcagcgtgagaaacgtgcataagagaatatgatatgtgagtgataggaactggaagaacaagttcgtcactgcaccttcctgtgtctggatagcaccctgccattctgctttaatcctgtgcggccttctcaaaggaagctgggaggtgatgaaggtcaggaaagtggcttaatcacagagcctacttacctcaggagtccctgtgtgcattcaactccacgttttaaacattgtccagttctaggcctctttactttcttttggctgtaaccagtcctgatgtttcccttcttgtgcctttatttcctccaagaaacaaagttataatagttgctgtattcccaattatcacatggctagcttaacctgaaacccaatgtcaacaacttaacaatgaatttaagtcacaaataa

SEQ ID NO: 1133 - DNA, 1200 bp, mus musculus
ccagcactagactattataaaaacaaaacaggcaacacttcacactaaaagactcaggagggacattgtttctaagaattttgtgtggtattatcacttgccatgtttgctttgttcctgatatcctgcattagctaggacttttatctgtgataaaaaggctgttgctttgcttcttacctcatctctctcaaatctgtccctccctcaatgtctttcttatgccagtgataaaagtattttaagttgtgggtgtgccatccatccctggtggcatctctgcaaacaacaatttaaaggttatttttacatatcacttatatgtgattaagcctttagggaatatgacaaagatacccagtggtgcagaataggaatcctttaaataaggtgaaattttcagtgataattgctgcgaggtaaaaatgtctttcattcctgagcagccagagaagagagtagcagtgatagcttgatgacatgagacattctgcaaggagcccatgctgagcgtcaatacttaggagccacctgctccagggagtctgggagctgataccagaggagagcgagatgcacaggcagggtgagaacactgcagttacaggggcgggaagtccagctgcatttatctgtaccttgtgaacacacacaagaatccgaggtaccacagcagactaagccagagggcaacatccagggagaacactgttgagatccagtgatcatagcaggaagttaacatctcaggagagaaggactgagagttttcctctccttgctttttgtctaagacgttttattttattttatttcccgaaaaaaaaaaaaaaaaaaacagtccagggcaaagtacagtgtcaaagatcaagtgcagtattccaggaaaatatcaattcagacaaaagctgtgatgctattgattttaaactgactaaaagtagattcttacaaaaaggaaccccatattgttcagagtgtagaatttgatatgggttaaggtgaactcagaaggtggcataaggagaaggactgggtcagaggtggctgagaaagaactcttaaaattaaataatgaaatgtaactcaaaaaagagtaaagttctgaatagaaacatagaaatggctaatacacacattagacattagagaaatgcaaatttaattcactaggagaaaccatgatgactataattccgt

SEQ ID NO: 1134 - DNA, 1000 bp, mus musculus
caacaggaactctcagggcccaagcatttgaataccctctgaagaatccccagaattctgaacttcacacaatcacagaaactctctgcagctagcaaaaccacacccctgttagagcaggaagcaaatcattgtcagctgctggacaatcaagaccagcccctcgtccccatccctgggattaaaatgaagtcacattcctatttctgtgtgtgtgtgtgtgtgtgtgtgtgtgtgtgtgtgtgtgtgtgtgtgatttaaagaaacaaaaactctcactacatttatgtgccaaggatattattgttcaggtattatgtttccttttctcctagatcatagtattttttttctctccatgtttggtcattttatatttgcgacgctcttactacatttcaacagaaaacttttttactacattccagccaaaataccttccattttctcattctcctttccaggaaacaatggcaaccacaaaactgagagctcttcaaaagggtctgggtgaccacacactggcctctgtccctcccctcctcactggcaagtggcactcatgtcctcgcttcatgtagacttaggggaactttgcccttgtttgttccagtcttgcacttggtactccggttgcactttattggctatttcagaagtattcttcaaggttaacacctgacttggttttaatagcacagttgacctttctgccctggtcagtccacagcattcatggcttctcttcatcttgtggattttctctaactcatggccgctctgtataacttcccatggtcacaactctcttgggagtagagactcacttcaggatgatccagagctatctcacaacttcatcggcaccaggcaagcctctcattccaccgctcatttcattcccatgctgccattctttatccatctggctaccacataattaactccgtttgtatgtctaattattttcttaatagccattccaaaaataactttctgt

SEQ ID NO: 1135 - DNA, 1200 bp, mus musculus
gtcctggtgatgatttctgtctcacaatctgcaaacttagactaagtgtgattgtgcttctgcctcttgaataaaaccttagtatattctctttccttttgggaaatcggtgacttaaatgtaacccctttagcccatgtttcccaaaaagccacatttcaatttattgattattttctttcttcttttacatttttattggatattttatttatttacatttcaactgttatcccttttcctggtttctccttcacaaatcccatatcacacctgcctccactgcttctatgaggatgctcccccactcacccacccacccactcctacctcaatgtcctagcattcccctatactggggcattgagccttcacaggacccagggcctcccctcctattgatgccagataagctacttatgcagctggtgccatgggtccctccatgtgtactctttggttgatggtttagtccctgggagctctagtgtgtgtgtgtgtgtgggggggggctggttggttgatgttgtttggtgttcttcctatgggtttgcaaactcctttagctccttcagtcctttccctaactcttctgttggagtacccgtgcttagtctgatggttggctgcaagcactagatatataaggaagaatttatatcccatacaaacaagggcaagttcatgtgtaaagcttctatttctgcttcttaacaatattctgcaagaactgaccctgttcattttggtcccctttccccaatgatctgctgtcctgtcacatcagcattccaactgaaattccagactgattagaaagactccttgtggtggccccagggtgttggcactgcaggtataaatctgtgccgaatctcctccccatccctctgtttctcctgctgtcccacgcagttctaaatgaacttgctcagagaactggaacattagctgagatttttaccagacatgacctgaggaggagcaggtgatgtctagggatgaaacaaggacttttcaaagatatatcacaggttccatggaaaacagtattgaatcttataacataatgtgtccagttctgatccttgtagtagaacaagagtggcagcattaatgtagctaataattatcttttatacacagcataattagtactattttaagttcatacagttcttctagcttttacatcattat

SEQ ID NO: 1136 - DNA, 1000 bp, mus musculus
atatgtggcaggggtaaagttttaaagaagttgtaaaactattttgcaaaataaaataatactgcaaagccaactagcagttagaggagtgcctgcatttggggggggggtattttctttatttacatttcaaaccattgcctctttcctgatttcccctccagaacacccccatcccatcccctttgcttctatgagggtgttccccaaaccactcacccacttctgactccctgccctggcattcccctacactggggcatctagcctttacaggacaaagagctccttctcccattgatgacaacaaggccatcctctgctacatatgtggctggagccatggatccttccatgtgtattctttggttggtgcctgcatttttaaattcttgaaacattttaaatgatcagttgtttgattttaggcataagtagtttatcacatgtaattcataaatgtttcctaagatcttgtcttttcattctcttagtctataaatatttttccaacgctttaaacatatgtaaaattaaaaagtctaataacttatcaataaatctgcctgctaggtagcaattacaatactttcaatgttttgagtgtattattcactacgacaattccaattatgcaaatatacttaatcccactactataattctacaattcacatgtgagatacagtgttcacaaaactctttgaaagcaatctaatataaatgtttattgatgagttctttgggatagattccaacaagcccttgagtgttcataaatgttgttaaattcttcatcctcagccccaacaccaatcaatgtaaataagattctgaatattaactagcaatccatataaattttcactatttaaaatcaaaagtcttatctgtataagactttgatgaataaatataattttaataacttattggatttatggttttcttacactctttatattcctatttatttattcatcctttcttttttaattct

SEQ ID NO: 1137 - DNA, 1400 bp, mus musculus
atacatgaaataagaaaataaatctttaaaaaaatcttttaaaaaaatgaatgaggtaaatcagacacaaaagaacatacatagtatgtactcactaatgagttgatattaaccaaaaacagtacggaatacccagaatacaacccacaaaactcaagaaagttaacaagcagaagggcccaagtgaggatgtctcaatccacttgggagggagaaaaaagaaatcatggctttgggggtgggggtggggggagaaagggacctgagtggagaagtgacaggcagaggaaagggggaacatgattagatattgagggggaattggactgaagtcctgtgggccagcagaaagaataaaaacaggaaacctcaggaggtagagatgggaggaccctcaaagggagtcaccttagatgaaatgccctacagtggggagagggagcttgtgtagtcctcttctagtggaaggacatggtatcaattggagaaatggggttgccatcttacaatcaggaactctgacccagaattgttcctgtctaaaagcactgcagtgatggaaatggataagagcctaagggaaaggaagtccagtgacaggcctagactgggatccagctaggggctagggagaggttcctgggcctgacactgttactggagctatgatgtgcttacagatgggagcctgccatggctgtcctctgagaggcacagcaagcaaccaaaagagtcaggtgcagttacttataaccaatcaatggacagaaaccagggacccctgtggttgtattagggaaaagctggaagaagctgagaaggagagcaaccctgtaagaagaccaacagtcacaacttgcctggaccccagagatatcttggacactgagccaccttccaggcaacatacacaagctgacatgaggcccctgacacatatacagcagaggacttgcctcagtgagagaagatgcacctaacccttgagagacttaaggtcccagggagtggggaggtctggtggggttgaagtgagggggtgggtacatcctcttggagacaggagaggaggtatgaaatgggggttgggggtgcagagtgagaaaagggtagtggccagactgtaaaggaagatcaaagaataataaataaataaataaataaataaataaaatgtttcttgctctcctctctgttagtagactaaaactagaatggaagtaggaaaatataaccacaaaaccaaaaataattggaatgggagaataataaggggagtctaaggaaagtctaagtcaaggtagaagaatgaccaacagggttggggatcaaattcaaccaactaaaactatccatgaacccaggagcctaaggcagggacatcctcagtcacagtgtag

SEQ ID NO: 1138 - DNA, 1200 bp, mus musculus
acaagattgataagataattatcagcacctagagaaggtatgtgtagaaagaaattacctgtgattgctactggttttctttcaaatggtgatgaactgtgttctgaaatgcatggtaaaattgttgtacatctctatacatatgataaaattctatgcactttaaatggataaattgttcagtatgtgaaaatttaaaggttgtttaaaagaaaatacccacaggcaacttctgctgcaatattcatgtcagcatatcctcagcgtgcaaatctgggaagatcgagtcacagcacagatgtcaaaagccacaaactatagcagaaatggacaggaggtaaaacaaggcaagaagccttcagtgccccttgagctggtcattaacatgtgtccttactccaatacaaaggtacatgagaactgtgaaggagggacacactctcccatcaacatgcaaagcaggcattggaaaggcaattaacagggcagcctatactcaggtagatggagaatctagcaaacattggtaaggcaattcacagataagtgtggactcgggtagatgaataaacccctccaactctagctggttttctgagaatctttaaaaagaaaccactgcaaagagagattccactgggaaattatacaacaaaacaaagaaattccaagagaaaacaagggaaatttgggtgccccagaacatagagtgcactctctttattacttagtgtctggtgttgatcacaggtaaagaagttctagggactgaacttggtaaacatcttctaaatcatgtttcttctactcaacaacagaaaaggcagtggtaacactaatcttttacctattagctgtcttcatttaatctatactatcacattctattttatgatgcttgagttgagacaccaaaaatatgatttaccaattatcacactgttaggtcccattaatagtatgaggaactaaacattgtaattcacaaagaactacagtgcaatcacttgtagtagtagtagtagtagtagtagtaatattaataacaatataagatgaaaatatcaacaaagaagaaagacaattacttggtggcccaaaataaatgcaatatttgttaatttctagctccattatctttggttaataagcattaaggacaaattctaaaaattcacccacttatccacagaggacaaa

SEQ ID NO: 1139 - DNA, 1000 bp, mus musculus
taaataacatctgaacaaagacagttgacttttcactgaccccacggaaatgcttaaatgtttggatttatccacgagaaagatgagacagtcagtgtttatatatttggatatatttgtttcaaatatgtatgtcatgtaaactgcttaagcgttttgagcatggtttagtgaattcctcttgaagttttttgtagaaatgaaacttgctgagtgcaaagctatttgctgaccagaaggagccttatgccatcagggtgagtggaagagagtacacagataaaccactcattctcactctcctcccttgtttacacttaacatccagtatagcagagtttccctaatctacatgaggttctcagccttttcattataaccattctgtgcagaaactggaaactttccaaacaggtattcatggtctcctttctttataagagatccccacttggaactgaaacaccagctcttttgaagacagctatgaacatttaatatttagctgacacaatataaagacaagtgtctcatggagcttataaacggataggttcctgaccttccaatccatctctctccttgcaaaaagagaactgttagtttgtcaacacagtgaccttctaaggaaactggccaataaagtataggcatcctaggagtctgactaacagccggcttctgcactagtctaaacctcagctgcctacacactaggtggcaatgacctatggggtcatgtgacacagtgtagcaattaataataattcaagcaacacaaaagatttctgatcatacatgactaaaacatatctccaaaccaaatgctcaatgaaccaaagtgtttccagaagtgctaactgaagcttcatctcaggacttcatttatcctttcttctgtccatccagcatgcacactttgtattacttttgcctctacacaaggaatgaatcctgaaactcattggctaaatgcaatagtcttttctgttatacattc

SEQ ID NO: 1140 - DNA, 1000 bp, mus musculus
gtatatgtatataggcattctctgttataacctcttttttaattaattatctgaatatgcaaacttgcagcgagcttttcctatgtgaacactagctcctagagttgtacaagacaaagctcagagaaaaatctccctccccctttctccctgggacttcaacttagagaagcacaattcctccctcccccaagaagctttacctagcctcctgctgtgtcactttgaggtgccaactagaggctggggaagccatctttaagggactgggtcaggctgatcagctgcagaacttcagaagcagagtacctttcacctaggacagataggaaatggtcaaaatggtccatggcttagtttctgaatgtgatataagcaatgaccccctcactgttaggtccattggattcataaccttagtttcaatatttctctgtttagttcctgtcttgatgacatgtgctttggtgaaagtagggtgttgaagtctcccactattaatgtgtggggtttgatatgtggtttaagctttagtaatgtttcttttacgaatgtgggtgcccttgcatttggagcatatatgttcaatattgagaagtcgtcctggtggcttttttcttttatgagtataaagtgtccttcccatctcttttgattaattttggttgcaagtctactgtattagatatgggaatgactactccagcctgtttcttgggtacattttcttggagaacttttttacagccctttacctggttctttattattctgtggacctggatggtttttcttaggcaggccttataggggccagcagagttggctgcaccattttaattttcagttcccagtggtccaatcaacaatgtatatggggaggctgaggcattaggttcacaaggtcaaggcttgactgagttatgagtagagacctgtgctccatcctccccactctcaatccaagggcaataaatagcataccatcccccaatggcag

SEQ ID NO: 1141 - DNA, 1000 bp, mus musculus
gttcaaaaaaaagcttcgagaggtattattcacaatatcctgctggtaaaaaagaacctaagtaccaaaacagaacgtgctataaaactataacatggacatcattcagtcaaacgatgaataagtgtgctctgtgaaatgagccagatatgtaaggaaggcccatttccatgaaaccgctagataagacaagaacctaagtagtggtgctggggcctaggaaaaagagtgcattgaatggacactggttttctttagggatgctgaaaatgttctagaacttgacagtgataataatgcttgtgtattatattacaagcctcttagaaagctttctttcagagctgagcccttgtgtgtgctaagcaagcactgttctaccaagttacgttcccaccaattaatccttatttttagacagggttttactaagctgtccaggcaagccttgaacctgcaacctcctgcttcagtgtcccacgtagctaagtttacatgctgtgccatcagccccagcaaatagtaaagtttactatatgaacctaaaatataattgaaggaaggtcctgtacatatgcctctgactccaactattaatccatactcttatataatcaaaaccaagacagttacattctacgcaccggttagcgccgctggcttggacagtgtgctatactggttctgcgtggacagcatgctctgccgtggactcagggttggtgacgcaaccagtgaaagctcctcaatgacgacactgcttttggggtgattcctggggagctcatttaacctttgctctagtgaatactttaaaaggtccaacttctgacttgattcattaaatctcgcttgtgccttgttaggaaaagagatattgttgtcatttaagccaggatattcttcaaataacataataaacggctaaaaattgtttttaaaattacttctgaaagcgcttttctgtctgttacttttcctgagccaagtaacttcatga

SEQ ID NO: 1142 - DNA, 1000 bp, mus musculus
tggccttctgactccagcaggtcacacttcacacccccactgagtcatcccttgatgttatttctttagcgtctcaccctcttctagctctaaaatacctctgagatggtctctagccactagccattcaagcctttcccctgagctggctcaaacctgccattccaaccttgtttcccactaaggtccaattcagctttctgggacagaaagctggtgtcctcagtggtctggtgtctttggtcccctgaagaactgcaacctgccctggaccccagtgtgtacacactctgtgctttaaccaagggtcagtccaatcctcaccatggctggaacccacagtatcctgtccttctctgcactcacgcctgtgcccctgacagtgggtgacttgcactcatgcctgcacccctgacagggggtgacttgcatctacacctgctctcctgacagtgggtgacttgtactcatgcctgcacctctgatagtgggtgacttgcactcacacctacgcccctgacagtgggtgacttgcactcatgcctatgcccctgacagtgggtgactgtcctttctcacctcacatatggatcacatgactaaatttcattggtttgtgtattcagccaccctccttggggaacgttggtttctctgaggccagtgacatcctcatgtatatttgtctcatgagaacacagaccaaagggcattttactgacccttccactgtctctcagaagaaagctatacacactccactggaggcgtgacctgagtcctggaaatccccagagtaccacgtggctcttgtttccaggattcacacaagacatcccttccatcgaacactcctaaagtctccctgtgccacccctgttgccaccatgagctctgccttcctctagttccactttttctggatagctccttggcccagcttagacatcacagccccctgagggttcacccttaattcatgagaccagaagaggtttgg

SEQ ID NO: 1143 - DNA, 1000 bp, mus musculus
taaatatcatatttgcagtgttctgtcaataacatcttgaaaacacacattaggtttctgtgtcaaatctattgactctaacacatgtgctgatacccatcagattacgtatttaaaccattgtcttcgagaacgtatcttcttatatctgttctgtggagacaggggcatctggatttcccaaatattagcattttataatggtttggtaagctttagtgagaagacagtggaaaacctagaatgtcacctggaagccccattgttgattccattaggctggtgtgagaaatcacctggagatggattagcgtgaggttgctgttctacacaccagtccaacagacatgagtgagggaagactctaagaagttatgtgactcaagtaagaagggcacagtgctattcctgaagacatgagcagggtaatgataatggataggatactacccagacgcatcccatccttgcctggagaaaacagcctctagtcagttcaatgagtcattttcttccactttgtggatacacatagtatcatagtggaaataaaacttcattgcttagctctatgcaaggattccattgtgagaaaaatggaaagcacttacagaatcgagactttgcatgaacatgatggagcccctcgcagtctgggatttgtttgggataaatgtacacttggcttcctgcattcctgtctttgcatctcgacgacatctcctcgacacacagctgcctccctgacactcacggaccacactggtgccagtgatgtcggtggaacacctatgataaaagcattgagttgctgtggtggtgctagctgctggacccagaggctacacacatgctaagtgagctgtctatcacaaagccacaccctcagaaccagtttggaagcttccctcactctctcttgtcctgaaatcttttcctcagtgacaactcttcttggtcatgccccaaatatttcattttgacaacagtaggcataatg

SEQ ID NO: 1144 - DNA, 1000 bp, mus musculus
aaaagtgaaatagatatgtaaaaatgataataaaaatggaatcaagccttccggtctgcggcagcaccgggttaccttgggcgcagagttggtggacacccccaaggtccctagaggactctccacgtgatcttaggaccaacggtgagtggaacacaacttctgttccattccaatcactcaggacttgagacagcattagggaagcagaaaacccagcctgaccagggtcacaagtcccttctggtcggcgccagcacctggtcaccttgggcatggagttgttggacacacccaaggtccctagaggacagcttctgaggcagaccccgtttcaggctccagacatctgggcaccttccctgccagaggtgaggtgtgcaccctgcccaggagggctttgttggagcacctgggggagccacctttgttcccggatccctccaagatgagtctacgcaggtgagagtgtggaatacagaagctaacagcctctgggacaggccctgtttcgggccttcatcttctgccaggaggcaggtccaaatgccagatatctgtgtaccttccctgcaagaggaaagcttgcctgcagagagtgctctgaccactgaaactcagtggagatctagtctcccaggtctgctgatagaggctaacagaatcatgagaggaacaagctctaaccagagaaaactataacaactaactccagagattatcagatggtgaaaggcaaatgtaagaatcttactaacagaaaccaagaccactcaccatcatcagaacacagcactcccacctcacccaatcctggacaccccaacacacccgaaagcctagacccggatttaaaagcatatctcaagatgatggtagaggacatcatgaaggactttaataactcacttaaagaaatacaggagaacactgctaaagagttacaagtccttaaagaaaaacaggaaaacacaaccaaacaggtagaagtccttaaaga

SEQ ID NO: 1145 - DNA, 1000 bp, mus musculus
ggtgaagtctctctcacctctggtccccccaggggagagcgaccccggctgcagtcaggcagggagcatcctagctatctttctccctgggtgctgcttcctacccccatactgcttcatcccttaccccaccctacactccgttctgcgggtaggagcatggttctcatgtgattttcccccttttcatggacagtacctgcacctttagcagttcggagctggcttctgttttccgttagtgctttgctgcagggacaaatgcatacaaatgcatttaggagcctacaggacaaggcatggaaaggtctcccccaccacagaaacgtaagtagcccacccgccgcccgaggggggaggaaggggctttagaccaaaccccctctcaccacccactgaatccgcagtggagctggagatctgtgctccttggtaccttttggagtagggagcctgcgagctgccgtggcatcctcctcctcttgacttctcaacttgtaaaataccgtgtttgaaaggaagcaagcttctgccagcgagtctcagtttatgctaaagcaatcctgtggctgaggaggaaaagcttgctggcctgtgtcccaacatcccctcggccactgccccaggcggttgcagagccgctctgacacccgcctgggctctaactccaactatcctctcaccccctccccttttcctctttcagttttggctgaagtcctacttccagctgtctggggcacccagcctggatgactgctaggacaccagcaatcctgtggattccgcaagcacaggattggggttaaatttaggtggtgagaaaggatgcctatctacagagcccagaaagccggaggatctgagggggtcacctcttttaattctttctctgtttttttagaagaccaacagacataactctcgcatctggagttgtagctagccctgacatacgttctgtcagtggagaagtagtgctcacagccaggatagggtt

SEQ ID NO: 1146 - DNA, 1600 bp, mus musculus
tcagcatctagttagatgatcatgtacttttttcctttgagtttgtttatatagttaattacattgatggatttacatatattgaaccatctctgcatccctgaagtgaagcctatggaactagaaagtatcatcctgagtgaggtaaccaagtcacaaaagaaaacacatgttttggatattagtgctaatgctcagaatacccaagataaaattgacagaccacatgaagctcaagaagaagaaagacaaaagtgtggttgcttcagtccttcttagtagggggaacaaaatactcatggaatgaaacatggagacaaagtctggagcagagactgaaggaaaggccatccagagactgtcccacacgtggatccatctcatatacagacaccaaacccagacactattgagggtgtcaagaagtgcatgctgacaggagcctgatatcgctgtctcctgagagaccctgccagagcttgacaaatacagggtggatgcttgcagtcaaccattggaggatctagagaaaggactgaaggagctaaagcagtttgcaatcccataggaagaacaacaatattaaccaaccagaccccccaccaaagatcccagggactgaaccactgatcagagggtagagatggtgtgacccctggctccatctgcatgtgtagcagaggatggccatgctgagcatcaacaggaggagaggtcctttgccctgtgaagccttgatgccccagtgcaggggaatgccagagaggtggtagtgggtgggtgagcagcctcacagaagcaggggaatgggggatgggataggggatttctggaggggataacaggaaatgtaaatatataaaatatcccccacaagaaattgaatgaaaattataatgacatccttctctaggcctaaagttttaaaagtcgcgtgatgctttcacactccactgacaagagcagagtagtatcagccttgcatcaaaacagctcagtattattttacacatattcgggacatagtgtatgagacaagagaaataaaacagttaacttcccccaagaagaatgacagggacctttccataatcgctcaaagtagaactgagggtcaactggtggatgagtaagcaatctaagtatattcaaagactggaaagatgttgatagctatgaaggaactggttacagacacaggcagtgccaccgatggaagtcaagctgctgttccccttttctattgccaacttgacccctccctccacccctccacgctaatccactgaggtacatgggattcagctctactgtcctctttcttcagtcactgctttcatccactcaactcttcccttttgttcacttcatttagcgaagaactttgcttttggatcatatattctcctctaccttgtgattattcttattctaggtcacttgattatctataactgccaaatactatttggtctcataattggctgcttatcttattgacctctgtcacaccatgcacacacacacagacgacagacagacacacacacagacatacacacacacacaaatttaaatctattactttgtggacagtaac

SEQ ID NO: 1147 - DNA, 1000 bp, mus musculus
agccagagagcaagagcaagagctctattgcttacatctttaggagccagagagcaagagagcaagaactctattgcttacatctttaggagccagagagcaagagtgcaagagagcaagagcaagagctctattgcttacatctttagtagccagagagcaagagcaagagagagaatggtgaaaccccgtccctttttaaggagaattatcctccgcctaggacgtgtcactccctgattggctgcagcccatcggccgagttgtcgtcacggggaaggcagagcacatggagtggagaactacccttggcacatgcgcagattatttgtttaccacttagaacacaggatgtcagcgccatcttgcaacagcgaatgtgagggcagctccccacatggttgctgggatttgaactcaggacctttgggagagcagtcagtactcttacatgctgagccatcttgccagcccaaaagaaatttagaaaataaaataactattaaattgccagttcatcttctggtaggtactttcgtgttcctttctttctcatacaagatatgtgacagaaacaatggaaggaaaaaagtattgacactggctcacagtttcagaaggttgaaaggcctggagctgcctgactgtgggagtgtggacagagccattcacaccacagtggacaagacagtagggaccatggcggagagtggaggctgggcccaaccttcagagacctgtagttcatgtcctgctttaaccagctacgctccggtctccccagacagcaccgtcagctggggacgaaatgctcagaacctgagtctgtgaggaatctttcagatttattatgccactcatccattttgtatatcttgatagtttcataggttagcatcccaatatttgatagaagctcatagaaatttttactactgaatcagatttgcatatttcttctgtcatagttatcaaattttactttctatatttttactag

SEQ ID NO: 1148 - DNA, 1400 bp, mus musculus
caagtgccttgaggaggaaacacttcctcaatgctcgtgcttgtttgtccagcttactctacagatttgagggggaattcaattccctcatataagcaagtttcatttttattattttacttatttgcatttcaaatgttgtccccttccacaaacccccaccccaccaacccacccactcctaactcacctctctagcatcccccttctctgaggcatcaaggttccacaggaccaagtgcatccctttccactaattctagataaggcagtcctctactgtgggaagccacatgtgccgttgcagggtggcgctggcttctactggccaccacgcatacacaggcggtaaagttcttttgccaagatgaggttttgagaattaaccaaagttaaccaatcagatgagagagaatttaaccaatcagatgtaggcatgcaaatgaggtgataagcataacccaagcacaaccaatccgggtgtgagacacgcctctcctaggcctatataagcagcaccagttctgggcttgggggtcttttcacctctgcaatcaagctctcccaataaacgtgtgcagaaggatcctgttgcagcgtcgttcttgctggccagtcgggcgtgcgcaagactctactacatgtgtagtgggagatattactgattcatgtgtactctttggttggtggttcagtctctgggagctctgagtggtttggttagttgatattgctgttcttcctatagggttgcaatccctaactcttccattggggtcctcgtgctcagtccaatgcttggctgtgagtatgtgcatctgtcttagccaggtgctgggagatcctcccagaggacaatcgtttcaggcccctgtctgcaagcacatcaaggcatcaggaaaagcatcagggtttggtatctgtacatgtgatggatctaaaggtagggcagtctctgaatggcttggccttcagtctttgctccatttctttgtccttgcatttcctttagacaggaacaattatgggttaaaatttttgagatgtgtgggtggccccatcccttaactgggtgacatgtcgacctactaaaggtgttctctccaggttctgtctccctgctgtttgtttgttgtttgctgttattctagtattgtcatccccactgggttctgggaacctcttgcatccctggcctctgggactttctagtgtctcccccagacccaggcccctctgctacttatttctcttcattcttctggccctctggatttctcttgtctcttcacatacatggtcctgcttcccctttttccatccccttccctctcccacccaattcgcttcctccctctgcctcccatgattactttgtcccccttttctaagtggaattg

SEQ ID NO: 1149 - DNA, 1000 bp, mus musculus
ttatctttaagccatcacattagttgcttttctgttgttgtgataaaacacctgaacaagacaattcatagaagactttatttgagcatctggttccatagaaataacagtctgtcatgtcagaggggcacatcagcaaacaacaggcacagtagctggacaaggccactgctagcacgtatttcctactgcaagcgtgcatgaagcaaagagagtaaagtaggaatgactcaagtctttaaactctccaagcccagcctcagttccatacttcgttcaccaaggacacatctcctaaatctcctcaaatggtgccggccatcaactagagaccagttattcaagtccatgagtacacagggacgttgtaattcaaactacgcagctttagaactctcagcaaactagtttagtaatagcacatttattgtgcatggtgaagaatcctgaaaatatgctgatcacttaaagcaatggttcaggattcaggcttctcccagcttaggacatctgacatattacctgaaaatattcttgtaggttgtctgccttcagcatagttgcaagggaatcacaaagacaggagaactattacatcaacaagatcacaaatgcctaccagagtcatcaatagctgacatctatcttggagccagggaagaaagatgattttttttctttattttgttttccaaaatgctgcctcaattttgattatttttgaacccttcaaattaaacattcttatttatttatatcactgaattatagactatgtttgaaaatgctatttcttttttaaaatttttattaggtattttcctcatttagatttccaatgcgatcccaaaagtgccccatatcctcccccccactctcctacacacccattcccatttcttggcactggcgttcccctgtactggggcatataaagtttgcaagtccaatggggttctctttccagtgatggccgactaggccatcttttgatacatat

SEQ ID NO: 1150 - DNA, 1200 bp, mus musculus
gagtctgtaaacattggtgaagaggattttgtatgtgtgtaagttttaatttctccagagtagatttccagaaatgcaattgtttgattatattatagttttatctttaacattatagattctattgtgaggttttgaagttaacattggcattttaaatgtctggagaattgaatgagtgatcaagttttcctaccttgtttctaacaatacttaaatagttttgtttttaagaaacactgtaggccagcgtgtttgacaatgagaaacttattttacaggagccatttccatgtgcttattttgaaatctctagaaaatgtaccttatcatgtgttttgctaatgcttgttttatgatgagcatttaacagtgttgctgtcaggggctggagaaatggctcaggcctcaagagcacttgctattcttgcacactgtacgaagtgattcccagcacccatacgggctggtacacagctgccgtaactgcagactcttcctttttcttatgtttttcggcattctccataattaccatttctccaaagctatgtatttatttcagaatctcattttaatgcctgacatttctcacaagcactgtcaggttttctaactgggctccacttaatctaaagagccttaaccatccattggacggagcacaaggtccccgatgaaagagccagagaaggtacccagggagctgaaggggtctgaagccccataggaggaacatcaatatgatctaaccagtaaccccagagctccttggaactaaaccaccaatcaaagaaaacacatggtggaacatgtgtctctagctatatatgtagcagaggatggcatacttggtcatgaatgggaggagaggccctaggtcctgtaaaggttctatgccccaatataggggaatgccaggaccaggaatgggagtgggtggattggggggcaggggtaggggagtaaggggtagggaatttttggaggggaaactaggaaaggggataacatttgaaatgtaaataaagaaaatatctaaaaaaaaaaataaaagaaatctgtttggcttttgaagttcaaagaaagaaaagacccttatcttcctatacaaagggaggtggtcacatcacctattctgtgttattactcgccaaggtgtgtaacattactgaagatttctctctccataagtatcat

SEQ ID NO: 1151 - DNA, 1000 bp, mus musculus
gtcctttgagcaggtataaagccatcatggtatgctgggtggaaaaccattctgggcataaagacagtgtgagtccctcatctccccttctggggtcagattaagcagaaggcattagaatcttaagactggagtcttcagccggacactattccctgcctcatctccccccatccctgctgccttctggcattgcattctatagtcacaattgtggggctagctccgtaggtaggaaatcttgctgtgaattctttggctccttagttcacatgcccataacccaggttaaagctggacatggacacacaagtttctaaacttagtgctgggcagagaagaggccaaagggtcactgagatcctgtttcagggagatacatagaatggaagagcaggaccttccctgatggcctcctctggcctccacatgtgcatgcatgtatgtgcacacatgtacttatacacaatcactacacgcaatggaagaaagtatgatggggaaaggaggaagaaacagaaggggagtaagagagaaagggttgtgagacaggcaagagagcaagcagcaacatctccaaaccctttctatcagctccaccaatcaggaaatgccagtacccactctagggagggtcatctccccgttaatccttcttgggaatattgggattgccttcaaagtcctatccagggacacgtctcttaagtccagatcctgcccagtggacaatcaaaattagtcattatagagggaatttttaaataaagcattgagcttttattttactttattatttatgtattttataatagtcttttagactatttctgaggcgcatctattccagagacaagctctcactgtccacaggtgtttccatgcttagcagcaaggagtttgttaatgtctctgtactgacaagtgcattttagataagatacattttgattttagcatccacttcctgttggcctgtgtgtctattgctgctgctgct

SEQ ID NO: 1152 - DNA, 1000 bp, mus musculus
acagaatgcgctgtccgaacgtcctgcaaaccaaaatactaaataaaatgtattcgttctggcctcgtataaaagaaattccacttgtgaagccatgcagaaggcaagagctaggcgagtggttctgtccttggacggcctccccactggactcgtttgcggccatgcaccttgaccttctgcctaactggggtgttgaaggaaaatgagatctttttcacactttagtcaggattaattcaacactgtcaaagcatttgtacagcctcatatttagagacatcaaaaacagtaggtacaacgatggaatcttctttgaattacccagtgatgacaaatagtcatataataaaacaggaggaggcgaatggtaatcccgggtgacaggcagctgtcaatcagagatcccaacactctggtggctccctaactggagctcacgcaggacagattgtcagcttcatttctattcagaggcagccaatcacagggactcatttacatctctcctttttccctacagcatgttaacagcaggcggtccacccataccatctttgaaataggtaggtggctcaaaatgccttcagatttcagtcaagagccggaattaaaaataaactggagcttccgtgtcaccgttttctgctctcagagagtaagcagagcgcgtgcgcatgcgcggctcctgttttaagaggggcctccctgccgaaacctgcctcctttaacccaggagctttctcaagagctgaacatcacttaagctcacgtaggcaagaacaagcaagacattttaagtgttttggactcttctgtaacttcacgtgtgcttacaacattacttaagctcacgtaggcaagaacaagcaggactttaagtgttttggactcttctgtaacttcacgtgtgcttacaacaagctgcacacactggcattaaagcccaccacaaggggaggaacacatgttgctattctgacattaccttaaagtaaaa

SEQ ID NO: 1153 - DNA, 1000 bp, mus musculus
gattgtccaaaagaaaccggagacaaggttgactcatacacacatctgtggctcctcccaggacttcttacctcagcccctaccctaaatctctccctcccacagtgctgggcttctctactcccagcttctgattcccatataattcacccattatggtcatgtgctctcttgggttttggctcctggttagcttactcttccttcttggtctacagctcctccctcgatcctcctgacctctcttctccttctcttcctctcttgccatcccatcactctaatgccttggttcagtccgaacccctacagatacttctggctgcaccctccctcatatctaggatacaacccttttgccaaaccatactttggagaagtcttgtcctcgttgtcattcagagatgtccccaggatctgagggcagtatacctgtagttgagggtcctatatttcctgtttgtgagggactatagttatggtgaactcagtgtagatcccactgatgaaagtgaaaatgattttgaaaatgcgtcaaaggggagatcatctgggtgggacctgtcacagtgcagatagccgggaattaacagcatccttctgctgggggagactcttctgctgactttgaaaacatgagcagccatgtttgagttgcctgtgcaggtgtccaggtgataaaggcagagtggagatgagcctggccattagctccagggagcacagtgaattcagtcataaaaccccaagaaaaatctctgccaagatgcagtgagctaggaatcacttcttcccccgtggagcttccacatgggaaggcagctggctaaagcctggatatcaggctgccagaacacagaagaaaagttagcttgtgccagactgatgacatagagagagtaagtgtatgctgttttaatcctatacatttgtaattgattccacaccaaaaggaaacccttaacagttactaaaccctagtaggtagagtttgtgctgg

SEQ ID NO: 1154 - DNA, 1000 bp, mus musculus
aattcatcaatattcatattatttattctattgcaaacattcagtgaatgtctaggaaattaaaaagtatttgcgaaatatataaactaattagttagaatgaactggctttaataattggagtgtttttccggaagcttcagcaactcacctgaatctgtcttcttcttttgtgaatgatacatttagtgaagacacagtattaaaaaatatcattgtacaaacaacagctttacctccaggcaacacagtacagaagtaatttaattaactttaattaaactttctagttaatatttttcatacagttttatggtctatgactttataactactttcccatagtacttcagtgtttgtaagaattttatgaaaaaaaaatatcccaaatattcagttccacaatttttagtagggtataatggagttagtagatgaaattctgagacatgttttgaatgacattttgaaacaaacatggagaccctgaagagaaagatattgcaccattgagaaacttagttaacccataagatgaaatagaaaagatcattttaggctgatgtacaaattagttttctaaacaattgaccatggtgattgctcagacactgggaagcatgcaagtcttgaagaacactgttcacataagattagagtcctggaggactctgtcaaagaagaaacaaaaaacaaggattatgctcctggttttgtcaaaattgaagatgcaaggacaggaatcggctgaatcatctctcttgactgaattttaagtcctgatggcgagcagctgagtgatccagacttgggggagttgacaccaaatgaggtggagacatctgaaagtattcaggctcccaccaccaagcagtggcatatgtaaattgagttggagtctttgaaacctcatgattaagtactcagacagctcagtagcagatgtttggctctcctatcatccatgttgaaaccctcatgctaattaggaatgtggaca

SEQ ID NO: 1155 - DNA, 1200 bp, mus musculus
cccctcacccttatggtcccttccccccccccaaataaaaaagcaacagcaacaacagaaaaagtccaatttgtgttgtccatatactcactggaatatggtcaattccagttgctagccccttaaagaaaactgagttctccccacccacattcctacaagaagcatatgttgtggaggtagagaactacacttcagcatctttgtcattatttttaagagttctctttgatggctttctgtctggcttttttttttttaattgaaggggaggggagacagggggaggaaggggctaagtgttgtcgcagaaaccttctgtctctctcaacagtgagtgtgcagtcatcagtgtcactgcaaaagtagcatccttgccttttacagtctgcaggaggacgggtcatggacttacacatgatctctggaggcagcacagcatggtccatgcacacacacatgatctccattgttggcatgtgccatgacctcagtataatctccggtgccaggagagatcacagacatcaacagagacctctctggtgtaggtcagggcatagattccataaaagccctgagcagcaacacatgtcaaaatcatccacagcgacataggccacagagaagaatgtagtccccagtggtagctcggcccatggacacatcaaagtggcgtctggtggcagtacagaccacagacatacacgtagccttccgtgaagacaggacatgaacataaatgaacatgatcgcagtctgcagcagggccatagaccacaacatgatcttctgcagcacaggcatcaatgtgttcactggtatgttggcaacacagcccacagacatcaacacggtttcaggcggtgacacagaccaggcgcatccatatgggctttagtgttaactaaattaactaattgaaaactataaattgaaacacacacacacacacacacacacacacacacacgcatgcacacacaccacaaacacacacaccacaaacacaaacacacacagcacacacacaacacacacacacacctcaacacacacatacaacacacatacacataaaccacccccacaccataccacatacacacacaccacacacacataaaccatcccccacacgtacacacacacacaaacacacacacaacacacacacaaaaaccagccccacacatacat

SEQ ID NO: 1156 - DNA, 1200 bp, mus musculus
atgaggtttttatagctaaaatggggctttggaaatacttgctttaaatacatttactagacttactaatactactccagttagcattaacaattgagtttaatgtatctagaattatttggggacagactctaaatggaagaactgtgtatatcagattggactgtatgaatatctatggatggttgccctggttgttaactgatgtaggaagaagtagccagtctctaggccactagtactgaactgtataagaaagctacatgagcacacatctgcttggcagccagcaggcagcattctccatggttcccaccatacttctttggctgtgaaatgagttccttcgccagagataatactgtgtaggaaagtcaacagacctgactcaagttctcttgcacacgctcaactggccaggaagaatgatgctgcaacaggatccttctgcacacgtttattgggagagcatcgattgcataggcaaaagaagaacaaccccgaacaaggaaaatgatgctgcttatatacccctccatgtgacatgtcagctcctgattagctgctcactcatcaccccactactatgccccgggatgggcagtgacttggcacaaatttactcttgcacctgcgcatattacttgtttaccagttaggcacagcggaggctcgtgatggcaattgctcacggctctccacaaagttcctgccttaaattcctgtcttgaattcccttaatgatcaactgtaacctgcaatataagtcaaataaaccattttccccaaagttgtttcttcttctaacatttcacagtcatagacataaagctaacacggttgtatttactgtgcccctttattttgtgtttttattattactcctgctctgactttggcatttccttgtctctgaagcaagcacctctcagaggtctttcttactagtgctcagttgttgtcttactattctgagtaatatctagaatatctataatattatcatgtctaaccttaaaacattaaatattattagtgtattactcttctcaactaacattgtcttagcatacacaatttctctgaactacatggtattgctatgtaagacagccttattttattcctgaaattacacacaaaaattattttataaaactattatgtttgcatgtttgcttacatatttaccaattcatt

SEQ ID NO: 1157 - DNA, 1000 bp, mus musculus
ccagacatctgggcaccttccctcctagaagagaggtgtccacctggtagagctcagactgcctgagcaggtgagggaaccatcttgtgtcccaggtccctcagagaccagtctgaacaggtgagagtgtggaccacataagcatcagagcttctgggacaggcagaagcaacacagcttctgggacagaccccatttcaggctccagacatctgggcaccttccccgccagaggagagatggctgcctgggagggatctgacagccagagcaggtgagagagccatcttgtgtcacaggtccctcagagaccagtctgtgcaggtgagcatgcagaatgcaggggcaacacatcttcttggacaggccctgtttcgggccttcatcttcagccaggaggcatgtctgtgcaccagatctctgtgcactttccctgcgagaggagagcttgcctgcagagagtactctgaccactgagactcaggagagagctggactcccaggactgctgtcagaggctaacagaatcacaggaggaacaagctccaaccagagacaactataacaactaacaccagagattaccaggtggcaaaaggcaaacctaagaatcttactaacagaaaacaaaaccactcaccatcatcagaacccagcactcccgcctcagccagtactgtataccccaacacacccaaagagcaagactaggatttaaaatcatatctcatgatgctggtagaggactttaagaaggactttaataactcacttaaagaagtacaggagaacactgcgaaagaggtagaagtccttaaaggcttacaggaaaacacaaccaaacaggtgatggaattgaacaaaaccatacaagagctaaaaagggaagtagaaacaataaagaaaacccaaagtgagacaactctggagatagaaaccctaggaaagaaatcaggaaccgtagatgtgagcatcagcaacagaatacaagagatggaag

SEQ ID NO: 1158 - DNA, 1000 bp, mus musculus
gtgtggctttgttgaaggaagtgtgtcactgcacaggtcaggctctgaggtctcatatatgctcaagccatgcccagtgggacaatctccttctgttgcctgcagatcaagacggagcacctcctgcatgctgccatgcttcccgccatgatgataatggactgaatctctgaaactgtaagccagccccaattaaatgtttccctctataagagttatggtggctatcacgtctcttcacaacaataaaaccctaacgaaaacagtgttggagataaacataagaaggagttctgtttcttaagttatagggagactagctttgctttacaaagagtcttcattgtgtaagacaatgtatgcgaagcccccgactcccatcagtgtaaagagcaaacattggaagagctgggtggaaagggactgctgcagagagaccttgccatcctgagaggagaaaggcataggtgctgatgcacaggcaggagtatggcagcaccacttagagctctaccatggtccctgagaagcaacgaggccgcaagcatcctcctctcaacctttcagtggaatcgtctcctatacacaacacaattcccactacatttatatcaattgacaaagagtcatttggtaacacagagtacttcctaattccatggattcggaggtgacctgtcgctcgctggaagggggaggggcaatatgtaattgcatccattgccccgaggaaacaacgttagagacaagttagaagaaatatttgtgttatgaaggcatcagcaagaacacagggtgtgtgggggcgaggtcagggatgagtcaggacaggtccagatgatcctgctgaggatgttttagcactgctgtgcatgaggacttcacacattaaaatagtgcgctgaagcaagagaagctggcacattctcacaccatgggatggccctggaggtttcaccaagagttgagacacagctgctgtggctaaaaccagatgtga

SEQ ID NO: 1159 - DNA, 1400 bp, mus musculus
cttccttccttccttttccagtgtgttataggtggaatcactccctccgtttcattttctgtttcttgctggaagtgtagagaaatacagctggatcctgtgcattgatcttctttccagcaaccttgctgggctcatgttctggctcagtagaatttaatgtgttcccagaggctgtggatgaagggtatgtgtccttcccttccatttttaagaaatataactacaataaagagggatcctggttattttagcatgttatttggtgttagcttcctggggacaagatgatggtggcccctgacactgagaacatttgtagcgaccaggacagacattggtctacaacctcagatggctgtaccactctctacaaaacaaagcaacacgtgcaacagctgctatttagtaacaggctccatttggaagcccccctctccacgaacacactcaaactaatcttacccaaactaaggcaagaaagcaaaactcacatccatagacagttccaacattctaaaaagactctaaataggatttcagttgctaaagtaagtggaggattaagaaccatgtttactaaaagaccaagaaagcggagctcttgcgagcagaaacctcacacagagccagctcatccccaggccgtgcggtcccacgccctcctgtctccgtttatgttatcagcggcttctgtgcgtgccttggtttgtcttcactttccaggacacagttaacgacttataatgaaagtgataaaacgatacgtagtgactaagaaagacgcattttcgtagccagactcgaattcttccaccccaaagggagctttacccaacacttgacatcaaatggtactctgggcaaagatggtctcagtgctgccctctggtggtagatgttgggagaaggcataggcagatggcaggaaggtgcttttcagccctatttggcaaagtcccaagatactgaccagagtgtgatgacatgcaacagacagcttttatcatgctgagtgtggagggagcaaaaagtgtcatatagactcacggtttaggagcctgggacagtgtgtggccccgttgatgggagatatgtgcttcaccagtaagattttcatcagaaacagaggttgagattaatatcctatgcagacccgttccaactacccatctcctcaaactctgaattctaaaatccaactttttctcactgagacaactgagggggaaatctagaactagactggcctctgaggaggctaataaccattaactataaatctcattttatttcctggaaggctggctctctgtgtagacagcaccacaggacactttacaatttcttatctgagttgaagaatagaaaattactggcctcttgtgagaacatcaact

SEQ ID NO: 1160 - DNA, 1000 bp, mus musculus
gaatatagtcacacctcggactccataccccacatagactaggaaaaagactgggaaagaaaataaaatcaatcaggcagaacaggctccaaggagtcacgacaatgcatctggcaaggagagaggataaggaaataccaagtgtcaaagagggttatgggaggctgcacgagggagtgaggagcccagagaaacagaggtgtgctggttataggaggggccattgtggtcatgcctgtctgagctgaggacgttcaaaccaggtcctcacagaggagggagactgagcagcggtaagatggaagggtatgacagccagagggaagagcaattggatgggccacagtttcatcagaaacttgataaggaggctactgagtagaccacaagcagtagatgatgctaagcaggtgataaaacagtccattctgcatttgatatgcgatcatcaccatgttgagtgagtccacactcgggagttaagtctcacaggcttctgctgaagccgaagcagtcagaactttaagataaaacagccagccacccattagactggagaaaaccagcgtgagaggacttgtcagcttcatggtgtgaaaggctggttcagcaaacgtctcatgatgcacggaacaaacaaaacgtgaaagtgacccttcctctaaggtcaggtgtgctcgggttaaaggtaccgcacagtcgtggtacaaatggacacttaaatagtggaagataacgttggggagccatagttgttagattcttttgtgtgtgtgtgtgattgtgtatgtgtgcacgcacatgaaagccagaggtcacatgaggcattcgacctgatcactttccacatactgtttgaggcacggtccctcactaaaggcagagcttaccgatcccaccaggctagctagccacagctccacagctgtcttctctaccttctctcgaagtcctggtatgagggggacgtgctgtgccaccttacttttacttaggttct

SEQ ID NO: 1161 - DNA, 1600 bp, mus musculus
tgtctatgctgagtgttctgaccttcagacatctgaaggattagtagcctaacatttcctgaaaaaaagtgagcctgagaccaccaccagtctgtcaccacagggcctggacagggaactaggttgagatgactaccaagacagtgccaggtaggcctggacaggctcccaggacaggaagcaagccaaaggcgggaagaagccaacctgggacagcaggccccaggcaggagtgagcccaagacaaatggccgcacaggtgggccggtagaggagctggcctgagatgaacactaatctgtcgccctccaggcctagagggtggggacagatcatgcccaagatgactcctgccctgtgccatattgcacaagcagggcatagcactcctgagacctctcctgagacgacctcagaccctgagccacccgggcaccactaagaggagcaagcgagtcgtggagaaatgaaagagaaggagaagcagaaggaagtgggcacagtggagagagaggtagtgaggaacagcctgctgtgagtacccagtgctgctaccttggaccatggtggcctgtgctgccaccaggtggtcacatctgggtctgtggcccttcagcagcaggggtctgttactgccaaagggctgtacagaactggtcctacccttcacctgggcattgagaggagctggtcttagaggcacaagagtgggaaagctgattctgcccatagccagccacagcactctggagagtcggccctgcacattgtgggagttgcaggttagctggtcctgaggatgcaagcttgggagaaatggccctaccactagtctccctgtggcttggatgagagagggggcaggggagggggggggtcacccccttctgcggcaggcaggaaagctgaccttgacagaatcatgagagcaggagaagggcctttccctttacctgctgcagtacttggaagagcaggccctgcaccttatctgggcagcacaatggagctggtcatagatatgagggttatgggtgagccaaccaggagggtgtgagcgtgggagagctgacctgcctcttgtctgatatgctgaagtgtccctcaccctcaaccctgccacttagaatggcaggagggagacttggtactggggtcatgagagtagcagggacagtcctgcccccccccccccaactgctgcagcaatgtggaaagcaggccctgcatctcacctaggaggcagtagtggagctgagcctgatacggggcttgcagatgagcaggccccaaggatgtgagcacaagagagttggttctgcctgtggtctgctgggcagtggtgacacagacagtgagagacaccctcctcccctcactcacctttggggcaggcaggtgagctggccccagggcatgcacgagggcgggagagccagtgggctgaccatctctgacactttcaggcctggattcaggcctttgaattggcccaccccgacatctaccccattgctggagtcctacagatccaaaactacaggatcttcatgacaaagggcaacagcgggatgtctgagaggagccccagtgaggatcc

SEQ ID NO: 1162 - DNA, 1000 bp, mus musculus
acatgttcagcaatgccagtgtatgtgaggaatggggaaaggggtatgaaggaaggaagagggagagggagagggagagggacaggggtgctgtttctggagactgtggcacctctaggaggtgaggcttggtgggcagagaatgggtcactgcctgcgtctatctttgattggctgtgctgaagccctgttctccacttcctggtttgcctgcaagtgaaactcctaacatggtgtcactggtacacctgcttgcaatggcagactgacccctctgagaccttctgtaaaaagttaactccattctccttcagatggttccgtagcacactttgacagagattttgtcatcaatacagagctcaccagcaaagttgaggatgttaagaaaacaatgttcaacctgagtaccaaagggcagatagacgctctctgcccaggtagtcaagagtagggttatagtctcatgaaaggaatggggaaagattctgctttcgctagaatttaaggtgggggagacggaggaggtgtcacagtgactctgaggaatggtgctggagaagatgccaaagaagccgactggccttttatgctcagcggacttttgaaatacgagaaaaagcagagtgtagacggagaaggcaatggctttcccacctctgagtgtgggagaactagaagacaggtgaaatagagacccagtgacagctcaaacaccctctggtatccggccaccacaaaagccgcccaacaagcccttgactccgcagctatctgacaaagcaagaccaacaatcggtcatctccgcacaggaccgagcaggcttcccaccaaagcccttccccttaaactagtttcctgcagggtttcaatccacagctaccctcctcattacaaaactccgttccaccctctcaacacggggaaccggggaacgtcttgctggcatggggacctgggacacaaagatggggacttccagggaggaagaaagctgat

SEQ ID NO: 1163 - DNA, 1200 bp, mus musculus
agtttgtttatatagtggagtacactgatggacttttgtatattaatcaaccctgtgtccttgtgatgaagccttgatcatggtgaatgatgttgtgatgttcttgtattttgtttgcaagaattttattgattatattgcatctatattcataagtaaaattggcctgaagttctcttcctttgttgggtctttgtgtggtttaagtatcagagtcaccatgactacatagaacaaattaagtagtgttccttctgtttctattttgtggaatagtttgaggaatatctatattatatcctccttgaaagtctggtagaattcttcagtaaaaccatctggccctagaattgttttggttttgtgaggtttttaacaactgcttttatttccttaggggttctggaattctgtgggacagtggatatggaggaataaagggagtaggagaaaacccacatcccaccagagttccggtgctctgggcaggcagacgcagaggactgctgcacactttccatgcggccctgagtgggtgtctggctgtgggaagctatggatccagcccacagggggtggacaaggggcaggtctaggtctctgggcctcatggaggccagagataacagattctcagtctcaggcatcccagacaccactggacaccgcagaagggctgagaacaaaatgggacccctaggggctgctcggtcagtcaaccccggagccaaagggaggagagggcagggagagagggggcactgggtggttcccacatgggcaagagtccttggtccagtttgtggctggaatgcaggaaggccttccagcaggaggttagacgaagctctttaggggaaaggcaatctcatccttcaagcatggcgggccttgatgagcagagacaggggccttgatgagcagagacaggctatggttttagagctttattgtagaaaggcagagagaaagagagaagatataaagagaggggtcagccatgtccatgtggagagagggcagaagggagagagagaaggagatgagagtaaggatggtgagagatcttcaatttctttcttcaagagcttttattatattttaattttgtgtccttattttcacttaatcccagaaaaaattttaattttcttgatttcttctttgagcattggaaaaaatattatttttcttgatttg

SEQ ID NO: 1164 - DNA, 1200 bp, mus musculus
agtgtaattttgaaaaattattaagtactagtttggtaacatatattttcagggtttcacctcaagtaaagcaactcatccattaaatagaaaagtaaaatattcaagcaaacaaatgaagcttaatatgtaatcaaagcaattcctcaagcatgtggatccaggttggataaaacagctagaaagcaaaacagaaagtaagcaagcagccagcaaatgtgctgggaggcaacattcctccaagtttctgtgtcagttcctgttgaattcctgtcctgactgccttatgctttggactgtgacatggaagtctcaacaaaataaccctttcctctccagactggcttcttttggtgaaagggattttatcacagtaactaaggagcaaactagaaaaacctctctttgtgttggtagctgtgagttccagcaactcacagtctggctttccaagcacaaaacatcatcatagtccaatgtcatgggaaccaatgatgttcatcaacaagctttccaagctgggccttactgatgtgcatgttgaaggagagtcttgtaggccatagcttggagggtcagcagcttgtagtggaagattttatggtgtggggactcttcgatttttagcattttgcagattctttcttcttctgctgtctgggactggacatctctaccttggtgtcattgccaggggctattgcatctattgctcttacctcgtggtgacactctgcaactcacagatgactcttggtgttatgtcattgaaccttggatattagaactctctggtggattttggcttcccttgcacttctgctgatattatgggtagaaactctaaaaattggttttgttttgttttgttttgttttgttttatttttgtttttgttttccaactcaatgctctttacctgaaaccaagaccacatgggggctaattttattcaagcaaaatcttctttagagtttgatgatgcacttgtagaaaagtgtttgtgtgtgtgtgtgagtatacatgtgagtgtatatgtgtctgtgtatgtgtgtgtgtacatatgtgagattgcatgtaacatattgcagaggtttcagcagtcttgcccttcaaaggcaggtcttgcctctgttaaagtttgtttgtatgtggataagtcaagacctaaaaaaccaaatgactttttggtgacagaag

SEQ ID NO: 1165 - DNA, 1200 bp, mus musculus
acaaaagagagaagaggaaagtgcaatataaaatgaaaggcttgcgtctcatgaatgccactgagaaagtagaaattcagttcatgaaataaaagcatagatataaaagcacatatctctcaaatatttcacctagaatatgttagggtcctattgctgtgaagagaccatgaccatagcaactctaaataaggaaagaagataaattgggctgggatatacttcagaggattagtccattatcatcgcggtggtaaacactatgctatgcaggaaggcatggtgcttgagatgtagtttgagttttacttctggagcagtaagagagaatgacactggatgtgggttgaacttctaaacccttaaaaccagctcccagtgacacaattcctccaacaaaatcacacctactccaacagttctgtttcctatttgccctgggggagggggggaggttgccgcagtctctgacctgcagacacaagaatgacacagacaccatgacacagacaccaagaccggttcaagcagcttccgcagcttcctctttacctggggctttctttacttagggcaagggctatatttatacagtagcagcaactgacctcatattgctccacaccacctcatccaatcagaatcacacatgctccaggcacgatctcttatcagtcacagataggatgacagatctggatcacaaggaataatctaacttagcaggcagtttacgcatgcagtttcactgcacatgttcgggcaagggagtaaacatgtggatttcacagggtctggcaatgggccagggcgccatcttggcccatgtggccgtacccacttcccgcaggccattttcgttcaacccatcacacagaatcgaatgagtcaatggcaaaacaattactgatttagtgtcatcaaaaatgcaaatgggtgctactttaaataaaataaccgtgtggaaaataattgtattacagccatgagaatcttccaaataaaatccataatcagatttccttctccatattctccatgctgtctataatcaaaagaaaaatagtaagcttgccggtacatgcagagagccttctcttcattcatgtccaagggttagccaagagtttcgttgaaaagttaaataatgtcagattccctgatatttccattgtgaagaaaaatccaaagacatgtggg

SEQ ID NO: 1166 - DNA, 1000 bp, mus musculus
tctaggatctcctcagccatgactcagcagtgttgtatccaccctgaccagcaggaaagatgcaacaccacgttgtccttcttcaagcaggtttattcaggaacacttagcattgcaatgcaggaacaggaatctcttacaaaaccccagggtgtgccttcctactgactcctcccaatcaccccagtcacataatggcagtccataggttcacagcaagtgacctcaggcaagctgatgaggcatgacatctgtgcagtgcaggcagtggctgggatgtggctaagtctgagataatgaggaagtcaggcacaggtcataagacctggcagccatccagggcaccatcttggggccgtggctacaccagctcctcacacagcaggatctcaaaagtgactcagctgatacctaccttcattacagtttacccttgaaatcatatatttacctatgccctttgtatttcacaaaatgtttaaatgtgaaataagttgaaaataacagcaaacatcttctaatgttcccaaacattttcatctgttttcataacttccatatactattcagaagtagaatttgcacctcaagttgggtcatctggcaagaacatctgagtgattctcagagaaagaagataatgtaattcagagaaaagaatgggggtttggagagatggctcagcagttaaaagcactgcctgctcttccagaggttctgagttcaatccccagcaaccaagtggtggcttacaaccatctgtaatgggatctggtgcctgcttctggtgtgtctgaagacagtgacagtttgctaatatacataaaataaaccatcaaagaaaaatttggaggccagagagatggctcagcagttaagagaactgactgatcttccaaaggtcttgagttcaattcccagcaaccacttggtggcttacaaaccattaacaggatccgatgccctcttctggtatgtctgaagagagcaacagtgtact

SEQ ID NO: 1167 - DNA, 1400 bp, mus musculus
ttattcttaagtgaattaaaataatgtgtgacttgaatttgatggacagacgttgaatgtaataatggttgcattgtctttgaaaggaagtaacttacttctatggaaaattttaaaaagtgcgtcatcttgtgtgcttcatctgttttcataacaataatatagtctttaaggctatcttttaacttttgtgatttgcattttaaggagcatacaggttgaataatacagaggaaaaaatcactgactacatgttgctaacattttattacaaaaggcccatttgtattcaaattccatatgcatgagttaatgtgcccatgcttttgagaaggaagaaatataaacacttctataatctctcatttataccagcagcaggatttctattaaatttttgcagggtagaggctggagagatggtgttttgcttaatgatctgcagaagaactgggtttagtccccaaaacccacattaggctgttcacaactctcagtaactcagctgtaagggatccaataccccagtataggggaatgccagggcaggaagcaggggtgggttggttaatgagcagtggaaggggagagaggataggggattttcagatggggaaactaggaaagaggataacatttgaactctaagtaaagaaaatatctaataaaacaaaacaaaacaaaacaacaaaaataaatttcagaagagacaggtaagttggatcactgcttacgagtttgcactgcccttgctgagaacttgagtgcattactaatcaaggggctcacaaacacctgtaactccttcttaaaggacctgctgcctatggcttctgtgggtttttgcatgcatgtgtctatatgcacagacagacacagaaatgaaatataaactaagtcttacaaacaagaaatactgagagctaccctgaatctcagcacaaaggtagagtggaaaaggaagttgtgactctcttttgagtcccaattttcttctgggcattatactccacataagaggagtattggcctcattaggaaatatgagagacaaacatttgctcttcagcattgacgaatggaggcacataatgcacatgtgtataatatggcaccattttcattgtggctctgcctctcattctactattgccactttacagctagctgatatatggagagctatagcttgcacatcatagcaacaggaaatgtccatgagactttggggcatgaagtaaggacataggggaaagtagaagacttatacacaagctaaaaatagacaaggcataatgagaaatgcagtgattgggaaacagcccattgtcaactaaaatgagagcaaaagatatagctttccttaaagtctgattgctaactacagatttgatcaatct

SEQ ID NO: 1168 - DNA, 1000 bp, mus musculus
atctgcctcttctatcatcgaactgtataatatttagctaagttcctttctttgattttatttcttcacccttaattagaacagattatgaccagacattttataagtttatttctaactttaaaatgtcttgattctgtctttcactggaattttcatggcatgcagcatgctatctcagagggacctccatttgcttgccacccctcttcccacctcatcagacctgagcctcctgatcgatccatgctagcctcccttctcccatccatcttccctgcttggtaagccctctgggacaagcctagccaccctaagcacctgctagcccagggtcccatccattgtcctgttgccactctgtctaccaatattggacccgaggatcctaaaccatacagtcttgtaggtccaaactatacagcctaagccacatcaaaaccattgagtttcaccccttcagcaggaatagcagtggccacctttatataaatgccagggagtgcagctgcaatagcatctcatgcaggaggactgaattgaggactggctgagagaccaaagattacttgtgcagataatgccagccaatcaggaactgctgttaagaagaagagatgctttcttgctaccaatggttcatgagagaagggtgttaaaggagcttgcaacagtgttcagatgagcttgctgcagaattactaacctgctcacagagactgtgtccttgactcttcaccactttaccttcaatccccagaggctggtaaggtcagtcaatgagctgtttagagcacaggtaacacactaccatctgaatccctactttaagaacattcagggatcaaaacaatctagatggataaaggacctcaaaagaacacaaacaacaaaagccaggacaatatgacccctcctccaaagtacagctacctcactacaacaagccctggatatcctaactgaatcaaaacacaagaaaatgaccttaaatccaatc

SEQ ID NO: 1169 - DNA, 1000 bp, mus musculus
aaagtttctcaatgattttgatgattgttatgatagaatttagccaagaaatcaattcattccatctttagccagggaagagaagaaaaaggggaggaaaaggggggtgaagaagaaacatggataagagagaggaaaagagggccatgttggcccagggcagccagaagaaggtcactcaagcaccggctgttaggcattgccactatgatggatcaatgtgtgatggagagatgggaaagatggagtgcactggaggacagaaggaagagaaagcaatgccaaggggtttatacactgtaaagaatggtggaactggtgaagaacagacagatatgggtggggtcctgcccaggctgccatcgatggtcatgtctagatgcataatcatgctgtagttcgagtctgtgccaatgtctgtggcctgatttaccaccaaaggctaagcagatgtccatggtctgtgctgccatgggaaatcatgtactgcctctagggaacatgctaatctgaatagcatgcattgctacctgcaaccaggaggacaaccaggtccatgctgttgctgggggccatctctgggtccatggtccgatggcagtcagagtctgtgttgatgttctaggcttgtgatatcaccaaaggccatgcagatgttcctggcctagactgctgcctgatgcaccccacctcttgcctgggaagcacattaaagctggcttggtggcaaaagcacaagtgaactggccccaaggacatgagagtaagagagctgaccctaacccttgctgattgtagcactgggtgagttagccaggatagtgctggaaagcttgccctgattgtacaggtacaggagagatagcaggcctggcagactaaccaattcagctaccttgcaggccctttgaggcttcagggctttgagttggcccaccccaacatctaccccatctacatacgatctgctggagtgcaagaaagaaccagtcctgcaaac

SEQ ID NO: 1170 - DNA, 1000 bp, mus musculus
ttgaagagacaaccctgaatatttagcattccttgtttccttaagtgcttttacatgagcataaagacctctgctttctacattctataatgtatactttccctcattaattacaaggacactgtttagttgtgcctgttacaaactaggcctatgtggttgtgagtacaagggacattatgtgatatatgaagatctatccctttgggatccaggctctgaatacacaagtaaatggaccatgtgcacatgtatttggtcaagtggacaccagaatataagtgcagggagtcatgaagtaagaagatatccccttgaatctagagtctgtgcttcaatattcagacacacatgtaagtgccctgtgtaaatctcttcagggtattagacatatatgcacagggcatctaattgggttgagacagaacatcagcaactcacatcagcctctccaaaaagggcattgaagggaagaagtcttggaggaatctacttgcaagtgtcagaggatgctgacatggagtagccatggctatgcttctatcagttgccatttcaaactagtttcagaaattcacttgataatctgaggggatctagatcttggagagagtgccctgagtctgtattaaaggtgcatgtgttggagatatgctgaatgtcagcattgccctcaaaagtcaagctgaagcaaacacgaaatgcctctgagcccaggaattagaaaagatattatttggtggatgccatacagtgagaaagtgagcttcctggatacagtccaccattttgcacagctgtgatggatgtgccttggagaggcacagttctggggacttcatctctgtattgcttcttgctgttgctgatccttctcatgcttgtcattgctatattcctcctgtatttagtgttgtgtgaatggccatgagatcatcagtgcctatagtgtggtattcttgtttcttgggagatagctcattctgttgggcattttgat

SEQ ID NO: 1171 - DNA, 1000 bp, mus musculus
agcatactgtttggaagaactacaaagatgactgttgaatgattgcaggcttccctttacttgattatttttatccattggggcaatatggggtagtagaacctgcttattttgggaaggaaccttgaggacatgagacaagcagaatctggcaaggttcaaaactgtcagaaagaagtcatttggagaagtgcaaggtagctcttttagagaaatgaatcagtgtacctgggaatgaagggtgaataacaaattctatacactggtgcagcagaatacatattgcctcaagaggtatcctatgtggctgcagatccatggaattgtgggagatggagcacagagcaagagctgggttgagacatgtctaaactttggggtcaggaggagtaggactggtatacctcctaccccaggcctgcatatcccagcactgtgctcccacatttaggaggtcacatagcccagtagccgggtcaagcttcctttcaccttataagatcatgcccagcagcacctgaaattcctccttatgtgaatgaggcatcactagtgccctggctctggcctatgatgcatgctcaacttgaaatcccctgaaggttacagagcctttgttctcccccattaatgagctgtctcactgaaactgtctctgagagtttattctcattgtgctaacagacacctgagatctcttctgctccagcaggctgatcacaccctgttggacggggaagcagaatctgaacggtagaatcccatatcagggctttgatgaatcattggacaagaatgtctcaactctgagtggactatgtctagtttggagacatggatttacagaactggtaatctgagtagtttggtgttatagacacagcatatcctctgttttcattctcatgggttctaacatacatttatatcacagtaactatgatattccagataggaactttaagcttattaggtcttgatttccttatataattttctg

SEQ ID NO: 1172 - DNA, 1000 bp, mus musculus
agcatatatacagcaacatttaaaaacttaactagtacagggtggcttgtaggtataattaggcactcaaacaaatgcctgccagttgaatatggctccatcttcagctagctatagtcgtctccttatagaatagtcctttagcttcattaactccttgaaatatctcactttattattacaggttgtgttcttcacttggttgtagatatgtagaaagactcattttccatacacaattctgggattgactttttgttttttaatgtattataggttctctctgtgtgtgttttgtacgtgcacatatgtacatttgtatgagcttgaacatatatgtggctctgtgtatgtacatttgaggttatgtacagagtcttccttgattgtcacactccaaattagtcattgaaactgatcctctcaactgatctcagagatggttaatatggctggtctagatagccatctttctcttaagaccacctgtcaaagtcttctgagtaccagaattacagagtggttgccatatccacctgacatttacatgggtgctgcagatctgaattctggtattcatgctcacttgtcaaatgttttaccccctaagccattgcccctgagtttgctttccatcatctgcaagacttgctaaagtttatttctatgataattaattcacaatctatgtatattctgcatgctgctgttcatcagatctccctgaccatttaaatcagtgccacttttcttttcctcaaatatgattttttttaattccatgtgattctttctccttctgcttttcattccattttacagctcatcattccttttggaatacattcttcttaaaggcatgattcatctgtggttatttttgcctcacaagtatgctgtgctttttactattaaatatatattttatattgtagtttccatcaattagatagtctttgtcctttaagtcttttatctgtaatctataatttttaacacg

SEQ ID NO: 1173 - DNA, 1600 bp, mus musculus
agaaagtagccaaggagctaaagggatctgcaaccctataggtggaacaacattatgaactaaccagtaccctggagctcttgactctagctgcatatatatcaaaatatggcctcgtcggccatcactggaaagagaggcccattggacttgcaaactttatatgccccagtacaggggaacaccagggccaaaaagggggagtggggggccggggagtgggggtgggtggatatgggggacttttggtatagcattggaaatgtaaatgagctaaatacctaataaaaaatggaaaaacaaaacaaaaaaaaaaaaacaaaaaaaaaatggcttcaatggtaaaactcagaccaggaatattctattgtcataaaacatcattataaaaccatgctagcacgttatcctggtgactggactctaattcaatacaccagatcttaactgtatgatagccacatgagcaaacccactggaagggacaccacagtccaggacacatgggaaatgagccacgttccagacaaagggaagatagtgtgtgaaagcgctgtctgcgttaagacaaagaccaaaggaatggagcacagactccagtgtgcttatggtagagaataagagatcgcgtctgcccctgtggatgacgggtgtcctccctgaggaggctcggccttcagtctgtccatctgtcacgtgcttttagccattgccctgacccatgccgtgacccatgccggatgcatactctgcaaatccgttcccaatctctgggttgtttcctttactctgagcatgctcccctgcagatgtacttcacaagtaatgcctagtgtgtccgcccttgtcgttgttgcctgcgcgttaggagtccttagagcgttgtttcctgagacaaatggcgccaaagcctccccacatgctctttcagtggttttatcatttcagattttacatttaagtctctaacccattttgagttgattttgtttgtttgttttatgataggagctcatttttctacatttagcaattctgtcttctcagcactatttattaaggagaatgttcctgtctacgtggacactctcggtatctctgtcaaagcccttggttgttagtcactgattacttatttccaggtaatctatattgtcctgtgggtctattaatcatcagagagatgcaattcaaacccaccatgagatatggtataacaccagtaagaatggacaagtgctgttgggaccaagggaaataaggaaccctcacattgtgtcggtgggaacatgttaatgcattgtcatcatagaaaactacatagtggtctctcaaaaataaaaaacagaaataccttgtgatccatcgattacactttatatatccagagtccagagccctcttctggactctataggcacctgcatttgagtgtacacacatgcagacagacattacacgtaattaaaagtaaagtaagtctaaaaaaaagaaagaattctaaagggagaacagaatcaatcaaggtttgaggcccgattaaacaatgctgactagaaggaatactactgcagcctttatattcatgtaacactcaaaa

SEQ ID NO: 1174 - DNA, 1000 bp, mus musculus
cctgcatgggacataatggctctcctagactctatagctaccatacaaaaacacagagataggtgtgggttacctcttttctaattgttggtcagtggggtctcacagacctccacaaacagtacaggtgatggtcactgctcttggttgtcctccaggatccttgatgataaaaacttattgctgaagctgacatgtattgagacaaagaacatggagaaagttagccgataatgacctggaagcttcatccctaaatgggtagctttcatagtgctagaaggtgctgtgctgtgtatagtactgaggtagagaaagaatgaacagtgctaatcagctgcaaatcctgtgaactacaaaaaagtgtatgctagtgcatgcccataatcccaacactcgggaaaggcggacctcactgactttgaagattagcttggtctacataatgacttccaaactagctaggtcgacatagtgaaatccctctttttttgtttgtttgttttttgttttgttttgtttttgtttctctgtgtagccctggctgtcctggaactcactttgtagaccaggctggccccaaactcagaaatctgcctgcctctgcctcccaagtgttggaattaaaggcatgcgccaccactgcccagcgtgagatccttttaaaaacaaacaaaaacataaacagataaacaaaaaacctaatcaaccaaccaactaagcatcaaccaaaaagatctaaaaggttcttaacatgtaccatatgtcttataaacatggcataaaaatgggtcctagaggctggagagatggctcagcagttaaaagcactggctgctcttacaaaggatccaggttcaattcccagcacccatatggaagctaacagctgtctgtaattccagtaccagggatccaacagcttcatctggtctctgagaacatcaagcatgcataggaaacatagccatatatgtaggcaaaataacaatacacataa

SEQ ID NO: 1175 - DNA, 1000 bp, mus musculus
tttatggagctccgaaccagcagcgtctcttccaaaaatcctttgccgtttctcagtcccgcgttggttcgccaattgttgtgtccggccagcagaccacaacctgggttctagcctggaaaggcattttggaaacctggaagagaagaggggctaggtggcgagagaaaagaatgtagctaagacagttactctgatcaaggctcaaattttattgttgcgacactagttatgaaggaagggggaggggtcccgattcccgccgaataatctctggtccagtagaaaggtgcacgtgtgtggctctgcaggttccagcagtgggcgtggcagaacgaatgagcaggaagctccacccctgagcaagcaggtttcaggctgggggaggggagactacaagtacctattaactcagagtgcctggtcaaaattgtagcctccctcagccttgaagcaggctgatccagactttgaccttgctgccactaagaaggagattacctagggtagagccaagtcttcagaaatccctgctgatctcagacgcctgttctcacagctcagataccacagagataactgaagttattgaatcatatcaattccaacggaacagagcacagtttctcattgccttgcttctatttcttgcatctatgaccttgatggctctatttgctcttctccaagactctgcttcctgctgaaaggtgcttgagatattccggagacacaccctgtagatcgcctgcgggctggctccaggaaccaagaatgggctggcgggggatgggcctaccctctttataagaaaggactctcagtaaacttcagaggctttgaacagaaagatttgtcttggcctcgttcttttctcaccgtctgatctctttcagccccagcccgagtttcaggggaacccagttcacgtggccgcaggcggctacaaaaatgacctggtagattacagaactcatttcaaataacagccatttgacag

SEQ ID NO: 1176 - DNA, 1000 bp, mus musculus
taggctgtctggccctcatagcaaaccttattcccaaagtcagaccaaagccacaatatgtacttagaatgcttcctcaatgaagatttaataactgccacctgcgctgttggaggcgaggatgcacacctgctgtagtcaggctgaagggcgttgactgacctgcttgaaaaacaaagtcaagacagtgaaaagcaacagtacaaaagcttctttgggaaagtccaggtactcccttaattgtaaattagcaacgatcaaggtaagacttagagctccaggtatgggggaggtgactttgagaattgcagaaagtctgcagcttttctgggggtggaggctgtgctccaaattaactttgttaggtaattaagaatatttagctatcttccctgggattctctaatactggaattattactagaccagtccaagattgagttagaataactggtcacaatgagggaaagagaagaatcattataattctttcttgtgactaatatttttaagtcagattacacagtctctgatgttctttttaccataaggtttaaaagcttgaagcaaggcagcttcgcttgtccaaactggaaaaatggcaaacaaggatgggtcgaaaacatgtacccaattcaacttcctagtcactacagtcagggcactgagcgaactcacctgtcttgtcacaccaattagctgtcatgcttctgcagcattctgtggagagaacctatgcttctccctttcctaataaggtagctgttcaggatcaagccatatgccaataggtagatccttttaagatactataaggcatttattaagttctttgacatccaaatttcaaaattctaaaataaaaggatgatttaaataatgtgcatgggaatacattaaataatatgcacggggatataatttccctcttctttgtcttttaagaagctagagttttaaagttccacaataccttgtccttgagaattaataatttgtt

SEQ ID NO: 1177 - DNA, 1000 bp, mus musculus
taccctgaacccacatacaaaaatgtatgcagttgtaatcccaatataagggaggcacagcagctagcttgatctttgggattttgccaagtttgctcagtagtgagctccaggttaataagagatttctgtgggagcggtagagagcttttgaggagcaacacttgaggttgacctctggcctcccatgtcaattcaatatatgttggaatcatttgggaaaaaggaaccttaattgagaaaatgcccattgtgggcaagtccatgggaacattttattaattagtgattgatgagggctggtccattacaccaggtttgatgtcactcctgtgtaagtggttctggatggtataagaatgtagtctggctcctgcctcaccaaagaacacattagcattcagaatcgtaagtaagtctgcacctgaagaccaacagcactcccacagcacctgaccaccatcccctatctaccctcttccccttatcaccatatcctggcccacacctgtactaccagaggccatgctgacaagcagaatcccaggtagtgtcccacttgtggactactaacacttccttatgccttccaatccttctcctaaccaccaatcttatccttatcaccatatcctagcagaggtcacctgctccaccagaggcctagaaaaccccagataggctgttcacaggcagactacccccaatatctcagtgcttgtccagtccaccccagtaggacttcctctcttagtcaccatatcttggctggcccctaatttgtgctgaggacccccagctagatcagagaccatataagttgccagattccaagccccaactctgctagaatcccactgctcaagcaaaggccaccatagccatcagaaatccttcctgactttctaatcaatcagagggcagtccaaccagaatgaaaggaaggaaagaaaccaaggagcaaaacatccatccaacaaagacaaactcagaaattggc

SEQ ID NO: 1178 - DNA, 1000 bp, mus musculus
gctggtgagcagagcactggggagggaaaggggatagggggttttgggaggggaaaccaggaaaggggacaacatttgaaatgtaaataaagtaaatatcgaataaaaaatcccctaaaaactatctttaaataccagaggaagaacttaaaaatctgccaaatatatttaaaccacaaaacataattttagaccttgggtgagaacttggtggacagtcccacggtccccagaggactctgcatgctgaaggtgccctagcacacacaggatcttgggatcactggtgagtgaaatacaacatctcttccaaaacaaccagcaggaacagggacactgaaacctgcccgaccagcagctggggttctttcctgtaggcaaaagacctgggccaccttcggcacaaattgcagaaggtcccacagtccccagaggactctccacatcgcaggcaccctagcacacccaggatcttaggatcactgaggagagtcagcctacagagagggctctgaccccgggactcagatgagtgagccatcttgtatcctgggtctctcagagaccagaccacacaggagagcagacaggcctcagaagcaacagagcttcttggacagggtcccttcaggccttcctcttcagccaggaggcagagctgagcaccagacctctgtgtacctttcctgcaagaggaaagcttgcttgcagagaatgctctgaccactgagactcaggaaagagttggacccctaggagtgcttcacagaggctaatagaatcacaggaggaacaagctctagccagagacagctagaacatctaacaccagagattaccagagggcaaaaggcaaacataagaatcttactaacagaaaccaagactactcggcatcatcagaatccaatattcacaccacagcaagttctggataccccaacatacccaaaaagcaagatttggattaaaatcatatctcatgatgctggtagaggat

SEQ ID NO: 1179 - DNA, 1000 bp, mus musculus
gctggactagacctcacatgagcttccattttcctgcctctacttctcaagtgctgctactttaaacctgagccagcctttgaagtttttcctaaaagcacactgcccttgtttgattgccaagcagttgaatagttccagtgagctgcaggaaccactccatgagtgggcctcctaatgaagcttctcctgaaatgatactactctgttaaacacccaaaaatacactgcacagtgaaaaatacattacagtctatctgacaagaaactagttctagaatattcagaaaactcttcatgtgcaatatctaaaaagaaaaacaaacccagtccagcaccacagggaccctgggcaaggaataagcattagatgacccctgctccatgccacacaggcataggccaataaacccataattcctgctggtgacacactgcatatgcaggacctagcactcctgagaccactcttaagacaacccagacacccagaggccccaggaaccactgagatgaacgagcaagtggtggaggaatggaagagaaagagaaacataaggatgtgtgcataatgaagagggagaactggagatctcaaggtagtaaggaacagcctgatgtgagtagctagtgatgccacctactatgacagtggggttctggcctgtgctgccactgagggccatgtctgggtctgtggctctggagtagcagaggtctataaccaccaaagactaggcagaagtccatgatctgagctgctgcttggggcatgttaatgtttgagggctgtgcaaagctggctccgccttcagcctggacatcctaagagggctagctccaaactcatgagatcaaaagtgctagcccttccccttatgtgctgcagcacgtgggagagcaggctaatgagctcagatacctcctaagcccagatccagggctgtgagttgacccaccccagtatctaccacatctatgttatggtggagtatgtgaa

SEQ ID NO: 1180 - DNA, 1000 bp, mus musculus
gactgaaggaagggccatccagagattgccccacctagggactcatcccatctacagattcttggcactattactgatgccaagaagtatttgctgacaggaatctccacccccatagctgtcccctgagaggctctgccagagcctgaccaatacagatgcagatgcatggagccaaataacagacttagcttgaggaccccaatggagaagttagaaaaagtagtgaaggggctgaaggactttgcaaccccacagaaagaacaacaatatcaaccaaccagaccccccccccaaaagctcccagggactaaagaaccaactaaagaatacacctgggggaacccatgactcaagctgaatagcagcggatttctttatatggcctcagtgggagggaagcccattggccctatggaggccaagcataggggaatgctgaggtgtgggcaggtgggggagaacactcatagaggcaggggaggggattgtgagttcatggaggggaaactggaaagggggataatatttgtaatataaataaataaaataaccaataaaaattttaaaacattgagtttgaaaagtaccctgcacaaaacatctaggaaatcgggacactatgaaaagaccagacctaataacagtaagactaggagaagatttccagctcaaaggctcagaaaatatttttaacaaataaaagaaaattctccttacattaagaaggctatgcctatgaaagtacaagaagagccatcttggttcccagatcctgccgagactactctgtgcaggtgagagtgtggactacagaagctaaaagcttctcagacatgcagaagccacagagcttctgaggaagaccccgttttgggcaccagacatctgggcaccttccctgccaaaggagaggtgtctgccctgcctggaagggctttgccacagcatcttggggagccaattttttttcaaggattccgatgagactagtctgcgc

SEQ ID NO: 1181 - DNA, 1200 bp, mus musculus
aaatgttaaaagttattgcatacaactttagtattgttgtgtaactgtttccttcgaaatcaagacattccaccctacaggaaaactccttaagcagaagcttaacttagaatagcttcaaaagtgaccagatctaccaggcccctccctgccaaagtaagcaacagacattgagagtcagaaagactcagaaagagcaggtaaagctgagctgcaaagaagtggatcagctgccaggaggaagcagaaaccagctaagtagcctggaagagaacctggaaaggacatgtcctaacttgttggactgcctgtaggctgtgcagtatgttctatgtttccagccttgggagcactcacatttgctgcggtgggttttgttgatggagctgtctttgagttatttctgcttctgtaagaaatctctcagccatattcctgtaagttacctcaataaaactcgtttgttcaacatgttggactttggtggtattcatgctttgctctgttgtgggatccctattctggggtgtagatgtgtgttgtttttcttcagaatgatgtttttttcattttttaaacacaagtatacatacattatgcatacatagaagataagcacattttttgtgtttttggagacacacacacacacagacacacacacacattcctaaagtccaaaaagtaagattaaaaaataaaggcacttttggtcccaagcacttcagaccagtgacatttagtctgtatttgaaaactgaggaattgaaggaatagacactggggttcctattggaactgcatggccgttgtcctccttgtattgaggtcgctgcagcaggaatgttttagccgtggtgaagggtaatgaatgcatgagcagataacaagcactgagagtcctgatgcacaaggtgctgggcagacttcacaggcacgacccagatggtctctgttaatgttatttccccatgaggacgttgggttccaggaggttgagtaacttgggtgaggtctaacaggagtctcaatctatgctgttttccacaaagttatacttggagcactgagatctactgacaactggaatggaaggaaattattcataatatacatattttagtagatttacaaaacagtagattttatgatattttatatgtatctatgtatgtaatttacccatccccattcatatat

SEQ ID NO: 1182 - DNA, 1000 bp, mus musculus
cagcaccttgaccttagccagcctgcctccaagaactcgagaggcagtttctgttccagtcgctgtgtgcagctgagtgcagagctctggcatggattcattggagacactaccagggcggatgggtgcctgcctcaggcattattgtttctaggccagtggtttaaacatcaaactgcttctgcagacacgggttgtgtttcagatgtaggcagcatgggtgggcgtgtggagtcccgactctttaacagttcccactgctgctgatgcttcagctgccacatgacagcgggagagcgctgggccgggtagtatgttgaagaggttcaggcaagagcttagaatacaggtagggattttttaccacccagccgcagaagtggttcataccccaggagccactgtctgtgaggcagggataatatttactcagtttatctcataggattgataaaagtagatgcatgaagagatccatttgaacctcctttgcttttcatgcaaagcagcctggtggagcagggagtatccatcgttctccgccaaaaagaaagaacataggagaatactgacgtatcctagtgtaaaccacagcctaaaggggtctcctatcgttcttcactgtactgcttcacagggtgccagaactcgggctcctccctctccacacccaggactcccccgtctctctccctacacaccactccaccttctcttgaacgtctgcctgttggcctggcagcctagatcacagtctgtggctccatatttggatccttctctgtcaggaatgtctggatgtcttcgagactgtggggttgaagctaagaaacctgctgtgtttcttctcaagtgtgctcctgctcctgcccctgtgcaggtctcctcaagtgtgctcctgcctctgtgcaggtctcctcaagtgtgctcctgcccctgtgcaggtctcctcaagtgtgctcctgtgcaggtctcctcaagtgtgctcctgcccctgtgc

SEQ ID NO: 1183 - DNA, 1000 bp, mus musculus
aagtgaacaattttctggggaaatgcagattacataacatctctcaaaacaaagaagagaaatgaattgactataacatagtaaaatggaaaaaggggtcaaaatgttgaggagctggggtttagctcagtggcaaagtgcttgcctaatatgtgtaaatccttggcttcaatccccagaactgaaaaaataactagcctttacaagttgcagcaggactaggcagataaagctgcccagctaggggaaagggacccaaaccaggcaacagagtcagagacagtcccagctccacttcttaggggaaccacatgaagaccaagcttcacatctgttacatatgtgtagaaggcctggggtccatctcatgcgtgctttttggttgatggttcagtctctgtgagccccccaagggctcaggttagtttactctgtagatcttcttgtagtgtccttgtcccctccagtccctcaacccattccttcactctttcccaagactctccaagctctatcctttgtgtgagggtctatgcatctatttccatcagcggcaggatgaagcctctcacatgactgtgatgctagggtcctgtctgcaagcatagcagagtattactaatagtgtctggaattggctctctcccatgggatgagtctcaagtttggcagtcattggttgctcattccttcaatctctgttccatctttatcacacatcaaaggttggctttggtcaaaggttgtgtgggtgggtgaccatctgcatttgattcccagcaaagaattgacttcagtgagttgtcctctgaccctatgcaggtgccatgcatggcactggataccctaccccaccatgaatgtacacatatgcaggtaaataataccatgattaaaacataaacttggtaaagaaaagagtaaaaaaagaaagcatagaaaaatttttcacaaatataaaacagaagtgtttaaattaaaatacagcagatattaactc

SEQ ID NO: 1184 - DNA, 1000 bp, mus musculus
cttctttatgtcctctaccatcatcatgagatatgcttttaaatccaggtctaccttttcaggtgtgttaggatgccctggactgggcgaagtgggcttctgggttctgatgatggtgagtggtcctggtttctgttagtaggattcttacgtttacctttcaccatctggcaatctctggagttaattgttatagttgtctttgtttagagattgttcctctgttgattttgttactctctctcagcagacgtgggagactagctctctcctctgagtttcagtggtcagagcagtctctgcaggcaagctctcctctttcagggaaggtgcacagttatctggtgtttggacctcctcctggctgaagatgaaggcccaaaacaggatctttcccaggagctgtgttgctttggccaggaagggggccagttgtctggagccgaagatggcgccgcctcagatgctctctggctctcgcctggcccaggaaggtggccggttgtctggagccgaagatgacgccgcctcaggagctctctggctctcgccaggaaggtggccggttgtctggagccgaagatggcgccgcctcagaagctctctggatctcgcctgtcccagaaacggctggcctctgtattccacaccgtcacccgtgcagcctgccctccgcggagtcccggagccaaggaggctcccgctgccggggcctgaggcagaaacctctcgggccgcgcggacccctgtgctctcaccaggaaggtggccggttgtctcttgttgccctttctaagtagtattgaagcatccacagtttagtctttcttctttttgaacttcatatggtctgtatcatgggtattccaagcttttttcctaatattcacttatccaatgagtgcataccatgtgtattcttttgtgatttggttacctcactctgaatgatattttctagttccatccatttgcctgcaaatttcatgaagtcattgct

SEQ ID NO: 1185 - DNA, 1000 bp, mus musculus
ccttcttaaaatcctctaccagcatcatgagattgagatacgattttaaatctgaatcttgctttttgtgtgttttggggtatccaggacttgctgtggtgggcatactgggttctgatgatgccgagtggtcttggtttctgttagtaagattcttatgtttgccttttcaccctctggtaatctctggtgttagatgttctagctgtctctggctggagcttgttcctcctgtgattctttagcctctgtcagcactcttgggagtcgaactctctccttagtcccagtgatcagagcactctctgcaggcaatctctcctctggcagggaaggtgtccagaagtctggagctctgatccatctcctgagtcctggggtcagagccctccctggaggctgactctcctctggtgaggaaggtgcccaggggtctgggtctcagctctgcctcctgactgaggatgaaggcctgaagggaccctgtccaagaagctctgttgcttctgccacccacgtgctctcctgtgtggactggtctcagtgatcccaagatactgggtgtgctagtgcttgctgagttcgcgcccaagatggctcagggctggtgctgccaggaaagaaccccagccactggttgggtggtttcctttgtccctgttcctgctggcacaagaccctcggggttttttggaacagatgttgcattccactcaccagggatctcaagatcctgggtgtggtagggctcgctgagttcgcacccaagtttgtgttccatttttaagggcttcaacctgtgttctcctgtatttctttaaaggagtttttatgttcttcttaaagtcttctatcatcatcatgagatgtgactttaagtcagaatcttgcttttctggtgtgttggggtatccaaggctcactgtggtgggagaactgggttctgatgatgccaagtagccttggtttctgttgcttattttcttgctcttgcctcttg

SEQ ID NO: 1186 - DNA, 1200 bp, mus musculus
ttgttttttattgaccgtctattgctgggtatgagtcctggccttaagggttgtttttatgcaaagtgagacactgttagagaaaggtaaagctagtttttcatttgccagtgataatcacttggaaatagtttctgggctagggatgggggtgggggggtttgcatccacttccactctttgcactgaaagctcatcaggcccagacctgcgcaaggttctgtgagttcatatttacattggtccttatgtgtttagaaggccttatttccttggcattctccatcccttctgactcttaaaatctttctacatgctcttctccagggtcgcctgagccttaagggagacatcccatttaggactaatgactccaatctttctcacattgtccaatgtgggtgtctgtattgattcccatctaccataggaggaagctttgctgatgacagcttagcagctccctggtctatgagtgtagcagaatgtcgttaggagtcattttgctgccttgtaccttcagtatgtggttttcttctaaacctgttgcctgtctggtgttgagttcatggctacctgagcaatgttggaaattacttcaatctcatggagatggaatgctaatcaaataagatgtgggtcggttactccctcaagttttatgccatcattgctctagaacaccttgtagacaattgtccattgtagaccaaagggtttgcagctaggctggtgtttacctttgttttttggtagcatgcagagtactttccagtaccatggagctcttaacagtggcacagatagtacactgagaaggggatttagtacaaagtaggccttatgggccccatgggttttagctttctggttctggtcaaatgttttcctgactatgccctgtgatcctgcacctcttgttcctgtttccatggattaaccatgatgcactatattcttttaacccaagagccaaagtaaacccttgatctcttcagtgtctgctttgaagccctttatccagtgagcaaggtaaccaccatgtgagctgtgtgtttaagcctggtgtttgatgccttcattggacataagcatgtatcttatgtcaagttcacaaaacctcttgataaaagagaactgggccccttagaaagtggcagtttctaggataataaataaggaagtggtttaaaagggtga

SEQ ID NO: 1187 - DNA, 1000 bp, mus musculus
tgaatcttgcttttcgggtgtgttggggtatcaaagacttgctgtggtgggcatactgggttccaatgatgccgagtggtcttggtctctgttattaagattcttacgtttgcctttcaccatctggtaatctctgctattagatgttctagctgtctctggctggaacttggtcctcctatgatctttagcctctgtcagcactcctgatagtccaactctctcctgagtcctagtggtcagagcactcttttcaggcaagctctcctgtttcagggaagttgcacagaggtctggaactcagatccacctcctggctgaagatgaagaagctctgttgcatctgcagcccatgcactctcctgtgtggactggtctctgagaaacccgacatatatgatggtgttctcacctgagtcccggggtcagaaccctcctggagcctgagtctcctctggcagggaaggtgcccagaggtctaggtctcagctctgcctcctggctgaggatgagggcctgaagtgaccctgtccaagaagctctgttgcttctgttgcctgagtgctctgagagacctggaatgcaagatggcgctctcacctgagtcctggggttagagccctctctggaggccaactttcctcagtgatcctaagattctgggtgtgctagggctcctgtggcatggataatcctctggggactgtgagactgtctgcagagttcgtgctcaaggtggtgcccagctggtgctgaccagaaccaaatattcaagtattaaaagaagaaaagtcaaacgttcttatctcatgagagtaatactaacagaagctgatactctcatcaaacaggaaaagggcaacatgaaaaaaagggaaaggtgctatgagactgggtgggaaagtcgacaagagtcccacggagtttggtgcccagtccattgcagctgctatctgtaatctatatgaatggtgctgaaggcctggaaggctgttaatgt

SEQ ID NO: 1188 - DNA, 1000 bp, mus musculus
cctgtcaccctcagagacttcaccgcttggatcatcaatgccttttttccttttttaaggagtgggttggcatgttagcctggggattggtggtcctcctgggatgtggtttctgcctttgactcgtaggtcgctttaagagagatcatgccatatacaaggctgtggtatatcaggccatgattgccgtgaagatggcacatctcccaatatttggctggcctctgaaaaattaagagtttgccctaggtcaattggcagttgtagtcacacaaatccacagtatctagagacgggcatctttcctgtgcacagatcaacctaagacatggggcctggagacggtagggtaaccctatgatgggtaaggctgtgacactagaggatcaacctaagacaggagccgtggccgaaggacagatttgcccagacctagtccagcatcatattattaaacaaaaaagagggagatgtaggaagccaactctaagatgatgccggtttccattgtgccgttgtcataaacaacaccactgcgcaggcataagcctgagtctggcgccaacccctcccgagcgggtacatgctaattaggtgacagtggttcaacctatcccaggaggacacgaagcctttccctgtgctggggtgcatataagcagacctccctcggtgcccggggtccccgtagcagcattgaggtgttcctgcaataaaggctgttgagaagaatctgaccgtgttgtgtcttccttgctggctgaggtgggtgcaacagaatatagagatgaaaagacctggaactttcaggactgtgcatgaagattttggatgtctttggttagctgtaacatcaggaccatgtcagtagatgaatgcttcatgaataagatgataaatgcattactagagaatgaacaaagggactataaagagaaaatatgggatgatgaaagaaatgagaagatgatatcaaggtggggtaaccaacagggctaat

SEQ ID NO: 1189 - DNA, 1400 bp, mus musculus
gtatttctttaagtgagttattaaagtccttcttgatgtcctctaccatcatcatgagatatgcttttaaatcccggtctagcttttcgggtgtgttggggtgccctggactgggcgaagtgggagttctgggttctgatggtggtgagtggtcttagtttctgttagtaagattcttacgtttacctttcgccgtctggtaatctctggagttagttgttatagttgtctctgtttagagattgttcatctggtgattctgttaccctctatcagcagacctgggagactagatctctcctctgagtttcagtggtcagagcagtctctgcaggcaagctcacctcttacagggaaggtgcacagttatttggcgtttgaaccttctcctggccgaagatgaaggcccaaaacagggcctttcccagaagctgtgttgctttggcctgtcccagaagctgttaatttcagtagtccacactctcacctgtgcagactactttctgcagagtcctggaaccaaaatggctcctgcggatcctgaggctagggcctcccgggctgggcggacacctgacctctggccgggaaggtggccggatgtctgaagcccgataatggcgatgcctcagaagctctgtggctctcgcctatcccagaagctgttagcttctgtagtccacactctcacctgtgcaggctgctttctgccgagtccgggtggctcctgctgatccgagtcaaaatcctagcctcccgggccgggcagacccctgtcctctggctgggaaggtggccggatgtctggagcccgaaaaaggtgctgcctcagaagctctgtggctctcacccatcccagaagctgttagcttctgtggtccacactctcgtctgtgcagacaactttctgcggagtcccagagtcaagatagctctcgcagatcctgaggcaaaaacctcctgagccgggcagacccctgtcctctggccaggaaggtggccgggtgtctggagcctgaaaatggcgctgcctcagaagctctgtggctctcacctttcccagaagctgttagcttctgtagttcacactctcacctgtgcaggctgtaaagcacacacatatataacaaatgttggtgcacttgcatttgagatatcgacgttcagaatttagatatcatcttggtggctttccttcaattcagtgatatttttcatgtcttttgattaatttgggttgtaattctattttattatatatttgaatggctactccacttgcttcattggttcatttgcttggaaaatcacttttcaggcctttactctgaggtaatagctatctttgatgttgtgatgcctttcttttattcagcaaaatgatagatcatgttttcaca

SEQ ID NO: 1190 - DNA, 1000 bp, mus musculus
gtggcattgagctaatcattattttaagaggaaaactctcaaaaggctttgtagaggccatcttcatttcaactacttttttgaaaaaatatatttttaacgatttttatgtaagtacattgtagctgtttcagacacaccagataaaggcatctgatctcattacagataattgtgagttactgtgtggttgctgtgtggttgctggaatttgaactcaggacctccagaggatcagtcagtgctcttaaccactgagccaactctccagctcttgctcaggccctgctcgctctgaccccactcactgtagctgtcttcagataacccaaaagagggcatcagatttcattacggatggttgtgagccatcatgtggttgctgggatttgaactcagttaagagccgtcagtgctcttaactgctgatccatctctccagccctcaactgcttttgattgattattttaaattacacgatcttttcagatggtttttatgacttgttgtgctgagaaatctgaagtgataactggctacaccaagaacttccgctaacacttttgtcatttttacaattgaagcttctagggcaactccggggtatcaaactacctggttcaaatattgaaatctcctaagcctcaggaatcagagacaagggcctatcgtcttttaaaacaccagaaactcaactgttgtaatacactatgtgcccacagatctgtgcctttaaaacagcctgcaaggggcaaacgcttggaacagagagtgcttgagtgaaaggccaactggtccctacctcacacagccctggggcctccagcagggacggtacacatgtagaggcttgtttgcatctgtctttccttttctgtgttttcaagttattggaaacctagatttgctaactgtgtttatagtcttacctttccaagtgtgttgtgtaggccaggcagtgatgctgcatgttcttaatgccagcacttgggaagcaga

SEQ ID NO: 1191 - DNA, 1200 bp, mus musculus
atttctccctgcaaaaggtatttaatctcaagcccaccctgagaagggagtatggtacattatatatccattttctgccatgaacagccaataaactgtttggaactatggactgtctttttttcatcaagaaccacagtggggagccatgaagaaggcctttgccttcagagccataccctactcccaaagaaggcctctctgcactcctagccacaacctccaccaagcctgcctcagccaagagaggaaaattcaccccaagagagaagctggagctcccatcccctccctggccccgggctcgatgtagtctccagcctatgggctcccattcggttctctgctcttccaagactcacagcgatgcctggttgtcctagagtctgaaaagcccacagcctcagccttgtcacaggcccagctttcccaccccaaagcagtacctcgatgcttccctacagtccagcacctgccagcagcatgggataaacacagtcaaactcccttgttcagcttcccccaccacacaagagcctatgggtgggtggcctcatgcttcaactcggggccatgtctatcttctagaggtgatctttttaggctctgtctcccaactattgggcatctcaactaaggtcaaccccatttagacctggaagccactcatatcccaggtctctgggactttctaggtccccaactcggtccctgctgcccccactgctgctgcatattttcactcattctcctggccctctgggcttctctcctgtctcaccccatacctgatcctactcccattttcttttccacctcccctctcccacccaggaccctccgtccctctgcctctcatgattattttgttcccccttctcagtgggattgaagcattcttacttgggcctttcttgtttaactttttttttttaagatttgtttattttatatatgtgagtacactgtagctatcttcaggcacaccagaagagggcatcaaatcctattacagatggttgtgagccaccatgtagttgctgggatgtgaactcacgacctctggaagagcagtcagtgctcttaaccgctgagccatctctccagtccccttgtttaacttcttatggtatgtggggaatattattggtaccctgtacttttttgctaatattcacatcagtaagtacacaccgtgtg

SEQ ID NO: 1192 - DNA, 1400 bp, mus musculus
aagcccagtgtttactcatagacagtatacatgggtcaaaagcccagatattatacacatgatgctctacttagttgtagttctaagttggaaaaaaacagattgcaacaaaacgtttcattttcataaattgttgttttgttggtgctagaaactgaaccttgagcctcacatggcaggcaagtgctctgctagagctgtgtccccatcccatggcactttgttacataagaagagcaaacagacttgtgtgtgggcacagctctgttacaaagaatacttctcgaagtgattgaaaatctgagtaacacgagtcattccgcataaaatccttctgtactgattttaccacacagctctctgcttctgccaccttcaactcttgctatacataaaatataataatcaaacacttgagtgaaaacaagtgatacattatttaacaaaataatgtgtagccagggttttcattgaatcctagaaagtgagcacaagcagaggtcttgttaggacagctggaggggggaagacttaacaagcgagtgtggccatggccctccctttctgcattacttcagcatcaccttgcacaggtgagcagtgagaggccactggatgcctctcagtaggaaaggctccagagaaagcaaagcagctgagtagtgttggggcaaggatacaaattctcagttgaagagaaacaaggttcaaccctgactccagcctctgctggagaaaccagcaatgcaggagttacagacttaggaagctacacatacataaaagggagatctccagtttgttagaaagattcaaaactgacacaattaacacctgtttaccactgatttcattcatttctttatgctgattctcataagtattcaaaaattcttaactgctgtagtagtttcctcttagcagcagagatgtgctgataaaagcggcgcactcctgaccctagtaacaccaaggtcactgggatcaccagcactttataaggctgataaagctgctgtcacgacaatatgttcctatgatgacagacaccgagtcgccacacttttaagaaaaattaaattgaaatcttcatttttggaacataaagctgggggccaaaatctaaaacaaaatttattccaagccagaatgagcaggacacctaaaaaataattagcgggaagagtaacaccttggtgtgtgatgacgacgtcctccacaatagactttaagttctacaactgccactgagagagcactggttaaagttaatccaacgtgtttcttaaagctgttaggaagcttattcataaaactcgtgtaaggtagctgtgttcttcagtagcatttacaacaatctagcacttggtagattggcacactctataaagcagtgtaac

SEQ ID NO: 1193 - DNA, 1200 bp, mus musculus
ggaagaagctctgaagcggtatcttagtggaagaataattgtatgacacacacctgatactaggttctattcccactcctatgtggtagggagaaaccatcccagatcctgaatttgctaataccttcaacttggattttggcctgaaactatgacaaaattaatttcacttggctgtgatattatatatcatactgtggcatccagactactatgccacatatgaaattaaatctccaaccattcatttaagtcataggagctctttcccagacataaaacatgatcaaactggtttccatgtatggaatctatccctttaatcatgaaaatatttacacatcctaggctaataaacaaagtatgaatatggtcttaaaggtgtcctgccttgggcagctatggggataaggggaggctagtcgccattggggcatcccgtctggtagtagccgagtgagagatgggtccgaggcggcgaggggctcagagtggcgagctcagagcaggagagaatggaaggcgtgaggcgcgggtggcggggcttgagtcgggaggggcggggtggggcgtggcacgcatctgatgagtttagcacacatggtgaggactctagcatgtatttgttctttcattaaacaaaaacccgcatcaactaatatgaacaaagtttctaatgacctttaataagaatatttttcaaattttgtgtctacccataaagatgaaaatcatgtaagaaacttcttagcagattatattttagagattattattaggcatgatggtttagataggatttagtagtgtatccagtgaggactcatatgatggagacagaatcctgcatgtgtctgtacagtaggtggcattgccctactaagggatgctgcctaccagatggtgctcagctcactgtgagtgctgcctccaggactcagaacagttattaatgtggtcaagagcaagttgtagggagagtaagtcagctcttgaatccctcatgcttcctgtctggtgatgagctgtctctctttcatctgttcctttgccatcttgcaagaggccctcatcagaggcaagatgatgctgggccattgcatttgaatctccagaattaggagctagagttaatctattcatttgttttattacaataatttttaaaacggactaatatccagggtaaaatgcaaggct

SEQ ID NO: 1194 - DNA, 1400 bp, mus musculus
tatttaaaaagtcatgattggtcaaatatcctttctaatagatgttgatttaaaaagcctacaaccatgccataaatatgtatttttaaaaactaaataatcactactaaagacttctgtttctatgtaaaattcaactttgccaccaaaaatattgtgatgtcagttcctcaccagaacttttgtgagaaactaaagacctcacaaagactgggactatggttccatgggtaaaggaaaacccctgtaaaaagtagaggaagagaagcatgccacagaattctctctgacctccatacatgtgctagagcatatctacatgcatgcacacatcgcagacacacacaaacacaaaaataaataaaatacaaataaaactaacatgtgtatctgccacattcttctgtaagcctttttcatttgaattcaagataacctaaatttagctggaattgtatatgaagcctggcatttggccaatatagttattggccaataacttttcattcttattcatggactaaacctatgttagtgccctgccagtcagtgccagcaccaggtaaccttgggcgcagagtcggaggacacccccaaggtccgctagaggactctctgcacgatcttaggaccacaggtgaatggaacacaactgctgttccaatccaattgcgtgggacctgagacaacattagggaagcaggaaacctggcctgaccagggtcaaaagtcccttctggtctgcaccagcactgggtcacctgggcgcagagtcagaggacacccccaaggtccctagaggacagcttctgagacagaccacttttcgggctccagacatccaggcaccttccctgccagaggagaggtgtctgccctgcccaggaggactttgccggagcaccaggggaaaccatcttggttcctggatccctccaagactagtctgtgcaggcgagagtgtggactacagaagctaacagcttctgtgacaggccaaagcaacacagcttctgggacaggtcctgtttcaggccttcattttcggccaggagggaggaccaaatgccagatatctgtgcaccttccctgtaagaggagagcttgcctgcagagagtgctctgaccactgaaactcagaggagagatctagtctcccaggtctgctgatagaggctaacagaatcactagaggaacaatctctaaccagagataactataacaactaactccagagattaccagatggcgaaaggcaaatgtaagaatcttactaacagaaaccaagaccactcaccaacatcagaacccagcactcccacctcagccagtcctgggcacgccaacacacccgaaaagctagacccggatttaaaagcatatctcatgatgatggtag

SEQ ID NO: 1195 - DNA, 1200 bp, mus musculus
agatgtagcaattttcatagtaaagtctttatgtataataaaatcttatcacctgcaaatgaaggtactttgatttcttactttcattattgttttacatatgttagatcatcctgcatctctgaaactgaagccaacttgatcagcgtggataatctttctgatattttctggaatttcgtttggaaacatgtccttcaacagaggaatggatacagaaattgtggtacatttacacaatggagtactactcagctattaaaaacaatgaattaatgaaattcttaggcaaatgtatggaacagaacatttcatcccgagtgaggtaacccagtcacaaaagaacacacatggtatgcactcactgataagtggatattagcccagaagctcagaatactcaagatacaattcacagaccacatgaagctcaagaagaaggaaagccaaagtttggctgctttggtcctgcttagaagggggaacaaaatactcatgggagcaaatatggagacaaagtgtggagcagagacagaaggaatgaccatccagagactgccacacctggggatccatcccatatacagtcaccaaccccagacactattgtcgacaccaagaagtgcatgctgacaggagcctaatatagctgtctcttgagaggctctgccagagcctgataaatacagaatgatgctcgcaaccaacctttgaagtgagcatagggtccccaatggaggagttaggggaaggactaaaggagctgaagaagtttgcaaccccataggaagaacaaaattatcaaccaaccagacgcccccagagctcccagggactaaaccactaaccaaggactacacatggaggaacccatgggtccagtgcatatgtagcagaggatggccttgctggtcatcaatgggtaaagaggcccttggtctggtgaaggttcgatgccccagtgtagaggaatgcaagggcagggaagcaggagtgggtgggtgggggaagctccctcatagaagcaaggggcgggggatgagataggaggtttccagagaggaaaccaggaaaggggatattatttggaatataaataaagaaaatatccaataaaaaagattttttgcatttatactcataagggatataagtctataattttatttttttgagagggtctttgtgaggttttggagt

SEQ ID NO: 1196 - DNA, 1000 bp, mus musculus
ccatactgaccctgaaagaaagacatacaaacacctgcctctggaatcactgttatttgaatgtgtgctggggatatggaaaagacaagagtacatggtggagaggtggaagagaaaatgaagccaaggtgtttgtatattgtagagaaaggtagaactagagatggtagtgaggaacagggagatatgaggacgccatagtgagttcctaccctgggatgccactaagggccatgtttgcatccatggtcctgttgcagctggggtcgttgctgatgtcttggcccgagttaccatcaaagaccaagtggatgtcccatggtctaggttgccactggaaaacgtgtggatatctgagggtcatgctgcttagggaagacttgctcatcttcgtggcctgccctgtcacatgaggccatagggacatttgggcccagactagttcaatgggctatgtcttggtccttgacttcatggcagctgaggtctgtgttgatgtcccagtctcatgaattaccaaaggccatgcagatatccctagtctggaatgctgcctgagtactatgctgagctggagtgtgtggggtgatcagccccaaaggtgtgactgggggagagctggcccggggccctgcctcttatctgccccacaacagtggcagagatagctagggcagtacctcccagggcacagaagagctgatgggctaactagctcaattacctgcgcagatctagggcagtgagttggcccactccaacatagttctatcccaactataaactgctggggcatgtgaaagggctggttttgcagatccaaagcagcaggatctccatggcatggggctgaaacagaatatccaagccgtgtcccggtgaggatccagtatatatagtatagcagaagccagagaccttgaaacagaccatgacttattgcaaggaacatttccaagtgaaaatatatggacaaaagggtgtaccatgcgacacaaca

SEQ ID NO: 1197 - DNA, 1400 bp, mus musculus
agagttttgaaggaagaaagataagggagaaatgaggcaattaaactaaaatatagaataaagatcatttgtgatgttttaagatatgttagtcttcctcgatttatttcttcctcgatttgaagttcttgttatgcagatctttcacttgcttggtaagagttatgcaaagatattttatattatttgtgactattatgaagggtgttatttctctaatttctttctcaacccatttatcctttgtatagtggaaagctaattagttgtttgagttatttttatatccagtctctttgttgaagttgtttggctcacaggacccaatggggatgacagtagctgaaatgcccaacagtggggagacggaacttgaagagactaccaccagtaggttgatatggcccccagttcaggaatggagccacgcacccatctcaaaatttttaacctagaattgtccgtgtcttaaggaaactcagggacaaaaatggagcagagactgaaggaaaggccatccaagagaacacttcactgtgtgatccattcaatcctcaaacaccaaacccagacactattgctgatgcaaagatatggttgcagataagagcctggtatggctgtcctctgagaggttctgccagcaccagatgaaggcagatacagatactcacagcaaagcattgtactgagcccagggacccctatagaagagttaggggaagggctaaaggaggtgaaggagattgaaatcccataggggtttatatcaactaacctgatacccccctcccagctcccagtgactaaaccaccaaccaaagagtatacatgcatattggtccatggctcctggtacatatgtagcagaggactgccttgtcttccatcagtgggagtggaggagcttggtcctatagagactttatgccccagagaagggggatgttagaggcttgaggaaggaatggatggatgggtgtgggagcaccctcttagaggcaaatagtgggggatacggagtgggagtgtttgtggaggggatactggaaggggggataacatttgaaatgtaaacaaataaaattattaataataaaaatatattttgtattatatccagaaaaattgattacagtgttaggatatctttccaagagttacggtttcatttttaaagcttaagtgaagctgaggaaagctgccttacttagataagtaggccgtcatgatatgggaattggagtttggttttggaaagaatttcttttgaattcacttttgccaaataataactacttaaaagcctaatataactaattaagattttcttggtcaaaatctccatgttacaccatgttatctgaggaagttatcccggaatttcttcctccacttct

SEQ ID NO: 1198 - DNA, 1400 bp, mus musculus
atttgcctcccttatgaaacccattcaagctaaagtaattcttcacaatcattttttttacagatgaaaaaaagtcacagtattgagttgtcccctatcatatgatcatgattcagcaacaacagctggtagcattgcaaacttcctttattttgtcaaatcatactcctaacacaagctaagcaatttaactgataccaagtgcctccaactccatcccattcttcattatgtgtgtttttagtttagatttatttccattgtcattaatcttcttccaaataacttatttatttatccatttagccatcaaacatctgtgaagtggtatgtgtatgttgtggattcaaatgaatgtcagagttctgaaaccaagcatccaaacaaccgacaaaacaatctttcaaccaatcatcaaagcctgaaagcaagcaagcaagcaaccaaccaactaaccaagcaatcaagcaaccaatcttccagccaattactcaaggaagcattcaaccaacaacccaactaaacaatttaccaaccaattgcctaaccaagcagtcactcactcactcactcactgactcactcactcacccaaccaaccaaccaaccaaccaaccaaccaaacaaccaaccaaacaaccaaccaaccagccagtcacccaaccaaccagtcacccaaccaagcaatcaaccaagcaaccaaacaaccagtctttcagtcaatcacccaagcaatcactcagccaactaaccaactaaccaaccatccaaccaatcaaatgactgaccaaccgaccgaccaaccgactgaccaatgaaccaacaaaccaatgagccaactaatcatctaagcaagcaagcaagcaagcaagcaagcaagcaagcaagcaagcaagcatgtaagcaaccaaacaagcaagcacccaaccaaccaagcagtcattttcctgctttctagtgttctattcaactctaaaatgagaattattaaattaataggagaagtgctgtttctcttgttaagaattgtgggaggaagatatgcttcatccatttggggtctgtcgggactggatcctgaggataaaagcattccagttgacatttgaggaatatataaagatttccaagaatctatggaaaatgagcaccttaaaatagagtgaagaaaatgttaaagatttacttaaaaagagttgcttttcacaaatttaaaattccccatttagcttccataccctttaaagttctggcctatctttttgtctgcctatgcttcctttgcttctcaacaaagagcttttgcttcagtaatgcttcttcatgctcctaagcaaagcatgctttaatctgtcatctagcctaacctcttcttcaagtcaagctcatgtctcacactt

SEQ ID NO: 1199 - DNA, 1200 bp, mus musculus
tatatttcagaacacaggtataggagagaaatgtgagaggaatctgcccttgtctttctttgataaagcagaaaaaaatagatttttcagaatcagggtatttagaggttacagacaggtttcagggaaaaaggaaattgtatgttgagggtgaattgagaggctatactttgtctaagtgtttgtagcagcaattgaaaagaatatgtttcagtctgaagagactatgccactgatggactgactgactatgtgagaaaatgacattttcttacagaaactagttaagaatatactaagctatattaaaaacagcagcaaagaagacaaataatcagcactgccagtctaccttggatgcaaactcagcacatccccatggttcccagagaaactctccaatccccaggtgctctagcatgcccaggatcttaggatcagcagtgagtagaacacaacatctgtttgaacactaccaggagtgactggaaccagcaggatccagggacactggaaccccacctgaccagtagctcgagttccttcctgctggcttgagtctagcttgggtacaaacttggcagacattcccatggtccccagaggagatactactcccaggtgctctaacacatcaaggatcttcccaggatcccacgatcccacaatcccacgatcccaggaacccaggagcttggtcacaccagaatgtcagggtctcagaggcagcttgactcccaggaactctgacatacccagaatcttaggaccacaggatcacagaatcacaggatcataaagaaagctggattctgaggagttctgactcaactgggattacaggaagaacaggctccaatccgatatagtgagggcagggagcacttttaatagtcagatggcaggaggcaagcataagaacagaagcaacagaagcaaaggttacttggcatcatcagaactcaattctcccaccatagcaagtcctggaaacaccatcatacctgaaaagcaagatatgtatttaaaatcacttctcttgatgatgaaggaggattttaaggacataaataactcccttaaagaaatacaggagaacacaaataagcaagcagaatccttaaagaggaaatgaaaaaattccttaaagaataacaagaaaaaacaaccaaactggtgaaggatttgagcaaaaccatc

SEQ ID NO: 1200 - DNA, 1000 bp, mus musculus
aattaaaatgtattataagtttttactttaaaatttctatgtattattcatttccctgataactgctgattcagaatcctgttagcaggattgaactttaaatattttaaatatatttacatttacaattataaaagtaagttatactatagaagcatttcttgttgcatattctggtacttttagattgctagtcccaaatacatgtgtggcagattacagagaaatttggaaatgcattcatggattccatgtattcatcccagttttcttagcttctgaaaatgcttcttgctgtcacagtcaaatttccactgacataacaatattttgaatccacgagtaatgtggaaggtggtagaaattctctaccttttgtatcttgtaattggtgaacttctctctctctttttaaataattacctttatttttttttacagtccagtcattatccccttcctggtacaccctcccacagttcttcagttcattccttcttccctctctccaagaagttgttcctccaaccccaccaggcctccccagtccctggggcctcaagtctcttgggggttaggtgcatcttcccccaatgaggttagagcagtcagtcctctgctgtatatttgttgggggcctcagatcagctcatgtatactgcctgtttgttggctcagtgcctcagagatctcaggggtccaagttagttgagactgctggtctttctatgggattgctctcctcctcagcttcttccagccttttcctcattcaataacaggaggcctgacttcagtctatttgttggatataagtacctgtatctgtctcagtcagcagcttgctgggcctctcacagtcaaaaaccctgaccaggaattgttcatgtctgaaagaactgcaaagataaaaaatggaaaagagactgaggaaaaggttgtccagtgacctgcccaatttgggatccgtctcaaagggaagttccaaagcctgacacta

SEQ ID NO: 1201 - DNA, 1000 bp, mus musculus
taattactactatgtaaatttaatttacttattgtcccattttacatctcaatatcagccctttgtcttctcccagaatcccctcacacagattctcctccccatcccctcttcctcttttcctcacacactaaacaccaccttaccccacttcctggacaatcaagtcactgcatttctaggaacatcctctcccactgaaaccagataaggtggcccagttagaagaatgggatctggaggcaggtaggcaacagttacaaggagagtaccagctccacttgtggggcacccagtgaagaccaggctgggcatctgttacatttgtgcagagggcctagaaccagcatatgcttgctatttggttggtattaaatctctgttggccccaagggaggaggctagttgactctctggaggctctgtcctccttctggctttcaatacttctctctattgttccatcagactccccaagcgccatctaatgtttggctgtgggattctttccattggctgctgggtggaggatctcaaaggacagttatcctagggttgtgtctgcaagcataacagagtatcattaatagtgtcagggattagttttttccaatgggatggatctcagttggttggacattcattccctctctgctctatcttcatcactgaacatgttgaagacaggacacatttggagttttgtgagtaggttgctattcttttctctccattgggagttattcttggctacacaaattgcctacttcaggatccatatcacccccagataggagtctcagctataatcacctccatagttccaaaggggcctccctcctctccaagtctctataacatcctccatttaccattcactgccaatctccgttctctctacactgttctctctacatcttgtccctggttctgctctgttccatatcccatcacccacccattttccccatccatctattttgtttctgctttggaaaaa

SEQ ID NO: 1202 - DNA, 1000 bp, mus musculus
gaggttctccctggataccaacctatcctgacttcataagacactgcagtattaggcacatcctaagtcactaaggccagaaaggtcagagaagttaggggagtagtatacacaggcaggcatcagagttagggtgagtccccactccagtttttgggcttccttcataaagaccaagctactgttacatatgtgtgtgtgtgtggaggggtagttccagtcattgtacactttttggttggtggttcagttttagaaacccctaagagtacatgttagttgactctgttggtcttcctgtggaatccctaacattatattcctgagtcttttgctcaattcctctgtgagacttcccaagctggttctaatatttggctgtgggtctctgcatttattttggtaagttgttgggaaaaggttctccgaatacagttatgtcaggctccagtctgagaattacctctactcttctgcattttctccctctgtctttgtctcaactcccctccccaagtcctgagtaatctcgtgtgtgtgtgtgggggggggggggcggggggagatgagggaaggattgagggacctagacagcagagggactttacaggatggccaagggagtgaactaatctgcacccttggggactcccagaatctgaagtagcaaccaaacagcatacagagtacacatatcacttgttccaaaatatttgtagcagatatgcagattggtcttcatgcaggtccatcaataactggagtgggggcttatcctgactctgtcacctgcctgtagatactgctcaataactggagtgagggcttaccctgactgtgttacctgcctatagatacttctcccctaactagtctgtcctgactggcctcagtgggagtggattgacctagatctacagtgactttaggtgccaggaatagttttgcaataaaaactataccaactgtcttgtaaggtattatgtcaaaattattctat

SEQ ID NO: 1203 - DNA, 1400 bp, mus musculus
tttttgttttacataacttgaaagagcaattctcaagttcatatgagaaaacaaaagtcctaggataaccagaataatctgtacaataaaagaaccttaggaggaatcaatatggttgaccccaagccatactacaaagcaatagttaaaaacactacatgttattggtacagaaacagacaggctaatcaattgagttgaagattcagaaataaaactacactactatggatacttaatttttgacaaacactcaaaaccagaaaaaaaaaaacacagaagaaaaggtaacagaaaaaggaaagtatctttaacagatggtactgatctaacttggtttctctatgtagaaggccaatatgtttttattaataactctgcataaaacatatgtccagttggataaagaatctcaacataaaaccttattcacgatctgcaggagacatcttggttcccggtgtggactacagaagctaacagcttctgggacaggtcctgttttgggccttcatcttctgccaggaggcaagtccgaatgccagatatttgtgcatctgccctgaaagaggagagcctgcctgcagagagtggtctgaccactgaaactcaggagaaagcttagtctcccaggtctgctggtagagaataacagaatcacaagaggaacaagctctaaccagagacaactataacaactgactccagagtttaccagatggcaaaaggcagacgtaagaatttcactaacagaaacgaagaccgctcatcatcatcagaacccagcactcccacctcagccaggcctgggcaccccaacacacctgaaaacctagacccagttttaaaggcatatttcatgatgatagtagacaacatcaagaaggactttaataacccacttaaagaaatacaggagaacactgctaaatagttgtaagcccttaaagaaaaacaggtaaacacatccaaacaggagatggaaatgaacaaaaccatactagacctaaaaagggaagtagacacaataaagaaaacccaaagtgaggcaacgctggagatagaaaaccttggaaataaatctggaaccaaagatgtgagcatcagcaacagaatacaagagatggaagagagaatctcaggtgcagaagattccatagagaacatctgcacaacaatcaaagaaaatggaaaatgcaaaaagatcctaactcaaaacatccaggaagtccaggacacaatgagaacaaacttacggataataggagcagatgacaatgaagattttcaacttaaagagccagcaaatatcttcaacaaaattttagaagaaaacatcccaaaagtaaagaaagagatgcccatgaacatacaagaagcacacagaactccaaatagac

SEQ ID NO: 1204 - DNA, 1000 bp, mus musculus
aataatattaaaattcacaaggaacaaatgcaaattgcacaaaggcagaccaaacttctcaatagagacattaaagccagaaaggcctgagcatgtcatacagtcttcgaaaggtcacagatgccagcccagactaatatatccagcaaaatcttcaagtagcagaaaccatgacaaaatcaaaattaaataataccttttcactgatccagccctatgtagattataaaaaggaaaactacaatacaagcagggtaaatacaagcaaaaaaataagtaattccatgccagcaaaacaaaaagaaaagaaacgcacatacacacacacacacacacacacacactctaccaccatcaacatcaaaataataggaattagtattcattgtttattaatagctctcaatatccatggtcacaatttctcaattaaaaagtcacaagctaacagaggggattcgtgaaaaatatccatcattctgctgcatacaagaaatacagatcagcaacaaaactagacattactttacagtaagaagttagaaaatgatttttccatcagggaaatgcaaatcaaaacaaccctgagattccacctcacaccagtcagaatggctaagatcaaaaattcaggtgacaacagatgctggcgtggatgtggagaaagaggaacactcctccattgttggtgggattgcaggcttgtacaaccactctggaaatcagtctggtggttcctcagaaaattggacatagtactaccggaggatccagcaatacctctcctgggcatatatccagaagatgccccaactgataagaaggacacatgctccactatgttcatagcagccttatttataatagccagaagctggaaagaacccagatgcccctcaacagaggaatggatacagaaaatgtggtacatctacacaatggagtactactcagctattaaaaagaatgaatttatgaaattcctagccaaatggatgga

SEQ ID NO: 1205 - DNA, 3200 bp, mus musculus
agcaaaatccattacataaagaaattcaaagaaaaaaagccacatgatcattttattagatgcttaaaaaaacatctgacaaaattcaagatcccttcatgttaaaagttttggaaagatcaggaattcaaggctcatacctaacatagtaaaagcaatatacagaaaaccagtagccaacatcaaactaaatggagaaaaagttgaagcaatccaattgaaaaattgttgatggtgatggaaaggaattatggtttgctcagtttctgtgaaggggtttgcaaccacataggaagaacagcagtacaaaccatccagactccacaaagctccctgggattaaaccaccaaccaaagagtacacatgggaggacccataactccagctgtatacatgacagaggattgccatatcaggcatcactaggagggaaggttcttggtcatgtggaagcttggtgacccagggtaggggaatgctagggcagtgaggtgggaatgggttggtgtttggagaagcaccctaatagaggcacaggaaagggccagagaataggggatttgtggactgtgggatttccatcccacagtcaaagttctcacccataattcgtgctgtctgaaagaactacagggatggaaatggagaggagcctgaggaaaaggtccagcgacaggccgaaattgagatccaggtcaaggggaggtcccaaggcctgactctattactgaggctatggtgcactcataaaaagggacctatcataattgccctctgaaagaccctacaaccatcttaaagagtcagatgcagatatttacacctaaccaatggacagacactgacccttgtggttgaattaggcaaaggctgagagaagctgaggaggaaggcgaccctgtaggagggccagcagtctcaattcacctggaccctcaagatctctcaaacactggaccaccaaacaggcagcacatatcagccgctgttgaatctgtgttcattcagagattatgcacccaacgctcaagagactggaggtcccagggtgtttagaaatcagatggggtgggaagtgtgggttagggacatgactgtggagacagcagggtccagaggaggtatggtatatgtaacagtcagagggtagacaggggaaataaaatctcgtgtgtaaaaaaattaattaattaattaaaataaataaataaccaataaaaatgaaaaatatttttaaaaaaaatttgttcagttttgatgtgtactactaagaatttttcttaaatcttcaagaggctctcttccaagagtaattgagagggttgatgtagtatacatatcttctgttaaaaaaaaaatctttaatgataattcagatttcaggttgcagtagaaggttaaatgctcatagtgaatgtagagaaaaatctctagtcagcatttcccaggtggcttcttttctcataaacttacttcctaatgggaacacaatattactccattacagtaaagaataaacattattggaaaaaccattcagctcttagttggatatttttccacactaaatggaagagattgaaaatatattcactgaatctactgccaagagaattataggagatgatatttgacccagagatggtggtttattttcttttctcactaggacatgcatcatgttttcaagcatgccttcttactattttactttttgttccttacataacaaaatctcttcatatatattgtttgctttcaacttttaaccactaaaggcccaattgttttgctggatataatttgacaaggaaagtatatttaaatatattatgatgatttgagaaaatattttaaagttcatatagtaaactataatacaagaccaagatattaactagcatgtgtgtttgagaatatggggtttattagcaaatatataagtaggcttttgttgaacccacacttccccatccataactggctatctcttgttaccaaaagaggcctccagtggagtaaatagcttgaattcatgtgagttgttgacccaggggttaccatagaaatccccaaatgacccaaaatgttgaaaagtcaatgagttgttccctgaaaactgatagtagggtcccatttccatgaataacatccaacaaaagtcattgaacaaacagaagttgagtggtgcctacatgaagcctccatccctatggcatttgatgagagaaggtactcatcatcattttgtaggctaccaaaagaaatgcagacaccaacccagccacaaaaccttacaatatattctgcctgaaaaatacgatagggcaatggtggtacagagcttatgggagtatacaaaaaaaaatctaatttgacttaaggcacactctataagacagattcctatacctatagtattgctttgttgaccaagacccaaagactaaattgtacataattctatggtaaaagaaacagtactggtatcttaacaaataaaataatactttttttgaaatgtcctaatgatattaagctatgctgatatattcatgcctcattctattatcagaaaggtttcctctggcagaaaatgggaacagatgcagaaacctactgtcagatttttttttattattaatcattttatttgtttcttttctaatgatatcccccttcccagttacctctccacagacctccccatctgttccctactccccccgccctttcctttgcctctgtgaaagtgctccttttcccactcacccccttctgtctcatcactataacattccccaatgctggaccatcaagcttctacaggaccaagggcccatcccattgatgtcagttagggtcaccctctgaaacatatgtacctggagtcatggatacctccatgtatagtctttagttgatggcttagtccctgggagctctgagcacttagttgacatggttcttccttggggttgcaatacctttcatctctttaagtcctttctcttgctcttccataggtgtctcggggctcagtcatggttggctgtgagaatctgcatctttgctggtagaacctcttagggaacagacatgccaggctcctgtcagcaagcacttcttggcatcagcaatagtgtgggagtttgatgtctgcagatgggatatggagaatgagtgtgtaaatgggatt

SEQ ID NO: 1206 - DNA, 1000 bp, mus musculus
ctttcctttcctttcctttcctttcctttcctttcctttccttttcttttctttcctttggttggtggtttagttcctgggagctttgggggtggtggttggttcatattattgttcctcccatggagctgcaagctccttcagctccttcagtcctttctctatctcctccattagggaatttatgcacagtccaatggttagcagatcctctcagaagacagctatgtcagcaagcacttgttggcttccacaatagtgtctgggtgtaggattaagatggcgccagttttcagtgtgcctttgtggtgaacaacaccactgcacaggtgctagccagaatctggtgccaacccctcctgagagggtgcatgcaaattaggtgccagcaagctgaccaatcccagggggccacggagccttctcctgtgctggggtgcatataagcagtcctccctgggttcccagggtctccgtagcagcattgaggcgttcctgcaataaaggctgttaaaaagaatccaaacgtgttgtgtcttccttgctggtcaaggtcaaggtgggcgcaacatctgggtttggtgactatatgtgggatggattcccaggtggggcagtctctggatggtctttgcttccacctctgctccacactttgtctcagtatctcctgccatgggaattttgttcccccttcaaagaaggactggagtatccatactttggtcttccttcttctttttgaaaatagagtataatgttggatgcatagggtggtgagtgtgatctaaccaaaagccaagagacaaaagactgctgttgatgcagtctgtggtgacaaagtctgtggatatcattggtgtctggcataaagcttgagaaaggggttaaagaataaataaatctcacaaagataacgataatgataaagataatcaaactaaatgacatagcctttgtaaatagtgttgccagatttggtagcttattacttaaaact

SEQ ID NO: 1207 - DNA, 1600 bp, mus musculus
tgtttaatcttttccatacaaaccttcccccatattctgcattcttttaaattcatggcttttcttttcagtgttattgtaggtgtgtattaagacagtgtgtttacaagtacatcttttaagctagtatttcattatagtaatttaatatctatatctccctggtgattagtaatactgaacgtttttataaaaaatttggtatatctgtcattttaattgtctgatttttgaattgggttattcatatttgcactgagtgggtttccaggcctagttgtagtaatttaaattttgagtagtttttaggagactctgccataaaaaagggaacaattattaggtcctataaaaataagaaatccacaatatccattaaactaaaccaaataaatattttgtagtaagagttaaaatttcataaatatttaaagtaatttttccatagacagccaaataatctttattaatgtttttcaaaaagcactttaaggatttacatattccagagctttgcattagactgatacagaggaaagaacatagtctttctccatcaataactagatgtaaaaatcaatgctttatcacaaattcttcattttcattaattattttttaaactaatttactttttacactccatattccattccccaccccagcccgatccaccctctgactgctccacatcccacacctcctccccacccgactgtctccatgtggatgtccccatccctcaccccacctgacctctaaactccttggggcctccagtctcttgagggttaggtgcatcatctctgaatgaacacagacctggaagtcctctattttatatgtgttgttggcttcatatcagcttgtgtatgctgtctgttttgtggaccagtcagtgattgagagatcttaggagtccagattaaacaaacaaacaaacaaaactattttcttaggatgattcagatgactttccgtttcttactggcatttattaagaattgttaccgctgggcagtgatggcacacgccattaatcccagcacttgggaggcagaggcaggcagatttctgagttcaaggacggcctggtctacagagtgagttccaggacagccaggactacacagagaaaccctgtcttaaaaaaaaaaaaaagaaaagaaaaacactaccaccaccacaaacaacaacaacaataacaataatagaaagaattgttgagataaaaatgataatatattatcaattttatctctgttttcaaaaactccatttgtattatgaattctttaagcactagattaaaaattaactcatgtattatacatggttcttcaagaagattatggggtaaaagggatacattctatactagattaattttcctttagtaatagaattctgaggctttcatggctttttttttctgatgtctacatttcctggcatcccttccagatagcccatgccttattgatatttattcaataatcaaaaatgagtcagtcctctatcatgatcttaagaaggtaaaccttcctttttatatttcagtctacattctgttgtctaatctatgtacaaaatggtgagg

SEQ ID NO: 1208 - DNA, 1600 bp, mus musculus
acaccagtcagaatggttaagatcaaaaattcaggtgacagcagatgctggcgagaatgtggagaaagaggaacactcctccattgttggtgggattgcaagcttgtacaaccactctggaaatcagtctggaggttcctcagaaaattggacatagtactaccggaggatcccgcaatacctctcctgggcatatatccagaaaatgttccaaccagtatgaaggactcatgctccactatgttcatagcggccatgtttataatagccagaagctggaaagaacccagatgcccctcaacggaggaatggacacagaaaatgtggtacatttacacaatcgagtactactcagctatttaaaagaataaatttatgaaattcctaagcaaatggatggacctggagggcatcattctgagtgagataacccaatcacaaaggaactcacacaatatgtactcactgataagtggatattagcccagaaacttaggatacccaagatataggaaacaatttgctaaatgcatgaagggacactttgccccttcttagaattgggaacaaaatacccatggaaggagctacagagacaaattttggagctgtgacgaaaggatggaccatctgaagactaccatatccagggatccatcccataatcagcttccaaacgctggcaccattgcatacactagcaagattttgctgaaaggacccagatatagctgtctcttgtgagactatgccggggcctagcaaacacagaagtggatgctcacagtcagctattgtatggatcacacggcccccaatccaggagctagagaaagtacccaaggagctaaagggatctgcaatcctataggtggaacaacaatatgaactaaccagttccctccagagctcgtgtctctagctgcatatgaatcagaagatggcctagtcggccatcagtggaaagagaggctcattggtcatgcagactttatatgcctcagtacaggggaacgacagggccaagaagtggaagttggtgggtgagggagtgggtgggggagcgtgtgggggacttttgggatagtattggaaatgtaaatgaaataaatagccaataaaataaatttaaaaaaagaaaatattaagtcagactaaagttatttttatatttatatttacatttatatttatatttattttgagacagtatgtgccctagactgtctcatgaattctagtctacatttaccaacttctactggtgctcattgccaagcggggtcaaaaataatcaatttcaaacaaagattcacaaaaataaataggctcacttgtgtggagagccggtacgtgctgcgcgcaatcgcatgtgtgccgccagtaatctctgaggagagccgtgtgtgccgcgagcaattgccattataagatggtgcgggcctccgctgtgcctaactagtaaacaagccttgtacgcaggtgcaagagtgaattcactcctagtcactcccattctcggggtgtaatagtgaggtgatgggcaagcaacgaaccaggagctgtcacgccatatcaggtgctgaaacgtcacgctgca

SEQ ID NO: 1209 - DNA, 1000 bp, mus musculus
tgcaatttacacagcacataggaactgttaaactgagaaaaggaagacttacacactgcagcttccatctgctcagtccagtagagacattgctctctcattagctctctcatccctggagaatgttgtggtgaacgtggaaagtcatcagtaaaacaattacaatatgatggggactttttaaagaattgttatgtattcacatttgaaaggaagaattgagaattgggcatcttgaattagtttctcatggtctagactgaaatgagattttaaaaaggcaacgaatgacttcagaggtaatttttttcagctttgctaaatgtctaaaggctgtgtgtttaaagatgataaatgtagacatttaaagacctcaaaaagcagaatgtgaaatagaatttatgttcaagagtcaaaatactgtgcttcattaactgacatgtagatggaaaaacagagtagagtcctacagcttaccattggattgactggacctacacaatagaatagactacaagcttggcagctaaatgaaatgattttcaattgcttttatagcgctgaaaacaacagaaaacttggacacacctcatttttatctatgtgaccactgaaaaatatgacatgaaaggctgaagagatagcctagcagttaagaatatttactgctattacagaggacgtgaattcagtttcctgtacccacagtttcttacagctctttggagctccagttcgtacgatttcaacactttattctggcctcatggggcagcacacatatgtgttgcacgtgcactcatgcaggccaaacatccgtacacataaaacgaatggaccaaatggaacacaaacatcactttattagtaaagagtattcaaacggagtgtctggtttggaaactaggcattagagattgcttaagacaggctgttatccccacgactctcatactgtctttacaacagtccattgtcaaaatagtccacacatatggta

SEQ ID NO: 1210 - DNA, 1200 bp, mus musculus
aagttttataaagcattttctgcttagatgttctcttaatttgacgcatgtacatagaaagagaaatgtatcccttttagctttgaaattttacatcagagttatttaaccaattttattttcaatgtcatccaatggaactatgtttacacccttcctagaaagaacaaaaattaaatatagctctttgtacgcattccactccactacagggcaaggctgtttgggaagcaaaatgtggagcttaactgtgcttatccccaatgtcccctccagactggtgctaggcttcaggaagcaccaagacaccactccaggggcaggaaaacacagtctgggatgtgggaaagctgaagctggggacttcagagcctccccgcactcagttgtccatggggtggcacacagaggagtcaggaacaaaatgtctgtggtccccggtcttctgacgaggttgagaccatggactcttggacatccaggccgctgggagtctaggaagagccaagaatggaagaggcctgcgagctgaggaagaggcctgggctgcgggaagggggatctccggcttagctcagcagtgattgtcctcaggttggcagcagttatggctgggagtgcagatgagtattctatgggaggattaggcagtggctccataggtgaaggcctgctccatgtttcccatgttcgtggtagatgaaagagacagtccttggttccaaattctttattagttgtccactgtggaaaatggatgtctaccgtatcaacttctcagggtgacctggagattgattgccttttgcagggagaaatgtctgtgatgggaagcttactggctaagccctcaaggcctcaggcatcattagaatgatgaactctgttctgggcctgtgtgaccacaggtcacatttccttaagtgggaagtgtagcacgtgttctaggccaggaatttgtcaggaaggagtgaggcgcctaccatctcaggtgtgcaccaatgagttctggggtcacaatttgttctgactaccaagcatccagacatgatttactgtcccatgcatagtcaatttaaaaacagttttaatcacagagctattcttgtaaccgatttgtgctgttctaagaaaacccatgagactaatttataagattatccaaaatctccaagggtgattccaagatattcaccatct

SEQ ID NO: 1211 - DNA, 1200 bp, mus musculus
atgcacatctaaattactgtgaacttcatcttcatataaatattattttaatttaccagactatgtacacattgcattagtaggaagaagaaacatttagttttattagcttgttaaaaagaatgtaaagtatgctctagtatatatcttggatgtactgaaagtaggcgcttatccaatctacaagtaccctgtagtgtagtgtctgctacatgcaagacattgttaaaggttatgagagggtcaaaaatgaaaattatacacccagtctcttcttaaggcaggacactgacaacatattcactaaactaaatacttataaaaggatagaatctaaagacaaccagacaccaagagagagccttaaattcaaagtcaatttatgctgaacagtgagcattagttgagcctcagaaatatagtgagatgctcttgcagaagaggaaagacaaaatagtaagtaattaagtcaaaaaggtagaaaagaaaaacggaaaagaaaataataagatagacaggaggtgatggaggaattagtaatgtgtcccatacagggtgctattaacacataacaagaaacaaggagaatatagacttgcaaataaaatgtcagcagatgacccttgttgaattagggaaagactgaaagaagctgaggagtagggtaaacctgtagaaggatcagcagtctcaattaatctggacccctgagatctctcaaacactggaccacccaacaggtggtatacaccaactgatatgaggacaccaacacatttacagcagaggacttccgggtctgtgttccttcagagatgatgaacctaaccctcaaagactggaggccccagggagtttagagatcagacagggtgggggttagggtaatccacctggagacaggggtgtgggaagtaggtatggaatgtggagcagtaggagggtggatgggggtgggattttttgggggaggaataataaattaaaataaaagtcagcagaagatttttgtagatgtctataaggagaataaacaaacgaacaaacaaaactgaaggaacaaaaattttgaaagcaaaggtaagaatgtagaatagttcagagtatgcaagggttgtataaaccgaaatgacatcaggaagcaaagactataaacggagaaaaaaattgccatataattaaagaacaatttccaacctc

SEQ ID NO: 1212 - DNA, 1200 bp, mus musculus
tggacttcaaagcctttttatttgtgaggctgcttttgtattcaggaatggcattgtgctccagacctcatagccattaaatagatcaagcattgttgtgattaagagactagagagtccttcaggagccacctggagcacagccagctgaggtgatctacatgctttcccctgtgcaccattatctggcacaggactctgcttgccttcctgaagaggcttgccaatccaaggaacacccaaattaagttcctctccattaatctattgcatgtcagatccaccagggacagaatcagcagaggtgaactatatggggctacatgtggtccttgagcaccatagtcttagcccatggctttgcccttcttcccgaggagcactatggggcaacaggaatatttagatccacctggttcaaaaaaaaaaaaaaaagcatgctctattgaatagaaagttctattgtcagccccacatctttacatgcctcctcaggttacatcctgactggcatcaggaatatccagccagcaccaggataacctgatggctaaagatcagcataggatcacagtcaacaaaagcaaaggcaatatcataccacccagctaacctactacaggaaagccctgggcatagccaaagcacaagaagatgacaaatccaatcttatacagataatagaaatttttaaaaagaaattattaaatctcttaatgaaatacagtagaatacaatcgaacaggcgaaggaaatgaataaaactgctcaagacctgaaaagagaaatggagaaaacacagtcttggagatggaatctccaagtgaaagacccacaacgtgaggactcccccacgttctgactcaggagaggcgacaccccaaaatcaccaacaagaaacggtcttgttgcaaattgcaagaggatttttattcaagagcactctcgggctcacggtccccatacaccacgcaggggtagaggaccgtggcgccccgagtagctggattagggggtatttaaaggaagaaaccacaacttaaggaggtgggaagggcgttgttggaaaataccaaaaataccagttaagagtcacaaggaagtgcaaagttacaagagtcacaaggaatacctggtaagtgttaactctcaagacagcttctaagagcccctaacaatagcacatttgcattgcaggtt

SEQ ID NO: 1213 - DNA, 1000 bp, mus musculus
ccagaggttttccacagagatttctggccaggcctggtgcgagggttccagcaaagggaagcaattggggccaggagacaaagtctctgacatgcgttccaggttacttggtaactctgagctgctctgcactgagtcgggtccagctgggccaaggagaagctgactatccattgaggagtgtgggggaacctcaggtggtgttccagagagaagatctcttcctaattattaccactcttggaacaaaagactcagacaacggagtagttctcacacacctttaattccctggttaggatttatatacagttttgggtgtgattcagggttcaacagtaggtaactctccttggcttggactgagagcttgggggaaaccttatttgcatgtgggaaggctaggtgctgttcctacatgaccactgatagccacacacctctcctatgggggctgtggaggaggtaacttggacaggaatcaggggttcaggagacatgattgaacaccttcagacccatgtaggtggaaatcaccatccatcaggtccccagggttccagacttttgctcgactggagaccaggctttctgtgcacagcctgccgccccacagattcccagatcctcaatgtctcccaaagggccagaagggaacacttcatgcatgcctttcctagactggtcttttgtggataggaggcagcagatcatctttgtaaacttcagcattcttcttcatgtttccactgatgtttttcctttattattattatctttaatctgttttttacagtccagttgttatccccgtcccggtctgccctctaactgttcctcatcccattcttcctctcctgtctccaagaggatgtttccacccccatatgacaattaaaaataaagtaatccaaaccactcttgataatagtatctgtgattgaattccacaaaggattatagataataatgaattgtgtgttctgatacagtgctcaaa

SEQ ID NO: 1214 - DNA, 1000 bp, mus musculus
gattccccccccccaagatcttttattgttgagaattgtatagttttggctaatctggattggggggcagtgttgctgttgttggttggttagttttccatataaagctgagaattgctcttgccatgtctataaagaattatgttggaattttaatggagactgcattggatctgtagattgcttttggtaacatagccattttactctgctaatcctaccaatcccttcagcttttaaaaatgaggacatcaggctgcagctagacttggtaatttgtaagaatcacccaaatggtactagttttaaaggggtcatagagagtagctgaggcttgacactgtaaggtcaggaaaggccactggtaaaggtgcagcctcagttgcagttgatagtgcaggactgaagggttcatgaatgaagttgaggcttggcaccacatcagagcctatgagaggctattgataaagcctacttgcagtggaagactccagcaaactggagatgccagtactgtgggatgaccaccaagaataggagcagcagtagagaggagtcaaccacagcctagagtgctacagatagcagagctggagaaatgacccaagtgcttgcttgagaggagcccagacgatcccgtgtgggtcccagacattggaacaagaacctataaagttgaaattgtgttggaggccccaaaatgttagagatgttggagctgtgggatgcctgccaaggaaatctgcaaacaaggaaaggaaccagcccaagggaatgaaatttgttgctgctgaatgtcagatctgacaacagcagtcaacaatgacaaaaggagttggagatctgaagagtgctttgacattggacatggagatgtggagtttggagtttgcccagttgatttttggttttgctttcatccagtattttctatgattgtttttgaatggtaatgtatatcctttgatgctggaagtgtgtgatctgcttttttattttg

SEQ ID NO: 1215 - DNA, 1000 bp, mus musculus
atcattgactttgcattttattcaattgtgatgtcttctatgatcacttgcaccaagacctgactctcctggaggcttcctgctaattagatgctccctttaatgactcctgttgcaccccgggcttctctagaagaggaggaggaggaggaggaggaggaggtggcggctccttgtttcttaaaaatctctatatcacttttgatgctgtcagcgtatactgtaaagatttctctctcttcctctgaaaagtatcattaatctattctctgaccacctcagactaggtaatgggatacagaagtaggatgttcttagccacagaatagcaacctcagttaatttgcacagaatatcttattcctaggtctgtcttatgtaactctttctggcgaatgaagactcctcaagcaataacaacttgcatttatacagcctcatgaacatgaactcacataaatcacattcattagtgcctcttcccttctgtggtccctttcccaggtgactagcgtgcctccagctttccttccaccctctgccttgcctctattattggtctaatcttacttgggtctccctggggaagcccacctgcctgatcctcttctcattcttccctgattctcacaccaatttcagtgaggcccaggaccgtctgctgcctgctgtgagattcctccccatctgcccctcaactcacctaagtgtctctctcctactgcagttactctctatagtcttttatggagagaactgaggttgcctgacttagctgtcccaatcttttgtcttttcttcatctggggaaaataatctggttcttcccgctccacctcccatcttttccaaatgtattggtcacctccacaaataaagaaatccatattagcatagtactgtcattaagggtgcaaatgttttagcaacccaagttttaaaaaagttagtagcatctttctgtccctggatattttgactggcaaacagtaaaaacgtt

SEQ ID NO: 1216 - DNA, 1400 bp, mus musculus
catgtgtgaatgaataagcatgttagctgctatggtgccagtagctctactttgctatttatacataaaggcttgaatgctgatattgctataaacagcagctacaaatgaattttgggtacattactggcaagtttctggtatacaagtgaacatgacttacaaatagcaattttacagtttccacatatggaaatttagctatatgtataatatcctgcttctaggtttggaacaagtattcatagcaatgtttcttcacaaagctttaaaaaatgtgtttgcttagctattttcatttctttagcagaaaagttctaactgtatcaagcattatgtatgcactcttttgagaaagagattcatgtataggacaggctagtccagaatgcactataaagcacaggctggccttgaactcctaactatccttagactaagccctctaagtgctgctttataagtgttaagaaataatacacaactaaaattttaatcaagctccatgtggaagtttccagtggtaatttatcagagtggaagcataagtgtgtcttatgagtgatttgaaaaaaaattggctttaacactgtaaggtgggttgtagataccccaaagctaaaccaccatcccatcatgttgcacagatgggcaaaagccacccagatgcccactagcaaaagtgcccacccacagtgggaaccactaaggtgtgcaagaatatggtagacagatgggagagaacgagaagtgaaacagtcttttttgagcaatatgaatagaggtgacactggagaccagagggtactgaggagtagcctattttgtcctgccacctgaggctatggtgaagtcccaacccgtggagctgctgagagctgtacagcagcacaggtctgtgttggtgtccatgactcatattaccactgaaacccatgcagatggccatgatctatgtagatctggggagccaaccccttgacagctgcaggagagcagcagagctgactctgtctcttgactgcagcaccactgagtgagctattgttattagacgcgttctcacgaccggccaggaaagacgcaacaaaccagaatcttctgcggcaaagctttattgcttacatcttcaggagccagagtgcaagagagcaagcaagcaaatggcgaaaccccatccctttttaaggagaattatcctccacctaggacgtattactccctgattggctgcagcccatcggcccagttgtcatcacgggaaaggcagaacacatggtgggaaaactgcccctgcatgtgtgcagactatgtttaccacttagaacacagctgtcagtgccatcttataatggcaaatgtgagggcggctcctcacagatcccccttttcttttaata

SEQ ID NO: 1217 - DNA, 1000 bp, mus musculus
aggcagtctgaatcagtcgtcttgaagaggagtttggaccaggaatggtatgttgaaccagccagccagagttcagaaagagttagaaaaggtgagtgtattcagcagtatgacttcaaggtgtaaaaaatgctttttgatgataatacagaactgagacttttgccaaagtctgagtagttgttaaggttcaagatagagtatcactttcggagcattgttagtccaagtccatatccatcatggctaatatcatagaaattggtgagaaagatgtaggagagggatggctgtttggattagcgcacttcttcccatggcagctgtagatcattgcaattaaaattccaggacatcttatgccctcttccagtctctgcagacaccaggcatacacatgctgcacatacataccagtgggaaaaacacccaaacaatgtaaaatataaatcacttcttagaattgggaacaaaacacccatggaaagagttacagagataaagtttggagctgtgacgaaaggatggaccatctaaagactgctatatccagggatccatcccataatcagcttccaaaagctgacaccattgcatacactagcaagattttgctgaaaggacccagatatagctgtctctcgtgagacaatgccggggcctaggaaacacagaagtggatgctcacagtcagctattggatggatcacagggcccccaatggaggagctagagaaagtactcaaggagctaaagggatctgcaaccctataggtggaacaacaatatgaactaagcagtacccctgagctcttgactctagctgcatatgtatcaaaagatggcctagtcggccatcactggaaagaggcccattggacttgcaaactttatatgccccagtacaggggaacgccagggccaaaaagtgggactgggtgggtaggggagtgaggggggagtgtattggggactttttggatagcattggaaatgtaaa

SEQ ID NO: 1218 - DNA, 1400 bp, mus musculus
tttaaatgtttgaattccagattattttctttcatttttattttaacttattgcttcaaaatgaccctatctattttgcttttacaaacttattagcaaatgttaaaagccactttttttcaatgttggaaaacattaactgggcttgtgtgataactaagcaggtaaaaatacatgtcaccaagcctgatgatatgaagtcatatctaaagatctacattgcagagagagccaacttcattcagcaaattgccttgtacactgtcaaatgtacatgtggccaaacacacacacacaacacacacactacataatttaatcaacaatgaagtataaaaagtttaactgactactcatcacaagtttctagtgggttttatatgataagacatgagcgaccaaagctcagcaagaggtagtgggaggggagttcatcactaggacatgccagagacctgggatttgggaggctccagggaatctgaggtgacttttactgatactgttagcagtggggatatggagcctgaaatagccacctactgtaaccaggcaggagtcctattggaaggaaaaggatagcaactcacccacaaaacaaaccttcaattcaaaatttgtcctgactataaaaagtgcagggacaaagatggagcagacactgagggaatggtcaaccagtaactggtccaacttgagacccaccccatgggcaagaaccaattcttgacactactaatgatatcctctgagaggcttcgcccagcagctgactgaaacagatgcatagatccacagccaagcatcatgtagagtgcagaatgtcctgtggaagagttggggaaggattgagggacccagacaggatagactccacaagaagaccaacagagtcatgtaacctggacccttgggggctcccagtgactgaaccagcaacaaaagcacgtacatgggcaggacctatcccacctccattgcagagttatatagtagatgtgcagcttggtcttcatatgggtccacccccaaaagctggaagagggctgtccttcactgtgttacctccctgtggatcctgttcttctaacagagctgccttgtctgggtgcagtaggggccaagatgtacttaatcccaaggtgacttgatgtgccaggataggtggagtacacatgggtactccattctcagaggagaactggaagagttgagggaataggctgtatgtggagaagactagaggtgagcatggctgagattgggatgtaaagtgaataaataatggggaaaaagaatatacatagatatattaataataaatcaaaaacaacggtgtacatgttcctataaatttaatgttcttactatatataaagtcatgaaaagaaagtttgcat

SEQ ID NO: 1219 - DNA, 1200 bp, mus musculus
aatatatttaataaatgaacacacaaaaatccacaaaaaataataactcgaaatgatcaacatagtatttgaaaaaagaatcattttgtaaattttttattggatattttctttatttacatttcaagtgttattcccttttctggattcccttccagagaccccctatcctattgtacctccccctgcttctatgagtgtactcccccacccacctacccactcttgcctccctgccctagcattcccctacactggggcattgagccttctcaagaccaagggcctctcctcctattgatgtccaataaggccaccatctgctacatatgcaactgaagtcatgggtcactccatgggtactctttggtttgtagtttagtccctgagagctctagggtgggggtgggggtctgattggttgatattgttgttcttccttcctatgggatgcaaacctcttctgctctttcagtcgtttctctagctcttccattggggaccctgtgctcagtccaaaggttggttgtgagcatccacctctgtatttgttatgctctggcagagcttctcaggagacagctataaaaggctcttgtcagcaagctcttcttggcatctgcaatagcatccaggcttgatggctgtatctgggatggatccccaggtggggcagtctctggatggcctttccttcagtccctgttccacactttgtctccatatttcctcccgtgagtattttgttcccccttctaagaaggaccgaagcatccacactttggtcttgcttcgtcttgagctttgtgtgaattgtatatttggtattctgagaaaaagaatcatttttaaacaaatgaaacatatcccaaataagcaaagatctattaatagacctgatcacatcaacaatccaaagaagaagaaaaaatatgatcatattgaaggatgcatgaaacaattgacaaaatatagaatccattttgtaaaaatatacacagcaagggcacagggtaactcagttgttaagaggacttgggctctatcagaggacctggtttcagatctagcaccctcaagtgagttcacagcacttgaagttacactccaaggtttctaacactctcttctctactctgtgggcaatatatacatgcagtgcatatacattcaaacaggtacacacacacatatacataa

SEQ ID NO: 1220 - DNA, 1000 bp, mus musculus
gatccacaatacatgttaatggtcacatattcttctttaatgcccttatatataagcagggcaatgagaaaaaatcatgtcaagggaggcaaggtatacattgtccccaacataagtactaaatcataaataagcatgatggatattccatcataggactatgttaatcactcaacagtgaaaactagaatctcactgtatcagcaaatctgcacacagagggctttgctgctgagcaaggtctcctaattcctcagaatcaaaatgtagtgactttccaattccttatttattgcaacctatccaaagactgaactaaacctcatgaacaaatcatacagacatgaagaacttagaaatctaccccgttggactcagcggaacttaggaaattagtctgaacaggttagagggtgcgccagagaaccggacagcttctgggacgggcagaagcacagagccgctgaggcagcacccttggcgggccgcagacagccggccaccgtccagaccagaggacaggtgtccgcctggcttgggaggcagcctcagcctcaggagcagcggtcccaggactccctggaacttaggaatttagtctgcacaggtgagagtctgcaccacagaagctgacagcttctgggaactgccaaagcaacacaggttctgagagaggccctgttttgggccttcttcttcgaccaggaggaggtccaaaaacaagatatctgcgcaccttccctgtaagagagcttgccagcagagagtgctctgagcactgaaactcagaggagagaatctgtctcccaggtctgctgagagacgcaacagaatcaccagaagaacaatctctaaacagagtcaactataactactaactccagagattaccagatggcgaaaggtaaacgtaggaatcctactaataggaaccaagaccactcaccatcatcagaacccagcactcccacttcgcccagtccagggcaccccaacacac

SEQ ID NO: 1221 - DNA, 1000 bp, mus musculus
tacgagagacatttctcacttaaaccaccataaaggacatcttataaaatgtccagtttacaggggagttctcaactgttatttatcttcagcatctagggcggccttgagtttctgatctcaataccatttactccaaagagagcctttcaaggccgagagtatcttctttaaaacgacgtttgttttacaagtgtaagtgttttgcatatgtagatacataatgttttgccgaagcagacacagataaaaggatgttttgctaaagcaagcacatgaaaagacatgggataaaggattctttgctagggacacacatgtattggtccaccttatgttgagtagttgagctccattggtcaggactctctagagagaaatgcactgaaattttcatgtgctatgctggaggcttcctacatcttccgtggtctctagccgattggcagagtgatgtcagctggtacagactcgtgtgtagttttgctaagacagactcacctgctgaggcaagacgcatggtgaggtaagacccgcagaggacacgtgatacttggagggagtataaataagactcaaaggtgagtgatggagactgggcttgctggcatagctagcttgcaatgcttcttggtcttgcatctttgcttcattgagagaggcacagctgacaagttctggtgtccccggtggtcctaattcctcctttgactcatgacaattaggctgaggcctagctgttcctgctaggtcatgcctccactgctgccatcctgacactactgatctgaacggctggtatatctgtgaagtgtttgcgagtggatcgagctgcctctgctgactcctgtgaactgaattgctgatttcctgacaaaacagatgggatttgctccaaagaacaggtccacttctctgtattttaataacctttatttccccacaacctctggtgggtggtgggctgtgagggaagttaaatcatttaagaaccataatt

SEQ ID NO: 1222 - DNA, 1000 bp, mus musculus
cttgtacaaccactctggaaatcagtctggcggttcctcagaaaattggacatagtactaccggaggatccagcaatacctctcttgggcatatatccagaagatgtcccaactggtaagaaggacacatgctccactatgttcatagcagcctcatttataatagccagaagctggaaagaacccagatgcccctcaacagaggaatggatacacaaaatgtggtacatttacacaatggagtactactcagctattaaaaagaatgaatttatgaaattcctaggcaaatggatggaccttgagggcatcatcctgagtgaggtaacacaatcacaaaggaactcacacaatacgtactcactgataagtggatattagcccagaaacttaggatacccaagatataagatacaatttgctaaacgcatgaaactcaagaagaatgaagactgaagtgtgcacaccatgcccctccttagaattgggaacaaaacacccatggaaggtgttacagagaaaaaggttggagctgtgacaaaaggatggaccatctagagactgccattccagggatccaccccataatcagctttcaaacgctgacaccaatggatacactagcaagattttactgaaaggacccagatgtagatgtctcttgtgatactatgccagggcctagcaaacacagaagttgatgctcacagtcagctagtggatagatcacagggcttccaatggaggagctagagacagtacccaaggagctaaagggatctgcaaccctataggtggaacaacattatgaactaaccagtaccccggagctcttgactctagctgcatatgtatcaaaagatggcctagtcagccatcactggaaagagaggcccattggacttgcaaactttatatgccccagtacaggggaatgccagggccaaaaaaaaaaaaaaaaatgggaatgggtgggtgggagggtatgggggactttggg

SEQ ID NO: 1223 - DNA, 1200 bp, mus musculus
tttctccagttaaagtaactaaggtacaacttattgtttttgtcaacttccttcagatattttgctaactcactgggagagttaaaatcttccacatgaatgaatgaatcagctggaatataattctcatagttttccctagatggacccaggacaacaggtactgaaccagccaaaaatgcattgtagagcttttctgtgatgtaatctttgtgaattgagttttcaaatgaaagataaaatttacaagtagatatggtgggaatcagatttttatcgttcacgtattctccgaatgcttggccataggtgtggatttcaatactcttgctgagctcgttgtaatacttgaccctggcatgctcagggttccagttactcacaacccagcacaccaacttctccttgcttggcacttcaaacacaaagggatttgtgctcaccgtcaagaagccataaggcacttggatatctgaatcacggcgataagttagagtcaggttgaacaagtgttcaatgccactcttttggggggtgtgagtgggtgactctaaattcatccaaatccatttctgaaagggtggcctggcctgctgaggtaagttagtcagatcccagctgatgtctctatggtgaatcaggaccgcatgggatttgttgtacaatgagcggtctgttgtgagatggcacccttggatattgaacattgcttggcaggatgtaaggtcaaaggtctgcccaaatggccatacccaaaccagaatggtagtttcgttaaaataatcagtttttgtggagaagaaatttttcattttcagcacagaacttgcagactccattggactgaagacccagctgttggtgggcttgatataaatgagcagacatgccatgaagcagcccaggatgatgcagacgattagaaatgggcgaagaatgcctttggatgttgatgtcataatttttcctggggaagagagaaaaatagaaggtaagtttagaaacaaaagaggaaattataactacaatgtaagagaaatagtacgactattttaatcatgaaaccaactctaattccctttcagttgtaaaagtttcctttttaagaaacagcgatatgaagttgagtggatggacagaggaatttaggagaagctagagggtggaaaaggatatggtaaaatattctgtttgaaattc

SEQ ID NO: 1224 - DNA, 1000 bp, mus musculus
ctagtcctctcattgctcttcaggaagctctagtgttgtggattgagctcaacacgtgtattatgttacttgagtcccccaaatggcatgagaatccacatgtaagatgctgaggttccctcctcccagttggttttgtttggcaaataaagttgcaggtggcgaatggctggacagagagacagaggtgggactttaagattcacgggaaagggactgagggagaaaggggtaaggggaacgagggaggagaaatagacagaactctgtgctgggagaggagtaaagaccagatcttagaagtgcagaagcgagagcatgccaatcatgtaaggggtggtgaagagaggtcccagagtgttcccgatttggtctagggtagcaaagatggaatatagatttttgtaagtaataactcagaatgttggaggggaggtgttagtgacatgaaggttttagggtgctagccactgaactgtttaaggcatataaaatataaggctgcatgtgtgtgtcgttgatttgggaacacagaacattgggtcagatagcagggaacacaccactgttgccaggttgattggaggagaagtataattggcaaaagcaacactggagatcactgacattgtatagtaatacttgaaaagagttgtaaggagaaaagaaactcattaggaaaaaaaaaaaagaaacaaatatatgtttaatgttatatacttcaaatattgcctttacctagaattgtttaaagtaaaatattaaatggctagagagttttttgatctcttaggctctcaagtaaattattatttttgtgactaaacaaattatgtaactaaactccaagtaaaaagatacaaaacgtaaataattacgtaatatgaaaatgaacattgtagatgccatgcaaaactaacggcttatttaatatgttcaaaagtaagttttgtttagggcagcctgcgccaggaagtcaatctcatctttcccacttctg

SEQ ID NO: 1225 - DNA, 1000 bp, mus musculus
ccgggggggggggtgtcaatttgaattttagacggtcatttgcaatcggctttatcttatcagcagagggcgtggtccagacttccttgtgtagacctgtctggtctaaaatgcagagatctgcctgtctctgtctcctgtgtttctgtgtttgttaagtgttcatgattcgcggaagaatgacatcctggactcaaatagaattttattctgcagaagtccagcatgcaggggtctccgcattaccaagatagacacccaagtgagcttgtgggtctgatttaaagcatattagggaggtccggtgtaggtgacctctatgttaatctgttgggtgcatctttacaaacattctgttacctgggtgtggaggctgggaacttgcaggggcactctgagaactgttaatgagaaagtagctgaggaatgctcgaaattgctttaggccaggtggctggtacattgtattttctctgcgtgaaggcctgagcttgggtttttctctatcagtaattgacttgcctgggcttgcctggacttgcccagtgtttaggcctcctcttcttaactgccaatatgaagtctgtcacggaatcaggctaaccttctcagttttagctcagatgctgtcctggacttggccaagaccaaacacacatgcacatacacacgcacaaacacacgcacgcgcacacacatacaccccattgcttacagggcaaattgcccacagcagtgaacctaaggctgcattgttttgctctccgcctctgtatctgctgcgttcattacccgtgtaaaagggagcctggttaccgcccccccgcccccccagcagctctgcccttggatgaagcacctacttctgtgttctgcttttaaatttagttagggcttctttaaaaagccaccttctatacagtctctctgtaggtgcctgctccttgcctagaaacttcctttctagttgttctgggatgctttagctttgctctgtttt

SEQ ID NO: 1226 - DNA, 1200 bp, mus musculus
caaacagcctatcccatcccaacttgccctgcttctatgagggtgctcccttactcacccacccactcctgcctcaccttcctagaattcctctacagtggggcatcaagccttcaaaggactattgacctcccctcccattgatgccagataaggccccttcagcaacttcagtccttccctggctcctcctatttaggttcctgtgctcagtctaatggttgcctgcaagcatccacatctgtattggtcaggatctggcagaacctctcaggagacagctatattcagctcctttcagcaagtgcttcatggcatcagcaatagtgactggatttggtttctgcatatgagatggatccccaggtggggcagtctctgggtagcctttctttctgtctctgctccactctttgttgtccttgtatttcctttagacaagagcagttctaggttaatatttttgagatgggttgaggcctcattcctcaactgcgggtcatgcctaacctctccatatggtctctacacattcactctcccctttgttggatatttcaactaatgtcatccctgttggattctgggagcctcttgctgtcctgtcatctgggactttcttgtagctacccccagttccccattttccactgctacatacctttcaatttcccgactctctgtatttcttccccacaatcagcaatagtgtctgggtttgttgtcttcctgtgggatagattctcaggtggggccgtctatggatggcctttcccttagtctctgttccactctttgtatattttgtagacaggagcaattctgggttgaaattttgggcatgggtgggtggccccattcctcaacggggggccatgcttaacctctcgatatggttttgacaggttcttcctttctttgtggggtatttcagctaatatcatccctgtggggtcctgaaaggtcttgctttcctggcatctgggactttctggctgctatacagaaataactatcacccattgctaaacacctctgttcaatttcctgaccctctgtaccctccgtacatctcctccatctcttcccatacctgattctgtttctcttttccccctcctcctcctttcttcctcccaagtccctgtgcccatctactttccttgattgtgggaagccgcccccacattcgccgttaca

SEQ ID NO: 1227 - DNA, 1200 bp, mus musculus
taggcatttaatatcttttgagaaaactgcaattgtgtatttttggtaccttttacaatacagctgtcagaaaaactgtaggctacaagtcatggtgaagatttacttgattgtgactgaagagaagcattcagtctgcctcagcactttctccctgcttgcagaacttcccctcctgcccctgttctttccagcagctaacacagggctcctcctcccattcctggcctttcagagaggacttgatctggcactggaatattgctatcccagatttcatggaggcacccctagcaaactcacccctaccccctgcctgggaggaacagatggcagcttgagaatagacaaggaacaacctccctcagcctaggccaaccttccctcccccatccctgtgtcacctaggctgccactgtcactgatagatggctaagcacttcccagtgcagctggtgcctgtccttgggaagagctaagaccaagcatccttgaagaaataagtgtcccacatttgggccatgagaggacagtaatcaagctttcccagacaattgtggctagttgtaaaaacacactagttcctgatagtaccataaagtaacttctcaggtcagaagagtcccctctcccagttgtatgattctgcctcctgcctgaacaaatgatatcttgtttgaaagatgacttcccttgtcaccttcccctgtcatcctaaaatccaaagaatccctgattatgcttgtattaaaaaacactaaacccctggacattgggtcgcattcctgtcctgtgcagtgtgaaggtttgtgaccgagtctgactcgaataaataaaagactctcttctttcactacatcgaatcagtagttctaagaattctcctggggcccatgtgatgacctggacacaacagtggcatcaatagtttaaagaatttatcatgctatccagaaattacattgaactgctaggaaaccgaaaggttctcactcttgatttcaaaagaaagagaaaacaatttgtgtaatatccttgaaattaagaagtcatctacaaaaccacagattttctggtaggccggttaggaccatgtttcttctactcagacactagcagttagcacagatatttgttactttctgaagcatctacagagcaggttggaggtttcccgaaagagaaatattggacatgtcc

SEQ ID NO: 1228 - DNA, 1000 bp, mus musculus
gaaatgggtatccaccattagccattaagatgtctccagttaggatcactatgggaaaagtactcttattaacaaatccctagtctatgttttaaaacgaatcttgtgggacttcatttataaacttaggtatgattgctttttcacctatatgtaatatgtagcatgttgaaacgatttcagttctggatttatcagtagaagctgcaggcaaacactagacatggaatgaccaactgatacacctttacaaggtactatttggaagccattggacttggtttatcagaggggaatccaggatcctttgggaaggcagacatctccatgggtcttgccaagttaaggagccctcaccaagtgggaggttgtttccatgcagcagctcactgttttgtcactgacactcaagtgcttaatgacaccattaaggtcaattataaagaggtccctgagagtcacaccagcaccttctgattactccctgtatttgcaggctatttccttagtttaacacaacagtgtaatgtttttgtgactcaaatggtcatgcttccatggtatgtaaggtgaattaaaatgggaattcactacaactgcaaccacttcccagttcatactgtgaaatccattgactttaccacaaaaacaaccaacttttgtaggacacacatacacaaaatcaaaaggagagaagaaaagcactaagtgtttccccttaaaagtcattaaagtatggctctttggactctccacagactataggatcttaaaagcaggaaaatttgacttggacacaggtagaccactgtatgtttgtcttctcgaaaaaatgggccacatggctaaaaaggcagaaataatctgcgaaactgcattgacatatggagcaaccaggacttggaagaatcttccctcccatcttcagtacatgaaggagctctggtgcacagagctgctgactagcagcacgaattttaattgtaatattcatttcagt

SEQ ID NO: 1229 - DNA, 1200 bp, mus musculus
actctccaaatgttccacatccaataccttctccccaccccccagtctccacatgagtgccccactccctgcccctcaccccaacagacctctaaagtcactgggatctccagtctcttgagggctaggtgcatcttctctgactaaactaagacctggaagtcctctgctttatatgtgtttggggtttcacaccagctggtgtttgctgcctggttggtggtccagtatcttagagatctcagggatccaggttaattgagactgctggtcctcctacaaggtcaccctcctcatcaccttttccaactttcccctaattcaacaatagaggttagcagctctgtccattggttggatgcaaatatctgcacctgactctttctgctgcttgttgggtcttttggagggcagtcatgataggtccctcttgtggagtgctccatagccttagtaatagtgtcaggccttgggagctcctcttgagctggatcccactttggacctgttgctggaccttcttttcctcaggattatctccgtttcaatccctgaagttctttcagacaggaacaattatgggtcagagatgtgactgtaggatggcaacctctcccacacttgatttcctgtctttcagctggaggtaggctctacaagttccctttccccaatgaagggcattttatctagggtcccttactgtcagtcctgagagtctctcacctccattgtctctggtacattctggaaggtctcctcaacctcctaactcccaaagttgcctgtttacattctttctgctggccctcatgtcttcagtcattttcccccacccaataacagaacatgtccccctctttcctgacccatccactttccctcccaggtccctctctcttctgccttgtggttgttttcttctccctcccaagtgagactgaggtatcctcatttatgccctgcagctttttgaccttttttaattctgtggactgtatcttgggtattctgtactcgtgttttttgtttgtttgtttgttttgttgtttttgtttttggataacacacatttacaaatctttgatatttttgaatccttgggaacaatacaattttaagcatgtctttaagggttataatcttggttcatggaaaagacaagactcactctaagtgtagagtgcaccatttcacaag

SEQ ID NO: 1230 - DNA, 1000 bp, mus musculus
ttttatctctgggtcttttattctatttaattaatctgcctgtctgtcatggccattttcactaggttaatcgtgccagtccatgagcactggggatctttccatcttctgacatagtcttcaatgtctttctttggggacttgatgtttttgtcatacagataaaatcattaatcaaatcccagatttctaacagtgggatgtgaaaacagaagagttcacattctatagctaggtagaactttcagtggactaataaggacaccaatctacctactcaaaaaaattttacccaaaatttgtcctgtctaaaagaaatgcagagatagagatggagcagaaactgaaggaatggccaaccaaaaaccaactcaacttaaacccatcccatgggcaagcacaatttcacaacattattactgatactctgttatgcttgcagactggcacctagcataagtgtcctctaaaaggatatacccagcagcagactgaaacagatgcagatatttacagtcaaacattggacagaggtcaaggtctcttatggaatacttggtagtaggatttaagtccctgaaggggatgggaaccccacagtaagaccaacagagtcagctatcctgaacccacgggagcttccagagactaagccagcaaccaaagaacatccacaggctggaatgaggcctctgccacacacttagcaaatgtgcagctcagtctccatggttgccttgactggctcctatggcagagacttgctgtgtccttatcagaggacaagtgggaatatggggagggactctatgaggggcaacaagaagggggagaaggatttgagatataaataaatgaataaataaataaataaataaaacattacaaaatatagtcaatttcatgttatcatgcacataaagcacagagaaggcagtaccctctctatcatctaatatctaatgcagcattgtagacaaggagattaacctcaagaaat

SEQ ID NO: 1231 - DNA, 1000 bp, mus musculus
cttggtgattcttccatctgtagttctggttcacatacctagattttcaatttgcagaacttccccattttttattacctccgtggtttctatttccattttcaagtctttatgagttttatttattagtaaaatgtttatttgtttatttcatggctttctttaaaggatttatgcatttcttccaatttcttgtttctttattcccatcttttattaaaggatttattaatttcctctttaaagaactctatcatgtccataaagttggtttttggtgttagtttcctgtgtttcagctctcctgaaatattcaggtcttgctctattagcatagctgggttcttgtgttaacatgctgccttggctattgttgcttgcatgcttacattaacaaaccagaattagtgattgtgattataggtctgggtatcttattctaagtttgtctttgttggatgtgtatttttccctcttttgtctttttctggtcgttgtggcctgggtttctgatagctggtgtgacctgtggtacaggagaagaagtatctgtctgaattggggttgaacttctggtgactattgtggcctttgattcatcagggttctctgcctcagagtgtggaatgtggtgatgaggagggtagtgggactgaggatataatgtcagaaggatatagtggcattgagagattggaggagttctatgtgcagactacctgtctggaattctggtggtctgtagggcctctggttctgctgtttgtctccgcttgacttgccagttttttttcagactggtgtggactgcaccagatcttctcatagccatgacctgtgcatgagtagtgaatatctgtccaagttgaggggaagagaatggcagtggatacaaccagggaggcaggtaatagattggatatttgtgaacccaactgaaggcataggaatgcaggcaggctaacagcctatctgtttttctggctggccttattttgtg

SEQ ID NO: 1232 - DNA, 1400 bp, mus musculus
acattgtagtccctgtttctctgctcacaatgtcttctaaaagaatattaatgagaggctctctgctcatccctgttccagagacagctgcaccttcttgtgcagtgccagccttgtcctgtagacaaaacagtgaaggttggtatggattgatttggccatattgggtgcttggttaccagggctgccttctgttctgcacttggcaaagtggagattgttgtcatcaacaaccccttcattgacctcaactacatggtctacatgttccagtatgtctccacccatggcaaattcaaaagcccagtcaaggctgagaatgagaagcttgtcatcaatgggaagcccatcaccatcttcgaggaccgagataccactaacatcatggagtaattctggtgctgagtatgttgtagagtctactggtgtcttcaccaccatggagaagactggagcctacttgaaaggtggggccaaaggctcatcatctccccccctgctaccaatgcccccatgtttgtgatggctgtgaaccatgagaaatatgacaactcactcaagactgtcaacaatgcatcctataccaccaactgcttaccaccccaacccccacccccggccctggccaatgtcatccatgacaattttggcatcgtgaaagagctcatgaccatggtccatgcaatcactgcaactcagaaaactggatggcccctctggaaagctatggcgtggctgcttaaagcattatccctgcatccactggtgctgccaagactgtaaacatggtcattctagagctgaacaggaagcacactggcatgtccttccgtgttcctacgctcaatgtatccattgtgaatctgacatgctgcctgaaaaaacctgccaagtatgatggcatgaagaagacagtgaagcagacatccgagggctcactgaagggcatcctgggttacactgaggaccaggttgtctcctgcgacttcaacagcaacttccacttttctaactttggtgctgaggttggcattgctatcaatcataactctgtaaagctcctttcgtggtatgacagtgaatatgggtacagcaatagggtggtgtacctcgtggcctacatggcctccaaggagtaagaaaccatggactacccaccccaccaaggacactaagagcaagagagaagcccttgattgctgagaagtccctgaccctactagtcctccaaaactgagatctcctttacaattcccatcccagaccctcataataacttacagaagttacaggacttacagaaccctccctactctcttgaatactatcaataaagtttgctgcaccccctaaaaaacaatattgatgagaacattcttccactattggctcccaccttc

SEQ ID NO: 1233 - DNA, 1000 bp, mus musculus
gacaccctgccaccttgtcccgattcctccggaatagcgggatctaaggaaaagtttgccccgcacggcgaagcggcgcgcgcgagctctggcagactccagcaggagtttgagctataaataactgcatcactagggggagaggtgcctgcagccagcaggcctctcttgctctcctcctccggtgctacgtggagagggttctgattctcggagcctgagttctttagatgcagacaagatgtttaagaggcaggtggtagggaacgcgcccgacttctcggtggcgacgctcggggcgctccggcgcgcaatcaggcggtggcgttccctgagcgctgctacccggaggtggcccggggcatcacggcacccaaggagcttggccagcagcgccgcgagcaggtgcgcggcctctagggcagctggggtggcgaccaacctcccgggtcccctttcccggttccctagcgcggcaggagtggcccgggaacgctgaggctaattgcggccgctgctctccatcccgacagtacaaccgccgccgcgccctcagaggaggcgcttcccgaaagcccgtctgttcctcgcgactcctgcccaggctgggcgccacccgctccctggagtcccaggtctggaagtgtaatggacgctaggttggcgggcgcagccgtctggctgccccgccccgccccgccccgccctgatgctcgggcagcgctggagcctccaggctcaccgcagagccgcggctctggactcccggtagcggccagctgccctgtgccttctccggggcgcgcagtgaggctgactcggtacggcagtccagagggaagacggtcacggggcgattgcattcagcactccagagcttccgaaagcctcgccagctcggtggccaccttctacttcctcttgatttgccggtttctttgctaagttgccggccagcaggtagccgaggggaaaggcatagcaggagaggataatctca

SEQ ID NO: 1234 - DNA, 1000 bp, mus musculus; identical to SEQ ID NO: 1233

SEQ ID NO: 1235 - DNA, 1400 bp, mus musculus
gatattaataaaaagctaccacaaacagggtttcaactgaaccagcactagctgttatcaagtcagatcaagcttcaggcagggcagttgtgttttgcaattcatgtctgagaaaaaagtttgacatgggtgaagcttatgacctgtgatctctgatgtattccgtgtggttgtgtggtttccttgctctgtgtgagatgtgttgccacagtattcaggaagtgagtctaaggagggacagtctcctggcacatggctacatataagttatacagctcagacaacatctccctttctttctattttagatgtactcttcatagagcaacatctcttccgggactacagatccctctatatagtgctgtcttccagtaaccgtttttctccccgtttttccctaccatgtaaggatacaaaagcaaggataacttcatttcataaccttttctagcactcataataagaatcagagcttcttcttctttcaaatgcaggattttctatagtagatccagttttatacaatttacaagagatgctagtaaataaaaatgatctaactcggagagtatgtcaatggttaccatcagactacatgagcgagagtaatggaatattaggaagtaaaggcagagaggagatatgaattgtagtttggtaaggaaggttgaagcctaggctgtgctatgatacttacatacgtgaccaatggacaactggagatcaagaaagtaagggatcatgaacagtaaagcaccacctccgtggtggttaatgtcagcgtgagccccggagctagtagatgacagccccttcagatagaaagcacaggactaccagctgctatgtaaccgtcaagcccaattcagaggttgtgaacaaaaggctcacagaacagaattacccaactggtaagttctgtgccctgctaaagagactgcaagctgagaaataaccaagctttctatatggagatgaagagctgaaaaattactgactctaagctgggcattggtggtgcacaccttcaatccccgcacccaggagacagaggcaggtggatcgcttgagttcttggccagtgtggtgtacaaagcgagtaccccaggacagccagtgttacacagaaaagccttgtcttgaaaaaccaataaataaacaaatacataatacataataagtaaataaaattactaaatttacagtgatatatttttacagatgtctgatttatttaatgaatcagaatgattttatagttatttattaacagcagacattgatttctaaaattttactctttgaatatcacatatagttatgcatttgtaaaatatattttcatcttaggaaatatgttttagactctaaaaattcctggactgctctccaaatga

SEQ ID NO: 1236 - DNA, 1400 bp, mus musculus; identical to SEQ ID NO: 1235

SEQ ID NO: 1237 - DNA, 1400 bp, mus musculus
ttccagatttctttcctaggttttctatcgccagccttgcctcacttcgggttttctttattgtgtctacttccctttttaggtctagtattggtttgttcatttccatcacctgtttggatgtgttttcctgtttttctataaggacttgtaactctttagtagtgttctcctgtatttctttaagtgagttatcaaagtccttcttgatgtcctctaccatcatcatgggatatgcttttaaatctgggtctagcttttcaggtgtgttgggctgcccaggactgggcgagggggaaatgctgcgttctgatgatggtgagtggtcttggtttctgttagtaagattcttacatttgccttttgccatctgaaaatctctgtagttagttgttatagttttctctggttagagattgttcctctcgtgattctgttatcctttatcagcagacctgggagaccagctctctcctctgagtttcagtggtcagagcactctccgcaggcaagctttcctcttacagggaaagtgcacagatacctggcctttggacctctctcctggcagaagatgaaggccagaaacaggacgtgccagaagctgtgttgcttaggcaggcctgtcatagaggctgtcagcttgtgtagtccacactctcacctacacagactagtctcagagggatctgggaaccaagatggctcccccaggagctcaagcaaagccctcctgggcacacctttcctctggcacggaaggtgctaggatgtctggagcccgaaatggggtctgtctcagaagctgccctctagggaccttgggggtgtctgcagactctgcccccaggtgaccaagtgctggtgccgaccggaagggacttgtgaccctggtcaagccgggtttcctgcttccttaatgctgtctcaggtccctcacgattggattgaaatggaaatcgtgttccactcactggtggtcctaagattgcatggagagtactctaggggggcttggggttatctgccgactccgtgcctaaggtgccctggtgctggcgctgaccggaagggacttgtgaccctggtcagctgggtttcctgcttctctaatgctgtctcagccattccatcactcttaaaagctctcggttgttatatgtgaagttatgtccatttgcttaagaatcagattatgttatatgccccacaaaatgaattgtgtttattaattataattaataattatgagttactattcatttcagttacttgaatatgttcatttaatattccatataatctcaggaggaactatatgtgctgtgaaaagcaattttactgaggatttggcttgatataatatggtataagaatacacttatggttcatgaaaaaat

SEQ ID NO: 1238 - DNA, 1000 bp, mus musculus
gatcaagcggatcatattaatttttgtcacagatataaggtttctctgtgtgaatacttttacctagcattagctccgccttaattctgttcctataatgagatgatataagatccatttatataacagattgtcatttttattgtcatcctgtttctgctccagataaggagcaattttgaattctgaactagtaaccttgggcttcagagttcacttttcaagatgaagcatattacaaggctttaaattttgtttcaaagaattcttctaaaataatagtaagatttttttcctttctagaactccagagaagcccatatatccaacgaacaaatttatcaaacagtcatctcctcaggactataaattactcagatggtcaaatccacttgcctataaacaaccatttactcactaaaattcatgccttgtctccatatatcttccagccctaaaatgctttattaacctcttcaattcaatcctgtattgaaagatttgcagtaaatcaccagcaaaagagattctgagactgtgaaaatagccttaaacataacccaggagacaccaatccagtgtcaacatggtgtcaccctagtgcagtcagtacaaattcaggctttcctttctcaacaggtcatggtgtttttctccctgaccccaaaattggaagagattttactttctatcagttacaagggactgaggtctactgtgagttctcttggagatgatgcccaggatctagccttggcccaagagtattataaagtagtttgtttgctccgtgatgtcctagtcactgttgcaccagagagcatgcattgcaagtccggtcatgatcgcagcttgcagaggtcatagctgtgactctttgatgattatttttctgcagtattatacataacactttccaaccctgtttaaactggatgtaagcaaggtaacaggggtgtaaatttcaagagagcttgacttcttgatattcaatgattca

SEQ ID NO: 1239 - DNA, 1400 bp, mus musculus
ccttgggttttatctccagtgttgcctcactttgtttttctttattgtgtctacttccctttttaggtctagtattgttttgttcatttccatcacctgtttggatgtgttttcctgtttttctttaaggacttgtaacactttagcagtgttctcctgtatttctttaagtgagttattaaagtccttcttgatgtcctctaccatcatcataagatatgcttttaaatctgggtctagctttttgggtgtttttgggtgcacaggacagggtgaggtgggagtgctgcgttctgatgatgatgagtagtcttgttttctgttagtaagattcttaagtttgccttttgccatatggtaatctctggagttagttgttgtagttgtctctggttagagcttgttcctctcgtgattctgttagcctctatcagcagacctgggagactagctttctcctctgagtttcagtggtcagagcactctctgcactcaacctctcctcttacagggaaggtgcacagatatctggtgtttggacctccctcctggcagaagatgaatgcctgaaacaagatctgtcccagaagctgtgttgcttaggcctgtcccagaaactgttagcttctgtagtccacactcttacctgcacagactagtcccagagggatttgggaaccaagattgctcccccaggtgctccagcaaagccatcctggcagggaagatacctctcatctggtagggacggtgccgggatatctggagcccgaaatggggtctgtctcagaagctgtcctctagggaccttgggggtgtccaccaattctgcacccaggtgaccaagtgctggcgctgatcagctgggtttcctccttctctaatgttgtctcaggtcctgtgtgattggattggaacagaagttgtgatccacctactggtggtcctaaagtcgagtggaaagtcctctaggggccttgggtggcgtccctgactctgcgcccaaggtgaccctgtgctggtgctgactggaagggtttttttttttttttttttttttttttttgggtaattgcttacagtttttctccattaaagttagtattggatatgagcttgctttaaattgtctttactatgctgtggcatgtctcctctattattacaatgatcaatttcttttagattttctagttgggtagaatacacatttaaaagtatgtccttagtattctcctgacttttttcatagtgtcccttattatatttccttttgcattttctgttctgttaatttggatattctccgtctatctcttagttaatttggatgaagtttttcaatcttattgactttctcaaagagccaacttttcatttcattgattctttatattgtt

SEQ ID NO: 1240 - DNA, 1400 bp, mus musculus
tgttttccaattgcacttttgaatttttaagctatatatttgtttaccttaagtcctcatcagtagttatctctttactgcattcagtgtcaaatcttgagttgacttcatcatttcattcagacatatatccatcttttcttcaacattattcagacatttattacaatctctaattattcttgagcattttttttatttcttctttaaactccttgaatttcttaataggtttaataattgttttttacattctacatcttcagatttctgaatgtgattgccattggacaacatttctatatggcaggtgggcttaattagtagaatggattgtctttgcacttagtaatgttagtgttttgcattacgacctactcttgtcgacatatcttctccattatgtatgtgctgtggtattattttggggcagtcctttggttgggcttgtgcaggagctgagtgacaagactttaggtttggagtatggagatagcataagtatgctcacttctctgtggacaaaccagggagatttcatacatgagtgtctacagcttagcctagcagtggactgcagatggcacaggtcgccgagagatgcacaagggaaaagcagtgaccctcatgtaaaatattttaaagtacttattttctctaataaaatgttttaaatatttgaaggcttctttaaatgttaatcattgttttatattttccttaagtattgacatataatatttcaaaataatatgtatctgagaacatctattgcatcataactacattataaaaatattgagattagtcgagaggataatgtctctccttcagttacttacacaatgttatttatctctatgtatttatatttttctaactatgccacatgctttgtccacttagtgttaaaacatctggatggaaactaggaagtgtagcagcaagcccagatggttcataagaagaaggccaagcatccagatggagtcagcaaggcagagcatctggatagcaaataccaaatccttcattcagatgtcacagctccacatagactaagtatcaataaagtctttgtgatgaagacagagtattatgatatcagctgaaggtcaaatcaaagagaacaaatatgggcaagaaggcttagagctcacacattcatttttaactctcagcaaaagtaatttgtagttgtttaacatgtaacatacttcaagaaaaatctaagtgaaagagactcagcttattagattcactttttaattgttaccctgtttgctaatcttttgatttgggataatcttcaacacagctcacgtgtataataaatgggctcaattaaaaattgcatttgatacccattaaaagttccttgatctttaatattacaatat

SEQ ID NO: 1241 - DNA, 1400 bp, mus musculus
catttttttgaatgttgtttcaatgttttctatggtatcttctgccctggagtttctcttttctatctcttgtattctgttgttgatgcttgcaactatggttcctgatctctttcctagggtttctaactccagggttgtctccctttgtgatttctttgttgtttctatttccatttttagatattgggtggttttgttcacttcctttgcttgtttgattgtgttttcctgtacttctttaaggggtttttgtgtttgctctttaagggcttctacctgtttacctgtgttctcctgtatttcttagaaggagttatttatgtccttcttaaagtcttctatcattgtcttgagaagtgattttagatctgaatctttcttttccagtgtgatggtgtatccaggacttgctattgtgagagaattgggttctgatgatgccaagtaaccttggtttctattgcttaaattgttaaacttgcctcctgccatctgattatctctagtactacctgcccttgctatatctgactggagcctgtccttcctgtgttcctggttgtgtcagaactcctaagagtccagctgtctcgatgatcctgtgattccaggatcctatggtcctgagatccaggatgtgacagagctcctggaagtcaagctgcctctgggaccctgagatcctggtgtgaccaagaccctgggatcctgggatcccaagatcttgggatgccgggatcctgggcatgttagagtgcctgggagtaacccttcctctaggtgttatgggactggctgaggagtttgtgcccaaagtctgctcaaggcacctgctcagacaagaagcaacctgagccactggtcaaactggatttcaatgtccctgtatcccactggtcccagttactcccagtgttggaacacatgttgtgtcctccttacttctgatcctatgatcctcagaaaacaacaatcttatagtaaactctaaaaatataaaatatcttggagtaactctaaccaagctaattataaaaattgtacagttaaaatatgtaagtattgaagaagatagaagaagattagaaggtctcccaagctcatggatcaggagtaatatagtaaaaatagctatcctactgaaacaatctgtaaattcaatgcaatcccaccaaattccaacacaattgttcacagatcttaaaagaacaagtttctccttcaaatggaaacaaacacacacatacacacacagatggctaaaacactcctgaaaataaaaaactacttgagataaacactgctccaaactcaaactgtacaataaggctatagtaataaaaacagcattgtttgcgcacaaaaacaaacacacaggttactgaaatttaattgaa

SEQ ID NO: 1242 - DNA, 1400 bp, mus musculus
aagacatcaaaatgtgaatatgatggtctccttcaattatgagtaaaaggttgtggcctttaaatttttgctgatattcctacagatataagtcttgtacagtgaccaagtaatgttttataaagtttaataattgtgtttctttaacttagcttttttccagtttcatgattatttcttgttttcttgtaaaatcaagtactgactgtgaattttgaactttttataatagcttgctgctggttgcaggagggacagttctaaaaatctgcgattttggtacagcttgtgacatccaaacacacatgaccaataataaagggagtgctgcttggatggcgcctgaagtatttgaaggtacagtccgagagcatggaatggtcggtaatgtgccccagcgcttgtaaatccaggatgcactctaacactgcacatcgtgtcgcttctgaagagtacagaaaaaggtctccctgagtatatagcctgagagcccaaattttatggcagaatttaaattggcaccttctgtgcagattctcaaacatggatagccgatcctcactattcacaggttgcataattaagaacctgtctgcctgatcacctttgcttgagatgctttcaaaactgttgagaaaaaggaactcatgaacagcagtacacattttgtaaggtaaacaacttatccagagcggtgcgttcccttttcagggatggtcatggtggcttcgctgcttaagtagagctgcctgagtacaggaaggctttgaacatgtgggaagcgtgaaagtacgtgttagagtattctctcaacgtgctctagagtgccgtgaggggggacgagttaaccagtcaagtgttaggtgaagagtccttaaaccacacagagaaccaggtgcagatactgattagctgacaagtgttcctgaacaaaggcacagagcaacttagctctgtattccccctaggaacactgggtcagagactatggaggcttctgtatacacccaaaataaggagaaagctgtgcctttgctctgatctgctatcagttaaaaagagagctaaagcttcaatcagcatgccttaaaaagaccacatgccactgagtacagataaggtacagtaaaggatatgctaacagttgctttcttttactacatggtggctcacaaccatctgtaataggatccatagctcactcagaatttataagattagtctgtatatttaagtttctatatgaaatgtcaaattattttttaagtaagagacactgagataaagaaatgggctttgtgtgaatgccataatatgcaaagtgcattcaagaatcaggcttggcttgcttgctttcttccttttttaatgtatgtgagtacactgtagctgtctttgga

SEQ ID NO: 1243 - DNA, 1000 bp, mus musculus
ctttgttagtgaagttgggaagagctgaactgtacaatgtcttagaaattgaatggatagagaaagagtggtgtgtatggatggaaattcctggcaaagaagttaagccaagattccaaggccaagatcttgagttctgtgttgactgcttgcaacaccttagtaggtcaaggatgctcaaggcaaaaggtgctaagagctcacaggacaagttccctaaactgcaaccttgtggtatctcaacaggaagagctctgggggagtgatgggcctgtgatcgggagggggcctctgcaacaccattcacacggttcctggtgcacactgttcccattgtggtaaactagatggtacagataccatgcatttctcttctaagtctaaatcatgaatttcctcctgaagttaaaaaggtgcactgactcatccagagaggatataaagcagaaagaaaatgttagctgtaattaagtttaaaaagttgcctcagtatcttcacacctttgctgcttcaagcgtttctgaattctggggagcctgtgccagctccgcgccgtgccgctcttctgagcacagccctcctggaagctccatctcggtgctatttccgtttcttatctggagatacctcagcttaccaggcacacttcttcctgccttatttgattgcatcgtacctgtattttaccgcacacgttcaccacatccaatttagtagacttgtgtggactttctgtcaagaagagaagaaattgctgatccatgtaagccaatcggaatggtatcctgttgttagactccaagggcatgaaagctcatctcagcttagctgtcaagactcagatagttttaaacaaattattcagcagggagccctggtcacaagccacaggatggatggacaaggcttgagaggcacagtatgtgagacccttgtcattcctgtccagtcgcagacccacttgtgtgatggctgccttagagtggggatgttagtcag

SEQ ID NO: 1244 - DNA, 1000 bp, mus musculus
tgagaacgcgtgtaagaaggatccccgaaaataaacacagtgaaagaagaactaagaccatggctgagattatccatccccagggtaatgaggaggccaatagaggacactatctctcttagagtttcattgctgtgaagggacactatgaccaaggcaactcttataaagcaaaacatttataaactggagctggcttacagtttcagaggttcagtccattatcatcatggcaggaaacatggcagcattcaggcatatacagtgtcagaggagagtttcacatcttgatctgaaggcagccagaagactgtcctttgcagggaaccatgaggagactatcatcctcactgggcagagcctgagcatagaagaagacctgaaaggctaccgccacacacagtgacacacttcctccaacaaggccccacctcttaatagagccattccccatagactaagcattcaaacatctgagtctaatggggaccaaacctattcaaaccaccacaccgtccaagtcaggaccgtagggctgaagaggagcaagcatggttttcttgctaagctgacaacatgttcagcagagccagagctatggggcagtgtggttaaacagtgccacgtgacagaataagaggaagggggtgaggaccacagtggagacaacactaaggcaggtggagcgtggtgtttggggcagaagaaaccagagtgtgacaaactctgtatacccttatgagcagagtgaccttacttggcaaaccattggaagtgttgaaagtttaggactaaggtgttgggatgctataactaatcttaggagagctaaccaggaagggctggagtggtggctcagtgggtaaagtgtctgctagagtgaagacttgagttcacagtataagtcaaagctgggtgtgatctgtaacctcagcgctgttaggaagcggagacaaatgggtgccagagcttaccagccagcaagtctaggccaaagcag

SEQ ID NO: 1245 - DNA, 1600 bp, mus musculus
aactcagtggggaaacccccactcagctcccgattcggcgtgcacccaagaatcacgaatagaacacaacaccttgatgtaacaacaagaggttttttaatggcggagctccgggtcgaaacgtatctcacataacaggagacagtggattcgaccacgaggcttggaagctaggggtttttatagaaaaggagtggggctgggggaggaattggcgcggtttcacatgattggtccatttaaacatcagcagcctgtaacatttaacttaggtcagaggggtgggagctagggaggcgatgggcttgcccgggcatgtcctggtctgttctgctatgttctcagccccaggtttcaaagctcagaaacaactctttgggctatttaacatacattacatgaattacagttttatttcctttcactacgtcagaaaatccagagtagaagttgatccatccactttagaccaaccaaaaacaaaaaagaaaaacaaaacaataacaacaaccttccacagatgtgtcctccatttctggattgtagacaagattccagttgtagtcaggttgataaccaagaagagtcatcaaactctgtaagattaaaaggcaaactgcattcttccaacatacagtggcacagaatatatattaccattgcaaaagagaggaaatgggacatagtaaacatatattgaatcaaagctaagaatgaaagccagcaaggcaaacttcaaatccttcaaatctaatagtttggatggctctgccctcgcagttttgctgggtacaagctattcctctccttcaggctgatcccagtccccgtgtggagcttctcttggcagatatgccatagctctggcacctctaaaatggggtctccaatgaactctaggcttcatttttaaagctccacacaatagcctcttggggactccatacagggagtgccctgtcaaatttttggcctcagtggctctccttaaccatgaagaaagaattcccagccctttactgggcttccttcatgactccaaagccagaaccacatggacaacatgtcaagttcagctgcttgcttaggtggagcctgacccttgggatcacagttgcagcagctgccattggttgtgcttctgagaaggagacaattctttaggtcttttcttttcacaagtttataggcttagctgggttggggcttgctcttagggtctacctccttttactccaaatcagacctctccttgatctatttagctctttcagcaaaagccttgactgcaactttaaatcccctgctgctgttttcctctcaactgtacttgttttttaaatgccgcagttgttcttttcattgtagatctgaaaaaagaaatttataataaccacacaactgagtcaatgttagactgtcttaaaatcttctctgtcaaaaaaaaagttcattaatttttcaatttagcctttggaaaattcgtagaacaagggcagaagacagtcacattcttgtacaaataatgatctctagcctagttgctaatgttgctcctcgaaatgtcttgagttagtattccacagtccatgtttctctc

SEQ ID NO: 1246 - DNA, 1400 bp, mus musculus
ttcagaactgcataacggggaagaaggggttaataaagtgttcccataaaacagactgttgagaaggatctggcgtggattcagaactcttcagctggggaacggtactgatgaagagaaagaagaaagatgaagactgaataaactgctgttagaaggactggtggtcacgtcgttcttgctggtcgagagcgggcgtgacaattaaaggtgcgggacaaggcaggaagagcttccatttcgccagcgccacctgaggatttcctggagccgccacccccacctcccgcgatggaagacgatcaggagctggagaggaaagccatagaggaattgctaaaggaggcaaagcgtgggaaaaccagagcggagacaatggggccgatgggctggatgaagtgtcctcttgctggtacaaataaaagattcctaattaacacaattaagaacacactgccctcccataaagagcaagaccatgaacaaaaagagggcagtaaggagcctggcaaaagccaagaccagaaggaagcaagtgggaagaagtaccgaagtcactcgtacaagcgcagccttcactcgtcccggggctccgcaggctgctctcctccacggaagcggacctcccggacctcccgggacaagtgcgacccacggcccagcaggcgatgagacagccgcagggctagcccagcccagcactgcacctgccactgggcgcagcaaagaagacagggaggtggccggctggcacctgagagtgactttctcagtgggtcctttgttttaaggaggctgttggtactgtgtggttgttcttgttgctgttgttgttgttgttaacgggagaagaaaactttactaaaacaaatcttaactaccttatcctgaaggtgtcgcggtgagagcaagctgactcggcatggcccccgcatatccgtggtgtctttatcctaccttacttggaagttcgtttcaaaacaggcagttttagaatttgagattttgagaaagtttaaaaactcctagttttttgatgtactgctcttttgtggtcatttcccagaatttctcaaaaaaatcaataaaatacttagaaacgcaaaaaaaaaaaaaaaaaaaaaaaaagaaaaaagggggaattgtggggagcgggtgtggcggcagtcctaaaggcgccagggactgcagctaagtcatatgacttgcacctgacttcctcatataagacacaaacatcttgagtgctgcgcaggtgtaccaggatacaggtgaatccaatttggtggagatttgcccctgctgccctgattagctgaagcctcgtgactggcgaggtggcgtggcctgctgtgtgtggatgggaactgagagtataaaagagtgagaggcccagggtt

SEQ ID NO: 1247 - DNA, 1600 bp, mus musculus
gaaatcagtcttgaggttcctcagaaaattgaacatagaactatctgaagatccagcaataccacccctgggcatatacccagaatatgctctaacatgtaataaggacacatgctccactatgttcatagaagccttatttataatagccagaagctagaaagaacctagatgtccctcaacagaggaatggatacagaaaatgtgatacatttacacaatggaatactacttagctattaaaaataatgacttcatgaaatttgcaggcaaatggatggaacttgaaaatatcttcctgagtgaggtaactcactcacaaaagagcacacatggtatgtattcactgataagtgggtattagcccaaattttggaatacccaagattcaatttacagaccatatgaagcctaagaagaaggaagaccaaaatgtgtatgcttcagtgtttcttagaagggtgaacaaaatcacaggagggaatatggagacaaagtgtggagcagagactgaaggaaaggccatccagagacttctccacttggggatccatcccatatacagccaccaaacccatatgctattatggatgcagggaagtacttgctgatggaagcctgatatggctgtctcttgagaggctctgccagagcctgacaaatacagaggtgaatgcttacagccaacctttgaactgctgggtccccaatggatgagttggataagagattgaaggagctgagggaatttgcagccccatggggggagcaacagtgtcaacaggccagatccccaagggatcctggaggttggatcaccaaccaaagaatacacatggaggtacccatggtgctggccacatatgtggcagaggatggccttgttggacatcagtgggaggagaggcccttgggcctaagggtgttcaatgccccagtgtaggggaatgccagggtgggaagacaatgggagtgggtgggtgggtgtgggagcaccttcatagaggcaggggggcggggaatgtgataggtggcttctgaatggtagacctggaaaggggaaaacatttaaaatgtaaataaagaaaatttcaaaaaaaaaaaaaaaaaaaaaaaagaaggtagactggtgaagactgtcttcaggctgctaggaggagggtctcaaatcccacccctacttcttcttctaataaggccacatctactccaaagccatacctcccaatagagtcactccctgggccaatcatattgaaaccaccacaacattaaaaaaggacctttaagtacaatatcatttatttcacatttattgacatacttgtacttacttaatgactccattttcttctccaaggaaataaccaggcttgtggatttgtaggagttcaagagcccagggctcagggcagtgtaattgatagttgtttattctgattcttctcttaatgatgcttctacattgcaagagttcttcctattctgtgcagcattcatagattccttgggtcttgctgtccttcactctcattctctatgcctttcagtaacaatgtgaataacctgccttcagagtttctgagcggtagtggtggtg

SEQ ID NO: 1248 - DNA, 1000 bp, mus musculus
tatttgattttcatttccctgaagagccactgatttccaggtcactactattctgcgacttagttcttgatctgaaatgacttaaaattcacttggcttgcccagactagatttagtcttttctgtcgttgaaatgtgaattcacattcaggtgaggtttgcacagtgaaactcacagtctgaggaggtggggcagagtgctttgagcaacagcgtgcctctagtctgaaataggaagtgtagagaaggcaaaatactgttatttttcataatgctcttttttttcttctaggcaaacaaaattagactttgtgccagggagaggcaatgtgtagcttagggaaaattatgaagcagaaggaaatggagtgaacaaaagataaatattcaaaatataatcacgccctggaagtctcagatgtactaaatcctttatgaattgtgcttcttttcatgaaatactagatataatcatgggcaagtatctgtgtataggcttcattagcatactcttcttgttaagtgtagcaaagcttagctacagtgtcgcaggaggaaaagaaaatggacccagagagaaaagagagatggcagtttagatttgtttggggaaaagtacatgtccctggaaactgtacagactttaattttaatgaaataacacaattcaatgtatatatttttacataacatcaataaaatactatagttctggaccatttgggatctctaacacgacagcaacagataattgtctttgtaaggagtatcaacaagcaagaattctctttcttttcttcttttctattctttctattctttctattttttctttctttctttctctctctctctctctctctctctctctctctctctctctctccctccctccctccctccctcccttccttccttccttccttcttaccttctcttctttcctttttagactttaatatcggaaaacttgaaacatacacattactgacttaaactt

SEQ ID NO: 1249 - DNA, 1000 bp, mus musculus; identical to SEQ ID NO: 1248

SEQ ID NO: 1250 - DNA, 1200 bp, mus musculus
cccagtagaaactctacaagggacagagcagtgagccatgctaacagacaggcataggtgcctgacaccatggagtctctagctccataatcctgtgactatcagtcatgtctccaaactcatgctattgctgccagactacacccccacagtatctggatatagccaggtaagttcctccccacagttacctgactgtaggtagcctagtccactataaaagtggctgcttcactccccctgtctcttaagctcctatactaatgctctcttgctttgctcttacctcttgccccactttctacccccctctctccatgtggccatggctggcctatccttttctacaaccccccccccccccgcctttctacaataaatctctaaaacccatagactgtctctactcatcaagacccgccatgcttgaacgatgaaataggccttcccctaaagagcagtatctaatctccagagggaaggcttcccagattttccaggtgccaggccagaccaagggctctcggccaagtaggaacctaggaactgtttgcgccctctctttccctgccttccaacccagggctgaccgagctgcccccggaaccctcactttgttctcagctcttccatgacctacagtgatgtctgggatgtccaagactgagaacctgtagtctctggcttctgtgaggtccagagaccccggactgctccctctctaccctctgcagactggggttctgtggcttctcacagccagacacccacttgggtcacataaagaatgcacaggggtccctgcgtctgcccacccagagcaccggaactctggagggatgcgggcactttctcccatcgcctttatttcccagcaactcactgcctgacaattgaggttgaaatgtccaaggaaatatgaaatatttttaccagttgaaggttaaaagatgacaatttgtacaaggtcaagacaggtgaatgccagcatgggtggagatggggccttgtgtactgaggagacactggcagttgataaatgctggaaaagagagtatggtatgtgaccactggtaaataggggctggacccacacccatctgaatattagcagcactgaatagaggaagtgtgaggggtggatatgatttagatatattacatacatgtatgcaattttcatacaatatagacataatg

SEQ ID NO: 1251 - DNA, 1200 bp, mus musculus; identical to SEQ ID NO: 1250

SEQ ID NO: 1252 - DNA, 1000 bp, mus musculus
agcctgatgtttttagtctttttcatatttagacttttctattaccaattcctgaagctgccttctttacttttcaaacacaactaatctataagtaaagtcaatagatacatttttttacttttactatgcctttttttctttcatgaatttgttcttcagtaaaagatgcatctctctctggcctggtgacccagtggaggaggctgctcccctttttcagaggaaaaagggaggtaggaatgaggtgaggatctgcatgggaggtgttggtaagggaaagtgtgctgatagtgggatgtaaactgaatacattaattaattaatcaattaattaattaaaacccaaaaataaacaaacaaaaagtggcatctttctctttatttcccctgtccttacaaattgtctatttttaaaaaagcctttagtatattaattgcagtttaaaaaggaagattctggtatgaaaatttcaatttgttgtcatatctgaatctagtcctgcagttttcagtttctttaatgttttccatattaatcagctatgtaagtaggaataatagatgctaccatattagctttattaaagcgaatgttaaggtagggaaaagagaattacaagtgtatggtatgattttataatctcagtgtcttagtgatcttgttaccgggagctgtgggctccacagtacttcacagtcccctctttagtggtgcaaatggctagggcgccttgatttgctcatttattttcttaatgcacaaagctagaggcaggtagaggtggggtattgctttcccttgaacagtctgacaaatcctcagtaagttaagctctgatgaaaggttttctcttctaagtgtagatcctgttagtaaggacagaatgctctgctctatttaaaaatggctaatctttcccaattcctgccttaaaaagaaaatgaatccccactgaacatcaatgagcaaacctagtaaggattaagtagataaaat

SEQ ID NO: 1253 - DNA, 1000 bp, mus musculus; identical to SEQ ID NO: 1252

SEQ ID NO: 1254 - DNA, 1000 bp, mus musculus
actaatttgttatacatttctcttctatgaagaaaaacttttagttcgtctaagacacataaaaatttttttggcatttatacatttaaaaaatattttctcatacagtacattgtaagtacatcctctcctctctccactattcccaggtctcccatcccactttccttttccccagatgcactgttcctccatttccttcttataaagcaggtatcccagggatatcaactgaacagggcataacaattatgctataagacaaggcacaaaccctcatgttaaggttggacagggcaacccagtaagaggaaaatggtctgaagtgcaagcaaaatagtcagagacatcctccatacccattcttaagagtcctacaaaaactccaagtgaaacaaccacagcatttgtgcagagcgccaactgcaaacctatgcaggctctgtggttccatcttcagttactttgaatccctcgtatatacctcgtatagctctgtgttcagtattctagcatgccatacagctaggcatgatggcacatgcatataatttcattaattgggaggtgacatatgtgcagattcaaggccaccctgagatatagaggactccaccttgaaataataaaaagtgctataagagacataagtatttaaatataattatgtaaacacatatacatacatgcaaacacacacacacatgtacacacaaaccaatatcagaaacatcacattagtagtaatgactccaactctaccagctgtaggcagagtcaaagatgactgtgcacattcattcctcatgttaaaaagacactcctgtggatgcactgctgagatcaggctttgtcagctctacattacaactactatggacaatattgctttttcaactgagcgttgccacaggacactatttctcaagtagtttctgaccccattgtgaagataacagtaaccctgttagacatgtgaattgctctgtttatatggaaa

SEQ ID NO: 1255 - DNA, 1000 bp, mus musculus; identical to SEQ ID NO: 1254

SEQ ID NO: 1256 - DNA, 1000 bp, mus musculus
acagaatgaaaaataattgatgtaagagcatcagagaaggctccccagcctgtacctgggatccttctgggaaggtgtctgtgagagctgccctgctttatcaaacagcatgatggaagggcaagtgggcacatgccagtcatggaaatcaatgtgggatcccaagaactagcctgctcatgcccacacacagaaagagagctctctctacatagcaaagcttcagtcctgaaaagacaagcccagttctgataaaaatccatcaagagggccatgacctaatcagctacctgaaggacccactctttactattgttcctgtatctcttaaatttcaatttgaattttggagaaaatactcaaatcatagagggtagaaaacgtacactttgctactgacagatacaattagtaagctgggtgggatatatttctttttttttttagtcagatattttctttatttatatttcaaacgttattccctttcctagtttcccctccaaaaatccccaatcccttctcccctgcccctgctcaccaacccacccactcccacttcctggccctggcattcccctatactggggacattcacaagacaagggcctctcctcccattgatgactgactaggccatcctctgctacagatacagctagagccatgagtcccaccatgtgttttctttgtttggtggtttagttccagggagctctggagatactggttagttcatatttttgtttctcctatggggctgcaaaccccttcagctccttggatattttctctgtccaatggatgaccttcagcatccacttctgtatttgccaggcactggcagcagttcctctcaggagacagttatatcaggctcgtgtcagaaacctcttgttggcatctacaatagtttctgggtttggtggttgtttatgggatggatcctcaagtgggcagtctctggatggccatttgttcagtgtctgcttcacatttt

SEQ ID NO: 1257 - DNA, 1200 bp, mus musculus
taataatatatgccagagaaattttttcgatgtaaggttatttaattgacattgtttaaattaaaggaaaaaaatctatctatccaaagagatttaaaagcatataaatgaattataatgtattgactttctaagaaatcaaattcagtaaacagttagaaagaacactattttaaagaacaggtaaaatattaaaacacagagaaaatatttgatgattttcttatcaacttaaatgtgtgatgataaaaaagtattatcttctaaagcagtgcttatctttagaagtttgtcctgaagtatttatagatgaaatgatatgatgcctgggatttgctccaaagaaaatcagaggatgaagggaaatggacgtgtgcagagatgacacagtttaaccagcagttgattgttcaactttgtagttgtatgcagaaagaacttcattatgttatttttattgtatttttttgttttacccttgtgcatgtgcaatggatttatttaaaattataggagaacaaatatattacagaatcataagggatatctgaagcaaaattaataagcttccctggaagcataaacatatattttaatcagtactatggaagattaattcatgatattttcactggagacaaactaaaaaggaaaaaacaaataaaaataagttaatgccttaacaaattattgccttagagtaattgtttttaatgactctgaatgtgatctgaaattaggttaatttgagttggacttggctggcttcgcatcaggctccagatctactggcttgtatgctgtcatgtggcatacgaatgaactggttaaaatcagaaacacctcagcgtaagcatttcatgttgtcattggctttataactcctattcatcatctactgtccaaaccagccatacagcagatcaatggcaactatggacctatattctacaatctagtgggaagagcaacaaattcaggtaaaaagatgaatagatgaaagggaaccatgaagagttagcatggatatctagatagttgctcatttttaatgtttggaagcagtgctaactagaacagactggctagcacatctcaaataattaatatttatttcattacaggagaaaatgagacaatcaatttttctacatcgtgagatggtaccttgaacataccaatcatccaaccaaccatcca

SEQ ID NO: 1258 - DNA, 1400 bp, mus musculus
ttagattttctatatccaggaatccctcagtttgtgtgtgtgtgtgtgtgtgtgtgtgtgtgtgtgtgtgtgtgtgtgtttctcttttttacttctatttccacttttaggtctggcacagctttatttcttttacctgtttattggtattttcctatatttctttaagagatttatttgtttcctctttaaatacctctacctctttggttgtatttccctatatttctttatgaaatttattcatttcctctttaaagtcctctatcatctttacaagattggatttaaggtcactttcttgggttttgcttgtgttaggatactcagggcttgctgttgaagggtagctatgctctaaaggtgttatattgccctggtattttgattgtgttctttcaagggcctttagctgtttggatggcttgggtccgtggttgttcctattgtagtaggttattgggagtggagttaaccacaatggaacttgtttgagaggcctctgaaaggtaaccttgtgctgtatggtttcagatctgcatgtttatgtggttcaggatctacaggtagtatagttcagcagccccaggtcctatgaaggtaagcagagttgtggctggggagagtgttgatctgcacgtgctagcaggatgcttatgtgttgtgtctggccagctgactacatgtttgggttctaggctggaaaggcattttggaaacctggaggagaagaagggctgggtgatgagagaaaatgatgtagctaagtcaaagcattctgatcaaagctcaattttactattcctcatgcagttatgaagcagggagaaggggcccgattcccaccaaataatcttggagtccagtagcagggtgaccatgtgatggcttcggaacaggaaagtggcaggctccagcagtgggcgtggcagaacgattgagtgcaagctccatccaggtgtaaacagtggaaccattaaggctggggaaggggaggctacacttatgcagactggggtttccacaggactcagtaagcagggaagatgggttggtaaactgaagattaactgctgcactaacaaattttaacctttgatcacaccttaaaaagttgatatgaggttgaatgagaagatttattttgaaaggaaatactttcaaaataaatctttggtaattaatcaaaacaacaaggggagtgctagacatataatatgtgctcagtaaatgcattatttcaagaagaatacttacgttcaacagatcttccaccatttctagtatacataatatctgagatggaattaacaggaaatatgtattgggaaactggcaacttttaatgtgaccatattaggagatgatttatatattttttcattatttaatattttttc

SEQ ID NO: 1259 - DNA, 1200 bp, mus musculus
ataaataagtttaacaaaatttttaaaagaaatcctttggtttttttgcaggaacaatgttgtaatccataaattaatgtaaaatgatgccattgtatacaggtataatctctttattgttgaagtatatcacttaataaattccatggctatccaccactaagttctgggttcctgaatgaaacacacacacacagcctttatattttgatatgccttaatcagtgcaatagctgggccacttactaacctccatctggctaatccacctcctacccataatctggagtgattacttactaaatcctatagtccctcttgcctgccctggaaccagttgagcagccctcttggactctcccttggctcctaaatggcagctatgctctctgtctcacaccctctcactcctctcattcctctcctccaccattcctagcctagacagaaatcttcttcctctttcctctctgtcccttgactaaaaatcctaaaatgcttctgtctgtcctccccagccattggcagccaggaccttttttaccaattgagcaagttcccagaaactacataagtgcagttgttctgcaaatagtcttggtgatacaaattaatctaagaatacaagcagacagcatccaacctttggactgagcacatggtcccgaatggagacattagagaaaggactattggacctgaaggggtttgtaaaacataggaagaacaacagtatcaaccaagcagacccctcagagcttccagggactaaaccaccaaccaaagagtacacatggagggaccaatggctttagccgaatatgcaaaggatgggccttgttgggcaccaatgggaggagaggcccttggtcctgggaagactcaatgccctagtgtaggagtatgtcaaggcagagaggtaggagtgggtaggtgggtgggtgagcaccctcatagaagcagggggaaggacgatgggatggaggattccaggggtcaggggaaacctggaaaggggacaataattgaaatgcaaataaagaaaatatccaataaaaaggggtggggggagaatacaagcagccacacctctatttcctatagtatctcagagttaaaagtttgggaggggtaactgagaagggggatatcatttgaaatataaatgagtaaaatgattaataagaaaaaaagttctgc

SEQ ID NO: 1260 - DNA, 1200 bp, mus musculus
taaaatattaacttctgtatttaactgtaaataataactgaagaatacatttgtttctgctgctttcagtaattaccataatattaaagaagtaatctctaatgctagtgagggaatggacttttcattgagggtaagagcgagcagacaaagaaaacagcctccttcattcttgtccatatataagcagccaccagaatgtgctgtccaaattaaaagtgagttttcccacctcaaaagacatagattaaagttatatctccatgcctcaaagatctagacttcaaataatgtaattatgacacaattctgctgcttccttgaagacaccacagcctgaggcatcccaggagatccactgcacatagggcaactgaatccacagcctgaagatattccagaagatcccctacacacatggcaactggccaactgatcaccagcttctctgctcccataaaaacaccacagcttgaaggcatcccaggtgttccttggcacacaaggcaactgggcaatcaatgccacagtctgaagaactcccaagggcttcacagaattcataactgacccaagagactgaaagcctccctgaagatctgctgcacacagagaaacagaaactacaatcagtaggaccccatagagaacagtttcccacaggacaacagcaggactactcctctgaagacccaacagtctgaaggcctcccaggagatctgtgcagagctccaagtacatatcatacagcagaggacttccaggtctgtgttcagtcagagaagctgcacctatccctcaagagactggaggccccagagagtgggggtggatgagtgtgagtgttgccggcgtggggatagggaatggggaaatcctagtggagactggagggaggaagtatgtgttgtggaaaattcagagggtggactgggaaggggataaaatctggagtataaagaaaagactaaataaaaaatttaaaaatgtaatcgtttctaagaggggcattaatttcagaatattaattattttgtttaacataacaaatggccacccaataataacaagattgtttccaaaggggaaaaaagtaaaaaataaaacccctctaaattgtagcatgcatatcctttacattagagttaatacccacatagaagtgagtatataacaagtttttctttctgggtctggat

SEQ ID NO: 1261 - DNA, 1000 bp, mus musculus
gagatgttaaacatacaactcaaaatgaaattaaatctcattacctctaactatgtggcaccatatttgtcttcatctgatgtagaaggtgaattctctgagggattgctgaataagacactgatctatgagttcacagaaatatcattaagtgtcatattggatggttaatccatgtcaggaaatttcataaggtagaggaggttgagacatgaagacttggtggacacacacctgagacttaggtggtgcccagcttcctgccagattcctggcctgtagcctgtgccacacttctcacacagagaaaccatgtgtcctgtggtcatctaggcctgaaacagaattccccatgctaatggggcacctagaggcatggaggcttagccactaaactctacttcccagatattcatccctgacaaaagtatttaatctcagttctaccctgagaaatgggtaaggtacattatgcatccattttctgccatgaacaaccaataaacaatttagaaccattaaatgtttctttttatctagatctgccatggggagtcaaggagaagacattctcccagccacagcctccaccatgcctacacacaccaagctaagaattatcatctctaagacaagccaaacctcccattttctacccaaccttctgtcccgggctagaggttgtccccagactgtaggaccccgactccattttctgtgactctcagtagtgcctggatatccaagagtctgagaacatcatgttttgatttcatcacaggttcagagactcccaaacccatttctgctatcacacacctcagactgctctttcctatctcttgattggtgtcttgtgcttccctacagcctggcacatgctgcaacacaagcatgggataagtgcagtcaaactgcccacctccccaagagtccttgctcagtggcagagctgataaggacccacagagttatttcattgttacttttaaatttcatc

SEQ ID NO: 1262 - DNA, 1000 bp, mus musculus
tctggtaatctctggatttagttgttataattgtctctggttagagattgtttctctcgtgattctgttatcttctatcagcagacctgtgagactagctctctcctctgagtttcagtgatcagagcactctccgcaggcaagcactcctcttacagggaaggtgcacagatacctggcatttggacctccctcctggcagaagatgaaggcccgaaacaggacctgtcccagaagctgtgtagcttcagcctgtcacagaagctgttaccttctgtattccacactctcacctgcacagactagtcttggaggaatctgggaaccaagatggctccccagatgctctggcaaagccctccagggcagagtggacacctctcctctggcagggaaaggtgcccagatgtctggagcccgaaatggggtatgtctcagaagctgtcctctagggaccttgggggtgtcacctgactctgtgcccaggtgaccaagtggtggagctgaccagaagggacttttgaccctggtcaggcagggtttcctacttctctaatgctgtctcagttcctgcatgattgcattggaacagaagttgtgttccactcattggtggtcctaagattgtgtggagaatcctctaggggaccttggggatgtccactgactctgtgcccatggtgaccccatgctggtgcagaccggaagggacaagtgaccctggtcaggcagggtttcctgcttccctaatgctgtctcagatcccgtgcaattggtttggaacagaagttgtgttccactcactggtggtcataatatcgcatggagagtcctctaagggtgtttggggtgtccacagactctgtgcccaaggtgacctggtgctggcgcggccactttactctcttaatacacagagaggaaaacagaaaaaaaaaaaaacaaatcaactaatacaatgtcatatatctacacctacagtcacaatcttctcacaccc

SEQ ID NO: 1263 - DNA, 1000 bp, mus musculus
taaagcagaattgatccatcacacttaaaaatcaaattgccagttcttttaggcttagttgagatgttccttcctgagaatcttcaccacttatatatccagtactaactccagtacttaggcgttatactgaccactctactcaagctgttcttagcttttcttctccaggactcactaatgcgtgttttttttgctctgttgttgattcttcttggctcttcatcctgggttttcacagtatgcacaatttacacttataattctattctcagatattattgtttcctctgtagataaccatgagtaaaggtgggtaccattaaccattactaacattcttttctagagctctatttgtgacgctgtgaaagctaagtagactttgaatgctttgggcaatcttcacttttgggaaatgtgcttcttatttggggagatagcctgcttttcctggatgttaactgtaatagatatttatctttttagagtatgcagtgggtatttctagtatttcattgaaattaaaccttggccagaatataaaatacactcagtgaatctgataatatgccaaaatatgtaattaacaggcttattaataactcagcaagctttgtttctgtcccaggtcctaggaaaattcctcagtgtttcagtcagcagatgggaagacctgttcacttgaaagatgtctttgttagggttgtgttgctgtaaagtgcaactaggatcatggccagtcttagaaagtaaattctttaattggatctggcttacactttcagaggtttagtttttttatcatcatgaagggaatcatgtcagcactcagggagacatagtgctggagaaggaagaagttaggtgttctatatcttgacctacaggcatcaaaggtaactgtgaatcaaactgggcatggtttgagcataggagatacctaagcccacctccacagcgacacactatgtgcaacaaggccatgcctatttcaata

SEQ ID NO: 1264 - DNA, 1200 bp, mus musculus
caacatttgatgattgcttcctcagttttgtgtcagagctgtgagtttcccctcagtggatagaaagaatataaattttacatcaagtaaaaatgattaacttttacaccttttgtaaatatgtgcttttaacaattagtttctaaagatttattttcagatcctactaaactcatagttttgattcctcattaaaaggactcataataatcagtaagtagctataatgaggttagtttgttattttatgaaatcacttgtatgtattcctcacagattccaacaggtcaatggtaatcctcatccaatgttgaggttcatggagaatgaaggaacagcagtcctcctcacagaggtgctctccaatctccacttcccttctcctctgagagggtgcctccccatattaccccaccctggtgcatcaagtctctcagcataggtgcatcctttgtcactgaggtcagacaaggcagccttgttggtgaaccgataccagagtcaggctacagcattagtgagagcccctgcttcaggtgttgaggggctcacatggaaactcagcttcatgtctcctttatatgtgcccggggtctctttcaagcccgtgtgtgttctttgttctgtgtagctcagattctaagagctcccagaggtccaggttagttgactctgttggtctttctgtggaattaccatccatttcagggtcttcaatgcttcccccaactctaccttaaaaacccctggcatccatccgatgtttggctgtagttatctgtgtctgtttcagtaagctgccgagtagagcttttcagaggatagttttgctaggctcctgtctgcaagcataacagagtatcattaataatgtcagtgattggtttcaagttgaactgtttattgattggtcatttcttcagtctctactccatctttgtttctgcatttcttttagacagcacaaaaattgctttgaatattttgtgggtgggttggagtccttatctctccattgggttcttgagtggctacaggaaatggctcttcagttttcatgttaccaatgcttggcatcttggctaagcacaaaacaaacaaacaacaaccagatacactaaatcgcatagaagagaaagtaagatatagccttaaattcattgattcaagatagtattccctataattgttgacatggaa

SEQ ID NO: 1265 - DNA, 1200 bp, mus musculus
ctgatttgaatataaatcataggacctggtaggaggaagtacttcctcaaaggtctacctttgaaagggttatcatgttactgaatatgtctggtaactttttgcttctaattatcatgaagtgagaagattttatattccacactctttgattgtgactcctatcttaagcaattacattgcagtggaacactgtgaaaaaataaaaaaaaaattaaaaaaaaaaagaaattcattagagaactctgttccactttatacttttttaaaaatttttattagatattttcttcatttacatttcaaatgctattccaaaagtcccctataccctccccctgccctgctccctaaccactcactcccacttctttgccctggcattcccctgtactggggtatataaagtttgcaagaccaaggggcctctcttcccaatgatggccaactaggccattcttctgctacatatgcagctagagacaagagctctggggatactggttagttcatattgttgttccacctatagggttgcagaccccttcacctccttgggtactttctctagctcctccattgggggccctgtgttccatactatagaattctgtgagcatccacttctgtatttgccaggaactggcatagattaacaagagacagctatatcagggtcctttcagcaaaatcttgctggcatatgcaatggtgtctgcatttggtggctgattatgggatggacccccaggtgggaccgtctctggatggtccatctttcgtcttagctccaagctttgtctctgtaactccttcaatgggtattttgttccctattctagggaggaatgaagtatccacgcattgatcttccttcttcatgattttcttgtgttttgcaaatggcatcttggatgttctagatactttgttttatattgttgagattctctaattttttctttatgtttatgtatttagtgacttcttattaaacagtatattattacattttacacttaacttgaaattctgtatattttctatgagtaattattgtagtattaaaccaacattacagtaatgcatttaatcttaacttattccacttatatgctagaagtttccatttagtaatgtatataattgtggttctattattattttagaataatgcacatcagtgaagaattaatccat

SEQ ID NO: 1266 - DNA, 1000 bp, mus musculus
ccaaggagctaaagggatctgcaaccctataggtggaacaacattatgaactaaccagtaccccggagctcttgactctagctgcataggtatcaaaagatggcctaatcggccatcactggaaagagaggcccattggacacgcaaactttgtatgccccagtacaggggaacgccagggccaaaaagggggagtgggtgggtaggggagtgggagtggttggctatgggggacttttggtatagcattggaaacgcaaatgagctaaatacctaataaaaaatggaaaaaaaaagacatacattactttaaatttaatatgcttttagctcaatgcctgggctcttcttagccttcctcagctagcttgcccttcatttcattcctagctcaacacctctaaatctgccctcaactttagttgcctggttaccttctcctgctcagcaagctaaatctgccctaagtatagttgtgtttctaatcctctgcctgctatcccaggtccaggtggggaagtagctaatgaccactccactctagaactcacatggctaatgggccccctctccatccaaagcatggcaaatcttctttgctcctcctatgccttctagcctttctaagggaacatggaagttccacctcttctgcccagtcagtggctgcaaacttctttattaatagatcaagaaccaactggtgaacatgaccttaagcatttacatgcttattcccaatcagaacatcagaaccacaccctaaaaatttcctatccccttaagtgctgcaatccttcctatacttccataagagtctccaagctccattcagtgtttgactgtttacattagtctgagtcagcttctggatagagcctctcaaaagaaagccatgctagatgcctgtctacaagcatgaaagagaatgtcattaatagtgccagggatttgtccttgtatcctatatcttatgctaataatgagttataagtgagta

SEQ ID NO: 1267 - DNA, 1000 bp, mus musculus
ataaagttctagaatgcatatcaaaacaggatatgaactgggcggtggtggcacacgcctttaatcccagcaattgggaggcaaaggcaggcagatttctgagttcaagaacagcctggtctacagagtgagtttcaggatagccagggctacacaaagaaaccctgtctcaaaaagcaaaaacaaaaaacaacaaaaacaaaaaacaaaaacaaaaaaacaaaacaaaacaaaaacaagcaaaaccagatatgaactcttctactgtgtccaaaaaaatatacctttaaaatcaagaataattcttgctcttcctgtaagcggccagagttactagttgctgtgttcacaggtcacctgccaagatggttcgctactctcttgacccagaaaaccccacaaaatcatgcaaatcaagagggtcaaaccttcgtgttcactttaagaacaccagggaaactgaccaggccatcaagggtatgcatccacaaagctaccaagtatctgaaggatgtcactttaaagaagcaatgtgtgccattctggcggtataatggtggagttggtaggtgcgcccaggccaaacagtggggctggacacagggtcagtggccaaaaaagagtgctgaatttttgctgcacatgcttaaaaatgcaaagagtaacgctgaacttaagggtttagacgtaaattctctagccattgaacacatccacattgaacaaggcacctaagatgcgctgatgaacctacagagctcatggccggattaacccatacatgagctgaataaaagatagaaaaacattccaaccaagttgacatgagaagcaagctgctatagccattttaatatctgacaagataaacttcaaatcaaaactagtcagaagatatagggaaggacactacatactcatcaaagaaaaaatatctatcaagaggacagtgcaattcttaacatatatacaccaaaacaagggtacccaaattcatact

SEQ ID NO: 1268 - DNA, 1400 bp, mus musculus
aatcaaatgacaggcatctttttttgaggacacttggctatttgtagattttagtagagaatactgtggctcttgcatttcctgcctccttctcagacaatcttattccttatgtttttattccaggatacacacacacacaccttttattcttttggttcataaaatctcatcaattttaaaatagtctattgtgactgaattttttgtctattatctaatgaaaagttgttcacatgcgtttttttaatgcttaatctttttttttttttttacaatctagtctttactctttatccccctcccagtcttctctctgcctgttcctcatcctatacctgttcccctcaaaccagtctccaagaaaaatgactcaattttctttagggttagttgcatcttctctctctgagtccagaccaggctgtcctttgtgtatatgtgctggagacctcatatcacttggtgtatgctgcctggttggtggttcagtgtttaagaggtctccgggcccaggataattgagactgctggtcttcctatggggtcttcctcctcattagctgccaccaactttcccctaattcaatcacaggggcccccagcttctgtccattggttgggtataaatatctgcctctgactctttcagctgcttgttaagcctctcagagggcagtcatgctatgctcctgtttgtaagctcattacagcatcaataatagtgccaggcctttggggtctcctcttgagctggatctcaatttggacatgtcactggactcctttccctcagactttttttttttccatttttgtccctgcagttctttgagacagagacaattatgggtcagagtttctttactgtgggatggcaatcccattcttccacttgatgtcctgtttttctactggaggtagactctacaagttccctctccccactgtagagcatttcatctgaggtgccttcctttgagacttgaattcttgaatttggtttagaaagcttgccttgctgaaatactgaattgctgaattgtttactgtttcatacccattgaatgttgatgaatggccatgtttcttacaacattcttttatcaataacaaaattgccctattaataatttgttaaatactatctttacaagtactttaacacttttaacactatatttaattcaaatatagctctcagttcatcaagttaaacaatattagtgtccataaatactttcaatttcaaagaatctatttagtttcttaaatgtggaccatattgtagagatcgaaaaatagaagacttgagctgaatgagttaaacttagaattgcagaatcatgtcacaatttgacattgaagactccaagataggcagtggctggatgtttgaa

SEQ ID NO: 1269 - DNA, 1000 bp, mus musculus
attggtgagaagtgatttagaggaagggatttacttcagcttacaatttcagggaactgtctgtcaggacagggaagacatgtcagggttcaacaccacagaagggtgtgggtaggagtcctgtatcagagtaccaagaaaagacaaggaggaattatgatgcttaaatggatttttcctttctccattcatatattcaggtttactaggcatggactgctgccacccacattctgggcaggtcatttcacctcagctaaccatctccagcaaaccagagatagacagacacctagaggtgcacctcatcagtgactgaaggcatccctcgattccatcaagcagcagattggccattattggaaagagaggcctcttggtcttgcaaactttatatgccccaacacaggggaatgccagggccatgaactgggagtgggtgggcaggggagcagggtggaggtgggggggttaaaggggacttttaggatagcatttgaaatttaaatgaagaaaatatctgataaaaattgaaaaaaaataaatgtactgagcaataagaaaatactattatcagaaactaaaaccaaatttgtcttacttcaaaggacacatttatcacactatatgtgtgcagtaaacagtaattaagaaactgagaaatacagtatttatgttgcagcttgatgattaaatcaaatgcctttgattatgatggacattacaccagttttatccatgaacaagataaataaattgaaaaagtacagaaaaaatttcacatgaaacattaatatactgtaagatatcaaattttatagaaagaactaataatttagtgtaaaaaatacagtagtgctgatttttcaaagtctgtttggtttcacaccaaacattgttcacacatatcattttttattttagatttaatctctggattacagctattcacacacataaatgacaaaaatgtagctcagactatgaactcaagagacaa

SEQ ID NO: 1270 - DNA, 1000 bp, mus musculus
gataccaactttctatccaggttgtaattctgaaattgatgcaataacttcaccaagaaacagattcaagtgttaagcatgatgaagctctttatggctttgatgtatctagaagtttctgttcccgttgtaggacttattagagaggcacaataatctcagtcaagaatgagagaccaagtgactatgacatggaaagcttgcagactttaaggtttgtttctcgttccctaacatcccaggggcccaaagagatgtgactcctttttcttactctttgaacactatctttattatttactgtggtaaatctcattatactgctcagtggacatgctaccaatacacattctcctatggtttgtgttctatgatttctctggaaaatagtctaagcacttctttgatcaacatgtgttctctgtgtctaaagcatcacaaactttttcacagtttcaactgctagacatttatcttatagacattgagatacatttttatgtctatgaacataaagaaaaagcttcatcattaactacagattatctacatgtctgtgataatttgaataggtttgagtctaaaagaatcatgtgtttgatgtttggccccttggaagaggcactacaaggagatattgtcttactggagaaggtgtggctttggttgaggaagtgtgtcactgtgaaggctaggctttgtggtcttaaatgctcaagctatacccagtgtgaaaacaaacaaacaaaaaacaaacaacaacaacaacaaaaacaaaaccagtctcctcttggctgtgcgtgattcaagatgtagaactctaggctcctccagcaccatgtcttcctataaattgctgtgcttctcatgatgataaggggctaaacctctgaaactttaatccagctctaattaaatgttagcatggatagagttggcttgttcagtgtctcttcacagccatggcaatactaactaagccaatgtctttcttgtaatg

SEQ ID NO: 1271 - DNA, 1400 bp, mus musculus
aatttatgtggaacctaaattgtttctgagatatgccgttttatatgtattattatttcatttgtgatacattaaatggtccaccacgggtattttcgataagagcacgtgacctggtcttcctacgaaatgctctctgtatataattatttggtttaattactgcttgttgttttacaagtcctccatatttaaatttatatcctggcaattgatgttctgtacaaaattaagagatacatctttccttattttttttttcatgtcttagtgttccaatgattttttttcttttttttttttttttggtgtttattttatttatttacatttcaaatgtgattcccctttccagtttccccttcacaacctccctatcccccttttcctcccctgcctctatgagggtgctccctcacccgcccacccattcctgcctcagcgccctagtgttcccctatcctgggtcatcaagcctccacaggaccaaggggctttcctcccagtgatgccagataaggaaatcctatgctacatatacagctggagccatggtccacctttaccccctatgtactctttggttggtggtttagtccctggagctttgaagggtcaggttggttgatattattgttcttcctatggggttgcaagccccttctgctcctacagtccttaccctaacttctccactggggaccccatgatcagttcaatggttggctatgagcacctccctctgtatatgtctggctctggcagagcctctcaggggacagctataccaggctcctgtcagcaatcattcttggcatcagcaatagtgtctgggtttggtgtttgcagatgagatggatccctaggtgggacagtgtctggatgacctttccttcagtttcttttccccaatttgtccctgcatttccatttgacaggaagaattctgaatacaaaaaccacccatggtgatttaaaattttttaaaagtactctatattatctcttttgctctctctcttcttcacttttctctctgtgtgtttgtatgtttttaataaacttgcttagccataacatcttgccttcacaggtccccaggtcacttcagttcagctgatagctcgtcacatgtttcattcatcaactccatgattgtttttaaagagcacctgattattcatgattttctttactgtttgactatcttaactttaataaggcttttgtcatacaagagtttaatttacttaaaatatattttgcctctggtttgggggttttatatatttctatagaaacataacttctgcatatgtttaccatatctaaggccctttgataaaatatagattacacttgtttttaatcataattcatgaatctatggttccactatg

SEQ ID NO: 1272 - DNA, 1000 bp, mus musculus
tgttggtaagattcttacatttgccttttgccatctggtaatctctggtgttagttgttatagttgtttctggctggagccagtttctcctgtgatcctgtcagctgtcctgggaatccagttctcttttgagtctcagtggtcagagctctctcttctggcaagctctcctcttgcagggaaggtatacagaggtctggagttcagacctgcctcctggctgcagatgaaggcccgaaacagggcttgtcccagaagatatgtggcctctgcagtctttgcactcacctgcatagactggtctcctaggggaccaagacacaagatggctccctcacctgctcagaaggtcagagccctcccatgtggtcacctttcctttggaggggatggtgcccggatgtctggagcctgaatcgaagtctgtcccagatgctgtgtggcttctgcctatcccagaaactgtgtagtttctgcagtctgcttgctcaccctcagcagtctgcaagctgacctgtgcagactggtctcagtgggacctcagagacaagattgctccctcacttgttctgggggtcagagccctcccaggtgactacctctcctctgttggggaaggtgcccagatgtctggggactgaaatgggggtctgtcccagaagttgtgttgcttctgcagtctgcttactcaccctctgtagtccacaagctgatctgcacagactggtctcagaggaacccaggagacaagatgactccctcacctgctctgggggtcagagccctcctgggcggccacctctcttctggtggggaaggtgcctggatgtctggagcccaaaagaggacctgtcccagaagctgtgttgcttctgcagtccactcactcaccctcagcaggctgtgagctgacctgctcagactagtcccagctcttgtgctttttctttggctcttcttgattgatcattttggtatgatatagattgtttttaatttg

SEQ ID NO: 1273 - DNA, 1400 bp, mus musculus
tatctcttcaatatagtatttgaagttatagctagagcaccaagataactaaaggatatcaaggatataaaattggaagggaaaaagtctaagtgtggatagtcacatatgatatgatagtatacataagtgaccccaaacactctaccaaagaactcctacatctgataaacaccttcagcaaaatagctggacacaaaattaacttaaaatttcagtagtctgaccttatacagaaaacaaacagggtgaaaaagaaatcaattaaacaatacatttcacaatagccacaaatgacataaattatcatggtttaaactctaaccaatcaaatgaatgaactgtataccaaatgtttcaagactttgaaaaaggaaattgaagaagatatcagaaaatggaaaggtctccaatgctcatgaattaatagaattagcatagtaaaaatggccttcttaccagccatctatagatttaatgcaatccccattaacatttaaacccaattctttgcagaatgtgaaataaccagtggactgggcataaagtcccccatggaggagttagaaaaaggactgaagaagccaaaggggtttgcaaccccataggaagaacaacaatatcaaccaaccagatccttcagagctcccaggaacgaaaccaccaaccaaagaatacacatggagcaaccatggctccaaccgcatatgtatcagaagatggccttgttgggcatcaatgggagaagaggcccttggtcctgtgaaggctcgatgcctcagtgtaagggaatgccaggacatgaaggtgtgagtgggtggatgggtgagaggaggtgggaaggggtttccagaggggaaaccgggaacgcagataacatttgaaacttaaataaatacaatatgcaatttaaaaatactcaccttcatatgaaaaaaatgaaaaaacccaggatagctaaaacaaacctgtccaatattagaacttctagaagtataaccatacctatttccaactgtactacagatctgtagtaataaaaagtgcatagttttagcataaaaatagacaagattattaattgaataaatccaaaaccctatatgcaactccacaaatccttgagcaccttattttttataaagaagctagaaattacaatgggaaaataaaagcaggttcaacaaactttcctgatttacctgaatgtctacatgtagaagaatggaaataaatcgatttttttacaccctgcaactcaagtctaagtgagttaaaaatctcaatataaaacaaaatatactgaaactgataaaagagaaagtgtggaacaatcgtgaatgcattgacacaggagacaacttcatgaacagaacaacaatagtacaggttctaagatc

SEQ ID NO: 1274 - DNA, 1400 bp, mus musculus
aggcagaaagaatttcaaagtcagctgataaggaggaattctgtaaaattccaggatttgatatggctgctgcactcttgatctcacaactgctagggatactggcattagatatgtgcaagattaatccagacaaaattctggctcacatgtgggaggggctcttttagaaatgcatgatcatggatagtttgcctaggtcccagtggttgatcctaggtctgaattatatgattgccaatccttagattcaatgggtcattaaaaatcaaaataatacccctgaaaaaaatgaatttatcataaagttgggtggggaccttggaaaatgtatttgtagactgaagtggaaatttaatggttctttggaaagttggttggatggtgtttcattggggcaaacacatgaagaaacgtttttgttaaagtggacagaggtgtgaatgtctaaggcacaggagagacgatgttctgctaaaaacaagcacatgaaaggacatgtgataaaggattctctgctaatgacatgcatgtattggtctgatttacactgcatagtcgagttgcatttgtaggcatgccacacagagaaaagcaccaaagtggtacactgcagtttgttgctgcttccaaggactcaggctaattgggtgcatgtgttgaggcaagagccgtgctgaggcaatgcacagggaggacaagtgatgtgtggaggtataaataggactccacagagtgacagagacagagcttgacttgctgatgcagctagctctgcaatgtgtgtgggtcttgcattcactgacgtcgcctgctaatttgtgaactgaactgctgattttcagacaacacatagggagttgctctaaagaacctttctaaacaggtccatttctccccacccccaggtcctttcttttccactacctcctgtgggtggtaggttacatggaagattaaactgtttaagaattatcattaaaaataggatttaaaaaattaaattataagagacttataggagggtagtagaaagtgaatatgatcatattttattggatatatgtattaaactgtgaagcctgaagaaaaattaatattaatatgacaaaaagttgatacatttaataaccgatattcagatcgtgcatttaattggtatgttatcataatttcatctatgtagctattgttaggttttaacattcttatttgtgatatatatatgcttataatttagttatatgtacatttggtaatctatattaatatatgttgcaagttcttcttgatatacagagtaaatctaacaaatttgtctcttaaatttaaagataacaatgcacaagtcttactgaagaatattttgtatttttaaaaatgagtcagttttatttcaa

SEQ ID NO: 1275 - DNA, 1000 bp, mus musculus
aaaagaaacgtccttgtcgtttacagtcagttgcagcatggatcatggacttccccatggtttctggttatagcacagaccacagaaatttgtatggcacacaaaagcaacacaggctatggatgccaacatgtcccctagcaacagcatcatggccttaggcagcagcaaagatcaaggacatccacatggccttgggtagtacagagactgtggacataagcatggcttcgagtagcagcacagaccactgacatccacaaagccttaggtggtagcatggccgccaaaattggcatggtcttcagctacaacacagactgcagacaaccacaagaactcaggtatcaatacagcctagggcagcagttgtaaccacaaacatttgtccctgggtggtagcatggaccatggataccaataatgtctccaggggcagcacagactcctgggggagatttcaaggaagcccaatccagaagatgagccttttgccagggacatgtttgctttcagaggtagaagttgcaggaaccccaggctgctgcatatcaccctctacaacaggttaccccctacctcacctgcagccttctcccacacttataaccacagttgctgttctgcctctctcccctgcccacatgcagctagttcttcccttttcccacctctccaccatatatttgttcatccaaatgacactgaaaattgtagtgcatcacacagtacacacacacacacacacacacacacacacacacacatatacacactaccatcactgagacttccttcggatatcctgctgttgctcagaatcagagtgatcttgtaggtaggcagggcaagatccctgttacatagccccagtctgctgtgcacctctgtgctcattcagcatgattgtgcttgcagtctgctggctgtgttgctgcctaagctctgttcttctcagcagggctagtaggtttcttgcagtggctgcctactcagggct

SEQ ID NO: 1276 - DNA, 1000 bp, mus musculus
aaccactgaagaacagaaggggtgagagatctgattccgcagcctgctgccttccccactctctcccaaggaccctcttaccagtcataggctccacataggctgggcagggcttatccggccggggcaacagtgaggccagctcttggaggcggttatagaaggagtaggcaggacggactggagctggagggaaaacctgtggaagacaggacagtgactttgagagggagggacagcccagagatgggaggatggggcaggtgtgagtgggggcactaaccataaaggactccctgcccccctgcaccttacctctgtgtagcgcagcactgggtgagccccctgaacggcagacacagtaagtgggagaccctccagcccccagagcaggcggctgaggtcatcatagcaacgcacagccaacgccaaggcctcctcacccgtgctggagatctgatgaagagaagacactcaggaggaagtctgggtcttaagaaaccccagcaccaccttggatgctgccatgattcaggctatggcaggaccggggcgccccctgctggacactaggagatgcaacctggctagggtagaaagggttctccatccagtcttgccatagcactaactaccccgcaatcactggcttagaccccaggctcttacctctttggggttttggatcaatgcatcaaggaagccacccacatactggatacaggtgtctgggatgtcagcatggctgaagaacacagatacaatgagggtgtcaggggctatgcctaccgaaaatggctgccctgaccacagcagcctcctggtgtgaagacgctgatactcacagtgctaagaggtgggtgaccacctgatgaggaataagacgcttctcaaacaaagattctgcctcccagaccacagcttcccggatggctccgtcctggaaacgcctgagctctgagcgggtcccccagaactgacggaaatcagcagcctggag

SEQ ID NO: 1277 - DNA, 1000 bp, mus musculus
tgcctctgacccttgttggatacacagggcagttggcccaccccaaagcctcttctggaaccaacccagcccctgagctcacattcctgctccagaccttcgggcgatctcattcctgccaaaccgggagcctgtgctgccctggaaggcacatcaggctgaagtaggtgtggccagggctggaaaggaatgtgtaaacatgcctttcttggacacaggagcaacagttgactactgctatagcttggatctgaaaggttcccccaaaggcctgtgggtaaaaggcttgtccccagcaaggggcatattaaaaggtaatgaacgctttacaaagtggggtccaatgggaagctttggcagtgcagaatctgggagtgagggccttgcacttgtgagagtctccctcggagtagctttgttccattgggtcctggtgcttaaggacgtagtgggaccccacccacacccctcttttgcttcttggctatcacagaggatgaatgagcttgtatgagcacccctcccagccagtctgtgcagccatgtcacagacagggaccaaagcaagaagtcacattaacatgaaatccctgacgatcactgcacacgaactttccctcttttgccttattttgtattttatattctgtctgcatggatgcctgtgtagcacttatgtgcctgatccctgaggaagtcagaagaggaaactggagtagagacagttgtgaggtgtcatgtgggtgtctgaaattgacctcaagtcctctgcaaaagcagtccagtaagtgcccttacctgctgagctggcactctggtctcacctttcctcctcttaagttaattgtatcaggtgtattgttacagtaacagaaatctcagtgacagaaatgccattctgtacagggtctcgtctcaaaaaaagtccttcaaatgatttttacttttttatgtcctcgtagcctgtgatgggttgggtctgaccaattcttgagatgta

SEQ ID NO: 1278 - DNA, 1200 bp, mus musculus
tttttaatgttttggacaagaagaatctgcctataaaaataattagtattattaaaacagaaataagttactttggtacaacaagaaaaatgttttatgtacatctcaagaattggtcagacccaacccatcacaggctacgaggacataaaaaagtaaaaatcatttgaaggactttttttgagacgagaccctgtacagaatggcatttctgtcactgagatttctgttactgtaacaatacacctgatacaattaacttaagaggaggaaaggtgagaccagagtgccagctcagcaggtaagggcacttactggactgcttttgcagaggacttgaggtcaatttcagacacccacatgacacctcacaactgtctctactccagtttcctcttctgacttcctcagggatcaggcacataagtgctacacaggcatccatgcagacagaatataaaatacaaaataaggcaaaagagggaaagttcgtgtgcagtgatcgtcagggatttcatgttaatgtgacttcttgctttggtccctgtctgtgacatggctgcacagactggctgggaggggtgctcatacaagctcattcatcctctgtgatagccaagaagcaaaagaggggtgtgggtggggtcccactacgtccttaagcaccaggacccaatggaacaaagctactccgagggagactctcacaagtgcaaggccctcactcccagattctgcactgccaaagcttcccattggaccccactttgtaaagcgttcattaccttttaatatgccccttgctggggacaagccttttacccacaggcctttgggggaacctttcagatccaagctatagcagtagtcaactgttgctcctgtgtccaagaaaggcatgtttacacattcctttccagccctggccacacctacttcagcctgatgtgccttccagggcagcacaggctcccggtttggcaggaatgagatcgcccgaaggtctggagcaggaatgtgagctcaggggctgggttggttccagaagaggctttggggtgggccaactgccctgtgtatccaacaagggtcagaggcagtttgatcctcttacattctcaacagattgttgagccttccaaaaacagaatgtccccaggacggtgcagctgctcccaaagtagaagtctatgttccctt

SEQ ID NO: 1279 - DNA, 2000 bp, mus musculus
ccccgagaggaggtaagtgctgctcttccgactccattctttagtgtaggccatgggattactcttctcatctgggagaaaaatcagcagagggagccaagacagatgctgctggaagcgggcatctctgtgtgaggacggcctggggctgagcatggctactggaacagcatggagtcagaaactaatgacttccagcacagcgagccaggaaggcagggaccctgcctctggctatcacttccttctccaaggccacttaggtccatttctctgccagtggagtagaggtgcaatagtgaaatagtagaggtgaaaatagactataaactggttattggatgctgctgcaggtattatcagtttttatgttgttgatactgtggttggataagaagatattcttacttgttggatgtgtacacagaaagaagtgtttcagaatagaagaattatgataccttctggcagctaagcaagtatgtaaatgtacttaatctgtgtattgtctatatacacagagaaagccactgaccaaatattagcagttgttggccctaggaggatatgtggtattctgatgtctctatgtttgatttaaacaaaaaagtgaaagggctgagccttgtggcatagcataggcctggatctcacctacttgggaggctgaggtaggaccacaagttcaaggtcagcccgtgtaacttaatgaagatcctaccacaaaaataaaaagtaaaaagaagcattggtagaatgctttcccagtataaatgaagacctaggttcaatccctgacatctcccaaaaatagaaacaaaatgaaaggaaagggagactgatgcagcaggcggaggccctgtctgttggagatggctttagtgtcccctccccagggggattgaggtgacctggctggctcacctgtctatggcccttggtgtatggaggagcaggcacgggaactgtgagggcagcagggcagtgccattagtgctctgttggtttttaaggtgccgttcaatggacgtggatctcaaccaggcacacatggaggataccccgaaaaagaaaggaaccaatgtgtttgggagccttgagagaggactggataaggttctcactgcgctcacaaggaacaagaagaagggctctgccagagatggaccaagaaagcgaaaggtaggtgggccagagtctgttacagatttcagaagctgactcttaataagtgtatctagcaccgcccttctctgtttggttggctaacccaggcagtcttcttccctcagcctgccaaatgctggggtcacaggcatgtgctgccatgtgtcgtgcttgtctgtctggggtgtttccatcccacctcccatgttcctgtgtgtgcacacatgcatgtgtgtacatgtgtgtacatgttactgttgatccaggggctaacacagggtgtcaggtttgcggatctgaggccctcagccccttgagatcgtccttggtgggggtaagaaggtgcagagtcaatgacagactccagaagtcaggtcagaggcaggagcagactcgtttattgcaggatggagagtgcctttatacctttcacctgtgtcctattggtccatgacatctcgttccctgtagctggcaccatctgattagttgttccagtcatgggctctgtttccaggagtcaggcagatttcacggttgccagatgtagaggtagctgttgtgcgtgcgtgggccactatgggccactatgggccactatgggataggctgactggttcctcctacacatgtcaaatgctttgacctacttagctgtcttgccagtagatgtttttgctttttaaaaacaactatatcaagtaacgttactgttctttttttttttttttttatctttttttttttccattttttattaggtatttaactcatttacatttccaatgctataccaaaagtcccccatatccacccacccccactcccctgcc

SEQ ID NO: 1280 - DNA, 1200 bp, mus musculus
tttgcctgtatgtatgcctgtatgtgaggatgtcagatcttggagttacagatagttttgagccaccatgtgagtgctgggaattgaaccctgggtcctctggaagagtaatcagtgctcttaaccacggagccatctttccagcccccaatatattttaactttagttctaaggttggtgcattttatttatttactttaaactttttattgattcttcgcaagtacatgaactccagtcccgctcatctccctcttcccacatatctgcccttcactcttgcagttaaccaccccacataaaacacacacacacacacacacacacacatacacactcactcaccaccaccatcatcaacaataccaaaaaacaaggcatagaaaacatctcactgtggaactgtagtatgtcacagtgtgtcctacagtatagtcctctgtccacacatctccacttgcaaatgtccattgttatgagtcattggtctggtttggtagtttctgtaataccatcaatattggatcctcattgggactcctcctggttatcttattgttctgtgtcatggagatcctgcagctttggatcaataggactggccctttcacttatcccaaccatgtgcagatgataaaaattttagggtggcccatttcagagccctgatctgggcctgggcaatagctaagaaggttggcccaatgactttcctttatcactctaccagggcaagttctccagcactgctccaggtaggccacccaatgctgccatcagcaagaagcagggtcagttctcttgctctcatgtccttggggccaactcactcccactcaagcttccagagccagctccactgtgctacccagtcaagctgtggggcccattctcccaagggctacagcctgtgaaccggactctcaccctctgggacaactcacctgtgccctctccaccagggccagctctactgtgatgcccaggcaaggtacagggcccactctcctaagtgttgtggtactcccagaacctttgtgaatttgggttgtaagtaaagctatatttcctgtagatacctctttgcttccacagtaaagttctttagccagcttggttcagatgttactaaaagattccacaaatggcaagataataaggcttgtgaatacccattgcttttgtgcctccagtttaga

SEQ ID NO: 1281 - DNA, 1600 bp, mus musculus
aagaaagacaaacccttacccaattgatctgaaaggtggcgagagaatatcctaattagcaaaatcagaaatgagaagggcaatatcaccacagacacagaggaaatccagagagtcataagacatactttataaaaacagtactccaccaaattggaaattctaaaagaaatggataattttctcaatcagtgccacttttagaagttaaattcagaccagacaaacaatttaaatagacctataatgcctagtgaaatagaactaatcattaaaagtctcccaatcaaaaaaatccagggccagatggtttaagtgcggaattctactagactttcaaagaagagctaataccaaaactcatcaaattattccacaaaataaaaacatttaattttatgaggtaatagttagcctgatactcaaatcacataaagacccaaccaaaaaaaaaaaaaaaaaaagagagagagagagagaattgcatacatactcaataaaatacttgcaaactgaatctaagaacacatcaaaaagatcactcaccataatcaaatagacttcatcctagaagataaactgtgggaaaccagaccttcaatggctccctcccggaaaaccaaacggtcctttgttgagagtcagagccaccccctccatgcaaggctgaccctgagagctggccaacacttatcttgaatgagtacctggggctgttagccaacattcagaaacagatctacaggatgaccttcgccctgcatcttcccgtacaggatgccacaaagcctgctatcagcatactccccaagatgtccttcttctatccgcctcagatgtccttcgctctgaagtccttgttctcccttctcagcccctccttattccttttctttactgtgtgtatataactaggctttcagcctcattaaaatcagaccttgacaactctttgcttggtcttgcttccctttctcctcccatttctctttcaggcctcggtcctcctcaacccacggaataactaagtcctgttggacgggacagtttaagtgcagaattctactagactttcaaagaagagctaataccaaaactcatcaaattattccacaaaataaaaacatttaattttatgaggccatagttagcctgatactcaaatcacataaagacccaacccaaaaaaaaaaaaaaaaaagagagagagagagagaattgcatacatactcaataaaatacttgcaaactgaatctaagaacacatcaaaaagatcacttatcataatcaaatagacttcatcttagaagataaagagatggttcaacataagaaaatcaataaatgtgatctaccatataaatcaactgaaaccatacacacacacacacacacacacacacacacacacacacagataatcttgctagatagtgaaaaggcctttgacaaatccaacaccccttcatgttaaaagtcctggagaaattagtggagagggacatacctaaacataatttaggaaaattacagcaagcttaaagtcaatatcaactaaagtggagagaactcaaagcaattccacaaaaatcaggaaca

SEQ ID NO: 1282 - DNA, 1400 bp, mus musculus
gagtaattctaaccaaacaagtgtaagacctgtctgaaaataacttcaagactctcaagaaagaaagtgaagatctcagaaaatgtaaagatctcccatgctcatggattggcagaattaatatagtaaaaatggccatcctaccaaaggcaatctacagattcactgcaatccccatcaaaactccaacacaattcttcaaagacaaggaaagagccattctcaaattcatctggcaagacaaaaaacccagagtagttaaaacaattcttaacagtaaaagaacagctgggggaatcaccatccctgacctcaagctttacaatagagcatttaaagaaaaaatacagaatacccaagggccagcagaaaggatggaaacaggcaatctcaggaggtaggacgttgggggggcggggaccctccagaatgcaccagagacctggtagtaagagtctctcaggaatcaaagggagggactttagatgaagtgaccgatagtaggaagaggcaacttatagaacccacctccagctgggcagtggtggcacacacctttaatcccagcacttgggaggcagaggcaggtggatttctgaggccagcctggtctacagagtgatttccagaattgccagggctatactgtttgggggggggggggggagacgaccgacccaacccccagcaggaagactggacatcaagtgagggttgaggttgccatcccacagtcacaactctgacccataattaattctgtctgaaagaattacagggataaaaatggagatgagcctgaggaaaagaaggtccagtagcaggcccaaagagggatccagctcaagaggaggctgtggagcactcacaaaaagggacctagtgtgactgccctctgaaagactcaacaagcagctgaaagagtcagaggcagatagttgtagctgacctctgtggttgaattagggaaaggctggaagaagctgagtaggaaggtgaccctgtaggaggaccagcagtctcaattaatctagacaccccgagatatctcaaacactggatcaccaaacaggcagcatacaccagctgatatgagggccccccaacatacatacagcagaggacttccaggtctatgttcattgagagatgatgcacttaaccctcaagagcctggaggcaccaagtttagaggtcaggtggtatggggacatccaacatggaactggggttggggggggtatgggatgtggagcagtaggaaggtggacggggtggggggtggacgggttaaatatggagtgtaaaaattaattaattaattaaaaaaaagagagagaaagaaatgttcaccatccttagtcatcagggaaatgcaaatcaaaacgaccctgagattc

SEQ ID NO: 1283 - DNA, 1000 bp, mus musculus
gctgtgctatgcactcaagaatacaatgacacagtatacagggcattggtcttgaaggaggtagcagtttatctggaagaacaggcagtatgctgacaaccataaattgatagttaaaaacaatgtagattactgtgacacatatttatatatgggaaatacatgttcgcttggatttacatttattgaatacaaaaagggaaataatttgattataattcagttttttgttttaggatttctgaggtatcattgtatggaatattttgatctttacaaaggtgatacatttgatgttttggaatataaacaaatagtccgaaacgattaaggggggaaatatatttgggacagaagagtttctggcccattcctacaacagatatagcttagggaaattagtcttaacttttttatctctttatctttaaaataatgaaaacaacactatatgcctgtgttagattgatttctttcagatcatagttaatgttattttcattatcagcatctttcaccttgtactaaaactccagtgctggccaaggaagaaatgatagcatatctgagggaatctgggacttgaaaagtgcctgctgcttcctcaactcttctctcttcctcaagaaaatatgcctagaatgggagatgaagcataggaaacttccagccacagtcaaagctacatgaatgagcctggttcaggcaaaggaaagtgtctaataacctgcctcttgatctcagattcatgaagaacctcctgctgaattcaggtgaactgtttactttgtatatcaaaacatgagtgaacattcatgattcttacagtatactcctgggtcgtttattgctttgttatggagtggtagccaactaataaaatatttcatgtttctgtagagatcattataatgtgttttgaaaactggtaaaatacttcataaatagagctttacaagtctataagatcaatgagttatggcaggtaagaatacaagat

SEQ ID NO: 1284 - DNA, 1400 bp, mus musculus
aagagtaataaaaatctaccaaataataattgtatctttatattacggtttattcagtgtttgaaaacagagcagtagcaaataatatataaatcaccatgaacctcaatgatgacacaaagcaatatatagtttgtaatgattattcatatgaacttgaaaatacaatgacatagttttgtacctttgacaaatggttctatgtgtaacttgaagtaatatctaacatcagacttaatggtaaataaccatttcattcccattaaagtcagatcaagaaaacattgttctgtcaccattgaggttcatagtgatttatatacactttgctattgctatgttttcaaatacagtagaaaaccagggcatcaagtggagggatgaggttgccatcccacagtcaaaaactctgacccaggattgtccctgtctaaaagaactgcagggacaaaaatggagaagagactgagggaacagaggtttagtgacaggcccaaattaggattgggctcaaggggagatgccaagacctgacaccactactaatgctatggtgtgcttacaaacaggagcctaccatgcagaccctccaagaggcctaacaagcagctgactgagacagaggcagatacttacaccaaccagtggacagaagttaggacccctgtggttgaattcaggaaaggctggaagaaactgaggaggagcacgatcctgtaggaagaccagcaatcttaattaacctggacccccgagatctctgtctgataccgagccactaacgaggcagcatacactagctgatatgaggccccaacacgtatacagcagaggacttcctggtctgtcctcagtgaaagaagatgaacctaaccctcaagagacttgaggcttcagggcatagggaggcctggtgtagtggggggtttagacttcctcttggagaccagggaggaagaatgggataaggaactgtcaaagggtggaccaggatgggtataaagaatggactataaaaaaatactaaataataataaacaaaaaacaaagtataatcttgctagtgtatgcaatggtgtcagcgtttggatgctgattatggggtggatccctggatatggcagtctctacatggtccatcctttcatctcagctccaaactttgtctctgtaactccttccaagggtgttttgttcccacttctaaggagggccatagtatccacacttcagtcttcatttttcttgagtttcatgtgtttagaaaattgtatcttatatcttgggtatcctaggttttgggctaatatccacttatcagtgagtacatattgtgtgagttcctttgtgaatgtgttacctcactcaggatgatgccctccaggtccatccatttggaa

SEQ ID NO: 1285 - DNA, 1000 bp, mus musculus
tcacaagatgttttatgcaagtgcctttaccgggttgtattgtatctagtaaggactgtgttaagactggagaagagggcttgggtattgactcagtagctgaagatcctgttgtgtacacatgaagaactgagatcagattccaagcaatcatgtaaaatacctgggactggaagcaagcacctttaatcccagtgctgctggggtacatgctggcttcatgggtacatgaaggtttgttggggtacatgctggccagtctaaataactgctgagccttaagttcaccaagaaaccctgtctcaaaaataaaatctagatgtccttcaacagaggaatggatacagaaaatgtggtatttttacacaatagactactactcagctattaaaaacaataaattcatgaaattcttaggcaaatggatagagctagaaaataccatcctgggtgaggtaacccagtcacaaaaaagcacacatggtatgcactcactgataaatggatattagcccaaatgcttggaatacctagatacaattcacagaccacatgaagatcaagaagaaggaataccaaagtgtggatgcctcagtccttcttagaagggggaacaaaatacagaacaaaatagagacaaaatgtggagcagagacatagggaaaggccatccagagactgccccatctggggatccatctcatatacagtcaccaaacacagacactattgtagatgccaagaagtgcatgctgacagcagccagatatagttgtctcctgagaggctctgccagagcctgacaagtacaaaggcagatgctcccagccaaccatttgactgagtatggggtcctcaatggaggagttagagaaaggactgaaggagccgaaggggtttgcaaccccacaggaagaaaaataatatcaactaaccagacccccagagcttccaggaactaaatcaccaacaaaggagtacacatggaggcacacatata

SEQ ID NO: 1286 - DNA, 1400 bp, mus musculus
gtttagtcattttagcgctattgcataggtcacaaaagacaatcacttaagcaagttacaatggatctatgcttaaaagcaactgctttgtattttctctttaaaatactagtgattcaaacatgccatttcttgtctgagggcagtgaacctaaaactgttgattggcacaagtaaggatgagataaaaggtgaagtaagataatttatagggagagattgtgtttctttccaattaaaaaggaactaaataggagtgcaatacaatatttgtgtttttctatctcttttacattttaaaattagtataaaattatgtgtggctattaatagagtaagagattttgttatgcacattatcaaaactcatttcagtgatttgattgtcccttttactctgattcttcctgtaggatgatagtccttagctatttgtattagttcagacagatgtgtgaagtgagaagtgccatgtggagaaaaggacgactgactgactctagctgtccatgggcaggtgctgtcctccaaaatgcacacagaagccagtactgtggcatcataggtttgtaaacttaaagggctctttaatttaaaacaaatgtactcatttgttttatattttgaaaatatcatataatttcatacttatttctttcctgtctttgctcccctcctgtatacccattcttactctttttttatacatggctctgtttcttaataattcgtgttacatatatgtgcatacacacacacatacctacatgtatgtatatgttcctgtgtgtatagcatgtgcacatgcgctaatgcacatgttcctaaagaagatagtattccctagagaagaacacacatcaattcattatctaataccaaattaacatgcctgaaaatatacacataaatgaaatattacaaagacgagcagattgtattcatgtgcttaggaaagtgcttttactgcaagctcccctacagtgagacggagggcacatgaataccagtcttcccaattggtgaaagagtttaaaaagctcttgtagctaatgggatgtttgtaaccagacaccttcgtaggatagctgcagtttctatttccaaatatataaaatggagaaaatgctatcaaaatgataattttgacatatatacaactgaatgatataggaaataagagataatttatgtacaaaattttggtattttgtgaaatgctacataaacatcaaatttgaaaggatagagaattatgctagtggttgctaacatgtcttagatcatttttcccccaaaacatgatattatgtggctaaacaatgtatttagcaggtattaatattatcaattttactggacaaacagtgaaaacaaagtttcttaaaagttagatgata

SEQ ID NO: 1287 - DNA, 1600 bp, mus musculus
ggttccccactcctacatccccacccccatcccagactctcctcctctgagagtgtagagcaccaagaactgactatccccacaccctggcacatcaagtctcttcagggctagacactctctctccactgaggccagtcaaaacagcctacttaggggaacatattccaaggatgggcaaaagcttttctgacagtcccactctacttgttcagtggtttaacgtgaagaccagtctacacatcagctacttatatgtgagggagtggtctgggtccagtctatatatgctctttggttagcgattcagtatctgagaatctcccaaggtccaggagagttgactctgtttgttttcttatgtagttcctatccctgggggcccttaataattccctaacttttccataagagtcaccgagctccacccaatgtttagctgtgggtctgcttctgttcaagtcagctgctgggtaaagcctcccataggacagtctacaaccataacatattatctatcatttataatgataatatcattcatatcaggaattgttgcttgcccatggaatgggtctcaagttgggccagtaattgattggccatttcctcagtgtctgctctatctttgttcctgaattttaagtagacagaacaaatcttgggttgaaagttttctgaatggattggtatcttgatcccccacctgaatgtcctgcctaccggatgtgacctcttcagtttctgcattcccactgctatgagtttcagcttaagtcactcccatagagtcctgggaacctgcccaatcccatgtctccaacatgtcctagagatgcaccccctcctccaactcctgctagcggcatatctccatccactctcttggcgctcttgttctctcccctgtctctccccacaccagttccaaaaccttccttattctgtttttctttccttcctccattcatttcccttcttccagctttttcctatgactattttattcttccttctaagtgatactcaagtaccatcacttgggctttccttcttgtttagattctttgggtctatggagtgtagcttatgtattttctactttatatctaatatccacttataagtaaagacatattatgcatgtccttttggttctgggctatctccctcaggatgatattttctagttccaccagttttcctgcaaaattcatgatatccttgtttttgtttttgttgtttgtttttgtcttgttttgttacttatttatttacaatccaagtgctgtcccccttgaagtgccctctcccagagttcctcccccttctccatctctttctttctccttcatctctgggagatcatccttgcccatattaccccctgcagccctgttgcatcaaacctctgtaagataaggatcaccctctcccactgaggccagtcctttgctgcatatgtttcagagtcctcagaccagcccatgtatgctctatggctggtggctcagtttcagagctctgaggggtccaggctagttgacatttgttggttttcctgtgtggttccaacctccttgagtgccctcaattagtc

SEQ ID NO: 1288 - DNA, 1400 bp, mus musculus
tgaaaagtctttctagataggaactatttttgattcttctcaaaaagtaaataaataaataaataaataaataaataaacaaataaataaaaactaatggagagataagatctcttcctcagagacaacacttttcaaaagacacatatgtataagaatttcatacatccttttttttggttctcatactctcccactactcactcctctacctcacatcctctccctctgcttctgttttatcctttatgcatacatcccttctttttcttcacatttgtttttctttctcttcctcagtattttgttttcttcactatactttcacagaatcattttttaattgcattgtgagatagtaagcttacataggaattttaatgtttgctttctttgatttagtctttgctttcatggcctgatttcccctattatttccaggcttctccctcataagtttgtaggcctcagcatctgcctcactactttcactttatccctaatgcattgctcctccctcaaaaacttgtccacatctctctgcaaaggcctcatcctaattttctggcttccatttgtgctccaaattgaattcccaaagcacaagattcggagtgaggatccacacatgacaggcagcatacctgcttatcttggcccaatttcactcactcagtataatttgttttacatcatgattgtctgtctataagtaaaattccaccctgtatttgtgctttgtttttttttaatcccttcatattttgatggacatctacttgattacgtttcttagctattcttaatagagcaacagtgaacatcaatgtgcaaatgtctctggggtaggataaaaggtctgctggaattatgcccaggagtgatatggatgaaccatggagcagttctaaactccaagacaaatttcaaaagtggcttcactaatataaattcccaccaatagtatataaatgatcccctttcaccttgtccaagatagtaactgttgttatttgtgctccttgtgatggccgttttgattaggataagacatactctaagtaattctcatgtccacttccctcatcatagatgatgctgaatacttttgttaacctactagctagcaagctaatttcaaaataaaacttggaaaaagattaaagggaccaaacagaagtaccatgcagaattgaacattgatccttctagaacatgtaggttactaaatgaaaatcagaatgcaaatcatgggatatgtttctatgaattattggcaagaaaagctgtaggattctccaaaacagtctattgccattgtctttagttaccatcataactacatagtaagaccctcttgctaaagaaaatgtaccctttggctgaaggacatgaagaag

SEQ ID NO: 1289 - DNA, 1200 bp, mus musculus
gtggtcttgttttctgttagtaagattcttacatttgccttttgccatctggtaacctctggcgttagatgttctagctgtctctggctggagcttgttcgtcctgtgattctttagcctttgtcagcattcctggaagtccaactctcacctgggtcccagttgtcagagcactttctgcaggcaagctctcttcttgcagggaaggtgcacagaagtcaagagctcagatccacctcctgaatcctgtggtcagagccctccctaaaggctgactctcttctggcagggaaggtacccaagggtctgggtctcagctctgcctgcaggctgaggatgaaggtctgaagggaccctttccaagaaacagttgcttctgctgtctacgtgctctcctgtgtagactggtctcagtgatcccaagatccttggtgtgctagggctcctgcagtgtggagtgtcctctgggaccttgggaacctttgcagatttcgagcccaagatggtgctgggctggagccaacaggaatgaagcccagccactggtcagtgggtttcctttgtccctgtttctgctcacacaagaccctccgggatttttttgaaacagatgttgcattccactcaccagtgatcccaagttcctgggtgtactagggcctgctgagtttgtgcccaagatggtgcgaggctggcgccaaggaaggaaccacagtcactggtcagggatgtttcctttgtccctattcctgctagcacaagaccttctgggttttttggaacagatgttacgttccactcaccagtgatctcaagatcctggttgtgctagggtgtctgcagtatggagagtcctctgggtaccttgggaccctcggcctagtttgtgcccaagatggcacagggctccacacagactttatttgaaactataagaagaaataagtggcctcgcagaataatagtcatagatccacaatgactgaaagcccaggactgggccttttaactctctgctattatacatttcagtgaacctgaaggcaaaaaaaaattatgaagaataattcttataataatgatacctgagttttagcttttacactatgaacagagtcaatatttgcttgggcagacagtgaagacatgtttgagatgagagcaatctaaagttctgttttactcctgataacttagagg

SEQ ID NO: 1290 - DNA, 1000 bp, mus musculus
tatcctccatcctagcctaggattaaggccctagttttctttaaattaactttacatcctgatcataggcccaccccttcctctcttccaattccacccttacaaatccctcttccattatccccttcccttctcctcagagaacaacttcaattacccacttcccttctcatgaagaacaagttgcacatctactacaaatgtggagggggtggtctagattcagctcctacacgatccctggttggtggcgcaggctctgggaaccctcatggtcccaggttagttgactctgtggctcttcttttggtgtcttcttgtgatgttcacttctaccctacactcttccacaagacttcccagattctgcctgatatttggctgtgggatctctgcatctgcccccatttgttgctggatgaagccactcagggaacaattgtgctaggttcttgtctgcaaggatagcagaatctcattaatagtgtcagaagttggctctctcacatgggatgggtctcaagttgaggcagtcattggttggccattccctctgattctgctctctctataggcaaaacacaatttggattgagggttttgtgggtggattgatatcctcttccttcctctggacctcctgctgggttaaagtaggtgaccagttcaggctctatattcccctctggtaggaatctaagctagaatcacccccatagactccctgtatcctctcctgtcacgggccttcgcctactccatcagctagtcaccagagatactccctgccaatttccagtcccactccaagccctctttcatcctcctgtagatcccctacagacattattaccacccagatgcctctcctcacctcctctcttacccagttccctttctctattcacctccaagatggcattgtatacccatcagaatgactaagatcaaatattcaaggaatagcacatattgaagaggatgtagaaaagggaaaaca

SEQ ID NO: 1291 - DNA, 1000 bp, mus musculus
aagaagtgggtacatagattaagtaaatgaacaaataaaaataaacacatagattgtctctaatggcttctgtaagggttgcttctcagtgtgatgttcctaatttcactttgtgcttcatccaaaaaacacatcagtagccatccctaccaagcacattgacactgtcaatgtcagtgtctatttggacttgtaccaaaatgacacatttaaaattaaaaagggtaatagtctttctagttactatatcttagtatcagtttttattgtttgctttttcatatttattttaacatacaatttataaaagaacagacatctgtggttttatatactactatacagttatgaaatgttgcaggcaaatgcctagtaggtattgtggtagaaaagaactagtaatcatcatcttagatgaaaatgattagcggagcgtggtggtgcacgcctttttttttaatttaatatattttttccattttttattaggtatttagctcatttacatttccaatgctataccaaaagtcccccataccccccacccctactcccctacccacccactcccactttttggccctggcgttcccctgtactggggcatataaagtttgcgtgtccaatgggcctctctttccagtgatggccgactaggccatcttttgatgcatatgcagctagagtcaagagctccggggtactggttagttcataatgttgttccacctatagggttgcagatccctttagctccttgggtactttctctagctcctccattgggagccctgtgatccatccattagctgactgtgagcatccacttctgtgtttgctaggccccggcatagtctcacaagagacagctacatctgggtcctttcgataaaatcttgctagtgtacgcaatggtgtcagcgtttggatgctgattatggggtggatccctggatatggcagtctctacatggtccatcctttcatctcagctccaaac

SEQ ID NO: 1292 - DNA, 1000 bp, mus musculus
ggactcttcttggatatcctgttgttgccttgtatcatggagatcctgaagatttggaattatggggccagcccctacataccttcaagcagctcatcaacggggtagatgttggggtgggccaattcaaagccctggatctgagcctggtctgtccagccagcaggtctcctgctcccatacccaccctcagggctggctcatccatgttcattccattagaaccagctctactatgctgctgagggggaggtgcagggaagtatgcagagtagtacagctgtcagctttcctgctgtcatgcttcccagggccagctctcccagcatgcccaggagatgggtagggacagttctgcacaacttgcaggtatcagcatgtccctgggtggcagcctagacgagcacatctgcctggcctttgatggttacagaccaccccccccacccccccaccccccctccacccccccccccccccgcttcagggccaaggaccctgatgtgacccctggtggcatcacaggccaggactccaccctggtcccagatggcattgctggttcctcacctcaggctgctcctcactaccctctgttgtgtccacatcctttttccacttccatttctccaccacttacttctcttagtgctgcccagggtctccgagtatctggggtcctctcaggagtggtcttagtagtgctatgctccacttgtgctttatggctctgagcaaaggtattctcaggcatggtcttgccgcctccccccacccagggcttcgagatgctatactggtggtcgtcttgtgctagctcccagtctaggcccaatggcacaggactggtggtcatcttgggctcactctggtggtggtcttcttgtctctgggtcactccctctgtatttgcatagcactggactggaggtcatctcaggcttgctgtttttcagggagtgttagcctgctaatcattcagatgttcgtcttaaaatag

SEQ ID NO: 1293 - DNA, 1000 bp, mus musculus
cccttgttcactctaaataaagagaacaagctgtttcactggatatcaatcatttaagagagttgtttcaatgaatactgtctaaaatagctataaagctaaaacccttacagaagactccaggcacttccagccagactcagatcctgctgacccccatctaatgtgcagtggcaggcacctggacacccctataagaaccatatttccccacttttcaaatggttattttatttatttacatttcaaatgttgtccttccaagtcttccctctgcaccctccccattccatcccaccacccctttgcctctaagagggtgcttccttacccacccacatactccagcctcaccactctagcattcccctgctggggcaacaagtctccacaggactccccctcccattgatgccagataaggcaatcctctgctttatatgtagctggagacatggacccatctatgcatactctttggttggtggtttactacctgggagttctggggatccgattagttgatattgttgttcttcccactgggttgcaatccccttcagctccctcaagtcctcccactaaggcttacatttgggtttctgggctcagtctgatgcttgactatgagtatctgcatctgtcttagtcagatgctggtggagtctctcccttccccattttaactggatttttccccctgatatccagtttcttcagttttttattttatatttttggatgatagtctatcagatgtggtgttcataattctgttttccattctgtaggctgctgttttgtccaattgattgtgtcctttgccatacagaagctttttcagtttcatgagatcccatttactaattgttggttttaatgcctgcactattggtgttctgttcagaaagtcatctgctgtgccaatatggtcaaggttattcctcactttctcttttatcaggttgagtgcatttgattttacgtttaagtctttgat

SEQ ID NO: 1294 - DNA, 1000 bp, mus musculus
atctgcgtccaaaggaaggacagaggaaaaccaggttcagacctcagtcagacaggtgaggaatgctccccaaccaagcatgtgagtgctcctcccccaaccacaagacaaatgtgtctgaactgcctttgcaacagactctctgcttgatgctacaggtttgaagatgaaccagaccctatccagggagaagaaaacagaccatgctaataagacctacagagttctgtctggaataagtggagagaatagccccaccctgaaggggactgacctgttgaatttggggctgtgtgccaggaagggatgcagagtctggcatcactgggatggaacactctctggatagcaacaaaaagaaattgctcaaaagaaagcccagtggatccctggagagtccagcacactgtgcaaaaggcttagtgggcggggatcctaaatggaatgcaagcttctggtagcaaaggcaatggctagcagctggagaactccgagcaaacctgcagaagggaggcagaaatagagcagaggacagggttgctgggccctgggcgtggccttccacgatctctgcctcatcttatttggcacactctctacctgcttcaggaaagtacagttcacagacctgggttccccctggtgctggaaaagagctctccagtgctgagcattttaggcaaggctccccaccaagcccctaacctgtataggtgagttcatgtcttcctctaaaagaaccgaggaggggtcacactctttcttccgcttctcccagaaaccttccatctacagctttaggttgccaggggacctgctgaccttggtggtgactacactcttctgcctctgggagatgaactgactcagcaaacccttgaggccaagatgaggagttcaaatgtcagcattgctcggcagagctgagaaacatcaatgttgtctctataaagctggaggtaccagggttagcaaagcaggaacatgtgacagttttcag

SEQ ID NO: 1295 - DNA, 1200 bp, mus musculus
gagatcttccctgggttcattgccaagcactgggaaagggaagaaaacactccagcattgcatgaccctaacaagatgtgtatttttcagtctttactagagtattctgttgttcccatatttatgtgtaatcttttaaacagaaatgtcaccactaccttatatgtaatttccccatgtatttctgtgttataaacatttctgtagattagtaataatggctgttttaagttgttgtctgttaatgtcttggcatgcttttgttttaatgaggttatataagcttgtgccctaaacacctttattaatatgaggtttcctgtgatgatttgaaagaggaaacattctattaatggtggcccgtctcaagtaaaagcatgtgtgtatgcttactttaagttgtgtttggcaagcgttcccttcccaccgaatgaagtacatgcttgtaagcttcgccatctgcctgcggtagatgtgcagggtgcaggatctcgtgtgcttgcgtttgcttctggtagttctccatgcgtatgtgtatgtgtgtatttctcttcggaaggggagggtaatgtcttctgttggaatgcgcactccaccctctctgataaactggtaagattggcatctgtacgcacagcagtcatcttcatagcgcacagcacttagctcccataatgaatgcgcggggtggagtgtatcgcagccattctcacctctcatttgtgtgtttgatgtggcatttatattacgtaggagtaattttttttctgattttttttttcttgtgtcaccagtgcacctattccattcttccatcgctgtgctcctgtgaacatttcctgctatgccaagtttgcagaggccctgatcacctttgtcagtgacaatagtgtcttacacaggctgattagtggagtaatgaccagcaaagaaattatattgggactttgcttgttatcactaggtaattgtttttctcattattagctgttgcatagtactgcagaaggctgttctggttttagccaaaatatgcgtacaattggagataacgtgtaaaatgtttgactacccatggccaaaataactgtttcagattacatataactatatacataaaagtatgtatggcatatatctgaaactctttcttgttgcttcttttttttttctttgattaaagacttgtttccccactgg

SEQ ID NO: 1296 - DNA, 1200 bp, mus musculus; identical to SEQ ID NO: 1295

SEQ ID NO: 1297 - DNA, 1000 bp, mus musculus
tcagtgtcctcctccttcattcttggccctcctgccttgaagcagtttctcgctgaatcaagctcatcgtttcaggtgggctggttggccagccagcttctgcctctcagtggtagggtcacagacacagatagcattttgtgtaggtgctggagactcagactcagttcttcacccttgcaaagcaagcactcttatgtagacccatgccacgagcagggaggttgagtctccgaagttaagaatattccagagacctgcatgggagaagccattttctaggcatctgagctcaagggtagtacaaagaaagcacttttcatttttgtcatcaaaacaagcaaaacaggggctggagagatggctcatcggttaagagcactggctacttgctcttccagaggtcctgaattcaattcctagcaaccacatggtggctcacaaccatctgtaagagatcagatgccctcttctagtgtgtctgaagacaacagtaaccttatataaatgaaataaataaatcttttttaaaaaaccaagcaaaacagaatgacgtttactgttagctcaagtaaatacgagtacagtgcgggaatatgccttggtcatgtgagaagagccaaaagcattccttccaggcctttgcctgtcctacagagactatgtggccatgccaggccattcccttcaggtccttgctttcacgtcatcatagtttatgcattgtgctttaggccaccttgtgggaagaacactctgccctagccatagtttaccgtgaagttcacagccttcttgcacaggctcccacatcttacccacagtccgcagctcccacctgctttttctttaaatctattttgtcaaccttgtcttttaattagaaagattagggtattaacatatatcataattattgataaggttaaatttaagtcttttacttgattattgagctttctttttttttttttctcctccttgctccgttcttattatg

SEQ ID NO: 1298 - DNA, 1400 bp, mus musculus
cttcgcctgggttccaatgccctgtagatgactatataaaagtcaactaagaagttacctattcagtactaattagcattataaagtcagagcctacagctcagggctaatctgctagtagtttactaggacagaaaggacagtcttatccagatatggtttaccataagaaaagttaagaaatcccactgagacaggttttttcattaggccctaaaattcaggcagaactatagagcagaaataaattttatgcctcagcccagccctttcttttttatattaacaacagggaggagatgtagcctcccctccccagcctgaacctgtttgctcaggtttcagtattagagagcattggggcagaacttctcgccctatcgtcctgccactcccactgccgctgcctggcaactagctgttctggacctatcacgtgtgtacctgcaactttacttcaagatgatttggcgagatttggttcccttcccctgcttcataactgagtgtcagaaatagtaaaattgaaacttgaacagagccttgtcttggttctgtctttctctcgtgccgcctagtccccccacccctttctcttccaggtttccaagatgcctttccagactaaaacccagacatgtgagctgctggccggacacaacaccaagtagctttggtttctgttttaagttgttgcacttgccattagccatctggttatctctggtgttggctgttcttgctgtctttgactgttgcttgtccctcctgcaagtctgtgtgttagtactcctgggaaaccagttctctccaggaggaatttgggtatagaaaactgtgacacagtttcagcttgtgggtgcagacagaaaccagaaggatcctgtcctccaccgttccatggttcctgtgtcctgttggctctgggtgggtccttcttggaccaggaatttgagcaaaactgttggtcttacctgtgttcacaggtgtgtcagtattcctgggagaccaggtttctcctggcaggatttgggtatggagtgcggtggcacagggtgagctctggagtcttcttttgtttgggatgggagacttttaatgactgcttctatttcctagggcctatagggttatttaaatactttacctaatcttgatttaactttgataagtgatatctatctagaaagtcatccatttcagttagacttttcaattttatggagtacaggctttgtaggtctggccgaatgattctttgaatttcttcagtgtatgttgttttgtctccctttttatttctgactttgttaatgtggatactgtctctttgcctcttaggtggttaggctaagaatttgtttattttcgttgaatttttcaaagaaccagcttttgtt

SEQ ID NO: 1299 - DNA, 1800 bp, mus musculus
gtagctcacaggaatccataactgtagtatcaggggttctgacaccctaggtgtgcactgcaagcatgtgatgcacagacacatgtgcaagcaaaacactcacaaacatgaaataatatattaaaatatgaaagcattaaccagaccaccaggaagtaggcagagggctatctagggcatggagagtgtccacacatgcaaaggccatgacaaataggagcacaagtagttcagagagccaaaggaaaccttgcaggagcacagcaagcatagaagttatgaagtgagtcaaggctagaaagggggttgtttcagtttgcagggtgtgactttacgaaatcatgcagtatgggtgactttaacagcaagaattgaactctctcatttctggcagctagaactctgagagcaaggtgttcaatggggctagacccctatctccaaacttaggttcttctactgaagttattttatatagtctgagctctttctccataggaagctgttcttggtccttttgtgttagacagttgttctcagcttatatggcatcacatatttttcctattttagttcctactaaatgccttcattactttttacccaatccaaatcaaatgtaaatgcctctgtggtattttgttaggtggggttttttagcggaataaaacctacagcatgtatgtgatttgtttgttagaatggcttacagactgtgtagttcagctaatctactaacagaaattccagggattctttaattgttcattcctcaaggttggatgtcttagctttttttcagccacctccatgaacagccagggccacgcagacaggcagacagacagacaggcctgtgtagccaggcctagagcacaaggagccacctccatgagctgccaaggccacagagacagccagctagccagccagacatttagatcttaaataaagacagttaaagctcctaaaatgctttgctggctgtttgtgtgtgtgtgtgtgtgtgtgtgtgtgtgtgtgtgtgtgtgtctgtctatgtgcagaggcagaggcagaggcatagagatgtctgagttctagcacagcctgggtcacacagtgagctccaggacagacagacagacagacagacagacagcacagtgtagccaggcttggagttcaaggagccacagtcatgtacaaccagggccataaagacagacagccagacagccagacagccagacagccagacagccagtctcttgtagccaggcctggaacataaggagccatctccatgcacagccagggctacacagacagacagatagacactgagatctgaaataaatacatttaaagctcccaagatgcttttctgtctctgtgtttgtatgtgtgtgtgtgtgtgtgtgtgtgtgtgtgtgtgtgtgtgtgtttgtgtgtgtgtgtgtttgtgtctgtgtgcagaggcagaggcagaggcagaggcagaggcagaggcagaggcagaggcagaggcagaggcagaggcagaggcagaggcagaggcagaggcagaggcagaggcagaggcagagaggcagaggcagaggcagaggcagaggcagaggcagaggcagaggcagaggcagaggcagaggcagaggcagaggcagaggcagggcgatttcttagttcagagccagcatggtgcacacagtgagggtcacaggaagtgtttatggggggaggggtttcatggctctagtgtgttgtgtgaaacagctacacgaatcttataaatttataccaattaaagaatttttattt

SEQ ID NO: 1300 - DNA, 1800 bp, mus musculus; identical to SEQ ID NO: 1299

SEQ ID NO: 1301 - DNA, 1000 bp, mus musculus
tgaaaaatctatctgaaatggatgactttctagatagattccacttatcaaagttaaatcaagatcaggtaaagtatttaaataaccctataatccctaaggaaatagaagcagtcattaaaagtctcccatcccaaacaaaagaaggctccagagctcaccctgtgccaccgctctccatacccaaattctgctacgagagagctagtctcccaggagtgctgtcacacctgtgaacactggtaaggaccaccagttttgatcaaattcctggcccaagaaggacccacccagaaccatcaggacagaggaaccaaggaatggtggaggacagggtccttctggtttctgtcagcacccctaatctgaccctgtgccacagttctccatacccaaattcttcctggagagaactggtctcccaggagtactgacacacagacttgcagttgggacaggcaacagtcaaagacagcaagtccagctaacaccacagattaccagatgtctattgggcctccctgctttataagcacagtctcttagtagactcgtgggccttgatcagagaaaaatttatcttgcctcgttcttttcctgctgtctagtctttttcagcccccagcctgcctttcaggagtacctggttcatgtaagccacgggcggcttagtgttacagctataggcaagttcaagaatcttaaaacagaaaccaaacatcagaacccagctctcccaccacagcaagttctagatacaccaacacaacaaaaaagtaagattaggattcaaataggatttagactatggtctactgtgcttcactaagctcaactcttttatttgcattctggggatcaaactcaggacctcacactgcacagcaagctcttgaccagttgagttgttgtcccagcccttgaccctttttgatacagcagttagtctagctgaatactttaatgtttgaaattgggacatttccttcctccgtaaaag

SEQ ID NO: 1302 - DNA, 1000 bp, mus musculus
tcaaattatacatacaaatgtaatatacatacaaatgtaatatgtatacatagagcacaaacctaacaggcacaaacagaggatgcccctgcagtggggctgtaggagacagcgcaacactcagcttggccagtagagggcaaccgtgcctttgctacacttgcagtgtgagtgctcaaccaatttcttaagcttcatcatagtccaggtgtctactgtggttaagttctttctctttcagacatagatgagcttcacagagctatgcatgcgtagatacaaaggccatggtgtggttgttgtgtctgtcccattatctccagagtttctgtccttatcttttcagttgtatttgacaggcactgttcatgtctttatatatctaattactgcctagtggatggattaaactgcatgaaactaagctgagtaccacaaccaggtagcatggaatgtcagacacattggaacttctctgcaatatagagcttatttagtctttttgttatttacaaacaaatgtctaacactagatttatagtgtatttgaatattggatttggttgattctttttaaatatccatttcaagcaggtccatttcctatagtcatcccaaaactatttaaattttctttgcatctaaataaaatcaaagtgatcatctctccagaaaaccaattgtcaagcttacaaagaaattaattctgaattgctatttatcaaattaattacaagggacaaagtcagtgattgacttatcatccacatagaagcatataataagtccattttaagcatttattttgctgtgtttttaaacaataatttgtgtgtttgtgtgttcatgtgtgtgtatgtgtgtttgcaggtgcatgcagaggcctgacagggcccttggctgacagctgatagctgcttgacatagctgctggaaacttccgttcatctacctaaaactgggtcataccttgttttgccagcctatataaaagacatgg

SEQ ID NO: 1303 - DNA, 1000 bp, mus musculus
tcatttttgcatatgcatatacatttatatgagttagatttattttttaaattattttgtttatttatattctaaatgttgacccttcctcaagagctctcctcccagagttctttacccctcctacctccttttcccctctgagagggtgctccctgttaaggacatcccctttctctggggcataaagtctttacagggttaggtgcatcttttcccatggacgccagacaaggcagtcttctgctacatatgtgccaggggtcatgggccagctcctgcatggcctttggttggtgtcttagtctctgatccccatgcataataacaacacaacatctcaaaagagcactgtgctcccaagaagcacctctggttcccttgtgttcgttagatcacgttgtatacaacacatggtaaacataaactaaatttagttaatgcaacaggattgtttcttactcacactaagtaaccattgccatccctcagagatcttttattctgcatccttggggccaaaggctaaaaaagaagcaacgatcaaacactagtaaccactatggtacagacaaacaaaactctgaaggttcttcactgggcagataaattctcctcctcctcttcctcctcttcctcctcctcctcttcttcttcttcattggtcagaattgatcccatagccctgtgcaaagacagtttatatcatatatctggaagagattttaagtttggatatagcactaagggctaacccaaacatccaccagatatccatcgataaccaccttcaagtttaaaagaaaaatatttaatgttttttaatgtataagagacagacagaattcagtactgtgacaagagatcttagccactcagaaagggaaaagtaattattgaactaagaggtaacaaataaaatgcccaccatattctgcagacataaactaaagaatagaaaaatcattaaaattaatatgaaagtatacacgattgtcta

SEQ ID NO: 1304 - DNA, 1200 bp, mus musculus
attttgttcaattccatcatctgtttggttgtgttttcctgtatttcttcaaggacttctacctctttaccagtgttctcctgtatttctttaagtgagttattaaagtccttcttgatgtcctctaccaacatcatgagatatgattttaaaaccaagtcttgcttttcggttgtgtttgggtatccaggactggctgagttgggagtgctgggttatgatgatggcaagtggtgttgttttctgttagtaagattcttatgtttgtctttcaccatctgataatctctggagttagttgttatagttgtttctggttggagcttgtttctcctgtgattctgttagcctctgtcagcagacctgggagtctagatctctcctaagtctcagaggtcagagtactctctgcagtcaagctctcctcttgcagggaaggagcacagatatctagtgttcagacctgcctcctggctgaagatgaaggcctgaaacagggcctgtcccagaaactgtgttgcttctgcctgtcccagaagctatgtcccttctgtagtccgtactttcacctgtgcagactagtctctgagggatcaggacccaagattgatgccctaggtgctctggcagagccctcccgggcgtacatctctcctcttgcagggaagctgccctgatatctggagccccaaacggggtctgtcccagaaggtgtgtagcttctgtagtccgcactctcacctgtgcagactagttctgagggatctgggatccaagatggctcccccaggtgctcagtggcagagccctaccaggcgaggtggacatctcttctctggcagggaaagtgctcggatgtctggatcctgtcccagaagctgtattgcttctgtatttagccctctcacccatgcagactagtctctgagagatctgggacccaagattgaaaatgttcttttgatcagaaggaagtagctttcttttaatacttctcagcaaaactgagatactttcatcaattcacatagtaatataaatcccaaagagtagtgaagttcatacttacccttccagtgttaacaggaaaacagtagttaggggccaaagttgaccatgagtggagggtttatagtcagtgacctctaaggctcttaataactgtgatagtgcttaccatttgtcatggaaaaagcttca

SEQ ID NO: 1305 - DNA, 1000 bp, mus musculus
acaagatccctgttctggagttcagtctgaggtccctgtggacctgctggaattggctctgggtcccttggcctgcacagaggccaaggacggcaggttctagctctttggtaccacagatgttgctcagtgctgtggaagtgataagaactaagagtagagtgtgggcttgtggggttggctctggccctgggccaaagggaaaaaggcagggttcccgcagggaggacagtctttggttttcctggtcggtggcttgagttggctggcagctgtggctgagaatgcagggaggcttcctgagtgagatgagatgggaggctctttcaaggaagacctgctccattgttccttgcagagggtcttgatgagaagagacagtccatggtttcaaggcatttattgtcctggagagaggcagaggaaggcagagctagggagacagtagagagaagtagaggccatgtggagaggagagggggagagtatgcgaagagaggggaagcaagaggacaagtaagagaggcaagagtaagagagtaaaaacaagaatgagagagtaagagagggaggaggtggggaaacagccccttttatagtgggcagggcctacccggctattgccaggtaaccatggggaggagcatccctgactgtggccaggtaactgtgggcatggtgttcagacagaataccaggagcttggggcattgccctatatgactgatgtccacagaaatatggagctggggccttgtgtcaggagtctagtgtctgggagtgtggcaaacttctttccattccttgcagagttatctgttgggtccccggggtggggtttaaacctagctcaacctgaaaacaggctgcctttcacagtcccacaaaattattatctaatatttgaagaagtgggccatcccaagcaaagcctctataaggatggtaaagctgcctaaatataggaactgtagtcagcagaaagtgtctggctgtcaac

SEQ ID NO: 1306 - DNA, 1400 bp, mus musculus
ttatctggatataggtacatgactgtgttcactttaggaaaatgtacaaagtttacattcatgattagtgtgatttttctatatgagtattatgtttctatagaaacttcaaaaagaaagtgaagaatcattgtcacaaatgagtgaaacaagccaaagtagtgtaagtgtttaataaccctagagacttgggatcattaaaccttaaaaatataagagcctcaaagttgattgactcaactgtctcatttcacaggcaaagagaaacaaacttgtatatagaaacaccaagaccacacaaggattcagtagtggaatcaggtctggtgaaaccctcagctcatagtcctctgctcttcatgattctgccttcctaatcatatgatgaaggggagatgtattttcaacatgagccatgaatctcagcatgtcatggcatacacactttcaaataatgattaatacaatatctgcctcacaaatggtttcagcagctgggatgaggcagacatggctacactaatgtgctgtccatgacgcatgggttgaaagagtggggtggagtcagttcttgagtgaaggaacaaaaggagagtttatctgcctggaatgcaatggggatgaagattccaagaaggtcatccagggagacactgtgcctgaatcccagagaagtctgggtgcatttactgacatcccaaacatctgtgcttttgcaagggagataaaagggaatctgcttctctgcctcgaggcatgatgtatgggcttctgagacactgggtgtggactgctcttgaaggcacaatgcagaggttgatagatgaaggctaagggaactcaccaggccacacattaataaaaagtgatcaacctgccctggatggcggagtagaatgctaatgccattctccatgcaagtgttgacaacagagaatgtctggagggtgcaaccctcctctgtctatctttgccttgattctacatgtccaaattagattctctattcttctgccaatggcctaagtaagccaaggctggcaaggcatattctatcctaaaaccacccatggttttcacctgcctctagccattcttgactaagagtgagaaactgtgttctcatcataacttaaacccataagtaccccctcaccctccactgctgaaagaagaacatctagctattttaacctggcctttgagtctttcatcaaaaactccaatctcttctatatggtgctcctgtaggtaacttccattctggcctcatgtctatccctttgcctgaatttcctcttttattggaatatttccagaataagctcaatgccttcataaaggcatcctcaactatcagatactcaaactaaagtgatatattatctattctatctcta

SEQ ID NO: 1307 - DNA, 1000 bp, mus musculus
cactttacaggcattctaatgcacccaagatcacaggatcagagatgaggaggatacaacatctgtcccaacaccacctcaagtaactgggaccaactggatctagggaggcaggaaacccgccagaccagtggcatggtcttgaggtctgggccagaggcctgaacagaccttggcctgaactctgcagccagtcccgcaatgcccataggaagctccacttccaggtgttctaacacaactacgatcccagaaggatcccaggggctagatcacatcaggatctcagggtcccagaggctgctggactctcagtacctctgacacactcaggatctcggaatcacatgattccagaaccacaggatcacagagacatctggactctgaggagttctgacacaacaaagctcacaggaaggacagcctccagtcagatatagtgagggcaggtagcactagcgataaccagatggtggagaggcaagcataagaacataagaaacagaaaacaagattaactttgcatcgtcagaatccaattctgatcaccatcacacctgagaatcaagttttggagctaaaaatcaattttcatgatggtgatagaggattttaaaaaggacataaataggaggctgcaccatcttcagctccagacaaccagccaccttcctggccaaagcaacacagctcatgggaaagatcctgttttgggccttcatcttcagccaggaggaggtccaaacaccagataactgtgcaccttccctgaaagaggagagcttgcctgcagagactgctctgaccactgaaactcagaggagagagctagtctcccacgtctgctgatagagggtaacaaaatcaacagaggaacaatctctaaacaaagacaactataacaactaactccagagattaccagatggcgaaaggtaaacataagaatcctactaacagaaaccaggaccactcaccatcatcagaacccagaacg

SEQ ID NO: 1308 - DNA, 1000 bp, mus musculus
aaatggatcgggcccatcagtaccattataaagcccctaacaaggaaatactggcaagggggatgtaaataagctagtatttaacaaaactgagcactgatattttagactgcctttgcagagacaatgaaatcaccaatcaaaggctcagcgaataccatttgacctctgaaaggtgccacatgaggtccactaattaaagacgaggggatttctaggaagccattgatgacatggtttgctgacagaataccctttctatgctgctaaatgagcaagtcctgggttagcagtcatcacccgtttgcaatgaatttttttgcttctttcccaccctgcacccttaggatatcataatgggcaatgtgttttatttttctaggtttagcaatcacacgagataatgatgctgcaaagtttccattgtcatacctttgggactcttggcagctcaatatgttcaacagttatatttgggaggtctcaggctcatcaagaaattccaacctcaaacaaaccagcaacacttttctgtaatttgttgtttaatccttgatgcaaactttttaagcatatgaaacacactgagaattctcccagtttactaatcagccctgttacaagtgccacataatgcagcacttaagagctttaacaacaaaccatcttcttgctgccgccaatcacacacatgctttagttcattttaccttttccatatggtggcgggtccttgttagtgtccttatttcaaagctaatgaaatgctctgagtaaataaaagttttcttaatggagaatacatgggcccacatctgaatctgtcatagatagatttcttccaaaaatttgttttaagttttccatatatatatttgtttatcaatgtgaatatgagccatatgtgtgtatttgccagagaaggctaaaataaagtgcattaaccctgagatttggaattatagatatttgtgggtcatccagcttgggtgctaggaac

SEQ ID NO: 1309 - DNA, 1600 bp, mus musculus
gagttctctggtagaatttttgaagtcctttatgtatactatcatatcattcacaaatactgatacattgacttcttcctttcaaatttacatctttttgacaaccttttttgtgtaattgttctagctagatcgtgaatactattttgaataaatagggagagagttggcagccttgtcttgtccctgattttaatgggattgcgtcaagtttctctccatttcatttgatgttagctgttggtttcagtatattgcttttcttatgtttagggaagttccttaaattcctgttctttctaagatccttaacaggaggggatggtatattttgacaaaagctttctcagcatctagtgaaatgatcatgtggattttttatttgaatttgtttatatagttgattacattgagggatttctgtaaattgacccaagcctggcatcactggggtaaagcctccatgatctttgtgaatgatgcttttgatgggcacttgaattccttttgtaagtattttattgagtatttttgcattgatattcataagtgaaattcatctaaaattctctttgttgggtgtttatgtggtttcggtatcagcataactgtggcttcaaagaatgaattagttagttgtcctgcgctatcttctcgccagcaagaactcacacggaacaccaggatccttctgcagcaaagcttttattgcatcttgaagaggaagaccccaagccccagaaaggcgctgcttatatacaccctagcgtggagtgtccacgcctgactggtcgcttacccatgatctcattgacatgccccggggtgggctatgacttcgctcaaacacactcttgcacatgagcacacagcttgtagagctggcgcagcggaagctggcgccatcttatcgcggctctccacagttagtattccttctgtttctattttgtggaatagtttgagaagtaatggtattagctcttttttgaaattctgatagaattctccacttctggccctgtggtacttttggtagagagacttttagtgactgcttctttttctttaggagtaacgtgactctttagatagttcatctggtcctgatttaattttagtatttggtatctgtctagaaaatcatccatttcatctagatttttctgttttgtaggatataggtttgtgtagtagtatgtgatcattttgtgaatttcctaagattctggtgttatgtctcttcatttctgattttgttaaaaaggaaactgtctctgttccctctagttagcttgactaagggtatatctatcttgtttatctttttcaaagagccaacttttagtcgtgttgattctttgtgtcctgctatttgttcctaattgcttgatttcaggttttagtttatttccttctttctacttctctttggtgtgtttgcacctttttgttctagaactttcagaagtcctgttaagttgctagagtaggacctatccagtttctttatgaaggtactcactgctaggaattttcttcttagcaatgctttcattgtatcccatacgtttggatatgctgttccttcattttcatt

SEQ ID NO: 1310 - DNA, 1000 bp, mus musculus
ttaattgaatattttatttatttacatttcaaatgttagagcctttccagacttccctccctcaagaaacccccatcccacccccccccccgcttctatatgggtgtgcccccaccctcccacacactcctgcctccccaacttcgaattctcctgccctggggcattgagccttcatggaatcaagggcctcttctcccattgatgcccaagaaggtcattctctgctacatatactgctgtacctatgtgtactcctggtttgtgatttagaccctgagagagctctggttggttgatattgttgtttttcctatagggttgcaaaccccttcagcctcttcagtcctttctctaactccttcactggggactgcatgatcagttcaatggctggctgcaagcatctgcctctgtatatatcaggctctggcagagtctctcaggagacagctataacaggctcctgtcagcatgaatttcttgtcatccacaattgtgtctgcatttagtgactgtatatgggatggatccccaggtcgtgcagtcactgaatggccttttcttcactctctgctgcacactttgtctccatatctgctgatatggaccacttctaaatacttctgcatcatcacagataaatatgtgattccaaattcaatgttaatccaatgcattaattaatggtattaatccaatacattaatagctgaaaaagacatttgaataacaaaaacaagaataacatatgatcctttgtactgaatttttgttctatttctaccaggtgttatttgaaattataaataaagaaactaaacagatttaaatggtatgaattagtcagaaatttacatgacagaagaagcacttaaaaataacctagaagacaaaaacattggatacaaatatacctgaagttaggcagaaaggcacaacttatttaatttttgatgaagtctaagtcatgcagacattgctgatcttgaatttcacc

SEQ ID NO: 1311 - DNA, 1200 bp, mus musculus
gagatgttgggagccgcccccacattcgccgttacaagatggcgctgacatcctgtgttctaagtggtaaacaaataatctgcgcatgtgccaagggtatcttatgactacttgtgctctgccttccccgtgacgtcaactcggccgatgggctgcagccaatcaaggagtgacacgtccgaggcgaaggagaatgctccttaagagggacggggttttcgtttctctctctctcttgctttttcgctctcttgcttttctctctctcttgcttttctctctctcttgcttcttgctctcttttcctgaagatgtaagaataaagctttgccgcagaagattctggtctgtggtgttcttcctggccggtcgtgagaacgcgtcgaataacaggggataacatttgaaatgtaaacaaatacaataaccagttaaaaattaattaagcttattggcttaaattggctttattgacttaaaaagcaggaaaaaaaggaagcttattggcacaccctctgaacatctaggtaccacatgaacatgttgaaatctgttttgagcctatttgactgtggtcacatctctcttcctattgtcttggtctgagatgttctggatgcctcatctacatgtggaagggcctgaggtattttcctttcctaactgatggccactaatctctctggggctgggggtcagtggctatgtgacaggggcctggtgtcagggcttcaagtttttagctcgaccttaacaggcttccacatgcaggcttccaccgcctgaatggccccactcctaccttttcaattctgagattctcagggtctaagctaattcaaacttatccgttctgtctagagtcaaggtccacttgccaaacagaacttgtgagaaaggtggattggaggtagggagcagatattgggatgtaaaagtgaatgaatgaatgaatgaatcaatcaatcaatcaatcagtcaatcaatgggagtaaaataaaatatctcttgccctttagccctgtgttcacaattctcactatgaacaattcaccaggatcgttcaggacaatcctttattcctattaattaccagattcagggctgttgaccagtgactcacttcggtgagacatatttaacccactcactgctcatttgctacatacttttcaaactttgtggaagttacgaaaatga

SEQ ID NO: 1312 - DNA, 1000 bp, mus musculus
tttgcaagtccaatgggcctctctttccagtgatggccaactaggccatcttttgatacatatgcagctagagtcaagagctccagggtactggttagttcatattgttgttccacctatagggttacagatacctttagctccttgggcactttctctagctcctctattgggggtcctgtgatccatccaatagctgactgtgagcatccacttatgtgtttgctaggccccggcgtgttctcacaagagacagctatatcagggtcctttcagcaaaatcttgctagtgtatgcaatgctgtcagcgtttggaggctgattatgagatggatccttggatatggcagtctctagatggtccatccttttgtcacagctccaaactttttctctgtaattctttccatgtgtgttttgtttccaattctaagaaaggggaaaagtgtccacactttggtcttcattcttcttgagtttcatgtgttttgcaaattgtaacttatatcttgggtattctaagtttaaaacaatcatccatcctgaccaattaggttttattccagggatgcagggatggtttaatatacggaaatccatcaacgtaatccattatataaacaaactcaaagacaaaaatcacatgatcatctcctcagatgcagagaaagcatttgacaaaatctaacacccattcatgaaaaaagtcttggaaagagcaggaattcaaggctcatacctaaacatgataaaaagcaatctacagcaaaccagtagccaacatcaaagtaattggtgagaagctggaagcaatcccactaaaatcagggactaaataaggctgtccactttctccctacctagtcaacattgtacttgaagtcctagccagagcaattggacaagaaaaggagatcaagtggatacaaattggaaaagaagaagtcaaaatatcactttttgcagatgatatgatattatatataagtgaccctaaaaa

SEQ ID NO: 1313 - DNA, 1200 bp, mus musculus
aagaagaagaagaagaagaagaagaaggaaagaaaggaaatcacacagacatatattgtgcttcattttagtcggcaaatcttcaatttctgttgagttatgtaagagaaagcattgtacttgtgttcaaagggcaagcttgaggaaaagcttaggacactgcctgcattctaagtggccccagtgatggagggaatgggccctgttccaaattgattagttctgccaccttctcattattgttctgcctgaagtttggcacgcaagcaaggtcattccatgcaccggtctgcgtgacttcaaggattctgctagagactttcttcccatccacctcctctccccccaaccccaccacagcatgccacctgcactagagaaaattaaaaagcagcccatacattttacatgagctcccaggaccagtgagaaattaatattatgttgtcttttgataaagatacagctgttttataagatgctcatccaattcagtgatagaaaaccttgtttaaattcctccgtggagcctgaacttcacgactggaagaggaaatgcatacagatacagcagaatatgtttgagtaagttttcaactttcagttcaccttacaacaagatttcagggttacatatttgattgccaccctccccaaactctttggtaccttattagctctgggtttccatattttctttatagttgctgccttagtgttttctgttttatatcctcacgctcagatatttatgattctcaaggttgacttcaacatgtcagtttccaggaacctatctgattctctcaaaattaggtgtttttttttccatttttattaaatattttcttcatttacatttcaaatgctatcctgaaagtcccctataccctccctccccaacctacccactcctgtttcctggctctggcattcccctgtactggggcatatgatattcgcaagaccaagggcctctcctcccattgatggctgactaggccatcctctgctacatatgcaactagagacacagttctgtggggtactggttaattcatattgttgatcctcctatagggttgccgacccctttagctccttgggtacgttttctagctccttctttaggggtcttgtgtttcatccaatagatgaatgttcttgactattgacttttctggtcaggagatgagaata

SEQ ID NO: 1314 - DNA, 1000 bp, mus musculus
tacttacacataaatttcttactcaatgatatcagatcatcaggtgatagacacacagggctgtttcaaacagaactcagcatagcattttctatgaattgtagattgtagaaccaagcattttcttccccccacttaagtctgaagtagtaagctttgtctaagccaatcatttcaactctctatgccccaaccataaagtggagactggtgagattgttcccagtgatcacctctggttcagacactgcaatcccatcctgagtgctgttgtgcagtgatacaatatggaaattgccaatgcgagcaagtgaaacctccacatgaaccgtgcagatagctggctattacacaatgggaaatgtcgagaaaataaccttatggagtggaaagtattgaattgtctgattatgacttactctccaatataaagatatagccatgcttggctgctcaagggtgaaaatgtggtaatgtgttaaaatgctaatgaaattgaaatcctataatagatgtttagaacagtttgggttaccaagacatgggaagttagagagcatagctcataaatcctgttgataaggccaaactcttcagaacatttaaggccctttataggttgatcctaacttcttttttttttttcaagctcatctctttttaccctgtgttcaatccataatgagccatttgacattctccatgcacagcaggttctccggtgtcacatacacagaaagtcattttatttccagcctcttatttcacactgctccatcccattgccatcgtctattctagatcaacatcactcacccacagagctccttataccctttcttgcctggtcatccagtctctggtattttctgattctaatccaatgtcctcatcatcaccaaagtatatttcttaatcatgtatccaatcaatcaggtctgtctggcttaagttcatttgataattattctattgcctctaaatataaaaaccaaaattt

SEQ ID NO: 1315 - DNA, 1000 bp, mus musculus
gttgggaggcttgaatttcactgagaattggaaatagattagacatgggatgggtggaaggatgtgggttaaaatgagggtcctgcttctgcttggggttcaagccactgggcgaggcgggccaccagaaagtttgactgtgcccacccccacgttactgtctgggtgggtgtcaggctgtgagaagccgcaggaccccattctgggggtggggagccacagtctgaggtcctcgtggaactgctggagtgggactcagggtctctgggcctgcaaagaggccagggatggcaggttttagctcttgggcaccgcacactttgctggatgtcgtggaatccacggaacggagcagggccaaagtccaaagggaacagggcagggagttgtgtgctccagttcggtccctcaaggaggagagtccttgtcctgctggacagctagcttggtttgttggaagctgtttctggtagcacaggaaggcctcctaactggaggttagatgcaccgctcattgagggaaagcctgctccttgctccagcaatgaggatcctgatgagaagaggcagttcatggttttaaggaatttactgaagaaaggcagagagagggagaagagtagaaaagtagaggccggccatggccatgtggagaaaagggagaagggaagacagccaaacattcagtggattttcaggaatcctgtggaagagttggaggaaaaaatggaaggagcaagaggggtcaagggcatagaaagaataactacagaacgaactaacttgggctcaccaaggttctagcaactgaactgccaatcagagagcatgcttgggatggaccttggccctctggcatatgtaacagttgtgtagttggatcttcatgtgggactcccaaagcaggagcagggactgtatctgattctgttggaaacatttcccctaactgggttgccatgtcttgcttcaagaggagaagatgtgtcttactgcaact

SEQ ID NO: 1316 - DNA, 1200 bp, mus musculus
ctgcatggccatcatataacaccttgtcacaagccccaaattgaaaaaaaaatcaatcatgagccttttggctttataagttgacaatctcaggtactgattatgtagccacagaatcctggttgacatagtcaatgactagtgaaaagttacctagcaactaacaagtacttggaagagcttgtttgaaataaatgagatggatgaagatgttaagtgggcaggggtggggtggtgggatgtgcacagacagcctgatctccagttgagcaaaggtctggaaccctggtgacgtgaagggtgatgatttccacctacatgggacagaaggtattcgatcatgtctcctgggcccctggctcctgtggaagttaccacccccacagccccccaacaggagaggtgtgtggctatcagtcatgcttgagcagcaccaagccttcccacatgcaaataaggtttcccccaaactctcagtccaagccaaggagaggtacctgctgtcgaaccctgaatcaccccccaaaatatatataaatcctatccaaggaattaaaggtgtgggagaactactccatcgtatgagccttttgttctaagagctgtaaaacttgggaagagatctgctctcccaaagcactggctgaggctccactgcactacttactgactagtcagcctctcattgacccagcccaaccagacttagttcagagcagctcgaagttactgagtgatctggaagtcatggccgagatggaggctccctgtccccacacgcttcctttcgcctgaaccctggcaccaggcctggccagagatctccgtggaaagcctctggtactgaggcccacaggcaggcacaattatttgtccatattgcacaacagacaagatgagaggaagacagttgcagaaagaagctcagaaaaggaacaaaatctgccttctgaaaggaaagcatctctattgagaaaatgccttcataagatgcactgtagataccacctatgggatattatcctagttggtggttgatgtgggatgagacaactcattgtagatgatggacctcctgggtaggtagccttaggagccataagaaagcccaacgaacaagctatgggagaaagccagcaagcggcactattatatgacctctgtatcagcacctgcttcccagctcctgttcagcttgtg

SEQ ID NO: 1317 - DNA, 1200 bp, mus musculus
actgataagtggatattacccaaaaagttcaaaatacccacaatacaactcacaaaccatattaaacttaaccagaaggaaagcccgagtatgaaaacttcaaccccacttagaagagataacaaaataatcatgggaggcagagggagggagggaactggatgggagagggaaggtatagagggaaagggggacaggatcaggtatgggggagacaggagagaagtccacagagccaatagaatgaatagaagtatacaacagtgtggggtggggattggggaaacctctagaaagtcccagacatcagggatgtgagaggcttctaggacccatggggatgaccttagccaaaatgaccaactgtgtagagatgtaacataaaaagactaccttcaataggtagacatggcccccatttgaggcatggggccacctgaccatcttcaaaattgttaacccagaatgttcctgtctaaaagaaatgcagggacaaaaatgaagcaaagactcaagaacagtctatccagagactggaccaacttggaattcttcccatgcacaggcagcaaactctgacactattactgatgccatgttgttcttgcagacaggagactagagtggttgtcctctgagatgctctactagcagtagactgagacaattgcagatacctacagaaaaccattgaattaaggtcagggactcctatggaagaggagttaaaagaaggactgaaggagctgaaggggattgcaatcccataggaagaacaacagcatcaactaacccagatccctcagagctcccagagttaagtcactaaccaaagagcatgaagacatgggctggtccatgtcttcaggcacatatgtaacagaggactgccttgtctggcctcagtgtgaaaaaatgcatttagtcctgtagaaacttgatgccagagcaaaaggggatgatagctgagtgtggttggagtgggtgggtggaagggggaagtaaaggggtggaggaattgagtgaagaacttgtaaaggggtgaccaagaagagggtaacatttggaacataaataaataaaataataaaaaataaagaaagtaaagacctgtaatagcttatcttttaaagactgccaataagtaataactgtggccccttttaaaaattacataataaatttctgacaaatcttaat

SEQ ID NO: 1318 - DNA, 1600 bp, mus musculus
ctcctgtgatatgggcctgtttaaatagtttacctgctcttgatttaactttggtatgtggcatctgtctagaaaaccatccatttcatttagatttttccaattttattgagtataggctttaatagtaagatatgattaattttttttgaatttcctctgtttctgttgttatgtcttacttttcacttctgattttgttaatttggatactgcatctaggccctttagttagtttgggtagaggtttatctagcttattgattctctcaaagaaccagcttttggtattactgattctttgtattctctttgattctatttggttgattttggcccaaaatttgactatttcatgtcttctactcctcttgggtgagtttgcttcttttttttcttgatctctcaggtgtgctgttaagttgctagtgtaagatctcttcagtttctttaccagggcacttagtgctatgaattttccttttagcactgctttcactgtatcccataagtttgggtatgctgtgtcaacattttcattaaattccaggaagactttattttgttcctgaccatgatatcattgagtaaagagttgttcagtttccacgtgtatatgggctttctgttgtttctgctgttattgaagaccagacttaggccatggtatgtcgactctctgtcatcaggtccaggcaagaagagagaacctggtccagccgagtgtctctgaagctgagcgaatggtgagtgtcatggcccaaaacaaacacacccaggcctggagtctgtcaaagcaggaactccactttatggcatcagctcctcgtttatgtaagttcagaacacagggaggggaatttttggtgcagtaagatgatttaggaggcatgggagggtgacagatggtatggagtgactgacagggtcaatggcaaagctctagatcagcagcaacatcagaggcagggtcaaacaggtcttgctgaatcacccagatacggacatgactaagacaaaactggagccaggatcaggtttgttctcaaggcccaaactaaggccaaaatagggcaaaataatggtgatctgatagggtgcatggtattatttcaatttacttgtattacttgagggttgttttgtgaccagttatatggttgattttggagaaggtaccatgaggtgctgaggtgtattatttagttttagggtaaaacgttctatagatatctgttaaatccatttagttcataacctctcttagttttgctgtgtctctgtttagcttctgttcctatgaccattcgattggtgagagtggggtgttgaaatctcccactattactctgtggggttcaatgtgtgttttgacctttagtaaaatttcttttatgaatatgggtgctcttacctttcaggcatagatattgagaattgtgactttctcttgatggattttccccttgatgtatatgaagtatcctttctcatcatgcttgatcatttttagttgaaaatctcctttattgggtattagaatggcaactccagcttgtttccttggaccacttgcttgaaagacatttttctatccttt

SEQ ID NO: 1319 - DNA, 1400 bp, mus musculus
gtttattactgaacatacaattatttctaagttgaaagtcaaaacaaaactacatcaggtctaaatactctctgttattgcatttgtaattttttattagatattttctttatttatatttcaaatgttatccctttcctaatttcctctccaaaaatctcctatcccctcctccctcccctgatcccaacccactcactcccacttcctggccctggcatttccccctatactggggcatagaaccttcaccaaaacaagagcctctcctcccactgttgaccaactaggccatcctctgccacatatgcagctagagacccaagtcccaccatgtgttttctttgattggtggtttagtcccaggaagctctgaggggtattggttagttcatattgttgttcctcctatagtgctgcaaaccccttcatctccttgggtactttctctagatacttcattggggaccctgtgctccatccaatagatgactgtgagcatccagagactgccccacctagggatccatcccataaacaagcaccaaacccagacatcattgcagatgccaacaagagcttgctgacaggaccctgatatatctgtctcctgagaggctctgccagtgcctggcaaatacaaaagtgtttttaatttttaacatggaaaatattgttcttttaatctctaactctctttcctttggagacttcattttactatttgcaaactaaattatttctttctacatttatttataacctgtttctttttcttttactgttttcaagttttacattaccactatagaagtttgacatttttctgtcccactgtgcctccaggaaaattttcttcctgtccttctatgtgtctgcaggctcctcaaactagcttgcttctatgatggtcagcttggcccgtttgctggctccaactagctgcctgtccttgacagtactgttgaggcactgttgggtcttccatgagaggtgagcctcataccctcagcaaccagcagtgtgctgtgcctacctgccccatctctggaacgttgcttgcctgtgggacctgcactgaggctctgtgtcatcctacctgctacccatagtcctttgtttgctccttttaagagggatttagactacttccaaactgtaaaactttgtctgtctctggaaagtgcttgttctctgcctttccacacagcactttttctcgagctctaagcttggattttactagtccttttattggatgccatttgtaactgcttaggcctgttctatgcctgacccactcccagataatgacatggagactatatctattaataaatgctattggccttatagctatgcattgtttcccactagctataactcaattatttcattta

SEQ ID NO: 1320 - DNA, 1000 bp, mus musculus
tctctgtgtagtcctggctgtcctggaactcactttgtagaccaggctgcccttgaactcagaaatccgcctgcctctgcctcctgagtgctgggattaaaggcgtgtggcaccacaaccggctgcctgaatgtttcttagttctgttgcttacaatatttctttttttttctttttttttccattttttattaggtatttagctcatttacatttccaatgctataccaaaagtcccccatacccgcccacccccactcccctaaccacccactccccctttttggccctggcgttcccctgtactggggcatacaaagtttgcgtgtctaatgggcctctctttccagtgatggtcgactaggccatcttttgatacatatgcagctagagtcaagagctccagcgtactggttagttcataatgttgttccacctatagggttgcagatccctttagctccttgggttctttctctagctcctccattgggagcactgtgatccatccattagctgactgtgagcatccacttctgtgtctgctaggccccggcatagtctcacaagagatagctacatctgggtcctttcgataaaatcttgctagggtatgcaatggtgtcagcgtttggatgctgattatggggtggatccctggatatggcagtctctacatggtccatcctttcatctcagctccaaactttgtctctgtaactccttccatgggtgttttgttcccaattctaaagagggcatagtgtccacacttcagtcttcattcttcttgagtttcatgtgtttagcaaattgtaccttatatcttgggaatcctaggtttggggctaatatccacttatcagtgagtacatattgtgtgagttcctttgtgaatgtgttacctcactgaggatgatgccctcaaggtccatccatttggctaggaatttcataaattcattctttttaatagctgagtagtactccattgtgtaga

SEQ ID NO: 1321 - DNA, 1200 bp, mus musculus
gatgaaaccaatacagaagatctagacaaatccacagaattcttgcccaagtaatcaaaccaaagaaattgcagtaaattaatagaatcagaattgaaccaggaaacattacaacacaaaagaaattcaactgaagggatttgcaaccacataggaagaacaacaatatcaaccaaccagacaccctcaggctccgaggaactaccagccaaagagtacacatagacgaagccatggctccagctatatatgtaacagagggtggccttgttgggcatcaatgggaggagaggcccttggtcctgtgaaggcttgatgccccattgtaggagaatgccagggtgggggagtgagtgggtaggagagtacactcatagaagcagggggagaatggataggattgggggtttgtgaaggggaaaccaggaaaggggataacatttgaaatgtaaataaataaagtatccaataaaaaataaaaatataaaagaaattgagaaccatggtatatactgtgacctgatgccatgtttgtgcagctttctaaggccatgttaatgtctgtgttccaactgttacaactgagagccaagttggtgcccctggtccttaatcctgccagaggatgtgttaatgtctgtggtccatgctgttgctactaaggaccatgttgatatttgtgatcagggctctgcaggagaccatgttgaggctcaagttccatgatgccacaggagaacatttggaaacctgtggtctatgcgactgttagctgttatggacaaggaagtttcttttgcattgatattgatgactatagcctcataattgaaaatgagagaaattgaagccagtgggacaatagtccctcgaaaacaaattaggtaaaaggccatggaagaaagtccattatgatacatatgctgaaatgtaagtcttcacagtagatggcttctaggagcaaatggaggtggactcaattttctttaagggactggccactggtagattaactatgttccagtgagtaaatgtatggacaacacaaactggacttgctgcattttcttacctattgatttgtattgggagagcacaaggacaggaggctacatctgggtgtaataggaagcaagtgtgatctgggtacattgtaggaaactgtcaaataatcaaaaaaatatgatttggtttaaaagc

SEQ ID NO: 1322 - DNA, 1000 bp, mus musculus
tctgatgtatgtttgagtaccaaactagatctgaatccctttagcgaaagaattaggaaaaagttgggtggttttttgttgttgttgttggtgttgttgtcttaaacctgtttacctaatggtcagtgccaggccctgaggatatatttagtatgttattgtaaaacccaatgatcaccctttccagagagttttgactttccctcccaccaatattggaacttgacagacagagaaggaaggtaatctgtctcagagaaggcaattctgtttcctccatactctcaagctcaaaagatgcagagagtttccccagtactgcagagggcaacccccagaccaacctcactgtacctgctgctgcctggccctattcccacagccccttaaaacaggctggttccccagtaccagtcttgtggggggttttgtttgtttgttttgttttgttttttaaaagatttatttattattacatgtaagtacattgtagttgtcttcagacactccagaagagggcatcagatctcatctcattacgggtggttgtgagccaccatgtggttgctgggatttgaactcaggacttttgggagagcagccagtgctctttaaccactgagccatctctccaggccccccactcttgtttttagttattggcttttctgcttttttcatggtatctaactttagaggaaccaagaagaaaacttcctaaagaaacatttacttatgcattcaaagctcccagatgtcaaggcccattaattctgataccataaagattgccttctctcataaacagacctcatgctaatgctgaaatacgttttaaaataataatctccatatcaggattttctgttcttttctcagccctgtgtatactcttgacatatggctgaaggagaagtgcaaaccaacaaaccacttggccttgaggaattctccaaataagtactaatgctgttgttacatagaagatgatttgtgtttg

SEQ ID NO: 1323 - DNA, 1000 bp, mus musculus; identical to SEQ ID NO: 1322

SEQ ID NO: 1324 - DNA, 1000 bp, mus musculus
cagaagaggacagggattaaaggggaagaccaaaaatggcaaataacctggatcttttggggctcccagagactgagcccccaaccagagagcatgcatgtgttgttcctaggccccctgcacatatgcagcaaatgtgcagcttggacctcatacaggtcccacaacaactggagtagaggctgaaactgaatcctgttgcctgcctgtctgtgaattcccttcccctaactgggctgtcttgtttggtctcagtttgaaaagatgaaaatcttggattggcttgatgtgatggggtttgaagacactgggggggggtagtgtgtggtgtgatacccaaaatggagatactccttcttaaaggaggatagagaggaatagaggatggatctgcatgaggagattactggtagaatgggtgtgtgtgtgtgctgatttggggatgtaaaaaagaagacagatacaaaaggatgttagatcatccagttttcagtgcttagaatgacagctgaatacagatgaagttaagttttacttctagcaaattgaatgctttaaagcctcagttttcatttcctttgaatacattcactatttcttagagtatgcaacttaatagtgaacatattttttactcatgaactttttactgaacttagactacatagtacagaatactccaaataagattatacatatgagaaatagaattccaagaaatgtggagcacacatctctgcttataaaaagaaacatttcttttacatgttagagattataatatacttactccacttttcctcctttttctccccataaaattcttccaaatcttccttttttttttacttttttcattcatagtacctttcatcattatttgtttttgcgtgcgcatgcgtgtgcgcgcgcgcatgcacacacacacacacacacacacacacacacacacacacacacacacacacattatattcagagctaatatttgatattgatt

SEQ ID NO: 1325 - DNA, 1200 bp, mus musculus
taattcctgacctcttttctaggttttccatttccagagttgcctccatgtgtgtgtgtgtgtgtgtgtgtgtgtgtgtgtaattgcttctacttccacttttaggtcttggactgcattattcatttccttcacctgtttggttgtgctttttatattattttcagggatttatttgtttcccctttaagggcttctacctgtttacttgtgttttcctgtatttctttcattgagttatttatattcttcttaaagggttctattatcttcatgagataggattttaggtcagcttcctgattttcatgtgtgttgtattcagggcttgctgtggttagagaactgggttctgatgatggccatgtatactggcttatgttgcttatggtcttgtgcttgcctcttgcatctggttattcctggtgtttgctggtctgggtgactatgtctggagtctgcctgatttgtccctgggttgcttcaggtctcccagtaggcctgtggccctggctgtagcaggacacctgtggggtcttctaacttggggcttttcagagtggcagagaatctgttcctttattgccttggctgcagtagatcttctgggaggtcttcagagtgttgagtctccagaggagtagtgaagctattgtcctgtgtgaagatgttctccagaggctctaacagacatggtttctctttccttgcatgcagcagaactccagggatgcttccagtctgttggttcattttccctttatgccacagaacccctaggaaatcttcagactgtggtgtctcttgcctagttccctgtgtacagaggagctactgggatgccttcaagctgtggtgtcttccagggagcagacaagttggtgatcagttgcttggttgccctgtgtgcagaagatctcctgggatacctcaagctgggttgccagatgcccaactgctctgagtgcaatgaattctgtgggatggctcaggatatggtgtcttcaggggagcaaaccagctagcagtctgccccagcagaaaggactgggcagaagcaagtcaaggttttaatcaacacctatctctgaatcaggatctgatataactttgttcacagctaagaccaatgtttctaaaaaatccgtgagacttctacagagccttgtataatttctgtaaatgaattggcccatttct

SEQ ID NO: 1326 - DNA, 1800 bp, mus musculus
aagaagggaaaaaaagacattttgtagatggaattaagtttgatgaccttgtttgaaataaggtcattattactaattatcaagatggatctatctaatcattaagcttcttaaagtagagtgtattccctctgctattatcagaaagaaatgtgatgaaggacaagtcaaagagatgtgatatgatattgctgggtttcaagatgaaggagaggggcattatcaaaagcatgtgggaaatttttagaatgtggaaatggcaaagggattctattctagcctcactagtgtgggatatacccttgccaacactgcaaatttaatccatggatatttgtttcaattacgacctatgaaactgagaggcaggtaattaattttgttaaaattcctggtgtttatagaaatttgtagaaaactaacttatgtaatgaactacccaataggacctgtgatcttataaaaaagctggaagctattgaccaacaatattctgtctttgactttctaaagccctgccagtgtcttccatgaactaaacacattatatgagagcttaaggaaaggctagacagcgcaatgtaattttcagatattaattttgaaagtttagaatccagaagaaatgaatggagaatggatttaaggtggtaaatagaaatgttctacctctgtcaggtctgagccagtgccctgagcagactttgagtgctagctcctcacccagtcctacaacatccagaaaaagctcaactcccaggttctctagtatacctaagatcacaggtaaggagcccacaacatctcccccaacactggaagaaactggaccagtgggagccaggaacacaggaaccccagcccaaccagtgtcacaggttccttctggtttgagcctgtaccctgagcagatgttgagtgctagctttacacccaatcccacaacaactagaagaaacttgactctcaggtgctctaacacagctaggatcgtaggatctcaggagcttggtcacaccaggatttcaggataccagaggcaacttgacacccaggagttctgacacatgcagaatctcaggatcacaggatcacagagacaactggaatgtgaggagttctggtacaaccaggatcacagaggggacatgtttcaatcagagaaagggagggcagacagcactagagaaaaccagatggcaagaggcaagacataagcaacagaaagcaaagttacttaatatcatcagaacccagttatcccaatcatagcaagtcatggatatcccatcacagtgaaaaagcaagagtcagatttaaaatcaaacctcgtgatgatgaagaaggactttaggaaggacataaataactgacttaaagaaatgcaggaaaaaataaacaaacagatgaaagaattgaacaaaactattcagaatctaaaatttgaaatagaaataataaagaaatcataaaaggagacaaccctagacatagataacctaggaaagagatcaggagtcatagatgctagcattaccaacagaataaaagagatagaagagagaatcacaggtgcagaagataccatagaaaacattgacacatcagtcaaagaagaaaatgcaaaatgcaaaaagttcctaacccaaaatatccaggaaatccaggatacaatgacaagatcaaacataaggataacaggtgtagaagagagtgaagattttcaacttaaaaggccagtaaatatcttcaacaaaattataaaagaaaagttccctaacctaaagaaagagatgccca

SEQ ID NO: 1327 - DNA, 1200 bp, mus musculus
ctcttaagtgactgctatttcattttggacaaagtttagctttcttccatggttgacgaacattgaaaaaaaatctcagccctatacaattttgaatttctcaaaaatcagcatacagcttatcttttagaacatggtgctgcagcttttaccattttgaatttctctttgacttacaaaatgatttactagaccaccaaccaaggagtgtacaagaaggcacccatgactccagagacatatgtagcaaagaatggctttgtctggcatcaatgaaacgggaggcccttagtcctatggatgtttgatgcaccagcatagggggatgctgagtggtggggcaggagtgggtaggtgggtgaaataggaagtaccctcatagattcgaaggggaggaagaggtcgaatagaatagtagggttgtagaggggtgactgggaagggggatatcatttaaaatgtaataaaatgtaatgattaataaaaaataataaaacagaaagtttatgtaacacacacatacatgcaagcacacatccaatgttgcaccacccaccagaagactattgtctcatgcctgcattcctgtcccactttgggataccccttcagttagagacccaaagtatcactgataagtacatccatctgagttgcttgccattgtccctaattagccctttttcttaattaaatacataagactcaagtcacaaactcaatccatccctagaatcccaggaaactgctccgttccaggaagtgacattagactgacaatacgaattcaacccacccatgtagccttcctaagaaccacaagtcaatgccttcccccttttattgttcctcttctcataggaggccaagactcacatcagcaattccacaaatacttattgtctaaggaaagctcctcattgtgtcttcaagattcccgaagaatggttctgagaatcttttatagaaagtctacttccagctgagaaacctgagtcaaattgacccaagactattttctgatatcctattgtaactttgacactgtatttcaaacatggaaccccagcatccacatagctggtcaatcacatgacatgttagagtaaaaagaaagagaggtttgaacattttctcaacaatgtagagacagaattagaatatcaatatattactaatgacctagctccatgtactcag

SEQ ID NO: 1328 - DNA, 1200 bp, mus musculus
tcatggatcacaggatgaggtcagtcatgatcagggacgctcaggaattattaattgcctttgttctattccctatgttaccagctctcttgaggtaaatgtactgtaattttatagagtatgattctgttgcttcttcctttttcttcttctttttttttgaatagtgcagttcaccctcccagtccaccctccgactgttccgcatcccatacctctgccctactctcctgtctccacaaggatgtcccccacacaccagacctctaaactccctgggtcttcagtctcttgaggtttaggctcatcttctctgaacgagcacatacctggcagtcctctgctctgtatgtgttgggggcctcctatcagctggtgtatgcttcctggttgacgatccaatgtctgagagatctcaggggtccaggttaattgaaactgctggtcttcctacagggtcatcctcctcctcagcttcttccagtttttccttaattcaatgctgacaggggtcagcagcttctgtccattggttgagtgcaaatatctgcatttgactctttcagctgctttttgagtattttggatggcaatcatgataggtccctttttgtgagcactccatagcctcagtaatagtgtcaggccttgggtctgcccttgagctgggtcccactttgggcctgttgctggaccttctttccctcaggctcctctccatttccatccctgcagttctttcagatagacaaaaaaaaaaaaaaaaaaaaaaaaaaaaaaagggtcagagttgtgactgtgggatggccacctgcttccttacttaataccctgtctttctgctggaggtggactctacaagttccctctctccactgtctgtcatttcatctaaggtccttccccttgagttctgagagtctttgaccttccaggtctctggtacattctggagggttccccccaacctcctatctcctgaggttgcctgtttccattctttctgctggccctcagggcttcagtccttttcctccacccaataccagatcatgttcccctctcctaccctctcccctgtccactgtccctcctagttccatcagatctgttgcctttcaattaccatttctttgaataaagtatagcttaagtatacagttactgcctctgatcactggtagttttggtgacaaatat

SEQ ID NO: 1329 - DNA, 1000 bp, mus musculus
ggagagatgggggtaaagaagcaataccttagggaataatctacatagagattcccacaatgaaggggactcctgacttttataacattttatagcagtggttctcaaactgtgggttgtgactgctttggggaggggatcacatatcgaatatcctgaatatcagatatccccattacaattcataacagtaccaaaattacatttataaagtaggattcaaataatttcatgttgggggtttactacaacatgaggaactcattttcaagagccttggtactaggaaggttaataagaactgttttcgagacataatttatttcatttatttacttcaatataacacacaagaagaaccattcaacgtgttgtgtactggctaagaccataaggtaggagcaataaaaaccaaagcacaaaacaattccctaactttgcataccaggtctagcatttcaggtagggatggctatttttttccaggctgtggaatgtagatccttaagaatgacagcttgagccttccggtccactccagcaccagggtaccttgcctacggagtctccgatcacatgcaaggacccacacaggatcccccacaggatcctaagacctctggtgagttgaacagaacctctgccaggaggcaggttcaaatatcagatatctgggcaccttccctgcaagaagagagcttgcctgcagagaatactctgaccactgaagctaaggagagagctagtcttccaggtctgctgatagaggctaacagagtcaccggaggaagaagctctaaccagagacaactataacaactagcttcagagattaccagatggcgaaaggcaaacgtaagaatcctactaacagaaatcaggaccactcaccattatcagaacgcagcactcccaccccacctagccctgggcaacccaacacacgtgaaaagcaagacccggatttaaaagcatatctcatgaggatggtagaggacat

SEQ ID NO: 1330 - DNA, 1000 bp, mus musculus
agtgattgtaatacagaaccaaagaactgcaaacacattgatccttgaatcactggtgaatttcccagacttctatcacatggtaggccttgtaaggacacacatagtacactttccaaattcaaacaacttcctggaaatcacccactgtggaggggaagctgagacacctccccaatacacaaactgcctctctcctcatatactattttcaaactccaccctgaatttcctctccttctctgtctagcacattccatagccacaatcaggagtttcttcttgttgttgttgttagctcccttaggacctacttcaagctctccttcaggtctctactttccccttttgcccccccccctcaaaattcttcccagctatcatcctcaccaggaagaaaaacatgaccaactgatgagaaggatcacaccacaatgaactcctgaagaggaggacagggctctatgttctaatagttcttagaacagtactctagtctaagagtacattcttctagtcctcagcacattagtgtgggcgagctgtcaagtggatacccactccaatctcctgtgaagagtagtgtgttcctgcacgtgctcaactggccaggaagaatgacactgcaacaggatccttctgcacacgtttattgggagagcattgattgcataggtgaaagaagaaccccgaacaaggaaaatgatgctgcttatatacccctccatgtgacgtgtcagctcctgattagctgctcactcatcaccccactactacaccccgggatgggcagtgacttggcacgaatttactcttgcacctgcgcacattacttgtttaccagttaggcacagcggaggctcgtgatggcaattgctcacggctctccatatctcccccatttattttacacatgagaaaacacaggagatatttgacttactctgactgagttatttggcttaacatgacagtcactggttctacccatttgcctaca

SEQ ID NO: 1331 - DNA, 1400 bp, mus musculus
aaggaatttttcggcaaatggatggaactagaaaatatcattctgagtgaggtaacccagacacaaaacacacgtggtatatacttactaataagcggatactaacccaaaaactcacaatgcctatgatacaacgtacagaccatgtggagcatagaaggaaggaagatcagggggtggttgcttcagacctgcattgatgagggaacaggacgattgtgggagatggaaggagagtggaacaaggagggaggaggtggaaataagggtggcagtatctgagtctggaggagacatgagagaggtacagagaaaggatcaaggaatcaaataaaaataggtagcaggggggacgaggaactgggcatagccactggagggtcccagacaccagagaagcctgatgctctgaggacgaaatggaattgactttagctgcaatgcacagagaaaagggagatagaactgccagtagacaggcacaacccctggtagagggatagagtcactcacccatctcaaagtttttttgtaatacaaaaatgttcctgtctaaaggaagaacagggataacaaaatggaacagagactgaaggaagtgtcaaccaaggaatggctccacctggggatacatcacatctgcagacgacaaacccaacagtgttgctatggtcaagaggcacttgccgacaagaacccagtgtagcagttcctgggaaggatcggccagcaactgaccaaagcagaggcagatgcttcgagccaatcattaggctgaactcaggtaatctcgtggaggagctggcagcgggactggaggaatcagagacctctttggaaaaacaacataggctggcatgaccacccagtactcccagagactaggccaccaaccaaggaatacacctggagggacccatggctccagatgaatatatagcagaggacagccttgcctgagagcaacaggaggggaggctcttggttctggggatttttgatgtaccagagtaggggcattctggagtggtggatgtgggagcactctcatacaggcaaaagggagggggcagcaggtgtgggatgtggggtggggtgggggtggaagtggggtaaccaggaaatgggataacatgggatgaggggtaggttgagggggtaacagggaagtaggatatcatttgacatttaaacgaatggaatgattaacaataataaaagaaaaatatgtgaaaaaaagggaaaaccaaccaaaaaatgaaagtaagcttccttttgaaagatgtaaaacacacaccaaaaagatgtagggtatattaaatacacatattacagtgtttttttttttttttttttttgtcaggatagaaagttgaaattggaacttgatgatgtgtgct

SEQ ID NO: 1332 - DNA, 1400 bp, mus musculus
cttataatggaattttcagttatgctgtatttcaaagccactttaaaaaaatttattctataatgtcaaaatccagaattatgcccacagaacatatggttttggcacagctttagcaaagtatcaaataaataaaaaaaaaaaacttttcataaaactgacatttataggtccctaccatatatttccttaatattctgtccaaacactgatacaaatgaaaaatgaaagtttctttgccaatgagaaaccaaagatacaccgtgctataacgaatctagaatatcaacagtttgagacaagctgcaaataaagatgacaagtgtgagaatctggagggatgtatataatgttaacatggagtttggatttttcttgtgtaatattcaaattcatgcacgcattgtcttttgaatcaggctcagctttttattagacatgttaacaaaagaggtttggttgaaaagacaaaagcgtgtgccatcatcagacatttgagtttcttccttctttgcttttcccttcttctacccagcgtgagcagcaatggtggaggggccaggactgcctactcgaacaactccagctcctggagcaggcctgacaggaccaaccttgcagataaggttcccaatgttcaagtttgccatgccctttgtgaagaatccagaccagaaaggttcagcattggcaccacaccaatcttagtggatgcgtcatctaaaccaaacactattgaatgataacagtactagttgtacagttagcaactaagttacagtaattatatagcccatgttactaaaccagatgtttcctcaagctaacaacaatttgtgtttctgtgctataaatctgagataccaggtaaagctataataatttttttattaaggtaacaaagggtattgtggtatgatctagcatccacactgtgtcatgtgtctcctaggatacttaccttgtagttcaatgtaagtgtataataggaggagcacatgacgtcagcatgtcatcatatgctgtatttatgcaccagaggaaataccagcttctcataagtatgattatttcatgaaaagcacaccccactgagatgtcttattgctgttataaaaaatctttattgcagggaattcttttgagctgtaggaaaatgaattccacactttagaaatgttgaacagcagcttcagtagactgctatggttctcacagattactctaccccattagaatattcatgatccaatcagaatgcttcctaagtctctgcaatttttccattgtaaaataaactaggtacgttttgatgaaacagcctatgctgagcaaatgccttcattaatttttttaaaagtattttatggattctgttactatcaaagaacattgctctg

SEQ ID NO: 1333 - DNA, 1200 bp, mus musculus
acattcagaactgaccctagagattattattattatttttagcaactaaataatcttttcttaggatatgtttcctggaatctaagggtctcctctcaagactcacctctgacagctcctattttttatcgactcactactctaagggccgagatttcaacaaatgaaggcttgtggcaaatcacatctaaaataacacatcttgatctcttggtcttgtaggagtagcttcttatcttttgaagtcttgtgcccttcttttaagtataaccatccaagcctaccatgttacctactggggtcattgctggtatattttcatggctttattttgtgttttttttttttttttttttttttgtcccaaataatatatgtatctttatagggctcaactgatctctaagaccacagttgagacttatgctcttccataggagtttagatgtggacaggaagctcactggtaattcaaatatttaaaacaagcattgccatttaacaatatgaaaataaagtgtggctctcctgttcttacacactgaaaatcggtagccatatcaggtaaatgaatggtttgggtctgtactggctggttttgtgtgtcaacttgacacaagctggagttatcacagagaaaggagcttcagttggggaaatgcctccatgatatccaactgtaaggcattttcttaattagtgatcaaaggaaagggccccttgtgggtgggaccatccctgggctggtagtcttgggttctataagagaacaggctgagtaagccaggggaagcaagccagtaaggaacatctctccatggcctctgcaccagcttctgcttcctgccctgcttgaattccagtcctgacttccttggtgatgaacagcagtcagtatggaagtgtaagctgaataaaccctttcttccccaacttgcttcttgatcatgatgttttatccaggtctagaaaccctgactaagacaaattggtaccagaggtggggtattactgtgacaacctgacaatgttttctggaggactgtggaagactttgtaactgtgggccagaagttccattaggtgttaagagctttgtgagacattgtgtaggagcttggaagataatgttgagaacagtgcagaaaatggaggcctggcttgtaaaatttcagagggaagattaaagatccttttcag

SEQ ID NO: 1334 - DNA, 1200 bp, mus musculus
tgaaaatcctacatgattcatgggtataagaaatccccaggataagaatagatctaatctataacacaagtcaaaaagtattcctgattatagaaagttaaggatcggcataaaagaagacttacatggaaaataaacaattacatcagaaagaaaaagttcagaaggtcaccagatatggttgagcacttgctatatcatgatggatgctccttttgctgtagctaatgcatcctcttggaatgcattgtgaggcactatcaggtaaagggcagcaaagctgctttctcggtgccattcattgttaagaagctttactgaagcctgagggccagcagaaagaatggaaacagtcaacctcaggaggtaaggagttggcgaaatcttccagaatgcaccagagaactgggaggtgagagactctcaagactcaaggggaagaaccatagatgaaaggccagacagtaggcagagggaaattatagatcccacctccagcaggaagacagagaatcaaatgagggaaggggggcgcatcccacagtcacaactctgacccataattgttcctgtctgcaagaattacagggatggaaataaagaagagcctgaggaaaagaagatccagcaacaggcccaaaatgggatccagctcaataggggtcccaaggcctgacactattactgaggctatggagtgcttacaaaaagagacctagcttcactgccctctgaaagacctaataagcagctgaaagagtcagatgcagatattttcacccatctaatggacagaaacagctgaccccagttgctgaaggcagaaagaagctcccaggagaagggcaaccttgtaggagaatcagcagtctcaattaatctggacctccaagatctgtctaacactggaacaccaaacagacagcatataccagctgatatgaggcccccaacacacatacagtagaggaatgccagatatgtgttcattcagggatgatgcacctaaccctcaagagactggaggccccagggagctagaggtcaggtggtgtgggagaaggtatgggatgtggagcaatcagaaggtggatgtggggggaataaaatatggagtgtaaaaaaaattaattaattaaaaaagaaagagcattaacttaacagtggtaagggatgagagtacccacaggcctccatgat

SEQ ID NO: 1335 - DNA, 1000 bp, mus musculus
tagcttttgtatccattgcacaaacttacaagtcatacacacagatatctgttttagtgtaaaacttcaatatttatgttttttgtatgatgcttctctaatgtgtaatcacttccctcttctgtttataccattaatttctataattatccttggcacaaagctcaattcttcaacaatatttccctcttagtctatgtgatttttccatttgtttaaacagtaataataatgtttccctagctcatttttatggatatagtgttttatttgagttttttgaaatcagaaatatacactctcagacattaccaaattcatggtgtgacatgaatatacctattctcaaaacatagctacagttgccaaccaagattgatcttctttgctctagctgcaaaattcaaaatacggccaaatacttggtgatcaaaaataaattttcatccacttaatattttctgagtggcagaaatattacaaatattaatgcttctgatcaggaaagaaaagaaaaatgaaaaaaagatcaaaaggaaagaaatcctggaacacaaagaactatgttcattgtttctaagccagactttagagtaggaagaggaactagtcctgggaaatgagactcccagactttcctttataaagcagtgtacaaagtaggtcagtactttccaaaagaaaagactgggagtacaggcattcagaaaagaatggaagaacatatcctttaaagctctgtaagctacggtctaatgcaagataaaggacaggagaggtgagagtgatgtcaagaggcacaaacaagggcaagcagaacccgtttgttggtgactgggctgcagtggagggtcacacctgcttgctgtgctttctctgaggaaaacagagaggagaatagaacaaaattctcagtaaaactctggctgtattttaagtttgttcatcttctgccggtgtctgatggcatttagagccaatgctttataaggtgggaaga

SEQ ID NO: 1336 - DNA, 1000 bp, mus musculus
gaaacatctgcatactagacaatctatgatttgtaactgtagaattattagtagctgcaaatatttattaatttgaattagtaattaatcgtttgtctactagaaacttcattaggcactgaacataagcaaatatgaacacataaacatgccaggtaccctccatataaacagactagacgtttctatgtgtgtgtgtatctatgtgtgtatgtatatgtatatgtattatatatatatatatatatatatatatatatatatatatatgtataatgcaggcatgtatatgtaaatataatgtacaaacacacacacacacatatatatgatcttttatatattaacaattcagtacacaatgaagatggaagacaattatatttacttacaaagaattgtacatttgcccatttagtagatggctgagtcatttttgtggcctgattgctcttaagcaaatgccttaaacacactgacattttaccaaaaacgtaagttgattattgtcatgctcctgcatatcttctaccaattctatatgaaggcaggaagtgggataattccaggcactatatttatgcttatcagaaatattgaatgacttgacagccattttcaaaactatttatgattcatgacaataatttatttggaatacttttgccatacagatattacttcatgaagtacacatattttaaaacctttcttagagaatttgtaaggagaagaaactaattccattggacaaattgctcagattttccagaggtgctatggaaaccgtttcccttgaaaggaagtacactgaggtaactgatcattttcttgtcttttttgtcagtccatgactttgtagagtatgaactcatggtacagttgtcaagtgagtgcaatggaatgactgtgctgtacgcaaggggctcctgtcctgacatgtgtctactctctgatactttcaaaactactcttgggtccttacagcatggaacttact

SEQ ID NO: 1337 - DNA, 1000 bp, mus musculus
taacctatcattcactgttggtgatgtatgacaaagaattattcttgtggttaacttagtagatgaatataatgtaaataattttacatatgctgatctgtgagtatgctttgaatgtgtactgaattcctgaatgatttgctgctctgactagtattgtgatatttgggacactctagctgtgattcctgatgaaaacgctactatatcagaactgtaagacacacttcagctcattatgattataattcactacttatctgcaagcatgagaacaataagaaggtaagacaaaaattgagagtgtggtattttcattatgttttgaggagagaattgagtcttttagggcctctagtaggagagcagaaggatggagatatgtgaggaaatgtggtggccagaagttcccattaagatcaattgcctaagtctgcagagagaaaagattagggccatggagacattttagatggttccagtgtgaactcatgaaagatggtgcatgccattctatgacttgctaactggtctgtgactttgaatgagtcactgaggctacctaaatagatttgcaatttgatagaggtagcccagggatttgttaagccataaccaattaaaaagcttagcagttaagcagatttttaggttgaaccaatggtcacatcagcaactttgtggtttatcataatgtaaggggaaaaatagttcattaattttatgttcatgttaaaacactagatttatgtaattaaacctaactaacagcagtccacaaagaatgtggagattgcatctttctatgaactgagtattcaagctccggatttatcattagtgcagagagggctctggtcctcacagtcctttgcacaatggtgtctctggctatgtctatgtttaatgtgcctttggctgactgctgcactgtttgcatttagtcaaggggaattttacctgaactatatacattggcaatgtctggagatatttcatg

SEQ ID NO: 1338 - DNA, 1400 bp, mus musculus
aaaaaagttaatttaacaaatattaatggtctctaaaattaacctgtttttctcatgaagttattctggctacagacttgtcctcaaaagtattatctactttttttttaatatgtaagctgtgaatctgaagataaacatgactctatctgggagccttactcaaaatcttcagtttcattcatagaatttgggccagcagcatcatgcggcaggattacctcaatataagttgagcaggtccctcttctctcatgacttgaaagcatagacattctttgttcattaattgttgttacttgtatgtgtgtgtgtgtgtgtgtgtgtgtgtgtgtgtggagagagagagagacagagacagagacagacagagacagagagagacagagagagacagagagagacagagagagacagagagagacagagagagacagagagagaaggagggaaagagagagggagggagagggagagagcacatatgaacttacagtggttgtggcactaagctcaagatctgtaaaatctcaagtaagaaaaaaaaaaaatcccagcatgcagatgagacatggatatgatttcaaacctgtggctgagtaattattgacaactgagaactgctgggagagagaaagtcagttttcattcaggacctctgtgggtgaccatactttagtggaatgccactcatatgggcagcaaaaactggtcatttaaaaatgataacaagccaggcagtgctggagcatgcctttaatcccagcacttgggaggcaaaggcaggtgatttctgagttctaggccaccctgatctacaaggtgggattcaggacagccagggctacacagagaaaccttatctcaaaaaaacaacaccaccaccaacaaaaagataacaaaaagaggtcacaaagttagatgggtaggggaggataaaccttggaggattggtgggaggtggataactataatcaagccactgtacaaaatcctgaaagaactaataaaaataaatatatgtatgtttacactaaaaaaaaacccacacatatcaccctgtacaaataaacaacatcaaagtatggcccagggataggagaaaatatttgtaattatatatctaattaaaggctaccttccaaaatacattaagaaatcaaataatccaacttcaaaaacatcaattaacttcattaaaataagcctaagaacactaatatgtatttctacaaattcattcaaaacattatttaaccatattttgagaaatgtatgggtaaaccagttagaacataacttggatttgtacaaatatccattactgctttgttaatacatcctaaaacaccttgagactctatgattgagaagacaagaacacctttttactttttgga

SEQ ID NO: 1339 - DNA, 1200 bp, mus musculus
tgagttattgatatcttccttaaaggacactattatcttcaagagatggtattttaggacagattcctgattttcatgtgcattggtgtatccagtgcttgctgaggtggtagaactgggttctgatgatgtctacatattttggtttctgctgcttatagccctgtgctttcctttcgccatctggatatccctgctgtttgttgatctgggtgactgtatggagtctggctcttttgtcccttgggtgtttcagatctcctggtaggcttgctgccctggctatatcagagcacctgtggggccttcctattgggggctcttcacaggggcagagaagctgctgatctgttgccctggctgcagtagacctcctgggaggcctttagactgttgggtcttccttggagcagtcaagctgctgtccaactgcactgagtgtagctgacactcatctttcctgagagcagcaggtcctcaatttatctgagtgaagagggtcctcaactgctcaactgcactgagctcaggggttcctctactgctctgagtacagcaggtcctctgggatgtatggagatatggagtcttcaggtgagcagaccaactaggggtctgccacagcagcaagaaccaggtggaaggggtgggagggatggaaggaaggggagtggtattagggagtgtggttgttttggtgggtcatgggtcctaagtccaccaggctcccagcagcagctcaggaacttaggcaggggtgtgtgggggtggttcttaccaattgttttgagtgcagtaggtcctctgggatgtatctagatatggagtcttcaagggagcagaacaactaggggtcttccccagcagcaaggaccaggcagaagtaaatctactttaaaatgcctcattagttcttattcatcagccttctgtgtctaattttatagcagaaggaaacaatggcagattcagtcatcaaaatacaatttcttatatatatgcaggtgcagcaaataaagaaaaacacagcctccttgttaaaaaaaaaaagaaagaaaaaaaaatactttaacaagatatttaggactgtatgttccagaatttcagatagtaaagaattaatacttatctttccagctagaatttaattaaaatgtgagatgcatttttatgtatcaatgattcttaactcaccattac

SEQ ID NO: 1340 - DNA, 1200 bp, mus musculus
ttggaccactttgttcaattccttcacctgtttgattgggttttcctctatttctttaagtgatttatttgtttcctcattaaggacttctaactgtttacctgtattttctttatttctttcagtatgttatttatatcctcctttaaggattctattatattcatgagatagaattttaggtcagcttcctgattttcaggtgagttggagtatccaaggctttcttttgtgtgagaactgggttctcatgatgtcaaagtacattggcttctgttgcttatggtcttgcacttggctctagctttctggttatccctggtgttcgctggtcttggtgtctctgtctggagcctgcttcctatgtcccaggttattgcaggtctcctgggaggcctgtggccctgactgtagcagacttcctgtgagactttcagactgtgaggtcttccgagggttgcatattccagtgacctattgccctggctgcaattgctctttttggagggcatcagactgttgggtcttcagaggagcagacaagctgttgacctgcatgtagctgttctgtagggaggccttcagactacagaacctcctgtcccgtgtgcatctgaactccagagacactttcagactgatgggtctgttgccctgtctgcagcagaactcctgtgaggccttcaggctgtggtgtcttcagtggatcagacatgctggtgatctgccatgtcagaaggcacaggacagaagggccatggaattcaggtggcatgttttttatggggtaatgaggaggattccattgggctcttcaggatgcccagctgctgtggctgttgagagggtcccataccaggttgcccagcatgcagccatactcatgggatgccttcagactgtggtgtcttcagaagatcagagaagctggtgatctgctcaaacagaaggcacaggctgaaaagccacacacattttaatatagatttatctatactgtactgaacaccaaagaacatgggctcaagtcccttgagagtcatgttttgtaatgtttccattaaaaacaaactctgccttcaattccctatagcaatattatgaatatggctttatgtagatgaattataaatacactttagctctactgtaggttaaagagtcccatgtgggctacactatggatattgccaacttata

SEQ ID NO: 1341 - DNA, 1000 bp, mus musculus
actcttgtatgtctcaaaaatatcttaactaagttgttattttaaaatgagtctttgctccaataattcacagatgatatagatttttggataggccaaaacaaagccctggatctgggcatagttggtagctgagctagtcagcttgtgcactctttcatctactccccaagggcaagtagcccagtcctgcttttgctaagccacctagtatctcattcagcagaaagcaagctctcatgtcctaggggttggctcaccttcactaatacctcctgagcctgctcctactccactgtgtagccctactgaggcaagactcactctgcctagtgctgcatccaagaaaaggataggcaagctcttttctgactttctcacagcctcatggcaggcttccctgtgcattctccattggggccagctcctctccaggtctacatcaactggtggggcagggatagatatccttctctcatgtacttggggccagcattccagactaccacagatggcaaggaatgagaatactggaggccatcacccctgtgccaactccacctcacagcaggtgagtgaatgggccagatccatcatgaccttgggactagatcatctgacccttctccaccagggccagttctattgctctgtgctggtgacgtggagggactgccttcccaagtgctgtagctggccagaggcagggccagctcactcattttcatgactccaggactagctacatcatctctgaactattggaacttgtgaaaggaccagtcctgataatctaaagctgcagtatctctatgatacagggcagcaaaaggatcacctgtaggagtcctggtggggatcactatttatggtgtcatggaacctagaaaccccagaccagtgactcactgcaatgagcatttgtaagtgaaaatgtgtggacagtgaggtatatggtaggacacactgtgaaactacatctttcatgacaagatggttt

SEQ ID NO: 1342 - DNA, 1000 bp, mus musculus
taatagaagagaaagcaatactaagccaaagaaagtagaaattataaacactgtggtgataaggaaacatttggctcagaatgtgagccatgcagggtatggtaacacacatgcctttaatggcatcactagagaagctgaagcaggattggatataaacagactgtctcaaaaatcgtaactcatgtaaagtaggtcttgagcctagcttttaacggctaagtcatctctccagcccaagtaggctatttattagatatgatgttggctattaaagcgtatgttggagactacaaccaagtcacatgacacatctttagtgtaaagtatctgaggaacacccaatagaagagctaaggaggcaatgtttacgtgcacgatcaagaagcaataagattacacaaaatactaatacaagataaaatctcagctagtgattggcaagttttaaaagtgccctatttatttacttacttacttcaattatgcagaaatatggtcactctaagcataaatactacaagtgttgacagaaatggacttgagcatataggaaatttggacactattcatcctttctgtagtttgctagattcaaaccaaggattcaagaaccggtactcagaggccagatgccaactgcctgtgtggactgtgtgccatagccctcaggccttccaaagtttctttgcttgggtcattcataatcacagagcttcagaaataaaactgtcactaaaaaaaaaaaaaaaaagaaatctgcagctgccagggtgatggtatgaggtgtgggaggggaatcattaggaggtcccaaaaacctgagatgggagaggttgcctggagtcaatgaaggtgagtatagccaatatgcctaacagatgagacatgggacctgaagaggccaactatggtagccaagaaggactcccagtgtacacataaggacaccaaaccttactcctaccccaaaatttttcctgtgtctaaaagaattgca

SEQ ID NO: 1343 - DNA, 1200 bp, mus musculus
aggcagtttgaatttgataatcacactatgtcatttagcaattttaaatacttggaacaagattgaaaaatgaagaaagaggcttgagtcatttactaaaattatataaggcccaaaagaagcttttactgattttttgcaaaggttgatttcaactgtaactagaacaggatcagatttagaaaccagaaagatactaactgaacctttgaattttgaaaatgctaattcaaaatgcaaaagggtgattatccccttaaaggcaagattggcagatctcatatttatgttgtactctgaaaggactgaaggagctgaagtggtttgcaaccccatatgaagaagaacaatatcaaccaaccatatcccccagagctcccagggactaaaccaaaccaaagactacacacggagggacccatgactccaacagcatatgtagcagaggatagcactgtctggcatcaatagaaggagaggcccttggttctgtgatgtcttgattctctagtggtataagggaattccaaggcactgaggtgggagtgggtgggaggaaaagcatccttatagaagcagcaggggggggtgatgggatagggggattccagtggggaaaacgggaaaggggataacatttgaaatgtaaatacataaaatatccaataaaaaatcaaaatgtgagatgttgtatatgtattaagtcatttgagaagggtccataggcaaggcattcctggaatcattgggtatttgtttatttttttttctcctacagataatacaaaaagaagaagatgtaaaaatatttttgctaaaatcttggcatctaaatttccctcttcagcaggttaatactcaactactaggggttggaaccgtaactcacgtgaaataaaatacacgatggctccagtgtatagggccagaagacaaatcaaaaaatgaaaggcatatagagataatagacatgagatttgggggatgtggtttgttatcacaatggaaaacgcacagtaacatttctccaatctcagaaataaatgataaaataaagaatgcatttgagaagaatatttaaaagtattatcaaaaacagttacaggcttcccagttgtccataaacaggacaaaacatgtaatagtttttcaaattaccaactaacctacctttaagttagttaactggcaaagctgtgt

SEQ ID NO: 1344 - DNA, 1000 bp, mus musculus
cgcaaccacctggaatcttccgtggcaaaagctttactgcttacttcttcaggaagaccccgaaccgggaaaatggcgctgcctttatagcccgcaagcatgacatttcagcacctgatatggcatgacagctcctgattcgttgctcgcccatcaccccactattacaccctgagaatgggagtgactagaagtgagttcactctcgcacctgcttacaaggcttgtttactagttaggcacagcagagatcagtgccatcttataatggcgattgctcgcagcacggctctccacatctccccctttttattttattaaaatttgaggctggtctaggcctgtgtaattatgcccatcctatgtggctcctgtcttaggtcgttcctccaatgtcacagcctttcctgtcatagggtaaccctattgccaccgggccccatgtcttagattgatctgtgcatgaggaaagttgcccgtccctggataccacagtgctatgtgacagtaactactaaatgacctagggcgaactctatacaagaggccagccaccaatgtcaactaatttttgagcatagatagccagattttgggggaggccccttgctcgatggcagcaagtgcttgagttatcacaaccttgtcatttgtttgttgggttctgagtttgcaaaccaaccagagcatgaccacaagtccacagcaggtggcaacaccaaataaacccacccccacccattccttaaaataagaaaatggagatgaaatccatgaggagaggccctctgtcaatgacaggtccactccagtcgagttgatctttagaacggccgctctcagggcctcaagggtctcatcgaatctttcagaccaatttcctgcaagatataaagaaagctgtctagaagattcgctgcataagtaaaattttcatattggacactggtaatgcacagagcttccagttttctttcacaacccaactgggccatctggt

SEQ ID NO: 1345 - DNA, 1000 bp, mus musculus
agtaatatgataatgtttaaatatgttaataactcttttaagtaattgataaatactattaaagaagaagactgtgaaacaatgtctttaaaggctacttaaaagataaatattatgcattcctggcagaccagcttatcctccctgctccctccaacactccctacccctgcctgtctccctggatgcttgctctaatagggacacagatgagacccacccactccctgcatcaacccccatgccacctgggaccccacagagctgagcatacctaggctctgttctgctctatagagacttatctccctcctggtatgcacctctaactggacactcaaggaaagggtgcgcctgcccttaaaagcctactgttgtgcttgtctaccaggaggtctgctctaacttggaacacagagcaatgcctgtctcctgggatgtctactcctatccaggacaaccagtccagttaacaccagggaccatcagatggtgaaaggtaataggaagagcatatccaactgaagccaatgaaatatggcaccatcagaattcagctctcctactatagcaagccctggatagtctaacacatgtgaagagccagattatgacattaaatctcatcccatgaagatgacagaagtctttaaagggcatattagtaattcccttaaagaaatgaagaaaaacacagtcaagcatacagaagatcttagagaggaaagaaatccctaaagaaataaaggaaaatacaaccaagtttgtgaaggaaatgaataaaacagtctaagaactaaaacagggaaatataaccaatgaagaaaacaaactgatgcaaccctagagataaaaaatataggaaggagaacaggaactacagatgaaagaatcactaacagaatatcagagaaacaagagctaatctcaggtgataccatagaagaaattaatacattgatcaaggaaaagcaaagtgtaaaaaaaaaaatgcataaaa

SEQ ID NO: 1346 - DNA, 1000 bp, mus musculus
accatcttcacaagaacaaggatgtccccagctcccagccccaccccaccagacctctccactttctgggtcctccaggctcttggtggttaggtgcatcttctctgattgagtccagaccctgcaatcctctgctatatatgtgttgggcgcttcatatcagatagtgtatgctgcctggttggtgacccagtgtctgagagatctcaggggtccaggtcagttgagaatgctggtcctcctatagggtcaccctcctcctcagcttcttccatagcagcttctgtcctttgatataaatatctacatcagattctttcagcttcttgttgggtctattggacggcagtcaagataggcacaccataacctccataatagtgttagaccttggggcctcccctttagctggatcccaatttcggcctgacactggtcctacttttcctcgggttcttctccattgttgtctctgcagttctttcagacaagagcatttatgggtcagagtttttgactgtgggatgacaattccatttctcactttataccctatctttttgctggaggtgggctctacaagtcccctttccccactgtagggcatttcatctaaggactctccctttgatcctgagagtctcttacctccaaggtctctggtacattctgtagggtcaccccaccttctaactcctgacattgccaatttccatttttctgctggccctcagtgcttcaatacccacacaatacctgatactgttccctttttcctctccctgtcccatttcccacccaggtcccttattccctccccttcttgtaattgctttcttctctctcccaagtgggatcgaggcatcctcatttgagccctttcttcttgttaacctttttgagatctgtgagtcatatcatgggtagtctgtacatttgtttgctaatattcacatattagtgagtatataccatgcatgttcttttgggttacctcact

SEQ ID NO: 1347 - DNA, 1000 bp, mus musculus
ggcatagaactttgacaggacaaagggcttctcctcccattgaggagaaactaggccatcctctgctacacgtatagctagagacatgagtcccaccatgtgttttctttgtttggtagtttagtccctgcgaactctgggggtactacttaatacacattgctgttcctcctatgaagctgcaagccccattagctccttgggttctttctctagttccttcactagggactctttgctttgttcaatggatgcctgtgggcattctcatcggtatttgtcaggcaatggcagagcttcttaggagacagctctatcaggctcctgtcagcaagctcttgttggcattcacaacagtgtctgggatgggtggttgtttatgggatggatccccaggtgggtcagtctctaaatggaatttttggtgtttttatatcttacttggttgtgctctttatatatgcaggacattaatcccctgccagttgtataccttgcacatttttctttcattctttgacctctttttaactgattggttggttcttcagctgtgctgaatgtttttagttttctgaattccacttgtcaagacttgggtttaattctagaataagtagagtcctgtttgtggaatcatttcctagagctttattatgtagaggaatgcatatgctttatttcagcagttccagtgattgaggtttcacacttaggtctttgatccattttaagttttttttttttttttttttttttttttttttgtgaggtgatagacactaatctaattttattcttctgaaaatggatatccagtttttccagaaacattcattgaaaattccttcctttgcccagtttttattttggtatatttgtaaaatattaagtggctgaacttaaatatgctcatgtttgcatatgttttgaacacaaatatttttgaaccaaaataaaccttgtattcattatgtttctgttagaatgatacaatgct

SEQ ID NO: 1348 - DNA, 1000 bp, mus musculus
ggaaggccatccagagacttcccccaatggggatccataccatatacagtcaccaaatgcagacactattgtggatcccaagaagtgcatgcttagaggagcctaatacaactgtttcctgagagcctctgccagagcctgacaagtacagaggaggatacttgcagtcaaccattgggctgagcaccagatccccggtggaggagttacagaaaggactgaagaagctgaaggtgtttgcaaccccgtaggaagaacaacaatgtcaaccaacagaactcctagggtctaaaccaccaacaaaggaatacacatggagggacccatggctcccaccatattgtagcagaggatggccttgttgggtatcaatcaagaagaggtccttggtcctatgaaggcttgatgccccagtgtagtgaaatgagcgggcagggatgcaggagtgggtggatgggtggggatacaccctcatagaagtaggaggatgggagatgggatgggggtttctgtgggggaaatcgggaaaggggataacatttgaaatgtaaataagtaaaatattcaatttaaaaaaaaggaaaggaaagaaagacagaaagacatattcttgtttgttttcaaccagtattcttgtgtataaggtctggccaggagcatggttggtgtacccagcagcatttagttgaagaaaaatgattttccctctctcggcagctattacttacaaaggtttcttgggtatatgtaggattttatggtcacttaactttgtccctcactgggattctgtctggcctcatcttgtgcagaccttgtacatggtgtcacagggtctgtgatttcatatgtgcatcaggttaatgtgtctggaagatgtttttcctatgatgtcatatccatcctttggctcttacatacagtttgaatgtcagacaatgtgagattaaaaatgtatttttaaaaatcataaattacactttagatactgcatttttgt

SEQ ID NO: 1349 - DNA, 1400 bp, mus musculus
ttgtattctgttgttgatgctcacatctatggttccagatttctttcctagggtttctatctccagcattgcctcactatgggttttctttattgtgtctacttgcctttttaggtcttctatggttttgttcaattccatcacctgtttgtttgtgttttcctctttttcttttaggacttgtacctctttatcagtgttctcctgtatttctttaagtgagttattaaagtccttcttgatgtcctctatcatcatcatgagatttgcttttaaatccaggtctagcttttcgggtgtgttggggtgcccaggactggccaaggtttgagtgctgggttctggtgatggtgagtggtcttggtttgtgttagtaagattcttgcatttgccttttgccatctggtaatctctggagttagttgttatagttgtgtctggttagaggttgatcctcctgtgattctgttagcctctatcagcacacctgggggactagctctctcctgagtttcagtggtctgaagtggtctgcaggcaagatctcctcttgaagggaaggttcacagatatctggagtgtagacctgcctcctggcagaagatgaaggcccaaaacagggcctgtcccagaaactgtgtggcttctgcctgtcccagaagctgtgtagcttctgtagttggcactctcacctacagtctagtctctgaaaaatcccagaccagagatggctcccccaggttctctggcaaaaccctcctctggcagggaaggtgcctggatgttctggggcctgaaaaggggttcgccccagaagccatgtcactcctgcctgtcccagaagctgttttcttctgtagtccacagtctcacctgcaccgacttctctctgagggatccgggaaccaagatggatcccccaggtgctctggcaaagccctcccaggcaaggcagacacctctcctctggcacggaaggtgcccagatgtctggagcctgaaacagggtctgctcagaagctgtgtggcttctgcctgtcccagaagctgttaacttctgtagttcacactctcacctgcacagaatagtctctgtgggagttttttacttcttaagtctaaaagatttccctttataacttccttaattttaatgagctttcccttaggatggaattattcattctgaaaataatgacaggtgtcaatctatacacatggtgtaggaaaacctaaaacacagagttttcatgctctttcatgtctctgactgtgtaatatggtgaaaagccctaagtagccttgtcaatcatgtttgaatgctctaggtggtcatattgctgaatacctacatggactaaatgcctcccccaacccctacttctctgtaattagctttt

SEQ ID NO: 1350 - DNA, 1000 bp, mus musculus
ttcctggtatctgtctagaaaattgtccacttcttccagtttttccatttttgctgagtatagccttttgtagtaggatctgatgatgttttggatctcctcaggttccttcttagaatggggaacaaaataccaatggaaggaggtacagataaagttcagagcagaaattgaagaaaggactatccagaagagtctgccccacccagggacccatcccattaacaaccaccaaacccagacactattgcatatgccagcaagactttgctgacaggactctgatatcgctgtctcttgtaaggctatgccagtgcctgacaagtacagaagtgaatgctcaccgccatctattggatggaaaacagggcccccaatgcaggagctagagaaagtacccaagagctgaaggggtctgcaaccctataggaggaacaacaatatgaactaaccagtaccctccagagcttgtgtctctagttgcatgtgtagcagaggatcgccttgtaggccatcagtgggaggagaggcccttggtcttgtaaatattatatgcctcagtacagggaaatgccagggccaggaagcaagagtgggttgggaagcagggcgatgggaggaaataggggactttggggatagcatttgaaatgaaaatgaagaaaatacctaataaaaatgtttaaaaaaaagaaaaacttgttttacaaggaactctcctcggcagcaaacgatggagacaaatacagcctctcaagccacacctcttgtttaaataaccccctgatagataatgactgagtaaaggggaggagaaggtgggataaaaggcgatcaatctgatggagaagcaacaaaatgaaataggatgaatcattaacctgagaaggatatttgagagtacagagaggtccagaatcaaatgagtctgataccgaagctattttgaagaaatttcacagtaaaagcagggtaaaaccatttgacatcctgtgattgt

SEQ ID NO: 1351 - DNA, 1000 bp, mus musculus
acatggtcacacaggagatgtaatgttgaagctcaagcaccaataaaacccacagtgactaggcactcggccagtacctctagtcacagatagcacaggcagccaggacatcctattgagactgagaccaagccctatgtttttacagttaggagcttccttgacttaattgtcttatttaaggaaggcaaaggcagctccctatttcgtctgcctatgatctccagtgaggtattcaatggctggttagactggtgtggcctcgtataactgtgtggtggggtctcttatggctcacaggaagtgttttagctacaagcttttaatttcaatctacaacaaatcttgtcaaactgtcatggtgtcattggtgtgtattactaaggtttctgctgtgaaagcagccttctactgaactgtaattgatgatgaataagctagattattttaaattaataaagttcctattatagtaagcaaattatgaagcttagcatataaggacctggtattaatttaactgaattttctcataatatccatttatattaacattgttaacctgaattataaaataatgtctataccttctaagccaactctaacattctgctagagggttcccatttcctcacgaagataaaatttgggatacagagttcagtcactgttgacaggaaggagtgtgcacagagtgcttgcgaggcaggaagcaggacttctacacagggaagtcagagaaggtgtgttcaacattctgaaagtgttccgaaccaagacaaagtgtttggcagcagagagcagagcccagtttgctaaagcaggacctcagagttcttcaagccaccacaccatcttccaacacaaaagttatagcagaaagaagctctaggtgaaacagttctggtttggagatttctcctacatcactggcaaatacagtaagccagttaatgatcccaaagacaggccagcgccaggcctcaatgcccaaggcagt

SEQ ID NO: 1352 - DNA, 1000 bp, mus musculus
tgccgatggcaaaaaggactgtaggttatcatcttagagactgaaaatacacatgaggaatggagtagagatcagagcaaggatgcaaaagataaaaccatggggtggacatgaaagtcagtgcagccaacacgaggtagaagccgcgcaagcctaggtgagagctcagggctcagttctactttgtattctcaaaaacacaaataagaactctgttggcagaacaggaggcaagataaactcgttcccctctgtcttaagactgtcattcaactttcattcttcaatgtctctgtactcacacaaatcatgtatgaccccaaacaatttgttcatcacagccctacaaatcacccccacttgaccaatattcaataacacacagacggcatgataggacagctgaccaaaggggagaggaggaggaagggaataagaggaacagaaatgggaggcccagccaggcaagtggtaaacgcctttagtcccaacactagggaagcagagggaggtgaatttgagaccaacctggtctacatagtaagtttcaggatagccaggatatagaaagaccctgtcttgatgatgatgatgatgaggaggaggaggaggagaaagaagaagagtaatagtagttctggtcccagctctgtgcttcacagcattgtcaattacacaaagattaaagcctttgcaaactgcagggtcctcatatacagagtgaatctacccactgccctatgtgtactttatggtacagatggagaaactggaaactgtgtcacatatggaagagctcctgagagggtggtggcacctggaagaggtcagtgtttgtatctgactggctgcataagcactcaaagctctggcatcaagttagagcagtgtgtcttccttcacaccgtctcccttgctctagtaagacaagtccaatagcccactccctcccagaccttctatctcccaggataactggagctttggatagatttttact

SEQ ID NO: 1353 - DNA, 1000 bp, mus musculus
acaaagtgtatccagttttgtaaacttgaagaattaaattcagatttggttaggactgcttaaaggtaaacataaaacatgtcaaatttcctataaattaaaatttaaaaaactttgagtactgaagaaaatgtatgtacaattgtttcatcccaatcactgccttctgagtttagtaacaaacgcatttaaagaaaccctggtggaaggctaatttaaaagtaaacatgcttttaaaacttaaatatagatcttgtattagtcccacaacaggatcaagatcactattaaaatgaagcctggggcacattatgatgcctaagattggtaggtggattttaattgacttgaagactgtcatagttctattctcataaaacctgtaacgcatttccagcatggaggacccatctgtgcccaccatccatctgtttagacgtgattggcaaagtggtagggaactcgcagtggttgccgctgcctgaaaggaatgaaccacaggatcttccaacgagtgccaaaaacttctgagaaggtctgctgccatggctttcggggccgcgatctacagaagacagcattattagtgaaagacagcactcccatggtgcccttcagtcagctaaaacaatacaggttggctggggatccattactggactctgatgcactgtgtctcagcatcacaaatgcagctttcctttcaatgtggcatgcagctgagcgtcagctctggagagcagatattgtatctgcatcgtcaatcaacctagggtaactctggaagcagaggagaagctcagcataacagaatgtgtgtcaacaacacagtagcaaatctcttttgatgtactttcaggacaaataatttagcttacttctgtgagacagggaacaagagtgatcggtacttattttgtttaaaagctcccatggctgaaagacccctacagtaagactgggatacgcctgtctagcttgggcctcagacaggacacca

SEQ ID NO: 1354 - DNA, 1200 bp, mus musculus
aatattaaaagcagtaagggaaaaaggtcaagaaacatataaaggcagacctatcagaataatcaaggagtaataagtggtaaacttcaacacaggagggaaaccacaccctagaagaagcaagaaaataatcttcttttaacaaaccaaaaagaagatagccacaaaaacataattctacctctaacaacaaaaataacaggaagcaacaatcatttttctttaatatctcttaataccaatgggctcaattccccaataaaaagacatagactaacagactggatacataaacaggaccaacattttgctgcatataggaaacccacctcagtgacaaagacaggcactacttcagaggaaaaggctggaaaagaattctccaagcaatggtcccaagaaacaagctggagtagccattctaatatcaaataaaattgacattcaatgtaaagttaacaaaaaagataaggaaaaccacttcatactcatcaaaggaaaaatctaccaagaagaactctcaattcggaacatctatgctccaaatgcaagggcaccaacattcataaaagaaactttactaaagcacaaagcacacattgcaccacacacaataatactcgataaaattcaacaccacactctcatcaatggacagatccaggaaacagatactaaacaggaacacagtgaaactaacagaagttatggaacaaatggatttaacagatatctacaaaacattttatcctaaaacaaaagagtataccttctcctcagtacttcacgctaccttctccaaaatttgccatataatcagtcacaaaacaggcctcaacagatacaggaagattgaaataatcccatacatcctatcagatcaccatggactaaggctggtcttcaataacaacataaacaatagaaattccacgtacacggagacgctgaacaacactctactcaatgataacttagtcaagggagaaataaagaaagaaattaaagccgttttagagtttaatgaaaatgaagcgacaatatacctaaacttatgggacacagtgaaatccgtactaagaaaaaactcatagctctgagtgcctccaaaaagaaactggagagagcatacactagctacttgacatcacacctgaaagctctaaaacaaaaatcaaccacacaccagaggaaataatc

SEQ ID NO: 1355 - DNA, 1000 bp, mus musculus
ttttcacgggctctgccatgggtggtattcttgaatgatattcacattgttatactgatttccaaaacgtaactatttcagagcatctgttttggacttaactctgcccaccaaagctgaagttctgcccagtgagcagaacaatagtaatcatgtggattatgtacgttttgatcatcggatgtggagaaatcaagctggtactgacctggaagctcccccctctctaggtagcttctgggatgccagaaggtgccgctgtgctagctgctgtggaaacaaggtcatcagcacgtcgcctagtggtgaacctgtgaactgcagtagcccagcgtggcaagacatatcatagtgacacaggtgttatgggtgtaaccaggaacgttctgagaggctctagagcctactttacaggtgggtaaacttggccaagaagccttatctggggaaatcataagacaaagagaagaatctactactattactttgctaaatggacaaagtattaaactgccttctaaatactcatctttacacctacatattaatgcatcccttaacccctcatcagagatgcttccttttgaagtggatgccgattaatacaagagactctgatcaaagcgcagagaataagggaccgtgtttaaccttacacgggacatctgttgtcacaccccttcctccctcattcagggaacatcaaggaggcagaagattgtaagagccaggatcctgggaagactgctgtgcaatggtgacttttagaaacgacaggagcattgagctcacagcagctggagttgcctgttcagctctgcatgagatcaagtcagtcaacactccagcacacagatggggcaggtgctcatgaggcctttccttgaagtgagacgctattagcacttgctaagggagcaagagtgacgttttcctcagcagatggccctaaacgcgtgtacatgggcagagaagcactggaatcatggagtcatgtaaa

SEQ ID NO: 1356 - DNA, 1200 bp, mus musculus
tgtcaacacacatcctcaagatgtattctccaccaggctatttacttacaaccagtcctattgtttgtatatcttaaatctgtgtaggcatcccacaataatactaaagaacagaagttgcataaatatgaaataactcaacttttagaatcagaaactcatgagttaggtatatttaaatttaacttgtaatatgaatgtataacttttataaccagaaaaatacaataaactgcttctactgggagaagaaatgccataaagttaccaaaaacaacatctcagtatgccaccaagtgttcagctcccatttaagaccaaaggaaaaatacataaattcagtataatctcctcagggcaattagtaattatccaaatgccatctctgtttgatggctcttaggacacatactcagtattagggggagtataagtaactaaggtgtttaagatgatctccgtccacatgctggggctaaaacacaaatcttcaaaatatcagtttatggtccttcaaagctcaaccctagccgattacattttattccttggaattcaacggtactgggaaaaggccagtgaacagaagcagtaacaaactctaaagaagactccttagaccctggctgcagcggggagttgagcacctagaggatccctcactgtctactccttgctcccccattcccgcagccccagcaggcactgttcttgctcacaccctatctgcttcaaaatcgacccaggtgcaccagggaatgaaggaaacttatcactgtctgtaaggtcacatatggactctcaaagagacatgaaggagcccagaggagaaggtggcctgggcaattacctgtgtttaaaatgtaacaggaaatgaagttgctcacatggtatctgaggagcaaatgacaacagggaagaagataatgagtcctgctgaaactcttcaaaaaataaatgaatgaatgaatgaatgaatgcagattaccatgaagaaaaagcttgtctgactctgatcaataccaaatcatcataagtgtgtgtgtgtgtgtgtgtgtgtgtgtgtcacattctacagatgtagagggagcaaaggccaactgcaacttaagagattactcttggggggagtataggggtttttggaatagcatttgaaatgtaaatgaagaaaatatctaataaaaattttttttaaaa

SEQ ID NO: 1357 - DNA, 1000 bp, mus musculus
gagagggaagaatgaaggctttatacaattttagggtaatagtaaattatttgggggtactttagggcttggggaacatcaatgagctgagacaaagtgacccaaagaacgggcagtggtttttaaatgagtctctttggaatatggaatggggtcaaaatgaaagacactagggtgtgacaaagtcctcacaggtatgtggtcagtgtttaatctcccttcctgtgctgagtttggctttctctggttagtgaggtttcagtaaatcaaactgaaggcagttggtatccaggtcaggtagacaagggaacttggtggaagagccctatgttagtctgtgataaaataccatggtcagaagcaacgtagaggagcaaagggtttattctgactaatgattcaggagggattaagtccacggaggcagggaaggcagacaacaatcagaacagtggtaacaggaacaggaagctgactggtcacatctcatttacacacaggaagctgaaagaaacatcaagatagaatggggcctcaaaaccaatctgctgtgataggcttcctctggcaaggctctacctcctaaaggttctacaacctccccagacagtgacaataactggaatcaagtgctcaaatacatgagcctatgagaggcagttctcaaactacagcaggacccttgttgtgcatgggattcgaggagccaggcagggtcacagggagcttgacctgagttcacgtccaaggccctctgtcttctcttataatagaccaatgaatattgatgaactccacatcctctgagtcccagtattatttaccaaaattcaaaactgaatgagcatgcattactttttcaacgagaagccaaaagctcaccagaactcacttgcagtgttctaatccactgaagcatcaggaaaactgaagcagtgtcaggtccagatttgccagtgtgggaagctgtgcattgatggtgatggtgaatactaacaca

SEQ ID NO: 1358 - DNA, 1400 bp, mus musculus
gaagctaggacttggctgattttccagacctttatctttctattcctaattttatttacccatgtctatttactgaatagcttttacctcaagcattgtaaacacttcaaagtgtttacactttggagataattgaatctcttcacttcccacaatttttttttcagtttatatacaatgtatgtttccaagacaactagaatacataaggaacattcagataaaaatggactgataaattcaaatgaaggtatgctgagtcacagcataactgtaccagactggggcttgaaccctctgacctctatgtatctgatgccctgaatgatgcccctgtagttagttgggccagtcataatacaggtttgccccttttcccaccccatctggatgaagaggcagaagtattctgttagagagatcagaatctcaggcctggatccccctttcctaatgtgtgggttaccatgttgctactctttcttttgcaacatggttaggaaaaccttcctagtcaggcagaagtgcagagcacctgggcctggcctctctagcttttgccaaactcaataggtgagggcatcctattcagcagcgctctccaaccacgatggtctgaacactccactggttcctagtcccatccaaatcctattccacaactccaagctccatgcatctcattctcctctcattccccactctcctggatcactaaactttagtcccatcctcattttgtcacacactgctttgtatcaagcctcattagtactccatttactcagggggtttcccctgtgggagctctttcccacttccaccaccatgtgtactaggtccccctccccgcatgctcttggttcttggtccctagcaagtttcttctcctcaaagaagccttctagacctataagacgcatggaagccttcccactgtacagcttctcagacaaccatgcaatgtctgcctgtcttcattcttcctcttaaagtgctcacccagagactgcactcaccagattgcccatactagcatcctctttctttactagtgaggagctagggagatgcatgcatactgtgatatgtttatggggtgattgagcaagtcgggaaatgagtgagcaagttaagaaatggcttctctgctgcagtattgaagctttccttggaaatggagctatgtaaattggtatgatggctttcacattttcaaatgaatgttatgataatgaatctataaatatataactctttcttgatcagtaagtgcagcagggccatctcaggttaattcagaagtgtttgtgtagatggtatagagcaattcagaagaaaaaaataaagctgttgaaagtggcttacaactataaagttattcatacttttatattttg

SEQ ID NO: 1359 - DNA, 1800 bp, mus musculus
gctactatctagcctgtggcgtgagctgcaagtgctgaagaggccaagagagcagggccagtcctgtccactgccttttgccctggccatccgcacctacttccgagggttcttccgctatctgaaggcaaaggcacacagcgcttgctcctgggagatcgtcagagtccaattgcaagtggaccttccagcgttcccactgtctgcgagaagaggcccaagatgaggagaagccccgtgcaggaatctctctgctctcgtgacaccacgctccctctctccattcaaagcagacatacggattcggattcagcaccaacaggcgaaatgggcgtgcatcgacaaagagcatcgagttctttatgtcttccctgccagaggccccgaagcatcctactgtacatcatacactgcgaaagatgtttgaaagaaatcctgtgctcttgcatttgaggtggcttctgaataaattgatggtctcggttttccttgggaggttttgatcacagatgggggatgcccatgggccacgggggttggaaaacgtgccttgttgcagcaaggctcattcgggctgttgggtgttagagccgttctctctcctgtcacggggttctgggtagcttcttgtaagctgggaactccagactctcagtctggagggcgaaggcgacctaggctttgtttatagagagggccttacgaagggactgttcagcccctggatgagcccctggatgagtgagcatggctctcctccaagtcccgaagcaggattccacgattcttctcctcttctgttctgttttcttttgttttgtgtttctacctgcttgcctccaaacacgtatcacagtcagcacgccacagtcccggtgtttcacataaacaccagggggcagatggggaaagtttgaggccatggagctaaaggcatgaagaggctgaaaatatttcactccacttggaagctcctgccctcccttgatcactcaattcctggggtgggatgggtgtggtgggagttgagtggggaagagggcgggagacctttaatttctcagaagcctttatcggcactagagctgggcagatacccatgctctacgggattatgtccgtttcccagcccataacacctctctgcaatttccccacccccttgcctctgggcttctcttgactcctgtaggccagccagcacccagggccgttattttggattctcacctcaaggcatcttcttccctctccaccttcctctctctcctggaccccaaaccccacccgtgtcccttctgcccagcgggtggctgtgggcaacagctttttttttttaaatgtttttttattcacatttatttagttagttagttatttttataaccaagagcgtggagtcaaggagttaggtcttttggtccatgcagagtctcgtgtccttgggaacaaccctgccttggaagcgagtacttatcacgaccatgcaccacgaaagatcaagccctctcccccacacccaaccccccaccccccacacccaaaacaggagtcacataagacatctttctcaggattccagaagagaatgaaggacgttggattacctattctggctgcggggtggtgtgggaatttttggcaatagaaaacaaaacctctccaaacccctagctacctggtcaaagtaatacatgaaggaagctgctgaaaatgtgaccgcattcgtattcagaatgggagagaaaactcgtgctgacttacagagggagggttgatgtcagaaggagcagagacagg

SEQ ID NO: 1360 - DNA, 1200 bp, mus musculus
aagaaaaaaaaaaaaaacagaaacaaaaccaaaaaaaaaaaaaaaaaaaaaaaccacactgaaaagaatctgaacacgaaaccccacttacactgtatcagggttatctacatccacacccaaattacattcaacacaagcactcaagcagttgtaccatgctaaaaaccgccacacttctgacttattcatgtattaaacatttcagatacctttgaaatcagttgaaattaatataaacattatttcaatacccatcagtgttttatctattatttagtttgagacaatgtctcactacatagccaaggctgtcctcgaattctaaattgtcccacctctgcttcttgccccgagatcatgggtgggagccaccatgcccagcaacatcattcttgggaagaaagaggtatcgcgattctccaaaatataacaaattaaacttatattcgattcaactaactattccacaatacttagcagtttgaatgatatctcttctacttattacatggaatagttacctagaatttctttactttcctagccattctttagaatttgtgcggaacagaacaactaaagataatctcagccatcaaaatttacccaacaattatcctaagttcaatgtggaatcttagcatgagaacacagtcacttttcagccatgacgcttatcccaaaactcttgatattatacctatcaaaattaacatgtcctggcaccattatccagtattaagaaaagaacaggggagcaggctgcagaggactgctcggctgtcaacagagtaccctgttctgacaaaacccaggtcagtgctcccaactactggagaggatccaaggccctcctgtggcttctaaaggcacttcactcacattcacatgtcaacaacaggcagtcatgtaatatacatatcatttacgaattaagtcctttaaacgttttttttttctttcttggctacatggcaagttcaaggccagcctcaaaaattgaaaagaaatcaccaggaaaagagaaaaaaaggtaaaacaagattttcaaaaatgaacaactaaaaaccctattcattaagtgactgtggagcttttttcaattttcaaaggaattttgtggggcttttttttttcaagtttagaatgtatggcctaattagggttttctgcaagattctcttcaccatctcccaa

SEQ ID NO: 1361 - DNA, 1200 bp, mus musculus; identical to SEQ ID NO: 1360

SEQ ID NO: 1362 - DNA, 1200 bp, mus musculus; identical to SEQ ID NO: 1360

SEQ ID NO: 1363 - DNA, 1000 bp, mus musculus
tttcttcacctccagaagcagaactccctgaagcttttaaaatacccaaaagttgtaatactttagtttataataactaatcacgaatctgttaccaaaaatatcagatggagctgttacagctttctggctataccatttatcataccgtaagtgccaactaaatcaaaatctatcctgttcctaactatttatctgtcctctttaacaaaaggctcatttcaattggattcaagcatcttttgagtggctatcatgtgccagagtaacagaacagggttgcagactctcagtgtctaatggaaatcagattaagcttttaggaaaccctaggaaaagagaaaatttgaaaatctaacgagctcagtaaatgtgttatataaaacatagttacaggatgcctgcttgggcgttgctagtgctattaagtcttgaaatgtttgtgcactctaactttttattatacgattgtccacattttctccttgagataggagaacctatctcctcactaacagaacccttttaggagatagttttacaaactgttaagcgcttgagccatggcttcagcacatgccaatttatacttgactctgccactatggagtcttacatccacgtatcacctttaagtcttggtttcctgatctctaaagcaatgatagcaaggatcaatgtctagcactgtgaggttaaatataatcataagcatagaacaatcaaaattcctgcatgggcgaagtcgtcaatacatagtaactacaaccatggcacatttattttcataaagccagaattagaatccctaccttccatgtggtcattagtgtcttacctgatatattttatgataaatatcttctcatatttctaattgtaaccaagttttaaaggctccagaagacataaaaatcttctgtctgccctgttaggtgactccaatatatttcccaatacaatttcatgattcacccataaaaagttgtggatcttcaaa

SEQ ID NO: 1364 - DNA, 1600 bp, mus musculus
aaatccacttggcttcattacagtattatttgtgtcaattgctatagtatgcattaaaggcacagaacttaattatctagcattaatcaaagtgtataacctcaagacagcatctctgttactttcttgtccttaaatctgaaagccactattctcctaattctatgatcttgaaaatttagggctacaagaaagttcgtgtattgcatctttatgtgttttcaaatgaaagtagcatgacctgtattcaatggatgaatgataatcttgtgtgtacatgtgctgcactatcactatcatgccttcagttcttcagccaatgctttttatatatttgatattatgctcaatgctgtttaaatttttatttcttttttattagatatttgatttatttaattacaaaaattagcccctttcctagttacctccaaaaaccccctatcccttcccccctccccctgctcaccaaccaacccactcatgcttcctgtccctggcattctcctatactgaggcatagaaccttcacaggaccaaaggcctctccacccattgatgaacaacaaggccatcctctgctacatattcagctagagccatgtgtcccacaatgtgttttctttggtggctggtttagttctagggagctctagagatactggttagttcatattgttgttcatcctatggggctgcaatccccctcagccccttgggtactttctctagcttcttcattggggaccctgtgctccatccaatggatgtatgtgagcatccacttctgtattgtcaggcactgacagagcctctcaggagacagctatctcaggttcctgtcagcaagctcttgttggcatccacaatagggcctgggtttggtggttgtctatgggatggatccccaggtagggcagtctctggatggtcattccttcagtctctgcttcacactttgtctctataactccttccatgagtattttgttcccccttctaagaaggaccaaagtatccacatgttagtcttcctttttcttgagtttcacgagttttgcaaattgtatcctggctattctaagtttctgggctaatatccacttatcagtgagtgcatattatgtgtattcttttgtgattgggttacctcactcaggatgatatcctccagatccatccatttgcctaagaatttcataaattcattgtttttaatagctgagtagtactccattgtgtaaatgtaccacattttctgtattcattcctctgttgagggacatctgggttctttcctgcttctggctattttaaataaggctgctatgaacatagtgaagcatgaatccttataagttacttccttgctattttcaacaaaaggtgtataagataaattctgatcaacaatgtgaaaagacgcttttgcacattgtaataagcatttgttattagtggtgatgcattgagtcattacatacataaggcacattgatggtggttttcatctctatgtttgtgtgcactaattacattttttcctcataaagatatttctgactttgcctccaaaatctggaattaaaggcatgtgcca

SEQ ID NO: 1365 - DNA, 1000 bp, mus musculus
aaatggatggaactggataatattaccccgagtgagataacccagtcaaaaaggaacacacatgatatgcactcactgataagtggatattagtcccaaagctcagaatacccaagataaaattcacagatcatatgaagctcaagaaaaaggaagaccaaaatgtggatgcttcagtccttcttagaagtgggaacaaaatactcacaggaggtagagggtggaaggaaattgggaggaagagagtggggcaggaaagggtggcaggatcaggtatgacaggaaacagggatgatatacagagagtcaggaatttgaacagaagtgcgtagcaatgagggatgaagaactggaggtaggcaccagcaagaggctcccatgaaacaacaggggtgagattagctgaaatgctcaacaaaggggagggagaacctgaagagaacatatccagaggttaggcagggaccctggttaggggatgaggccacccactcatctccatattcttaacccagaagaactcctgcctgaaaggaaataaggggacaaagtatggagtagagactaaagaaaagaccatgcagagactgccccatctggggatccatcccatatacagacatgaaacccagacactactggggatgccaagaagtgtttgctgacaggagcctcttatagctgtcacctgaaaggatctgccagaggctgataaatacagaggcaggtgcttgcaaccaaacattggacttagcaatgggtcttcaattgaggagttagagaaagaactaaaggaactgaggggggttgtagccccataggaagaacaacagtatcaaccaaccagaacccccagagctctcacagactaaaccactaaccaaagagtacccatggagggaccaatgcctccagccgcatatgtagcagaggatggcattgactggcatcaataggaggagaagctcttggtcctatgaaggcttgatgccccagtgta

SEQ ID NO: 1366 - DNA, 1200 bp, mus musculus
ttcctcagagacttgaagttcttgttatacagatctttcacctgcttggttagagatactccaagatattttatattatttatggctattttaaagggtgttgtcttcctaccatctttcttggcccatttatcattttaataaaggagagttattaatttctttgagtcaattttgtatccacccactttgctgaaggtgtttatcagctataagagttctctgctagaatttttgaggtaacttgcggggctgtgggtgttggggagagaggggagtgggagagtacccgtgtcctgccagagttccagtgctctgggcagaaagacatgggaggactgtccatgctttccaaatagccctaggtgggcatctggctgtgttaagccactgaccaggcacagcaggtgatggacaaggggcagccccaggtatgagtttctctgcctccggcaccccatggtgaatatggtggaggagctgagaacagaagagaggccctgggttggcactcagcctaggagaggaagggaagagagggcactgggggttggggggaaggcagtgctggatcggtcccacgaagatgagagtacttagtccagtccatggcagcagcataggaaggccttctggtgggaggttagacgtggctccttataaagtctagtccatcattcaagcatggtgggccttgatgaacagagacagtctatggttttagagttttattgtagaaaggcagggagaaaggagagaaagagagagggagacaggccatggccacgtggagagaggggggaagggaaagagagaaaacaggaagtctagagagtaagaaaggtaaaaggagtgcgaagtggggccaagcagtccctcttatagtgggctgggctatcttgctgttgctaggtaactgtgaggaggagtctagccagaaggcctgaaatttgggacattgtctatgtgactggtagccacaggcctctgctgtgggggctgtggaggtaacttctacaggagccaggggtccaggagacatgatcgaatgccttctgtcccatgtaggtggaaattaccacccaccgggtcccaccagggttcaagacttaagcttggctggagaccaggctgtctgtgcaaagcccattgtcccacagtaagttatgtatactatcatattatatgcaaatatagata

SEQ ID NO: 1367 - DNA, 1000 bp, mus musculus
agtactgcatctttcattgggaaaagctgcccaagggctctgtgggttgagactggcagcatcttctaaatctcctctctgaggttgagcagatggcagctttcagattggaaacttgattcaatgctgcatttagtgtgattaaaaacaaaaacaaaaacaaaaacaaaacaaaacgaaaaaaaaaaaaccaatgagcctggggctgagactatacaaccccccacagaacaggtggcaaaatggaaaaatgaaggtaaaccagtttgtttgttatccccacaccactaaagaaatggcttgatgaatttttttccccaagtggaatgactatttttttttgttgttgttgttcctctcctcatcaaatgaattgaactgaccagctgtattggcatcctgtagacagggcctgaaaagtctcctgctctaacaggcttcaaactgttaggggtctgtagtgacacagcaggtgcagggagatctaagcccttaaatgcagtgtatacacagagctctgcagacagtcctgcggagctaccacataagatggtttttcatgtgtaaatgagaaggtctttcatttttcaagcttttgcattatattcccttctgttgaaagacaaacacaggaaagcaaccagcactgaggcaattacagaagggtggccagtgccatcgccaggacggctggcttcagtcagaaggcttaagtgcaccagcatggctctgagttcctaactagagttcaaactcttgttgggcatgcgtgatttctcaggattgcttcttcggaaatcagtgtaaacaggagcgcataggtgtgggcaaggctttctcggattgagggtgagaatttaagttcgacttagtgaaaagaattctaaatgactgattttcaaggtgagtatttaccagggatatattttaggaggtatattttcctttaaacccattgctagaaagcaattctatggtctttcaggatagattaggtgaa

SEQ ID NO: 1368 - DNA, 1200 bp, mus musculus
cctaatgtggatttcctaatgaggagagtgagtcaacctctactctttggccatagttacctttgatttactaatccattagtttattaaaactaatgacttaagagtagtttggggggcagactcctacttggtctgctcccatgaagacaccatagcaagatccatcctagaggacccactgcactcagagaagttggtaagaacctcttccctccacctcttgagtcctggggctacagctggtagcctggtaggcttgggacccatcacccaccaaaactctggccctccaatatactacttcccttccatcccttcaccccttcagcctggtctttgctactagggcagactcgtagttggtctgctcctgtgaagacaccatattcagatctatgctagaggacctgctgcacttagagtagttgaggatccactacactcagagtagttgggatcagctgcactcagggcaggtgcacaacagcttggctgcttcactgaagacctattgcccgagcttttgtccctgccagcaagaacacactcaggacaaccagaatcttctgcggcaaagcttttattgcttacttatcaggagggaagacccctaaccgagaaaatggcgctgcttatatagcctgcagcgtgacattcagcacctgatgtggcgtgatagctcctgattcgttactcacccatcaccccattactacgccgcgagatgggcagtgactaggcgtgagttcactcttgcacttgtgcataaggcttatttactagttaggctcagtggaagccagcgccatcttataatggcgattgctcacagcatgctcgcggcacagctctccacaaagacccagcagtatgaaatatcccaggagatctactagagccagggcaacaaatcagcaacatctcttcctctgtgaagagcccccagttggatggccccatatgtggtttgatacatccagggccacaggcctacttggagacttcaagcatcccaaagacaaaacagggagactccaaacagtcaccaagaccaacaaactccagggatatccccatggtgaaaggcaagcacaagaccatgagcaacagaagccaaaatatgtggacatcatcagaacccagttctcccaacacagcaagccttgaatacaccaacacacatgaaaatcatgaatc

SEQ ID NO: 1369 - DNA, 1200 bp, mus musculus
taatactgcccctaagataccacctttctggttaggtaatactgcttgtttgaataattttatatatttcaaggagatcataatataatcaagattattaatgatgcaataatgcagctccacagtccacacatctctcgattctgatctttttttttttgatattttatttatttacatttcaaacgttatccagtctcccatttcccctccgcacactccctatttcatcccccatcctcctgcttctatgagagtgcttgtccactcacccacccactctcaccacctcaccaccctggcattcccttacactgtttactctttggtttgtggtttagtccctggaagttctcggggtctggttggttgatattgttgttcttcctatgggattgcaaacctcttcaactcctttagtcctctccctaactcctctttttgggatgtctttgctcagcctaatggttggctactagcttcaacctctgttttttacaggctctggcagagctctcaggagacagctatagcaggttactgtcagcaagcagtttttggcattagcaatagtgtttgggattgttgtctgtatatgggatggatccccatttctctagactgacttttcttcagtctctgatccatactttgttcccatatttcctttagacaggagcaattctaagttaaaaatttggaggttagcaggtagcctcatccctcatccaggggccttgtctaaactctgaatatggtctctacatgttttccctcccctttgttgggaatttcaggtattgtcatcccagttgtgtcctgggagctttttgctttcctggcatctgggactttctagtggctatctccagttcctcagcccccatcgccacatacctctgctcaatttcctgactctatcatccccatctcctcccatacctaatccttccccttttttatcctctacttcctttattcctcccaaatcccttccaccctctacctcctgttattattatatttccctttctgaaaaggactgaagcctctacaatttggtcttccttcttcttgagttttatgtgatctttgagttgaatcatgagtattctgacctttggggctaatatatacttatcagtgagaacatactatgtatatccttttgggtgtagattaccttactcaacatgatat

SEQ ID NO: 1370 - DNA, 1000 bp, mus musculus
tctccacatgatccatatatgcatagaaacttgtttctctaagtctaaggaccttaaaattactgtccatgaattgtgactaaaaatgctgttcattgagccaaagagaagtgatctttgtggaatagtatgcatttatccctttgtcaagccaagatcttcctttttcttatagttacactccatggatgtagacattcctgtaaacatacagggtagatatgtgtgtatagaatatagtgaggccagtgtgcagtcctttcccattctccttcactggagtcctgtcctcagctcacttgcccctgagcactgctatgacactccccaggacaaaatgccactcattcttgtggaatcaatctttatttatataccaaattattgggaactacctaatacttaataagagatgaaaccctgagtttatcaagttatgctccaagcaggagttattttcactattagaatacttattacctcaagatacccttgataagaaatgcagaaatcaacaataattgaacatcaagtctagaccacagactacattggtggcagtactttgatgctgtacctcctacccatcagaagcaggagcttatcactgtaaatggatgatttttgtcaagacaataagcatacaaaccaggatattgaataaggccaaccagccccttacccacagggttgacttctacagaagtgattcttggcttgttttggaaggctttactgtgtactctagactgactttgaattcatgacctttctgtctcagcctccagagttctggcattaaaggagtgagtcccatggccaatcatgttttgttcgtaacaccggtcttaggtttgttgcaattggacctcaacgttgaaaatcactgaagatcagtggtgcgttttcccctgcactatgtgcaaaacaagcaaatatcccagctgtaccttgacaggtaactgtttataccacatgctctcacatagatcatgcttca

SEQ ID NO: 1371 - DNA, 1200 bp, mus musculus
agattattttgctttattattttacattatgtaactccaatattttgtcacaatgatgaacacgaacacacatgtaaaattgtatccatttgtaagatttagtgatttatttctacgtgcaaagtttattttaaaattttatgctttgatgattttgttattcttaagaaatatttatcacaatttcatatttctttccacttaatcatagaacaaaaaaatctagttcactaaagaaaaagtttcatagaaaacccagcctccccagggtaacaagtcccttccagttggggccagcactgggtcacctggacgcagagtcagtagatacccgcaaggtccctagaggactctccacacaatcttaggacctccggtgagtggaacacaacttcttttccattccaatcgcacaagacatgaggcagcattaggaaagcagaaaacctggcctgaccaggatcaaaagtcccttccaatcagctccagcaccgggtcaccttgggtgcggagtccgcaaacacccccaaggtccctagaggacagtttctgaggcagaccccatttagggctccagacatttgggtacctttcctgccagaggagaggtgtcgctccacctgggagtgctttgcctgagctcctacaggagccatcttggtccccagatccctccaagactagtctgtgcaggtgagagtttggactacagaagctatacagcttctgggacaggcagaagccacacagcttctgaagcagaccactttttgggcttcagacatccaggaaacttacctggcagaggagaggtgtcctccctgcccgggagggctttgctggaggacctggggaagccatcttggttctctgatcgttggactacagaagctaacagcttctgggacaagccctgtttcaggccttcatcttctgccaggaggcatgtccgaaaaacagatatctgtgcacattccctgcaagaggagagcttgcctgcagagagtgctctgaccactgaaactcaggagagagctattctcccaagtctgctgatagaggctaatagaatcacaagaggaacaagctctatccagagacaactataacaactaactccagagattaccagatggcaaaaggtaaaacttaagaatcttactaacagaaaccaagaccactcatcatcatcagaatgca

SEQ ID NO: 1372 - DNA, 1400 bp, mus musculus
aatatgtattcccctttctcatcttttctaacattttgaattcattcaatctttccatgtgctatcattttcatttgtcatataattaaacatgtaaaacaataagtagttcaaatatactgatcgagattcatgctcagctttttgtgatccataccttttgctataagatgaactactgtttgtccaggttcatgacaatggtagtttctttggtagcaataatgttgcagaaaatttatttaaggaaatttacccaaccataagcctttgcacttagggtagaaacatacttaagactctacggttttgtttctttctctcatctatactgccttgtgaatacatgtaagtgcccagaaaaaaaaaaaaaaaaaaaaaaaacagagtaagctcaaacccctcaacttaatctaacctgtaatgtcccttgtgtcctacaaggtaacaaatacatgtgttttaagagattagaaggagtgtgtttagaaaaagatgcaggatcctgtctcctgaaagagaaactgacaactccacagttaacttcatcaggactgcttttctttcaaagtggctgctccatctcctattttcacctgggatgcatgaggttataattgctctgtgttctagccaagacttgtttattaccagttgttttcataatagccatcctagtggttctaagtgttatctcactgtgattttgatttgcatttcctaatgactaatgatgttgacaaccattaatgtgctcactgactgctcttataccttttaggaagacatgtctattcaagtgaacaagggggtgtggtaatgatttattgattacagaattattgaacagtcattgttttttcataagggtaagacagtaaatatttcaatttgattcctttggtatttaacagcatgagataaatttaaatattagcatacataaagatattgttctgaaaacttaataaatatcattgtatcaataaacagtaaatgctattctaattcaacttaatattcatgtaaatttcttaaagcttttaattattacatatataaaatatttttaaatgatatttgtatatgttcctgagtgcatatttgtgtgtgcacatgtatgtgcattaagcacttatttttaaatataacagtgttttgtaaaagcctggcatatgtttaaaaattacttttttaaaattacttctaatgtgagtaatatttaaatttattgataatgactctttaaaaacattttataattttactactgatttttagagtttattaatattgagagagataagagtatttgttacatggttatataatatagtttgggctggttactatccttggtcattctacaagaaattacccaagtgttcggattatgtgtg

SEQ ID NO: 1373 - DNA, 1000 bp, mus musculus
atccagtaaaatactgcaagaaagcatgcaagacccgccacactactgcagggacaaatttggaacattcgtgctatggaaatgccatggttccaggaggctaagtttccatgaaacatttttgcctcaggactgtgtccaagctttgggactgcctcacagtgttcactggagtgggtgtagcaatccccaataatgttatatttttatgaagaatccaaaagtattactagaaagataacaaagatgagaataatagaataaaaggaaaagcatttgaagggaagagaaatcaccagtgatatttggtaaatcgagctgctccttccagttaatattctttcaaatactcatgcagtctaacttgaataactcaaacattaattcctactctactccaaaagatttttttcttagtcctcctttgagagaaagatgaaattttagaacctacacatcatgtaaaatgtaccagaaagtttttttgtgagcccgaaagactgcttgaggctgagaacaaagaagaacaggcccaggcatgtcctagcaggccagtcgttaaggcattcctaagaacagcttgaccataaagataaaaaaagattacaaggacagaacagggctatcttggctgagtcaacaccatctgcccgctgacctcctgactcagttcagagtcatatattaaccagatgttccactgatgtagataagcacccaaccctcagacttcctgacaccccaatctacaggtacacttttactgatatataaccattctgttgaagtttaaattatccaatcatgtgaaacctcactaattccttccccagccccagacccttttctataaaaacccctagcttccaagcctcttggccaacatctgctatctcctgtgtgagatacaatgttggtccggagttcggagttctgtcattaaattacctcatgtgtttgcttcaagacggtctctcgtgatttgtttgggtgcacaccg

SEQ ID NO: 1374 - DNA, 1000 bp, mus musculus
tatcagcagacctgggcgactagctctatccttagtttcagtggtcagagtactctctccaggcaagctctcctcttgcagggaaggtgcccggatatctggtgttcgaacctgcctcctggcagaagttgtgttccactcaccagaggtcttaagaagatcccgtaggagttctgtgaggcccttaggggtgtccagaaactccgtgcacaaggaactctgctgctggagtgaaccggaagggacttgtgcccctgatcaggccgggttatctacttccctagttaatgcagtctaaggtcctgcaaaattggattggagcagacgctgtgttccactcaccagaggtcttaggatcccatggggaatcctgtgtggttccttgcatgtgttcagagactgtgtgggcaaggcacccaggtgctgcagtgggccggaagggacttgtgcccctgctcaggctgggttatctgcttccctagttaatgcagtctcaggtcttgcaaaattggattggagcagatgctgtgttgcactcaccagaggtcttaggatcccgtggggaatcctgtgtggttccttgcaggtgtccggagaccccgcgggcaaggcctaaactcttttcacgagatagtctctattccaaatgatactcctgtaacagctccctttcctcagtttatgtgaagtaatatacaggcattaatggttaagtctcaaaagaaaatacaaatactgaccaagaggttaaggtcccaaatctgagtgacttctcaagaataggaaaaagactactcaggagagaaagactgtcatcaatgaaaacttttcactcattatcacagtgcagcctaatacagaccctcagtgtacttaggactaccccccaagacagtatgtgattataacctgtgtcctctagtttccttagcacatggcctcaataaacctactgactcccaataacttttgtttcttaagttttagcacagaatctggc

SEQ ID NO: 1375 - DNA, 1000 bp, mus musculus
atatataacttagagtaaaacatcagcttttacatagtttaaaaacatgatgtccccactggcaatgggcaaaaagatactttgttggtagtgttcttatatcggtcaggggcggagcagatggcagtcccttgtttatcctagcctgatgcctggcttggtggccaaagctgttttatgtctaggacatatcaaatgaaattaaatccagtcaggatgacagagttctgccatgtcacacagtgtgagctggaaaggatgcccacaggtttattactaagcagtgcagcatgggagaaagacagacagacttgtagacctatagacttccatgccacccacagacctgccctcctatgcttgacacaggcaaccgtagatactcccttgtctgaggatgtcacccacggtcccaccagccacatggccagtctgcagcgggagccaccacactgtgtgaggagatggtgggcagaggggcaagaaagacatgtggagcagcgggaacattatgaagatagttggaactcgagaaatgaaggtagaggggagtggcctgttgatagtggccaacccttgttatggggcccatggtgaagtcccagccagatgtgcctctgtcatttgtgtgtctggatttgtggctatgtagcagctgggatcagggtcaatgtctgtggaccacatgacccacctgggaccacatgcatgccccggggctgtggaaaataggccccacccttcactggctacaacctcactggctagccctacctctgaccagcagcaacactctggagaatgggcctgagctttgcccaggtcagctcagtggagttttgtgtgaacagccccaagagtataagtgtgagagagctgacctcaccacggatgtcagggtgatgccactactcctcttacacttgggaaaattgtccacagggtcatgagctcaagagagctatccttgccctcaccagctgcagaacttggaagagtg

SEQ ID NO: 1376 - DNA, 1000 bp, mus musculus
cacagacctggaaggcctctactgtatgtgtgttgggggcctcatatcagctggtgtatgctgtctgtttggtggtccagtgtttgagagatctcaggggtccagattaattgagactgctggtactcctacaggatcacccttctcctcagcttctttctgccttccctaattcagcaataggtgtcagctgcttctgtccattggttgggtgcaaatatctgcctctgactctttcatctgcttgttggatcttttggagggcagtcatgataaatccatttttatgtgtgttccatagcttcagtataagtgtcaggccttgggacctcaccttgagcaggatactgctttaggactgtggctggaccttcttttcctcagaatcctgggatgggggggagcacagaaaggggaacatgatctgatattgggtgagggaaaagaactgaagccctgagggccagcagaaagaatggaaataggcaacctcataaaataggaggttggggggaccctcaggaatgcacagagacctggaaggtaagacactcccaggactcaaagggagggaccagggactgtagatttaatgcctgacagtagggagagggcacttatagagcccacctccagcaggaagatagggcatcaaatgagggatggggctgctatcctacagtcacatgtctaacccataattgttcctatctaagtaatttgacttttgacttttggaaggaatcatagtttagagattgctgtgagtctcagaaaagactttgaatttttaagcagtgttgcaaatgcaaaagagtatgggaattttcaaagttagactaaatgcatcttacataatggtgtgagcatgaaactgtggggtagaatgtggtggtttgatgagaaatgttcccaattggctcacatattttaatacttcatctgtggttggggtcttatttggagaaactgaggatttttagaaggtaaaaacctgttg

SEQ ID NO: 1377 - DNA, 1200 bp, mus musculus
ctgatactttcaaggaataaaatatctccttattaattttgattggagtgcattgtaagcagcattgagcagagggaatgtctttgatatttaacagatacaaattatacaaatcttaagtgtatagttcaatgtatggcacatccatataaaaccactcaaactgagatataacatattttcaggaccggaaagcctagcttcctgctatccatcattaatattcctgaatgtaattttaattttgaccactattgctgtctttttatctactttgggggatcttatatgttttctacatccatatttgtgaagtccaatcttgcctctgtctccttgagcatatggaatgtggttataataattgttttcatttctttgtctgctgactatcatctctgttcattctaatcattttaattggctggcttttctcctcatgtgggttatatttttcactttccttgcatgcctggggattttcatccgatgccacatatggtgaattttattttggccactattggctgcttttatctatattcttgccctgagacatggtaaatttactttaaaacagattacttgggggtcttgcttttaagaagcttcctttagatcatcccagaaccagtgctaatcccaatttctacattagtattctacacaaagcccccataaattatgttttctaccctgtgccatggaaaaataaatcagtctgtgttaaaaagagattcaatggttgttcctaatattttcacttgtatgtaagcacttgtggcaaccttccctgaagactcaaaggaaccccttcggacttcttcctatgcctaactctaatccttagagaatccatccaccttggctttcagagtctcagttccagttcccccactagggagagcacagaggcctcccatgcatggccttcctatgccacagtctgaaaacattccaggagaatacagggtacttcctactttcattgccatctcccaaggatggttgtcctttggtgcttgctccccgtggcttagaaaccaccatcactttgtacaaattttagttctttcaggtagtacaagaaatctgattcaagttccaccatcttgaactgaaagttttgtctgctatactttacacatgattatatgattacattcaatgttctttgtgtgtgtatgacttcagtgactc

SEQ ID NO: 1378 - DNA, 1200 bp, mus musculus
tctggaacatacattttaaaagggagatattaggaaaaggtcagtgaaatcaagagtcatatgggaaacagattattttctatctttgactttaaaaacaaaactaaatcaaagttcacatctcagttttaccaattgtcttcatttgggttgcattgctgtgaagagacaccatgaccaaggcaactcctttgggcctggcttacagtttcagatgtgtagtctattatcatcatggtgagaagcatgtcagcatccaggcagacagactagaggagctgagagttctccatcttggtctacaggcagcagaaggggactgtcctctgcaggcagctagaaagggctctgattctatgctgggtgtagcttgagcttatatctgagacctcaaagcccacctccacagtgacacttcctccaacaagaccacacctcctaatattaccactttctttgggccaagcatttaagcacattaatctatgggggccatacctagtctaaccaccacaccagtcaacatttgctctgtagccctctttatggactgagttgcagtagtgacataggatgtctagtgataccagctccttcttggaaatgtactgtcgttttctcaccagtgtccctaaggcaactggcatagacaaccgaaagtctgatacatatgtgacagtaacaggagtcacagatggaatgtgaagtgacagtgggtgtatgttggaaaccactccatcccaggagcctggatcctgagattctaggtccagatcagccacttggtaccttcataactcagtttccctcctcagggtatttcccctgctcctgttttcatacttgctaagtagtatttgctttcaggataagctaatctgagatctggaatgaaaagcctttacttttgcactgttaggaaatgtgagaatctggcaagttccaaggcttagcttgctaattgcctctccatttggctttgatacagtgctgtatgattaacagcaaatgctcattaaccagtggtttaatgagaatgggaatcctgtttgattttctcaccactgtatcaccaacaattaccacagtccctggtacacaggagcgctaactccatcatggtaactgacttattgatcggcctggatcattttcttcctaaactatcatgaagactggttctgctcttctcttcccaag

SEQ ID NO: 1379 - DNA, 1000 bp, mus musculus
attacatgcctccatgaagaaattataaaattctcgcactaataggtttaaactatgtctgaaaggtctagaaaaaaagaagcaagtacaataaagaagagtaaaaggcaggaaataatcaaaataagggctgaaatcaatcaattagacacacaaaaaagaatggaaataatcaacaaaaccaaaagctggttctttaagaaatcaagataggcaaacctgttgtggaaaatataaaagaagtgatcctgccaactctcctcggtgtcagaccatgctcccatgctcctcccacctccaactctctggagctaacccctacagcatctggccatgagccactagttccctctatctctctatccctttatcccagtattttgaaccttgtgaaatcatagctacttgtggctggaaaatgtcgcacgtgtacatgtccgcagccatggtacttctccctcctattctgccatgctccctccctctgcgactcttagctctgactccctttttactgtccaatcacaggcctcccactgccctaatgtgattggacagggaaaatcctgcaacataaacccttagccaaactttcaaaacgactgagagagtgtatccaaatacatgaaactagaaatgaggagggagacataatagcagatagtgaggaattcaaagaatcattgagtgttacttcaaggcatgtactccaaaaaattggaaaattttaagacaatgcataattttcttgacaggtatcacctagaaaagttaaatgaagatcagattaactacctgaatagtcttataacccctaaagaaacagaagtagtcataaaattctaataacaacagcccaaggcataataattttagtgcagaataataccagactttctaagaagagttaataacaatactcctcaaactatttcacaaaatggaaacagaatgaaccctgccaaactcattctctgaagccagaatcaccttgatactt

SEQ ID NO: 1380 - DNA, 1000 bp, mus musculus
caaccaagggcctctcctcccattggtgcccaacaaggccaccctctgctacatatgctgctcgagccatgggttcctccacgtgtactccttggatagtagtttggtccctaggagctctggggagggggggctctgattggttgatattgttgttcttcctatggggttgtaagcccctttagctccttcagtcctttctacaactccttcattgagaatatcatgctcagtcgaatggttggctgtgaggatccgcctctgtttttgtcagactctggccgttcctctcaggagacaactatatcagggttcttacagcaagcacttcttggcattcacaagagtgtctgtatttggtaactatagggatggatcccaaggtggggcagtctctggatggcctttccttcagtcctgctccacattttgtctccgtattttctcctgtaagtattttgttaccctttctaataaggactgaagtacccacactttggtcttccttctccttgagcttaatgtggcctgttaattgtatcttgggtattttgagcttttgggccaatatccatttatcagtgagtgcataccatgaatttccttttgtgtttgggttacttcactcacgatggcattctctatttccatccatttgcttaagaatttcatgaaatcattgttttcaatagctaagtagtactccattgtgtaaatgtaccacatttcctgtacccattcatctgttgaaggacatctgtgttctttccagcttctggctattataaataaagctgttatgaatgtagtggagcaagtgtccttgttatatgttggaaaatcttttgggcatattcccaggattggtataggtaggtcctcagttaatactgaatccaattttctgaggaaaacatcaaactgatttccagagtggttgtaccagcttgcaatcctaccaacaatggaggaatgttcctctttctcatgttgcttcccc

SEQ ID NO: 1381 - DNA, 1000 bp, mus musculus
tgggataggagaggctcctaagaaccatgggagtgaccttagctgtgactcacagcagtggggatatagaacctgaggaggctaccttttatagacaagtaggaaccccagtggagcgataaagacaccaacccacccacaaaacttccaacccaaaatttatcctgcctacgagaaatgcagggatgggagcagagactgaaggaatgatccactaataatcagcccaactggagaccatctcaaggaattggcaagcaccaattcctgacactattaatgatattttcttatgcttgcagacatggctgtcctctgagaggctccacccagcagctgactcagacagatgcagagacccacagccaaacagtggatggagcttggagactatggaagagttgggggaagaattgagggccccaaaggggataggaactccacaggaagactaacagagtcaaataacctagacccttggagactttatttttcttggagaccctcagagagtgaaccaccaaccaaaaagcatacataggctggacctaggcccctgcacacatgtagcagatgtgcagctctgtcaggaacaacaggagcagggcctatcccaaaagctgttgcctgtctgtggaaaccattcccttaactcggctgtcttctctggcctaagtgagaaaagaaacatctagccctaaagagacttgatgtgtcaggctagggcagggagacgcaggaaggaccccactctctcacaggagaaggggagggaggaggggaagctgtggggggactagaatggggggacagcagtcagggtataaagtgaataaattaaagaaaaaagaaaagagaagtagaaaatgaaaaagctaaatgacttagctggagaaggaaaaggagagggagggaagagggaggggaaaggggagaggaagaagaagagggagagtgagacagactgaataactttgtatgaaggtcgttgcttacagct

SEQ ID NO: 1382 - DNA, 1400 bp, mus musculus
tcaaaaattaagtggttttccaattgtcccaattcccaatggcttaccctcatttctaaagtggtttggaaaataattcagtgcatttgaaaagcaagcttatagttagttttcagtctttactgataagcctattaaaatcatgaatatgttttattagactttatactcaaatatcattcagggaggctgtccacctatagcagcccctaccttctgatggctgctcatcatgggaaactttcagtagctgtgattgtatttcataatcttgcccaactggtgagagttattagtcagattgagggtacctgacccaggagggaccaatctgattatctgttcgggaagtgtggatttcactctcagctatatagcctgatagtgtttgtgagatgtatgtatgtatgtctgcacatatgtatgtatgtatgtatgtatgtatgtatgtatgtatgtatgtatgtgtggtttacaagaagaaatgaaagcagattcatgggaattggaagtcagagctaaaggaatgatcctagcagagtgtcttcctagttttgagttcttcctttctcccgaggcctagccagagtccttgtcagccttctttagatagcttagttttattatctcatgttacagctgaggaaactgaagatgatgggtgtaaagaaagtgtcttcctgtgagctaccggaacattccgactgtgtggcctcctcaccttcgctatctagcatacaatctagcagacatgtatcttgtatatatctacaattctagaaagttaacttcactctttagaatctaaaacgggagctgtgaatcagagacctattgttaggtaacaaacacactgtgtattcttgctacctcccttggttcttttgggcattggccagtgtcagttgaacgtttcttgctcagggtctcccctgtggcttcagttccagtcaccctgaatgtttcagtattcaaatgtctggtgacttttggttagggtctaaatggaggagatggggctccccaaactctttctttctgtggtagactctgggtatctgctagctgaaggtcccaaaaatgtctaccccaagcctcttttaacttgacccctgaattcacttgttcagagtcattttggcttcaggggtacaagaaaaagtcttgtttggtggaaggaatgtcaatgacttttcaagcctgttttacatctatactttccatttcccttctgtgtgtgataggaaggaggtgagccccatgctggctgcaaggagcttctgttttgagttggaagccctcccccatttccagacaactgctagtttcaggttttaatgacagtgacatacactgtatctgactcactttgtgctttcaatgaaaatggcctccttagg

SEQ ID NO: 1383 - DNA, 1200 bp, mus musculus
atctttgctaaagattttgttcctcacacagttgggttgggtgggcacatcctccatgacagtggttctcaacccaggggttgtgacacctttgggaggtcaaatgacctttcaatggggtcacctaagaccatcagaaaacacagatatttacattacaattaataatagtagcaaaattacagatgtgaagtagcaatgaaagtaattttatggttgggggatcaccacaacatgaggaactgtattaatgggcagcagtactaaggaggtggagaactaccactctatgaaatatataggtgaccacagagctatgtgttcttaccataacctggaggccaggtagcccatcacctcaggaaaaaaaatgtgtccacttgccagtgagcctgcctttttctccccagaagtctggatagatgcagtttaaggcaggcatatgcaagtgttctccgaaagcacggtagctgctcatatgaataaaagacatcacttgtttcatacaggtgcttcataatggaggacagaggctatctggtggctcatccgaccctcgttgaccccaagggtcatgcacctctggagcagcaacacattacccacaaggtattccttggccaagagggtcagttccattctgtgacagcctggggtgtgttaagtgacgtgtgtcttctgtcttgtggccttgtcaggagcccctggtagcaaatgatatcctgaaccatcccaactttgtgaagaagaacttgtgtaacagcttcagtgaccggacagtgcagagatcttacaaattcaacactagcctggtggtaagctgtgtgcacgcgcctgctccttcgtggacagaataatgcccatgtgccttggagtcacagaaccgtgggctgagggaaggactttagtatgactctcactgtgataatcgtaggacaaacggccaggatggcacagggactgtctgaaggtcacagggttggtactctggtttgattaatccaccaactgtattagttatgggtcccgagagcagtggttttcaacctgtgggttgcgacccctttggggactcaaaatgaccttttcacaggggtagcatatcaggtatcttgcatatcaaatatttacattacaatttataacagtagcaaattatagttatgaagtagctacgaaattaattttatggttaggggg

SEQ ID NO: 1384 - DNA, 1000 bp, mus musculus
caggctggccttgaactccaaaatctgcctccctctgtctcctgagtgctgggattagaggtatgcaccaagtccaggtagtgtttacctttcttaagtctgccactttgctgtggtaactaacctgctggtctgagttcctctgaagtcagaaacttcagtctcttgcatttaccacctcatagtaaagcagtagggtattaagtaaaggattaatttctggggcctgagttctggggactgagtgagtcaggttccttctggtgggcgccagcacagggccattttgggcccaaattccgcaggcagtcccacagtctccagagaactccccaccccacaggcaccctaggacacccaggatcttagtatcactggtaagtggaacacaacatctattccaatagaactgagggtgtctgtggacagctggagcaggacataggaaccccgcccaatcagtggctcaggttccttctggtcatcactggtctaccttggtttagaactcagccgatagccccatagtccccagaggaggtaccacttccaggtgctcaaagggcccagaatcttaggatcccaagatcccaggagattggtcacagcaggatctctgggtcccagaggaagcttgactaccaagacttctgatacacccagaatctcagcatcacaggatcccagaatcacaggatcccagagacagttggactctagaaaaagcaagaaaatagtctttcaagaaacctaaaaaagacagcaacattgtcttagttagggtttaactgctgtgaacagacaccatgaccaaggcaagtcttataaaaaacatttaattggggctggcttacaggttcagaggttcagtccattatcatcaaggtgggagcatggcagtatccaggcaagcatggtgcaggaggagctgagagttctatgtcttcatctaaaggctgctagtggaagactgacttccaggcaactagggtgaggatct

SEQ ID NO: 1385 - DNA, 1000 bp, mus musculus
cgaaacctccctggagaggggggaggggagggaaggtcataagacaggaagttcataaaacatataagacttacaaagttgagaaagttaaagatttccaaagcccctccccaagttgtagaagttacaacctaaccaactgatggggaggaggagattctttcacagcgccacgtggaagttggaaggggggccgcagggatgcagattttatgatttgtcacctatgctggggtaaatggtttggtgatgtagctgcctctgagttgtacgtgctctcataactaactccagtaaactcattggttcactagtttttttttttttttttttgatctgttgttgatgctgcatctgaggtgaacagatgcttgtttgtgtctccctggaaagagtcatataatttgcatctgggcagagatcaacagaatcaaatgtgatctagggaggtgtgaggcagtggacaatgagaggaagcctggtaaggctgaggtagggcttgaagccctggagatccagaagggatggacggtaggataccaactccaggtccctgtcatgtagccacagtctcctatagagagaattgtgtccatcagtcatgtaggggcagcaccaacaagtccctcctcatgtagctatggaatcttaggccaagtcaataggaagcacctgccgtcagactcagctcaccccaaagctgtatataagatcctatccagaagaaatagacgtgtgtgagaattactgttttctatgggcatctgtcatgagagctgtaacactacctgggaagagagggaagagaatgctctctccaagcttttgacaccagaagctccccatatactgcacttacttgctagctagccctcccctgactcagcttggcttggttcagcttggttcagcacagccagtgcagcatctcagagcaacagcagctgtgggggaagtggcagcagcagcggcagcagcagtggggtgtaccctttcccct

SEQ ID NO: 1386 - DNA, 1000 bp, mus musculus
attaaagtgaccaaactccaactcaaagcacttggaggaagaacaagaggacaggtgggtgacctggatgagcagtttctggagcctgccacccaacctagcagtccacggaggcagccactccaaatagtgtctgtccaaggatccaatggcattgcctctgtctcttgcatcgtgaggctccactgttctctccttggcgtgtgtcttcagaagaatcctttgtgggtcaggaaagatatcctccagccccagctcatgtctttccaatttaggagtagtgagggcccagagatgcccaatggaaactgacatgggggactctgcaggactctctggatggtgagggcatctgtgatgccaggcagggagtgtgaggcatggccaggattggcatgagctcccccaggcatgtgaaatggatgcctgacaagagcgtcagttaggtggtgagagaagatggtatgaatgggtctcaggagcattgcattcccagcacccatgatgagcagcagccttggagagatggcctgggtgtgcaaagctatgattcctgtctctagacaggtgactggtacagaaccaagaagtacatttgcaaaaagttggggtcaaattgtccaacagtaagcctccgacagaaaggctttcccacagcctggctctctgtaaaggaagtggctagcacagtggttccctggccctctctcacccagctgcaccaaactcttacaattttggaacattctatgccttttttttggtctcagcagagtgtcttcagcttcatttccctgactagaattgaaccgtgtggctttaatacctcagtacagatcattgcctctgagaagccttccccagctaccacctctccttggcatgtgtcttcagaaggatcttttgtgggccaggaaagataacctctagccccagctcatgtctttccagttcaggagtagtgaggacccagagatgcccaatggaaacagaaagctgt

SEQ ID NO: 1387 - DNA, 1400 bp, mus musculus
tgtatccattcctctgttgaggggcatctgggttctttccagcttctggctattataaataaggctgctatgaacatagtggagcatgtgtccttcttaccagttggggcatcttctggatatatgcccaggagaggtattgctggatcctccggtagtactatgtccaattttctgaggaaccgccagacggatttccagagtggttgtacaagcctgcaatcccaccaacaatggaggagtgttcctctttctccacatcctcgccagcatctgctgtcacctgaatttttgactaattccttttaatatgtgcttatcatactccagcaaaagctggtatgggatgctattgatgccaagaatattctgtgaaactttcccccctttgatattatatattgcctgtgatggctaatcttttgtgtcaacttgacacagatgggcagagggagactcaaatgagggattgcttgtatcagattgttctgtgagcatgtctgtcaaacattttctagattgttgattgaggtgaaagaacccagtccactgtggacagtcctacttctgggcacatggtcctgggattattacaaaagtaggttaatttgagcctggaagcaagtcagtaaccagtgttatttgctggtctctgctacagttcctgcttgagttcctgccctgacttgctttggtgatatgaactgtgatgtggaagtgtatcccaaataagcttttcctctctaagtcgcttttgtttgtggtgtcatacagcaacaaatactcaagccctgcctctctgccttgttcttcttgggtttcactttgttaacctcataggtacttatgcattctgtgtggatgatgggctcttggacttggagcctggatctactctcagtttaggagtctggaataaccacaggctgtattcgccaagaatccacatttatttatttcttcgatataaagtttattagaaccgccgctatgttttgcacttcatatttatttagattgtaattatattgtacactatcagtacctttagatggaacagaaaggaacttattcctacaatcttgaggacatcattccaggtttcaatatttccccctattaatttgcaaacaatagtaactcttcattttgtagacaattaggaggatttttagagataccatctcagttaaattactagtctggtgcctgacatgtaaagagttctataaatgttagatattacttctatatataataatcactaatgtcttatatataggaaatgctaaatacatttctgtaatgcatttcaattatacgctttgttttagagttaggatagtttgaatctgctctttaatatgactttccctctgacccttaatatgatccaagtt

SEQ ID NO: 1388 - DNA, 1000 bp, mus musculus
gctcccctcacacctcctcccacattccccctacctttctcctctgagaagagggagcccccacagggtctcaccccatgatggcacatcaagtcactacaggactagggacatcctctcccactgaggccagacaaagtggcccagttagaggaacaggatccacaggcaggcagcagattcagggacagcccctgctccagttgttgggggacctgcatgaaaagcaagctgcacagctgttattcagggattggtggtggttaggtccaacccatgcccgctctttggttgttagctcagtctttgggagcaaccaagtgtccatgttagttgaattttttggttttcctatgacgtctctatcttcttcaggtaccttaatcctctcccccaactcttccacaagactccctagctccatctaatatttgactgtgggttttcccatctgttccattagctgctggttggaacctctcagaggattaagcataatagagtatgattaatagtatcagggactgatacttgcccatgggatgggactcaatatggggcagtcattgggtggccatttgctccatctctggtccatctttgtccctgcaccttgtaggcagggcacattttgggtctaagtgtttgtggctgggttactgtccttaaccttttaggagccctgcctcactacaggaagtagccatttcaggcttcatgtcccccatagccaggagtctcagctagactcacctccatagactccctctctgtgtccctctatccctgtccaaggtctctggcatgccctcgagatgccctacccctaatcacagcctatttccattctctgccctactttccctagacactgctatcctgataccctgctccatttcctccataatctcctctcccatgcatttctctatctccatccacctccaatatctaatttatttctccttctgagaaagattcaagcatccacccttggacc

SEQ ID NO: 1389 - DNA, 1400 bp, mus musculus
tgagactgagtgtggagccagtgcccaaggtctgctcagggcacaggctcagactggaagaaaccagtgtcactgtctgggcatgggttcctgtgtccctggatcccaggggtcccagttattcccggtgttaggacagatattgtagcctctcctgtgatccttggcatttcagagaacctgggaatagggctccctctggatgttgtaggagtgggtgccaagccagcaccctaggtctattcagggcacaggctcagacgagctgtgtttttattttatgttattttttattacctttatttttattttactttttttaattaatttatctttgacactccatattccattccccgcccccccttcaaccttcaatgctccacatcccacaccttctccccacccccacctgtctccacgtggaagctcctcccacctgacctctaaacttcctggggcctccattctcttgagagttaggtgcttcatctctgaatgaacacagacctggaattcctctactgtatgtgtgttgggagcctcatatcaaccagatatttgctgtctgtttggtggtccagtgtttgagagatctcaggggtccagattaattgagactgctggtcctcctacaggatcacccttctcctcagcttctttctgccttccctaattcaacaacaggggccagctgcttctgtccattggctgggtacaaatatctgcacctgactcagctgcttattgggtcttttttacagttcagttgttacccaccttccagtctgccctcccatagttccccattcctttcctcttccaccctgtctccaagaggattgccccctgaacccctacctggcttcctcattccccagggcttcaggtctctcaagggttatgctcatcttctcatactgagaccagaccaggcagtcctttgctgtttatatttcggagcctcagatcagctcctatatgctgcttgattagtggatcagtgtctgagagatctcaggttgcccaggttagttgagactgctggtcttcctatgaggtcaccctcttcctcaacttcttccagcctttccctcattcaagaacagggatttcctaacttcagtccattggtttggtgacagtattcttatctgtttcagtcagccatgtgttggacctcttggaggacaaccatgctaggttcctttctataagcacaccatagcatcagtaatagtgtcaggccttggcgcctccccttgagatgaatttcaagtacaaaagagcctcatgttaaaatatttttaaatcatgaagaatctagttatttggaattactttgacctggctatcagaagacttatttttcccattcagtataatcttttatactgtca

SEQ ID NO: 1390 - DNA, 1200 bp, mus musculus
aggaaaaaagtttgcaccctgtatacacagaatgaaaagggcaaactactgaggattcttgtatcaaaaatggataatggatattgaggaagagagtcctgccatggagactgaagactatcaaaagagtaggaagaaacctgagtgtagtatcttatgcctgtagtcccagcacgtgggaggttaaggcaagagggttgctgtgagtttgaggccagcctaggttacagggtgagactgtttcaaaaaactcaagacaaaggctatcaggattaccgagggagggcagctgtgagatggcacaccaaggaaagcatacttaagtcactgtgccatggtgacttttggatgtcagtgtcatgaaggccataatacagcaggactgagtagtgaccacagcatagctggtgcccgcatcaatgttctttccaaaggttttctgggggaagaggaaaaggaagtaaacaggtagacagagggatggggaaggtttggggtagtgctcatctttttcagggaaagacttgagttcagaatgtgtaggtcagactggaagaggccctgcaagggaagagtaccaggtctatggtagaacagttgccttgtgaacaatggcttgcttctgaaacaaataagcagagaccatgttcctgcaggtacagcctctgtgttctgtctcaccccactgcctattctaaaaatgctgtaatgcttcctctttctgaaacatctgtgccattaagaactgtactaaagaaaaaccacacacacaaccacccacaccttttcaaactccctagagaggactcaacttcagattccagccaaggtgcttcctctgagaaacctgtatggctgtattggcccttcccccattgcccctcacccaaactttgagcacaacagtaaaacctcagggcagcattaaaggaaagtttcctctgtagctccaatcctccctatcctcccagatgattccccaccccaccccaccccacctcacacccatcagaaaatgggcatatggtgaagcagatagcatgtgctctgactcgtgtctttatgtccactttgaaaaggcaatagattgatcaacaatccaaatagctggaagaagagtgcttaaacatggtaattcccttatgcaggtaccccctacagggtcagctggtccaccttatgaactagtttgtctaaggt

SEQ ID NO: 1391 - DNA, 1000 bp, mus musculus
ccttctggacagaacactatgcgagaaaagatgagaggactctggcctggtgtgcatgcctggcatcccagaacatgggaggtgggttaagagttcaaggccagcctcagctacataagttctatgccagctgtgctacacgaggcactgtttcaaagcagagaaacaaacagaggggacatttgcttttagctatcatggaatatggggacaagttttatcttccgaacttaacacctagaaaaatatatgacacaatggtcttcaggaacaaacacagtgagccccaaaggaccttgctgacagcatggtgtcagcgtccagcctgcggtgaggacgggactctaaatagggcttagaagtctctctgagtcaagcaaacacaccatcacttaggaaggccacagagcaactgacaggacacattacttcagatgacagagcaacagagaaagctctgaagatctgcaaagggcacctcccaaatctatggccaggtactgatctgtgcacacatgagaggagacacagaggctaagaaccaccacgaagaagttaaaaaaacaaaaaccaaacaaacaaacctagcgttcataccggacgaggagctgtttctattcccataaagcagggtggagatgcagtggggagagcagaatgtcttgctaacacaggaaggaggctttggcagtgttctcaggaggaggccactgcatcagaagcataaatggctcttgagaatactgctcaagacttgctaacactactacagcaagcctaaggcctactactgtttccaagtaacttagctaaacgtaccaaaatccagtgccatttaaaggattacaagatttagcacagaaaagtgtgaaaacctattacgtccgataattaccagaaaaatatgcaccaatagaaacaattccagatcttcgttcttcttcagtttcatatgttttgcatattgtaccttatatctagctatactaagtttctgggt

SEQ ID NO: 1392 - DNA, 1000 bp, mus musculus; identical to SEQ ID NO: 1391

SEQ ID NO: 1393 - DNA, 1000 bp, mus musculus
gccagccctgagactgtgggtgtggcagagccagccctgctgacatgggagagatgccctcccttattaccccttgacacctacagagggcaggagagctggttccaaggtctcctgagaactattcctgccccttgcctactgcagcgatcaggagagctggccctgcccctcacctgaggcagcacttgggagagcaagccctgccccatacctgggcagcacagtagagccggctctggatgtagggactgtgggtgagccagccctgaggggcaggagtacaagagagctgaccctgactcttgtctgccatgcagtggcacagatgagggagagataccttccttccttccctcatgccttgccacctatggcaggtggaaaagctggccctggggtcatgagagaggaaaaactggccatgtccttcacaagccacaccatttggaatagcaggtccttcacctcacctgggcagcagggtagagctgaccctgattgcagggggtcactggtgagccaaccccaagggcatgagaacaggtgactggttggccagctcagatacctctcaggcccacatccagggctttgaattggctaacgccaacatctaccccattgatgaactgctggagtacatgaagggctgggtccgacagattcaaagctacaggatttccatgacacagggcaacaacagtgtatttgagaggagtcccagtaagattcagtattgatagtgtagtaaaagccagagtgtccatgccagaccaacaactcattgcaatgaacacttgcaagcaaagaggtatggacaaaagggtttactgtggaacatattgtgacacactacagcttccacaagattttctttttctctggaggttgcaagggtggagagtgagtatcagggcaggagaagatgagtggggttggggtgcacgatgtgaaattcaccaagaaccaataaagagtttaaagaaagggttgacca

SEQ ID NO: 1394 - DNA, 1000 bp, mus musculus
gagctacctttctttacactcctcgtctcctcctgttgccatctctttcgtctctttggactcaacatctctttcaccaattctctcttcatcgcctcgcatcctaatgcctcagctcatttactgggatgcaaacatcagttatattagctctcaagaagtctgtttggttatttcttatatcttctcatttattctacagtctccttccatcacatatattttgcaagccttgtcttttatttaagaaccattaagcacagacagttaccgtagagttcctggtgacccagctataaccaggtcttgttctgttatctgtagcgtctgctgacctctcccccagtccacctgttctttatagtttgcctgtttgcgaacatgtgctgctcagtgtgccgaggcgtgtgtgtggacagaggctggtgagctgtctgcaaagggcactagagtcagtgttccatgttttgcaggctgcttgccatccctactctttcttttcttggtcctcgttctctttcttttaatcgccctaaacatttgacaaaagcaagctgtagctctccggcctgcaggatatcactctaaagggattcgtgtgtttctcagggagctggcgtgactcatgtgtgatttgcttttactgtccataggtaaccagaattcccagcaggcagctctgctctccctttacctgaagtagctccacagcacctcctcaccatcccctacacatcggcaaagacctccaaccttacgtttgccttggcttccaaagtgctgacttacagttgctgtagcagctcagttttgtgcagctggggtcgcttctgcaggaggggtcgccatgcttccctggtgccaccattacagtcagtttgtcctgattgcttttcttagagggtgatcaatattacccttttaaccttaaaaaaaaggcagggattcaatgtggtcacattggcaagaaaaacagtgggccccaagtggtttaaatgga

SEQ ID NO: 1395 - DNA, 1000 bp, mus musculus
acttgtgggtgtgtggctagtaacatctgttttttttttttttaaggtcagtggttacttcctagttcctatgtagtacatttgggccttggtcaagatcatggacaatcccaggagcatggccaaggcaaatgtggctgttagtaggggtagaagactggcaagtgaccaggcaggcaggatataacgttaggatggtatggtgtcacttcagtcatttcattaaccagaatcattcaataagtgagagctttctttgcagccccctaggaggaacaacaatatgaactaaccagtaaccccagagctccctgagactaaaccaccaatcaaagaaaacacatggtgggactcatggctttagctgcatatgtagcagaggatggcctagtcggtcatcaatgggaggggaggctcttggtcctgtgaaggttctatgcccaagtatagaggaatgcctgggccaggaagcaggagtgggtgggtgggtgagcagggggaggggggagaggataggggattttcggaggggaaactaggaaaggggataacatttgaaatgtaaataaagaaaatatctaataaaaaaaattaaaagagagctttctctttcccctgacagctttactaccatttgccatgttcttagaagctaatatggtcaagttaattagcacacaaactgctgctcccagggcttccatgatgaggaagctctgatggtgaaagcatcctagctgttggcaggagtatgaggaacactgctcagcagtcaggagcagatgaatgctggtgctccctggctctcttctctttgttcagagaaagctttctttcttctaggctacataacaaagactagaatggtgtccagctctaccactttacctttgaggaagcttgctctcctcgtttgttaggaggcactgccagtcttcacaagagtttctttaaggccacgtgaaagcccaggtgtataagaacttaagtactgaggatt

SEQ ID NO: 1396 - DNA, 1000 bp, mus musculus
tcttttttttaatgcaggatttcactacgtagttctggctgtcctggaactctctgtggaagccaggctgaccttcaactcagaaatatctacctgcctctgcttcccaagagctgggattaaagatgacatcgccattcctgtggaatttagcattcttgctgtcagtcgttctattagacagacagactgatagacacgtgactgccagctcggaatgacatttcccagcttcctttgcagctgaatgaactctcactttgggaagcttctcctcttccagtctgagttttcgcgtctataagacggaagtcctaaggagactcgctggttaagtaaggctgtggaagcatgtctcacagtcaggatacatagtaggtgctcgtatcatagaacaggtggaggagagcatggaccctgatgttcaaaagcagaaaattccacaggaagggggcagtgtgtgcaaatgaacagggctcatgggggaggaatctggagctgtcagcctacagggtagatggttggcaacacaggaagtgcttggtgtgggcgaggtcggaaaagaatggtcattgatagtgacaggctgaactggagccatggaggatatgagtcgggtggagaaggaaggacgatcacattaaggtgggtaggccagagctgagtagggcacatggagaaatgaggagctctgagcaggccgtcacacatattcaggtagcagcgagagccccagaaccaatgagaagatggctgaacgagtgagcgggccagcagagactaagagaggcttggtgcagagaagaatggagtacaagggctgacttaagcagccactctttgctgaacaagaatttgcatctgcattatttagatctgtgtgtggctttacgtgccatacagtggcatgagcgcaatgaacagagagcgtccgggactggcagtgttatccataatgtcagtatctaggccccgccacatatgactgtcattcatgggc

SEQ ID NO: 1397 - DNA, 1000 bp, mus musculus
tgcatgcccttttgggcccgagttatctcactcagactattttctagttcaattcatttgcctgtaaatgtcaggatgtccttgtccttcatacttcagtagtattccattgtcacatgaaccatattttcagtatctattcttctgtcgttagacatctaggttgtttccagcttctggctatcacaaataaggccgctatgaacatagtggaacaggggcccctgtgccgtggtggtgcatcctttgggtatattcacaggagttgtatagctgggtcttcaggtagatctatttccagttttctgaggaaactccagattgatttccagagtggttgtaccagtttgcattcccaccaccattggaggagtgttcctcattctccacatcctctccaacatgtgttgtcacctgaggttttggccttagctattctgactggtgtaaggtggaatctcagggtagttttgatttgcatttctctgatcactaaggactttgaacattttttttttaggtgtttctcagccatttcagatccctcaggcatgaattctcagtttagtcctatactccatttttaattggtttatttgtttttttttgttttttttgtttgcttgtttttgtttttgctttttggtgattaacttcttgagttccttttatattttggatattagacctcaatttgatgtgaggttactgaagatttttttccaatcagaaggttgccaatttgtcttagaagcttttgagtttcatgaggtcccctttatcaattcatgatcttagagcatgagccattggagttctgttcaggaaattttccccctgtgccaatgaattcaagcctcttctccactttctcttctactagactcagtgtatccagttttatgttgaggtcttgatccacttggacttgagctttgtagaaggtgacagatatcggtctattctcattcttctacatacagacggccagtatgttcag

SEQ ID NO: 1398 - DNA, 1000 bp, mus musculus
gttctctgtacctaagggcggtggggaagccaaggtaggctttatgaggggagtattagttcctagggagggtaccactatgttgggctgtggagttggtggagtcggtacggtcgggaccttcgggggagccggtacgactggggggccctgttctataaggaccttgttgggccccacgagtgtcaccgccggttctctcactgtcagtctgatcgtgaaaatgaacccaggatctcttagtggaatgtatattcgccaaccccacctattccctttaagccaacttaaacggtgttgttttcctttttcggtgaaccttataagtagagggttgcagtatttatctttgcatggtcctggggggctgtttttaaaagcgcatccattctctggaaaatcacttaacttttcttcaccaccccagagccctggatatttattggggtctccttctccttggtttggcttatcatagccactacctcgttttaccgtgattaggtcccagttagaggagggcttccagtaagcttcccctgtcgtttcacatgaccatttaccacaaaagtaatctgatgcccctccacactcttgttgaagctttttgttctgaccctgaccagggcaaacataaaattgtgcagctctaagattagctcggtagaactgccccgaacatccatacgagttccctatcccacccaggacacactgctgttcagggggtgggttgctaagatcagtatgaccggggaggtcccaattgggggatcctgccgctaacttacagatgtcaggtgtgagatcaggccaccaagtccagaggggatggactgcagtggttgcccatacaatgtttcccttttcattgagcacttcccaggactgttgaattggagcatgagggttatggttccctaagttcagggtggcgcctacggcgcaaacgaagcttaagaggattgtcagtggctgccactgtccaattgtcttcgtg

SEQ ID NO: 1399 - DNA, 1000 bp, mus musculus
accgatggtcggagtcttgagaggattgagatagggtagtggtgccacaaagactctttcactggatgtaggtatcttagatctttttcagtgagtgttttatttaggaaactgacccttctgttttccgggggagtggccaaatcacatcagtggtgcacctgccaacagcttccttggagcgatggatgtctgcccgtttggaggcagcacgtcagagctgatgttcaggattttgtctccttacagttcattgatacattccttgcatagtcctctggccatcaccaagccaacgggattctaatattcttttccctgatccacccaaagctctttgtaaattggactcagcaggagtgagtccagtgacctcataaatagtggaaatgattgcaaatcagaattcatatatgttctcaactcagtgggtatccttctcccccacaaaggaagcaatcatcgctttcaaatttctgtttgccctttcactcagccacgcgaggagaaaatatagagagatatcttgctgtctaagcccgaaaggtccacttctccaccctgaaaagatgcaagtccggtggctggcccagtttagccagttgatcccacctggggagtcgccagaaaggcgagagcctgcctagggtctcacagaaacagtcttctgtcaggcacctgggaaaacatttcgtatctaaagaagcagttttgtggtggagacaggtactttgatgtcagtctctgtctccacctccctgtccccagagtttctctggcatggaggtggagccaggtgactcactttggctcatacacatggctgaaagtgccaaggtcccttgcatgcttggctcctctgagctccttcaccatccctttttttcttgttatctggattttacagtgatcatcagagaacccggagcgcctgaaggatgatggagaaacggagccgggagtcctggggtgacctaaagcagctccccacctgccggca

SEQ ID NO: 1400 - DNA, 1200 bp, mus musculus
ggaactcactctgtagaccaggctggccttgaactcagaaatccgcctgcctctgccctcccgagtgctgggattaaaggcgtgcgccaccacgcccggctaaattctgtttttaataaaaatctgggcatcacccaggggtgtgtgtgtgtgtgtgtgtgtgtgtgtgtgtatctgtgcctgtatacgttaattccagcacttgggaggcagaggcagcagatctctgtgaggctgagttgaagccagcctgttctatacagtaagttccaggacagccagggctacttgataagaccctgatttggttttgtttttttaaatttgagatggcaagcagtatggggacagttcaggagttctgtgggaagaaacccctaaagcaaacaaataaaaaatgatcctaaggagacactcatgacatcaggagcccaggttaggggaaagagggcatccctatctgacccttttcttccatccatccatccatccatccatccatccatccatctaatttctctctttttttgggacagggccatgctatgttgacatagccttggaggaactggtgctttctatgtagcccaaataggtcttgaactctcagaacttcctgcctcagcctcctaactgctgggattacaggcatgtgccaccaatcctggaaacccttttctttggaatggtctggctggacaacccgtaaccataaactcaccggagagcatcccctggccatgaaggccctggtgtagtaggagagatggccaagttggccacctgctgcgaaatgtcactggcctcctcagcctcctcatagagtgtcttggcatatcggacaaggaagggcagcagttggcacacctccttacgcagggatgaggtctcctccgccagccaggcacccaggatccgcaccgaggcaaacacaaagggctctttctgcttctctggccccacctgtggtcacaagaccccagtgaaacagagctgaaccaggtaccctcctctgcctgccagtaacagaactcaagggaaatcttggcctgtgggcccattacttgtgggcaccgagggccggtgaaatggatggctcagtgggtacatgaaaacctaagtttgattcctgggaatcacagcgtgaagggagagacctgactagctctccaaactccacatgtgtgctgtggcatgcag

SEQ ID NO: 1401 - DNA, 1000 bp, mus musculus
aaagtctccttgggtcatacaagccccgagaactcaagaggtgaggtaaagtgtgtgccatcatgaacttccagtcagcctgggtaatagcagatgagaagctgaccattgtagagcccggggcctcacagactgccttctctcaggtccacagcttggtgcggcatctttccattgtatcttacctccctgcactggtcactctgcacgcttctagaaagtgctgctactcacccgggaaccccgccttggctgagagtagagctcgtcttgtttccaccccaccccacccttctagtagcataattaactgtgctttattgtcaaactcttcttaataaaccatcacccaagtaagggcaggaaccacggtgggggagggggatgtcttcttttgctcttgcttccttgggccctagcacggagcccaacacataaaggaatacttgtggcatgaatggatgagtgaatgaatggactgcctaggaaaacagagaaaacaaagaaagctattccagagctataacagcccccagtcacttgctggcttactgctattaaagagtattttacacagggtggtccaggatgggtgtttcttgtggactagtgagttttccttcccatggtgacttagagagccagaccttatctgtctgtagtttagccatcccccaaatgttctacatccagtacacccttgcttacattcctttggctggaaccttgtctcacagtacacccaactgcaaaggtggctgggagatgtagtcccacccgagcattcgcttgtccctgacaatcagcggtactgagtttgggtagggtcattatttggggtggaaggagtctctgcaggcatagtaggataattagcagcaaccttagcctctgtctcccaggtgccagtagcaccaatcaatgtgataacgaaaaaaaaaaatgtctgctctcgtggtcagatgtcccctggagggaaaaattaccctctgctaagaat

SEQ ID NO: 1402 - DNA, 1400 bp, mus musculus
cttctaggatttcatagaattgatcaatttagaatgccttcagtatacacagtgtcttggatgacaccattctctgagccccaacagtatgtggagtcctccagagcatgaccatgaaagaggtgggtatatgactgatacccgcattgtcttacactataccactagctgccatcataaacaaaacaaaatgttcaagtaagcatttgaaggcagaggctaaggcaccacctagagagtgggtggaagttgtccttaatgagatttttatcccttgagccagcagcgccttggatggattaaatcccttaactgactgagtccctatcattgaagtctatgaaccgagagaccgctgtcacctttatcgttaacgtcccgcctgataaatcaatgcctcctatctccaacgcgttagtctgtcaggataaagatcctagatctcagagagaagggagagaacccagaggccctgttcacagctgttccctggtagtgtgtgtgtgtgggggggggggggggactctcacagtcagtagccccaccggcaaaccaaggagactgccattggtgagataagctaccagtgctaacccaggaggggagaaagaagatgaggtgagtcataacagtctaagcaatgggaactagagcttaccttactctcccaattccccccacttagtccactccctgctttctcttgcatcagctttcctaatgctgagactgcaagcctgtgacagacaccccggctcttctcctttgaatacattgtgcatggccaccacggagaagcagtgccggctagtgagtttgctatgggagaagagaaatctgagcatgtgcaagaggggaagccataacaaagtctgtcgctggcccacccttactgctcacagctgccagagtatccccaagagtggcagcccctagccagcgcgactgagagcaagctgaagtgttgctcagttgtggcaaggaatcaaacacctttggagagctgtctccacactccagtggcaaatggatgccccagctcctgcacctttctgagcagatgactctgagataagtgttttgtgctgttgctcagggttcctcgcagagccacttcatagccgtcctctgtgataaaaacgtgcccctgcccacctcgattcccacttccctactcctgttatgcacaccccaaacaagctaaatttactggagtctttctctcaagctcagctcttggaagaaaccacactaaggcacgatggtttagagagagaatacgctgctattttcaaagatttctttctgttctgtgtgatgtttgtgtgtggtatgtttgtggtgtggtgtgtgtgatatgtgtgtgtggtatggtgtgtgtgtatgtgtgtgtgtatgtg

SEQ ID NO: 1403 - DNA, 1000 bp, mus musculus
catttttctttcttttttttcaattttttatttggtattttcttcatttacatttcaaatgctatcccgaaagttccctgtgccctccccactgccctgctcccctacccacccactcccacttcttggccctggcgttcccctatactgaggcatataaagtttgcaagaccaaggggcctctcttcccaatgatggccaactaggccatcttcttatacatatgcagctagagacacgaactctgtgggtactggttagttcatattgttgttccacctatagggttgcagatccctttagctccttgggtactttctctagctcctccattgggggccctgtggtccatccaatagctgactgtgagcatccacttctgtgtttgccaggcactggcatagcctcacaagagacaactatatcaaggtcctttcagcaaaatcttgctggcatatgcaatagtgtctgtgtttggtggctgattatgggatggatccctgggtggggcagcctctgaatggtccatcttttcatctcagctccaaactttgtctctgtaactccttccatgggtactttgttccctgttctaaggaggaatgaggtatccacgcattggtcttccttctagttgccttactttgttcttccctggaatgcaggtgctccagcgtgtctcagaagggactgcctgctggtgtaagcagcctccagggccgaatccaacttaatgtcatttgagctgggtatgatagacatattatatgcctgtgatctcaacactcaggatcctgaattcaaggccagctttggctatagaatgagttaagagctagcctgggcaattgaacatgtccctgtctcagaaaagacaggtgtagagacaagtgtggagcagagaacatgctcaccatgtaggctgaggtcatggttttacattgctaaggggcagagccatcctctgttccagttggttctgagtagaaccctctagaag

SEQ ID NO: 1404 - DNA, 1000 bp, mus musculus
ggacaaatcacactgcctcttttgaatatcggctttcttatctctacaatgctcataacataagcagcctctctgtgccctgggactgaatgtgccaaggcccattataacccgtggccttatggctgctgtgcaaatggccgttggtattgatgttactaggaatagtgaaagtgagcgtggggctcctgcctcggaccccagcaccacgcctgcaacagagaagctccaggctcccaagggctctatcatctctcagagtctgtgaccaaacaagggcagtgcctgatccagagaaagcctttcctataaggacagacagttcagacccagggacctgtggagcctgtgacagttgttgagctgcaggccctccccaggaacatccatcgagggcctcctcctgcggctgtctcctggcatccccaggcagaggtgctggcaccaggagccagctttttcatcctggatccttggggcttgtcctcgcggcgggtgcaggttgcaggaacaggcgggacagatggtccctccgcgggtccctccgcctcctcccacactcctgtctggaaagcgctctggcttggccctacctgagcctcttcctggaggagactcagagccaattgctgtgatcgggtcccctgaggacagagcggagctgctgcagggatgtggctggggaaggagagtgtgagggtgaaggactgctgggcagggtgcccgggccctgcattctgtgagggcatcccctaggctgcccatctctgacctgggtccttctgtcctttccgttttccccatcagagcatctgtggtgactgtgcccagggccagacggctcatccagccttccttctggagaaaggagaaaagggggaccagggcatccctggcgtgccaggttttgacaactgtgccagggtaggaactgggcagaggcaggctgggacaggagggctccctggtgtagaagggcttcctggtgcaggtcccgcca

SEQ ID NO: 1405 - DNA, 1000 bp, mus musculus
ccggggcatctcttcatctcccccgtcccgcgccctgagaaaggctctctcgacatagccccgtctcagtcactatgttgaccaggctggtcttgaactcacgcacacctgcttgcctctaactctcaagtgccgggtttaaaggcgtgaggcaccacgcccggctgggttggtactgtagagtccagttttgcatcagacctccgccacctcccgctcagcatcccggtgctctacactggttcctccttagagcctctcacacgctggaccagctatcactgagctacagcccagcccatcgcacgagttttccatcttctgtggagctggaaacacagattcggcccaagagcaattaaaacgaaacttcaagtaccaaacggtcaccgatgccacattgaccaaactccagcatccgagacgtggtgctctcgcgagagtggacgccaagcaatcatgtgacaggccaagatggcgtcgcccagggagctggacgaagagtcgccggtttacctggtggtgagcgggatccctgccgtgttacgctcggctcagttacggagctactttagccagttccgggaacagcgcggcggaggcttcctgtgcttccactaccggcaccggcccgagaggggccctccgcaggcgagtcccgaggcggcccgggctggcccggaccccgccgctgaggatccggttctcgcccaggctccggcctccgatgcccgcgctgtccgcgcccggggctctgcggcagcccagacccgcacctgctgctgcgtcgtctcggtgaggggagcggcgcaagcccagcggctgcttcgcatgtactccggtcgccggtggctggactctcaggggacctggcttcccggtcgctgtctcatccgcaggcttaggcttcccaccgaggtttcaggtaagggggagagaatggaccggacgcacggcccttggaaaagaggcgcattgcctgggtggttaagataggtta

SEQ ID NO: 1406 - DNA, 1200 bp, mus musculus
taaacagggaagatataaacaggggagatataaaaacaagggagatatatagagaaagaagaaataggactgaataaacgtgtgcagaaggatcctgtagcggcgtcgttcttgctggcgagttgggggcgcgctcgacagttggtgccgaaacccgggacaagaaacatcttcaggcacaagtgaagaacccctgctacagggaggattcagaactgcatcacggggaaggagtggttaataaaagttcctgtaaaacagactgttgagaaggatctggcgtggattcagaactcttcagctggggaacggtactggtaagtctcccaaattgatccctgggttaaagggggatatttttaagagaaagaagaaagatgaagactgaataaactgctgttagaaggactggtggtcgcgtcgttcttgctggtcgagagcagacgcgacaattggtggcccgtacggggaaccgactcccccaccgagttcagaactttcagcagtcagtggttgccggcagggtaagttcaaggtgagtgaaacttgcgaccccaggagtttgggaaggacctcggataaaatagaggcaagtataaagttgccaggaagcaggcacaaagtaactcagtatcccgggattgggattaggctctcggtaaagagacagtaaggctctcggtaaagagacagtaaggctctccggctctggagacaaggaagtgaaagtaagagagaaagtgaaagtaagaggataatagggacaagttaaggttcctggctttgggacaagttaaggttcacggttttgggataaattaaggaactatgataacctcagtgtagtgatcaatagatcctcgctgtgtagttatgcttttttctcccgttgaccctttgtgggtaggtctgatagttttggtcttgtttgttctgatatatggactctgttactgtttgaaactgtgtgtagaggcagtcaagacaggtcagaaaatccttacagagcaacaagaaagtatgtcggaagaggagaagggcttaaaaagaaaaaggaaaaagaaaggagacacagtgttatcaggtggacagaaaggacaggacaacagagctgaggcggaggaggaaggtgaattagcttctgctccccctccctatgcctcctcggcagccatctatgggcagaccttctgtccggag

SEQ ID NO: 1407 - DNA, 1600 bp, mus musculus
caggcacgttccactcaaaccctctgcaacctgatgccagaccctctaagcagcccacagagagaaggggacccttggctcaggccaggccatctattcctctctaccctctttccctggctgaagtggtccagggagaccttcccttgggccatgttttgtccactgaactgacaaggttccctggggggggggggtgacgacggacatgtctggctctgttgctgtactaagagccttgctgtaccctccccaaagcacctctgaagtctgctcagggtcactgtgccagggatggagaccaccccttgtgtccctgcccgctgttcactgtcgctggggacctaccacagtgccgttgggcagacagatcatcatctctacaggaaagctgtacttctccaagtgcaggcctgccagctgcctgtggagtgggttctcctgctgggtctgtggagacaatgatacttcctggtatctgggcccagtgctgtcgtggggactcccacaggccgctccccctgatcccttgctcacctgcaggtcttctagctcctttaccagggaccaggtactgatgaagctctcattgaggagagtgaggatgggcgggctttccaggacagtctcccggagagtccgcccggaacctgttcagggtaaggccaagggtgagtagccctgattttacagcaatgacctcagcttaggtaaattccgtggggttttggaatgtctccacacccaggtgaagtaacaggttaaaagagtagacagaagctaggagtggtggcacacacctgtatcctagcactcaggaggctgaccacaaattcagggccagcctgggctacatggtgagtgagttataggctagcctgagctacagactgagagcctgtctcaaatgaaaagccaagaacagactctcaaggagtagatgctgaaggaggaagttgtaggatcagcatggacaaactggcacgccgagctgcagctgggggtggcccagggcctggtcacagtgaccgattctctctctctcttttctttctattttcttttaaataaaaaggttttttttttttttttttttttttttttttttttttttttttttaatgtgctcggcgttttgcctgcatgtgtggctgtataaggacatcagatcctctggaactgggaatcatagacagtggtgagcttccacgtgggcggtgggaattgaacccacgttctctggaagagcagccagtgctcttaaccactgagccatctctccagtcccagtggcagattcttgattccacttcgttctctgtctctagggcctttacacaggcacgttccactcaaaccctcttcctcctgtcatgtgacacaccactacgccacctctcaccatcctaggttaaatgtcactttctccaagaggcctcccagcttctcttctgttaccccactttgccttgcacacagctcgctgccctggggttacctgccctgcatgtgtctacaccacactgggataatgcgtagctacggcagggacccataatgttggctgggtgacaagattaaggcaggggcattgcttatc

SEQ ID NO: 1408 - DNA, 1000 bp, mus musculus
ggaccactagagcattcttcaaagtctcagacctgccagaggcctgtccgtcactcagggtctgcagccccaggctccttccaggagatcaaatgtgggaactgagttctctctactcagccatgctttctgaggctcccagactgcttaaataattcatggtcatctctccccgcaaccacgctgtgccctaagggccgggagtcagtgcgctctcgttaacgtcctgtttactctgcagagagcagcagaaagagaagaacctaacccctgacagaggacgctggccagagccaagggcagacaggggccaaggcgaggttagctgaactgcaccgtttcatgacacagagtctggtgccagggagccgggtagagaaatctcacccctgagatttccaaacccacagtttaagaggtccatggctctagatgcttttataagcactgctatttctgggcagactcatactatcaggtggtgcttagagagcatccatcccctagtccatgcgtcgtccatccacgtattcacatcgatctacccctcccccactgtatccatcctatctgctcacatcaattcaccaacatccactcatctattcaccaacgcatccacccatgcgtagctaatgtgccgtctacccatcagctcatccatgcatggatccactcattcaactgttcctatcaatctatcatccacgtatttactcgtccatccattggcccagctctctaccccccaaacacacaccgactcacacacacatctgctcgaccatttgaactgttcacatgcatccacccactcctacatctaccagtccaggtgtccatttgtccatccttttatctgtcggtcaggatgcccataccagtccagatgtgtgtatatgtgtggcccagggagtggcactattagaagttgtggccttgtttggagtaggtgtgtcactgtgggtttgggctttaagccccccatcctagcttcctg

SEQ ID NO: 1409 - DNA, 1800 bp, mus musculus
ataaaaagttgctggtcagtggggtcctttagactcccccaaatgttagaggctattgctatgggctaccttgcagacttgctggtaagactccattgctgaagaccccacaaccttgcattctataattctcgaatatggtgcgatcaagctggcaccgccttggaagcttcacccctactgtgtagctttcatggtcctgggaggtgccatgcacactatcagcgaaggaaatcaatcacttctgcacgctgtgtgctacagccacaactgcctggcaatagagacccggtggcataatagtggcattacccttatgggagtaaccaaacactttctggttggatttgaatcctgcgccacaaagctggactcaagcccagtactattcactgggccgacaatctgtggctggctaggccagagccctaagggagaacctagtactagtaccttgttaagtgaacagctttaacggcctcctaagtacttatctttgtatccatagattcacacatctctcaggcctcgtcagagaggcttgcctgcctgcttgcttgcttgcttatttattcatttattcatttatttatttatttatttgtttatttatttatttatttacaggagatggcaattaatacagagagccaagatgtcgatacccctcacccaagggtcagggatcatttgggaagagctggaaatcctataagagccagacagagcagatgtccatagcaaaacaacttgccagacatgacagggccattgcacacacgaattcacagtggctggggtagcatgcgtaagaattcacagtggctggggtagcatgcgtaagaattcacagtggctggggtagcatgcgtaagaattcacagtggctggggtagcatgcgtaagaactgcacaagaacaagccagaaagactgcagcatggcatcacacccctagctaaggagctactggcaactgatggctgccagaggaggagagtctgtcctcggcagagatgctgtcccctcagactctagcctgaacatcccgtcctgtgttgatggcactgtttatggacataagcttatgtgacctttaggagatacacacggctttgctggaggaagtgcatcactgggctttgagggtttatagcattggtcaacttcctgttctcactctcaacttcctgtctgtggctgaggagcagtctctcagcttcctgttctggcctctgactgccaagcctcctaggccattatggacttttgccgtggaaccataacctcaaataaactcttccctccatatcttacattggcttgtatggttttatcacagcaacagaaaagcagctcacacactgcacacgctccagtagatgttcctaccctcaggtaaacacagacagtgctaagtggacccggcaggttttcaaaaagagcagaggacactgggaaggacaagacgggaagaattggaggcgaagggaagaggatggggttgagcaaacactataggcatgtaagaaattctcaaacaggggctggtgagatggctcagtgagtaagagcacccgactgctcttccgaaggtcaggagttcaaatcccagcaaccacatggtgactcacaaccatccgtaatgagatctgactccctcttctggagtgtctgaagacagctacagtgtacttacatataataaataaataaatctttaaaaaaaaaagaaattctcaaacaatacaaaaagagattaaagagcaaaaccggaactggtgtcgtagacagcttggtt

SEQ ID NO: 1410 - DNA, 1200 bp, mus musculus
aaaggcacaacccttcttggcagggagtcgccacaagctagagcttgaagcagctcattacctccgatccactagaaacagatggatgatcagttatgctcagctcattgtctcctctgtatacccaacatccaaagcaaggaatggtgctgcccacagtgggcaggtcttcccacctgttgggtaacagatgctctttaaacaggaaggtaaacatccccaaatagcttcaggaagtccctaaaattgaccagatgcactaggcccttccctgccagaggaagctgtactaagttgacagtcctgatctcacagaaggaagctgagctgctgtgggtttgtgttggacgtgggagtggagatgcctgaggcattgtctgagctgagatgcagacccctggtcatctgcaggtaggacctacccagagcctcaggagtctgcaaaaccttggaacttaagccgatgctgctgggagtgtgggaacttagactggctggggaattatgacgggtcatcctggagcatctgactccatgacattgtagctgtctttgaagtacaggtgtctttctgtatgtttgttcaattatatgacactgaggtagcccattgtattacatcttacactgcaaagtgaccaccatcatcttctggctccaggtcagggattaattaattaattaattaattttctggactaagatgctatatctcttatcacttggccgaaaggatcgggcaagaagacagggagagagagagtagagtaacccaggcccaggaaggaaagctgggtctagagaatgcttgaatgagactgggcagaccctcagaacaccagtcattaaacaggcctgagaggtgtgagttgggttctcctccagtgagcctccaccaggagcatcatcttcagcacctcattccacacctggaaccttccccaccccacccccatcggtcacccccacaggccaagctgtgacccctgtatcctctcatcagctgtcaggcgcttttcttactttatttgtacttatttagtttgatgttttgagacagggtctctgggctgaccttgaactcatggcaatcctcctgcctcagcctttgaagtgataggattatggtaaagagccaccatactctttggttttttgtttttatctgagagatgtccttgtagctcaatctggcctcaa

SEQ ID NO: 1411 - DNA, 1000 bp, mus musculus
gattaaaggcgtgcgccaccacgcatggctaacctggcacatcttttaccagcaaccatttagagaatttcttgaagccctggaggtagatgttatgtctcctttggagctcaccctgggggttttggcttaatctgaccaactggcatggcctcagtttcaccctgaatggagaagggatggggagcatgccaggcaggcaggcctggcattgctcagctttgaggtgttcccgggagccaggcccagtggcacacacagccgtaaacatagcactcaagtgaggggagtgggagaccatgggtttgtggctagcctgggctacatagcaaggtcactgcctcaaaaaaaaagtggggttctctcaggaggatacacagctgttccctggcatatacaaagaaagatggccaccatgggagagaacccctgcttagagggatccccatgtccccagcattgcaccagtcccataagcaaagccttggcatccatcaagaccagtcacccctgtcgagagccacggcataaagctgtggctctccactaattatctgtagccggttctcagcctttcctgtctagacacactttatgaaccaagtcatttgctcagacagtggtgttgcctggtaacacggcccacatcccaccttccttgggtctgggggggcggggcaggcctggactttgaccactgagaagtgattgatcagtatttactcggcttttgtgataagccaccaggaagcagaggatcctgggagtaaggacttcccagaccccacagttgttctgagggagaggggctggacctgtgcctctgcagaggggaacagaacatggtggtctcaacccaaccccatgcctttgcccaccctagccaggtgctccccaacccatgcgtgtcttggatatgacacaaatgccacatttgtcacggtagataaaggatttcatggacttacagataacgcatgggggaagccgaggcaggagg

SEQ ID NO: 1412 - DNA, 1600 bp, mus musculus
aaatcacacattggcgacagtttagttaggtggttaggagcctgggcttcagtccgcaaggatcggggtggggcagggatggggtactcaaaaaaaaacgtgtcatggggggagagcacagcagggtccatctttgtcagtagagtggtgtgaatatgggaaccttcttgctgtgaggatgagacagaacagtaacttaggaaccctaaagtctgaggaaggaaagagagcccagaggggagagatgttgcagagaaagcagtaacagtgtgccatttccccaaacactacgtgactcttgaatgtaccacctgccaggctgaggttgcctctgaaagggcttccccaacctgccctcaccccatggggcaattgggcatcttccccactgatcttcataggccacatggctactttccccagtccccagtagaatgcttcccagacctgccacccctgcacctgagctcctcggaaggcagataccacctttgaattccaggaccttcccaaagttcagtgagccctggctttcaatgaagtccctgagaaaatggcagcaactcttggctctgggagcaacggagccttccatgacttcacgctcagctctcgtcacatcctgactctgatactttccagtctcctgtgactttgagaggttgacttaagctgcgcgaggaccagcagtctggctctgcatctctaggataaacagcacaatgcccagcacacagtaggtgctcaatacctggtaatgggtgtttacaaactctaccattggcctccatctagcagtgagaaacatcttggatagtctgtccccaggtgtctcagtcacttccctgttgctgtgataacatgaccaaggcagcttataaaagaaagtgtttaattatagtttcagtctcagagggttagcattctcaattgcaacgcagagacaggatggcaagaacagctgggagcccacatctcagagctgcgttcaggaggcagagagcacacaggggctgtcaggaggctctgagacctcaccgtccacccccaacagcacacctcctccatcaaggccatgccccctaatccttccccagacgccaccaaccggggaccaagtattcagatagatgcccaagggacatctcattcaaaccacctcaccaggcaagcccctatccatctcccagagaggtcagtgcaacactttctctgtccctaacttgtacctagcctgggaagtcaccatctttctgaaagctcccctaaacagataagctgggtaccccactaccacctcataagctgagtgcatcctgagaaggacctgatgagcccgaccgctgttctgacactgctaggaggataccagggatgtgatttctgtcccatgtcctgcggtattctcctcgggctccctggttcctcacctcagtttcctgtgctgtgtgccagtcactacccatctgaattttaaggcagaacacatttaaaaaaacaaaacaaacaaaacaaaaaaaacctctgtctttttaactcccagatagactgctgttggtttccattatctttgcagaacagttggtggccatttttgtcc

SEQ ID NO: 1413 - DNA, 1000 bp, mus musculus
agcagccaccggtggagcatcctgtctgctacccacttccctcaactgttcagggaagtgaggcgcccttcatttgggaatcaggtgagtggaaaaggaggctcagacaaactgtgtggcaggctgcgtctgctctgtcactagcccaggttccatgtaaattggctagccaggccctctatcagggctctcttatttgtgtatgtggtagctctcagtctctgaatggggaagtgctacttgctgtctctctggaagtctggcagaaggaatccagagggaacaaaccatggttcacaaggcatgtgcactgttagggtcaaaagaaaagatcttctggtaaatcagagagtggcggcctcagcagagaccagcaacccacttcagccaccagggggtgcagggtaacggctgccactgcttgtggatgaccagggagcccaggtggtcattgccaaggtggtttggttctgatctgaggctgggatggaagggccagagcaaatgtcctgggctgactacaaacttgacaagaaggcctgagtgagtggagcctttggtgaggaggcagggagaggacagccaggggggtgggacaggtaggaggatctgatagaagctgagctcagtgcccagcttgtgtggggcccttgcagggctataggagtgtgtacatgacatgatgcccctttaggaagcccctctggatgctgggtggacatggaaggatgctgcacatgagggaccatgatgcccagggagagaactgcaaagaaacccacagcctttgcccaggcattggaaagcctggcctgcggtccggctccatcacaggtcacccggcctctctggttctctggtcttggctgaaggtatcatttgcaatgacagcagctttattcaaggctcaccatcctcaggcccttgtctctatatggacacctggggtgagtttttcctcaacttacccatgcatgaacacctagctacctacctacac

SEQ ID NO: 1414 - DNA, 1000 bp, mus musculus
gggcagagtccagctgcactgactacaccagacagcttctggccacccttaaatgacacaggaagcaggctgtggcccagccaccaggctgaggaactccagcctcagaggcagcaagcgtgtctggcttctgggtgccagaaaaacaaacaaacaaacaaacaaacaacaaagcctggcttctggatgccagaaaaacaaacaaacaaacaacaaagccagtggaggtggagaccggaagggcgggtagcaaggagctagggctggggccactgtcctcaagtgtctctagcttccagctctcatcagataggtacttggctaactggtctcccacctcaggaaccccagtgactctcccacagcttgacaacgctggtcagctgcttcctcatccaggccctaaacaaggccctcccacattagcccttacctgtcccctccagtctcaggtctcagtggctcttggcctgtcctggaattccgctgcccgtgacagcagggacccgattcagacctctgggccttggttcagatggtttgttctctccagatggaatcctctctcaatcggcaaactcctactaaaccttcaaaaccccactcccactttctccattgagacccttcctttgattcacatagtagcttctgggccctggctgcggagctttctaaaaaagacacatggaggttctgacttggggtgtggccactcctaagccaagaggttattttcgaaacagcacaggacacacacaaggttggtgacacagcccctattacaggggtcttgctcactagaccagaagctctgggacacactggctgcacttcatctccaggaagggtggtcagagtgtggcctagagcaagtgcctaacagctgcccaactaaatacagagcatgtccccgcttgggggtaagggcacagagctggggcagctgtagggacaggcttcaggtagaaggagggaagcatgcactaaaatcctttca

SEQ ID NO: 1415 - DNA, 1000 bp, mus musculus; identical to SEQ ID NO: 1414

SEQ ID NO: 1416 - DNA, 1000 bp, mus musculus
ccagcaccgttttgaaatggaaaccccaagtatgtgccctagtcaaggataaaatagggaggtcaagacaggagggttctctgtgagtttgaaaccagcctgaactacacaccaaactccaggccagccagagctacataatgagatccggtctcagaaaaaaaaaaaaaaaaaaaaaaggtctccatgctaataaaaaaacaaggcccactttaaagtcccaatgtgggctcactctccgcatgaactacagtgctgagtatccaacagcagggggcaggcgagtgccgcacagtccataggcatgtgccccggccagggggctcctgtgggggacagtgcactgccgaggttctgagtattgccaagaaaacagcagtctgtgatgtagccgcagatctgtggcagggaggttctgagtattgccaagaaaacagcagtctgtgatgtagccgcagatctgtggcaggcaggctcacataaacacaggacagcaaaagccagactatgggaatccctgaggacagccagctgttcctgaacagacagagactcaagagacccaaaggaaaaaagtttagccaggaatggtggaagacacagacctgtagccccagcacttggaagaacaagatccaagcacgaggctggggcctcactcatgcagagccccaggttcagtccccagccgtacataatcccggcatgctagcacacgcctgtaattccagcactcaagtggaaacaggacgatgggaagtttaaggccatcatccgctgtaccgtgaggatctgacagcctggaatacataagacttgaactaaaaaaaaagattcaaaaatttaaaactctggtgggcatggtaatgtctgcctttaatcccagcaatcagaaggcagaggcaggtggatctctgaatttaaggctagccagagctgcatggtgagatgatatctcaaaaattttttgtgaatatctacagctcctgatccaaacaag

SEQ ID NO: 1417 - DNA, 1000 bp, mus musculus; identical to SEQ ID NO: 1416

SEQ ID NO: 1418 - DNA, 1400 bp, mus musculus
ctccaggactactccagacagcatggtcttcagctctgggagtccagaccctggggcaagggaaaggcagtgtatacactctctcattctccccccaatgcactcccttctccagtcccactctgcttagcaagatcagagaaagtcaggcacatctccagtatggtttctctctctctctctctctctctctctctctctctctctctctctctttctctctctctcctcactgtgggggcccagactggaactggcagccagtcccctgcttctacttcccaagaactgctattccaagtgagtacacccagtacagacgaaaacacatactctctggcaccccccaccccccaacctcacacaccctgagaggaagatttcataacttcagctgttaggagagagagctgagggcctgggggtggggctcaaaggtggcagcagcagggtgggaacccagggattatcggaccaccgcttgagatacctgggagatcttcctgggctgaggctaaaggctactcttgggcctgggagccactgcttccctcagcccagccctgcctgacattttgagctgtgctcctgcaggtaaccagccaccaattgttttactagcccagaggaggctggggaagtcccctgctgcccctctccctttgtgactttgggtacatggtttgtctcttccaagcctggttccctactcatgtcactctttcctgccaccctcatgagaagcccccatgggatgtagaaagatttggacccatggggagtgcaggacaaggcaggttggctagggaggaggtgaccatgactcacctccagagaagggcgtaatgctctgtgagaagccggaggagaaggacagaagagctacggggtacacggtccaggagaggtaccggagcaggtggccgtccccaacttctctgtacagccacttgtgtgctggagatgaccagcagtcaggagccacccagagcctcagtgcagggggcagacactatggtgcccatttatagaccagaaaagggccaggccacccactgagaggacggtgaccaggttcctagctttgtacttgtgggacttcaggtcagtgacttgattgtgcctcagtttcccatctgtgcagtagccagtgatggcacctccccaaattccccaaccctgggcccctgaaagacccaaagggggacctagtgaggcagccaggtgtccagagaaagtgagtgttcactaagtaggcagcatggagggagaggagaaagacagggatggacagtagtcataagtaaagcctcccagaggcatgcaggatctctcccattgtgcagattggatgactgaggcccagaaaggagaaggaactttgccaggatcacaaagct

SEQ ID NO: 1419 - DNA, 1400 bp, mus musculus; identical to SEQ ID NO: 1418

SEQ ID NO: 1420 - DNA, 1000 bp, mus musculus
tgcagaaggcattcaaaagggatggggggtctggggcgtggctactcattccctccctgtaagcggggaaagtgctcaattctaccctctgctggccattggatgcactgcatctccgttcataactagtttttccaaattagatgttagacaggatgggcatgttcatacacgtttataatgtattcagaacacgcccactcctcgctacccctccttctctctcccacatcggtccctttctcttcctgtcccacttccctggggaccatggctctaacctgtattagaggttggggtacacctttaaaggaaggtgtttcatgctgaagcagactcacgagcctcttattggggtctggagaggagtgtgccacaaatacacaccccaaacccttcagcactttgtccagagccctgtggggcagcgaagagcccctcacactcaggctgcctgagaagtccgctttggtttttattgctcgccctgaaggtcctcccagctctaaggagggagggacttcaatgtctggccttgggcctgctccgccctggttcccagcccaaagcctcagagtcagcctcagccacagccacagccacagctccaccctggccctcaagtgtcctgcctgccctgtccttctgtcattgccacagagaagagatgcttaggagtggattcagccctcagaggtccctaccctggattagacctcagactgggcactggtaaccttgggtctccttgcctcagatctatttccttctagaacattcttgatggtaccgctgagacccactcagacatgagcaacagggtctgaatcagcttcctctcataaggcctagatggccaaagtctgggctgcctgctgactggccctgtgtggatgtatgtgacaagtgcttagggacactgggttttaaatttacatcctggctcagtggaggaggtggattttcagttgaatttaaaaataccattttatttttaaat

SEQ ID NO: 1421 - DNA, 1200 bp, mus musculus
ggagtttgatggatggctatgtgtgagtggatggagagataagggggtggatggatggatggatgagtggattgataagtaaatgaattgaaggttaaatggagagaaaatggacgaattagtgattcaatcagctgaatgaataaatactttggtaagaggacagatgagtggatggatgaatgggtggatggatggaagaaagaaaagatggatggattgatgaatggatgagtagatggaagaaaggatagatggattgatgaatggatggatgaatggatgatggttatgtggattaattgaggtaaagtagatagactggacaaattagtgattaagtgggctggatgaatagatacactgataaaaggatggataggtggatggatggatattaggagtggaggagtgtatggataggtcggtgggtgcatgaatgggtggatagatgagttggtgggtgtaaaagtgctcatgatgccctggaagaaaccaagagacagaagcaagtgagaagcacaatgtcaacatggtatttgatggttacaagtggtggtaggcacagaaggaccaatgatgctctacggaacgtttgatttaaatgatcccacaatccctgggcgaatcaccagctataccttcacttcatcaaactccatgcataagtgagggacggaagagctggcccctgaggaagcagagaaagcaaacaattttctccacaagagacacaagaaggctcctgtttctgagatgacaagttgtagtctgctaacacaggatcggaccatccagctccaaagccatattctatggttttccaatcctgtagacttgtcatgtacagagtctgatgccacagctagcctctaacatcacctaaacgcaagggtttgctttctgcagtggtgtgctgagggaaccagctcttgccagcctgaagcattatgctttcaggacactgagagtcagtcccttggtggaataattattataaattaaactatagaaacttgcaatgtaatcatattaaggacaaagttaataagtgcccaaatatatcctctgccaattattttactatgttttaccatcatcttcactctcaaggaatttatatccatttcatttgtgtggagggaaatactgtgtttcccaagtccatgtacagtatagccacattggtactttgtaact

SEQ ID NO: 1422 - DNA, 1400 bp, mus musculus
gaagaattggggagaggcatacagagtaaatacaatcgagatacattgtatgggtgtgtgaagttatctgaaaagaataaagatacaataattttaaaaatagtaacattcaaaatgtcacaaattatatttaacataaaatttactagctaaggctatttaagtgtgcactccagtgacatcagggacatttgtttttttgtttttttttttttaattcttacagccacccagctccagaaatgttttcatcttatataagtgataccctgcactcatgaagtgacagtttccagttccctctgccaggccatggcaaccacccacaattctgccttctgtctttgtgaatctgagagttccagtcatctctgagcatctgtcttttggagattgcagagctttgagtccacccagacaggtagtgtccaacaaagcagttcacctcgtggtatccatctaagagaaagagagtaccacactgcacgccttctcctctctctctctctctcctgccccatctaagtctcaccctggcctattggggcgggtcctgtgtcccagaagtgtcccccatcaaatggctaaactagaataaccattggaggtccctcacacgtgtcatcccagcactcaggaagcagaggcaggtggatctctgtaaatccaaagccagcctggtctacacagccagttctgggccagccagggctactgttaggaccttgttgcaaaaacaaacaaaaccagaagaaaatcaatgagttggatccaggagagcattgccattttgattatataaatggtatcctcttaatctggttatctttaaagctgagcacttgcaagtgaacttgacctctgtactaagatctggaagggctgtgcccagcaaacctgaagaggcagcactgcaaaggagcctctgctgagaagactgaagcttcacggcctggtactgtggggactggatcttaaaatagtccttcactcaaggtgcactaggactggagagagatagcccctagccaggggtgtctcgtactggaaaaagtcgtggcaggcatggcaaggcaaaaactggatgcgtagaacaccctctctatatatatattcttctccaggagcagctgtcaaaacaatttaggggcaagattgacagctcattagaatcccctcagccgagtggaattcagactactttccagcagacagagcgaaagagaggaagcagccgccctgggccaggaggctcaagcttccagacgtagttaacattaacataggcatgacgatggacggggtcagtgttcacagtgggcttgtcatcacaagtcacagatcctcaactgcttcttataattgactgtgatgaaatattacaattgtcctcacaggag

SEQ ID NO: 1423 - DNA, 1000 bp, mus musculus
ctggaggcacttaccccacctccccctctgggggaactccacttggccatggaccccaaaaacctctgaattcatttatttagacttttggacatctgcgtgtttccctctgaaaatgttaagagccgtgtcccgcccaccccacagcctgtcagtccagcctgcagagagattccttgtaattccgaaataaatagaattggtagcaagtgagtgctgagtgatgtcagggtggccccagcagtctctagaagagcactgtgggacagtctcaaggtgtcttctgatgggtgggcactgtgcagcgtgtggcagtgtgaggctgcctacagtttgtccaggaagttgtccagcgctgggatgtcctctttcaggcccttgcgcttgcgggtctcagctaccgcttggctggggcggctgctgttgtcaaaaggatccccaagcaggatctgccagtggtcaaacacgcactgggggaaggcctggccgccagtgttggatcacagatcagcggtgaagccaaaagactcattgacaggcaggtatgccttgaccacaaacatgtgggtaccagccacctgggactcctcaaacacatggccacgcttcctgttcaggacaccgtagatgccacccaccacttgctcaggacactggatctcctccagatagataggctccatgaggcagggctgtgcggtcagcacactggcatagaggcagcggcgtgctgtggggatgatctggccacctccctggtgaatggcatcagcatgcagggtcacaacatgaacatcaaaccgcacaccacgcatgttctcctcacagagagcgccctccttagtagcccactggtagccagccaccacactgtccttgatctcattcaggtactgcacgcccttggtgatgtcggtgagaatgttggggccagtgccatcagggccaaagcaccagatcttgcgggcttcagcaacgtcccactcatacttttcgacca

SEQ ID NO: 1424 - DNA, 1800 bp, mus musculus
aagcatcaataattttgtgtcaccttaagtagggtatcatccctgaagattgccttcagggatgtagactcagtggtgactgcttggggtaacaaaatcttcaggaatttaagcagttgactctaggttctaggattctgacattctccattccctactctgagatttattttcatttgcttaactgcttgattttatgtgtatagttttgatataagacaggctatcaagttcccaaagctatcaattaacactgtagcagagcatgaccttgaacttaaggatcctgctgcctttcccacccaaatgcaggaatttcagttacagtgcactatgactcatctgtatcacaatatctaagaacctttagacttcacacacccttttctaaaagtggcttccagtcatgaccagattcctgaatccccacccagctcatcttccaggggtcctagatagtctgggaattgattgcatcaaatgtcattcaaaggtgccaagaactagggatgagatgaagacaaaaggccatacatgtcgtgccccatgagcactgactgctgatactggtccacagtatcagaatttgggagaagaaagacctgcctggcctctatgagatcacgtttctcctttgagtgaagagcaagatcagctgttattagacgcgttctcacgaccggccaggaagaacaccacagaccaaaatcttctgcggcaaaactttattgcttacatcttcaggagcaggagtgtaagcagcaagagagcaagaagcaagagagctattgcttacatcttcaggagccagagtgcaggaagcaagagagcaagaagcaagagagccgaaaagggagaatggcgggaaccccgtcccctttaaggaggagttatccttcacttaggacgtgtcactccctgattggctgcagcccatcggccgagttgacgtcacggggaaagcagagcacaagtagtcataagatacccttggcacatgcgcagattatttgtttaccacttagaacacaggatgtcagcgccatcttgtaacggcgaatgtgggggcggctcccaacatctccccctttttcttttaataagagcaaataggccacccatattaatgagagtggagatagaggtcaaatccccagtgtgtaggtaaaggagccatgtacaggattagctcttaggcttacaggcttttacccagagcaaccctgacctgctcccgtgtcgttttgcctgggggaagggaactaggacactgaaccttcatgaaagatgacatgtctccctagaataggctcatatatgccgcagagcctttccattgcagtgcttagccttgcaactctctcgggctgctgaagcacactcactctatcccgtgcaatgagtctagcctcatgggatataagagctgagtggccagcgacctattgcctaagcatagataaccatatatcagggggagttccatgttctagtcctgcaagcgcctgggcaataaccaccttgtctctcctagtttaggccttaagcttacagaccaatcaaagaagcaacactaatccacagcaaagtgtatctccaaataatattaatcccacccattttttaaagaaagaaaatgctgaggagatccaattgggtaatcctttggtcagcgacaggtccaagcgcgtggagttgacctgaagtctcaattctcgaaggatctgttcaaattcagccatccaattctgtaacatatactgaaaaagactttttgacaatttagctgccctagtaaat

SEQ ID NO: 1425 - DNA, 1200 bp, mus musculus
tctctctccaggtattcctacctaaccttaacttttcctcgggttcaagacccttggaaaggcctgtatacttattttgtgtaccatatttcctctttgttcctactctctctccccgctttacttctgatagcttgtcctgaatttcctctagaattttcagccctatcttaatcacttgataacatgtaaaaaggaacaaaagggctcctaacaacagaaaaaattcaaggccaaacatatcttgaaaagccattttccactttacttctgatagactgtcttgaatttccttagaaagttcaagatcagacttatcttgtaaagctatacttacgggttaccgccgttccccagctgaaaagttctgaattcacgcagttgaatccttcttaacagtctgctttacgggaacctttattaccgcaatccgcagttctggttctggaatgagggatcttccttgcgctagtcccgagttttttctcgtcccggaattcggcaccaattgttattagacgcgttctcacgaccggccaggaagaacaccacagaccaaaatcttctgcggcaaaactttattgcttacatcttcaggagcaggagtgtaagcagcaagagagcaagaagcaagagagctattgcttacatcttcaggagccagagtgcaggaagcaagagagcaagaagcaagagagccgaaaagggagaatggcgggaaccccgtcccctttaaggaggagttatccttcacttaggacgtgtcactccctgattggctgcagcccatcggccgagttgacgtcacggggaaagcagagcacaagtagtcataagatacccttggcacatgcgcagattatttgtttaccacttagaacacaggatgtcagcgccatcttgtaacggcgaatgtgggggcggctcccaacaatcagcagctacaatcagctgagcaaagatgctctatggctcagatccaggggcttcagcccaagctggatctggtagagatgaaacagatgtggaagaggacatgatctcctctgatgagaatgtccttgtgaccaagttctacttagccactctattatcctttagaacctcagcatcataggaagctgggctcccaagtgagagcttgccaggaagacctggttagagtgtcaatgtctttctccatgtgaactaccccagaaa

SEQ ID NO: 1426 - DNA, 1200 bp, mus musculus
tattctgcaccatttccctctttttgcctaccaaagaagctaaacaagaaggaaggtacaagtgaggattcttgaatctcacttagaaaggggaatgaaatagtcctaagaggcagatggagggagagacctgggaggtagtggggaatgaggaagggaattgggggatggtggtgttatatcaggattatgtgtggagaaggacaggagagataactagatggccatgaaaatgaatggaaatctgtaactgaccaaggtgaggaggtaggggctatctccaggagaagacagagacctgggataaaggaggcacccaagagtcaatggggtgaccttatctatgactcacaacattgggaatatggaacctgaagaggccacctcctgtaatcaggcaggaaccccagtggaacaatagagacaccagcccaaccacaaaactttcaacccaaaatttaccctggctcaagaaatgcagacatgggggatagaacagagactgagggaatggccaaccagtaaccagcccaacttgagacccatcccatgggcaaacaccctgacactattaataacaatatgttatgcttgcagacaggagcacgctgtcctctgagaggttccacctagcagctgactcagacagatacagatacccacagtcaaacagcttgggaactcttggggaagaataggatctgaaaggattttgggcctcaaaagggatagacactccacaggagtaccaacatagtcaactaacttagaacccctggggctctcagaatctgaaccaccaaccaaagaacatacatgggctggacctaggcctccctgcacatatgtagcagctgttgcctgtatatgggatctgttcttctagctaggttgcattgtctggcccctgtgggagaggaagcacctagcctcatagagacttgaagtgccagggtgggagaatgccaccctgctcagaggagaaaggaaagggtgatggggaaggattgtgggagggggtgactgggagggggtcagtgagcaggatataaagtaaataaaaagtaaatacaaattcttggattttctagaaaaaatatttctcccccttttgtctaaataagagtctcttcctctaacattaagaaactataaactatctggtaagaattgcatgcacaatgtctagtttatttgtat

SEQ ID NO: 1427 - DNA, 1400 bp, mus musculus
tttcaaatgatcataggtattttctgcagattgcttcaacagggatgttgaaactcacacaccaggcaaatgaaaattaggtggcttgagtagctcttaccagtctggaaattgcaatcagctggacagtccctcttgattctcattgcacatgttcagtagatttaggactcagtgcttaatgacttagaggtcattacccaaatctgaagtgacttccaggttcatggaaaaatttctagaagtacacaatgaagacacatcttaccttgtacccctcacacaatgattgtcttcattctataactatttatacacacacttcttgtctatggtacaacaagcatatggtgatggttgacaaaatatgtccaggtaaaatcactgtttgagttatgtggaagacagcatgtgtatattgataaagatgcaagtccttggctcaggataattaaccataccatgtttgaagaacatggagactgaagctcactggatttggaacattaactgtttgtggaagagcatcgtaagataaataataagagccacactataggagcctgatgggcatttctagaagaacttcaagtggctagattttaaggaacccactaggtctatgtcagtaccttgcagggaaaggacaattctcagctgcagggcaactgatgggacagcgtggggattggatacacatggagtaggtggaaagtgttattccttggttgtaattggttttgttacaggagaactctgaagaggaactgagggcctgaaggaagagagtgggatcaacagcccatccttgccagtaggagtctggagctgcatggtttggaactaggactagagaacactgcctggggactcacagtattgtccccaagttaagccttgtggaaattttcagtcaccagagcagtggcaggaactgcaaacaagaagacttggaaactccaaggtcacagtaactacaaggctagtggatggacaggcagtggaccatgattgaaaccccttactctgctgctcataagaacactgatcttcaaattctattgtgcatttcataactgtgtaattaaattgctgactatgtaaatgtgacttatcctgatttttttaattcatcttattgttgccagaatacttacataataatttttgagagaatgggattgtttgttggaaacatggttatatttctctggtggcaggttcaaagctcatacaattcgcattcatccatgttttttaacgctgctatttaatcactgtgctagtcaagatctttgccattggagattatgcatccactgggaggtttaaaaattagtcccataaggatcactggagttttcattgaattttaagcaatatttatcaatttaaaaaaa

SEQ ID NO: 1428 - DNA, 1400 bp, mus musculus
cttattttgttcgtcctgaaatgtcatgatattcccgataggaagccaggtgatgttaattcttttaactgttatcatcccaagggctgcaatggcttttcttaatgaagaaaaataagtttcattattttttgtcccaattccatgaaccaaattaataggaggatgattagtataatccaaaatattccaatcacacagggtggtattagagcaaaggcatgaaattgtaatatatgtccatcagaatactctcctaaatatttggtttgattgacataaacagtaatatctacagtctcatcccaagtgacaggatgaattataggtggatttggaacatatgcccaataaacttatgcagagctgcctcgatgtaacatccagataatgctaatcaatagggcaatcagctgtattcgatcctgtgctgtcatagacgttatcattcgaggttcctggcggtggcgttgaaaagaaagacgaaacatctgtctttaatattcccatcttggttttcagcatggcgtacacactgggttggcaaccacctaggggaaggtgtgtctgttgggaaaacataaacatacccacggccccataaaagtacaggatctgggctgtgtaatgagccgtccatcggatctttccaataaactaaaggttttgctttgtcttcgggatgccagtgcctgtcagctgcagacaacccatcagcatccaaagttaaaaaatttaaagtaaacaacgtatgagttagaaagatgaattttatagtaaccacatttagccaaaacaataggatccaaaactaaagcttctcctaccaaagcttggccaatacaatcattgcctgcagttgaaggtctgggaagatcagaatgaacttttatatgaccaatttatatagaattttttttcaagcaagaatggtgtttgttccacaccacctccagtaggatctttgtgacaagttccacagactgagtgaggcaattgacgtcaaaaggccctgtaggtgtatgagtcatattaaaaatcaacaaatgtggactggtgagatggctcagtgggtaagagcatccgactgctcttccgaaggtccagagttcaaatcccagcaaccacatggtggctcacaaccatccgtaacgagatctgactccctcttctggagtgtctgaagacagctacagtgtacttacatataataaataaatctttaaaaaaaaatcaacaaatgtaaacgcaaagaatcatctatataagtaacaaactgtttttcagtagctcttttctacttgtaaggccaacaagttaaaactcaaagagaggtaggatcagcactccccctaagaatatcaaataagagtttcaattctcctgtagtaagctttaaa

SEQ ID NO: 1429 - DNA, 1200 bp, mus musculus
atatattgcagctcactattatacctgacttcagactccaaggtttggtgcagaactcaatgttttagggagataatgtgcaattctatacacataaaaacagccagatgaacatgtatatacctacagaaaatagtattgcaataaaaaatagaaacattgccacagccctcagctttccctatgtaatgcattgcttggctgaagaggaataacatagggtatgtcaacttgtcttccctctaaagaaaaggaaacaaaaaatagaaaggacattcacttacacttgaaaattgatggtttatgcacagcaccaaggctatcctctctagataaatgtttcaaatgtatttcatgtgatgaaatacaaaagtgaagaccccaggacctacactactaaggactggtacaaaaacaaaaggaaaataaacatgtcacagggacagcatctctcttgagtccaattttggatgtcaacactaaaatgattactgtgtgacttaaaatgttaaaaagaattgtcagaatactgaaatctgcatcagctcaaattacatcaatggaaaaagaaagacaattttcttccatcatctgtgtttctagggagctaattcatttactattaagattcaatggggctggtgagatggctcagtgggtaagagcacccgactgctcttctgaaggtccagagttcaaatcccagcaaccacatggtggctcataaccatctgtaatgagatctgacgccctcttctggtgtgtctgaagacagctacagtgtacttacatgtaataaataaataaatctttaaaaaaaaaaaaaaaaaaaaaagattcaagacagccggacttggtggcggaggcctttaatcccagcgctcgggaggcagaggcaggcagatctctgagtacgaggccagcctggtctatggagtgagttccaggacagccagggcaatacagaaaacccctgtcttgaaaaaaaaaaaaaggaaaagaaaaattcaagacggtgggcctcatataattttatgtgactacaaattctactcttccatatattgcttagtgatgtgagtttctacatatttacatatccacattcataagctgtgtctgaaaatctgaccattcctgtattgcaatttatgtgggacaagagactttacttccagactaatattactttatccaaca

SEQ ID NO: 1430 - DNA, 1000 bp, mus musculus
acttgctaaaacagttttgaatctctgtcatgaaatcaagttgagtttactttctgcatctattagagagaaactttttaaaagttgccctgtagcacccatacttttattattttctgtgtgcatgtttttgtggtcatttgcttttggacccaggtaaggtcagctttgtgtgatggctgtaccatattcccttactttctgtgttctgcactgttttctgggcattttttttgtgggatttttcagaagaaatttgtgaatttggtgcagcatttgattattcctgagaaagtgttagaaggaacactgagggtctgggtttctgcacttgattattccctggcctagtgtttattgttcctaggaaatcaatatttccctcgtcaattctcattcattttctgacattccatggtacttgataatctgctttttctcattgtcaatccatacttctgaggccagggcgttgaaagagatcattcatatacctgttaaatgccaagagaaatatctgacatgagagaaatataaggtcaaagaaatacataaaaagcactgaatatttgctgatatcatgtgtccctgtgtctctgaatcttgccggcaagaacacacacacaggacaaactcggatccttctgcagcaaagctttaatgcatctcgagagatagatgatcagcttctggggaggaggagacccagagcaccggaaaatcggtccttttatagaccacgaagagcggttggagacgtgccttgccctgattggctgctcaccatcagcccagatgacgccatgggacaggcagggcacaaggaatggaaaaataccccagcacatgcgcagactacttgtttaccagttagaacaccgaatgtcagcactatcttgtaatggtgactgcaagggcggctcctcacaatcatggtcatgacaactttcttcagcaatagtatcaccatgttcagaatgaattcttatgtttttattta

SEQ ID NO: 1431 - DNA, 1000 bp, mus musculus; identical to SEQ ID NO: 1430

SEQ ID NO: 1432 - DNA, 1400 bp, mus musculus
tctttggataatgcaatgctgtgtgacagtaattgctaaatgacttattttgttcgtcctgaaatgtcatgatattccctataggaagccaggtgatgttaattcttttaactgttatcatcccaagggctgcaatggcttttcttaatgaagaaaaataagtttcattattttttgtcccaattccatgaaccaaattaataggaggatgattagtataatccaaaatattccaatcacacagggtggtattagagcaaaggcatgaaattgtaatatatgtccatcagaatactctcctaaatatttggtttgattgacataaacagtaatatctacagtctcatcccaagtgacaggatgaattataggtggatttggaacatatgcccaataaacttatgcagagctgcctcgatgtaacatccagataatgctaatcaatagggcaatcagctgtattcgatcctgtgctgtcatagacgttatcattcgaggttcctggcggtggcgttgaaaagaaagacgaaacatctgtctttaatattcccatcttggttttcagcatggcgtacacactgggttggcaaccacctaggggaaggtgtgtctgttgggaaaacataaacatacccacggccccataaaagtacaggatctgggctgtgtaatgagccgtccatcggatctttccaataaactaaaggttttgctttgtcttcgggatgccagtgcctgtcagctgcagacaacccatcagcatccaaagttaaaaaatttaaagtaaacaacgtatgagttagaaagatgaattttatagtaaccacatttagccaaaacaataggatccaaaactaaagcttctcctaccaaagcttggccaatacaatcattgcctgcagttgaaggtctgggaagatcagaatgaacttttatatgaccaatttatatagaattttttttcaagcaagaatggtgtttgttccacaccacctccagtaggatctttgtgacaagttccacagactgagtgaggcaattgacgtcaaaaggccctgtaggtgtatgagtcatattaaaaatcaacaaatgtggactggtgagatggctcagtgggtaagagcatccgactgctcttccgaaggtccagagttcaaatcccagcaaccacatggtggctcacaaccatccgtaacgagatctgactccctcttctggagtgtctgaagacagctacagtgtacttacatataataaataaataaatctttaaaaaaaatcaacaaatgtaaacgcaaagaatcatctatataagtaacaaactgtttttcagtagctcttttctacttgtaaggccaacaagttaaaactcaaagagaggtaggatcagcactccccct

SEQ ID NO: 1433 - DNA, 1400 bp, mus musculus; identical to SEQ ID NO: 1432

SEQ ID NO: 1434 - DNA, 1200 bp, mus musculus
cctgcttcctgacctgcttgagttccagacctgacttcctttggtgatgaacagcagcatggaagtgtaagctgaataaaccctttcctccccaacttgcttcttggtcatgatgtttgtgcaggaatagagaccctgactaagacaatggctgactgtcagctacctcaactactacaagaagaacatgtggtgtctggagccacaacagctctaggctaccagaacacttcctgagaagtcctttcatccagccagacttaagttgctccctctccaggccaggcttgtgtacagtgcacagcttggccttcgtacctgcaaaccacagcagtgaaactttatccagtacaatggtgtgtgtgtggtggtggtggtggtgggaggtccaccagcaccatgttatcattctcggtggttatcccgtggtaggtgggctctagccatggcttgtgcttgttaactgcattgggagaaaaagggaaaaaaacagtaagattcagatcactgcttcagtgttctgctgtctttgaagatgatcatgtgttatctggcttctgcgcaagtgaacacacttacaggaaagcaaagccaggcacataaatggaggagagcaaagagactgatcatctgaaaagggcaaactgtggtttgattatgggagtgccccatgtaaaatctaacccagatcatgaagacagaaattgactcgttccctccacaagacactcctgggacatgagctctgacagagcagcctcaggagggacagcactctcacccttagtccccacaggggcagcatggggtgacacaatagcagggatgactgtgggcattgacagaatctggtaaagctcacagcagcaagggccggtcttcatcaaagggttcatggaacaaaaggcacctcaactatgccatgggagatgggcaactcatccactgctgagaccccaatatattttatatgaaccacactaagaaggaagctgtgacaactcagggaattagcccgaggcaaactgctcacaaacaatgaagtctcagacacatctcaccatgctctagttttagggttctctctgtctctgtctgtttgtctctatccctttctctgtgtgtgtctctgtctttctgtctctttctctctgtctctctctgtgtttctgtctctgtctctctccctctctctcttta

SEQ ID NO: 1435 - DNA, 1000 bp, mus musculus
tacagggtcacactcctcctcagcttctttcagtctttccctaaatcaacaacagggatcaggtgcttctgttcactggttgggtgcaactatcatcctctgattctttcagctgcttcttggatcttctggagtgcagttattcgaggtccctctttttgagtgttccacagtctcagtaatagtgtcaggccttgggacttgcccttgagctagatccctctttgggtctgtcacaggaccttcttttttttttttttttcctcaggctcctctccattattaaccctgtcattctttcatacaggaacaattacaggtcagagttataactgagggatgcacccgcttcctcatttgatgccctgtcttcctgctggaggtgggctctgtaagtccccgccccccactgtccacttttcctcccaggtccctcccttactcccccccttgtggttgctttcttctctcccaagtgtgactgagacttcctcacttggccacttcagcttgttgacctttttgagttctgtggagtgtaacatggaaattctgtactttttttttctaatgtccacttattagtgagtacataccatgcatgtcattttaggtctaaggtacctcactcaggatgatattttctggttccatccatttgcctgcagaaatcaggatatcctcattcttaatagctgagtagtattccattgtgtaaatgaatgacactttctgtatccattcttctgtcaggggacatctaggttgttttaaggttctggctatcatacaaaaggccattataaacatagtggaacacaggcccctgtgatatggtggggcatcttttgggtatatgcccaagattggtgtagctgagtcttcaggtggatctatttccaattttctgaggaagccccagattgatttccagagtggttgtaccaattttcaattccactagcaatggaggagggtcttctttctcgacatcctctcc

SEQ ID NO: 1436 - DNA, 1000 bp, mus musculus
caccaccctagattctcaaagtttattcacaacacctcatatggaaatccctgtcacctgacctaaatgacacacagcaaaagaaaattgagaggctgtagctaaagcaatttgaaaatgttaataaaatttccctaccccaaatcactaatgcaataccaattctcatgacaaaatgaattatgaaacaaactcaaaatataatatgaacaccattcaatgtggacaaatgtcataaagagggaacaagcacaggaattcaaagaaggcagaaacaaacttaatgaaattccagagaattccttcaagtgggtaagagaataattatacatgtgcaggatgtgaacatcttatccagagatataaaaatctaaggaatgctcactctgaaataaattctgtaagcctggtggtaactcaatggccaatatgtgaagatacaccattcaaacaaacaaacaaacaaacaaacaaacaaaaaatcagctcgtcaaagaaaggtctttcatcctagctgtcagggatgtaacctaaaagccattctggtctctatataaggacatgtgaaagttagaaatagagtgtgggaccctgttttacaaacaaacaaacacacaaacaaacaaacaggaaacccatacaaaaaattagagctttgtcttctacattgatatcaaaatcaattttaaaagtacaaggatattagaaggctgattctcctattggataatacttttatcttttaaagttgggtcctcagtgggtcacaatcgtttgaggaatttagctgttggaacattactgaataaagtatgacactgggggttggctatgagaaaaaagaatagatagatccaagccatcttaattctttcttcctctttagtgactggggttgaagatgtgatctttcacctttctacttcaacaacatggcaatgttctatgtgtcctccctgtcatggttgatggctatcctctggaagcattacccaaagta

SEQ ID NO: 1437 - DNA, 1000 bp, mus musculus
aggagaagaaagaaggagagagtttaaggttgatgccccaggtcacacaaccaaggaaagctatattgccaggctacaagcccagtccgcctgacctagtgatttagggacacagcctgctgcccacttccactcggcccagactcactgagatcctcagaggtcttacgccagctcacagggctgggccctcgagcggagccccccagggtagctcccactcacctggttgtgaatgaagagccgcatctgtttctgagggtatcgtaggcgcagcagccgcaggaaaaacaaggatagaaatggtgtgggctgctcaatgaacacaccgaccaggacagtggggagagcttcatcctgcagagggagggacaacacaagagtcaagcagggtctaggtactgcctgctaccaagccccaggaaaactgaggtggaggcgcatgccctcaggaggctagatgcccgggtcacagaggaaagcaggccatgcaggcatggggctgacagaacacacggtgaggcctgtttaggaaacgtacaggaggtcccagggtcctaccaaggccaatggatagcatgacaccaggtcctggctggtgtggtgttcaagctgggccatacataacagcaagtaagggctcacagcataggaagaggctatggggcacaaagggctagggagaagaaagcagacttggacatcaggaggaaagctgggcttgggtgacccacagacagacaaacaccttttcacctctccccaaagcaccattctactcaagatcacctcctcctctcccccatctcatggcactgccctcaactgcccccctcagctcacgccaggcctcaccccaatgcccttgaggctccgtaggccctcgtcacacacggtgcagcccgtctcgaaggtccagaatcgaggaatgtagttgcccaggtagttcagctgcagctgttgggagtgaggtgcaaggttgaagaggagccaagagggc

SEQ ID NO: 1438 - DNA, 1400 bp, mus musculus
tgtttctctctcatccaggcctgaatctgctcctttagctctggcactgagggagaaagcacaggggatgaatgacccggatgacaggctcttccactgcagttctatctgcgtggacacagagtccacggtgctcactccctgtgggcgctgaagactgcagaaggaacagccatggacagggaaacatttacagccaaagtgagcggagtgctctgtggcttttgggtactttctggatccaatgtcccttttcctggtggtggtgctggggactgagcctgggaatgtacacagttgggcaagggctctgtgcaggcccagccatcttttcctttttgtttgagacagtgttgtaattacactgtcggaacttacttgccatgaacaggctctccccttctgcttcatccaccccggtagctgggactacaggcctcgcggcaccggccagctctcagtctcccgcacggtctggctgcactcactggcctcctacctggctccagcatgctctcagtcagcatctggcggttgaaggggtcggtgggggagttgagcagatgccgcaggatgatagaacggtccatgacggtgccagagggcagtctcacgggatcggtcatcagggtgtccatcagagggtctgtggagacagagcagaacacactaaccctcaagaacaaaagcagatggttcctaccagcgagacagtctcagggagagctgtggagcgagcagcccctcaagcccctcagtaaaggaaggcagcaaatgatgaaggccttgccctgccttctgtcactgctgctgggaggagaaaagagcaaagaggacagccaggcagcaggcccagggcagaaccctttgccttagaatccagactccttcctgatagtggcagagctgcctttaaagtcttcctgggtacctgatgaaaccgcactggggatggtcaatgtaggacggacactgctgctgtcctcagacacaccagcagagggtgccagactccattttggatgtttgtgagccaccatgtgggtgctgggaattgaactcaggacttttggatgagcagtcagtgctcttaaccactgagccatctctccagcctcggatgttcaacattttaatctacaatattcactacaatttgtacgcataattttcgacaaatctcaagaatcagctatagcatcagacaatcaagaagcagagccagcggccacccttgtggtgatctagatgagaacgactcgccagaggctcaaatgtttgaattcgtggtccccagttaacagaccagtttcaaaaggattaggaggtatggccttgttggaatggctgtggtcttgatggagatttgtcactggaagtggactctaaggtttccacac

SEQ ID NO: 1439 - DNA, 1000 bp, mus musculus
atattccaggaagagggaggggttcattgcttaacctggagcagagcccccatggcagcagccaggcccacactccacccttgctcttgcctgggagactaaggaaaagccctaaggcacggggctctgtgtccacactcagcacacacagcaccctggctgcaccccatcacagaccatggcaccatggctcacccagaaagtgattgacacagagattgcgcagcgccttgggcatattgtagatggtggaacagagatgccgcagagacagtggctgctccgactgctcgctggagcccgtcagctcgctctcatatttcacaccgttcaggagaatgtttgcgacctgtaacagagccacagacaccaagtcagagccgttaggcccacatcccacggaggtgtgtgacagggtatgtatgtatcgtatgtatgtattatatgtgtgtacgagagaaagtgagagagagagagagagcaagagagagagggagagagagagaggaagatacaacacataaaatagataaaaatagataaaataaatacaggtcattggagagggacagctggtaaatgcttgccgtgaagacatgagacatgagtcacagcctcagaacctaggttgaaaaggaaccaaacccatatttgcaaccccgtactgaggaggcagagacagacccctggacttgctggtcagctagcctagcctactcatcaagtcacaggccaccgagagaccctgcctcaagaaagcaaggaggatggcatctgaagcaggccaaagttgacctctgacctccacatatatgtgcacatgggtgtacatgcacacacatgtgacatgcaggtcagctttagcccagccagccctcaccgtttttcccatgaagaaaggctgtgacgactttcttcagggtggccagcacaaagtcctctctgcgcgggtggctctcctgccacatggaggccagccagccacgtcagaggacacctc

SEQ ID NO: 1440 - DNA, 1000 bp, mus musculus
ccgtgggaggagacacacctcaacacccaggagttggctccagagcaaatttcaactcagggacatttccagaacaatgtccaagtcaatgaaaggtaggtgctcctggcgacattcctggttagttccatccacaaggaaccgctctgagcacagtagagattaggactggccaggtgacctgcagttccggttttgatggaaagagaggataaaagtaggaaggaagcaggccacccacccctgtcttatctgggctgggacagagtgtgcccctggagaggaggaacaagtgctgttttgctttctgtgtttttatttaagcaattagtcacaggtaacgtgaagcaacttttgaaggaaagctctccacatgccggaattctcaacccagtggtgttgggtgtcgaggttcgggaaacataaataagtgaatttcaaagcattaaagcggaggagggaaaagcaacgtccacctcatccttgcattggttagcattgatctcacaggacctggaaagggaataaatataagaatagcagacaggcaaacgtgtgaagctctgcagacagcaagccctgaacagtctcctgacagcggcaggctacttcagccacctctttggtgactataattacacaggacaatgtagctttgaggaaccctggcattggtgtctgggatttgtaaactctgctcagaggcccggcctcactctctaaagctggaaaagcctctgttttccacaagtcaccattgagagtgcagccagatctaaagtgtgtttgcccctgaacaaaggagcagccgttcccaaaggccagtccaacctgaaataccagatttctaatgagccctggccttgtctgcagctcactctgcacctggcttaaccccttcctgcctgcaggtcctcagagtccaccttcagtggaaaatcaccctgactaactgctgtagataaccctgcacgccatccatcaatttgggccgaatcat

SEQ ID NO: 1441 - DNA, 1000 bp, mus musculus
ttgttccccgcatctggcttggcatagggcccagagtcaggctgagtaaatatttgctgagtaagtaaactggcccaggaacactttaatgttgaatgaggctctctattgaagtagagattcaatctctcttcagaaggcaaacttctgcacgtagagatcagatcaccagaaagggctgcttctcaaagcgagggagccacacaagatgaacccagttcaccctgcaggaagtcaccaagctcccattgtttaaggcttgctctgcaagaataatctatctgtcagtgggctgtagaatggaggaaagatggctgggttccaagtagtcagtcgcttcccgtaacgatgctaattctggaatccaaagctggtaagggagcagggctctgtcattgtccagcttgctgctgcatgatggaagggccaggtgtggagctgaccttggcacatgtctcccttgagccactctaaacgttgcgactttgggaaagttgcttaatgtctcttgctcctcccacccccgccacctcatccccccagcagggcgatcaccgtgtctcctcggagctccatggtgagagttatggtgggtgtcaactttcctgttttttttttttttataacttcataactccttattggacagcagtttttagaaagccaaaagctgggtgcaattacagtgtcacctgaggtcacccagagaagatgtgtcaccctgtctttagaggcaactaaagggaagctatgatatggaagagctcagctagtgcccactgttcttcagtcaaccttgaccagattaaatcaaatcgtcttctcaaagcacgggtactggggctggtctctgctgggcatccttgctctaccaaagggtgcacaggcctttccaaccctcatctagtaagctttccagatggttgcccatcctctctcattgtaatgtaggctggtgatgaagggtgttggctggcgttgccaggcggaggcaccgggg

SEQ ID NO: 1442 - DNA, 1200 bp, mus musculus
ttgtcaccctgtccctgagcttgaactggaatgcatcagttctgtgctgcgcagacgttgcaggttctatccggagcctctgagcatccctccaaaaacggagaggtcctcgaaatgcttaaggagagtgcactgcctctggctgcctgggacctccgtgttacacagtgcagggacccggttccttggatgggtgtgctccgtcgggtctctgacgtgactgggccgaccgtgacccttgtgtccactgtaggacaggcgtttacgggcatccagagtagtgggagtcacccctgctcgccggagccgactcccaaggagacagcgttaaggatgctccctggggcaggtgggcagggaaggtgattccaagccaaaggaagaagcctagtgtagcctcgggtggctgggtgggatccaatgaagacgccaggctgcactctgggctctgtccagcagggggctctgtgctcactgtagagtgatttgtggttgcttctctgaaagggaactggaaaagcagagagagaacacagccagcgacatcctgcagaagaagcaagaggcagaggccgctgtgagtgtcccactgctcatatgcagggcacagggcaaacctccacacagggcccatcccactgaagctggggctgtgactccagacagcccaggggctctgcttcaccgacaacctcgttccctcctgaactgctgtgtctggagtctgcagtctgtgccctgagtcccagcacggctctgtagcgtggcacacaccgccctgctctcctcctttttgtgagagcaaaggagcagaaggccatgcttaggagcagggtgccatggggttctcgtgacacaggtgagggaccatttgagcccacatatgttcctaggcagatgtgcccgtttgtggggcagcacacagccctacacagctgaacggcttcacaaacaatactggtcctcttcaagaaaagtaggaggtccagctgctcacgtcaagtgtctgttttgaggcaggatctcacagtgtgttctagatgacaccatacttactatgtagcccaggttagcctttaagttcatcactatgtatctctttactccttttttttttttaagatttatttatttattatatgtaagtgcactgtagctgtcctcagacactccagaagagggcgtcagatctccttacgg

SEQ ID NO: 1443 - DNA, 1000 bp, mus musculus
gccacaggcaggtgcaagctcagaatccatcactgatatcccgcagcccccacccaccacgcttctccatccccagctccaggctaagctgactaagctctagccgatgtacaaccaaatgctctgcagcagcgccacccagtggccagtgaagcagaggtctgaagcctgcctgcatgctctggtcccggctaggcttcttccccgcagtagactctgagtgagggtctgggttttctgtttttaaaccccacccccagctcgcgtctggatttttaataagccttagatcatggtttacaacatgcttgagaacagccgctaaaacacaccctgacaggagagcctgagactccggggtccttcccaggacagacacctctttcccctggttttccgaagacacttgcaatagttcagggtccactcattatctacaaaggcccgaattcccagaatatctaggctgttggggttctatccggccgtcatctttcacgatggtgatgttactttgggcttcctttgccggctctgcagccagtggctcaccagcgccccctacaggaggcctgttgttcagaaaggctggaccacacaaggcgatcaagattgccctgtaagtctggctgttgctggcctttggaaaatgggcaggtgccagtccccaaatgcctgtgagctccttaagagcggcctcccagaggtctctgggtgggataccagagaccactgagtagtgatgtgcacagcgagaacattgctcttgggccctgctgaggggctcaggtagcctcagatgacattgtgtacgtcacaaccctgttaagccctccattgagaccttagtctttccccaggggaaggtggctgcctcagggactcctcctcagaggaggcctgggtgacttacctgtagatcatcccgggggagcctgtctgccgcagggagagtcgagctggggaccccgtggttgattccggatacatggggccggcc

SEQ ID NO: 1444 - DNA, 3000 bp, mus musculus
gacagtggacaagctgcacccttgagagctgccgagcaaagcctcgtccgtaactccaaaccccagctcctgcatgggaggagagaggatgtgggagcgccgtgggcagccctggcagctgcgggatgtcctggtttctgcccgcatccctggtatgcatcatgccctcagtgagtcccagggccagggccaggaaagtcacccagaagtgacctgtagacctcagccaggaatctcacagtctagagacaatgatatcaggtcgatgacactgacgtacgctggagccaacgcacacacacctgaggcctagatggagtgcttttgtgtaacaattgaccacaaactgggtggctctcaatgacagaaatatatatcatttcagatctagaggctaggagcatgacatctagacagcatcaaggtaaaacttcctctaagaggctgttgaaggaggttctttcctgccttgcccagcttctttaggctttagtgagccttggcatggggccactccttcttgtctctaccctgtctgcatgtcaccttctcctgtctgctgtgtcaaacatatctctgctggctttcttcccatcctgatgattgtattgtttggactgccctggggctgcaggacctcacttcaagaccttaactcgcaggcaggagggacagctgggtctgtacagggctaactgtgtgggcctgggagcctaagctcagggctccgagtctactcaaaaagctgggttgtagcacgtgctcatagccccagtgctgggaagtagatcactggagcttgctcccacacagctcggcctgaatggtgagctccaggcaaacagaagacctgctctccaaagcaaggttgacagtgtccacaagaatggcatctgatgctgacctctggcctccacaagcaggcctgtgtgtatacatacataaacacacacataaacacacacagaccttgatgtaatgggcatgcaaagacccttcatctaaatacagtcatttcctgagtccaggtactgggtctcagacaggtcttctgggcgccatgataccatctcttctggagtgtgtgaattggttttggggggcatccagtcttctccaacagcttggaagttgggtggatttgtcgagatgaccacaggacagcctgcctggggacaggaaagccaagactgcagcagtgagtagcagagaaggaggcagagcaagggcagagtctgggggcaggggtgaggtgtggctgaaactaacaagagcaacaacgtcttgtcacccctccgagccgagccgtagaagacttatccagagagaagatgggctcagttttgtgagagcaagaaggaggagggctgaccactgaggggctcaccgtggtgtgacagtgaaggggtgtctccctttcaccattgcctcggtcctggaacccaaccattcacacacacacacacacacacacacacacatgctcacacacacacacacacacacacacacacatgcacacatgctcacacaaacacacacatacacacacgcacacatgctcacacagagagacacagacatgctcacacacagacacacacacatgcacaatgctcacagagagacacacacatgttcacacacagacacacacacatgcacacatgatcacacacacacacacacacacacacacacacacacacacacacgcatgcacatgcatagtttccctactaaggatgagcactgtgtgtctctctccactccctcagttcctcctttcccaggctgaagccagacagagccttagcttattaagactcaagacatggaggggtctggggggcaccagcttcgggtgtgaggaacacgtacccgccttcagtatgcctgctgattcctgcactgctggctacagaagtgttcatctgtaacactgatgggcctggtaagatgggagtagaatttcacagctacggagaggagattagacagacgaaggcagctatgagataggctagggccgggagagccatttccagcgatgagcctgctgacttggggtgctgcgttgtgtgattacagtctgtctcctgactgcggcgggcatcacttttgagcacagcttttgtgggctgcactgaaatgctcacacctacccaggggtgtggagaacagggccagcctccaacgggtgcacacactcgtgtgcacacagagtctgcctggaacactggccgcattgacagttttgcctcctagttctaagtaagcagggtgctgcagacaggtgtggcgcgagctgggtagcaggttcaacgcaacagccgcgctgcgccggttcctcatgggaacctcctcagaggctcatccttgttggtaacaggtgctgatggctacagctactggggcaggagggattgacccaaaatttccccgaggcaggtgctttctggggaggctggaggtcctatcccttgtgcctgcatggtggaggtctccatctcataaccccaccctcccaccagcatttaagaagcccggctcgctgcagcccgcaagtgtctgctcttcaccctgctgatgctgcctcagggcagagttcccagctctgccagagttctcagaaggacacccagggcttgcttactctcatccagtatctagaactcttttctagatactttgatgaaagcctgtctcctaggtgaggcaagtcagtctgtctctcaggcggctgcagactgcacggggagaggtcagtaccaggcaacaaagctcggatcccaaacagacgttagctaccactgtatcataaccactgctgccattgttgttggcacacctctgtcgccatcgccctcatcatcaccgaatcaccatcatcgccattagagtggttgtcaccaacaccactggcatcaccatggttagaatcactatcatcctcctcttccttataatcatcagaatcatccttgttatcccagtggt

SEQ ID NO: 1445 - DNA, 1800 bp, mus musculus
tgaaggcaggtgaggtggccgtggtggccagagcagggcctacccagccagggatggccctcagagagaggcagacataggatagatggatgggtggtggcaagtaaggggacacttttagtacctctggacccatgatgctaccagagagctggtgctgggcccagcaggaccccctcactcactgtgtggttacaggccccgaagggttggttgcaccaagttgtaccccagggcctcccttagagccctagcagctagactccatagactgagaacactttctgttctggcctggggcggggggtacatgggatagggacctgaggttccagatagtgggcaaataaatgtatgtagatccctttgaggaaacagaaatgcagagggatgtgtcactcaggacaaggaaagccacgggaggggtcatggcgctctacccttgccaagaatccaagcagtcagcgtccccagatgtacaggacatcagaggctactgagggaaactaggactggtaacagacagaggacagggaggcaggtaccagggcaccccatcccaggacagcagggagacagtggccagggcgtcccatcccaggacggggacacttagcacacttggattcccgaagcccccctgggacatggagatagcactagaaggctccagggtcagcatcccccagtaccccacatcacaaactaaggaagggacccagagaagtgaatgccaggccatagccccagaaggggacagggtgggaacgagggggctggtcctatcctccctgtggctatgtgaggcccaggaggtaatactcaccttaccactaatgtcactgacagccacatgaacaaagatagaggcctcttccatcccttctaggtacacatgccggtagcctggagcaatagggtcacgagtcatcaaggttccaacatctcctcaccctgccaacccacactttcctcaaaggtgtctgggccttgagtaggaccagggagcctcctgtgcataggaggaagaggctgggcccccttcctgtgtcttaagctagttaggagctcctggggaacacggacggggaacgctggcaaacattgaacctcgcccagcctccttacctggcattatgctgctgaaggctagtgtcctctggccgatgaagtcacgtccaatggggtcatggtcccagaccaggaagcgtacaagcgcaatctctggcatgtgcacggtgaacaccagtgtctcctcccacatggggttgaatcctggagatagcgaagaaaggatcagcaggtccagagacgactggcacctaaggagccgcagagtggacagggcactgggcacccagcagtgcccgtatcctacgagggacttgggcactggctggtgtctgaagccctcacccactttggcgggagccctcaccgttgtcgtccaccactcgggtctgctccttgctgcagtccacggggagcccaatgacctccacctccacgaaggggtcgatgatctagagacagggtgaggggtggcactggaatcccaagccctcccaccacccacctcacccacgcaggcttgcccctacctccccacggtcgcccagcaccgagtcccgtggtttgggcagctgctggccactgatgatcctcagggccagctgcttcttgagctgccccggcaggggatcctccgagttggggttgaagacacctgagaggatgcaggtgtgagccaagtacacagctgacaccacacccctacctgttggtctgtggggctctggt

SEQ ID NO: 1446 - DNA, 1200 bp, mus musculus
acagagcatccagcaaaccagaaactcaggggcagagagtcagtccctggcactccttcagaaccagacacttggcctggaagcctccccatgtcagatacctgtgctgttctgacagctgccacccaggggtaaatgcagtctctgtcccaggcaggccatacaactcactgtgtctagccagccagggtttgcttttgtgtaggatcagcatacattagctgcctttgcactgtgtgctgggctccccagataaagggagcaccccgttttggggaagttggcaatctctcctccccaggtgacatcataggattcccatcatcccttgggtctcgagaacagtcacccagcaggaaaagtaccaggcatgaatgaggttttactcacccacaggcaaaacgttggcactcaggaaaagccatctgctgcctagatccggccctgggtcctcaggcaatgaagcgggaccaatggagctatccattggggggattcaacctagagggatgggcactctctgggatttgggtgcagacagcctggattagcagaggggtctagtcaccagcaggagactgatgtgaggtcccactgctcccagaggctccagtgtcccttgctgagatgaagtctaagcctgtagttcatcacacacctagagaaagcaaaaggagaatgtatgttttggggttgggggaagaggggagttctgcccagctacctgcactgtgggaaggcaatatgcaccacagcgccccctgctggaggatactggattgtagccagcaccacagtaacttttagataaacagactggtagggctagtgctgagctgggtagcaggggagccaaggttgaggaggtggagcaagaagggcccaagggtgtctacagagcctcgacttccatgaggtctaggtggaggcagagtattgtgaccaagctgccagcttcctcgggagttgacggaatgtttgtctgttgtgaagactttaggcaaggctccatcatagtcaagagaaaatgagaaccacttcacaaagtgagccccgtgggaacaaactttgcaagacaaagtacccgcaacacctcaaaacgtgtagcccatggctgtgctaaactcaccagcccttaggcacaatgggacccgggaagacttaaagagccagtgttgagcatcctccatctctgctcct

SEQ ID NO: 1447 - DNA, 1400 bp, mus musculus
cttggtactagaagctgattccaggggtcccgcgtggctggcgctggccgtggtgctgacccgcaccctgtgtgtgatctgtccaaggtgctggcggcgacctggttctctcctacaggctagggctcagctagggatggagaaggctggatgttgcctacctcctgagtgtcctctgcctgatgtctttcttgttctgtcctgatacatacatacatacgtacatacacacacacacacacacacacacacacacacacacacacacatacatgcccagccttctattcctgggacgcctggacagggtgctgagtgagggctcagggctgggcatgttcaggcaagcagtaccttctggtctcccatggtctgcctggggaatttctgaattcaaagtatggctatgaagtcccaaagaaccttttgtgggtcacctgggcaggccttaggtgggcataataggatcaaggataatcttgctttgaaaggataggtgggctcatagggtccatcttgtgcactgcaggccttgggggtttggggaaggggtcactgtgaggctaaggtcagtggagtccaagtctatagttaagtgtctcacgtctcaggctgaggtactattcggggcttgttggcttaggagatttctggtagggctaggttccctaaagggaaggtcacgggtcagtggtcattcattgtgtccctgagctgcctcaccaccgccactgttctcatctgctgctttcttggcattccttcccaggaagaactcctgggtgttgagctttggcagccaaagaagcacatagcacttgggcaggtggaaggtgaccaggatgcccagggcacagactaggatagcacccatctgcacagctggctggtaggccacctgcacattggccaggaggggcacaaaagagacccaggtgatgaaataagctagcatggcgaaggtgagaccacgggcacggttgtagcggccaggctggctctgtaccaggaaagtgcccagaaagcagaggaaagctaacattgcattggtgatgtgcaccaagcccaggctgacccaggaacgcacgtggcagtgctccagtacctctgtgggcagcactgaccagtctgtcaccacctctggtgggaaagcgatcaaataccaggcacatagtgctgcctccacaaaagtggccaacagtaccactagccaggcccagagtccccgaaggtagctgcatagccagtttgcccagctcagtggcagctcagactccacaaaggtctcagctgcttgcaggaagagtgtgctcaggcagcctgtgagagggaggtgagccattggttgttgtgcaaggcagctggcagagcttggccgccctgggaacagaaggacactg

SEQ ID NO: 1448 - DNA, 1200 bp, mus musculus
gatttggctttttaaaactctctggtatattaatgtctgtgtgtcctagttagcttaagttgtcaacattttggagcctacagtcatcttagggagcctcacttgaggttatcttacgcgctcgtgaccggccaggaaagacgcaacaagccagaatcttcttttttttttttttttttttctcttaagactgttttattttgttctattttcaaagaaaacagatttagaagagtgtaagcataaatttttgcaacctactcttaataagagttcaacctctcctctagcctaccacacagcagaggtagtggaagggaaacgttattaggatatgggaaattggatctggtcagcaatagttcttttgaggcgagctcagtctttttggccagcagttcagtcttgtagcaaacaccaaatacaactcagcagctgcagaccagtcctctcgggcaggcagacaccacacacgaaccatcagctgcagtccagtcctttctgcaggtgacaccaggcacaaacccagcaactgtagttcaatcctgaagaaactgcaaggcttgccacctggcctgaggcaaggctgctgcaagggacaagatgctagaggaacctcacaaacagtccttgggtgagtttctctcaataagccagaatcttctgcggcaaagctttattgtttactcaggagcaagagaggaagagcgaggcagagagaggaagagagagagagatgcagagagatgcagagagagaggcagagagaggggcagagagggagagaggcagagagcagaggaaaagacgaagagagacgaagagagggagtgccagaaccctgtcccttttaaggagaattatcctccacctaggacgtgtcactccctgattggctgcagcccatcggcccagttgtcatcacgagaaaggcagagcacatggcgggaaaactgcccctgcacatgtgcagattatttactacttagaacacagctgtcagcaccatcatgtaatggcaaatgtgagtgcggctccccacatctccccctgtccttttaataagagcaataggccacccatattaatgagagtggagatagaggtcaaatccccagtgtgcaggtaaaggagccgtacacataacctcctcccaggctcatcacccagaggggtcctggtctggtcccgtgtcgtttt

SEQ ID NO: 1449 - DNA, 1000 bp, mus musculus
ctgagtcaaagttgccaagcatctgttaagccctaaatcctgttctaggctgttgaacaaaatacaaggtcctcaaaggtcctcgtggagtcagagtctaacctggaatggcagttcattaaagatgagcaaggcgaggctactctatgtaaggaagcttgtggagcaaaagaaccaggcacagcgaataaggagacaggcttttgtatccaattgaagacagggtgggttggccttgctaaggaagagagattacactaatactataagaaacagaaagttctttctcaggctgtcagaattctgtcttgtcagccatgctcagaaaccgtttctccctgcattgcagtttgctcatgggtctgggtgaaagagactgccattttcctctacatcctccacatgcctctgggagcacatgctgtcatcaatgctgccacagcctgaagaccctcgcttgcttttgtctctgtgcttgtatttagttggctggttgtttttgagacagtcttgtcttagatactgctctattgctttgagacaccatgatcaaagcaaagtgttagttgggagcttgcttagagttgcagagggttagtctgtgatcaacacagtggggggcatggaggcagacaagcaggcaggcatggagctatagcagtagctgaggactcacgtgtgatccaaaagatccaggcagagaaaaaatgtgactgggcatgatatgggcttttgaaacctcaaagccaacccccaccccaacctgttcccatcaccccccacccccagaccctcaccctcatctctcatagcacacctccaacaaggccacacctcctaatccctccccaaaaattttactacctggggaccaaatattcaatatatgagcctatggtagccattctcactcaaaccacaagcctcatatatcttaaatttgcctcaaacttgaactcatcatgatgtagacaaggtgatgttgaatttctcatcctcc

SEQ ID NO: 1450 - DNA, 1200 bp, mus musculus
cctgcctgccagaagagggcatcagatcccatgacagatggttgtgagccaccatgtggttgctgggaattgaactcaggtcctctggaagagcagtcagtgctcttaaccactgagccatctcaccagccctgattttttttaagctcatattttggggccaatgagatggctcggtggggaaatgtggtagccataccagcctggtggcctgagtttcattcctggaagccatgtaaaagctggaaggagcgagccaccaccaccaaggttgtcctctgacctcctctgtgcacatgggccacctcttcattgtagtgtgcctgcacacacacctcagagttgttcttgatttccacatgtgtacatgaaccaactcctcattgaaatgtgtgcgggtacacacacacatacactccagagttgtcctatgaccaccacatatgcacatgagccacctatgcattgaaatgcacacacacacacacacacacacacacacacacacagacaccaaaatcatcttctgacttccacatgtgtgctgccgcacctgatccacctagactgtctccttatctcagaaatgtgtttgaggggcttgcccttcagaaacagggcaaatgtaagagccttgagaagaacagtagcgacacaaacacccatagcatatcatcaggcagcttccttctctctcctgtgagcatccgtgttccatgtgtgagaacctggtcatcagggtgtctcaggccatgttctctctcagcgctcagcatctcctttccctgttagcaccgttgatggttcttttttctgggacttgggaagcaaacagaagacaaccttgaaatgtaaaactggcttttccttgctgctgtaggtccttctagagcccatgataaaagaagaacagagtgcggaaatcgactttcttcttccctctttaacgctgagctctttggggtaagaggttttggtcaaatgagtatgttcaccggctgctttgggcagctcctgtaccagtgttaagtggccaggagtgccaacaatgaggagataattgccaaggattatgtctgttctcacacataggttggaagttgaccttgtcgcttaggaaggaggttttattagagactctcctttgagaattgacttgtgagacgaaagctagccgaaatcacctgatgactgtacttg

SEQ ID NO: 1451 - DNA, 1000 bp, mus musculus
aaccagtatttgataccagtttgtcttatggctgtaaaaaaaaagtgatcacataaacatatcagtagcagtgacagtagtgacagaagatactgtcatagtttggtgtaagaacacttccggtggagagaggtgtgagccttgcgataaagaggcggtggctaaagctggatctcggtgcttatccctggcctcagaccttcagagtcctgaggagtcactcagtcacttagcagttctgagtgagctctaggaaacggaggaaagaaggcgtctcaaaggctccttctccaagagtttacagtctagtgagttacaagacatttggaaacaattgacatgatgcaggcatgggaagacagagacttacatcctacctatgagagttgagaaaaaatgctgacctgtactgtgtggtcagtgagtactttcagaggagaatgcaggctgggcctcctgagcaggactgttcatagtaaagtcagaggctgagtgttgggaagtggatagaagacctgtgtccatcaaagaacaagtggttcactgtggctggaagatgggtccctgggtaatgtgggatgttacagaacacaatgataaatagtcagtgactaagtcacagattgattcactaatctcttaagtgtctctcagtccaattgggctggcaagcaggactaaccatgacgttgagttccgttaggcaaagcaactcaccaagcagacatttgataaatgctcagtgagtgacggcttttgtcattcctcctctccccacaaaacttagcccacactttgctgtaggtatttatggaaatctttctcattggccaatgactgtcatttacttgagggtagcactcttttcctaagtttttaaaaaacacttcacacaaaatgtatttattgatccatgaatctgttctatactgtcggtttagagtatagatagcactttcttgtctacagaaagcaaaacttcaccccatcttccctgctt

SEQ ID NO: 1452 - DNA, 1000 bp, mus musculus
ctctcctctcctctcctctcctctcctctcctctcctctccttctttctttttttttcgagacagggtctctctgtgcagccctggctgtcctggaattcactctgtagatcaggctggcctcgaactctgaaattcacctgcctctgcctcccaagtgctgggattaaaggtgtgtgccaccacgctcggcttgagttcctgtcctgacatcagtgatggagtatgaactggggatcacaaaataaaacaaccctttcttcagaagtcactttgatcatgttgccttaacaataggaatctgaactaaggcaggagcaggtaccaggagacagagttcaacagaaaccaaattagatactccatgttccaaatgctgagacatccaggtgggctggcaacacaggcagggtccagagttaaaggacagactggcctgggcatcaaaagttcaatgacaaacactgtaacaactcagaggtagaagctcataggcaaaggtgggagggtgaagtaaggacagagtggcttcaagttgaagttcaggcttcagagtagctatgacaatacagatgggtatgcatcccaacaagctgcaagtcaggaatgtccacagcacagaacattggtgcttgtctgatttcagaagaagtgagacaggttatggccagcccttgtgtgggaaaggtagtgatgtacaattttgcaggtgatcttggccatcacatgagaaaatttccagagctggcagggtcttgaagtaaggctaccttctcagagtccttggttttgagagggcatgttagtttttcttatggcttaatctgaaatccttaggcccctctctctccttcactcttctatccattgaatttcaaattaataattcagcttgaaattgtgaaagtcgcagcatcatctgtggaactcaggcaggttatgcaatcacactccagtgaacattgagtgcgcctgcgaaacatgtcagattggacgtgtaa

SEQ ID NO: 1453 - DNA, 1400 bp, mus musculus
aatataatcaaaacatgtataaaaatttcaaaagactagaattaaaaatcctgatgaatggaactaggaaataccatccggagtattgcaatttagacccaaaaggacatttgtggtatgtactcaccaataagtggatattagcttaaaaagtacagaatacctaggatacaatccgcagaaatcaagaaggttaataagcaggagggcccaagtaatgatgcttcaatgtcacttgggagggagaagaaagtaattaaagagtaggagggggtagggagaggagaggtggagaggagaagaagacatgatcaagtatggggtggggacaggaaaaaagccctgagggccagcagaatgaatggcaatatgcaacctcaaggggtgggggttgaaggaccctctagaaagtaccagagacctgggaggtgagagtttcttaggactcaaaaggagggaccatagtgaaatgcctaacagtggggaaagggaaatgtggcttgccatcctacagtcaaaaaactctgacccagaattgtccttgtctaaaagaacagcagggacaaaaatggagaagagactgagagaaaggtggtccagtgatcagccaaacttgggatccatctcaaggggaggtttcaaggcctgatgctatggtgtgcttacacaggagcctagcatggctgttttccaagaagcacaacaagcagctaacagagacatgcagataatatacccaaccattgaactgaagaaatgaagttggggacccctgtggttgagttagggaaaagctgacagaagctgaggagggaaaccctataggacaaccagcagtctcaactaacccagacccggagatctcccagacactgaggcaccaaccaggcaacatacatgagatgctctgaggtcccagacacaaatacaaaagaggactgcctggtctggcttcagtgggagaagatgcacctgacccttgagagacttgaggtcccagggagtggggatgtctgggggtgggaggaggtatatcattttggagacaaggcaggggcaggggagggggaatgggatcaggacctgtgtgagggcagactggaggtgggataatgactggactaaaaaaatgaaggtaacaaaaaaaattctgataagcagttactcaaaaaatccttcagacattacgcttatactttatatttgtaaaattaatggaaaaatgagcatactaaacttatttaataggagattaaaaatggttctttagaaaaatggaaaacagcatttaagtgtactttttcaagtttgtttatagtaaattgatatttattttttaataaaatatacctgctaatgatacagatcatgactatttaaaatgtgaatacattatggaa

SEQ ID NO: 1454 - DNA, 1200 bp, mus musculus
ggttagcaatttgttaaactggttgtattctcatattccatctgagctatctataattcagatttcaaagtactggaagattccaaaacacttagttcttgtgggtcctcaagaaacaaagacagtatatagtgttcagctccccccacccagtgtgtgtgtgtgtgtgtgtgtgtgtgtgtgtgtgtgtgtgtgtgcacgcacgtgcaagagagtgcatgagcatgtgagcgtgctcgcaggctcatgtgggtgtgtgcgtacaggtactcaagtagtgttgagcatttacatatgtatagaggcagaggtaaacgtagggtgtcttttctatggtttttatcttattttccatgaaaggatttctcattatacccggaactcacaaatttgctagactagctggatatgatgagtgagaaatctccttgtctctgtctattcagcactgggattactgggattacaccaggaagcccaaaattttccttgggtgctagggataaactcagattctcatgcttgcttaaacaaatgatccctttatacctaccaaattcttactggccttggaaataataatcactcaaggttataacattactatagtgttgccggtgccctggacatctctctgctcttgggggttaggggtgagttgacacagagtcaacaacagacaccaggagcatgtgagaaatgctacaacaagctcatctgagcactgctacaagctgctttaataccctctacctgcacccccattggtccaaaggaactatctcttctaaaaagcagttcctgattggctggtaggttttgcactagcaatccttgttttctcaggcaggcctcaattaggtcccctgagggagatccttttacagctgcatgacccttggcttttacatagaggcagccttgctgttcctgttatatatccacccttttgttttcagattttgacagcctggtgggagccagggtgccattgcctcaacattgttgacctcatgaccccacttcagaagattcccagtatactgaactgtgcctgtcttaggttgtgctgtcttccaggatcttacctatcattgactaccagctctaaaagagatatcactttgaaggcatgtcacacaagggagagacgaggaacagcctatgtggtggtctcatggatctctgccatccatactt

SEQ ID NO: 1455 - DNA, 1000 bp, mus musculus
cagaatcctgatctctgaaagtggagcactcaagtttagtgctccaagttctgcctgttacccattcagcatgtgagtcctgccttggaaacagatcctgggcttcctgtacagactgctggcctagggagccccggtcaccacagttctcccaagtcacattcttacagaaactcctctgagatgacacaagctgtgcaggactgtctttagccagacctgagttggtcttcaagcccctgtgtattgtgaacactgcaccaccctcccaggctgcccgtaccatggaacacttaggtctatggggcaggagctgttttcttagcactgactgggataatgtctccttacttaagtcctctggagggaactccttggtctcctgcatggccttcaagtccaggcgctggccttttctcatcttccttttcatcatccagggatcccttccttgttccaacgaggtgatcatatctggcttagaagcacaaagtcccagggatactaggttcctgtagttgtccagcatcaccttccagtacagactcctctgctcagagttgagccattccgacgcctcctgagagaaaactacaaccacatccccaaaggtcaccaagccctgcgacttggctttatgtctagtccctgtaggggcagcttcctgtttgcggtttatctcctggaggaagttggtatctctggaaagcagagctggaggaaaggaaagactagacaccaagtctacatggagactacaccctttgtgcacggtccccgaggtctgctccttggtgatcctgggaggccaggctgttcctggagcgtggcctccttttacaggattttaaagtcaattcaatctgaagataaagataaaagttttctcttccaggttcttgtaaaaatggggtgaagaagagcatcgataattttccaccattcaacagcaattttaagttccatatagcagtaagattaataacaacgtcatggtttt

SEQ ID NO: 1456 - DNA, 1000 bp, mus musculus
tacagatattcccttcccttgtctctgtctctttctccccatgccctgcctaagaaattctgggatgtaaaactacaccagtttggtaaggtagagcaggtcgagacccagagacttggtaatgaggcttatgtgactcccagccccctgccagactcctgacttgaaacacaagccatgcttctcacataagagacctgacctcaggtagactcaagacaaagttctccatgctaatgaggtacctagaggcctggagggcttaactaataagcttcccttcccagacattcctccctgcaaaaggtatataatctcaggcccaccttgttccaccatgacaagaaattgtttacaactatggagtggctctttataccgagatccactgcggggagccatgaagaaggacttcacctacagagccacagcctaacctctcatagaaggcctctctgccctcccagccacaacctgtggcctccaagctaaggacagtcatccctgctgggacaagcagaggctccccattttctcctggccccagactagatgctgtcccccgcatgcaagccttttctgctcttcagttctctgctcttcagtgacttccagcagtgcctggatgtccaagagcctgagcaccccatggttcccagccttgtcacaggctcagggaccctggagccagctccagctttcccacacttaagactgcacttgccatccctgggagtggtgcctcatgcttccctagagccaaacacacccagtggctgtggcggtggctggggaggggggcagttgtgggggataggcaaagtcaaagtcaaactcccccacgctttctgcctcccaaagcagctatgctcagtggaggagcagacacggggcatcaaccctacaagaaatgttttagcaatccagaagagtgactagctgtgtctatggatagagacagacaagaatattaatttgaaattatatttaaactccttga

SEQ ID NO: 1457 - DNA, 1000 bp, mus musculus; identical to SEQ ID NO: 1456

SEQ ID NO: 1458 - DNA, 1000 bp, mus musculus; identical to SEQ ID NO: 1456

SEQ ID NO: 1459 - DNA, 1000 bp, mus musculus
agactcaggaataaaatctggaccctgtctctggacaccaagatgcagaacacctataaaaagcaagttgagccagtcaggtaccatgctacccagtcagacagaccacaccagagaagaccccccagccagtgtcatgcaggcctggctgggtagtccatgccttaggcaatccatgtccagtgaatgggtgggacataacactcctgagatgacaccagaaacacagaggccccaggcatcattatgatgatgagcaagtagtggtggagagacagagagggagagggatgtttgtacagtgaagggaggtagaactgctgagagtgtgaagaacagcctgatgagggtggctggtgatgccacctggggttatggtggggtcctggcccatgctgccagccagggccatgtctaagttcatggacctgcaacagcaggggtctattcccaccaaaggccaggcggatgtccatagtctccaactgcagtactcaggagaaggggccccacatctcacccagggagcagagcaaagctggccctggttgctggggggttgtgagtgagctggtcctggggtgtaagtgtgggagagctggcctggccacttgtctaatgtgtggtgctgtggcaagggagagatgccctcccccacctcaccacctatggaagatgggagagctggcccccaaggtcatgagagcaggagagctgtctccgagcagtactcagcaggccctcctggtcagcacagtagagctgtccttggttgcaaggggtcacatgtaagccagtcccaaagcatgagaacaagagagttggcacagccccttgctgggtgtagtacttgggagagcagcccacacctcaactggacagcagagctggccctgctgggttgggatgaatcggcacgagggcatgagagtagaagagctggctctgcctcttgctggctgcagcattgggtgggctagtcagtgttctgccagagagc

SEQ ID NO: 1460 - DNA, 1000 bp, mus musculus
gctgagggacacaggctatgcctcactactataaagcccaccactgctggagccaggatgcaaactgaggccttggtcctccagttagctaggaatccaagctctgtcacagtggaacatcagttatcaggatgatagaaatgagaggtcaaaatagggcagctcattgacattccaggtaccaagaaacagcagggatcccagcaggtgagagggctgtgatttcctgaagaccaggtgtctgcgagccaggcatcccaatatgtgaaggttgaggaccttccaagacactaaagacactttgtctctgtgtgttcttagacgcgtggctctattttcctctgtactttcagagaaatgctttgtgtggcattagtgtttcccagccaaggtctgtggagttgaacctctggtgaagaggtcctaggaaacagtcattgggaactagctaactctagggtctggccccaaccaaggagtacatactatgccatactttgcaatatgcttcgggtttgggatgcttgagcagatgtgaggtcctgctcatttcctttctttgtggtgtgatgtcagaacatgcagataaatgtaatcctcattgtgcatcaggatgaggagactgcactgtggagtgactgttgtccacaccacacgcaagctcagtgccccaagctcttgcttgtattaggctgtacatgctctgaaccctgcacaagcaaggcactcacttccttagaaaatgaggaatagggaatatttcttgaaaacgtcacactataattgataggtagagctatttgtttacttgtttgttgtttagtatatgttgtatacacatttgtactcactcaccgtagtatgcatgcctatgtgcataccagttgaagccacaggatgacgtctggcagtctgccctatcactctcctccttgtctttgatacaaagttcgtctttatctttaactggacctcgtttgtcatttttgctaagctgatt

SEQ ID NO: 1461 - DNA, 1200 bp, mus musculus
gggagtgctgtgttctgatgatggatagtggtcttggtttcagttagtaagattctttcgtttgccttttgccatctggtaatctctggagttagttgttatagttatctctggttagagcttgttcctcaggtgattatgttagcctctattagcagacctgggagaccagctctctcctgtgtttcagtggtcagagtacactctgcaggcaagctctcctcttgcagggaaggtgcccatatatctggtttttgaacctgcctcctggcagaagttgtgttccattcaccagatgtcctatgatcccgtggagagtcctctggggaccttgggggtgtccacagactccgcgcccaaggtgccccagtgatggtgctggtgccaactggaagggacttgtgaccctggtcaggccaggttttctgcttccctaattaatgcttcctcaggtcccgcaattggattggagcagaagttgtgttccgctcaccagaggtcctaagatcccgtggagagtcctgtgcggaccttgggggtatccgcagactctgtgcccaaggtgagtcattgctggcccaaattagtaacttatggtatgaaggaatgagttaatattcagtcttactctgctctccttttagaaggctaatgaagggcagcccaccagtcacattgagcttgatctaaggaggtttctaacattattttttttttttttatcaaggaggcaaccttccagccttcccatgaacatgtgtactcatgtacacacacacacacacacacacacacacacacacacacacacacacgctccacgtgagccagggagggcaaagcttgtcatcgcctgctgtggctcctcgtcaacatggcttgctcctgttagagttctgggagctcctgtcaactgtgagcattgggacacctgcatgaagagcctccatgactgtctttccctcagttgccaatcaaaggcaaaggagatacttcaaaggggcttagaggatatgtgttttcttttcatggtgaactctccccctcattttcttttttttttttttttccattttttattaggtatttaactcatttacatttccaatgctataccaaaagtcccccatatccacccacccccactcccctgcccacccactccccctttttggccctggtattcccctgtactggggc

SEQ ID NO: 1462 - DNA, 1200 bp, mus musculus
caactggagttacagttatttggatcttgtttaaagcactgtatttctggaattcatggttatggcactgctgtcatgtctagaagttaattttgagaagtagatattctggtcctctgactcttccaatcttccttcttcctctttcttttattttctttcttttttttagtagatattttctttatatacatttcaaatgctatcccaaaattttcctataccctccctccaccctgttcccctacccacccactccagcatcttggcactaatgtaccctgagttttaggagtaagtgttgaactacaggtgttgataattggacagggattctcccaccacctcttcttcaccttcatcagactcctaaaacatacaggtgtgcttcccttcccccacccatattcccagctctctgagtactctgggctatgtcaagttgccctgaccagcctgctaccccagggagacctatattccctcattgcctatccccccaactccatcagatttgagactcctgagccatacaggttatcttgccttcccctacccactttcctactctgtgccaagcccaacttctctgagcaggctgctatcttgggcagacttacattctcccatcaactctccttcacctgaaccacacaggtaagactactacaccaatcaccatagattgagaaagcaagatatttcaacataaaataaaacagttatatacctacaaagccaacaatttcagagaatactagcaggaaaattcccaacacaagaaggataactacatcaaagaaaacaaaggaaataagtagttccataacagcagcaaaaatcaaagaaagtacccccccccacacacacacacaatctaatactgtcaaaatcaaaataacaggaactaataatcactggtctcaaaatcaatggattcaattccccaattaaaaacaaacaaacaacaacaaaaacaaacaaaaagaatcacaggctacgggggaatgccagggccaagaagtgggagtgggtgggtaggaaagtggggggctgggggagggtctgtgggacttttgggataacatttgaaatgtaaatgaagaaaatacctaattaaaaaaataaattaaaaaaagatccatcattctactgcatacaagaaacacccttcaacaataaagatagacattatctcaa

SEQ ID NO: 1463 - DNA, 1600 bp, mus musculus
aaatttcagattgaaaaaaaatattgtttataatgaagtattgttgtctacgttttcattttaaaatgtctccttacctctgacagtatagcttaactttaattatttaaattacccaattctacttgtgaatgtgctattggatataacagggatgctcaatctataatttatgtttgaatataatttagcagtgttatactaccaaatgatttaatctcaataaatcttaaatggccttctaaaagtagaaaccctaataaagaactcaaaacatagaacacattctcattcacactgaaaagaatctagaattaatgaaatgggaaaattagttaccaagaggattgtgagttatttaaaggtttgtaaaatagtttaattacctcatttccaacattaatttttaactctgaaaaatgaattgtgttgtgcgaaatattaaaaacgaaccgacatgttctcacactggtgccagtaactctctgtcattgtggcctggccagctatgcactgatgggcaatggccgacctgtttttatctcacggagacttaatcccaatacgcgggaggcagaggcaggcggatttctgagtttgaggccagcctggtctacaacgtgagttccaggacagccagggctatacagagaaaccctgtctcaaacaaacaaagaaacaaacaaaaacaaacaaacaaacaaacaaacaaaaacatcaaaaaagaggtctaaaatctttccacccagctcgctaggctcccactggcagatcgctaccatgccaacccagtgctccaaacccccacgacctttgtggtgcacctcaggcaaacctatgctttgccaccatatcttactctcttgaacaagccggtgcatgaagaaaacaccacacagatttagttcagaaatgacgataactcattctctgctcagcagctaaaatcctaatcttgtaagccttattatatctaaatcctctggtggcaaatcctgacggatctgccattgaaacccggagacactgttagccacatcttgtcctctgctatccctgtccaatagacctaactttctcctgcttcccctcctcctccatccaacctggaagccctgtctactctcccagtgattggctcctttatacattaggggattgtttcacaagaactcatctgggtacatgactcactccttgtctgcagctcctccctggagagcagaagtagcatcaaaatacaaacagcaccaggcccatccacaacagaattgtactattggaaattcagtcatttttctaggacatatttttgtttccaaattcaactttgtcacgttgtggacattctttatattagactaaaatataaagaatgtgctctattagactaaaattaaaatttaaaagtaagatttattcaattcttttacatgtcatatataccaatgttttgaaagactagtctaacacatgaaaataatatttaacccaattgcttaataatatactgcatcctttgagccatattttaatgaatcgattagtcaaagggagtttataagatgtagatgtggatatgaaaccttgtcaaactcta

SEQ ID NO: 1464 - DNA, 1400 bp, mus musculus
tgagtagagcattgttctgtttttttttttttttttttttttgtgtgtatgtgtgctctccattgtttttgttggtatttaagaccagccttagcctggtgtggtggtgcacacctttaatcccagcacttgggaggcagaggtgggcaaatttctgagttccaggccagcctggtctttagagtgagttccaggacagccagggctacacagagaaaccctgtctcaaaaaaacaacaacaaacaaaaaacaaaaaaaaacaaaaaaacaaaaaaaaaacaaaaaaaccaaacaaacaaacaaacaaaaaaagaccagtcttaatccatgttgatctgataggttgcataggacgattttaatattcttgtatctgtggaggcctgttttgttaacaattatatggttagtttagaaaaatgtacaatgaactgctgaaaagagagtatttgctttttgctttagtgtgaaatgttctataaatatctgatagatacttttggttcataacttctgttagtttcactgcatctctatttagtttcaatttcaatgatctgtccattgctgagagtggggtgttgtttgagctattattgtgtggggttgagtgtgtggtgtgtggtttgagctttagtatagattcttttatgaatgtgggtgcccattcatttggagcatagatgttaagaattgagatttttgagggaagcaaaaaacctggcctgaccagagtcacaagtcccttccggtcggcaccagcaccagagaaccttgggcgggatcttaggacctctggtgagtggaacacaacttctgccaagaggcaggttcgaacgccagatatccggacaccttccttgtaagaggagagcttgcctgcagagagtactctgaccactgaaactcaggagagatatagtctcccaggtctgctgatagaggttaacagaatcacctgaggaacaaggtctaaccaaagacaactataacaactaactccagagattacctgatggcgaaaggcaaacttaagaatcttactaacagaaaccaagaccactcaccatcatcagaatgcagaactcccaccccacccagtcctgggcaccccaacacacccaaaaagatagaccaggatttaaaagcatatctcatggtgatggtagaggacatcaagaaggactttaataactcacttaaagaaatagaggagaacactgctaaatgggtagaagaccttaaagaggaagcacaaaagtcccttaaagaattgcaggacaacacgaacaaacaggtgatggcatttcataaaaccatccaagacctaaaaagggaagtagacacaataaagaaaacccaaagtgaggcaacgctggagatagaaaccctaggaaag

SEQ ID NO: 1465 - DNA, 1000 bp, mus musculus
taagtcccccaaacccttcccccactccccacccactcctacttcttggccctggtgttcccctgtactgagacatataaagtttgcaagaccaatggtcctctctttccactgatggtcaactaggtcatcttctgatacatatgatgctagagacacgagctctcggggttactggttagttcatattgttgttccacctatagggttgcagactcctgtagctccttgggtactctctctagctcctccattgggggccctgtgatccatccaatagctgactatgagtctcaacttacgtgtttggtaggccctggtatagcctcacaagagacagctatatcagggtcctttcagcaacatcttggagtgtgtgcaatggtgtcagcgtttgggggctgattatgggatggatccccaggtagggcaatctctagatggtccatcgtttcgtctcagctccaatctttgtctctgaaactccttccatgggtgttttgttcccaattctaagaaggagcaaagtgtccacactttaatcttcgttcttcttgagtttcatgtgtttcataaattgtatcttgtatcttgggtattctaagtttctgggctaatatccacttatcagtgagtacatattgtgtgagttcttttgtgattgggttacctcactcaggatgatgccctccaggtacaaccatttgcctagaaatttcataaattcattcttttaaatagctgagtactccattgtgtaaatgtaccacattttctgcatctattcctctgttgagggtcctctggctattacaaataaggctgctatgaacatagttgagcatgtgtccttcttaccagttggaacatcttctggatatatgcccaggaggggtattgcggtatcctccggtagtactatgtcccattttccgaggaactgccagactgatttccagagtggttgtacaagtttgcaattccaccacaatggaggagt

SEQ ID NO: 1466 - DNA, 1600 bp, mus musculus
caggactagaatttgtgtatctaaaggaaacctttgcatggtgtttgtctggtttttatcctcagaaacataatagatctatcagacaaaaggcaacagtatctagaaactccagagagagttttgattatgagatgaataaacgaaatgccttctccttctgccctttactaacagtcagtttaaaaaaccgctgagttttcagaaaacaatgtctaacacaggcccaacactctatttaactcacttaacactctttagagagggggaaatttgagctgaagggcaagttttgttttagattgtgatgagtaaaaggaagtggaacatttacattccacaaattgacagtggatttttatgctctttcctcaacatcttgtaagagtgcagtgaccttaatggtcaccaatggcaagcagattacattagggtttcctgtgttttctatttgttggcttgtttgttttctgtgtattgcactactatgatcattcatgaatactaacatatttaaatgaaggtgataggatgtcagaagagagactggcctttaggaataccgagactgagggaatttcttcaggagaaggtttcttcattgttctcccaccctggggcagcctgaaggttaatataaacatttgctcacagacaggcacatggcgtaagcatcacctgggcatcaggctgtggagataacttaatgggtaaagtgcttactttctgtcaagcacaaggacctacgttcagattccagaacaaaggaagtagctgagtaccttctcacagatctacagtgcttcccagaggtaccacatagtttctggaatctcatgagctagccagtgtagctcctgcatcaggaagctatgcaaaaagtaaaggggagaaatgatggggaaggtcattctggtatcaacctctgtccccacatgtgctatcacgcagcgggcacctacaagcagacttgcttatgtgtgcaggcacaagctaggacaaatttaaattaacttcaatttagtcatctgctgtctttgtatcacgaaaccatctggttttagaagaggaacggatgctcattttctgaactaaagttaacatttacattctcatttatatattttgtttgcattttagcattccttccttccgccatctatcatctctaaagacaacttatgcaaaagcaagctagtcctcactaaatgattgtccattatctgagaaaattttaggaatttgtcatggttagctttaattgtcaacttgattaaacctagaatctaccacccagtgaggtattgtctatatagagttgatctgtttgcattactatggggctttgtctcaattaagttaattagtttgagaacccagcccactgtatgtggcactgtttcctaggcagggggtcctgattatatgagactagagaaaccaagcttagaaccaacgagcaagtatgcttcacttctctctgttgttgactgaggatgcgctgtgtccaagtgtcttaagttccagaggcagtgacttcccaccttgataggttattaactaggattgtaaaataattctatactttttaaattataat

SEQ ID NO: 1467 - DNA, 1000 bp, mus musculus
tgggctccagcacggaggaaggcaaggtgccctgccagtggggaaacatttaaccaatccggagactgccggctgccctgtgacaaggacagacagcacaagcataccttctccatctgtcatgagacatctttacgttttcacagtgaaaaacattttctgtaattacacattcagaaagagtttagccagtaattattagaatgatgtggaaagtagtctttatttatgaaagtgtgactcaaaaagccagattttccgcatgacttactttcaaggaaaagttatgtttggaaagtaaatatatgcctatattttaggtggctcaagttggcacttcatgcttgtgttgcttacttgttttgctggatcattttgggacacaatttcacctcatcaaccagtttattattgaatcatatacaagatataagatcaagaaaattgcacaataccattatggaagatgtcagggccccgacaaagatggaagagatgtttaagtcatttgtgttaaatgtgattgtaatactaagaatggcagtgtttcacaaaaagaaaagctaagaatgagaacaaatgaagactctaagcacaagtaagcaattcttatgaagataattctagaatatgaaatctcttcacttaaatattgaagaagaaaatatatggatgctatgttttattccaagtttaaaaattagatgaataacatttctactggtggatataagcaaatgaactaggattaaataataatattttaacatgataaaaagaaataattaaaccaaattgaagttttgaagttttttttttttttttttttttggtttttcgagacagggtttctctgtatagccttggctgtcctggaactcactttgtagaccaggctggcctcgaactcagaaatctgcctgcttctgcctcccaagtgctgggattaaaggcgtgcgccaccacgcccggctcaaattgaagttcttaatgcatggag

SEQ ID NO: 1468 - DNA, 1000 bp, mus musculus
cttgtctaaacatagactttttaattttaacttaaaaatgttaatttctaaaacctacttcaactggtatctaagttcttttacccagaatggcagatcttgtctttctattaaatccgcatgccttcctctgccttttcctgatagatcagaatgggtgatcatatcatcaggacagaacaagggctcctgctccgtagcctgcagaagaaggattcaggcaattacctgtgtcacgctgtggaacacggattcatgcaaactcttcttaaggtaaccctggaagtcattgacacagaacatttggaagaacttcttcataaagatgacgatggagatggctctaagataaaagaaatgtcgagcagcatgacgcccagccagaaagtctggtaccgagacttcatgcagctcattaaccaccccaacctgaacacgatggatgagttctgtgaacaagtgtggaaaagggaccgaaagcaacgccgacaaaggccggggcactctcaagggagcagcaacaagtggaagcacatgcaagagagcaagaaaggtagaaacaggaggacccacgagtttgagcgggcacccagaagtgtctgagctgcgccacctcccaaaacctcaaacaagtacaaacttgcttagataataactggaaaaaatgcaatacacatgaacatttcatggcattatgtggatgtttacaatgatgggaagttcaaccgggttccaccaatttaagtccgtgaggaactttcccagcaggctttcttcagtataccaacgcttgacagagatcacaggtgagcatagatgttcacgtccgctgacttagtgtttcctctgaaagttcattttgcttccttctttgcctgagaaataaaaatgtcatttgccatcgaaaggagaaaaactgcatcagcaaagccattttattgaagcaagagttgaaaataaactgcatggatttagtaagcagatgaatattccaaaacgt

SEQ ID NO: 1469 - DNA, 1000 bp, mus musculus
gaccaatttcccttatgaatatcgatgcacatatactcaataaagatcttggaagccaagtccatgaacacatcaaacctatcaatcagagtgatcaagtaggcttcatccaggaatgcattaaggggagaacaggatgatcatggtagatggaggtagagtgggaaactgggagggaaagtgtagggggaggaaataaggggggcagcattaggtatttggaagggttgggagagaggtacttatggacagaaattcaaacaaaaatatgtagggtttgggggctgaggaacagaggatagcctcctgagggtctcagacatcagggaaacatgaggcttccaagacgcaaaggagatgactttagatgaaatgctcagataaggggaggataaaacctgtagggaccacctccagtgtataggtgtgcttctgcccatccacaccccacccctaccccagccattgtcctctgtcaagggttggttacacctaaccctctcaaagtttttaacccagaaatgttcctgagcaaaggaagaacgtgacaagaaatggggcagagactgaaggaagggccatccagggactgccctacctggggatccatcctgtctgcagtagccaaaccagacactgttcccgtggtcaagaggcacttgtggacaggaatctcaagtgacagttctttgggaggtgtggccagcaactgacagttggaaccaaccattagcctgagctcatggaactccttgggggagcttggggaaaagctggaagtacagagggggactgcaactctattggaagaacaaaatctgctggcaggaccacccacccagtactctgagagactagaccacaaaaccaggagtgtataaggagggatctatagcttcagatacattgtcacagaggatggccttgctgaaagcaatgggagggaaggcccttggtcgtggagagttttgatgtcctagtgtagatagttgttaaagca

SEQ ID NO: 1470 - DNA, 1600 bp, mus musculus
tatatctgctgtgtggttgtcactgatgctgtgttgcaagcaaaactgaggcatatggctctggccttccttgtttattttatattcctttgtgaatatttttatttcctcggaagctttagagtaatgacggtatattactcagtatctggtccacaggatcatgaatggatgtgtgttacagagtactatatgttagaagtaagagaattcatgacaccatggatgcagtatggcagtgattacatcatcaagtgtgtgtccatggggtaagtgacattatccacacacaaaagatgatcattgccttgtatacctcctaggtggctatggctttactatgtagccctggctgcctggaacttacagagatccatcgctggctgtgattctaggtctgcagcaggagacagaacacctgaataaggaagatggtctcaagagtcactacttgcaaatcaatttttattcataagaaatagaatttttaaaaaataggttttaaaagttcaattaatatagagataaaggcaaaaacaaacaatgaaataaaagaacaagaacatataacttctaaataacgtaacaataactcaaagatcaaaaataaaaacttaaaccaaaactctaaaggaaaattattgttcagctgctttcgctttctgcacttttagcagcacagccctccagcctgctgctcctcttggacactaggtatcagtgcagccgcctcagttctctgccaagagacgttgtctgaagagaaaagggaacaacgccctgaatcagccatggcttccttgtaaaggcctattcaccctaagaaaatgaattatatggaagaagattcatccgaggaagattgtgggtgctggagatggtgctcagcaggggcctcctggcctggcaactcattctgcaggatgctgtcttcttcagctgtggccaatcccagctctcttgcagcttctgagacctgggagaggaaggcagttactaagacacaggagtggaggagacaggcatggcagctgtgaggctactgcctcctaccacctcaactgtacttgacagtcaacattaatattttaactgaagttattgatgttaaatctaaagacagggcaaaatattcaacaacagtcacaaaaacatggactgacaaagatcaactcaggcttctatcagttccaaccaaaaacatggcaaaggaagagacctcagtggattacaggaagaaaggagaagggcacaggataccagatcaatgataatgagaagcactcatttgacatttgtacttggctctaatccctccaaggtgcagacacatgggatgtcataagacctctgcctgtctcctgtctaaggacccagatctcactcaaacctctgcatagcattccacctatcatgaggacatgcaagaatgtgacatgttattcacctgtcaccctgtagtgggctgcagattaaagcagagttgaaaggtgcatttgccagtggtaacagtgtctcaaaagaagctaattcagtgtctcacaagaggctaacttccaagaatacttgtgtgaagacagagcagtgaacacctacattc

SEQ ID NO: 1471 - DNA, 1000 bp, mus musculus
acaaacaatgaaatacaagaacaagaacatgtaacttctaaataacataacaataactcaaagaacaaaaataaaaacttaaacgaaaaatctaaaggaaaattattgttcagctgctttcgctttctgcacatttagcagcacagccctccagcctgctgctcctcttggacactaggtatcagtgcagccgcctcagttctctgccaagagacgttgtctgaagagaaaagggaacaacgcactggatcagccatggcttcctagtaaaggcctattcaccctaagaaaatgaattatatggaagaagattcatccgaggaagattgtgggtgctggagatggtgctcagcaggggcctcctggcctggcaactcattctgcaggatgctgtcttcttcagctgtggccaatcccagctctcttgcagtttctgagacctgggagaggaaggcagttactaagacacaggagtggaggagacaggcatggcagctgtgaggctactgcctcctaccacctcaactgtacttgacagtcaacattaatattttaactgaagttattgatgttaaatctaaagacagggcaaaatattcaacaacagtcacaaaaacatggactgacaaagatcaactcagtcttctatcagttccaaccaaaaacatggcaaaggaagagacctcagtggattacaggaagaaaggagaagggcacaggacacccagatcaatgataatgagaagcactcatttgacatttgtacttggctctaatccctccaaggtgcagacacatgggatgtcataagacctctgcctgtctcatgtctaaggacccagatctcactcaaacctctgcatagcattccacctatcatgaggacatgaaagaatgtgacatgttattcacctgtcaccctgtagtgggctgcagattaaagcagagttgaaaggtgcatttgccagtggtaacagtgtctcaaaagaaactaattcag

SEQ ID NO: 1472 - DNA, 1000 bp, mus musculus
attatcatacctcatttgcatgtctcacatctgattggttatactctcagtaccttacagaacctcattatcatacctcatttgcatgtctcatatctgattggttatactctcagtaccttacagaacctcattatcatgcctgggccaggcagtgtctttgcaaaaaactttactgcatatgtacacattggttgtttgtccaatcttatgcgtggtggccagcagtagtcagtgccactcagcaatggcacatgtggcttcccacactccacctggcttagaacctgtgcaggcccctagtgtgctgccatgtttctgtgagttcttctatgcttcagtcctgctgtgtctggaagacactgtttccttggtgtgagccttcctacaggctcctacacacttcctactgcctcttttccagagcttcctaagccccgaggcaagggatctgatgaagacatctcatttagggcccaatgttccaagttctttcactctttgcacatcatccagctgtgggttctgcactagaaccttctgcaagaggaagattctctgatgatggctgagcaagtcattgaaccaaggatgcagcaggattttgttgagtaattttattttactaagttcctttagcagaacattagcatttggttttaccctagctttaactagtctcaggattttggctacccaagcattgtcaggcatggatcctatctcgtagagtgagccttaaattgaatcagatggtggctggttatgcccattccttttgtactatggatccactagcatatcacgcaggctggtcatcactgtagaatgaatggtttgtagctgggttgatgtttgcctttctgctctggtagcaagcagagtaccttacagatcgtgatcaccagtcagcaggggtgaaagctctagttagacaccagcatgacttctccagtatgtaggtgttgtcttcagcgatagggctttaccatctagatta

SEQ ID NO: 1473 - DNA, 1800 bp, mus musculus
ttgtttgtttctgattattaggagttagggaggcatcataatagcagtgaggcttttgtttgtggaagcattggatattaagaaattaaggaggtctttggacaaatacggggaagcaagctagataatggccaaaaaccataagtagacaaacctgaggtaaaagctccgaaggcaatatgaatatagacagcaaggctaagttgagggctgatagaaatgagaacttggtcagagactgggttaggggctactcttgttattcctggcaacacctgtgggtgacatctgacaatggcctgtgactttgttggaggctgtgtttagtggtgacaggctgatttagaagatagagtacacttctaggtctgcagcataaagtcaggctggagaacaattatcattgctgcttttagccaaatttatagcgagaatatgaaacaaggaggagtgaggaaggatttgcaaaatacactgtgtggtcagaaagagtttatgtaaatacatggccaagaacctgatgtaattactgcccataaaagcacacttttcactgacatgtagcttggaggtacttcagtaattatcagtgtgacatcactcatagtctccaagatcaaagaatgtacatttttttcttttcttgtttaaagattttttttattttatgcatgtgagtacactgccactgtactcaccacagacacaccagaagagggcattgaatcccattacagatggttgtggttgctgggatttgaattcaggtcctctggaagaataatcggtgctcttacccactgagccagctcactgtagagcgctaaggtcaaaagcctagagaatgcttagtcagtagaatgtccagcagaaaccagtttcccattcagggaacgtttttcaagttctcgtaaaggaggcactcattggtcacacctggctcctggttccatgttcatagaatggggactactttagcctggccttgacctgtatcccacatatctgcagacgccttggggaaccttagatattttcaaccccagtgacatcattaataaacttttctttctggtactcagtctgctcagaactatccctagtgtaacatattcatagcccactgtgtaactggaagtgccttacggtataagtttaccttatgttggcagtgattgagttgttttaaaatagagcttaggatatggagtttcaaaaatgagaatattttcaaaggtgagtacgagccacactgtgatagcatgagggtgtgtgcatctatcacctcatagcagctggataccagtctagaacacaaaccactcaaatcctttcaataggaaactcattataggatggatatgtatcaaagagttcgggatttctaacctttaattccctcagccacagaggaatagagtattactcttctaacatgcagtatggtagagggggatagcatcaggttatgtatgagataggatgtgaagaacattatcatataatgacacaaattgtaaccatgagtcctgcttatgggcccatagttttttctagggccattgcattgtgcacgtatgactagtggttcctaatgtgctgtatgtctcgctacctcagtgtctgatttactttaaggtattagaaagcatctagaatatggatcagtagagtactggcaaatgttgaatacatactgaggcttaccttagaatttattctagaagtaatttcacacaggagtaagcatttctggttttatctgtagggcattcacagatgtcttatggatgatatttg

SEQ ID NO: 1474 - DNA, 1000 bp, mus musculus
tttgatccagaacaggtgagttgaaccaactggccagagttcagaaagaactagaaagggtgagtttattcagaagtttcatataatttcatataattggaaacatatatactaaagcaatacttaaaaatggcttactcaggagagataaaaggctaaatattttgaagactatagtgagagagaataacaatgtattattgattcttttttttcctattaatcattctattcgcttacatctaaaatgatatctcacttactggttacccctccaccaactccccattccacatcttccctccttcctcccctttgccttttgagggttttcccccacccacactctcccaccacatggctctagcatacccctgcactggggcatcaaacctccccggaaacaagggtctcccctcccattgctgtcagctaaggctatcctctgctacataagtatctggagctatggatcctttcaggtatactccttggttgatgatctagacttgggaaaaactgggtggtcagaccaacctatgttgttcttgcaattggttagtgatccacctcaggccctccagtccttccaccagctcccccaccaggtccactgagttcagcctgatggttggcttcaaacatccacatctgcattggtcagttactggctggacctcccaaggaaccaccacactaggttcctgtcggcaagtacctcttgaccatggcaacagtgttgggtttggtgtctgcagacatgatgaatccccaggtagggcagtccttggttggctcctccttcagtctctgttccatttttatccctattcttcctttctataggcacatttctgggctagaaactttgagataggtgggtggccccagcccttgaccaggggctgtgcctatttacaggaggtggtctcaacaggttctgtcttcctcatctctgagcattacagctaaagtaatccctgttgggtcctgggagcct

SEQ ID NO: 1475 - DNA, 1000 bp, mus musculus
tctacattgttactctcataatacctttagttttatttagtgatggtaggataacattttggtacgtgataaccccatatcttcctacaacacatacttagtatgaatcactaaaagagagaaaattattagaatccaatgtgagtttctcaacaatggtaattaaatctctccaacacatacttcagtagaatgaccatctgatgaagatcaattcatttgtatgaggcacaatttccatcaattttcagagtattcacaaagaggtttttctctcaactaagcctccgtttttttcctgaagtctctttgtctcagcaggaaggctactgaatcagcaattctatgttctcatgaatcaaattctggaacaaataataagactaataatccctctggcccccgaaatatcccccatttccagttgtctctccaagtactctctccatctaccaccatcccaactaattactccttcttgttcctatctcaccctgcccacagtcctctgacaatatctattctatttccccttccaagggaggtcgttgcaccctccatgctacttagcctctctgggtctggagactagcacggttatatgtagctcaattatgttcacaatagctttattcacaatatccagaaactggaaccaaactagacgtcccccagccaaagagtggataaagaaaatgtaatacatagttgagcatagttaatcatagtctttgtgatatgatgaaggatcgcttgagtatgccaaagagtggtatagctgagttgtgaggtagaacaattcctgatgttctgaaaaaaaagtcacatcgatttccaaaatggctgtaaaagttcacactctcactatcaatggaggtgtgttacccttgctcaacaacttcctcaagcataagccatctcttgtgtttttaccttagccattttaacaaggcccaggatttcttaaagcatttgattcatcataaaatgacaattttat

SEQ ID NO: 1476 - DNA, 1200 bp, mus musculus
ttaaaaaatcttagtctttaggaaggttggtaaatgctatcatgggattaataattttcctttaacttttccatctaccactagcatccagaccactgacccagagcagactttattacatagtcaagaaattttaggctgttttccttttgcttctggagttatgaaaatatttaagtgtctgggtcaggttcagatacattctgtcaagtttccgttcttagcactacacgtgaatcaggatgcgatctttgatgaaaaggttagtgttcttgggaatggtgtcaaagatttaggatgatttaacagcattgtgggatttttaggtaggatcagtgtgagtggtcttccaccacaactcctatatggaatataccatttcttgcttcttattagcttccgtttaactggatgagtactgagttgaaatgttggctccaggaagtcttgaagtatgtgccacatgtgtgagcagagcctgaaaatgcctgcttggcaacaccacagaataactgctttctttataactagaggtgttggcagtcactgctcttgaaatggcattctgaatgagctgctgcgccaggaaggctgagttttagggaactctcaaaaatactcatgtaaaatttgatagctgtagaaatgtgtttgagttgggaacagcctaccatcaattgagaactacacatgaaaatactccaaggatgatgtacacatttctctgtcattttggagcagagaaaaagtctctttaaaataagtgggcttttataacaaagggggttactgcttgtcacagtggatctccagagagtaatcaaggcatacttggaaacactcatacatgctcatgaaggtctatatgcatgcacacatgcacactcatctcatatatacacaagacatttatttaagataataaattattctatgggatgatactttactaaaaccaaaatatatttataatcactgaaaataattctttcaaacacagcatatcttcctctatgccattctttggaaatgagttctttgtaaggtagaaaaagtctcataggttatctagacttgcctaaaatatgcactgattaccattgtgtaaagtaaataaattaatattaacctttctgagatatcttattattacaatgatgcttgcttttcccaggcacatgaataattttatttaaccat

SEQ ID NO: 1477 - DNA, 1000 bp, mus musculus
gcgacctctccatttcccttttgaaataacaggccaagtgactaccttataaaagcatcctttattctcgtgaagcaagtgttatttgtaggcttactgcctctgtgggctaacctaggcatcatcctagaagcttctactctccatatggggaagcatcaagctgtgagaagctgcaggacccccactccaggggtggggaagtgcagtctggagtcctgcagaactgcaaggacacagctcttgggtccccaggcctgcatggaggccagggaccgcaggttctagctcttgggcactgcagatgctgctggatgctgtaaaagagctgagaacagaatggggcccagctctagcctagggccaaagggaaaagggtgggaggagagagctccagctgtttgcaggggcttattcagcaggcagcttgacttggtggaaaaagtggcctggagtacagagaggcctcctgtaggagattagatccggctctttagaagggaagacctgctccattgctcgccaaggcagatcccaatgagaagaggcggatcatggttttaaagcagttgtgatgagtgaaatggtaccctactttctcaggcgagcctagagttaattaccttttgcatggaggagtgtctgagaaggagagcttaattgtctaagcccttcaggcctttaggttcctcattaaaatggagatcatgtcctctacctgtggaggggcttggtgtgttgccctccatgcctaatggccacagacctatggaaagctgcagtctcaagtcaggagcctgatgtctaggaacatgtggcaaactaagttgttatgctatcatgtcttcatatattgttaaataaaaccagttaacatgtttatcattttgtacaccagttttctgagaaaagtctgaggcttctaattttttatcagcacacacacacatatatgtgtgtgtgtgtgtgtgtgtgtgtgtgtgtgtatgtgtgtgtgtgt

SEQ ID NO: 1478 - DNA, 1600 bp, mus musculus
accacaaaatttctgctttttacgctttaccaagcaaagtggctgtatcagaaaaataattttattacatgtatcaagataataagcaatgtgtagcatgttgctcatttaagaaaattcttttagatttacattgtggttcatgtttattgaatggtttcattagacaactgatttgtgcctcttctttcaacgatgagagagagaaatacaagtaaagaaaagaaaagaaaagaaaagaaaagaaaagaaaagaaaagaaaagggggaaataattgaatcagtaaagtcttggagaaacatgatgcatgcatgcattcatgcacacatacatcataaatatgtatgcatatgtgtgtatatattttatatatatacacatgtgtgtctctctgtgtgtgtagatatattgaaaccctatatgattgttgggagccgcccccacattcgccgtcacaagatggcgctgacatcctgtgttctaagtggtaaacaaataatctgcgcatgtgccaagggtatttctctaccccatgtactctgcctttcccatgacgtcaactcggccatgggctgcagccaatcagggagtgatgcgtcctaggcgaaggataattctccttaaaggggacggggtttccgccattcgctctcttgcttgcgctcttgcgcttttgctctctggctctggctcttgctcgcttgctcctaaagatgtaaacaatagagctctcgctctggcgctctggcgctctggcgctctggcgctctggctcctaaagatgtaagcaaggggtttgaggcttgcactcttgctcctgaagatgtaagcaataaagttttgccgcagaagattctggtttgttgtgttcttcctggccggtcgtgagaacgcgtttaagagttggtgccgaaacccgggacgagaaaatccgggacgagaaaatccgggacgagaaaatccgggaagaaaaaacccgagacgagaaaatacaagaaaactcgggacgggagttaaccatcaccggcgcaaggaagatccctcattccggaaccaaaactgcaggttatggtaatgaaggttcccataaaacagactgttgagaaggattcaactgcatgaattcagaactcttcagctggggaacaggagtaccagtgagtacagctttacaaggtaagtctggtcttaaactttctaaggaaagtcaagacagtctatcagaagtaaagtgggaaatagctttacaaggtatgtttggccttaaactttttctagtgttaggagcccttttgttctttttcacatgttatcaagtgattaagatagggctaaaaattctggatgaaattcaggacaatctatcagaagtaaagcggggagagagagtaggagcaaagagaaaatatggtacacaaaataagcatacaggcctttccacgggtcttaaacccgaggaaaagttaaggtcaggtaagaatacctggggagagattggaaggaaggagaagaaaaaagaaaagaaaaaagatcaatcagcggaggcttctaggagaaggagcctctactcatcactagatgagctcaaggagccagttt

SEQ ID NO: 1479 - DNA, 1200 bp, mus musculus
gtccacactctgacagttcctcatcccattcccccacccccaccccaccccctgtctccaaaaggatgtccccaacctcatccctaccccactccactgccaggcctctgcactccctggggcttcaagtctttaaagggtcatgtatatcttctctcattgaggccagaccaggcagtcctttgctgtatatgtgtcaggggcctcatatcagcttgtgtatgctggtgtatggtgacttagtgtctgagagatctcaagggtccaagttagttgagactgctggtcttcttattgggtcgtccttctcttcaacttcttccagtcttttcttaattcaaccacaggagtccctggctcctttccattgcttggatataagtatgtacacctgacactttcagctgcttattggacctctcagagggcagccatgctaggctcctgtctgtaagcataatatagcatcagtaatagtgtcaggccttggagcatccccttaagctggattccaatttgggtcagtcactggacctcctttccctcagtcttgtcatttctgtccctgtagttcttctagacaggaaaaattgtgcgtcagagtttttgactgtgggatggtgacctcattcctcaacttgatgccctgtctttctaatggacgtggactctacaagttccctctccccacaagtttcctctccccactggtgaacaccctttcaattttattgcagcctactagcaagagcccgacctcctagcccctccactccctggggaccctgttcctttacccttttccttctgctcctctcagtctttatccctagcccagatccatgcttttctgtctctccctggaccacagaagcactctcactactcaaccaacacatttgccaaagatacatagtaggcaacagcaataaaagaatggaatgcctacccaagagaaaggagaccagatatctacaccaagaaacactgcactcatcataactccagatgcctatgtctgagcacaagaaaccaaaccatgaacaatgtagataacatgtctcctcccaaagccagaaactgtattgtagtaaaccttgagaaatgtactttgcctgaagtgcaaaatttcaaaagaagaattataaatatgatcaaggattacaaagatggtatgaataaataccttaataaacacaa

SEQ ID NO: 1480 - DNA, 1200 bp, mus musculus
tggatctgcagagatctgttccaaaggggtgtgctattactatagtgattgttatatatgtttaatagtaacaggaaaagcataataaaggtgaacctgttgcagattatataataatgtgaagcaggccatctcaggaagactgcttgctagttattagcttgtcccattatgcctcctgacagactttctgcttgagatgggctctataaataccctctccctacttttgaacatttcatctaaggttcctccctttgagtcctgagagtctttcacctcccaaggctctagtgcattctggaaggttgccccaacctcttaccttccgaggttgcctgcttcctttctttttgctggacttcagggcttcagtccttttccctcacctaatatcagatcagggtccccctttcccccctctcccatccactttccctcccaggtccctccctcctcccttgtgaatgctttcttctccctcccaagtgggactgaggtgtcctcacttgagcaccttcatcttgttgaccattttgagttctgtggactgtatcttgggtattctatactctttttttttttttttttttttttgctaatatccacttatcaatgagtacataccatatccttttgggtctgagttaccttactcaatatgatattttctagttccatccatttgcctgcaaaactcaggatgtcctcattcttaatagctgagtagtatttcattgtgcaaatgaaccacattttctgtatccattcttctgtcctgggacatctgggatatttccagctgaggaaaagaaggtctagtgacagacccaaagtggaatccagcgcaaggggaggccccaaggcctgacactattactgaggctgtggagtgctcaaaaaagcgacctataatgactgtcctccaaaagacccagcaagcagctgaaagagtcagatgcagatatttgcacccaaccaatggacagaagctgctgacccctttggttgaattagagaaaacctgaaagaagctgaggaggaggtgatcctgtaggaagaccagcaatctcaattaacctggaccctcaagatctctcagatactggaccaccaaccaggcagcataaagcagctgacatgaggtcctcaacacatgtacagcgaggacttccgggtcagggtccaatcagagaagat

SEQ ID NO: 1481 - DNA, 1000 bp, mus musculus
ggtttggggtttttataattttttttattcacatgacatcccaatcacagccccccttttctcctctcctcccagtcaggtccttacatatgacttcacccacgactctctccccttctcctcggagaagggaaattctgccttaggtaccaccccaccctgggacatctattcccaataagactaaggacctcctctcctactgaggcccaaccaggcagtccatataagggcttcaatggcaggcaacagagtcagagacagccttgcttcaattgttaaggtcccacatgaagaacaagctgtacatctgctagaaattgggggtaggaggggggcagtgtagggttatggggtccgcatccactctgcaacagggcacagtggccaggggaggcaggatgtgagaagtggaccgcacttacctcattccgttgccaggcaagtgttgtgccatagggaagccctgggtaacactgctccaggggtaggaaagtttagtctgaggtatggaacaacaggagatgtctggggggtagggaggaggtggggtggagatcctgagcctgcgatgaggccatagctatatggttcacaggttcttggacatccaggtgcagctgagaatggtgtgggagcccctgctggatggatctagcccagggccagggcatggggagcgaggagggaaagggacctccagctggtacccagagaagagttcttgccttgagggttgtgggcttgggcttgtctttgggttggtagcagccatggctgggagcacagagaaaccttctacaggagattagacagcagctctataggtgaaggccttctcaatgacttcccacggcagatcctgatgaaaagagacagtccatgttttgttgttttttttttttgttttgttttgttttgtttttgacatttattgtcatggtagaaagtggataagtaaatcactaccccacctctcagggtgggaaagaggttaaat

SEQ ID NO: 1482 - DNA, 1000 bp, mus musculus
atggcaatctctgccacagcttccagtccttcaatacttcatatacagacacaggattatggggactctatatggtctgtgaacaagccacggttgctgacatgctgcacgttgtacaaaacgaatggtgagaaaaagctctaaatagttaaaaagtcttaccaagaatatgttgttttagaccattttcctaatggtggtaactttagcttttaaagtggatgtacagttttttttttcttttattggatattttaatttatttacatttcaaatgttatcccctttacaggtctcccctccagaaacccctatcccatccctcctccccctgtctttatgaaggtgctcccccgcctgcccacccacccactcctgcctccctgctctggcatgtgctacactggggcatcaccctcaggcccaagggccactcttcccactgatgtccaactgtggctggatccatgggtccctccatgtatactctttggttggtggtccagtcccccagagttccaaggagtctgaccagttgattgttgttccccacatagggctgaaaaccccttagctccttcagtcccttctccaactcttccactggggactcctcgctcagtccaatggttggcttcgagcaaatgcctctgtatttgtcagactctggcagagcctttcaggaggaagccatatcaggctctgtcaggaagcacttcctggcatctgaaatagcattcggatttgatggctgtatatgggatggatccccaggtggggcagtctctggatggccttcccttcagtttctgctccacactccatatttcctgctgttgagtatttagttcccccgtctaagatgcactaaagcatccacactttgctcttctttctttttgagcttcatatggtctgtgacttgtatcttgggtattccaaactgttaggctaatatccagttatcagtgagtgcatgccatgtgtgttcttttgtaac

SEQ ID NO: 1483 - DNA, 1000 bp, mus musculus
atttcctaagttcagcgggtctcggaccaagatcttaatgtgtcttcaaaaagtttttgtgagagacagaatggtatcattttgatgaagttttcaaatctcttttgttttcttctaaccaattcacagagtaggtaaccaatcagttctcagtaggtaacaatactcaacaccagaactcagttcaaacagaggagaaagctctgtatgtcagcttctagtcttggccttggaataatcctgccagctttaaatagtaaactcatctctactctctcaaacgagccaatgtccttatggttatgccaagtggtgaattcctaagttacctgagacaataacatactgagcacccttccttctaagaagttggtcatatacaggcttgtgtatatgagtcctgggtagggaaccaggctagtgttgtgtccttatttgacgatcttgaaattgattacaaggggagtttgagccactgaaaagcaatgttttgaagtcaacctgggttcctagaaactctccaaactaagaactgaagcctagatgactccatgggagacaattcctgagcttattatgtgtttctttctacatctctgcagagaatcctgggtctgcttgcttaagggctgtgtgaacttctccctccaacctgactcaattaatgaaggatcaaggaagtcaaggctggaagaacatactagtgggaaccataaacaaccaaggtgataaagaaagaaagctccagtctgtacgcatcctcatgggttctggaggttggggttggaaggcacacttcctctacctgacggccaagggctgacacaagccactgtgtctctgaagacctcagctttgcacaatgaataaagaatggagtcaataatacctgctctcttgatagtttgtgagaagttcagtgattcaaagcagttcttttaaaatttccaaatatcaataatatctctgaacatgtgctcttaaaagacatgcactaatg

SEQ ID NO: 1484 - DNA, 1000 bp, mus musculus
tagcgtttgtgcttgggaaccgacaagacagcttgatggcagaggaactgaaagcagaaaacaaaggtaagattactcaaggagctcttattggatgactcaagcacaaaaaaataacctaaaacagaataaagcagccgctctctccctcttgccctgcaagtcccctttttcctgcattctcatgtgcacggctgttaatgctctggattctaagactcctccgcaggttcaagacgcttacaagacttaagtatagcgttacaatttcatctttctgcgcctccttatcttcctgggactctctaagtccactgtgactgtttaagtagttttccttctctaatgccttaactgtcaggagttaatggctaagaggcaacattgggggaggggtatccattggattgaatggaatgtgggtatggctatttttccagggtgaaataaatacctgtgaaccatcacaaccacgcaactcaagctcatctgggagaagggatttggagattatagtagcaccccaattggctggacttttcaatgtgttatctgggtaaccaactccttagatttcctttcaaaaggaaattttctactgaaatacaaggaaactttgagaaagaacaggacactgactgttgattaatacctaagtataacagagtaggtgactaagagttagtttctcattattcaaggtgaatcttgtaatttttcttccacactcctaaacctgttctttaaggtagagatttaatgccaagaatttgttatagccttagatttgtgcaatgaatttaatccttatagtatggggttgggaatttcttggtggtggtggtagtagaggttgatttttgagatagtgtctctctctgtagctcagattgacctcaaactcttgagccttctctcctaatgctgcctcctgagtcctcaaacgcaggcactgcccaccatgcctggccttccctgttatcttcaatctttatgcttt

SEQ ID NO: 1485 - DNA, 1400 bp, mus musculus
tacagttgcctacacaaagacctacacaatgtccataacagtcgacatgccaacatagatatgggaaattgtcacagagtctcatcttttctcgaagatctatagacagtcagtgacttctgagggagggataatcagttttcttcagagataagctccctgatagattatccaattctaaggaattatccctaaacgtgtacatacaggcaacactagttagactcagtaggttttgtgtgtgtgtgtgtgtgtgtgtgtgtgtgtgtgtgtgtgtgtgtgtgtgtaacaataataactataatagcagaagaggtcatgaagtagagaggagtatataagcgaggaaacagatggagttagaagggaagagggcaaggtaggggcgatgtaaataccgtgcattcatataaaaaattctcaacaaaactcattttaaaaaattgtagaaaatggacacccagaggccagcccgcagtcataccacacaggcaggctgtagacacacaaagcatgtgggcagaagatacccaggtggggggaggggagcttgtctaagaacatgagcacaggagagccggccccacccttgtctgccatgaggtgtcatggtcaaaggggagatgtcctccctaccttgctgtcagagcaactgagagatttgacccttcccttcacctgctgcagcacttggaaaaggcttgcacctagactgggcagcacagtagagctggccctggtggtgtgggtgcaagtaagccagcccaagggtgctaagtggaagatctgaccctgccccttgcctacggcagagttgggtgagctagtcagggcagtgctagagagctcttcctggtggtgctggtggcgctgatccacggctttgagttgtcccacctcaatacctatctcatctgtgagctgctgaagggcaacaaagggataactgacaggagttccagtgaggatccagtattgatccagtactgatagtgtagcaaaaaccagaggcctcaaaccagactcactgcagtgaacgtttgcaagtgaagatgtgtgaacagagggtacactgtgggatgtcacgagatgtgtgaacagagggaaactgtgggatgtcacgagatgtgtgaacagagggaaactgtgggatgtcacgagatgtgtgaacagagggaaactgtgggatgtcacgagatgtgtgaacagagggaaactgtgggatgtcacgagatgtgtgaacagagggaaactgtgggatgtcacgagatgtgtgaacagagggtacactgtgggatgtcacgagatgtgtgaacagagggaaactgtgggatgtcacgagatgtgtgaacagagggaaactgtgggatgtcacaagatgtgtgaacagagggaaactg

SEQ ID NO: 1486 - DNA, 1000 bp, mus musculus
ctggtagggaagagaacacagggaagcccaggtggtggcctgtctgaaggtgggtcgaaatggcaacatcagaagccgagagctgctcatctcacggatggaggcttctctgccgctggctaacttcccacccaacatccaaggcccagagtatgggcctcactcccgccaggatgcagggctggttagcccgccctgattttgctaggggcgagatgtcgatctctggagctgcgtctctgtctctgccagcgatggacgaagacctcgttctcgctgctttccttatctcttggagttagcacatcacctaaaacagggaggacagtgcgggaaggtagaagggttgagaaagtcatcttcccggagcttcgtctccagaactgggaaaacaaaacaaaaagcccgcgaggctggatgcaaccaggcatcggtatctgcggcagcggcagcggctttcaattgcaaccctcttcagagttactaagtccacttatgtggacgccgctttcccctttgtgacctcggaggcctctctttgtcctctagcttcggacacacagagcagagttccatggaggcgggtgatttgcgggcccactgctggtccctggtacacgcacagaagggaaacggtgttctgaggccagagccgccaaaagcgctccgagagggacagatggccgctgctggttcctctgatagaggaccgaggtctgcggccaagggacactgaaagccgagtagagcctgcaagcgctatgtctgagcagaagctaggacgctactagcatctcacacatttcaggcccggggtggagcagatctggcaaaccaagaaaacaataccaccctattccagaaagtgcaagaggccagattgaacccccaaaactagaagcctcctgaaagccagaacgctgtctgtgatacttaaaatttccccagccccagtgcatcaggtgtaaaagtaccttcacctaggcttcgccttttggaa

SEQ ID NO: 1487 - DNA, 1000 bp, mus musculus
ttgtatgtcacaatcagaaggttctggctggctcaggtcctccagtgctaacttctatggtggcagcaagggctctgactgccatggggtcctgctactgtagggaggttcagccctgttcaggtgtggcactatcatcagattttctctttaggggctgtctgcagcccattgatgtaactatatctgccatgctgtcaaagaggaaatcttaactctgttcacaactaaatatacaaagggcaggaactccacttggcaaatggccctgtttacttggggctgccttccctgaactcagacaaagttcaggtgtagttgcttgcagatatgggggttttgagcccccagagcacttcacagcctgcataactcagctttgatctataccagcagggcttcccagacagcagcaactcagttgagaactggaggcctcctgctacaagctatttcctcccaggtgtatgccccatgactactctgtcccttttcttatcaaacaaaaagaatttattggaggttgtgaccagctatccacagggagatcttggcctctaccttgaatgcaagtatgtttctgccaggttcaggcaggcccaaacagggctgtcaacagggcatggctatctggaggtgtatttgttcctcacaacgattggtaatgaagtacccgtgttagtcagctttccatccatgtgccaaaaaaaaactgagaaaaatgctttagagatgggaaacctggttttggcttatggctttagatgtttcagtccattggtgacatagtggcaatgtgcaagggaaaggaagtggctttcactgaggcaaagagagcaagacacagagagcgtgaaagtgagctagtgcagtcaggcttacaatgatgtcactttcactcgggtgtcacctcctaaaggccccatgtcttgggaaccctgttaattgagacacaaatggccattacatggccatttgaggccatttaaggtttggagcc

SEQ ID NO: 1488 - DNA, 1200 bp, mus musculus
caggactcggtatggtgggatagtttgcttctgatgatgccaagtaaccttggtttctgttgcttctgttattacgcttgcctcctgccatctgattatctcaagtgcttgctgccctcaatatatctgattgcagcctgtccttcctataatcctagttgattcaggactcctcagagtccagctttctctgtgatcctttgattgtggactcctgtgaacctgagattctgggtgtgtcagagttcttggcagtcaagctcctctgagaccctgaaatatttgtgtgatccagctcctgttatcctgggatcctgttatcctaagatcctgggcatgtttcagtgcctagaagtggtgtctcctttgaggaccgtggagctgtctgctctgttcaaaaccaaggtaaaccagaactgaccaaaaggtacctgagcccctggtcaggaagggctccagtgtccttgttcctgctgtcacaggcccgtcacaattggattggaactgatgttgtgttctgctcaccagttatcctaagatcgcatggagagtcatctagggaccatgggggtgtctgctgactctgagcccaaggtgtgtcgttgttggcgctgaccagaagggacttgtgcccctggtcaggccagttttctgcttccttaatgctgtctcaggtcctgcgcaattggattggaactgatgttgtgttctgctcaccagtgaacctaagattgtgtggagagtcttcgagggaccatgggggtgtccgctgattccgcacccaatgtgacccagtgctggtgctgaccggaagggacttgtgcctcctcacaattattaaattggaaaataaacataaacacatgtgttgaatttcaacattcatttatagaccaagataatactctaaacctgaaagagacaatcactttcttcagagcacctaccatcctagaaggagaaagacagagggtctgtgtccttgaaaatactacaggttgtgtcctgtcacttaaagaggaaggaaaggtctaattgtggggatgctggcgatttctataaagtcggtgcattttaactgagccataaaagtctaatagtctgactaacagttcaaggatcagatggaaaagggttgaacaaagcctttctgtaagagggcagtgatccatgcaaagaccataaatgtagggaactgga

SEQ ID NO: 1489 - DNA, 1200 bp, mus musculus
gcaggaacaaggctgcaggagctgctgcaggctcccgtaaacctaggaatagccagcctcagaatcaaggctaccccaggagaaggctgctcagaagagaaatctgctttctcctgacccctgactttagatctggggaaactatgggggcaggagccattggcagaaaggtgttcacttgggtggagtctccccttgcagctggcccaggggctggggatagaccctgagttaggtgactgtggagtctgactccgtgtgcatttgctctctagtttctgcagagacaagctgcccaactcctggcacagagactcggtcgggcctgcttctggcagaggaagcaggtgagaaccagtgtagcacttcttgcctactggcaagatttcagcttagagccatctcagccccacatctagttcagtctttaacactgtctttgtcccagggctccatccctgtgtgtgcctcacccccacccccgcactatcagcttccttcatatgccatttgtagaaggctagtctcttcgattcaggtttctcttaaagtgtcatcttaaacacactggaataatacccaaaaattaatgtgaagtgaatttcaagtctttgttggggtcttgataaaaaaccagaaggccacagtctgctcagcacagccaagtttacagtctgttcttgctctaggctggagagccttccctttcggctctgctcccagttccccagcattgctctgtccattcactgtccagtcagaggtgtctgtgcgttcttccttttgtactgtccttttcctcttcacagtccctgaatatattaactatctcaagatcaggaggaggccaggtcctgaacccttcccagtagaaggagggtagatgcttgagctggtgggctgagagtggccattgccatgttgcctgtgtattcctctgagtaacccaatctttcgggcccacagctggcagtccggaagcaagaacagtggggcacagccgggccctgtggctctgggccttctcactacaagcaaaggtaatggttctaattccctgggcactcctgccttcaggggctgctctgtaggctgggtcgtgggatccatcatggaagcctgagtcttatctcttgtcctctcttctgcaaggtgtggactgcatggctgggcttcatacttgagaggaggaggaaggcc

SEQ ID NO: 1490 - DNA, 1400 bp, mus musculus
gcaggctgagcaagccaggggaggcaagccagtaaagaacattcctccatggcctctgcatcagctcctgctccctgacctgtttgagttccagtcctgacttcctttggtgatgaacagcagcatggaagtgtaagccgaataaaccctttcctccccaacttgtttcttggtcatgatgtttgtgcaggaatagaaaccctgactaagacagagggtcttctgataggaaagaacacataccgtcagcttgctgtgaaggtcaaaagaaacaggtgcagctccagcacccaggaatcagtcaggaaggctgtaagggtcatgttgagttgtctaggctcagacctaccctgtgcacatgctggccttcagtctccctgtaaaatgccaaggactgaaccttcgcgagatcttaggtccccccacagaccttgtcagtccaaggaacagactatttctctccagcaatgcagcccgctcatcacggaaacagccccgacgtccatccttcctgcttgagcgtttggggagccaggtccccagagtggtacacccttgggaacagcagtaagttgaatggttgtgagtccaaaggcactgaaaactctgtgttcctatattttattggatgtctggtccctttaattcaggggaaggttccatggtgtgagcagcttctgcttctgcttgggttagagaagcccccggaggaggaaagcacggccccgctgggaggcccttccctgaaaagacccttcctacctggggtcctgccgaatgttcctgatccgaagctgcctcctatggcaggcctggagctgctgcctccctcctccatcatgccccgtgcggcaggaggcactgccagggtgagttctcgactgcgctgtcactcactctcctttggtgctcattctccaacccttactactcttatttctagaataccttggtcacttgacaagcttgggtgccctgcacaccaggcctaaaacacagcagtggctagtcttctaacaccccagcccttgagcaatgactgatgtctggacaaccagaagaatcttataggtgggctcccagcagggcctctggtcttgggggacaggaagaaattgaggggctgttgtagggcaccacatctggcctggactcagagcactaagtgctagggcagccatgagccgtggtatgatcagacagacatgctagtgctctggctgtagcctctcactggtgtgtgtgtgacagtctgttggggactgtctttggtgggacttgctatgctaggtatggtgaggacggaagaggaatccagggtcactaagaaagaattcttttactaaaagatggaatctggggtagggtccagtgtctggtgaggcagtcggtccccattc

SEQ ID NO: 1491 - DNA, 3800 bp, mus musculus
ggcccagggcctctaatgcccacccctgggcagacctgggaagtggcgccgatgtgagatggtccagtcagtgggggagtggaagcagtggtagtctcctggggccaggtagatgacacagtggtacagctcattcccttcccgggtgaccagctggtttctgaaggagtcactggaggaagctattgggtaggacagaaagaaggcctggcttttggacaagctccaggtgccattcatcccacagtgagcacctgtacatggcctgcatgtagccaataatgacttttggctacatagcagcctgctgccccaaagccttcccagcctttattccctcagccccctatgccttttcttgctagcctttgctccagctaccaatcctgctactaccacagctccaatcctgactaagcgatgacccacctggagggaagggcaggtcctctgtattggctcgagggcccaggaaggactccaaggagtaggttacgccctttacctgctccacctcagagttcttcacctgcccaaaggtgaggatcttgccatctgatgggctggtctggaggagacagagttttgaaggtaaggagggggtagtcctcaccttcagtggctccccaaactctaccacctgccaagtcctcagggagctccagtccaggtcaggagggagcctcccggagtgccacggccatgcagtgctgctaagcctggcttaaaggcagacaaggatttcatttcctaatgaagaatggagacaagggccaggccttaccacacagtgcaagccacatacgggccgtgcctgaggcttcagcttacgccggaagaactcgctgaggttgcggtagtggtgcaggtcctccactgcagcctcagtcatgttcaccccaaaggtccagatatacaggctgtagactggcctccggagccagtaaggaagttctacttggttgaggcgaccacaggcacgtgacagcaaacgcgttggcacagatttatacagggacacctgtaggccacagtgcaggaggctgagttggtcacaaatctgagtactttcatacactccaaccccccatccccacatgagtgagagagaaagaaactctacagacaccaccacgaagacccaagtgttcaggttggtttgtgaggtggctgtttctcagaaggaaccagactgctcaccaaatactcaaaacaaggctggatataaatgtaccatttttttttttttttttttgctattgcacaaaaaggtcaaagagcagctgccttaatcccagaggtggagactgggctgtatagccttggttcttacaaatggaagatgaggacctggtgcaagcctgaaagatcactgagaggcatgctgcccttgtgccagctcactgcccacattccagacaactcaagaaggcatcaggctcccaagagcaaagggctacagtcctgagcatcctcttcaaaaggaagcaaggatggtgttttcactcccagatctacatcaccctgcccctggggtctccacagaggcaggaggaagctctctgtcacccctctagtacagagcaccaggaggcaggtaccagtcccactttcaggccagagggtcctgcagagcacttgagcgtctgccaccactgctgtggtagcagtagcaactcccttaggagtgaagtaattttaccaagtttcaacagtccttccacactaagtcaatgtcttctgactgatgtttagtgacttggacagagcaataccatcaagtgtccctaggctacgctctagtgtctagtatacttccttgggcttttatggtgcctacctagactaccagtgtcctagaagcagggcttcctttttggagtcagtctgtcaagaagctgagagagagagagaacctgctggccagggcctgcctgagatgctgcctgtgcagtcctgagctcaattatgtactccaactaacaggcccagcctggctacagcttcctaaaccaccctctgctggctagactctgcttggctttttcttacaatcacctgttttctgtggaaaccagtgacattgttttctgatttacaaatgtaagttccttccaaaaccagcgcattctgaacagggctgccaaccaaacaaccttctcacacatatttactcatgagtgcggtctctgataagttgtttccttctctgtgcctcgccttcaggactgtctagggagggtcatggccagtaggcctatttacacttaccctgctcatgggcctccatcccacctggctgaggggcccgagcgcacggaagggcaggaggtagtggaggatggtcagcggccaggagcgcagtttcagagctggtctggacatgcagctcagctggcctagcctccgccgtagggccagctggggaaagtacaacctgcaggacacatgtccacacgtggcctgggtcagtgcctaagtctggaggaacctgaggagcaacctctcagccagtgccggtcctgctccctacccctacccccccactcacccccagcaagctgcctctctctccaatggaaccaaagagttccagcaggcattgcagtgcccattcaattctaaccaactgtagttgtgaggcaggggcttggctgcctgactactgggcttatttcccagtgtctcccacctgccggccggctgagtgggcggcagctcaggaacgactcctaggagcctctaagtacagcagcagcccgagcaaaggccttggagccctgaatgggaaggaagagaatctgccgtatacccacaacctcccatgcttaggagggttgggacccaaagacagttctgccctcacaggtgccagaaagacgagacacagtgccatgagcctagacagttgggcgacacctgccaagtcttttgttacttcattgtggcacctgggaaaaccttcagtcttttgcttcctcttctgccaaatggtagcagtggctccatccacaggctcaggaggctctccacctagctccaaagccgcctccctgctctgctacaaccacatgggtgacccactagttttacaaggtcattgtcttctattcagccagctttccaaaggcacagagaggccttttcactgtaagctcagcttcctgaatgcaactaggttccctgtcacacagtgggcatcatgagactatactgccacccactctgagaatgtttgaaaaagcacagttgattaaacaagctaaggctgccatctgagccttgctcaagagaagctgagtcctgtgtctcctagaaactgagcaaagcaaagaacaaaaggggattgcagcagagaactggtgaacggcgcaggcgccaagacaacagcacaccaactgtcctgctctcctcctttctcttccacaggaccctactatgtctctaaaaaaccagaggaggtggcagggaccaagcaaagacaaatcagtgctctcctgtgggctgccctgcccaagtcactgcagaagagtggacgccagtccagaagagcttgggggaggatcaggtgtaggaagcaggggtctagggaggaaaaagggggcctcagtgtccttgccaaagaccaagacacaggatagaagcccactgcttcccctgccttaccccctgcccccagccagagccatgggtacctgaagtgagtctcctactcagggcacagaggactccctctccagacccctttagccagccccctactgccactcccccaaaggccactggacttggtgtctgac

SEQ ID NO: 1492 - DNA, 1600 bp, mus musculus
cacacacacagcagaaataaacgtcccaggcccctgggatgtcttgcccgacgctgtgtgggcaggcaccccagagattctaggtaacaatttatttttgaagaatcaacctgaaaacaattaaatgcaatttatgaaaacagtggggaaaagtgagcgacaagcccaattagaaacgttattttaaaagtgtcagcatcccagcatcttcacacatgctggcatgctggagtttagcttctgtttagcagttgtagaaagacagtcaccctggaccaggctgaggagggtcagagggaggagatgtataagagatgctgccctgggatggattctttttaggaaaggaaacagacacagagaaccaaaggcatctgcaaaaacccacacatcctcgctcactcagaacagcccctcgccatggccacaggctacagagagcttgacaagtgtcccccagggaaggacaggacacttcaaatcctcttgattctggccatgctagtggtggcaggagacgtcctttgaggtgacccactgaggtgagccccagggctggctctgcaagtgggatggaggtctttggtaggctgagttcagcctccactgtctctccaaactcttgcttcatcccagaaggaaaccccaccccgtgccgagtgtttcaatgaggaggaagacattggtacacacagcagaagtgaaggggccaagagagaaaaagaacagatgtcaggttcatcaccagaaaccagcaccttaagtttctctttacaggacaagcagcatcgtcattcttgctctaccaagactagttgaacaacttcccacctagaaaaagactggctctatacttatggaaccaagtaaggacccatagtcctaacccatgatattatcctgaatttatgggaggccagtgtgatctgccctcccccacctccgggctcagaacattccctctgggtgagttaatctggctggctcagccccacgatgctttgtggctgtccaagaaattttgggggagccattgggtctcagagatgttctcttctatacatcacagtggacccaatacaggcccctttcagaggcctgctccttaagggtcacaggaacaaagatgtcctttccttagcaagttgttcccaagacataaggagtgaggacagctcacctgctggagcaccttcttctccaaggagtgaaagtcatgtttgccaccaaaagctcccactgctcctcttccagtaatagctctaggcagggctcaaggtagagctggccgaaatcattgtgctgtgcagagcctggggacacagagcacctcctggggacacagagcacctcctggggacatttcagctagctcatgaccaagaggagtgggcacaacccacctttcttccaagctgatcctgccttccccaccaactgagcaggcaggccagactggggcagaagacacgtgccttttctctgtagccttaccccttggcaagggccccgtgctgtaggtcatcaactgcagtgtgattcctctccacgccttgacttacccagggattggacgcctggggcaggacaggtctcctca

SEQ ID NO: 1493 - DNA, 1200 bp, mus musculus
catgatctaagcttcttttccagtcagtgagttccttgaggctttatattttgcaaaataatagtgtgtgcagggtgattggtccataaacaattaaaacaggcacaaaataggtactctgtgccttggtatttttcatgccacttcagttcagtcaacttagggattagttttagttagtatatcatgaggtctctgacctgggtagtactaagagccagagaacaataatacaagaatggaaagaagataaaattaccttctgtcttgtatatcatggggaaagagtcctaatgtctcagatactcaatctagcctgattctggctacaccaaaagtgactgttggttttatgcaagttacttctctatatagctctttctatcaatctatatcagacatattagtaaaccaggaggtatactttgaaaatagctcatgaaaacagctgcatgcaataagaaagatattctagaagtaacgatattaaagtgaaggtctgctgaagctagaatgcttgggtccacatagagatgattagatggtaaaatttactcccccagattctacagttgtcacattggcccaagcatcctgttagatagatgaaagaaaaccagaagttgaatagaaatcccatcatccataaactccaagtaagcaaggtgttctacacagtgcagatggagaatgtatcaggtttttctagttaccatgactgtgacatctcaaattatacaggaaaactgtcccccacaattctgaagggaaacttctagcatccaggtgctgtccttatactctcaccaaagcccttgaggggcaattagcctgtggctcttcagcctttcagcttcttaggtatccctgttgcttgctggtttgtattatgtctcactggcatcaaactttgtcttcatgtggtcttctctctgaatatgtgcagatttccccttcacacaacaacagtgtatattggataagggacctattcttcaccatggcttcattttaatgagttatatcaacaatatcctgacttccagatgaagtcacaccttgaggtactcaaggtgagaacatcattatattttcttggacagaaaggaatgatggtcaacagtcagcaaggattaggaaggttgatctcagccccaggatgagattgtcttgtctcaatcctgaatggaatggaatgta

SEQ ID NO: 1494 - DNA, 1000 bp, mus musculus
ttattcttaatctgtggatcaattcactggcagatgcttacaatgttaacattgttgaaaagagctagaaagtaggtggtcgaacctagttggagatagaatgtcaaagatgccataccctgcaggtttacacctagcttgtagcctgtttcctcctctctgtgtttactgggtattatatgaggaacagattcctttgtgatgattcctctctgttgaaggcctaacggcaatgggggcagccaaccccagacaatgaacccttaagttccagagaggattcctcaggtattggttacagcaacctaccactgattacttcaacacatacatcattgatgattggtaaggctagcttcatcttcattaataaggatagtccactgtgcaatcagaacttgacaatgtttaaacattttcaacatccctttctccatcatatctttccacggagtgagtttcatatgttttcctagtatcataaataaaatatttgaagaattcattatttaaagaaaatatatttgtttactcacatctatgattggagtgaacttgccaagatatagaactttttgttcttaaagtattagaaaactgacttaaattatgctaaaattacaaaaattacaaaaccagggagtatgacttttaatcacttactcagtaacctttaatccctgtggtccttctatcaattccaaggtatccaagtatactgtctgtattctttccctgtgctgtggtgcaaaattacagctatacctgcagccaggtcattctgttctgatgctaacattgtgtatcattgctctacatggcataagaagcaaggacagggattgtagtgcacaggcatggtgaagctgtgggagtctgggactatggctggtattagaggtctaaacatggaagggaatacagattagaccatctctacctgttgattgcattacaacagatccactttattattgtgatttcaaaagtaattttctgc

SEQ ID NO: 1495 - DNA, 1000 bp, mus musculus
ttggaatatccaggacttgctgtggtgggagtactgcgttctgatgatgccaagtagtcttgatctccattggtaagattcttgcatttgactttcaccatctggtaatctctggtgttaggtgttcttgctgtctctggctggagcttgttccttctttgattctgtaagcctgtgtcagcactcctgggagaccagctctctcctagcaaaatcagtgcacagagggctatggaacagtcccatctcctggctgcagatataggcccattgaaccctgtctcatctgctttgtcacttctgcagcctgtgcactcctgagtggacccaccttagatagtcaccagagagaaaatggcaatctcacctgggtcctggggtcagacacttcctggaggcaagctctccactggcagagaaggtacacagagggctgaggatcagccccacctcttgggtgcagatgtaggtacttaggagcctgtaccagaagctctgctgcttctgagacctgtgctctcctgagtggacccccttagagagtcactggagagaaaatggacatatggccaaatcttccagagacattttctcaattaaatttctcccctttaagagaaacttaactgcaactttatgtaaagttgacataacattacgaagcacaggtcttttccagaagaggtcaactcaccagagttactgtcttagttagggtttttattgctgtgcacagacaccatgaccaagaactcttctttaaaacaaaacaacaaaaacaaaacaaaacaaaaacacacaaacaaaaaaactgtatttaattgaggctgtcttacaggtttggaggtttagtcacttatcatcaaggcaggaacatgccagcatctaggcaggcctagtgtaggaggagctgagagttcaatatcttcatctgaaggctattagcagaatactggcttccagacagctaagaggagggtcttaaagcccatgcccatag

SEQ ID NO: 1496 - DNA, 1200 bp, mus musculus
acacatacatacatacactcacacacacacacacacacacacacacacacacacacacacacacacacaaacccaagggcatgtcccatgcccccagtcctggagtgactaaagagagagaccaagtgcctacccccctgcagtgggcaccagtatgatgagcaaatatgtgctggatggatagataggtcagagagggtacagggcagaaagatgggagagaagtgaagctgagcagttcaggcaatgtggagagaagtggaaccagagtcgcaatagcagtgagaaacaggcggatatgaggagcctatacaactgcctctggccatggagaggtcctggctcaggctgctgccaaggaacatgacttggtgggttcagcgccgtactgcagtcagggtctgtgctgatgtttgttggcaatctggatgtcagtggtctgggctgctgcctgagaccaatgtctgggactatactgtcaccagcagctaaactgatctgagtcctatccagggctgctgctgagggccatgtttgggtccattgtcctgctgtgtcaatgtctgaagcctgagttaccaccaaaggtcatgtggatgtcagtgggctgccatctgagaccatgtggatgtctagagtacatacagtctgagtggcctgtgctaccactcaaggctatagtgacatccaggcccaactgcatacttgtgtggggagggggtctgcttctgcagtcctattacagctagagtctaagctgatgtccaaggcctgtattaacagcaaagtccatgcagatgttgctagtctgggctgacacctgacattttgatagtgacatgagtgtgggagagaagttcccacacacacacacacaaaatacaccacagatggggtggatagtccatctatgaaatgctggggtgcattaagggtccaaagctataggaccaacataacacaggtcaacaacaggatatcctggaggagtccctatgaggatccagtattgatagtatagcagaagtcagagatctcaaacgagaccaatgatgcattgtaatgaacatctgcaagtatagctatttgggcaaaagagtgtactatggtgaaaccctgtgacacacagcagcagcttccatggagagatggttttggggggagggggtattttttatttatatatttttttcttttgga

SEQ ID NO: 1497 - DNA, 1000 bp, mus musculus
tttataggtttctttcaagactctattcatttcctgtactatgttcataaggggtattttaacatccctgtcttgtgcgtcaagtacatttctcagggcctgtgtagtagagatgctgggctgtagtggagggatattgtcctgactgttactatgtagtagagatgctgggctgtagcggaggagggatttgtcctgactgttactgattctgcttttatgctgtgtctggtcatctgagattgggaagattgaaagtttaggtgctgatatctgggcttgtcttggttgggtggggtgttttttccccatgatttctgttgttttctctaatttttataggggtatggtagttgtttgttgccctgggaatgaaatcagagagtggggagaggccatagtaggtagtctgctacagagttggaggtgagactgggaaaaggtgagaaaggtaaagatccacagttagattgtctactattctgggtagggtcctaggtaatgcctgctgtatttagggactgggataaagagatgtgtacggagaaggaaggctggcgtgggagatttgtggggtctactggagttgtgggcagggagggaggaaaggctgcagcaagaagtctgctacagagctggagacgaggctggaggatatgtagaggtgaagatcatgatcagtctccatgctactctcgcaggaaagctggctggtactcagagaatgcatgttggtgtttggagctggaataatgtgacgggttggaggaaggaagttggaggctaaggtctaactgatctgttggaaatggggggcagagaagaaggcaaggctgcaggagatggtctgccacagagctggaaatgagactggggattggatttaaaggagatgaaggacagacatgtgaagatgtgcagttggtctatttgcttccctgctgtgcttcatttataacgggattaatcttgtttgtgatatttgcaccattagcatatc

SEQ ID NO: 1498 - DNA, 1000 bp, mus musculus
gtttctaacctggacaactggaaacgcccaaagactgaaccaccaatcaatgagaactcaagggataagcctaggctacccgtacagatgttcagcttggtcttcatgcaggtctcccaacaactggagcagggacttaccctgactctgttacttgcctgtggaccctgttcccctaactgggctgccttgtctgacctcagtggaagaggatgtgcctacttctgctgtggcttgaggtgccagggtgggatgaaacctaaagaggacctgaaaaggaggtgaaataggggccatacaggggtgaatgggaggagaggggatctgtgatcagaacataaagcgaatcaataagtaaattgattgaaaaatagaatttttggatggagagaactagagcaaagaaggcagttgaaggtaagagaagaaagaattcctcctctgctttgagtattattctgcatctttatttctcatcaacttaatgtagtatctgatacttccacactgcagcccttagaagtcctctgccaggtaagaagcaggagtacatatcattccttgaagtgcccaagctttgtaccaaggccaagaaacatctgggcacctgatgtccgaatgacaatatcactaggcttccagatctgtcacacttatcagtggcaggatcctctgtcccaaccccactgctgtggttcatggagattctaaacaagacctgcccagtcaacccaaggcatccttcaagtcacagtcatttaaaatttttctaacatgctgtaattaagaatgggtaagaatatatcagtagagtggtagggtaaatggttcagcaggtatagcatttgatatgccagcatgaggagcagagttctggttccagcatccatgaataagccaggcaacatgcctgtaatcccagtgtgatgggggccggaggaggaaatcactgtagcaaccagactagctgaaaaggttttcaccatgtttaggtcaaaaa

SEQ ID NO: 1499 - DNA, 1000 bp, mus musculus
tgtctaatataaagagtattcaacaaaagttgtaatgtttctttgtttgcttttcttctgacaaattctttagcctcttagtgtctgcaataacatcgtagttacagtaacagtgattgaaattgaacctaacttaagtagtttccaaatttatctcacttaatatttactaacatccctcttctctgctttaaaggtaaagaaaatggaagttaaaatgtcaaataaaatgtttcattaaaatatggattccatttcactgaagagagttccagtctactgctttgagctctccttacaaaatactggaaactggagttgatttccttgacatgacaggagatccacacacctgatcaagctcaatgcagctcagagctctaagcatgtcctttgaaaactcaggagaatcactggaaagaatgatgttttatatctcagtaagttgcaagttgcccatatgctgttttggtatgaatttgaagtgtccccccacgaggtcatgtgctgaagagctcatagtttccagctgtttggggaggttgttgaacctttaggggatagagactttctggacagtatgttagagggacaaggacttgaggttttgacggtcagccccactttctgctctctgcttcctgtatagccgaaataaggattgaccttacgtgcacctcccatgactcctgtgcaatgatggacagtagctcactggagctgtaagcttgctcctctaagctgctaactgttaagagtgttctgtcataaaaacaaaacaagtagctaagacaaccaataaggattactctcttgccataacgttctcctgaagagtccaggttcatgcagtcatgggtgtttcagctcatcaaaaggctcataaataaggagcccaaaggttgtccaaaccagagagcataacagatgctgaaagcatattgaaagcacagaagacacagaagcaggaatattgagagctccacagtgctaatagtca

SEQ ID NO: 1500 - DNA, 1000 bp, mus musculus
acagtcatcaaaaccaaacactattgtgggtgccaataagtacttgctgacaggagcctgatagagctgtctcctaagaggatctgccagtgcctgacacattcagaggtggatgttctcatccaaccattggactgagcacaaggtacccaatgaaggagctagagaaaggaacaaaggagctgaaagagcttgcagccccataggaggagcaacaatataaaccaaccagtacccccagaactcctagggactaaaccatgaaccacagtatacacatggaggaacccatagctccagctgcatatgtaacagaggatggccttgttgaacatcaatgggaggagaggcccttggtcctgagaaagctagatgccccagtgtaggtgaatgccaggacatggaagcagtagtgtgtgggttggtgagcagggagaggggggaggggatagcgggtttttggaggggaaaccaggaaaggggataaaatttgaaataaagaaaatatctaataaattaaaaatagaaatttacctgaaacctgggattctgaaacttaggtttatgtatgacctcaaaaatcactgtacaaacattgtgaatgtgtgggttttgtgtgtgtgtgtgtgtgtgtgtgtgtgtgtgtgtgtgtgtgtgtgagtgtttgtgtgtgtatttgtggccgtgtttcccctgccccctgcaaatgtacatggagaacgagtgtgtgattctgttttcttttttctttctatagagatgatgtccttctcaatgtctttaataagttaggatggctcctgacatacaaaagaattaaagtcctgctttacagaattaaacattacctctactttttatgcactattccatcatccacagatcattttgcctacctgcttttcagactcaaaccataagtatgctcagagccaattaaaaaaaaaaaagccaaaaaacttttttactttgaaaattttatttgatcaacagtctccag

SEQ ID NO: 1501 - DNA, 1200 bp, mus musculus
atcaggcagaaggacaagagtcaggagacaggcatgaactgagagaagcagggaggtaaagggatagctgcatggaggagatgcagtggcagagaaattgggtaaagttagaagctagctgagagactctctcagcacaaaggccaatagccttaaactatatagatttgtccacatctttattattaaaccaaaagtctacaggcctgcattagtggtaaattcctaagtcactgaatttcataatgtttctatgaggctacgttctactgtataatctacattcataaaagtatatttcaactttaactttattcaacatcttttatatatgatattcaatagataatacatgtgtattatgtttaatttctgtgagtacattggttgtatataaaggtaataataagtaataattgagacacctatttatgtatcaattaagcagcatttttaacattctaagtgttatttcttctggtctactcttgtaagattttgtttggttatgctttttcaagaacttcaagaatatcattaaattatttgtgatctctaaatttttttttactctttttttaattaatttttttttacttatttactttccatcctgttcactgcccccctcctggtcacctcctctcacatttattcccacaaacccctgtttttctcctctgagcaggtgggcccccctggatataacccctacctgccctgcccagcctgccacttcaagtatttgcaaggctgaatgcttcctctctcactgaggccagacaaggcagttcagctagaagaacatatcccacagacagataatggtttttgggatagctcccattccagttgtttgggatgcacatgaagacaaagctgtacatctgttacatatgggttggaaggcatatgtccagcccatgtatgttctctggatggtagttcagaatctgagaaccataagggtccatgttagttgactctgttggtcctcctctccctcaagatctagctataccactcctgagcatataccaaaaagatgctctaacatcccacaaagatacttgctcaaccatgtttatagcagctttattcataataagcagaaacaattggtatctactctctagtaagtggatatcagccataaaatacaagtagcattctatattccacagacccaaagaagataaa

SEQ ID NO: 1502 - DNA, 1200 bp, mus musculus
ttaacttgcattaacctttcctctgaggctgacaaattgtgcatctgtggcttcttcagtctaatttctcatgtcactgccttgcaaagcatacagattcataatgtcactgtgtgatggatgcagactcctcctttgccttggggaagtgtctcaacccacttagattatctctcttttatttatttatttccagcaccacctagcacctacttttaaatgccttctgcgaatttctttcccagaggctcataattttaggatgaacggaagggtacccctgtcatgaatcattagcatgctgctatacaagagccaatgctgtcctctggcctgtcacacacagactagccttcatctgtgtgtccactttgtcactaacaatttgatgactgaatataaggactagtacagaaaaatcaggtcagaatgatatgtgggaagcaaactgacagtttttgtactttttacctgtggccatcagaccatccagttacattttccttaggatgtgaacagatggaaaagaaactcaattctttttgtctttttctttctttctttctttttattatataatctacatctattctatacaaacttgagtataaaatctaagcaattgtccaagaattcccatttctacttcttagagagagtgttatagggatattaacttagggaactctcttcctgatggtattcacccaccctacaggtacccaggatttgtttctaccatgggcttacatatagatcaagaaggatgttatgatggctattcctggttgtcatcttgactatatctgaaatgaactaacaatccagaaattgagggcacactgtgatgcagatcttgaggctggaagacactagcttctaacctggatattgacatggggatcttgaggcatggtggccataaaaaagcttaggcccaagcaaggtagtacacacctttaatcccaggacactgaggcaggcagatctctgagttcaaggtcagcctgggataaagcaagtttttttttttttttcattttttattaggtatttagctcatttacatttccaatgctataccaaaagtcccccttacccacccacccccactcccctacccacccactccccccctttggccctggcgttcccctgtaccggggcacacaaagtctgcgtgtccaatgggcctctctt

SEQ ID NO: 1503 - DNA, 1000 bp, mus musculus
acaaggttaattagaccaattgtatttaatttaaaaccactggatgcagtgcaataacattttaaaaggttatataactctacaagtgagaaactttgtaggaactaaaagggggtgaagggaacgagcaaggggggagggaggatagcccatgcccggccagagttcctcctatgctctggacatgtggacacggaagagctgtcagaagttttccacttggccccaggtggacatctaagccactgacccctctcaatgggggtgggaggggagagggagtggacaaggggcatctcccaactgagggctctggggcgacatcctgtaaccccagggttatgggagagagggcataagaagagaggttcgcacacaggcgagtgtaagtgcagtgggacttgatgaacatagacagtcaatggttttataactttattgtagaaaggcagggaggaagaagagaaggagagagagagaaagagagagagagagagagagagagagagagacagagagagagagagagagagagacagagacagagacagagacagagacagagacagagagataccagccatggccaagaggagagagaggggaaaaggagagagagagaagaaaggctagaaagtaagaaggagagagaggaagagaatgagaagaagagaaagtaagaagagcttaaggggagtaagagcaagagagtgaggaggggacaaacagcccctcttatggtatgctgttatctttggtgttgctaggtaactggggaggagtttagcctgaaggtcagaagcttgggacattgcttacatgactaaaagccacacttctcctgtgggggcagtggggtggtaacttcgacaggagccttggtccaggagacatgagagaactccttctgtcccatgtaggtgaattatcccggggttcaacatctcagctcaactggagaccagactgtctgtgtagagccgaatgttcaacaaaactt

SEQ ID NO: 1504 - DNA, 1400 bp, mus musculus
gaagaatttaataaaataagcctgtatttttacatggattttacataaagaaaagtatatataccgtctaaatacataactatatagtttggggggaaagagtggttgtttattgctatcaaacaccaagaggagaggcagactcaattattgcatcagggtttcaagtctgtaagggaggtgctgatactaaggtctagttccctaattggttcttgattttgtcaataaagaaggccagaagccagttgctgggtggaaggtacatgtgggtcttccgggagccaggaggaaaagatagatggaaagaaagagagacaggattattttgccaggctttggaacaagaagcacacagcaatcatgtatgatctcagggcagccagggcctgtggctctgctaacgggttgccagagatgtttctcaggggctgattggacaagccactgactttaggacagaatgagagacagagatggtggtttggtaaggcacaccaaaccaggagggaggtagctgtgcccaacaacagtgcaatgaaaggcaagctgtaaaatgacaaactgcgtgtgtgtcatttatccttggattcgagaggctcaggtcatgctggtaactcgacccctcctggagcaagggtcttaggagagggctgatggatcagtcgatcctgaagcaaagacaggtaggaaagagaagcctggtcagtgttggcagtggaacaaaagggagctgggaatggacccggtagccaagcaaccccagggaaaggccatagtgtacattgaagctacacacaagtcttctgtatttccctggttgtcattggaggctatttttagttcttatatctaccagctcgccccgtcttggtaagatcatcagcaaacaaattctaaaaagaatagtcacatatgcagtaatagaagacaaaagtttgtatacttaaaattcatgtataataagttgctaacttaactaattctacaagatagagccccatgctttttctagaaacatcttccttcattggaagcgatattcacccttatgcttctgattttataaaagaggaagaacaatgggatctgcaattctaatacataccttataactaaataagttgaatgatattttatttctttctgtggctgaagagattacttttcctataaataccacatttgcttgatccattcatctgttgatagacctcaaagctgattctatgttacatccattgtgattcttgccatgagattatggataacagacacttctatgtcgtcttattctaatgacatgtagaatgagataaataaattatttatgtgcttttaattttaagtcataatatttaaattacagaatgtaaaaataaagactaaataccactgga

SEQ ID NO: 1505 - DNA, 1000 bp, mus musculus
ttcttacaaggacctgagaggtacgtggaatttttcaagtttatgttattataaaagcattagcatttgctggaaaccatattttgaattttccatttgtgacttttcttgatttagtcatatgtggtatacctccgtggtggtgtcaggcagcagcagtggcaactcacaattcccaagctgtacaaggtcctgatgagaggcaactcagaccatgtgatacattgtattactaacctatgatatccagtacactagagatagtaactggatttttcagttgaatattttcatcctagaatagacttatctagaggtaatcccattgcaaactgtaaatgttggacattcaaggagtacctttataggagtcctgcagtcttagcctatgaggaaggaccgcagaccatgacattatgacaaaacataaagtcactgaggccaaagtttctgttgtttctgaagaaacaacagttaacaagaaaggatttgggagagcagctgttaattttttatgatgagctctgtggaaaggttttatcatccttcctcatatcattgtgtatgacaccaaagggaccaaggagtaatgaagaattgtacatgtggagcttattatagaaggggtatttacagattcccctactctagtgcatcaaatatatcatgtagctgcaattctcctttccatttcctgctctctttaagatggtacaagtagtggtttgaatgtgatgtccccataatttcaggcacttcaatacttgtcagttggaggcacaatttgggcaaggtcgtactggaggaagtatgtcactggggtaggatttgaggttgcaaagcttcaagccattatgaatagagtatagtctctctcttcctgcttgtgattcaagatgtgagctctttgcctcttcaccagcagctatgctttcctgcctcttgctgcaacccttccgtaccatgttgggctctggaatcgcctaactagcacagtgga

SEQ ID NO: 1506 - DNA, 1000 bp, mus musculus
ttcttctcttcagatgcttatatcatttggttacaaactagacactataaaagggatcacaccagaaagttcattgtcataagagagacttttctgtgctctgcaagaacattagtggcttcctaatcttctactgttgtgaaaatcagaaacacttctagatattgccaatggttccaatggtttgtgaatgtgcataagtacccacagctctgagtttggcccttcttccaagcatagtaagcatcataatgttaaactccacaattaagaactctacatcttgactctcaagtttattccatctaatgtctaattaaataccctgaggttcatgtgtctgtataattttccttagggtctacacactgcaaacaaacaaaagaagaacaaaattttttattattaattaatttatgcttttacactccatatttcattccttgcccactgatcgaccctccatctgttccacatcctacaccacctccccatccctccaccctgacctctaaacttcctggggcctccagtctcttaagggttaagtgcatcatctctgaaagaacacagacccagaagtcctctactgtatgtgtgttgggggcctcatatcagctgatgtatgctgcctgttttatggtccaatgtttgagagatctcaggggtccagattaattgagactgctggtcctcctacaggattacccttctccttgtgagctctcatagcctcagtaatagtgtcatgccttagaacacccaccctcccctggagctggatcccactttgggcctgttgctggaccttcttttactcagattcctctccatttctatccctgtaattctttcagacgggaacaattatggttcagagttgtgactgtagaatggcaatcccatccctctcacttgatgtcttgtcttcctattagaggcgagctctagaagttccctctccctactgtcaagcatcaggccttgtctaatgttgttt

SEQ ID NO: 1507 - DNA, 1000 bp, mus musculus
tttcttttatatttaaatacaaatacatttgatatattgtgctgcaatataaagtcatataaagagtctctgctccatagattacaccataatacttgccggtaatactcccttgatcagagtcaattctgtcttctttgttatatcattcctgacaaactggaatagggaatttcagatttgatttccttatattgcttgaggtgtagcaactggaatattccaatagggtgacagaaaactcagcagagcttggaaagctgaattgtcaggtatcaccaaactactgaattcaagcatccagctcaaagtaaaagtaaacctgggtcgaaagtcaagaagattgaataggcaaaagctaaaactagagaaaccaccaacaattcctgctccatttttagccttttgaaacatgcgctgtcttagttaggattttactgctgtgaacagacaccatgaccaaggcaagtcttaataaacaacatttaattgacgctggcttacagattcagaggttcagtccattatcatcaaggtggttgcatggcagtatccaggcaggcatggtgcaggtagagctgagagttttatgtcttcatccaaagactgctagtggaagattgacttccaggcaactagggtgaggaccttatgaccacacccacagtgacacacccattccaaccaggtcacacctattccaacgaggccacacctctagatggtgccactccctggtccaatgatatacaaaccatcacaagtgccttggtaaaatttgaatatgaaatcttctttatcagatcatcacttaaatccttggtttccagctggtggtgcaatttcagaatgttttagaaactatctctaggtagtaggtcattgaaagtgacatctgcctcctgcctttgtggaggagaaggtggactcccaccactcaccagatactgctgtcactctgtgatctgtccaggtgcacagaaccaagaaaacatgggct

SEQ ID NO: 1508 - DNA, 1600 bp, mus musculus
attatggtggtggtgttgatggtgatggtgtgtgtgtgttctctcttttaatatataagtttagaactatttattcctgtgttttcttgagtgtgtacaacctgcttacatttcagtttttcttgtaggaccttatgcaggcctagatttgtagtgagatgttgcttaaattttgttttatcatcgaatgtcttaatctctctatctatggtgattaaaagttttgttgcatatacaattttaggctgacattgtggtgtctcagagtttttagacttggttcctttatagtgtcacagatttcctggatgtgttatgccaggactttttagagttaacagcttcattgactaagactgggtacagtatattcagaccactgttatattcataaaggctattttaaggtcttatcttgtgcagagccatattttccatgattgtgctggctggagtattttcagaccactctcatattcataaatgctatttcaaagccttatcttgtggttcagatatgttgcaatacttagggccttctatagtaagagtgctgggttctagtagagactttttttttttttttttggttgatattgatcgccttcttactttggcatctaggtatctaggtatctctttgtggccatgacttacctctgcttccctaatctctccctctctctgccttaaacaccttaaaaccatggattatctcttcttatctggacttgctatgctggagcaatggagcaggtcatcccctaatgagcctcaggtagagtctaatttcctgtgggaagcctctcagcattcccagacggtctctaccaacccaaacttctcatagcccgatgccctcccagcagttctgtgggggtgcgtgcagtcagttttcccacactcagccttgcccagcggccttagccctgagcggacaccatttttatcccacagactacaacaggcagctggctacagactgacagactggggacagggcattagagattggatttgaagtaaacgtgtagaataaagatctgaagctcacctatctgttttctgccctacttgcttcttttacagtaaaaacaaacaaacgaacaaacttactaaatatgtgtgtttccctttagaaaaagacctattaacatattttgcctactttcctatagggatttttaaaaattattcaaataaaatgtgaaatcgccattttggggcagtactgtttttgacgtaagtattttgaaattcttatcggctcatctacttttatcactgttatattctctgcataaactgacctgtataatatcaatgttatacctggtgattcttgactggaaatgtacattgatagtgataacatagttcctcctttcagattaatgataacacagtatgatttttctatcatgtcacctttttcacgcttctctttaaagtgaatgtcctgtgggtaatctaaggttgcattttccattttctttcaacatgatagataattttcccttctcaagtaggttgtatagactcatttttatttaataatactattgacatgattagagaccaattaaacatcatagtattt

SEQ ID NO: 1509 - DNA, 1000 bp, mus musculus
ccatagcagaggtcttgtgacaggtgttgtattaactttttatattgcaatgaacctgtactcatacaaaccaaatctgtgtgcttcctttgatatgcacctgcaacttgttaattcaagggcctttattaagaaggtataaatttagcagcatctgtatagatttgtaaaaccctatcagcttgcttgagaacctaacatcattttgtgtgtgtgtgatatgtaaagaagtcaaaactgatgatggtttgtcccaaacagatgtgcctgcagataacacagctctgaagatacactcatgtttattacagagacttggggttaaaatagtggagtaatttgggacccctctgaggtcaaggacatcatttacctaccaacccttatatctctgaagtctttttctctagtatccttccagcataggggaggtgtcgtccattgctgatgctgtctgcactagtggagttcactggtggcagttagtatctttctttgcaatcctttatgaaagcagcagtgagggcagttcagggacagcctgtcatggaggaaatgccatgctagaggacgaaggaaagagcagaaggaagcatgtaggctacagagagctatccagctagctgccagctgaccagactaaaagacagctcagccacaaggggtccagggattaggaaccaagctctgaggccagtggatcattcttatgcttctgatgtaaaggtcagcggagggtggaggccaaccctatggtctagaaataggtagttcttttcatcctttccaaaggtgaatgcctttgtgatttataaagaaacacacacacacacacacaccacgaatttgtgttctgtaggattatatcagtgaaccagtgaattctcgagtagatattctcctttatacagtataaacatgtttcatttgaatatgtctcccccaaaatgtagcataagaattacccagatgccaataagcatgcattattgaaaggtag

SEQ ID NO: 1510 - DNA, 1000 bp, mus musculus
tgcggcgtcatcagagctcaagggcaggtccattattggtcttgggtcctgcccctgctgccatctttcctctcccatcaaatttcctttgtccttcaagaggtagtgttccagacaattacagtgagaactagatgcttagttgggagccaaacatgagcatctgctgggacccatttctcacatctcagcatgagctcccatgcaggtgcttgctgggagactctcttagaccgtgacgccatagggccagggcaaaccctgagaatttgtacttgctgggtaaatagcccccaacccctgccaaatccatacccatcacaaccctcagaatgtagtcttactagcttctgaattcagataagatagagcatattcagtgtgggatggctgttagcagaacgtggcctgactggaagtaacaactttgcagattattcagtgaagatgggatttgctgacttaggttggggtctaaattcaatatgactggagtctttataagaaaaataaatgcagatcacagatccagagagagacatagtagaaatagatgtgatgacccaggcaaagtccagagtgatgagcctgcagaccaggagacaccaaacattgttaggaacaccagaaatgaaggagaggcaagaaaaaattcttcctcagacctccaagtgtgtgtggccccgctgacaactccattatagccttctggtctctggcgctgtgagagaaagatttccaatgtggtaagcactctggtaatgtgttcagcaactctaggaagcagatgcatcgtgcagtgctgatactgttggcatgggaaccataacttgagaaccattgtttcggggcctttctataggaaagaaagcttgaagaattcagatgatgactgtgtgaaaaggggcgttccaacacggatgtcattctcttttatatgagatccgtgatggacatatgttgtttggggatggccacaaagcatcctggattttttttt

SEQ ID NO: 1511 - DNA, 1000 bp, mus musculus
gtgcagcaaaacaaaacaaaacacggtgtctgttttgtgttagccaactttccctgcagctatgctctgaatctgactgatataccagtaagtgatcttcatcattggaaactacagattttttcccccagcatgtgttagttggaaagagcttcttggttaggggcggggctttgcattcacttcccggtatcaatgctgggatttttgtctgacttaaacctacatcgtggtgcaggttctgtgtgtgctgtcacagtttctgtgagtcatattgcatcggtcctgctatgtctagaagattctgtttccttggagtcatcctccacctccagcacttagaatctttccgactcctctgcggcatagacccctgagccttaggggaggggcttgaggaagacctccagtttagaaccagagagctgcccactgcccacttgtggatctttgttttaatttgtgttctgcaagaagcttgtccgatgagagttgagtgacttaattccagcgctgggaggctgaggcagaaacgtcttctgtgaggcttgcctgggtcatatagtgagattgtgtttaaggaaaaatagaaaactaaacaaagaaaccccctcaaaatcttgagcaggcgctagagagattacactgggtgaaagtgcccactgccgagcctgataatataccttggtttctgggatccacatggtggaaggagagagccgacagctgtcctctgatcccacatgtgtgtgtctgcaagacccggctctctcaaaccccataagtaaatacatatgaaaacatggggaggagtttggggctggagagatggcataatgattcagagctctcgttgctcttgtagaggactcaagatcagttcccagtacccacttggaggctcacagctggctgtaactccaatcccaggggatccgatgccaggcatatgtgtagcacaatccctacctgcaggcaaatcattcatacacataaagta

SEQ ID NO: 1512 - DNA, 1200 bp, mus musculus
gattttctgacccgtgctcctctatttttcccctcagctggataaaaaggtcatccaacaaatcgcaatgggtgactcagcggcccagaacaagagcctgatcaagatctggtgtaaaagtataaccaatgtggtaagtgtcaaagtgatggatgagtatgtatgtcaaccaaagggttcaaaggcagcaaatcagaagtcagaaagggagaaaaattaggcaactgggagttctatctgccctctgcctttcaaggagatagacacctttgcatcactgttaagatgcccgctccttgacgtggtataatgcttgaatatctcatggaaggatgactcttgccttttgctttggagaccgtgatctctgtcccacaacacaaatgtaggcagcaggggcatctcaccttccaggctgtttctgaggaggcacacatggcttgcactaggaacttgcccaacctgctgtgcagtgtgggtgcaactcactcttaattctggggtgtagtatgtgtgtgcatgcatgcatgtgatgctaaaagctggtgataaaataaaatgaaacagattttatttgtccccatggttccaagagatttttcaaaaatctttgaagggaaagaaaacaccctatgatttagccaccatacagatccaaggataatgtcccatttggtccccacctttgttatttccccaccatggacgcaccttatgtttgtcattgtcatttagactgagatgaatgtcaccgtcccctcgactgataactgcacctctccttcatattgctggactgatggcatacagacctggaccatccagaacgttacccaaaaggagaacattgctaaatgtgagtgggaattaactggctggctagctgggtgggtagtctaggaatctgaccagtgtgcagcccagtgattacaggaacaaagggaagacaatgctgggccttctggtgactccatgccacctgaagagcttttgatagggattctacagtgctcccttggtgtgcctttggatcccttagtcaataagtcaggggtaattgatggctggtttgattatatggtctgtccacttaatgcatctcttctgatcaaggcactgagcccacctgatactcccatattttaggaaacctttcatcctttcaagccttcctgaatcccactttctcctctatcatac

SEQ ID NO: 1513 - DNA, 1400 bp, mus musculus
ggagaaagcattatgaattttcaagaagaataggtggaaatactattacttagctgcagaatcacacactctttttcttactaatcatgtttctaacatttttaagatcgaatctctaagtttaataaaatcccattatcttctaatatttaaaaattaataatgtagagtcttatatccagctctgtagcagaaaacctgctgtggtctccttttttaaatttttttttatctgaccccatccccaagggatcacaaagattctctctcttgctcttccttcccccaattcatcctattatcccagcttccaacaccagtaggcattcactgagaccttaccaattaagcagaaaaggtaaacaggaaagcaaactgaagatactcatcactctctcctcaccttcaaattcagtctcccagtctcatccccactgctacaagagaacaccagctgcagccttccatcacccctgcccacatttcttgtggaccccacaatgcatcccctcctaacccctacctcattcactcactttatcccaggccctaagcccagtagcagtcaccttctgtcacccaagggcaggttctcccagtataacaagtagtctgaaggcagacccatgcatctcctgcttctcctgagattcacccccaccccaaccccaagtctcaccagctgaacaagccaatgaaacaggaaacatccagccatcgcacctgacttctcaatggagactctaaaagccagaaaggcctggagagatgtgctgtagactctaggatacaaataccagcccagacaacggtacccagtaaaattttcaatcactatagatggagaaataagatattatgataaagccaaaattaaacaatatctatctacaaatatagccctacagaatgtgttagaaggaaaactatcattaacctatcattaactacacccacgaaaatgcagaaaataagtaacctcatgccagcaaaatcaaaacaagggaagcacacacacatcactactaccaccaccatcaccattagcagcagcagcagcagcattaccaccaccaccaaaataacaggacccaataatcattggtcattgatatctctcaatatcagtggtttcaattcccaataaaaaaacacagactaacagaatggatgtgaaaacaggatctatccttctgttgcatccaagaaacatacctcaatatcaaggatagatattaatccagagtaaagggttaaaaaatatattccaagtaaatagacctgagaaacaatgtgatgtaaccattataatatgtaactaaaaagacatcaaagcaagactaatgggagaacactccatatttaccaaaggaaaaacacactaagatgacatttcaatg

SEQ ID NO: 1514 - DNA, 1000 bp, mus musculus
cttccatcaaccccacccacaagcagaaaactcctggcttacaagttgccacccttggccttctcagttctagcaacccacccaaggtttttcactagataaggcaaagaaaaattgagttaaacaactgtgtattgtgagcacaggtgtccttggaattccgagtcactggggggtgttacttgacagtgtgatgggtcagatgcggcagtgctaattttttcttttaacctgtgtagtccacacatgctggttagtagagacataaggtaggggctaatagacttcctttctcttggtgacacaaatagacaccagataagaccagattaaaagcaggtaaatgcagagtgttttcaggtgctgctcccaggcaggctcactgggttcacctgtcccaaagaactgggtctggggatttgggcacctgggctaaggcaagagggttttatatatcttcatcaagggatgatcacgtgtaagtcaggatctgggactgtacccatatatggtcttgccattttttaacaaaaaagcaagataactcatagaaattttgtactaagaagcattgcttttttttttttttgttaaaaaaatcacagtctttgcctttttacccaccccctctcttttgcacaataaacatttaattcaatttctcaatcaaaggattctctttgttcacccactttgctccaagtttcacagtcttattccataccctgtaccaaatttgtttcagggccaagacctggtaatagatgcttggtccttgctccagggcctctcctgctaagggcatcttcggtgagtctgtgcttatttgctgaagttctattttctgtctactcaagggtgctgctcctgattactgggccttggatgtttctagttctataagtttaccctaatttttcatctgcaaacatatgaacagtttgtgaatgcccacgatgaattcaaagattcaattgtactcttcaacttgacctcaagt

SEQ ID NO: 1515 - DNA, 1000 bp, mus musculus
agcagacttaattcattttgtttttcttgtataaagcccctatgtggtaaccagagctggctcctggggcgtctgaacatagattctgctgggggcttcccaagacggtcagtgcatttcgaatgaagagacttggtgaacatggtatctttccagaggttgggactcaagtagctgtagtcttagagatgacatcaaaggtggccttagcaaagttgcccagggtggcattgtggcccccagctgatgtgtggtagtcagcaataccagctatcagcagcaacttcttgggcacgggagcagagacaatggcagcgactgtggtggcagggagaagacacaccaacacacaaccacagtggccgtcacctcgcgtggaacagtgaggaattgccacttttgttcccccagtctctgcgcacagggacggtggaaagcttggccaagatgatggacccttgaatggcagtgactaccttcttggggcacttaacactcagaccagcatgaccattgtaatccccatgtcttagggtttttattgctctgaagagacaccatgaccacagcagcctttaaaaagggaacattatatttggggctggcttacaggtgaaggtttggttcactatcattctgtcgggaagcatggctgcacacaggcaaacactgtgctgatgaagtagctgagagttcttcatcccagtccaacaacagggcaacagaagagtgacagtggaccctgagctgagcatctgaaacttcaaagcccacccccagatacacttcctccaataaggccacaactcctaatagtgccattccctatggcccatgggggccattttcactcaaaccgccacacctcagtagtgacaaaagtctttaacctggtctgctggtctgccccaacctaatcctttggggacattacctggaaaaagtcagcgatctcacgtttcttagtgggctggaagatcaaatgatctcccccagggac

SEQ ID NO: 1516 - DNA, 1200 bp, mus musculus
ttccttgtacccctcccacacccatttcttgagaatagacattgtttagatctggaaatcccctaatctcccccttctccttcccccctgagggcctataaaaactgggaactctttcccctcgaggtcgactcctctacccctgtgtgggatatgagttgtccccaaagctctggctttccctgaataaagcctcctgtggtttgcaacaagctcggtctgttgtgagttcttgggtgtccgctattgtcctgaggcctgagcaaggggctcctctcggagtctttcatttgggggctcatccgggattggcatgaccacccacgtctccgaagacccacttggaggtgaaattttttgtccaaaaatatttctgtaagtcggctaggttctgtgctgaaatttgcagccgcaacgtttcgtgagaaacggagacctttgacttgggatgagtgtgaacagcagatgtcctggaatcaccggctgctgctcgctctgggggatgccctgagcgaggggaaggactctaggagtccgtctggggcggggagtgtactccctcgaccatctgtatttctgaagccctgagcgaggggaaggactctaggagtctgtctgaggtggggagtgtactccctcgaccgtctacatttctgagttggttttgtctgtttgatggaaaacaggcatctgtcagtgtgtgtgtttgttttttgtgtctgttttcaggcatttgtcagtgtgtatttgttttttgtgtctgttttcaggtatttgtcagtgtgtgtatgtgtgttttctgtgtttgtttagtgttttccgtggtactggacagactgtaacgacccccctaagtttgactttagaccactggactgaagttagatcaagggcccataatctttcagcagaaaataagaagggaccttggcagactttctgtgcctctgagtggctgacttttaatgtaaaattgtcactggaagggacttttggtttactctttatctttgaagttaaagccattgtttttcagagtggacctgggtctcacctggatcaacagccttacctcattcagaattcacctccataaatcaaaccatgggttcccccacgcctctcagagccctcccccggctgctcccatgcactcgagtgggtcagcacagtgccctcgctttctgccctaagaagcag

SEQ ID NO: 1517 - DNA, 1000 bp, mus musculus
gggagaaaaaagcataactacacagcgaggatctattgatcactacactgagtttatcatagttccttaacttgtccccaaacccaggaaccttaacttgtcccaaagccaggaaccttaacttgtcccaaagcctgcttcctggcaactttatatttgcctctattttatccgaggtccttcccaaactcctgggttactttgtgcctacttcctggcaactttatgctcacctctattttatccgaggtccttcccaaactcctgggttactttgtgcctacttcctggcaactttatgctcacctctattttatccgaggtccttcccaaagtcctggggtcgcaagtttcactcactgtgaacttaccctgccggcaaccactgactgctgaaagttctgaactcggtgggggagtcggttccccgtacgggccaccaattgtcgcgcccactctcaaccagcaagaacgacgcgaccaccagtccttctaacagcagtttattcagtcttcatctttcttctttctcttcatcagtaccgttccccagctgaagagttctgaatccacgccagatccttctcaacagtctgttttacgggaacactttattaaccccttcttccccgttatgcagttctgaatcctccctgtagcagggggtcttcactcatgcctgaagatgtttcttttcccgggtttcctcgtcccaggtcttctcgtcccaggtcttctcgtcccaggtcttctcgtcccgtcccgagtttttcttcccgggtttcagcaccaactgttacgcgcgttcacgcgaccaggaagaacgacgctgcaacaggatctttctgcacacgtttattcagtcctgtttcttcttgtttatatctcccttgtttatatctcccttgtttatatctcccccaaaccctgggcctctcactcttttatactctcagttcccatccacgcacagcaggccacgccacctcaccaggcacgc

SEQ ID NO: 1518 - DNA, 1200 bp, mus musculus
cggttccccgtacgggccaccaattgtcgcgcccactctcaaccagcaagaacgacgcgaccaccagtccttctaacagcagtttattcagtcttcatctttcttctttctcttcatcagtaccgttccccagctgaagagttctgaatccacgccagatccttctcaacagtctgttttacgggaacactttattaaccccttcttccccgttatgcagttctgaatcctccctgtagcagggggtcttcactcatgcctgaagatgtttcttttcccgggtttcctcgtcccaggtcttctcgtcccaggtcttctcgtcccaggtcttctcgtcccgtcccgagtttttcttcccgggtttcagcaccaactgttacgcgcgttcacgcgaccaggaagaacgacgctgcaacaggatctttctgcacacgtttattcagtcctgtttcttcttgtttatatctcccttgtttatatctcccttgtttatatctcccccgaaccctgggcctctcactcttttatactctcagttcccatccacgcacagcaggccacgccacctcaccaggcacgcagcttcagctaatcagggcagcaggggcaaatctccatcagactggattcacctgtatcctggtacacctgcccagcactcaagatgtttgtgtcttatatgaggaagtcaggtgcaagtcatacgacttagctacagtccctggcgcctttaggactgccgccacacctgctcctaacaagtagtgcataggtaggaactgcacttggagaactggcctaggggggagacaaagatagatctctccaggccacttccttaccatgatggaaaattccttacagtttatccagagttgggctcccatggtgccttttgagtagctgccttgagcggccaggaccactctgtcttcccctgactcagtcatttctgtgacttctgctttcctggggcttgattagtgtgtagaattgtgtgaggggagtacatttatacaacctatttctctttactatctaaatatttcaaaaggttttattattataatgtgcacaaaaggtaattatacaattatcaatcacccagttttagaaatgagttgaacagacaaaattcacgaataatcttatccagagatttatacaagtttttgataaactgcccctatttttgacatg

SEQ ID NO: 1519 - DNA, 1200 bp, mus musculus
aatttcattttctgtaggttaagaaaagtgtgcatttatgtaatacatgcatgttttctgttaaaataaatgtacaattaaataatctataaaattatatatacacatctatttaattgtaagattataatataattacataattttcccttccctttcttcctgcaaaaaacatactccaaaccttcttttctctcttttcaaatttatggctccttttacacacacacacacacacacacacacacacacacacacacacacacacacataccccactcctaaatacaacctgctctgtctgtgcaatagtatgtatattagggctgaccatttggtgttggaagaccaattggtctattctgcctagggaagacagtttttctgtgatatcagcatcactcagttgtctatagttctctgtgtgcaaatatcccaacagcaggcataagaagctggtcagggcttctcaagatatttctaaaacattacaggctatttccattggtggctccttcttcccagaggtggaaggttaggttcttattagtgatggcatcatgcacttcaaattcagggcccagaggccattgagcaggaaatgatctaaaaacctccttcccaactactagttttcatggtataagaaggcatcatgccaacttccaatagagaaaagcaaccagcagttctccagagctaggataccaataaaccacaagtaccagtagagtacaataaccctacaggtggaataataccatacaaccttgacaataatgaacagctctctagcatgacttgagaccctctcaactagatggaaatcatatctaatattgtaaacctcaccaggccatccatctaattaattaaataaataaaataaagaaagaaagaataaaaactaattgccatacaaattcatgctcatcttttagaatgagttttctaaaacatctctagcatatatgtatcaggtactgtgccaatctattgcagtagttcttacgtgtggtatgagacctaatttttctttactatttctatggactgagtatcaggaatgatagtgagttttctctgttaaagcacattccaagaattctttcttgatgcactaggtagtacagttttcttggaggatatttttgaggggagaggtaaataaatacagtagagttgatagacaaaggcaaa

SEQ ID NO: 1520 - DNA, 1400 bp, mus musculus
aattggaaattttatttatttacatttcaaatgttatcccttttctgcgtttcccctctagaaaccccttatcccatcctccctctccacatgaagcgcgagaaaaaggaagaccaaagtatggaaactttggtccttcttagaagggggaacaaaatactcatggaaggaaatatggaggcaaagtgtggagcagagactgaaggaaaagccatccagagacaaccccacctggatatacatcccaaatacagtcaccaaacccaaacactattgcagatgccaagaagtgcttactgacaggagtctgacaagtacagaggcttgtctcctaagaggctctgccagagcctgacaagtacagaggtagatgctcgcagccaccattggactgagcatggggccccaatgaaggatttagagaaaggactgaaggagctgaaagagtttgcagcctcataggatgaacaacatcaacaaaccagagaccccctccccagaggtcccaaggagtaaaccatcaaccagagtgtgcacacagggagatccatggctccagctacatatgtagaagaggatgcccttgctaggcatcaataggaggagaggcccttggtcccgtgaagactccatgatcaagtgtaggggaatgccagagctgggtggctggagtgggtagatgagtgggggaaacacccttatagaagcaggggaaggagggatgggataggggttttccggggagaaaaacagggaaaggggataacatttgaaatttaaataagtaaaatatccaattaaaaatggaatacagagctaaacaatgaattctcaactgaggcatccaaaatggctgagaagctcctaaagaaatgtctaacttccttggtcatcaagaaaacaccaatcaaaacaaccctgagattccacctcacacaagtcagaatatctaagataaaaaattcatatgacagcagttgctggcctggatgtggagaaagaagaacactcctccatcgttggtgggattgcaagcttgtacaaccactctggaaataagtctggtggttcctcagaaaattggacatagtactacctgaggatccagctataccactatttggcatatacccaaaagatgctccaacatataacaagaacacatgtgccactatgttcatagcagtgttatttataatagccagaaactggaaagaacccatatgttcttcaacataggagtggatacaggaaatgtggtacatttacacaatggagtactactcagctattaaaaattatgggtatacttttatatttggagcaaaagttacatttttggtatatgttaaaattctgaattaatacatttcttttgtacttaactctactaaatcatc

SEQ ID NO: 1521 - DNA, 1200 bp, mus musculus
tatagaataagatgccttgtttgcacgtatatgatgacacagatcatgaagagttaagagatgtgataacactatcttctaaaatgggcaaatggaattttggcataagtttctcctttccaaactccacatataatccaatttctgatagaaaaacaattttggattctagggtctgaagatatagatcagagctcaatagaattgctattcttttttttttttggatttgtcttttttatttttaatattggtccatacacagcttttgcaatgaccgtatgttctgttacctgagaacttttccaagctactcaccacagagggcacctttcctcttattttgtctgtttctgtctcccacctctaccaattgctggggaaaaaatattttaaaggcaatcagaggactggagaggtatgtcagctggcttagtacttgttatgcaagaatgaagacctgagtttaatttccagcgcccatggaaaaatgacaagggctgattgacctctctttcatcctagcagtggggaggtggatgcaggaagatcctagggcttgctgccagccagtctagattagttggtgaacacaagaccaagaaaaactctgtcttatgggaggtgggtggtattctagagacaaaattctagcttttgctctggcctgcacctattgacatgataataacaataatgatggtgatgaaactagaaagctctagctgttttcatttttttttcttaaaggggatctaaattctgttcccagcactgcacaggctatcccacaactgaatataactacagctatgatgatctgctgccatcttcttattctatctgtacccctccctcacctagacacatggtataacacagacacacataaacatagattaaaaaactggattctaatttaccaaagttgtatatggagaacacatacttgcattgtatggtgtaattttataggagcataccaagataatctcaattgttttatcagttattattccataattgtgtgtaagacattattatcttaaattaccccatagttgtaaaactttatatctcttttgaagatgagtaagaatacattattcaaggatatatgaaaatattagaagaatccccagtaattagcctaaaatactgttttttctacacgctaaaatgtaagtaaaatgtaattat

SEQ ID NO: 1522 - DNA, 1000 bp, mus musculus
tgactaccctcagaaagatccaacaagcagccaaaagagccagatgcagatatttacacccaaccaatggacaaaagctgctgacccctgtggttaaattaggggaaagctggaagaagctgaggaggagggtaaccctgtagaaggaccagcagtctcagttaacctggaccctgaaatctctcaaacactggaccaccaactaggcagcatagatgcccccaccacatatatagctgaggtctgccaggtccgggttcagtcagagatgttgcacctaaccctcaagagactggaggtcccattgagagaagaggtctggtggggtggatggtggtgtggtgggggcattcttgtagagacaagggtggggaggaggtatgagatgtggaccactcagagggtagacagacatgggaataaaatatggagtgtaaaataaaaagattatggagagaaagtgtggagcagagactgaaagaaaggccataaagagactgccccactcgagaatccatcccatatatagttgccaaatgtggatgctattgctaatggcaggaagtgcttgctgacaggagcctaatatggctgtcttcttagagactctgctagagcctgacaaatacagaggtagatgctctcagccagcctttggattgagcacagggaccccagtggaggagttggagaaggggctaaaggaactgagggggttttcagccccacggggggagcaacagtgtcaactgaccagacaccctggagctcctggggactggaccaccaaccaaagaatacacatggagggatccagggctccagccacatatgttgtagaggatggccttgttggacatcagtgggaggaatggtccttgagcctgagggggttcaatgccccaatgtagggaagtgccaggactggtgaggcaggagtgagtaggttagttggtaggggagcaccctcatagaggcagggtgagggggtatgggatag

SEQ ID NO: 1523 - DNA, 1000 bp, mus musculus
agacagctatatcaggctccgggttcttgttggcatccaccatagtgtctggatttggtgattgtttacaaggtctccagtgaaggatcgagagaaatacccagggagctaaaggggattgaaggcccataggaggaacatcaatatgaactaaccagtaccccaaaagctccttggaactatacacatggtggaacttgtggctctagatatatatgtagtagaagatgacctagttggtcatcaatgggaggagaggcccttggtcctgtgaaggctctaggtcccagtataggggaatgctaggactaggaatggaagtgggtgggttggggagcaggaggaggtagggaggggataaaatattttcagagggtaaactaggaaaggggataacatttgaaatataaataaataaaatagctaataaaaaaggaaaaagacattaaaaaaggaattctataaagatctcagggcattggggctcatcaatggcttttacaagtcagccttttcactgtagaaggctatgcttcaggatgggtgcagatcatgtccattctcccccctccccccaggcacatacatatccatcactgctgaggtaacaatttgtgatgacttaagaacccaaattaagccccagagcatgtttctctctggagcaggaacttgaaaaccaacagtgtaaataggagttgaatggagggagcatctgtgggagacatcttggttcccagatcccactgagactagtctgcacaggtaagagtgtggactacagaagataacagcttctgggataggcaggagccacagagcttctgaggcagaccctattgccggctccagatgttcaggcaccttccctgccagagaagaggtgtccaccctaccctggagagctttgccagagcacgtgatggagccatcttggttcctggatacctctgaaactagtctgcacaggtgagagtgtggactacagaagctaacagct

SEQ ID NO: 1524 - DNA, 1000 bp, mus musculus
tgggaggctagctctctacttagtttcagtggtcagagtattctctgcaggcaagctctcttcttgcagggaagttgcccaaatatctgatgttcaaacctgcttcctggcagaagttgtgttccactcaccagaggtcttaggatcccatggggaatcctgtgagggccctttcgggtgtcaggagactctgctggcaagtcaccccggtgctagagtggaccagaagggatgggctatttctaaaactgctgccttgtgtggcctcagaggaagagcatgcacctaaccccgcagagttgttgcaccagaataggatcatcttttttcatgtcatgtaaaactctaattaatcaaatatatttttccattcttagtttgtcttttcctatatggtggacaactctatgacaacattacaatggttacaacaataaagtaattattttaaattatctatgataaactactaggacaaaagtatggaccatccagagactgcccgacccgggggtccatcccataatcagccaccaaatgcagacacttttgcatatgccagcaatattttgctgacaggaccctaatatagctgtctcctatgaggctttgccagtgcctggcaaatacagaagtggatgctcacagtcatctataggatgcaacacagagtccccaatggaggagatagagaaagtacccaaggagctgaaggggtctgcaaccctataggtgaaacaacaatatgatctaatcagtacccccagcgctcgtgtctctagctgcatatgtagcagaagatggcctaggtggccattattgggaagagaggctgcttggtctagcaaacttcatatgccccagtataggagaaggccagggccaagtagtgagagtaagtgggtaggggagcagggcagggggagggtataggggacttttgggatagcatttgaaatgtaaatgaagaacatagctaataaaaaacaatttttaaact

SEQ ID NO: 1525 - DNA, 1800 bp, mus musculus
tagattaaactttctctctcacttctttcatttttatttataattattttattagcacatgctaagtataaagttaagttatgccatatatatatatatatatatatacatatatatatatgtgtgtgtgtgtatgtgtgtgtgtgtaagagatatcatatagcaaataatataaaatacattacatgtgtgtgtaagagagagatcataatataacagatatattataaaatatattatatatatgtgtgtatatgataaacattaacatatttaaccctattgaactcttatattcccactttcacagatcttctttctattttcatttggtacattatttactttcatgtcttttcttacctatgctccctttaaagttttatttatttttactttatatatgtgaatgcttgcctgcatgcatgtatgtgcagtgtccaaggtcataaaggtttgtcagatcccctggaattggcatttcagacaaatgcaagctacctagtagaaactgaccccttgtgaaccccaggttgagaatcagcattctaattatttataactgtgcgtagcaaatgaagaatacaaacatgccatttggaaagtgaggaaaatttccgttgacctttgaaactgtttcacaatagatagatagatagatagataatccacagaaagtttgcagtgtgtgagacattggataacttaacactaaaagggacacctccatcaaatccctcctttcagggcacaggacacattgaagaagaatactcacagctggtgcaagacacagaggagaagtacaccaaggaaccaggtccttctaggcacagcggggctggcatgcatgtgaactgacagagaatgaggcagccagcacaggggttgcaaaagccaaagccagatgaggtcatacagctaaaagaattggttgcttctgaggcggcgccattttcggctccagacaacagaccaccttcctggtgagagcacaggggtctgcccggcctgagaggtttctgcctcaggctccacgggagccaccttggttccgggactcctcggagggcaggctgcacaggtgagggtgtggaatacagaggccagcagtttctgggacagtctagagccagagaccttctgaggcggcgccactttctgctccagacaaccggccacctccctggccaaagcaacacagcttctgggaaagatcctgttttgggccttcatttcagccaggaggaggtccaaacaccagataactgtgcaccttctctgaaagaggagagcttgcctgcagagactgctctctgacgactgaaactcagaggagagagctagtctcccacatctgctgatagagggtaacaaaatcaacagaggaacaatctctaaacaaagacaactataacaactaactccagagattgccagatggcgaaaggtaaacataagaatcctactacagaaaccaggaccactcaccatcatcagaatccagaaggcccacttcgcccagaccagggcatcctaacacacctgaaaaggtagacctggatttaaaagcatatctcatgatgatggtagaggacataaagaaggactttaataactcacttaaagaaatacaggagaacactgctaaagagttacaagtccttaaagaaaaacaggaaaacacaaccaaacaggtagaattccttatagaaaaacaggaaaacacatccaaacagatgatggaaatgaacaaatccatactagacctaaaaagggaagtagacacaataaagaaaa

SEQ ID NO: 1526 - DNA, 1200 bp, mus musculus
atatctaggtatatactgaaataaaactgagaaataaagttagatgtaatgacgaatacctcacaatgttattttttcttcaagcaatagtaactaatttttaaaaatttatttatttacactctatattttattcctgcccctctccaccctacaaagactgttccacctccctgtctccatgtggatatacctcctccccaccccctatcttcatgtggatgtctacaccccccaaccccatctgacctctaaaccccctggggcttccagtctcttgaatgttaggtgcatcatctcgaaatgtgcacagactagacagtcctttactatatgtgtgttaggggcctcatatcagctgattatgttgcctgtttggtggtccagtgtttgaaagatatcaagcgtacagattaattgagactgctggttctcctatagggtcgccctcctcctcagcttctttcagctttccctaatccaacaacaagggtcagctgcttctgtccattgattggatgcaaatatctgcatctgattcttttagctgcttgttgggtcttctggagtgcgaccatgctaggtccctttttatgagcactccatagcctcagtaatagtgtcagaccttgggacctttccttaagctggttcccactatgggcctatcgctggaccttcttttcctcaggctcctctccatttccatccctgcattctttcagacaggagcaattatgggtcagaggtctgactgtcagatccccaacctcccatttgataatctgtctttcagctggaggtgggctttgtaagttccctctccattctgtcaggcatttcatctaaggtccttccctttgagtcttaaaagtctcttactttctagatctctggtgcactctggagggtccccccaacctcctatcccaggaatttgcctgtttccaaagttccctgtttccatttcttctgctggccctcagatcttcagttgttttccctcatccaataccaagtcaggttctccctcttccccccaccccaagtcccatccactttcccacccactgtctgttacaatactaggggtaaatctgaatgttactgaataggtaacattcttactgaattccaagcccagggtcagctcaaggactgcctaggacattggaacactggtggaggataatctaactt

SEQ ID NO: 1527 - DNA, 1200 bp, mus musculus
atcatttggattctctgttctattttgaactcagacttttgttacatgtgtgtgtgtgtgtgtgtgtgtgtgtgtgtgtgtgtgtgtgtgtgtatttagtctcttagaatacatatatcaatgggcagtggtggcacatgcctttaatcacagcacttggcaggcagaagcaggcagatttctgagttcaaggcaagcctggtcaacagagtgagtgagttccaggacagccagggctacacagagaaaccctgtctcaaaaaagaatacatatatcaagataaccaaatacaaactataggtcaataactgcaccacagaatcttagagaataaacttgtcttttctttctttctttttatttatttttattggatattttatatattcatatttcaaatgtgatcccctttcccagttacccacaggaaaccccctatcccacaacctccccattcttctaagagggtgctaacccaccacctactactgcctccctgccaaagaattctcctacattggtgcatcgagccttcacagggccaagggtctcacctcccactgatgcctgacaaggccatcctctgctacatatgagactggagacatggattactccatgtgtactctgctttgtggttgattcgctggaagttcgggggtactggttcgtttatattggttgttcttcctatggagttgcaaacccctttagctccttcaattctttctctaattcttccactggggacaccaatggaggttggctgtgagtatctgcatctgtatttttcaggctctggcagagcctgtcaggaaacagctatgtcaggctcctgtcagaaagcacttcttggtatccgcaataacgtctgagtttggtgactgtaaatgagatggatccccaggtgggacagtctctggatggcttttccttcagactctgttccacactttgcctccttatttgtttctattttgtggaatactttgatgagtattggtacttggtcttctttgatggtgtgatagaattctgcactaaccctgttttctttttcattctaattctcaccacaattaagaatattctttgatctctaataaaatgatctatagtgaggtctacctttgggaattgccttttttgagatttattttcagttttaattatatgtttacatgtgtgagagagcatgg

SEQ ID NO: 1528 - DNA, 1000 bp, mus musculus
gttgaaagtggggtgttgaagtatcccactattattgtgtagcaggtgggatgtgtctttgagctttagtaaagtttcttttacttatgtgggtgccttcgcatttggagcatagtttttcagagatggatgcttgtagccaatctttggcttgagcaggggtccccagtgaaggagttagagaaaggactgaaggagctgaaagggtttgcaattccataggaagaacaacaagatcaaccaaaccgaccctccagatctcccaggatctaagccatcaaccaaaaagtatacatagctccagctgcatatgtagcagatgatagacttgtcaggcatcaacaggaggagaggtccttggtcctatgaaggctcggtagatgtctcagtgtagaggaattaagggtggggaggtgggagtggatgggcagagaaacaccctcatgggatagggatattccaagagggggagaactgggaaaggggataatattcgaaatgtaaataaagaaaatatccaataaaaattaaaaaaggaagaaggagaattataaaaggaaagataactgaaaactcttcaagagggagtttgagttgacaaagaaatggaaatgagatcatcaggtcaaggaggctaaggacattagtattagtcagggagggagagtgactagctgacaaaggctcaatgcagacattgagacaggcttaggaaatgtgacaagtgtgacaaaacttgaggagattgttgggctagggctcagagtaagagctggggacagaaagggaagcaacctagttgctgtggtagaatcaatagaacctttgaccctcaaggtcagatgcgatgattggggaagccaggcttactgttcatagcaaactggctttgctttaaactacttagaggtttacacagacaagagaactcagatgagtctcttgtgtctgttagatatttaacgtgtttttacctggatacctaaactccctcaggaga

SEQ ID NO: 1529 - DNA, 1000 bp, mus musculus
gaatagcaccaattgatcataaagagcttttatatattaaaaaaaaaaacctaaatgataaatttgagggggaagagaaggggtgattctaagcagagttggtaaaggggagataagatcaaaacacactcaattatttgaaaaataatatacaatgaaatgctttttatcttaagatccttatatcatctgattttgatgccaccttgaccatccatacccaagagataactactaactatttaagaaggaaatggagtgcttgaaatcattcaaagaaaatggtatttttttattatgtttctctttatttttttaaaaaaaatattattagctattttgttcatttatatttcaaatgctatccttaaaaaaaaaaaaaaaaaaaaaaaaggtaaagtgccctataccctcccccccctcccgccctgctcctcaatccacctactcccgcttcctggccctggtattcccctgtactggggcatataatcttctcaagaccaagggcctctcttcccactgatggcctactaggccatcctctgctacatatgcaacaagatacaaaattctgggggatactggttagttcatattgttgatcctcctatagggttgcagacccctttagctccttgtgtactttctctagctcctccactgggggccctgtgttccatccaatagatgactgtgagcatccacttctctatttgccaggcactggcataaacaagattcctacaggaccctgataaagctatctcttgagaaaatggctttggcagatcagttgggaataggttaggttactgctctcatcatctgagaacactcagcaagggtgattctcccaagtgtaggacctaaactatgcttctgttttgaactgatcaaaaaaaaaaaaaaatgaacttaacgtcacacaagaaacgtagttctaagccgggcttggtggcgcatgcctttaatcccagcacttggaaggcagaggcag

SEQ ID NO: 1530 - DNA, 1000 bp, mus musculus
atcctgtgttctaagtggtaaacaaataatctgcacatgtgccaagggtagttctccactccatgtgctctgccttccccgtgacgacaactcgacagatgggctgcagccaatcagggagtgacacgtcctaggcagaggataattctccttaaaagggatggggtttcaccactctctctcttgctcttgctctcttgctctcttgctctcttgctcttgctctctggctcctgaagatgtaagcaataaagctttgccgcagaagattccggtttgttgtgttcttcctggccggtcgtgagaacgcgtgtaagagtggcccttgcttctagggaggtgtgatgcccagaataagcggatgctggtgcagtggggctggagagggtggatgggtaggtgagcactctaataaaggcaaagaggaggggcagagcagatgtaggatggagggttaggggagggataatcaaccaggaagtgagatatcatttgagatgtaaatggaatgattaataaaataaaagtagaattttgatctacaaatttatttactggcttttcctggaaaccaaagtccagaattaacgtcaccttgagaagaacttctatgactgatgaagacacaactcctctccacctgacagaaaaacaaacaaacaaacaaacaaaaaatcaaaacaaaactgcatctcatgaaattgtaagtctggaagcaggatagctaagtactccacttttgctgctttaatcatgacctccctgtgaagtgatagaggctttaatgccctcttttaagtcaagggagatattttccacagcaggtactttccatttatgagaacttaacctgacagttcaaaaaagaaaagaaaaaaaaaaaccaatattttttttgttgctatttaccactaagtggaaaaaaaccaacctgtttcttattttatccaacatgaaaactaagtatgtgatttaatttagcagcacttctttcctaagc

SEQ ID NO: 1531 - DNA, 1200 bp, mus musculus
aatggacatctatgttaataatcatttcctagctattataaccaagacagcaatacttctggatgtgcaaatatctctctcatagtatataaattgcttcgagtaaattcgcaggaatggcgaaagtgttttcatggtaatactttttttaaaaaaattagatattttctttatgtatatttcaaatgttatcccctttcctggttccccctctaacactcccctattcccacctacctccccctgctcaccaacctacccactcctgcttcctggccctggaattcccctatactggggcatagacccttcacgggacctaagacctttcctcccattgatggctgactaggccatcctcttctacatatacagctagagccatgagtcctaccatgtgttttctttggttggtgctttagtcccagtgagctctggggttactggttagttcatatttttgttcctcctatggggctgcaaaccccttcagatccttgggtcctttctctacctccttcattggggaccttgtgctgaatccaatggatggctatgagcatccagttctgtatttgtcaggcactggcagagcctctcaggaaacagctatatcaggctcctgtcagccagcacttgttggcatccacaatactgtctgggttttgtggttgtatatgggatggatgcccaggtggggcagtctatgggtggtcatttttacccaatcttctctctaagtcatacacatgaaagtcatctcctattttcttccttttttaaaaaaatgttttgttttcggtttcacttttgcttgcttgctttctgttttcccatatattttgacatttattctgatcatttaggattgcaacagattctgtatatgtatttgtgtcagggggtactccactgtgtccatgcatgatgagggagtgtgaatgtgtgtgatagaggagagagagagaaagagagagagagcatatttaaggttttattgtatcagcagatgtgattatttttatactttccttattttattcctttgattcttttgtcttaatattctagataagatgtcaagcaacatattgttatgaaaaaagtggacatgttgtgcttgtatggattttagtgggaatgctttgagttttctcattatcagaatatccattaaactttgtcagatttgccctttat

SEQ ID NO: 1532 - DNA, 1400 bp, mus musculus
tctatctatctatctgaatgattcctaactctgtagtaacacgtactgtgaggcagtgagttgtgcacagatagcctggtccccatcggaacacaggccttgagtctgagtaacctggtaggaggtgacttccccctgagctctctggctcctgttgcagctacagcctctaacagctcctccacagagaggtgtgttaccatcagtcatataggcaacaccccaagctcctggtattctgtctggattccatcctcacagttacctggcaagatccaaatatactcctccccaaaattacctaacaacagccaggtaggcccagcccactataaaattggctgtttgccccctcttctctcttactctcgcttcctgcttgaaccctgtctgcattcccttcctccctccatgtggccatggccagcctctacttttctacttgtctccttctctctgcctttctacaacaaatgccttaaaaccatggaatgcctcatctcatcagatcatcaggatctgacatgctggagcaatggagcaggccttctccctaaagagccacgtgtctaatctctctcaggaagcctctcagctttcttagccaaggctgccggccaaactaagcagcccacccgagcaagccaagctctctccccacaggacccagccagagctctctcttccccctctttccctttggccccaggccagagcctttgcatgggcccaccactcctttctcagctctcctgtggcattcagagttgtctgcagtgcccaaaagtgagaacctgctagtctcggcctccgcgcaggccagaacccccaaaacctccttccagcaggtccacagggaactcagacttcctcacctctggaacggggccctgacacgtctcacagtccaaagcccatgattggccctagccctgtggcaggccggacacagggctcccattttgacccacaatgtactgcaagacaaagaaggaaatgtcagaagtcataatgaggaaggatggcaaaattgattttaaaggccataaattttatagcaaacccactcttttgaaaacacgagtaagtaagtgaagcatggaatcgtcacttatgttagctgacttcacatttgctcatttaattttccctcaaataacttttcttttccagaagacaaagctaatatgagaccatagatacctccccacagtagctatatcagaacatagtgagcagcattgagcctacaaagaggactgctagaggagtctagaaatttgaaaagtttcaacaacacatgaacaaattattgattttgaaattagagaatggccaaagaaaacaccaattcagacattgggtcttatcattagagtgtacgtacaggtgattcaggt

SEQ ID NO: 1533 - DNA, 1200 bp, mus musculus
gagactacagagagtagaagttctccccatgttcataagtggtccttagaccacttatgtcatacaattagccaatttctagctttatgtttgactttgatttggaagattataggatattctactttattaaaaagataagattataggatatcctactttattaagaaaataaaagggaataaaaagcattaattggtcaaggtcttaagtaatgcctaggccaaatttacattaataaaagtacagaaaatatgtaagcagggtcaggtgtacagataagcattgccagagatcagcaaaattactgtgatggtcatatttctattcttttgattgagcccaactggtttgtgtcctcccagacttcattaccttctgaatgttcccctggtgttcgcattgctctttttctcaatggctcaggtcataagaaatactcatcccataaagttttctaatacttttttttcagttcctcagctttcctaaaggtcatccccccacaccctcactcctctattcatcagctgtcttgcctaatcaacagtgctaactgctctgtgagaagacagcagctaattctccaaagggaaggcatctctccattgagtgcattctggtgtagcacatgttcacagagctaatcttgcctatcatagtgaattctttaggttagcaagctcataattaaaagtcttcactaatgacatggtaattgttttaatggatttccaatgaagtgtgaagttccctgctgatatgtcaacacaatatgaggcattgtgaaaggagcagcatagagcttcatagaatttttgagttagaagagaccttaaaattatcaaaggtaacctttccgtatttaaaaaaaaaaaaaaatgaaatcatccctggagctccggagaagggaagtgagttgctgaaggtcaacactctgaatggaaattgtaggtgacctgtacagcaaattgtttccatctcagtggtcattcattttgacctgctttttatttatatggtacctatatttttaaaaattgtttttatatttttcattatatcaacagaaatatttatttattctctaataaaatggtgcatatgaaaacaattttattccattagttctatgagaagattgcaaaggtgactttgaggatcaaaataaactgggctgagcatttcttggtccaatgc

SEQ ID NO: 1534 - DNA, 1000 bp, mus musculus
ataaaacagaatgaatccagagctctgtcatttgttagaaggaaaataaaatttctgacctggaagaatttctgctattactgtgattgcatagatttgatttcaaagggaagaaatactgaaaataagaaagggacacataagcagaacctccaggaagatagagagattacaggttcccctgagtcttcatctgagaagacaactcctttggcattgtgtttacaatgtaacacaatgcttctgtcaggatctgaatttagtgtatttctgtggaatcagactacaagccagactcaagtttcagtctgtaacgaaggaatgacattaactctgaaaaaattgtactacgctattaaatagctgcatgacttccctaactcaagtagacatatgcctaagatacatctgtgagaaaggttgtgaagaaccaaattattaatctcataaaatatatggtttggatctaataaagtagaaatactgaaaatagtgttatagtaataggtgtatatagaaggtttagaaagtaactaagaaattttcttgtgggctggataaaatgtagaacagtatttggtatagcccaaagaggttgaattgccttcactttcttaagacactattgaagttctttttttcttattggatattttatgtatttacctttcaaattttatcccattttcctccccatattccccctctccaattccccctcccactccttttatgaggatgctcctcctcccaccaacccactcccacctcatcccctggcattccctacactgggacattgagccttcacaggagcaaaggcctctcttcccattgatgccaacaaggccacatatgctggagcaataggtccctccatgtgtactctttggttggttgtttagtccctggagctgaagttctttaaagcataagatagagtgtttttttgtttgtttgtttgtttgtttgttttgttttttttttcatttaagcactg

SEQ ID NO: 1535 - DNA, 1600 bp, mus musculus
tttctgaacaaggttgaggagaactcaggtctgttgatataaacataaataattagagagcattcttagaacaggagtacatatcaataacaatactgtgttctaccctcctaccagtgacttcccctacaacagaaacactgctgctttgttgacagtgattaggcatattgccaagtgattttatagctctgataaaacaccaaggttataagcaacatggagaggagaagaagaagaagaagaagaagaagaagaagaagaagaagaagaagaagaagaagaagaagaagatgatgatgatgatttgtattatcattttgcagcccttcatggaactcagtgtatgatctcatggcaggatcatggaggcaggaactgaagcaaacgacacaagtaagttattttctggcatgaccctgtaggatagatttataacagttatcagtgaataaaagacacccaaggtttgcacacagatatatctgatgggggaatttcttcaattaagacttcatatttagaaattcctatagcctaaagcaagttaaaatagaagacgtgactctcacaagtcccttccggtcagcgccagcacctggtcaccttgggcacagagtaggtggacacccccagggtcccctagagtactctccatgcaattttaggaccacctgtaagtggaacacaacttctgttccaatccaatcacactggaccagagacagcattagggaagcagaaaacccagcatgaccagggtcacaaggtccttacggccaatgccagaaccgggtcacctgggcaaagagtctgtagacaaccccaaggtccctagaggacagcttctgaagcagaccccatttcgggctccagacatcggggcaccttccctgccagaggagaggtgtctgccctgcaccaggagggctttgatggagaacctgggggagccatcttggttcccagatacctaaagactagtctgcactgatgagagtatggactacagaagctaacagcttctgtgacaggcctaagcaacacagcttctgggacgggtcctgtttcagaccttcatcttccgccatgaggcatgtccaaacacaagatatctgtgcaccttccctgtaagaggagagcttgcctgcagagagtgctctgaccactgaaactcagaggagagagctagtcttgcaggtctgcagatagaggctaagagaatcatgagaggaacaatctctaaccagagacaactataacaactaactccagagattaccagatagctaaaggcaaacctaaaaatcatacttacagaaactaagaccactcaccatcatcagaatgcagcattcccacctcgctcagtcctgggcaccccaaaacaccagaaaagctagacccggacttaaaagcatatctcatgatgatggtaggggacatcaagaaggactttaataactcacttaaagaaatataggagaacactgctgaagagttacaagtccttatagaaaaacaggaagacaaaaccaaacaggtagaagtccttatagtaaaacaggaaaatatatccaaacaggtgatggaaatgaac

SEQ ID NO: 1536 - DNA, 1000 bp, mus musculus
ttggtgctaatttgcaaatgaatagagtgcatggacatccacatgggcaactttaatccttgaaatacttaaagtatttcaagctggtaggttacctccatgaaggctcaacttcagcaagggcagatggcagtaattcattgatatgaagagaagcattgagtgcatattgttggtctaattgggaaaaagttgtgcagtgagggccagcagccaaggatgggcaacttggtctatgtcttatttcaatctaagacagaggcatgtaccaagaggccatggtttgttcataataacaccatagaggggtgtttgtgcaaataaacacaaaaatgctgcatgtgttctccaggatgtgtaaaaataagtctagttagatttagtcctaagacaggtgtagccaccagccactaaaattcccaggcagaaccatggagcataagtaaattttatgccctactccagctaatatttattaaataatgagggaggaattgtagcctcccccagccttgagcaggctggtgcatacctgctctgccactgtctgctagcccacctagggtagagtcttctaatctagataggtctattgttctgccacctctggggatagatgccactacctgctgaggggctaaacctgtcttccctgaggtgatcctgaataaccaacagcttggagatgagagtgatgagagcctggcagaaaaagcaatgagagcctgggagcaggggcatgggccttcccccttatagcgcagacacttttttttaaagtgcattatttatgatttaaattttggacagcagaaggtgatggtaaaactattctctaaataagaagctaagttcagcaatgtctgaaactattcataatttatttcactatttaggattgtacatttctagggaattaccatcctttatactttattgctttaaggcaattaattgtgttatgactgattatacctctgcattgcttactgttacataa

SEQ ID NO: 1537 - DNA, 1400 bp, mus musculus
ttaaacaaaaaatccctattaattcaatggataatagaaataagtagacatctttcaaacactgtataaagtttgatagggttgtttttaaattgttttttcaattatttatatattataaatattaatatttgaatgtatacatatacacatgtaggtatactcatctccaatggatgcacatacacacacatgtatatattaatatttgctctgcagccagtgatattatctcagtagctgtaacagtacattttttaaagagaaaaaggaaagactatgcaagtatatgttttaaaagtatgtgtatatgcaataaatgttcttagtaaaataggacagaacagtcatcccgttacaatagtcccttctccaatttctcaaatgtccttaactgtgatttatgaccactttctgtatttcaaccatcctcagaaatcatctcagtttgtgtcttagtcagggtttctattactgcacaaacatcatgaccaagaagcaagttggggaggaaagggtttattcagcttacacttccatgttgctgtttatcaccaaggaagtcaggattggaactcaaacgggtcaggaagcaggagctgatgctgaggccatggagggatgttctttactggcttgcttcccctggcttgctcagcctgctctcttatagaacccaagactaccagcccagagatggtcccacccacaagaggcctttcccccttgatcactaattggaaaaatgccttacagttggatctcatggaggcatttcctcaactgaagctcctttctctgtgataactcaagctgtgtcaagctgacacacaaaaccagacagtatagttggtcttggatattttggtgtaacggtgacttatacattcatattttaaaagaattttcttattaatctttctgcattgtgttataatcctcattgatattaatcataagagatgctttaagagttctggtgaactctagacatagtcttccttatttgcatttcaggcaagggaataaatttctctctagtggtctgagtcagacactctttctaacactatcattgatggctaagcttgttgagttatgatagaaggacccaagtggtcaggagaaattcttcttttcatctctttcttctttcttcttcattctgttgttattcttgtaactttcactcctggcaaaagcactgctccttcataaccaaaacttctaggtcatcaggaaacaattccatggtaacagaagaaaaaaatgtttctctagtgagtcagtaatagtgacagtgaatgcaagtcacttttcctttccttaattttcctacaactcctggctaaggggagaagtatagtatgtcacagactcaaagttagtcatcattatgc

SEQ ID NO: 1538 - DNA, 1200 bp, mus musculus
ttaatattatttattttagatgtagaaagcaagtttgaccggcaccactttgtgcacatgctattatttatttacatcccaaatgttgactccattaccctttgagagtccctctgccatccccatcccctttgcctctgacagggtggagcctaccctggtcatcctcccaacattgacacactcaagtctctgcaggatcaggtggatcctctcccactgaggtagaaaaggctgccctctgctaaatatgtaagacagtgcatgctcttggttggtggctcagcatctcagaactcctaggggtccaaattagttgacactgttggtcttcttgtggggttcctaatcccttcagagcattcaattcttcccccaactctttcataagagtcccctacctccatccaatgtttggctgtgggcatctgcatttgtttctgtcagatgctgggtagagcccctcagaagaaaattatgctaggctcttctttgtaaacataacagtacccttaatagtgtcagggattgtgcttgaccttagaatgtgtctccagttggctggttattggatgaccattctttaagtctgtgctccatgtttgtccctgatttttttttaaagaggacaaactttgagttaaagttttgtgggtagattagtgtccttatctctccacatgggatcctatctggctacaggagttagcctctttaggttccatgtcccctctgttaggcatcttggctaaggtaacctgtattgcagtctctgggacatcctaaagatcccagcatattaaagattctcccctccttattgcctcatacatcccccttcccctgcagccacagatttccattcattctgctggacctctgggcctctccctgtctcttcacacacctgattctgcccccttattcacctccctctcccttctccattcaggttcttctttccctctgctgcccatgattattttgttactccttcaaagtgtgaatcaagcatatttatttaggccttccttgtttaacttctttgggtccgtggttatattatgggcgttccgctttatggctgatatccattcatcggtgagtttataccatgcatattcttttgagtctgcattacttcactcaggatgatattttctagttttatctatttgcctgcaatagtcacgatatcct

SEQ ID NO: 1539 - DNA, 1400 bp, mus musculus
tccttagttgtctaaagttctttgcctataataaagttctcaggagatttcaccttttatattatagtattactattggtataatcttatcatgtcttatgtgttcaacgatgatttatgatttctttgaaaacttattacaatgtattttgaatatattcattcctctcccccaacttgctcaataactctcctctcaattccttattacttctgactttattttgagatttttacttccctagccttcaagttccgttcatgtcctgcagtcagtgttgggaatggagcctgaaaacggccaattatgcttttctataccttattaatataattttgcactaagaaaatttttgtttattgcaagttttaatggtttgctctaataacattttctattacttgtgcattgagccttcacaggaccaagggcctctcttcccattgatgtccaacaaggccatcctctgctacatatgcagctggagtcatgggtcccatgggtactctttggatggtggtttaatcccttggagctctggggattactggtgggttcatatcgttgttcctcctatgtgactgcaaactccttcagctccttcagtcctttctctagcttctccattgggaaccctgagctcagtccaatagtaggctgtgagcatccacctctgtatttgtcaggcactggcagaacatttcaggagacagttatatcaggatcctatcaacatgcacttgttggcatccacaatagtgtctaggtttgttgactgtatatgggatggatctttatgtggggcagtttctgtatggcctttccttcaggctttgctccaatgtgtattttgttcccccttctaagaaggatggaagtatacacggttatccattagacagagcacaggatccccaatgaaggagatagagaaagtacccaaagaactgaaggggtttgcagccccctaggatgaacaacaatatgaaataaccagtaaccgtagaactccctgggactaaaccaccaatcaaagaaaacacatggagagactcatggctctagctgcatatgtagctgaggatggcctagtcggtcatcaatgggaggagaggcccttggtactgtgaaggttctatgccccagcataggggaatgcttgggccagaaagtgggagtgggtaggttggggaacaaggtgagggggaagaggatacaggattttttaaggggaaactaggaaaggggataacatttgaaatgtaagtgaagaaaatatctaatttaaaataaaaataattaaaaatatattcttttaagctcaaaatatttacatttctttaacttctccttatatgcactactgtcagcttggtcatgctgtggctgcctctttctt

SEQ ID NO: 1540 - DNA, 1400 bp, mus musculus
caaaacagccagcctagccactgctagctgcattgggaagggcgagctgtgctcaggaagttgccacagttagaattgctcctgacagaggaggcaaaaaggcaaggtctactacatagaccacaggaactgcaccatcagctggattgatgctcgggacaaaccaagaataattctgcattcctgcatccagttccaagttgtgtcaggacagcagtcagtcctcaagctgctgtgtgggaccaagatattaaagtcctcccctaaccccagacggtagagtttgcttagagcacagtccatccaaaggttcataagacaggagctatggacagagatgttgaaagatccatggccgtggtgttcataaacttgacactatactgcttgaaggaagataaacaatcaactgcctctccaaaactatgcctacctgcttgttatcatgtttcctgccatgataatagtccaaacctctgacctaccaaaggcttcagcacagctccaggagagccagaagaaaaacacacccaacggagcaccaaggccgggcagtgaatgccactctgatgaatgaatatgtgatggagagatgtgaaatatggagtatgtgatagggagatgggagggaaagacaaactgagtggatcgtgcactgtggagaggcaagggcagtgacaagcagtgggtctgaggagtctgtgcaatcatttgaggtcatggtgatgtcctggctcaggctgccacgaaaggctagttctgggtcctcagccctactatatgtagcctagtttctgtgctgatgtctgtggcccctgttgccactgaaggccatctggaagtcaatggtcccaggtgctgcctaagaccatgttgatggctggggacatattaaagcttatggccaaactgatttgagtggcctgtgctgccacctgagatcaagctcatgctctggcctcagctgatgctgagggccatgtctgggttcacggagtctgtgtctacatcagaggtctgtattaccactaaagggagcacacgttgtccttggtccctgctgctgccaaaggccatattgatttccaagcacagtgctgagctgtccccacccctcaccagctgtagcactcaggaacaaaaggcaaaaaccttcactgggcagcatagtagagctggcccttgtgacagccttgagtttggaagagctgaccagctcatcctccacccaggcccagctctggggctttgaattggccaacaccaataactacctgatctgtgaactacagaagcatgccaaaaaccagtcctgctgatcacagttacaggatctccatgacacaggaaaatagcagtatatctgaggagagccttgctaaatatccagtattgatagt

SEQ ID NO: 1541 - DNA, 1200 bp, mus musculus
ttggagctgagatgaaaggatgaaccatgtagagactgccttatccagggatccaccccataatcagcatccaaacgctgacaccattgcatacactaggaagattttatcgaaaggacccagatgtagctgtctcttgtgagactatgccggggcctagcaaacacagaagtggatgcccacagtcagctaatggatggatcacagggctcccaatggaggagctagagaaagtacccaaggagctaaagggatctgcaaccctataggtggatcaacattatgaactaaccagtaccccggagctcttgactctagctgcatatgtatcaaaggatggcctagtaggccatcaccggaaagagaggcccattggacacacaaactttatatgccccagaacaggggaacgccagggccaaaaagggggagtgggcgggtaggggagtgggggtgggtgggtatgggggacttatggtacagcattggaaatgtaaatgagctaaatacctaataaaaaatggaaagaaaaaaaaaaaaaagaaaggtcctgagcctagtttcaagcaatgattttttgagggtaagaaagacctatgtagcatgatacacatctgattgggcagtcattatggtctttagcttaattggcttgtgctaggagctaaaccatgaacctaattcctgttttcctactgattggaagtgaagtgtcaagggcatgcttactggagcctggcgatgcagatatgttggagaataaactggaaacgggtgctagccacaggtttgttgggtgctaacatggaaactggtactagacacagggcttggtaaaagcttgtgctatctactggcctgttagttaaattaggtataatcttaggtcatgttttccaagatggagtctgaactcaagatctggtctctcaaaggcataatattattgttgttgccaatttgcaactataattttgctactgttatgaattgtaatgtaaatttttgtgtttcctaatggtctttgtagatcactgtgaaaggattatttgacacagaaaagggttgtgaccctccagttgagaaacactacaatagaacaaaaagtaaacatacctaagagaagcagactgagaagtcatcaaactgaggtttgaaatcaataaaatagaaacaaagaaaaaatacaaataatcaaag

SEQ ID NO: 1542 - DNA, 1000 bp, mus musculus
agaatgccctgggcctaaaccacccaccatagagtacacatggagagacccatggctccaggtgtatatttagcagagaacagccttctgtgacatcaatgagaggaaaggcccttggtcccatgaaggctcaatgctcctgtgtaatggaatgccaagacagggaagtgggagtgggtagattagtgaggggggggggaggatatggaacagggggttttcagagggaaatcaagggaagaagggaagggaataatatttgaaatgtaaacaaagaaattgtctaataaaaatattttttaaaaaactgagaaaaaaagcctattgatctgagaaaactgattctgaatctaaccactttactgaaatggtttctgtgaggtttctggttgcatttttgatatttcttatatataatatctttccgtctaaaatagtgatgacttaccttcttttctaagttgtattcatgtaatagtctcttgttttacagctgcagctactgtttttggaattgtttttgaaaacttttggactaaagagagccctgtctcattgctggacactaatgggactgattccagttttccttctttcagataatattggctgtaggtttgacacatagctttcatatgctgagatatgattccctcattcctaggctctaggacttgtttcataaaggtgtgtagattaaaattcctatacttacacatacatacatacacacatatatacatacatacatatgtacaaacacatgcatatttttaagtattataaagtaaaattctgtgtataagtaaccaaaaatatgcttaagcaaatttattcatttacatttttattatgctaaaagtaattttagagtttatcacatgaataaacaaaaatgtctaagtagtttaagtaacagtttactttctcctttacctggattgacctgtaaagaaataaacaataagaattaaattataaagttaagaaaaactgagcc

SEQ ID NO: 1543 - DNA, 1000 bp, mus musculus
tcttcatgacttagtattattgtttcatgatattgggtattaagaaacaatatgcagccaaccatcagactgagcacagtatgttaatggaggagttaagggaaggactgaaggagctgaaggggtttgaaaccccataggaagaacaacaatatgaaccaaccagataccccagagctccctgggactaaaccaacagcaaaagagtacacatggaaggatccatggctccagctgtatatgtagcataggatgatcttatgtggcatcaatgggaaggaggtccttggtcctgtgaaggttcaatgtccaagaataagggaggtgggagtggataggttggttagcaactaatagaagcaggagggaggaagatgggataggtggtttgctgaggggaaactggaaaggggaaaaacgtttgaaatgtaaataaataaaataaccaataaaaaagaaacagaatatgcagtgatttgaaaatttgtaggatttttaccattgtacaagataataatacaatatgcagattaaattccctgtaatatcacattcatcattcatgcaataatgcaataactgtaatagtttgataatattgaaggaaaaatagaactctgtgacatatatacatatacatatacacatacatacatgcatacatacacccatttatatatatatatatatatatatatatatatatatatatatatatatatatataagtttgaaatttaaataggctccagttgttggtttgatggcttagttctgtttggtagccttatggaaattttgtataccacagctttgttggaaagtctgtgtcactgaagaagacatcgaggttttatagcctgaccatatgtcttgctctttctctgcttcgttgagcttttgtatcataagatgaggaagctttcttccactgtctctatgttcttccctgactgtatatctctgccacattagtggaatctatccttctataactcta

SEQ ID NO: 1544 - DNA, 1200 bp, mus musculus
ttaaataaataataaaaaagaaattttgaagcaacttctagaatttttttttaaattttgtaattatatttaggtacagaaaacttagtgtacatttaacccaatttagtggcgaggtctttagcctttgctttttccagcttggcaatgagagtcacagacttaggacccagaacgttgcctccccagtggcgatggatctcatcatatctgtcattataattggtcctaatagcttccaccagcttagccagagcacccttgtcttccgagttaacctgtgtgaaggcaacagtggtgcatgacttcctgtggaccaggcatcccagcctggcctttccttgatgatgcagtagggcacccccatctttcgacgcaggcaggaaaaccaccaggtcaatggggtctacgtcatgggtagtcaccaccagctgagccttcttgttctccatgaaggtggtgacttaattgactcctgctaggaggacaggtggtctcatagttgggacgtcgcctttgccagcagctttcttctcagcaaggactagtagcctttgcttcttctcttgcttggtctctggcctgtacttgtgggaaagcttaagcagctgaatagctgtctgcctgtccagcgcctgggtgaactggttaatggcaggagtttactttgagccgcttatagaggatggctctttgccgctgcagcctgatgtagcggggccatttgaggaagcacattaaatctcttttgggctggatgtcctgtccaatgcggaagttcttgggccttttctcaaacagagggttgaccactttcttggcctcctgcttcttgacgacggctggggccagggccaccttcttccccttggccttctatcctttgggcaccttgctcggctgctggagagatggaaattttaatagatttaatttcttctcagaatatagatttggaggaactgagttattgatgattaataaaaataggaatttttaaatctgaaattctttaataaaataatttttgcaattaatcataactgtcaattacaattaaaagaatccagttcaatatcaactatgtatctacagacaacagataccaaagttcatgattaaatatgaaaaaatcaaaatgattaataattattattttgaatatatataatgtttgcttccttggacattttgctttct

SEQ ID NO: 1545 - DNA, 1000 bp, mus musculus
agatccatgtcttgcttttctggtgtggtggtgtatccaggacttgctatggtaggagaatttggttctgatgatgccaagtaacctccgtttctgttgctttttttcttatgcttgcctcctgccatctgattatatcaagggcttgccgccttcaatatatctgattggagcctgtccttcctataatcccagttgatttagggctcctcagaatacagctttctctgtgatcctttgattgcaggctcctgggaacctgaaattctgggtgtgtcagagttcttgtcaatcaagcttcctctgagaccctgaaatcctggtgtgaccaagctcctgttatcctctatcctgtaatcctatgatcctaggtgcgttacagtgtctggaagtggtgtctcctttgaggactgtggagctgtctggtctctttgaaaccaatgtaaaccagtactgattagaaggaaccagagtctctggccaggcagggcttccgtgtccttgctcctgctgtcacaggcctgtcacacttggtttggaacagatgttgtgttccactgatcctaagatcttgtggagagtcctctgcagaccgtggggttgtctgtcaacttccgccaaagtgacccagtgctggagctgactggaagggacttgtgtcccagatcaggcaggttttctgatcccctgctgctgactcaggtcttgtgcgattggattggaaccgatgttgtgtttcactcaccagtgatccaaagatggcctggagagtccagtgggagaccttggaggtgtctgcgcacagggtgactcggagctggtgcctaccagaagcagatactttttataaatagaatattttaaatattatttagggaaaaggaaaaaagaacacaggacctactcagtgtaaattatttaaattagatgttgctgtatcacaatattcaacactagaaaaaataaagcacaggttgactttgaggccattgcataacat

SEQ ID NO: 1546 - DNA, 1400 bp, mus musculus
ttctaaaaatggtacaaaaaggagataaaaaatgactgggaaaataggaggaaataccttggcaatgttttgagagataactaacttgcaggttatgtgaaatttccagaacataatacaatcttacttgactctttctcagtataacaatgtgttggagaattatagagcgattaagagaaagaacaattgaaagaaccagatggagggtggtgctgaagagtcagacattctcatgttggaaaaccaggacatcctagaaggcctcattaaatggagaagatgggactatgaacttagatgtggagcattttaagtttagtaatcaatttacttaaaataaatataatatataagagaatgtatcaggtacacagctagtgtatgaacatattgcatagactgtgtattagtcaaggttttctagggtaacagaacttatagaatgatttcccttatatgtataggaaggaggatttattagaatgacttaaaggctgtggtctggctaacgcaataatcgttgcacatttgaaaaaaaaaaatccaggagtttttccagatcatgaggttagaaggaactctaggatttaatatactttctcccactgactccagacaaatcagtccagttaggatagcaggatgcataagcaagcaacagaatcaaggaaattccctgcatcaatttttgaggaacctgcttgaaaccaagctgtacacattctacttatgtgcagtgcagtggtttggataggaggcctatgtccagccctcgtgttctctttggttggtagttcagtttctgggaggccccaactgttggttttttttttttttttttttttggttttttgagtcagggtttctctgtgtagccctggctgtcctggaactcactcggtagaccaggctggcctcgaactcagaaatcctcctgcctctgcctcccaagtgctgggattaaaggaatgcgcctcttgatcttcttatggagaccctatcccctctgagttacacaatccttcccccaattcttccacaagactttcatctaatgtttggctgttggtctctgcatatgtttcattcagttgctggactagagcctataaggggacaagcataattatgtacatttaagagataaaattaaacctcagaaataggagttaaataacttgttcaaatttgtgaaccatttactaagcggatgagtttaaattgtcatttatattaactcacaaatatcttgttacaatatgtatttgcaggtgtttgctacttacaaattatagggaattatatattttctacttttacaaaacttatttgttcatatttcaggagttaaaggctaaatgaagaatcatcataaagagactatatttgtctttcaa

SEQ ID NO: 1547 - DNA, 1200 bp, mus musculus
tcaacttgtcttcagagaagatcatttaccctaaagcttcttggttgcatcttatacccttcttctcatctgcaggaaaattggattacagatcttcagctttataataaggttcgcatctctttccaaagaatgatttttaatcattgccacccttccacaaaatgtatgcaggaatgtgtcccagggattagtcttacattttcattggtaccattgatcagagctaagaatcctatttatttaagagttgtcacatgcttgagaattttgacttaagacagagaagaataataaaaaaactaaactagggcacaaggtatgtataggagatttggagaatagaagtatgtgttgaatcaaaaatgcagcagattaagagctgtaaaggaacattgaatcattatttttccatatttaaaataaggaaaaaacaaattattttaaaatgaatatgtagcaaaaataaaatcaaatctgaaattcttcaaagttgttgctactgtgaacaaattatgaaaaaaatcatggcagatttacttgtttttttaattaggtatttatttcatttacatttccaatgctatcccaaaagttccccacaccctcccccacccactcacccacccacccactcccactttttggccctggtgttcccctgtactgaggcatataaagtttgcatgaccaatgggcctctctttccactgatggccgactaggctatcttctgatatatatgcagctagagacaggagctccgggggtactggttagttcataatgttgttccacctatagggttgcagatccccccagctccttgggtactttctctagctcctccactgggggccctgtgatccatccagtaggtgactgtgagcatccacttctgtgtttgctaggccccagcatagtctcattattaaatccttctagattttttttttacattgtgtatctctatatactgttgcgtaattctttgttgaaactaaaatgtatgaaattttaagtaaagtaagcaagacaccaaaatactctccagtaatgtttgaagcctattatggaaatgtagacgtagggtttaatagagtgagggaagcagaggagggagagagaaggagggagagagagagagagagagagagagagagagagagagagagagatatggatggaaggagggaagca

SEQ ID NO: 1548 - DNA, 1000 bp, mus musculus
cacatattccctccctcctccatctgctcaccaatctacccactcctgcttcctggacttacactggcccataaagccttcacaggaccaaaggcctctcctccctttgatgaccaactaggccatcctctactacatatgcagctggagtcatgagtcccaccatggttggtggtttagtttctggcagctttgggagtactggttcgttaatatttttgttcctcctatggggctgcaaacccctgtagctccttgggatctttctctacctccttcattggggaccatgcactcagtccaatggtaggcttagagcatccacttctgtatttgtcaggtactggcagagcctctctggagacagctataacaggctttggtcagcaagctcttgttggaatacacaatagtgtctaggtttggtgcttgtatatgggatggatcccaaggaggggcagtctttgaatggtctttccatcaatctgtgctccacactttgtctctgtaactccttccatgggtgttttgctcccccttctaagaaggatggaagtatgcacactttgatattccttcttgagtttcatggggtttgtgaattgtttctttggtattctgaacttctgggctaagatctacttatcattgagtgcacatcatatgtgttcttttgtgattgggttacctcactcgggataatatttttgagttccatccatttatctaataatttcatgagttcattgttttaatagctgagaagtactttattgtgcaaatgtaccacattttctgtatccattcttatgttgagggatatctgggttctgtccagctcctggctattataataaggctgaacatagtggaacatggttccttgttacatgttggaacatcttctgagtatatgcccaggagtggtattagtaggtcctcaggtcttatctccaattctgaggaaccgccaaattgatttccagagtggttgtaccag

SEQ ID NO: 1549 - DNA, 1000 bp, mus musculus
atgaatttcagtgggcagaaaattagatatagggtagttcgaggaatgagcttgatattaagtacatttggaatctagtttcagtactaaactacatggaacatactatgcatagaagagtttcttagttgagacttctaaacaaaatggaatcaaaaggcaggaggggtgatttgaattcaggaaacaacatatgacaggaaaaggttacttcccagaaatatagtctgtcacaccctaaactcaggggaaaaaagcctttttgtggagtttacactaaactccagtgtaaaaaaaattataggagctgatcattaatgagcatatgtcactggcaaatatccatctgattcataaaacttattttatattattttattttactgaatgttttatttatttacatttcaaatgttatcccctttccttgtttcccctctggaaacaccctatcccatcctctcccctcctccttctatgagggtgcttcccccaccccccactcctgcctcaccaccctagaattcccctacaagcctaccaaggaccaaggacctctccttcccttgatgttctacaaggccatcctctgctatatatgcagctggagccatggatccctccatgtgtactgtttggttggtgctttagttcctgggagctctgggagttggggggggggtgtctggttggttgatattgttgttcttcctatggggttgaaaatcccttcagctccttcagtctttttgttaactcctccattaaggaccccatgcttattccaatggatggctgtgagcatctgccgctgtatttgacaggctctgccagaggctctcaaatgactcttatcaggctcttatcagaaagcacttcgtggcatccacaagtgtggctgagtttggtgtctggatatggaatggatccccaggtggggcagtctctagaaggtcattccttcagtctctgctccacactttgtctctgtaactccttc

SEQ ID NO: 1550 - DNA, 1400 bp, mus musculus
aacatggcctgcaaagccactgctatagaaaaattagtacattataagactgtccacttataagtgtttgtatctaggacaatgttctaatatatcttatccattgtgacttaagtatttaaatttactgtgctataattatgaagaattaagattttacctcaaatgttacaatttttaaaaaaatgaaaatttagttaattccattaaacttcttaaaataagaaaaagaattgcctatcatatggtcaactaaagacatatttgtgtatggtttataattgtgaggtgagttgtccataacattactagtgacaatagtttaaattattaacaagttttagagcatgaaaacttgttttactataaaggcaaggaatttcatatttaatatagatataaatgtctatatacttcattaagtcatatacatataagttaaaaagtaatgcaattactttatacaaacacacacacacacacacacacacacacacacacacacacaccagaggtgtgcctggtctgacctcagtggtagaagacacttctaaccctccaaagacttgatgccccagggagtgagggggtctggtggggaagggcatcctcttgaagacaggagggggaagaatgtgatgaagaaaagtagaaaggtgcctgggagggggcaatgactgaattgtaaaacaataaaattagcaataaaaagtaaaaaaaaaataaataaataaataaaaaggttaaagcatatacatatatgcatatatattataaacagatatacacttttacaaggagatgctattattcatttctgtatacttttatgatggtggaaaggatatgtgttggtaatcttaataagtttattttatcaatattttaatctggcaacagattgaagcacaatattagaaaaccttaaattgtacaaaatacattgccaatagtcagtttaatgtagcattacaatattggacttgtctctaggcacctgaatttacctatgttaagagcaatagagtgtgcctgtatctgcacatgtgtatgtaggtgtcgagaaatctcaaaagggatggtgttagtagtagtggataaattggtgaggagtagtcaaggtatcatcgcaagtctcaatgtgtgtcataatatttgtggtagatacaaaatgtgtctttaaaatacaaagagacagctttgctattactgccttacaaaaagtaatggaactcaatgatagcccagatggttcaggaagctgttaaagttttaatggaattcccatgtgtgaacatgtgtgtctctgaatctacatgtggtccccatgatgtttttttttttatgtcattttatttcatcttttaaaacaattctttagttatctgattgttttctaa

SEQ ID NO: 1551 - DNA, 1400 bp, mus musculus
cttccccttcttccccttcttccccttcttccccttcttccccttcttccccttcttccccctccccctccccctccccctccccctcccctcccctccctccctcccctcccctccttttcctttccctttccttcccttcccttcccttcccttcccttcccttcccttcccttcccttcccttcccttcccttcccttcccttcccttccctttccttcccttcccttccctttccttctctttccttttctttcctttccttttttcttttttggatattttctttatttacatttcaaatgttattccatttctctacctcttagaaacaccctatcacacacacacacccctgttcctctgacccacacaccctctccctcctcccaagcctccattcccctatactggggtatctatcaagccttcataggaccaaggacctctctttccattgatgcatgtatgtcacccaacttccttattgtcttctgtataaaaagtttgatgctcgatttgacaaaatacattcagattctacacaacctctcctgtgtccatctgtctgtcattcatcccatgttttgcccacccgcgactagagacctgttccacgcagacaaaggggccaagagggtctgcggcaaatatcaacctaaattaaactctaaaagacaaagttagcaacaattcaatatttctgttattaaaactaaatttatgaatcaaaccaataactagaagttcatttcccctgtttataaaaattttcagtttcttcatattgtgacatttgtaaagtttgaaatatctaaaatttctatttaaatattgttacgatcactttgcataaagagggacctttgcaagcagaatagctactctttgctccgtgtgttttaaaaacatattttgctatattttcctgtcacttatccaagtctctgatagtttgctattaatacaggtagaaatgttgtacatagtctttgcttttataatcatttctgagacagaattatgtcatttactgtttgaaacactaataaaaattatcaagatatgtgttgagtttgaacagccttcaagttcttgtcaatgatgaatcttttgttatttcttttattttatcttacattggttaagttaaactagctacttttgtaacattcaaaaattataaattctgacacatttccatttttttcaggtcagttcccttttaaggatagatatgtacaaaaacattgaatgctccttaaggtttctatagcattgtaagatattcagactactatttttttcatggggagtctttgtattgctatgttctttgcacagaatctttcagataaccatcctatatcaattaatacttatctatacatatgtcttc

SEQ ID NO: 1552 - DNA, 1200 bp, mus musculus
agaggaaaagcatttacttggtagataaacttgaacttctcagagccttaatagcacttttggaaaacggcatattataaaccattaggacaagtaatgctaggggaaacagtttaaagggtagcaatgagaaggacagcctaggctttattcaagaaaggtattgtaggacagtgaaaggcagcctggttctggtggagcacaggctggaaaccctgatgaccctaaggaacagatggcagtttgccatgatcctgacacagggtcgttgccctccatagatctgtggccaacagtcatgtaagggcaatgccgtaagcccctccacaagtaaaggatgtgaccacaggtcatgtagcctcaaggcagatctccattctaatgatatctaaaagcctggcttagccagacactcctccatgcaaaaggtatttaactttaagcccaccctgagaaactgggtatggttttattaatctaccttctgccatgacaataaatgtcttaaaaccatagactgcctcttttcaacaggatccaccatggggagcaatggaagaggtcttcacctaaagagctggatacctattctcctgctttcacaaggccggtaccaaccaagccactcttcaaacaagccaagaactctctcttcactgctggacccaacacaagctctcctttcttttctcctttgccccagagctagatcctgttcgcaggtccccactccattctcagcccttctgcagcatccagtggtgcctgggtaaccaagatcctgaaagcaagatggccctggcctctgggcaggttggggaccctcagccagttcaagctgtccctggaacctcagactgcactccctcacccccaaagctgtgtcccgcagcttcccatagcctgcccggtgctgcagtggggtaagcacagtccaactcccaagtctacctcctggagtggcccaagccaagtgacagagcagattctggacaccacaagccctacaaagtatgactggaaaggggccagtagccaattgtctgcttacaggtgggaagttataggacagaaaagaggaagaaggaagggaactaaaacatttcctgtttggatatgttgctggctatttctaggcgtagctttggaatcaagatgagaggtgagctgaaaaatgtcaggtgataataatcaacccca

SEQ ID NO: 1553 - DNA, 1000 bp, mus musculus
aagaaacaggcaacctccggaggtaggaggttggggaaccttctagaatataccagagtcctgggagaagagagactcacaggactcagagggaaggaccttagataaaatgcccaacagtgaggagaggaaacttgttgtgtctcctaccagtagaaaaacagggcatcaagtggaaggatggggttgcagtcccagtcaaaattgctgacccagaattgttcctgtttaaaagaactggagggaaaaaatggagaagaaactgagggaaaggaggtccagtgaccaacccaaatcgggatcaagctcaaggggaacatccaaggcttgacattttactgatgcatacagacaggagcctagtatagctgccctctgagaggcccagcaagcagctgaaagagccaactgcagatacttacaaccaaaaatgaactaagtcagggacccctgtggttgaattatggaaaggctggaagaagatgaggaggaggttgaccccataagaagaccagcaatctcagttaacctgcacccccgtgatctctcagacactgagccaccaaccaggaagaatacactagctgatttgaggctccgacacacatacagcacaggaccacctgctcagtgagaaaagaagcatcttgccatcgagagacttgaggcctgtctgagtatgtactgggaggggaatagagactgataataataataataacaacaacaacaacaataataataatacacagtgtagtggactcgagggcagggacatgggagtaggtgggtgggaggaggaacatcctcataaaagcacggtgagagaggatatgaaagggtatttcttggacagagggaaaccaggaaaggagataacatttgaaatgtaaataaagaaaatatccaataactcaaactcataataataataataataataataataataataaattaaaaatatgaagcaggcatgtgttaaagtaaaaaaagcaaa

SEQ ID NO: 1554 - DNA, 1000 bp, mus musculus
ttgtatttttcaacaggtgaattatgaaatttgtaaataagaggatggatttggaaacatccatcatgaatatggtttcccagaacctaaaagacaagcatcacattttctttattgtatgtgttgtcctagttaggattattattgctgtgcaaaaacacaatgaccaaaaccaagttggaattaaagggataggattttcttacacgtccaggtaacagttgttcatggagaaaagacaggacagaaacttggaggcaggagctgatgcagaagccatggaggggtgatgaatatgggcttgctccacatggcctgctcagcctgctttctcatagaaaccagacctacaaggacagggatggtactacccacaatgggctgtaccttaatcactaatagaggagatgctcaatagactacttacaaacaaatctttttttcttaatatttattttaataactttatacagtccagtcattatccccttccatggctgccctccaacagttcctcaccccattcctcctatctccagtctctaagagggtgttcccactccctcttcccagcttccccactatctccaaccccaccaagcttccctactccctggtgcctcacagttcatggctcttcagggttaggggcatcttctctcattgaggccagaccaggtacatatatgtcaggggcttcagaccagctagtataactgcctgaatggtggctcagtgtctgagagatctcaggggtctgggctagttaagattgctcatcttcctcaacttctttcagaccttccctaattcaaccacaggtgtccctgacattagttcattggttgggtgttaagtatctatatctgtctcgatcagctgcatcttgggcctctcagagtacagcgatgctagctaggctcctgcctataagcacaccatagcacatcagtaataatgtcaggtcttgcagcttccccttgatatggatcccaaagct

SEQ ID NO: 1555 - DNA, 1200 bp, mus musculus
aaacaggaggttattctgtaacatcccttacaatattctataagcatggaaattgggtcctacaaccaggacacaaagaaccaacctataacaggaggtaaggcatcccaagtgtaaacatctttcatattcagcattaaaatatttgaattgatacaatgaaagggtcttcatttcacctagcagtaacaatgactgtgcctacattatcctcaacttaccagagagatcaacttttctctccttaagtctaatttctgtagttcttgtatgttgatagcatttaacggtggttttcatgttcttgaaagcatgtttgttccctagtacaccttatgttgaaattcctttcatatttcctcttatttgtattaattccttaagaatttgctcaatgactgtattttgatcctattctatattagtctttgatgtgtcctctctatcattcagacaatttgatgtcatctgtgtgtttgtgcatgtgttttactggatattttctgaatttacatttcaaatgttatcctctttcctggtttccaaccagaaaacccctatcccattcccccttcccctacttctatgagggtgttccctggcccacccttgcacccacccactcctaactccgcgcactggcattcccctacaatggggcatcaagtcttcataggaccaagggcctctcctctccttgatgcccaacaatactatcctctgcaacataggctgctggagcaatgggtgcttccatgtgtattctttggttggtggtttagtccctacaagctctgggagtccggttggttgatattgttgttcttcctatatggttgcaaaccccttcagctctttcagtcctctctctagcacctccattggggaccctgtgttcactccaatggttggctgaaagcgtccacatctgtatttgtcaggctctggcagagcctctcaagaaacaactatatcaggatcctatctgtaagcacttcttggtatctacaatagtgtcatggttttgtgagtgtatgtgggatggatccccaggtggggcagtcactggatgtcctttccttcagtgataagtagatattagccccaaaacttagaatatccaagttacaatttgcaaaacacatgaaactcaagaaaagtaggtcttctttcttcttgagcttcatgtcatctgtgaat

SEQ ID NO: 1556 - DNA, 1000 bp, mus musculus
gtgctgttaggctaagcacttttaaagtccccatgagaccaccaggagttctaaagaaagtggggtttccactgaacatagggaacctaggaggaaggaagaccaggtgtggatgcttcagttctgtataaggggggaacaggacaatctcgggaggtggaaggagggggaacctgggagagagagagaagggggggggaaggagacaggatcagtactgtggggggagggagggagagaggtatagagggtcaggaaatctcatataaaaatatgtagcagtggagggtgaggaactaggggtagctactagagggtcccagaggccagggaagtgagaggcccccagaaacaaccacgatgacttttagaggagatagaacttgtagggactacctccagtagagaggcacagcccccaagtgaaggattgggccacccacccatctcaaagtgtttaacccagaaatgttcctatccaaaggaagaacagggtcaaaaaatggaacaaattgaagcaagggccgtctagagaccataccacctggtgatccatcctgtatgcagacaccaaaccctgacactgttgctgttgccaagaggtgcttactgacaggaaccttgtatggctgttccctgggaggttctgctagcacctgaccaatgcagatgtggacgctcacagcctcccatcagactgagctcagggactccagagagggagctggtggaaggactggagaaacagaagaattgcaaccccataggaagaagaatgttggctggccagaccacccactgctcccagggactggaccaccaaccaaggagtgtgcagggagggatccatggcctcagatacttgtgtagcagaggatgaccttgtctgacatcagtgggagggaggcccatggtcctgtggaggtttgatgccacagtgtaaggggatgatggagtggtagagggttcggtagggagcaccctcataaaagaaaggggg

SEQ ID NO: 1557 - DNA, 1000 bp, mus musculus
atccttcacaggaccaagggtctttcctctgatttatgtcccaaggccgtcctctgctacatatgtgactggagccatgggtccctccatgtctactctttggtaggtggtttattccctgggagctctgggagtactggttggctcatatcattgttcctactacggcgctgcaaaccccttcagctccttgggtcctttctctagctcttccattgaggaccctgtgctcagtccaatggtaagctgcagtgatccatttctgtatttgtcaggcactggcagagtctctgaggagatagctatattaggatcctatcagcaagaacttgttggcatccacaatagtgtctgggttggtaactgtattgactgaggagtcaatattcaattctgttgggcaaaaggaaattctcgacagtatttaactcaaatgctgcaagtcaagttgtatatactaatgaaaaaaaaaatgtgttcgaatgtatgagttactagggagtccattgtaaactatgtcccacgtactttgatcactctgggctcccagcctatcttctgtgctctggaatgatgcgctggtgtatctgcagcttgctgatctatttctgctgtgttcagctggctgctaacggtcctccacagaatgtaagaatagcacttaacaggatgaggggaaaagagagagttgctctttcttcttagcttcctgttcctgcttttgcttcccactgctcacagcattaccacagtgacactcttcacctggcagtggcatttcatctcaggagcagcagtggctgatttcagtttgcacttttcccaacacttttcagcatcaagcttgtggcactcccaagcttcaactgagtgaacagttactcctcctccagagtctaggcttcagctcctgcagacttcccttcatggtgattccagacagtgaatgtccaagcctcaagggggaccaacttttaatagttaccactagttcattcct

SEQ ID NO: 1558 - DNA, 1000 bp, mus musculus
aggagggaaactaagtctcctatgcaattgtcgaggaaccacaataatgtccaccatggcacaataactgtaaaggtgcaactatcgcatacataccgtgatggttaccaatagttgtctaattgatataaggcctgatcagcagtgacgaaaatcagacctggtactgaaacctggccaactacacaggattagtgaagtcagaaccccccacccccctgtggagagcccagccacgagcaatcacgtgtgtgttgtgagcaatcaccattataagatggtgctggcttccactgagcctaactagtaaacaagccttatgcgcaagtgcaagagtgaactcatgcctagtcactgcccatcttttttttttttaaattgggtattttcctcgtttacattttcaatgctatcccaaaggtcccccatacccaacccccccaatcccttacccccccactccccctttttggccctggcattcccctgtactggggcatataaagtttgcaagtccaatgggcctctctttgcagtgatggccgagtaggccatcttttgatacatatgcagctagagacaagagctccggggtacttcttagttcatattgttgttccacctatagggttgcagttccctttagctccttgggtaattcactgcccatcttgcggcgtagtaatggggtgatgggcgagcaatgaatcaggagctgtcacgccacatcaggtgctgaaacgtcacgctgcgggctatataagcagcgccattttcctggttcggggtcttccctcctgataagaaagcaataaaagcgttgctgcagaagattccggttgttctgagtgtgttcttgccggtggggaaaaaagctcgggatacccccccctttttttttcttttttttttttggtctctttgagacagggtttttctgtatagccctggctgtcctggaactccctctataaaccagactggccttgaactcggaaat

SEQ ID NO: 1559 - DNA, 1000 bp, mus musculus
actccatattttatttccccaccccacctaccctccaactcttgtacatcccataccttctccacacacccttttccccatgtggatatccccaccccccactctacctctaagctccctggggcctccagtcacttgagggttaggtgcatcatctctgaacaaaaacagaccaggaagttctctactgtatgtgttttgggggcctcatatcagctggtgtaggctgtctctttggtgatgctgtgtttgagagatctccggggtccagattaattgagactgctggtccctcctacaggatcgcccttctcctcagcttctttcagccttccctaattcaacaacaggggtcagttgtttctgtccattggttgggtgcaaatatctgcatctaactctttttgctgcttgttgggtctttcagaggccagccatgataggtccttttttgtgagcatgccatagcctcaataatagtgtcaggccttgggacctccccttgagttggatccaactttgagcctgtcgccagaccttcttttcctcaggctcctctccatttccacccctgtaattctttcattcaggaacaattatgggtcagagttgtgagtgtgggatgcatgacagccccatctgtcacttgatgtcctgtcatcgtgctgggattgggctctataatttccctctccctactgttgggcatttcatctaaggtcctgagagtctcccacctctcaagtctctggtgctttctggaggattcccccaatctcctatttactcaggttgcctatttacattctttctgctggccctcagggcttcagtcctttattgcatcacccaataccagatcaggtttctctctcacccccactcccccttcttgtccactttttctctatgatttctccctccctccccatttgtaattgctttttctacttcccaggtgggattgaggcatgctcacttgggcacttcaatttgatga

SEQ ID NO: 1560 - DNA, 1000 bp, mus musculus
agacacccccaaggtccctagaagactctccacacaatcttaggaacactggtgagtggaacacaacttctgttctattccaatcatgcaggacccgagacaccattagggaagcagaaaaactggcctgaccagggtcacaaggcccttttggtcggcttcagcaccaggtcaccttgggtgctgagtccgcagacacccccaaggtccctagaggacagcttctgaggcagatcctatttcgggctccagacatctgggcaccatccctgccagaggagaggtatccacactgccctggagggctttgccagagcacctgggggagccatcttggttcacagatcccgctgagactagtctgtgcaggtgagagtgtgaactacagaagctaacagcttctgggacaggcagaagccacacagcttctgaggcagaccctgctttggctccagacattcaggtgccttccctgccaaaggagaggtgtccaccccggctgggagggctttgccagaacatctgggggcgccatcttggttcccaatccctccgagactagtctgctcaggtgagagtgtggactacagaagctaaaatcttctaggacaggtcgaagcgacacagcttctgggacaggcccagtttcaggccttcatcttctaccaggaggcaagtctgaatgccagatatctgtgcaccttccctgcaagaggagagcttgcctgcagagagtgctctaaccactgaaactcaggagagagctatcctgctgatagaggctaacagaattatgagaggaagaagctctaaccagagaaaactgtaacaactaactccagagattaccagatgtcgaaaggcaaacgtaagaatcttactaacagaaaccaagaccactcaccatcattagaacgcagcaatcccacctcacccagtcctgggcaccccaacacacccgaaaacctagacccagatttaaaagcatatctcatgatga

SEQ ID NO: 1561 - DNA, 1200 bp, mus musculus
atctatctatctatctatctatctatctatctatctatctatttacactgaagatatattcccctctcggtactaactcccaactatttcacatctcatacctcctccctgtccccctatctccatgaggatatccccaccacccacaacccatgacccaacccccaccccaaaagacctctgaactccctgggacctccagtcccttgagggttagatatatcttctctgactgaacccagatccagcagtcctctgatgtatatgtgctgggggcctcctaaaacctggcacatgcttcctggttggtattatagtgtctgagaggtttcaggggtccaggttaatagagactgctagtccacctacagggttgtcctccccctcaacttctttcagctttttcctaattcaaccacagggatcagcagtttttgtccattagttgggtgcaaatatttgcatctgactctttcaactgcttgttgggtctttcagagggcattcatgataggtcccttttgtgagcactttatagcctcagtaattgtgtcaggccttggggcctccccttgagctggatcccactttggccctgtcacttgaccttctttgcctcaggcttctctctatttccatcctcacaattctttcaaacaggaacaattatgggtcagagttttgactgtgtgatggcaaccccatctctcacttgatgccctgtctttctgctgaaggtggcctctacaatttccctctccccactgtagggcaattcaactcccaggtctctggtacactctggatggtccccctaatctcccacctccctaggttgcctgttccattctttctgctgaccctcagggcttcagtcctttgcccccacccaataccagatcatattccctgtccaccttccctggtaaagctctttccttaagtagttaaatcagtttatttggatggctagagatttaaataataattcagtttaaagagcatcatggagactggcaactacagaatgaactgatcacataattctgtgaaacatgaaataacaaaagcataatctttcacatgtcagttggagccacagagaaaaacagaacaagcaacaaaatagccatgttcctgtgttatcatttcaagcttgagttatttacatattagtgcaaattcacagcctcaaggcat

SEQ ID NO: 1562 - DNA, 1000 bp, mus musculus
taatggcaagaagccttttatactgcctttggctacagtggctttatgagttaaacgtttgagtagcactgttaacttggaccaccctggtgatagcagctaacatgagtgcttgtttgtctttgatgaagcttggctgtaactactcagcgtgtactagattcacatgtgctacatgcctttcggtcctgaccaaaactagtgttcaaactgcagaggtgtgcaggaaagcccagtgccctttcttcctgctgttctcagtgcactagctacatgggttgtcactggcaacagaaaactcacagcgacctttaaactagagctagtggacatcaccgcggctggcagtgtgagaaaggggctcgtttggttttggtgatggattttcctaatgcatctcagcccagccggttccgcttccttctctcgggacttagagtccctggactcagcgccttagcatttggttctttactgtgggcatacacatcctttatatgaaacttcgtgtgtggtcataattttatcaagtttcttcatgggagagcggggaatggaggttgtaaggaaaaaggagtttgctgagtgtaatctgacagtatcacgcttgtccatgttctcttgtccttgttagttttgattatgaagatgccggttaccagactgcagaactcgttaaaatggatattctgctgaatggaaatatggtggaagagcttgtaactgtggtccataggtaagccaaggaagagatgaccagctgtgaacacaggcgcttggtgcttttctgtagtgctagtccctcacttagtgcagcagatacactttgtaaaacttgtaaagcttggaaagataattaaaatggactttagtctactcatcttccttctgcctttacatcagaagaatttgacttttattgatgaaaatagagttatgcttaaatatctcttccttttggatgaaattttggtagatttttatgactctgaatcagtct

SEQ ID NO: 1563 - DNA, 1000 bp, mus musculus
actcatagttgtaataatttaaaactttaaattcaatgtccaacactcccagacaactagaaattaagaagactgtctctttaaaaataggcaagccccaaaactccataaaatttctctcacattcatgaataaatcaaactatgcatgcataggcgaatgtctaatgagcacataggagcaaatcagtttgcactctaaagtgctaagctgcgaagatttcctgcacaccataatgttgtcagaattgacatttaaatctttctaatggggatacttaattgaaagctcagaaggactatgacatggaaataatggtagtatcctcaggactaaacgttcatcctaagatgaaggccaaagtaagtccctgtctagaaaattatagaatgaaaaccacacaagttcaagacaatttaaccattctttcctagaaggagatgcacaggtcttggaaggttactgaaacttgttaatgtcaggaagcttggaaggtacaagactcttaaggctcctcctcaaggtcttgaaagatgcagtgagtgtacagcggctgagatgagtcagactgagaacagcttcagagatgtacagagaactagcggatgcagacttcattgtttaccaccaatgttggagtgggctcttgctgaggcagttacctttgagtgacccatacttctgaaaggaaacttccaacaacagtgtagaaaacggctcaagtaaattcaccggttcactaagctagacctgggtagaggtgttggttaagtttctaaccagtgtgctgtctggaatgaatgggcatttgcttaaatccccccaggaaaacactaacctgcaaaaggatgctatggcccataattgtacatgattgacagtgtgtgaatgttaacaaagtactatcgttgtgaaatgaataaaggaaaactggactcacagataaaagcaaaagtaggtaacaggaaaaaacatgcttaagacgactcgaatgttagta

SEQ ID NO: 1564 - DNA, 1000 bp, mus musculus
aaagtccttcttgatgtcctctaccatcatcatgagatatgcttttaaaactggatctagcttttcgggtgttttggggtgccctggactgggcaaggtgggtgtgctgagttctgatgatggtgagttgtcttggtctcttttagtaagattcttacatttgccttttgccatctggtaatctctggagttatttgactttagttgtctctgattctctcttcattctgttagcctctatcagcagacctgggagactagatcaattctctgagtttcagggttcagagcactctctgcagacaagctctcctcttacagggaaggtgtacagatatctggtgttctgacctccctcctggccgaagatgaaggcccaaaacaggacctgtcccagaagctgtgttgcttctgcctgtcacagaagctgttagtgtctgtagtccacactctcacctgcccagactagtcttggagggatcctggaatcaagatggctcccccaggtgctcctgcatagctctcccggctgggcagacacctctcctctggcagggaaggtgcctggatgtctggagcctgaaaagggggctgtctcagaagctctgtggctctggcctgtcccagaagctgttagcttctgtagtccacactctcacctgtgcagactagtcatggtggagtcctggaatcctagatatttcttcatttacaattcaaatgctattccttttcctagtttcctgtccaaaaatccccaataccctccctcctcaccctgctccccagcccattcactcctgcttcctggccctggcattcccctatactggggcatataatctttgtaaaaccaatggttttgacattacacaataacacataagttgcctaaaataagactatatttttccagaaaagaaaggtttattgttggattctttaagtatgtatatatctacattgacatttctagttcactcgatggcacatacaaaaa

SEQ ID NO: 1565 - DNA, 1400 bp, mus musculus
agtgggatatttttgagccagtggacactgtattttccaattcactaaattgaacctagaatgaatgatactagatacttttctttcttctctttctttggcacagggcatccagtactacaaaggtaaatgcattataataaacatttgtactatatagttcagtatgatttgaagttgaacataccttaaacttccttcagttgttcatcagtaaatactggggtttcataaagacacaagacaaggcaatatacatcttttagaattatctaccatgtacatttggcaaaatctttatttgcattttattacatatgaagagaatgtgattttgtgttataaaaagaaaagaaattaaggtttttgtctgtcctacacaaaactaatttgttgagttgctttaaagaccctgttatatgacacagtagagcagctggtttatagtctgagactaaaagaaataatcagaagaaaatataaggaggacattgtgagttttgcagctgttttggggcattgttaactctcttgagaaatatagagtcacctgtccctgaagatagtcatgaatccacaaagatatgtgcttgttgtacattcaaaactcctctaaagtacaaagattgtgtgtctgtgatggtaattatcatctcacaggagtataattagcatcttctaaaagacatagagtggtccccctgtgttattccagatacatattactgcaattgcctggagaaatgtgaagcaatccaccagaattactctcaatgaggctgaaagaaaacagtctcatatgtgcctggagaacactgaaactgaggggaatatgataaagctcaaaactaggtttgatcctttgaagacccgagatcctaacaaatgtcagactataggccacctgcatcagaactctgggggttcagagtaacacagctgctcactgtgaaatcatgagtcaacaccagtccctgcaccaagggctcaggagcgataattaattgtatcttcatgatttatttttctttcattgtgctgtcatcatatttagaaaccaactactcaaaataacaaagctatcatcagatcaaactcagagtcctgatgtgtatcattattgatatgactaactttccttgtttaggcttccaaaaatcactctgaaatgatcccacacattagagtaaatgagtaactgagatatcttctttaaacttacaggaatgttcatgaagtgttttaggggaaaaaataataactgtcaagtttaaagatgtagatcctaaagttgaattgggtttgactcacccagactttagataggggttgatttagaggttgactagatggaatcgtggtacatagtatgaattattatagcagtgagaaaacagaaa

SEQ ID NO: 1566 - DNA, 1200 bp, mus musculus
tcagaactaagagcaaatttgaaatatgcagtaacctttgcattattgcttgaagaatcaacctttgacataattaagagaacatgggggttaagcagaaagtaaataagagatacacagtttgtttcaaattctgataattgtcccaaaaataaatagagaaaacatctactttttcaaaacagttaaacaattcacaagtcttgcatcagatactttgctcacttgtttaaaaaatacaatacctacattaaaagtagcaattcagtgtgcatactgttgtacataatttttaggtttagtaataacgttctttttattggatattttatttatttacatttcaaatgttatcattttctcaatttctgcccccccccaagaagcccactacccatcccccttcctcctgattctatgagggtgtgccccacccacacacttctgcctccccatcctcccatttccctgcactggggaatccagtcttcataggaccaagggcctcttctcccactgatgcctggcaaggccttcctctgcaacatatatgactggagtcatgggtccctccataagttctccttggttggtgatttagaccctgggagctctggggttacctgttggttcatattgtttttcctcctatgtggttgcaaaccccttcagcaaattgggtcctttatctagctccttctttgaggaccccatgctcactccaatggttggctgtgaacatctgtatctgtatttgtcagactctggtagagcctctcaggagacaactgtatcaggctcctgtcagcaagctcttgtttgcatccccaaaagtgtctgggtttggtgagtgtatagggactgaatcgctaggtggggcagtctctgggtgggtatgccatttagtctctgctccacactttgtatttactcctgtgagtattttgttaccccttctaagaaggactgaaacacccacactttgttcttctttcttcttgaggttcatgtggtctgtgaattgtagctttctagtagagactgaagaatacaagggaggatgagttacaaatattaaccatcaaacagtatttaaatgcacttggcattcatgaaagcaaccccttttgaatattactatgaacagtttggctcagtacagtaaatatacagcaaaaatgtacacattcttcataattt

SEQ ID NO: 1567 - DNA, 1200 bp, mus musculus
ttcagtaatggccattttctactcaaatatttaaaggcaatgttcactaatatgaaatttagttaatctaaaaatatgttaaattaatcttacttgagttaaatccctctactcaagatttttttaatagaatagctattagaatatctaaaatttcagtggacaaaggggaaaattcttcaactaaccaaaatagccaacttttgatgtccaaactacagagtcatttgaatgtataatgaataattttttaaaagccatcaactggaaatgcaagtatgtttgagtaagtaagggaaatttttcctttcaatgtgttcccatatcctgatagctttgatcagtgagaaagtggatggttctttttgattgaaggctgcattcttgccaatggttcagcatcagctgaagaatggacagtcctttacaccaaggtttccctctcagtaaacgtagctaatgtaaatatattttgactaagtatgacctactttgattatgtgtgaacatagcattaagtggggtcaatacaatttaaattaacaaccattaatttaataaacaacaaattagaaataggcatttatatctagatttatgtaacctgtatgtatgtctataccttgatacacacttctcaaaggtctgtgcttatttttatccttgccacattttctcaagtaggaagccccagttatagttatctcacggtggtacttgttttggggttgaagtgtcacaatagacattaagatgtctagcatttgttaaactggaaattggaaccattttcttcaaactatattctcacacacacacatacacacacacaaattcagctcttcagaatcctgccagatgaagggcagactcagttggcattgtgttcctgattgcagttgtttattttattgtaggatggtatgcacattgccactttaaaatgacagaaaacacaacttagttactaatgtcattccaaatggcccagctttgttagcaaatgtaaagctggaatcttcttgtgttgcattcagatgggtgagggcgacataactgttcaaaataatgttctgggataaaatggagcttatagagaaaactacttaggatgcagttcaagggcacataaaggttactatgctgttttgtctacaagaataaaatgctgctatgcaccttctgcttctcagtttaaat

SEQ ID NO: 1568 - DNA, 1000 bp, mus musculus
aacttgtaaacaatgcccatgtttttattgatatgggagtctagtaattcaaatattcatgctttcatggataatactttagttaagttctaaactctcacctaaaatgtatagttaagtatttaatctgttaaaagttaaagtcaaataactgttttcagttgtctattatgcttcttcaatgacctagtcatggttacctgaaaattttctacatttctgaatgtctcttgcaaaataacatactcataattcacaatcattttttacacaaaataaactgtatcattattttgtttttgctttgattttgaaataaactaaaagccctgagactgtgtgttggctccagagtaaaagcatttgtgtaaaggccaaagttcaatccacaaagctcttggaaagaagaaaatcaatgtgcaaaaggctttctctgatctccaaactcatgccctgtcacatacatctagtcatgtgtcccatacacacaaatgtacatacacacacaaacagacacttacatatgtacacacatacagaaacacaaacccccacatagacacacacagagaagcaaacatatacaaacacacacacaaacagatacgcaaaacacacagacacagaaatttcacatacacaaaactaccacacacacattcacatgcacataaacaaacacaaatgttcaaacacacagagtagcaagggatgaaattgacatatttgagagtataatataattctttcatttccccttccctttccttaatccaaaccctgccatgtacccacccaacccacactgatctctttgaaatacatgcaatatcaccagcatggcttcctaagcttgaggtgtgtgtgtgtgtgtgtatgtgtgtgtgtgtatgtgtgtgtgtgtgtgtgtgtgtgtgtgtgtgtgtgtgtgtgtgtgtatttcagggttaagaaaaatgatgaatcttggaagtgaaactattttcaaagttaaactaaa

SEQ ID NO: 1569 - DNA, 1200 bp, mus musculus
actgcaaagctatcaagcatcatttttacatgattgtatgatacatgattagctgctaaagaaattaatcttagaaccacagagatagctttaaatcagtaatatccttactttcaaactggagaatgagtttccaaacatgttaattccaaatgtacagccaatgaaattcagcaccacatgaaataatttgtggataaatgaagtccatatacacaggcatatgtagcagaaggggacttacaaaataacttattgtataaattatctcttcttaagcgacactgttgctgatgccaagacatgcttgctgacagaagtctgataaggctgtctcctgagagactgccagagcctgaccaatacagatgtggatgcttgcagccaaccatcgagctgggcaaccaatggagaagttagggaaaggactgtaggagctgaagaggtttgtaaccccataggaagaacaacaatatcaaccaaccatacacccctgagctcccagggattgaaccaccaaccaaaacgtacacatggagggacacatggctccagctgcatatgtagcggaggaaggccttttcaagcatcaatgggaggggaggccccttggtcctgtgaaggattgatggctcggtgtaggggaatgctagggcagtgtggtgagagtgagtgggtggatgggggagcagcctcatagaagcagggggaggggatgggatagggcgctgtggaggggaaactggtaaaggggataacacttgaaatgtaaatgaataaaataatcaataaaaatacatgaaaaaggaataacatcttgcaatatccccaggttggccttgagcttactctataactgaagctagcctttgaacttagatgctcctgacttacccttcacagtgctggtgtgacgagcagatgccacaacacagtgtgtacacaacctctatcctttaaatccattacaatttaaacactgaaacatagtaagttgttcagaaatcacaggttgaattatcatgctaccaaaatgtggtccaaatctactctatctacagttaaatagcatattaagtaggtgtaacaaattcttgtagctccacgacaccgcatagtgcttacactatccagtgcataacccttcaacagcataagtcatttggatcttctccaggaaataatttcacttgtcctagg

SEQ ID NO: 1570 - DNA, 1200 bp, mus musculus
catcaccaccaccaccaccaccaccaccaccaacaacaacaacaacaataaaacaaagcatagaaaacacctgatcgtggaagctgtagtatgtcacggtgtccccacagtatacccctctgtccacacatcttcccttgtaaatgttcattgcaatgagtcattggtctggttagagatatctgtcttttgtgacaccatcaatattggaccctcctaccaggcttcctcctggttatcctgttcttgccctgtgtcatggagatcctgcagttttggattagcaggactggccctttcacgcagcctgactgttcaaaaatgatacagattttggggtgggccaacgcagagccctggatcgggcctaggtgtttttgagctggttagcgtgttggctctcccttatctgcaccactaccagggtgagcttttcagcattgctccagctaggccacccaatgctgccctcctgctcttggggctagctcactcacacctccagaaccagctctactgtgctgcccagtcaaggcatgggagccactctcccaagtgctgcagcctgtgaggggcttctgctcttacaactccttacagctctcagactctcggggctccctcacccgtgcctttgctatcagagccagctctactgtgttgccaaggtgaggtacaggccctgttctccaactgcagctagagaaggagcagggctagctcttctgttctcaagtcctttgggagtccagctttcccatgctctcacccccaaggctagctcacctgcgccccatctaccagggccaacactgctgtgctgcccaggagagatgcagggcccactcccctgtgtgctgcagccagaaaagggcagggccatctcacctgcactcatgaccccagggccatctctcctaactgctgcaggtgacgagaggcaagtctgctttcttatagaacccagggccaccagtccagcagtgacccccactacaatgggctaggccttcccacttgaatcactaattaagaaaatgccctaaaggcttgcttgcaacccaacctcttggaagcattttcttaatttagaatcccatctctcaagtgactctagttcataccaagttgacataaaactaggcagcagagagaccatctttttgctgaatgagatgacttcttttcttttttttttca

SEQ ID NO: 1571 - DNA, 1000 bp, mus musculus
gaacgtgaaggcagagtcctcaggaatggaacagtgtcattaccagagaatcccaagggcaccaccttctgtcttcccaccatgggaggatgatgcaaataggccctcaccaaacacaggacctgccgaagcttcgatccgtgggcttccagccgttttcaaagttcatggctcatgatctcttcagctaggaccttcaacagctgtgcagttcactcaaactctcctctcaacagtctgcaaatcctgccctgcccttccctgcccgtcttcccctcctccttctgttgctgctcactgccctctctgcctcagccctactagctccctctctctcctacctgtgcctcaagacacttgcaccaagtataccagtccctaaaaatctctcccccaacttctctgtagctctcttcctcatttcaagatgttagtacagtgactttctcagtgacgtgtccccacgccatcctatacaaccatcaagttatccacctcctgggatccgtcttctttctctgctccatttttcttcatcattgatacgactgtctatcataagttaccgccctctccgggactttatttgttgtctgtctctagcaaatagagtgacgtttccatggagactgaaggttttgtgtattttagaaaagatggtagcccctaaatccattaataatagctggccttacagtaagtgctaagaaaataaaggaataaatatgttgacccccctaactcttacttgagctctctgtcccacaatcacctctgtttattactataaccttgttcttcataacccactccacagtgcaccatcttggcagctggcatggcatgtgaagaacgttgagcctgggaaagcacagtctgtcttcggagaccttctgggacaacagaggtcactccttagctgctttgtatccaactgtttcctgtcatcattcatacatttggaacagatattggcaaagcaaaggttgacttgggctgt

SEQ ID NO: 1572 - DNA, 1000 bp, mus musculus
ttaggctgactgtccagcttgtttgtccagaaatggttagcttcaggttcattgaaagaactttcattaataaataagacatgtaataactttattcttttcggtataaatagatacaatataaatgaaatgcactatcttatcttcataagataatgcagggctttgggtgtgtgggaaagaggggagtgggagagtgcccatgtccagccagagttccggtgctcttggtgggcagatacagtaggattgagcatgctttccacatggtcccgggtgggcatctggctgtgttaagccactgaccctacactgcaggtcgtggacaagaggcagaccccggtaccaggttctcagctaaaggcatcccacactggatactgcagaggagctgagaacagaatagagaacttggttatgggaggaaggcaggagaggtcagggggagagaggggcacaggcaagagtccttagtccagtccatggctacagcataggaaggctttgtggtgggaggttagacttggcttgttaggagaaagcctattccatctttcaagcatggcaggccttcatgatcagagacagtctatgcttttagagctttattgtagaaagccagggggaaagagagaaggtagaaagagagaggaagaggctggccatggccacgtggagagagggggagggaaagagagaaagagagctagagagaaagaaaggtaaaagcttagagagcaaggtggggccaagcagcccctcttatagtaggctgggatattaggctgttgccaggtaactatggggaggagtctagtcagaatgccagaaacttgggaccttatctagccacatgcctctcctgtgggggctgtggaagtggtaacttcaacaggagccaggggttcaggagacttgttcaaatgccttcagtcccatgtaggtggaaattaccacctactgggtcccactggggttcaagacctaagctcaactggag

SEQ ID NO: 1573 - DNA, 1200 bp, mus musculus
tctagtatctattgagaagtcaagtatttttctaataggcctgcctttatatactttttatacttgatgttgttctctcgcagtctttaatatttttctttgacttgggtgtttactgttttgattgatatatagcaagggaactttcaattcttctccagtctatttgatgctgtatttccttcctatacaactaaaacattttgaccaaaatttcaattcattgtggtcttgctgaggctttcatcctcagtgataataacacgattttcactgttcaacattaccctcattagaatcaaaagagacagagttttctccaagtaaaagataaaatgtagaccccagtacatgatacaaactgtgtcctctggattgggatcctgttaatgaaccaatttcacaaacgagcagccggctgttaagtttctccttttgagctttacagatgtgttctcttctgagacaagctatttttaaaacccgtaagatagaacatggacccaggcaaacaatgccatgtaccttgtatctctttggctctcttacctagtgaagaagatcccctagaacacttggattgcaattgcaatcaagggatatgaaatttggctaggcactccttggagtgagacatctctggtaatactgcccatggctagatgctaggatcatgcttcctgtatcacttttgcttgtgctgcccccatttgggctgtctctctcaggaccgagtgctgtcctatgactgagaaagagtcattttaaagttatgccaatgtaatatatactacaagcattgtaataagacaatgaccatttcactacttacaattgcttgccactcacaaagtaaatattactatttctagtggaccccactgggtatattaaccacacttaaagttctttctgaccaagtatggtttatctatggtatatggccagcaaaaaatgaactcagtggtgttttggagatctattgtctgataatgttacttgattgtactggtcttttgtttatattatatggtttctgattttgtgtttgtattgagtattgcgtgtgtgtgtgtgtgtgtgtgtgtgtgtgtgtgtgtattttcccatgtatatgtttcacttactttgttgttatatcatatttaattattttatcttgtttttattgtggcttgtttaatttttgccagtttattt

SEQ ID NO: 1574 - DNA, 1000 bp, mus musculus
ctctctctctctctctctctctctctttaatattttgtccctccaactgttccccatcccatacctcctctctgtccccctgtctccaaaaggatgtccccacccccacctctaaacttcctgggggcctccagactcttgagggttaggtgcatcatctctgaatgaacacagacccggaagtcctatgctgtatgtgtgttgagagcctaagaacacccggtgtatgctgcctggttggtggtccagtatctgagagatctcaggggtccaggttaattgagactgatgttcttcctacagggtcgcccccctcctcagcttcttccagctttctcctaattcaaccacaggggtcagcagtttctgtccattggttgggtacaaatatctgcatctgactctttctgctgcttgtcaggtcttttagagggcagtcatgataggtctctttctgccactgctctatagcctcaggcctttgtgtctccactagagctgaatgccactttgagcctgtcactggagcatcttttcctcaggcccctcttcatttccatccctacagttctttcagacaggaacaattatggttcatagttttgactgtgggatggcaacccaatccctgacttgatgccctgtctttctgctggaggtggcctctacaagttccctctccccagaatagggcatttcatctgaggtctctctctttgagttttgagagtctctcacttcccaggtctctggtacattctgaagagtcccccaacctcctacctcccgaggttgcatgtttcctttctttctgctggccctcaggagtttcagtaccccccccccccacacacacacacatactcaatattccatcatgttcccctctctgcccacaccccatccctctttcctcccaggtccctccctccctcttttctgtatcttaatgcagacattatggaagtgattcacactaaaagctcattaaatagatatc

SEQ ID NO: 1575 - DNA, 1400 bp, mus musculus
ccccacctgggagtccatcccataatcagccaccaaacacagacactattgcatatgccagcaagattttgctgaaaggaccttgatatagctgtctcttgtgaggctatgccagtggctggcaaatacagaagttgatgctcacagtcatctataggatggaacacagggcccccaatggaggagctagagaaagtactcaaggagctaaagggatctgcaaccatataggtggaacaacattatgaactaaccagtacccccagagcttgtgtctctagctgcatatgtagcagaggatggcctagtcggccatcagtggaaagagaggcccgttggtcttgcaaaatttatatgcctcagtacgggggaacaccagggccaagaagtgggagtgggtgggtagggaagcagggcagggggcgggggtattttttggagtagcatttgaaatgtaaatgaagaaaatatctaataaaaaattaaaaaaaaaaaagaagaagtgcaacaggaggaacattcactttttgttgcctgacaaaaacttcatggaggaaatagaattgtagaaggaaaaaccaaaaaaaaaaaagaaagaaagaaagaaaaagaaagaaaaaagagaagaagaaaagaaaaagggaaagaaaagaaaagaaaaggaaaagaaaagaaaagaaaagaaaagaaaagaaaagaaaagaaaagaaaagaaaagaaaaaggagtgtacctgaagggatccatggctccaaatacatatgtagcagagaatggtcttgcctgacagcaatgggatgggaggcccttggtcctgggaaggtttgatgccccagtgtaggaggatgctggagcagtggggtgggagaggatgagtgggtgggatagggtctcaaataggaaaagaggagggtgacaatggatgtggtataggggtaagtgagaagcagaatatcatttcagatgtaaacaagtggaatgattaataaaaaaatgaaagaaaaggatagaaaaaaagtagtgtgggtaaacaaaacatttttgaactcatattttctctttttcatggtgcatgtctggttatggctgcacaaatgaatattcatgtgggagtgaataaatgtaatatcagacatcttccaccactattatctactttttgagacactgtctctcactgaaatcagagtattttggcttaaatggctgaccagtaatatcatagagccatctgtctcttccttccaacagtctgccattacaggtgctcactccgaagtctggctttcactcctgtgctgggaatctgaactaactcctcacacttgaacacgaggcacttcaaccaatgaaccatctctcaaccctgtacatttccatcaaccaccaccaccaccacca

SEQ ID NO: 1576 - DNA, 1200 bp, mus musculus
ttcctctgccatatgtttattcagaaagagtagcattcttactgtcttatgtgaaacttgaatatctactttgtgtcacaaactttaaaaaaagtaattttcccatttttcatttatttacttacactgcattttttattccctccccctgccactctccaacttttccacctcttatacctcctccccagccccctgatcacatggatttctccacctcccaccccacctgacctctaaataccctagggcccccagtctcttgagggttaggtgcatcatctctgaatgaacacagatccggcagtcctctactgtatgtgtgttggggacttcatatcagctggtgtatgctgcctgcttggtggttcagtatttgagaggtatcaggggtacagattaattgagactgctggtccttctaccgggtcatccttctcctcagcttctttcatccttccctagttcaacaacaggagtcagctgcttctgtccattggttgtgtacaaatatctgcatctgactcttttagttgcttgttgggtcttccagagtgtggtcatgctaggtccctttttgtgagtgctccatagcctctgtaatagtgtcagtccatgtgaccttcccttgagctggatcccactttgggcctgtcgctggaccttcttttcctcaagcttctttccatttccttccctgtagttctttcagacaggaacaattatgggtgagaggtgtgactgtgggatggccccccttctcccttacttgatgtcctgtcttcctgctgggcatgggctctacaagttccctctccctactgtccgggatttcatctaaggtccctccttttgagtcccgagagtctctcacatcccaggtctctggtgcattccggagggttccctcatcttcctatctctcaaggtttcctgtttccattctttctgctggcactcggggcttcagttattttccttcacccaataccagatcaggttcccctctccccaacaagtcctttctcccctccccctccacttttcctccctccctccctccctccctccctccctccctccctccctccctccctccttgtgattgctttcttctccctcccagctatcagaagttgaaggattatggcaaaataattttttaagagtccatatacctttgcttttaacctatctaca

SEQ ID NO: 1577 - DNA, 1200 bp, mus musculus
aataacctgaaatagaagggcacacctgtgaagtatatttgattaatttacagtgggtagatctatttctatctgtatctttgatgtaagaagacacacacctgcatcttttaatttaatctacatcttttgagctggaaagattcacctttaatattagacacaccttcttctgcaagcctatataaggatttggctctttgcctcttttcttttgccttccttgctagcaagattattcctcatggactctccacttgattttaggatcactggtgagtgggacacaacatcggttccaatctaatctcaatgggcctgagccagcagcagggaagcagaaaacccacctgaccaggggcacaagtcccttctggttgacaccagcttcaggtcaccttgggcacaaacactgggaaaggacccacagtccacagaggactctccatgtgatcttaggatcactggtgagtggaatacaacatctgttccaaaccaactgtgacaagcctgtggcagcaggagcaaggacacgggagccctgcctgaccagtagctcgggttccttctgatctgtactggtacaccttgatttcaaacacaacaaacagccccacggacctcaggggagacaccacttccaggtgctgtaacacacccaagatcttaggattccaggataacagaagcttggtcacaccaggatctcagagtctctgaggaagcttgactgccaagaacactgacacatccagaatctcagatcaacaggagcctggaatcacaggatcacagagaaatttggactctgaggaattctgagtcaaccaggattataggaagaacaggctccaaacagatataccgagggcagcaagcacttgagataatcagaggccaggagccaagctttaaaagaaaagcaacagaaaccaagattacttggcatccagaaccaaactctcccaccatagcaagtcctggacacaccatcacaccagaaaagcaagacatggatctaaagtcccttttcatgatgatgatggaggcctttaagaaggaaatacaggaaaacacaggtaaacagctagaagaccttaaagaggaaacaccaaaaaatcccttaaagagttacaggaaaacagtaccaaacaggagaaagaattgaacaaaaccatccaggatctaaaaagggaagta

SEQ ID NO: 1578 - DNA, 1200 bp, mus musculus
tgattttgttcatttccatcacctgtttggatgtgttttcctgttcctctttaaggacttgcaactctttagaagtgttctcctgtatttctttaagtgagtcattaaagtccttcttgatgtcttctaccatcatcatgaggaatgcctttaaatccgaatctacgttttcgggtgtgttggggtgcccaggactggctgaggtgagagtgctgggttctgatgatggtgagtggtcttggtttctcttagtaagattcttatgtctgcctttcaccatctggtaatctctgtagtcagttgttgtagttgtctctggttagagcttgttgttcctctcatggttctgttattctctaccagcatacctgggagacacgctctctcctgagtttcagtggtcagagaactctctgcacacaggctctcctctttcagtgaaggtacacagatatctggtgtgcggacatgcctcctggcagaagatgaaggccagaaacaggacctgtcccagaagctgttagcttctgtagtccaacttgtacctgttcagactagtctcagcgtggtccagggaccagcatggctccctcaggtactcctgcaaagccctcctgggcagggcagatacctctcctctggcagggaaggtgcccggatatttggagcccaaaaaggggtctgcctcagaagctctgtggctcctgcctgtcccagaagctcttagcttctataatccacactctcacctgagccgactagtcttggtggaatccaggaaccaagatgtctcctgcagatgctctggcaactctctcccgggctaggcggaaacctctcctctggcagggaaggtgcccggatgtctgtgcagaccagtgtaggtggaatccgggaaccaagatgtctcctatttcaatattcttgtttagtaatttgtagtgtgattttgtgcacatcttgtttttttttttttttatcatgatgcaagaaccaagtttttgttcctggaaacttgaactttaaatcctgttcacattatgtagaaaacaaacccaaacccaaagacaggtgaatttaacaatcaatacatttgtagggaaaaagtgaaaaataatgcaaatatattacaggtacaaaatcatgatctgacatgtatgatatactaaattcagtagagtgccacattgcttctttaaa

SEQ ID NO: 1579 - DNA, 1600 bp, mus musculus
ctatgtctgttagcttctttatttatcagtttagtttttgtctatattacctgtcaattggtgagagtaaggtgttgaagtctttccctattactgtttgggcttcaatgtgctatttaagctttagaaatgtttgttttacaaagggggggtgtcattgtgttttgagtatagatgttcagaattagaaatttactaatagtcatatttgcaaaatgttgtttctttaaaatgaatttgatcattgtggccagttattttatcattattatatttcctccatactagctatatttcccagtagctttgacttattctgtgtagcagtgttcaaattattaccttaaatatcaaattgatttatgtacttttaataaattgtttagttttaatataattttttcaacgaaacaaccacttttcctctgtattcttactgtttcccatagctcttctgagtagcattttacattactttctgtatcattctgaatattatttatattattatacatcttctagtttgctgatagtttttgaaaaaaatatttctcagttttcaacatgcctatctttttaaaaaattaggtattttcttcatttacatttccaatgctatcccaaaagtcccccatgccctattcacctattcccacttcttggccctggcattcccctgtactgaggcataaagtttgcaagaccaataggcctctctttccactgatggctgactaggccatcttctgctacaaatacagaagtagatgctcatagtcacctattggatggaacacatggcccccaatggagtagctagagaaagtacccaaggagctgaaggggtctgcaaccctataggtagaacaacaatatgaactaaccagtactcccagagctcgtgtctttagcaacatatgttggcaagttcttgttggcatcgaaaatagtgtctgggtttggtggttgtttatgggatggatcccaaggtggggcagtctcaggatggttattccttcagtctctgctctgaactttgtctctgtaagcccttccatgggtgttttgttctcttcttctaagaatgatcaaagtgttttcactttggttttcctttttcttgagtttcatgtgttttgcaagttgtatcttggatattctgagctactgggctaatatccacttatctgtgtgttcttttgtgattgggttatctcactgaggatgttacccctccagatctatccatttgtctaggaatttcatgaattctttgtttttaatagctgggtaaatgtaaatgtaccattgtgtaaatgtaccacattttctgtatccattcctctcttgaggggcatctgggttctttcaagcttcttgctattataaataactctgctatgaacatcgtggaacatgcttgcttactaaggcattataagagactatactaaatcatcttttaaggtcatgtttttatgaaaagtttgtattcctaagaaattttaaattatgtttctttttatcttggttataagaaatctagggcctttgtttagtcaaaattttataattaattttgtactatgtaatgactttg

SEQ ID NO: 1580 - DNA, 1000 bp, mus musculus
caattttcaagagagttatttactattcttagtctctgcttagatcagacttgttgagatggacaactgccaatgacctggaactcactctgtagaccaggctggtctctaattcagaaatctgcctgcctctgcctcccgagtgctgggattaaaggagagtgccaccactgaccagcataatgtgttttttgaatgggaatatgagattagtcagtgaccagaactttaaagaaaacgttctaattagtattggagagtgctagatggactcagaaagtgatatgaaagcaggaagaaagggtacttctttaaatatggggcagtcaagccagatgaaggcatttctgacacagatgatgcagcaaggaagctctaaaatctgagccatctcaatcctctactgttgctgctttagtctgttttcttacactgcattctgctctctaaatattgttttccaaggtattgaatatttcgactacagagcaatttctaacatgaatactttttaaaatatacattgttaaaatattctgagtagagctaattgccaaatttattaaggagaatttttttgtgctccaaaatagtgtaaaataaagtcgtatcattaccatcttaatacaaagagtaaaaaggaaaatccagagatatgagagacacaatgatttgtcatcttcatatgaagatgaagacactgaggtaaccaaatgttgtattatttattattcctcattatacgttatgattattatatttttccttgtttccaatgaatttttgtagaaaaaatcctacactgtattttatcatagttttctctactcaaattccttttaatcccttcccacgcccctactcacccatctccttgtgtattctttatctttagcaatcaaacaaagaggaacaaaccatgattgaaagaaaaaagaaaaacaaggaacatagagacgtacacacaaaaaaggtaaaacacaaaaattagaaataatat

SEQ ID NO: 1581 - DNA, 1000 bp, mus musculus
gggccctgtgatccatccaatagttgactatgagcatccacttctgtgtttgcttggccccggttagtctcataagagacagctatatcacggtctttgcaacgtgagttattaaagaccttcttgatgtcttctaccatcatcatgagatatgcctttaaatccgggtcttggtttttgggtgtgttggggtgccctaaactggttgaggtgtgagtgctgggatctgatgattgtgagtggtctttgtttttgttagtaagtttcttatgcctgcccttcgccatctggtaatctctggagtcatttgttatagttgtctctggttagagcttgttcctctagtgattctgttattctctaccagcagacctgggagactagctctctcctgactttcagtggtcagagcactctctacaggcaagctctcctctttcagggaagttgcacagatatctggcattcaaacttgcctcctggcagaagatgaaggcccaaaacaggacctgtcacagaaactgttagctcatgtagttcacactctcacctttgcaaactagtctctgtggagtctgggtaccaagatgtctcccacagatgttccagcaaagtgctcctgggtcaggcggacacctcttctctggcagggaaggtgcctggatatctggaacccgaaaaaagagctgcctcagaagctctgtggctcctgcctttcccagaagctgttagcttctgtagtccacactctcactggtgcagactagtcttggtggagtctgggaaccaagatgtctcctgcagttgctttggcaatttcctccagggccgggcagacatctctcttctggcagggaaggtataattccagtgctggaaacagaagcagaggcagaggcagggcaggtagatccctgcagctcactggtcagccagcctaacgaaatatgtgtgttccagttcagcaggaggctatgtttcaaaagagcagtcattgttt

SEQ ID NO: 1582 - DNA, 1000 bp, mus musculus
gtgggtatcctggcatttggagcaaagatgttcagaattgagaattcttcttggtagattttttttttcctttgatgagaatgaagtgtcctttcttatattttttgataacttttgttgaaagccgattttattcaactttagaatggctactccagcttgtttcttgggaccatttgcttggaaaattgttttccagacccttactctgaagttgtgtctgtctttgactctgaggtgtgtattctgtatggaacaatattctgggtcctgtttacatatcctgtcttttattctatgtctttttattggggaattgagtctattgatgttaagagatattaagtagagattgatccagagctagggcggtcctgacccacaccttcatgcaggggagggtctctcattcagcctgtgtcctgtttgcctagcttcctgacacccccaacctctgagcaggggcttgctcaagactagtttcctggctttgactcaggaggccctttcctcactgggccccatgtgtgatcagcagtgcattaaagatatgaggcagggacctaagccacagcagcagcggtcgccatcttggtccgagacccgccgaacttaggaaattagtctgaacaggtgagagggtgcgccagagaacctgacagcttctggaacaggcggaagcacagaggcgctgaggcagcaccctttgtgggccggggacagccagccaccgtccggaccggaggacaggtgcccgtccggctggggaggcggcctaagccacagcagcagcggtcgccatcctggtccgagacccgccgaacttaggaaattagtctgaacaggtgagagggtgcgccagagaacctgacagcttctggaacaggcagaagcacagaggcgctgaggcagcacccagtgtgggccggggacagccggccaccttccggaccggaggacaggtgcccacccggcaggggaggcggcctaagccacagca

SEQ ID NO: 1583 - DNA, 1000 bp, mus musculus
atcctcaaacaagtacttaaagaagagaaaggtctttgaaccttgtgttaattcttaattttcaaagccgaactacacggggcaatcttagtgttatggaatttgtatgatcagcaacaggacaccaactgcaggtccttcgctatgtcaccgtgagcgaggaccgcacccacttgcacatttgagaattggctgcagatagtattagtgttgaaaacatggatatttgtaggcttcaaatttctaaattgttagtttctctcggggggaaaaagtgtttcatttggtcttaactcttttaagactcattttgcctcagctcagtgcttttcccatcaaacttattaatatcttatagaatggtgacgggagggacccgtgtgatcatcgtcagctttttcccctggttgcccatccttttccttaacaatactatgtaggactccccattgatagcagctatcccagggacaattactttggggaagacattttggggcaaatacatgatatactactgttcaggctccacttcaccatccttagctgtgtgatcacaacgggtggattctgatgggtaaggtgaggcaagaaagaaaggcctgcctggagggaagagatctcagactgcagtgagcacagcaaggacagaccagagagaagcagcatcaacgaggcagctcattttaatgggggaaaaaaagggtatttaaaccattggggagcagtgattggggggctgtggggtgagtgtggtcaggcaaggtactggagatatttcatacaagcccagggataagatcttactcctgctgatctcataacgaggtttccagaatttggacatactcttctcttgctcccggactgagattcccagtcccaaggcaccccagccccacacatccatcctaaggcatagattgtgatgcatggctgcagtgtatactaacaactctggaatagtcattagcaattcataggcttagcgcatgctgtg

SEQ ID NO: 1584 - DNA, 1000 bp, mus musculus
gttaaagaagaaggaaggtccacatgaggatgcttaaatccaacttagacaggaaacaggaggagggaagcaactggagaggagagggagtggagagaataaaggagggcaggatcaggtagtaggggagacaggagagaggctcggatggccaggagaatgtagtgaatggaaatttgcagctagctgagaagggagttgggagtgatctctagaaaattccggagacctgagattagggaggctcccagaacttagctgcaagacctaacagtggggatatggaacttaaagagaacacctccagtagtcagacaggatccttagtggagggacagagaggacatcccacctacaaaacgttggaaccccaaattggtcctgcataaagaaatgcagggaaaaaataaagccaagactgaagtaatggtaaatcagtggcggtgccaacttgggatccatcccaagtaccaaaccttgacattattactaatgctatcttgtgcttgcagatagcagcctagtatggctgtcccctgaaaccctgaaagtctctaccagcaggtgactgagacagatgaagatacttacagccaagcattggctgcgtttgggcaggaatccatatggaagagataggggaaggattgaaagaactgaagaagatggcaatcctataagaagcccaacagtgccaactaacttgtactcttggaagtttccagagattgagtcacaaacaaaagagcatacatgtgctggtctgagaccctggcatatatatatcagaaagcttccttctttcatcttaataagagaagatgtgcctaatcctgtagagacctgatgccccagggtaaaggagataggggatgcacccatcagaggtgaaggggaggggagatgagagaataaatctgtgaaaagggaccaggagaggggcaacacctgggatgtaaatcaataaaataattaataaacacctttttttcattcaaat

SEQ ID NO: 1585 - DNA, 1000 bp, mus musculus
agacttccaaacaatactttaccttcgtatcaaagtcatgttttcttgatcaatttgtttctataaaaatctctcttggtctacccttgaacctctgcaatatcaaatctctgatcacgagcaacacgtttaatgggatgtgggtggcccatccaccattgaatgccatcaaagcatttccaatcctaagaaaagcttagtcttacttcaagtatcatgtgggcaggattttatcctaataggctcttgagttcctcatctcaaccttgattggccttcactttgtcatactcaacaagtattccttatgaaggctcatgcttgctagagagactttcacagacaaggaatcgttatggttttatactaggaaacgtctaagattcagtttaaaatcttgtacaggctaaggcaagaggtgtgtctttcagatacttcttaagctacaatgatgacctaagggtttgtttggttttttttttttttcattgtatttaactctgttttagttctattgctttgattttcatatgttcagagttccatccctctggcaaccagtggagatcagtgctctgaagggatgctttaactgtcacaataagagttgtatgaccagcaaattccacttttcagtctgtgtcaattacagagatagaagacatgcagaaatcagctcttccttcctgacattcgattctgaccagatcgaaatttaacattacataaaatggtatgtcagcattatattttggggaacatgatgttaaaagtctttcaggcgtcaccattgggaggggtctaggagtacacaattttgatgtcagtactctccattctgagaaaagacattagaacatataagaataacaggtaatttttttttctttgaattcaaggagaacttggtgactcctgaaggagaggctttgactttgcagagtttaaggttagtgaacatttagtatgaaactgtatatctttacctcatcagaataac

SEQ ID NO: 1586 - DNA, 1200 bp, mus musculus
tattttgagaatattactcaaaagaaaaaatggtactctgggcaatatgagattcattgttactagacatataactgttaaatgtaggttacagatctagttagaaataaacatgcacatagagaagcacttggtatggttttcatgaaagcatataagatgagattttaggatgattatatattagaatagagttctttttaagtactgtatttttcgtgtgtgattatgaaatgaaaatgtattctaaaactaggagatacatatatattcaagttttgttacatagctgaatttaaaaagattgcacccatcacagtcacaacagttagaaaatgttgtgcaatcaatcaagcacactgtgattctgctgtgagtctgtgcaggtgagagtgtggactacagaggctaacagcttctgggacaggcagaagtgacacagcttcagaggcagacccatttcaggctccagatatctgggcaccttccctgccagaggagaggtgtctgcaccacctgggagagctttgccagagcacctgggggagccatcttggttcccagatccctccaaaactagtctgcacaggtgagagtgtggactacaaaagctaacagcttctggggcaggcagaagctttgggacatgccccatttcaggccttcatcttttgctaggaggcaggtctgaatgccagatatctgtgcaccttccctacaagaggagagcatgcctacagagagaactctaaccacagaaactcaggagacatctagtctcccaggtctgctgatagaggccaacagaatcatgagaggaacaagctctaatcagagacaactataacaaataactccatagattaccagatggtgaaaggcaaacataagatcttactaacaaaaaccaagaccaataaaacatcatcaggacccagcactcccagctcagccagtcctgggcaccccaacacacccaaaacctagacccggatttaaaagcatatctcatgatcatagtagaggacatcaagaaggactttaataactcacttaaagaaatacaggagaacaatgctaaagagttacaaatccttaaagaaaaacaggaaaacacaaccaaacaggtgatgggattgaacaaaaccatactatacctaaaaagggaagtagacacaataaagaaaacccaaagtgagg

SEQ ID NO: 1587 - DNA, 1600 bp, mus musculus
ttctttgtatcttgcaggaaattggtccgagggattcgataagactcttgaggccctgagggtggcagttttaaggatcaactcgacgtgagtggacctgtcattgacagagggcctctcctcctggatttcatctgcattttcttattttaaggaatgggtgggggtaggtttattttgtgttgccacctgctgtggacttgtgttcatgctctggttggtttgcaagttcagaacccaacaaacaaatgacaaggttgtgatagctcaagcacttgctgccattgagcaaggggcctcccccaaaatctggctatctatgctcaagaattagttaacattggtgactggcctcttttgtagagtttgccctaggtcatttagtagttactgtcacatagcactgcggtatccagggatgggcaactttcctcatgcacagatcaacctaagacacggggcccggtggcgatagggttaccctatgacgggaaaggctgtgacattggaggaatgacctaagacaggagccacagcagatggacatgattacacagacctagtccagcctcattttaataaaataaagagggggagacgtggagagccgtgcctcgagcaatcgcgagcagcaagcaatcgccattataagatggtgctggcctccactgtgcctaactagtaaacaagccttgtaagcaggtgcgagagtgaactcacgcctagtcactgcccatctcgggcatagtagtggagtgatgggcgagcaacaaatcaggagctgacacgccatatcaggtgctgaaatgccatggctgagggctatataaacgactccatattctgtggtcggggtctccctcctgaagaagcaataaagcttgccgcagaagattccagttgtcccgagtgtgttcttgccagcggggacaaaagctagggatagtatgtagtaacttctttggaaaaaaaatggagagtagcctttctgtgaagaggtgaataaggtgcctacaagaacttaaaagtgagtccttttctaatgatactaaaattgattctaatcaatggtgtgttcatatttgttaggtgtaacctacttaagcttcttgcagaaaattatgcttgtataataactattttagaatgggtgtatttttaaataataaagcacacagtgtgaacacaatgcgcaatgcatttttcttttattgcctatgatttgaaaattattccaaaacttgcttgggaaattttatctccataagttctcaaatttaaaactttgatataaaaatgtgattaaaaatgtagaatttttgttgttattgtttgaaaatagagacattctatagttggtaaagtgctttgcttgaaagcgtgggaacctcatattatttatcaaaagttatgtaaaaacaacccaaaaaacaaaaaacaaaatctaatgttatagttctctaatgtcagcgttgaggagtcatagccagatagattcttaggggatcctgactagccaattagctacttcataattctaagcaaggaagatacctttcctcaacaaattaatgaataaatgaataaatcaatcaatcaa

SEQ ID NO: 1588 - DNA, 1200 bp, mus musculus
agataaagaggaaagttataaggggaagcatgaagtccttgggaagggaaatagaataaatatagtggatagaatgggaagagtgggggcagacatagggaaagggtatgcagagaaacagctggaaatggggttcttcgtatgtaggggtgtggaaaactagggcagtgaacatttcctggagtctatgagggtgaccttagggtggacttacagtaatggaggatactgagtttgaactcaatgaccatcttttgttgccaggcaaagcttcttgtaatgggactcggtatgtttggctaaatagctggcagatgaggtccagagatctctaaacaacagaagcttttgcaaggacagaaacttaagctccattgccaaaaacaatttctactcacctcaaccaatattcagagattaaggaagtatggatttgtagcctttgcccctacattctacatggatgtacaagaaggtacactgcaagctatgaaaagagaaaccgggacatggaacaccaacccagtcacaaacattgccatctatgatctgttctgcctgcaacatgtgctttggcaacgattgttcagagcctatgggactgtccaaccaatgattggtttaactcaaggctcatgtccagagacaggacacatattctacagttcgtggataaccaaaaaccagagactggatagcctagagacctaggatagaacaaaacaagcctggcagaaaaaaaaaatccaagaaatgtttcctaatgatatgtttctgtacttattgttactttattcagttatcatcagcataacttcgtctggcagcagatggaagttcagagacccacagtaaagcattatttgaaaagagattctaaattgcatatctctatgtgatggctacccccaaagaacagagaaaccggaggaggacagcgagaaaagactgtgggagtcagggggcatggagaacaccaggagaaaaaggcctacagaccttagcagcacgcatgtggacccacagcaaccaaaatagcaagtaggttattaacctatcctctctacttctgtaatttatcatattttcaagctggagttgtactgaattgcttccttgatctattgtcactgcctttttggtttgaattgtaatttgttcacctgtccctaaataattaacataagattatattatatg

SEQ ID NO: 1589 - DNA, 1200 bp, mus musculus
aaagaaatattaattcactcataagacataaatctaacatgggtcatttctctaagtgtaagagtcatatttgctctcctaaaataatttgttgatgatacaagtagctttgaagttttgttattttacatgtatcagtactgcctactactcatgtccaattatagacaagtccaaaactacaaattatttctgaactatcacattaattgaaaaaaggtgtgtagaaatgggagatggggaactggggataaccaccagaaattccatatgctaggaaagaaagcagctcccaggacccaacagagatgacattggctgaaacaatgtctggcaacaaaaaagaggaagaatctgtagagattttatccagaggttaggcaaggccaccaactcatctccaaatttgtaacccagaattgtttctgtctaaaggaaatatggaaacaaagtgtggagcagtgactgaaggcaaggccatccaaatgaaaggttccacctggggatatatcccatatacagacaccaaacccagacattattgctgatgccaagaagtacttgctgacaggagatgatatagctgtcccctgagaggctctctgagaacctgaagaatacagaggcagatgctagtagccaaccatcagactaagcacagagaccccaatggaggagttagggaaaggactaaaggagctgaaggggtttgcaacttcataggaagaacaacaatatcaatcaaccagacctctgagacctgccagggactaaaccaccaaccaaagactacacatggaggaactcatggctccagctgcatgtgtagcagaggatgcccttgccaggcatctatgggaggagagggccctggtcctgtgaaggctggatgccccagtgtaggggaatgccagggctatgtggtggctatgaagtgggtgtgtgggtgaaggaacaccctcatataagcagggagacaggggatagggtagggggtttatagaggggaaactgggaaagaggataaaatttcaaatttaaataaataaaatagctaattttttaaaaacattttacttgaaaccatagaaagtaaaattatatgtaagattgttttactgtgctgaacaatggaaaaagatggtttgtaatattaaatacttactccagccaaactattaaaatcaaaaaacaatgtga

SEQ ID NO: 1590 - DNA, 1000 bp, mus musculus
tttcctccattaagaactttatacatgcatgatatttacacactaatgagtggacattagccaaaacagtacaaaatacccaggatacaatgcacagaactaaagaaagttaacaagcagaagggcccaagtgaggatccttcaatcccacttgggaggtagaagaaagcaatcacagggagaagaaggcaggaacctgggtgcgggagggaaaggggaaggacaaaggggaacatgatcaggtatggggggagtgtaggagagaatccctgaggaccatcagaatgaagggaaatatgcaacctagaggggtgggaagggtggggggaggctctctggaaagtaccagagtcctgggaggtgagagactcttagatgaaatcctttcagcagggaaaggggacttgcaaagtatacctccagtagaaagacagggcatcatatggagggatgatggggttgccatcccacagtcaaaaaccctgagcagaaattgttcctgtctaaaagaactgcagagacaaaaatggacagtgagggaaagatggttcagtgactggtccaactttgggatccatgtcaaatggagtctccaaggtctgtcactattactgatgctatggtgtgcttacagaaggaaatctagcatgactgtcctccaagaagtccaacaagtagctgactgagacaaaggcagatacttacactcaaccattggcttgaagttggacacccctgtggttaagttagggaaaggatagtaaaagatgaggaggagggcaaccccataggaaaacatgcagtctcaactcatctgggcccctgagatctctctggcacagggctaacaaccaggcagcatacaggagctggtatgtcacagatagatcaaagggctgcctggtgtggcctcagtgggagaagatgtgcttagtcctagaaagacttgaggtcttagtgagtggggaggtctggtgggatgcagggggtgggggacatc

SEQ ID NO: 1591 - DNA, 1000 bp, mus musculus
gcgggttgtggtttataggccacattctagacctgaacataattagttttgcttttcccactagttatccttgtgatctttgcaaagttgtaaaacgtacctaagtcatggttttcttttgagtaaatatgagggccaaaaaaaaaatgttttaaaagaaagtcacttattctcaaattaagtcaggaaataaatcaatttcattcatattgtcagtttcatataggcagatactaaaaaatcaaatttaatcaactgcttggccaatgcacctttttaaaaattttattggttatttttttatttacattttaagtgacatccctttttccagtttccaccccacaaaaccctaattccatccccctcttcctgcttctatgagggtgctctcccatccacccatccactcccacctcactgccctggcattcccctaccctggaacattgagccttcataggactaagagcctctcttcccaatgataacagataaggtcatcctctgctacatatgcagctggagccatgggtccctccatgtgtactctgtgattggtggtttagtccctgggagctctggagtgtctggctggttgatattgttgttcttcctatggggttttaaacccctttagctccttcagtcctttctctaactcctccattggggtccccatgctaggtgttagatccaatggttggctgtgagcatccgtttctgtatttgtcaggacctagcagagcctcttaggagacaggcttttttcagcaagcacttcttggcatcagcaattgtgtctaggttaagtgactgtatatgggatgaatctatggtggggcactctctgcatgacctttccttccacaccttgtctccacatttctgttagacaggagcaattctgggttaaaaatttggagatgagtgagtggccccattccccaatgggtctcttgcctaacctctggatatggtctgtacaggttttccccca

SEQ ID NO: 1592 - DNA, 1000 bp, mus musculus
agaaagatctaaaaagaagcactgtgggaccttgaaaggcagcctgttttctggttgagctaggtttaaaccctggagacccagctgataattctgcaagagatggaaggaaatttgccatgcacccaaacaccagactgctgacaggaggccccatctccatacttctgtggccatcagtcacataggcaatgcctcaagcttctggtattctgtctggactccacccctacagttacctggcaataatcaggtaaacctggctcactataaaaggggctgtttgcccctcctccctctgttactccttactcttgcctctctgtctctctctctctctgtgtctctctgtctgtctctgtctctctcgctctcttgcactcttgttccccctctctcctgcatccccttccccctctctccatgtggccagggctggccactaattctctactttcctctctctgcctctactacctgcttagctccccttccagccatgacaataaaagccttaaaaccatgaattaccgcttctcatcaggatcccctgtgctggtgcatgttgtctacaaggaacacacgcacacacacatgcacacacacacagagtggggaggcaaacctatcttgcagagagaaaagaaggaaagatacattccaataataaattgacaaaaatagaaagcatagtgctaaaactgtatgacaaatataatttaaatcagaataattctgaagagataaataatatcaggggatattaacaaaatacactctttgggagtatatttaaatgcttaagatatgtagatgaaatgttggcaagcatattttcttaaaacatgtacttctggattaacaggtcagtgggtgctatcaatactccacactcatcaataggttatccaatacttatgataatcaacaatcattggaactatctacctggttttctataaactaattcgaataggaatttagagccacaaacagaatt

SEQ ID NO: 1593 - DNA, 1000 bp, mus musculus
ccaagaggatgttcccaccccacttcaccagacctccccactctctgaggtctcaagtatcatgaagtttaggtaggtgtctgaggtcagacaaggcagctgccctcctcttcagatttttccagcatttccctaattcaaccacagtggttcctggcttctgtccattgtatctgtatctgactctttcagctgcttgttggacctgtcagagaccaaccatgctagtctcctgtctgtaagcacacagcatcattaatagtgtcaggccttgggacctcccctggagctggatcccaatttgagtctgtcactggtcctcttagcctcttctccttttttatccctgcagttcttttagacaggaacaattctaggtcagatttttttactgtgggatggcaaccacatcattccatttgatgccctgtctttctactggaggtggattctacaagttccttctccccactgtagggcattttatctaaggtacctccctttgagtcctgagagcctctctcctcccaggtctctgatacattctagagggttctccaacctcctacctcccaaggctgcctgtttccattctttctgctggccatcggggctttaataatgctctcctcttccaatacctgataatgttccccttttccttccttgttccctcttccacacagatccttcccttccccccaccccccacccacagtgagtatagatttcagttattttattactattggttgtgggggttttggtgtgtgtgtgtgtgtgtgtgtgtgtgtgtttcttctcttttgattttgttggtgtgagatgaggttatttgcttcttgtgtttttaagggtaccatgaagacaacctccttagtttggagtttcccttctagcatattacatacagctacatttgtagatggatattgtttagatatctatctaaattgaaagttttactgtaaaatgttgtttggctggcatctgtcatctt

SEQ ID NO: 1594 - DNA, 1400 bp, mus musculus
tagaagattttgctttctgggatctattttcaacacataagttgaacaaagggacatactaattttatcagtcagttaacaagagtgaaaatggaaaaaaggaattaaagaagatgatgacttctacattttaattttttttcacctttttctctattaaaagtaatcttaaataattctgaacaaaattctaagagcatcaattgattatatcataactacattatttcattctcaaatatatataaggctaaacacaatctgattttctcgtcattgctaatctaatgtactgactggagagataaaacattactgttgcaggctatttgttcacactgtgaatccccaaatcgtgttgtttaccaggaaaaccctgtttttagttgtggcgctgcttacccttagcatatgccttaatccctctgcctgtaatatatacacacccgcaatgcacacctttcatcccaaagataaagtttgttgtgagaaggaagcagtcgtgtttgaaagtcatgttcaatcgtgtgtctgacaaactgaaaatcagagaaagatttgacagagtaggatattcctaactttcacgagaagagaaaggaaagagaagccacttgagaggggccatgtaaagaaaaagaagagaaggccgttttacagagactggttaaagagaaaataaggtagacacaggtgaagaaagagccagagaatgagaagaagccggaagaatagaacaaattgccagagtgaatttgaggccaagaagaacaaaaagtcagaggctgagagagaagccagattgaatcggccagcttgcagaggagtctgagtctgaagaactgagttggactaggcagccagagttcagaaagaacaagcaaggagtgatcttagtagaacgtctcagaggctgcaaacaacctaggccttgattagattctatggaggctagacgctaccataactaggcctaggctatccgatgaaggcattaagcctccaaaattgaaattacaacaggagaagaaatgttacagtgcatgatatataggagtattattaaaaaatatattacataaaaattacagagaaagtataagacatggaaaatagaatgttaacctcaagcctattataatgtgaaatagtaatatgtaaaaggattagtaaaataattggattgcataaaatcaataaaaagaaatttaaaaaatttaaaaaaaaagaaaaaaagatgattttgttttaggtattgctttaaaaggctagagatatgggttggggttaagagcaccaggggccctaggttcatgtctcagcactaaaatggattctcacaactatctttaactccagttcctggggatctgataccttcctttgacctttgttgttat

SEQ ID NO: 1595 - DNA, 1600 bp, mus musculus
aatggaagctgcattgtctaaaataacctacttaattttatcaaaacatttttataaagcaatcatgttcatttggtattgataaccaatcgctgcacttttctctaaggaagacaatttctcccaggctcagcagtcctttgtgacctatagttctttgtatagaactgggcctctagccccacccatgcacataatagcattttattgttttgtccttgttaaactcacatttcagctgtcatttgtgagactttatggatgtaagttctgacattcctgggtgtcccaacttcacagtaaccaaactgagcatcaggatctacaacctttctacaaactttttgtaacaatcccttaaacaggtatcattacacagtctgagctggttgaatttattatatatattttatatatattcgtatgtctgcaaaattcatgatgtccttatttttaatagctgaataatattctgttgtataaatatactgcattttctttacccactcctcagttgagagacacctacactgtttccagtttctggctattatgaataaagctgccgtgaacatagctgagcaagtgtctttgtagtatagtggggtgtcttttggttataggtccaggagtgatatagctgggtcttgagttagactattcccagtgtcctgagaacctacctagttgattttcaaagaggttgtggaagttggcactcccatgaacaatggagaagtgttgctctttctccatttccttgccagcatctgttgtctccacattgctttcattgtgtcccataagtttggatatgatgtgtcaacacttttattaaattcctggaagtctttcatttctttctttctttctcccctaaccaagttgccattgagtagagagttgttcagtttccatgtgtatacggcctttctgttgttttgctgttactgaagcccagccttaggccatggtgatctgatcaaatgcatggaattatttcaatcttcttgtatcagctgagggttattttgtgatcaattatatgatcaattttggagaaagttacatgaggtgtttagaagaaggcatattctttagttttcaggtgaactgctctgtagatatacgttcaatccatttggttcctaatctctattagtttcactgtgtgtcagtttagtttctgtttcaatgacttgttcattgatgaaagtggggtgttgaagtctcccgctattattgtgttaggttaaatatgtgtttaataatatttcttctacaaatgtgggtgcccttgcatttgcggcatacatcttcagaattgagattatctcttggtggatttttctgttgatggatacgaagtgctcttcctcatcacacttgataactttcagttgaaagtctattttattggatattaggatggctactccagcttgtttcctgggaccatttgcttgggagactttttgcatccttttcctgagatagtatctgtctttgttattgaggtgtgtttcttttatgcagcaaaatgctggatcttgtttgtgtatccagtctgttagcttatgtctctttatagttgagttga

SEQ ID NO: 1596 - DNA, 1400 bp, mus musculus
agttaggatctttttttcattttgtattttctttgattgttctgctgatgttctctatggaatcttctgcacctgagattctctcttccatctcttgtattcctttgctgatgcttgcatctatggttccagatttctttcctaggttttctatctccagtgttgcctcactttgggttttctttatcgtgtctacttccctttttaggtcttggatggttttattcgattccatcacctgtttggtcgtgttttcctgcaattctttaagggatttttgtgcttcctctttaatgtcttctacctggttagcagtgttctcctgtatttctttaagtgagttattaaagtccttcttgattttctctaccatcatcatgaggtatgcttttaaatcagggcctatctttttgagtgtgttggggtgcccaggactgggtggggtgggagtgctgcattctgatgatggtgaatggtcttggtttctgttagtaagattcttaggtttgcctttgccatctgataatctctggagttagttgttgtagttgtctctggttagagcttgttcctcaggtgattatgttagcctctatcagcagacctgggagactacctctctcctgagtttcagtggtcagagcactctctgcaggcaagctctcctctagcagggaaggtgcccagatatctggtgtttgaacctgcctcctggcagaagttgtgatccactcacagaggtcttaagatcctgtggagggtcctgtgggtaccttcagagtgtcaagagactcctcacccaagctaccctggtgctagctgggaccggaagggacttgtgcccctgatcaggccaggttttgtgcttccctaataaatgcagtctcaggttccgaatgattgtactggagcagcagctgtgttccactcacagaggtcttaagatcctgtggagggtcctgtgggtaccttgcgggtgtctgcagactctgcacccaggctaccccagtgctgaaggagagcggaagggctgatttttctatgtctggtaatatatagaaatattaaatgtagaaataatgaacttcagtcttttataataaatatatagctcttttataataaatatatataaataaatatatatatatagtctcatacccttcttaaccactctcttcagaactgaataggaactaataatctataacataattggatattatctgaacttgaaaatattttaattgcctcatacattatgagcaattttaatatatgaaaatcatagtaatttatatgattaatggtaaaatatcattggagaggtagaaagttaattatcctagttttttccagctggtacaacaaaattgcatcactgaagttgagttacacat

SEQ ID NO: 1597 - DNA, 1000 bp, mus musculus
gtacactcacaagataaagcatgaagacatgagtatagatttcctagagtcactttattttcattaaattatctttttcttagcactttgtagaagtgacttaattcacattttttttggatgtattttgttttatgctggctttcctctctctcagttccaggtaataaattcaaaagctactgcttgtgtttgtacaagtggttctaaatcaaaaagaataatgacactgagccaccaaacaggcagcatacaatagctggtatgatgctcctgacacagagctctgatacagcagaggactgctgagtctggcttcagtgatatttaaccctcaagaggctttaaacaccagagagtggggaggcctggcagggggtgggatgacctcttgaagatggggggaggagtgggatgaagaagtgtgggggtgtgtaacgactgtactgtgaaaaaaaataaagtaattttaaaaatgaaaattgtgttgctagaagctatagctttcatttaaacattgatgtgcttgtaattctcttaaaactaatgtctgtgccattcatggaagatgcttgctaaattttagttcaacaaaaactctgaacctttctctctctctcttttttaaggtttttgtttatttattattatacactgtagctgtcttcagacgcaccagaagagggcatcagattccattatgggtggttgtgagccaccatatggttgctgggatttgacctcaggacctctggaagagaagtcagtgctcttacccgctgagccatctcacctgcccccatctattagaagcccattggtcgtgcagactttatatgcctcagtacaggaaaatgccagggccaagaagtgggagtgggtgggtggggaagtgggtgggggagcgtgtgggggacttttgggctagcattggaaatgtaaatgaaataaatacctaactaaaaaaatatagaaataagccacagccatacaagaaaaa

SEQ ID NO: 1598 - DNA, 1000 bp, mus musculus
ttcatatagacaaacaaccgcctagtgtaatgatattctgaagtaaacacacttctatgtgctacacctggaagaaatgtgaaaacaggttctaagaagaattccatgtttagaatgacatatcaaccaaccagacccagacccccacccccaccccagaactcccagggactaaatcaccaaccaaagagtacacatggagggaccaatggctccagcagcatttgtagcagaggatggcctttctgggcatcaaagaggagaggccttggtcctgtgaagactcagtcccccagtatagggggatgccaggcgtgagtgagtaactgccctctgaaagacccaacaagcagttgaaagagtcatatatttgttgcaaagcagtggacagaagcagttgacttctgttgttgaattagggaaggctggaacaagctgagaagggtgattctctaggaagaccagcagtctcaattaatatgaacccccgagttccctcaaatattggaccaccaaacagacagcatgcacctgcagatatgaggaccccaatacatgtacagtagaggactgccaggtctgtgttcattcagagataaagcacctaactctcaagagactagaggccccaagagtttagagatcaggtggggtgtggctgggggacaatccagttggagacaggagggtggagaggaggtatgggatgtggaacagtcagagagtggatgggggtcaataaaatatggagtggaaaaaattaattgattaattaaaaaaaaagaagaaaaaaagaagaggcaaatagacctcaaacgtagtattacattcaggctttatttagtgaggaatgcatttattatacattgatttattttaatcaattatatttctattcatcctgtttattgattagccagttaaaataataatgatatgtattgtgtttacccttatagataatattcagtgacaccgaagcagagtagtggggaaaaac

SEQ ID NO: 1599 - DNA, 1000 bp, mus musculus
aaaaggcattgaaaacctaggaataatctgtccaatgtaagaaaacactaaatgtcattatattcattgaatctatattcaacatatcataaagaaatagtttcatttaaactgtttggcaatataagttagacaatgtgctcttacagtttcttctaaattcatcctgggggtttagattattgtctaggaagccatattagtcaaatcaaggttgatacatgggaaaccacaaactggttaaacagacattattctctcacagttttatagatgaggaatcctaagatcaaagttcaggctgatttggtcctttggtgaggacaggttctgagttcccagatggctctctttgtatgcttgagacaaggggaaggagaaagcacgagaggcagtaggataccccaagcagagggaactaggtctcattgatgtcactgtgtgtcaagatggattctagaatgcaaagaagcttgtgcaccagcgcaaagtgagcacagaggccagagagaacacacatccatgggggaatgtcatatttaactctggatgactcggtgaggcatcacagcattctaaaatactaaatgactatttgggacatagtgttaaaattcttttttttttaaataaaaacaaaacttagacatataaaccaaataaaattatatatttttttaatttcatgctaatcatctgtcttggggtaaagagtttcattaaagttgattgcaaatttgacctcatttctactttgctttatttttgttgctattattctttcatataatattttcctagtattctccctcctctgtctctcactccctccttctctctctgtctctgtttctctgtctctctgtctccctgtctctctctctctgtctctctctgtctgtctctgtctctgtctctctctctcactttaacttggtctcatctattctcaagagatttttcttctgttcatgtttaagcatgctttctaattttattc

SEQ ID NO: 1600 - DNA, 1200 bp, mus musculus
cactaaagtacactataactaatattagcctcaaactgagaaaatacttactgtcttaaacaaacttaaaaactgatgaagctccaaatttgtgtgagttagagcatcaagttaattttttattacatagacccattcatccgaccatgaaaagaacttcgtagtcacatattaattatttatttatttcttgtttgaccactgaaacacattcctcacaaagaacttgatatcaaaatctagataaattctactttatttcatgtcgataattttagttatgtaatggacgcccaaaatgcatggaaaacactaaagtgcactatgactaatactagcctactttttttgatgctgacactgtactaaacagaagtaccctgttcttggataaacagaagcctaaatccaaccttcctcaggaattttgtaaggtaggtttgtgcttaccaggaaaaccactacctcctttatctaccccaaaggtcaactatcttgggccatctacttctcagttaatccaaacaacttatattagctcaaagattcccattccactgactaccaaataaaattggattgctttcctgacaagttcctgtactttgtctcccagacacatttgacagtttgatcttatccccccatacctttccttctaaccacagagtggtccagtttggtggtttcattgtgtccttggttacaaataattaacattatgagccaactcctccatttggtgtaggcttgtgtgctgtctggcatgatatcaacttgacccaagctatagtcacctaagaggagggaatcttgattaagaaaatacctccataagatgaggctttaggcaaacctgtagaatattttcttaatgagtgattaatggtagagggcccaacctattgtaggtcatgccatcttggctgggggtctgggactctataagaaggcagatggagcaagcaatgaaagacaagtcagtatgcagtatctttccatgtcctctgtatcagctcctgtttccaggttcctgcctgtttgagttcctgtcctgttcaatgttgagcagtgatgtggaagcacaagccagatcaactctttccttcccaggcagcttttgactattgtgtttctaggacagtttctcttctcttctcttctcttctcttctcttctcttctcttctcttctcttctc

SEQ ID NO: 1601 - DNA, 1000 bp, mus musculus
attgtcaactcactgagaaaaactgagtacttacgcgtacatcatggacccaggactaggaaggtttctatccagtcaccatctgatctctatcagccaggtcagggctgggaggctggaaaataatgacagtcactgaggacaagaaaggaaacaagtccagcaggtttactgagtgaggtttgctgtcttcatatagccagatagaagcatggtctatttggtcccagccattgccacacaatgaagtaatgaatgtcaatacctacacagagaagctccaagccatagggtgatcagtgtgcatagctggtgatgattcagaagtcacacttttccagttggggaggtatgatcagaattggggtgaggccagcctcgggtttctttttttaagcaaaacaaaacactagtatatactgttgccacttcttgctaaattgttagaaattttccatcacttccctttgagggaaacatgaggtgtgggggagaagagtggccctgaggtatggaggatagcacctgtgcctgtctccttggtagtgtgaccatggacagtccaattagcttatcgctgctgatgttccccacaagcaatataataaaattaatttcatctaattgtggccattttagttctaaagatagaaataaatttcactaaagatatgtttatactccaatggaaaaacagaaaagtaaaacaaacaacatttaacttttctcaccatcagaaaaatcttaatagattttagtgtcataaatcacccaatatttagaaatagtactcatataattacataattatataaacatatgaatctaaatatgtgactttctcataaaattacattaagttacagcatagatattacaattataaggtctacctttaaagattcaaaaccaaatcagacctactagtgctggtctgtaaccacagttgttcagaagcccgatgcaaaaggataagttcaagacctagaacgtcattgag

SEQ ID NO: 1602 - DNA, 1400 bp, mus musculus
atcagcagacgtgggagactagctctctcctctgagtttcagtggggagcagtttctgcaggcaagctctcctctttcagggaaggtgcacagttatctggtgtttgaacctcctcctggctgaagatgaaggcccaaaacaggatctttcccaggagctgtgttgctttgaccaggaaggtggccggttgtctggagccgaagatggcactacctcagaaggtctctggctctcgcctgtcccagaaacggctggcctctgtattccacaccctcacctgtgcagcctgcccttcacggagtcccagagccaaggaggctcccgccgccggggcctgaggcagaaacctctcgggccgggtggacccctgtgctctcaccaggaaggtggccagttgtctggagccgaagatggcaccgcctcagaagctctctggctctcgtctgtccctgaaacggctggcctctgtgttccacaccctcacccgtgcagcctgccctccgcagagtcccggagccaaggagcttcccgccgccggggcctgaggcagaaacctctcgggccgggcggacccctgtgctctcaccaggaaggtggccggttgtctggagccgaagatggcgccgcctcagaagctctgtcctgtatttctttaagggagttatttttgtccttcttaaattcctctattaccatcatgagaagtgattttagattggagtcttgcttttccggtgtgatggtgtatccaggacttgctatgttgggagaattaggttctaatgatgctgagtaaccttggtttctgttgagtatgttcttatgcttccctcctgccatctgattatctttagtgctacctgccctggctaaatccggctggagcctgtcctttctgtgatcctggttgtgtaagaactcctcagagttcaactgtctctgtgatcctgtgattctgggatcctgtgatcatgagatcctgggtgtatcagagttttgagtattcaagctgcctcctagatcctgagattctggtgtgaccaagttcctgtgatcctgtgatcctgtgatcctgtgagcctgtgtacgtgggtgcgttagagcatctgagtgtggagtttttttctgagtgttgtttgactgactgtggcgttagtgtccaacttctgctcagggcactggcccagactgaaaagaacccatgccactggtcgagccaactaccttctttttaaattcttttcagttgattcatctattccaaatccttatctacttacttacattatggtttccttacattgagcatataatttaatatagtattgtggtatttgtgattggcttcaatattttcaaaatctgaggactcttattattattgtaggcatgtgaatta

SEQ ID NO: 1603 - DNA, 1200 bp, mus musculus
acattgatggattttcgtatattaaaccatccctgcatccctggaataaaacctacttggtcaggatggatgattgctttaatgtgtttagattttctaaacatttcttatatggacagtgggaatcctccctgcacacagaagcaacatgcctgttattgtgcaagaagggaacgcacttctctgggagatggaggctggagtagtctgtacagggctttgcctgggacattttcaggctcagaatgagcctcatcttggccaatctatgggaattcatgaagcaatacttcaaagacaagcagcctaacatagcaacctgctgacttttttaatcctcagaatcacctgggtgctgctgatgctttggatagcttaaaaccctctaagtcaccagtaggaggactaggtcctgaatttcaagtatccaaatccacagcgttgcaatgcattctgctggctaactatacttgaccatttttggtaaaaaggtaacccttggcaatggggaaaatctaaagaagcagatcagacatttggcttttgcaagggagcgcccaaactcacttgcatatgctgggtgatggttccctgtagtacacgaaaatacaactttaggtactggcagaaagccctccttgagttgagttctctggcaagacttggcagagatgaaagctttactatgttaggctaccttgtctttttgcacaaaatggccagctgcactccactcatgtatggcttgattggacttccacaggcctgcagcatcactagagagcagcagcagcagcagatcaggaacaaccacttaatatctcttaacatcaatagactcaattctccaataaaaggacatagactaacaaactggatctgtaaacaggacccatcattttgctgcagacaggaaatgcacctcagtgtcaaagacaaacactacctcagagtaaagggctggaaaacaattttccaagcaaatagtcccaagaaactagcaggagtagccattctaataagggataaaatccactttcaaccaaaagacatcaaaaagaataaggaaggatattctacaaaggaaaaatctaccaagaaggatgctcaattctgtacatatatgctccaaatgcatgggtacccacattcataaaagaaactttacaaaagctaaaagtacacataccttacacaata

SEQ ID NO: 1604 - DNA, 1400 bp, mus musculus
gtaccacattttctttatccatattacagttgagggacatcgaggtggtttccagtttctggctattatgaataatgctataaataaactttaagaaaggcacaagcaaagatgcttgaatctcacttagaagatgcactaagattgtcataggagagctgggcggtggtaggctcgcctttaatcccagcacttgggaggcagaggcaggtgaatttctgagtttgaggccagcctggtctacaaagtgagttccaggacagccagggctacacagagaaaccctgtctcaaaaaaacaaaaaacaaaaaacaaaacaaacaaaacaaaacaaaaaaaacaaaaacaaaaaaaacaaaaaacaaaaacaaaaaacaaaaaaaacaaaaacaaaaaacaaaaaaaaaattgtcataggaggcaggtcgaaggaggaaggggaatgggggattcaggatcagatgtggggagggacaggaggatagccagccagccatgataatgaatggaaatttgcaaatgactagggtgggtagatgaggagaatctccaggaccttaaaaaggcctggataaaggagttacatgagacccaatggaggtgaccttagctgggactcacagcactggggatatggaactttcagaggccaccttctgtagccaggcaggaaacccagtgaaacaacagggacaccaatatacccacaaaattttctaccccaaatgtatactgtctacaagtgatgtaggctcgggggttgaagcagagacggagggaacggccaactaataactggcccaacttgagacacattccatggataagcacctatccctgacacgattaatgatactctgttatgcttgcagacagcagtctgagaggctcaacccagtatctgactcagaagaatgaaaaagcccacgacccaacagtggttggaatttgggaactcttatggaagagttgggggaaggtggccctgaaggggatagaaattccacaagaagaacaacagagtcaactaacttgcaccttaatacttaactatcaaccatagagcataccaaggctggacctagccccctgaccccgcacatatataggagatgtgcaggttgatcatcatgtgggtcctaagcaactggagcaaggattatcccaaagctgtttccttttttaggatatgttcttctaactggactgccttgtctgaccttagtggaagaggatgcttctagccccgcggagacttaatgtaccaggatgggggggggggggggggatatacaagggagccacggcctctcagaggagaagtggaaaagggactaggaggagaggattgtaggaggaggcagtgagtaggatgtaaagtgaacaaataaaaataaaat

SEQ ID NO: 1605 - DNA, 1200 bp, mus musculus
agcagtgagtcaactaaagaagataaagtggatgcaaattgaaaagaagaaatcaaagtattatttttacgtgatataataacatcatatgtgacctcaaaaattctaccacagaatccctacagctgataaatgctttcaacaaagtggctggatagaagattaactcaaaaatatcagtagcccccctatacacaaataaaaacttggctaagaaaggaatcagaaaacaataccttcacaataggtacaaataatataaaatttattgaggtgaaagacctataaaaccagaatttcaaatctttaaagaaagaatttgatgaatatatcagaaatggaaagatttcccattttgtggatcagatccatagaattagtatactaaaagtagccattcttccaaaagcaatctaaagattcatcacaatcctcaccataattctaacataattcttacagaccattaaagaacaatattgaaaaacaaaaatccaggatatatacaaaaatcttgtacaataaaataatgttggccggtttcaatctgtaacctggagctaaggtggtcccacagccctccacaaccaaatcccaccaggagagggctggtctcccaggagtattctcactcctaagcccacaggtaagataaccacttttgctccaatgactgtccaaggagggacccaccagaagcacagagggcacaggaacagcagagcatcctgggacaagatctttccagtttccatctgtgccctggagataaggctgccccacagccctctgcaccaaattctgccaggaaagagctggtctcccaaggaatgctgacacacctaagatcacaggtctacaggcccacaggagggacaagctccagtcagaaacagcaagaccaactaacaccagagataaccagatggcaaaaagcaagcacaggaccttacataacagaaaccaagtctactaggcaacatcagaagccagttctcccaccaaaataaatcctggataatccaacacaccagaaaagcaagactctgatttaaaataacatctcatgatgatgttacaggactttaagaagtctcttaaataaatttcttaaagaaatacaagagaacaaaagtaaacaggtagaagaccttaaagagaaaacacaaaaatcccttaaagggaaatacaaccaagcag

SEQ ID NO: 1606 - DNA, 1000 bp, mus musculus
gacatgcaatagccatctttgcgctgggaggcaaaggcatgaaggtcagtgaactccagaggtacagatcattctgggcaatcttagcaaaagccactgtcagccaggaagtccaagggcttgagtcctcttcaaaagtctgaaagggaagaatactctatttttaggaggaaaaactacatgcatgagaatatgttttgatgaaaatataaggggaagaacacttttgctgcagctattgtctgtgtatctgtgggaggaaaccaacatatttccaataaaagggaaacatacaaaaaaatctatgtctgtctggagttctgtcacacacacacacacacatacacgtgtgcgccatcagctcatgcatatgagagctgcttctcacacaagaatgtgaattcaaaatgtaacgtttacctcttttttaaccacaagagagtttttggtcccttttggtaaaagaatggttctacaataactgatctcgttgctcatgaactagccccacagaattctatctctgacaattcacaggttgacacagtgcagggtttcccagagtgtggtcacagactccctgagtctactcagatggagtatttttgttgccctagcctgccagcttccatataacgctcatgataaatattctccaagcctggtattttaccaagcatttgtggtgtatctcaggtgattattatttagactctatgctaagagcttggttgtgaccaaaggtcttcctgcaagatcttggggtccttagcatcatcctgaaaaagactatggaattgcatctctttgccattcttctcagcatcttcccttcctccatctccctcgccgtcttttttatttcaggtaggttttttgttttttactttattattaacctttagtaacctatagtaacatttaaatagggcatgatcaattatttataaataccatgtaattgcattttctcatccccttctaacccacaaggtatttg

SEQ ID NO: 1607 - DNA, 1000 bp, mus musculus
gagctcaggcttagcagttttagagcagacctgggagcctgggcctgagcaaagcctgggccttgtgctttcagacccccagccaaaggctagagttatcattaatcacactggtgagtctagaggactatcaagcactgagtagaaaacctgactttttctggttatgctagggttaatactggttaatatcctgtgaagtggtccctcactttctatagtagccaggacacttgggaccttgtcagctgaggtggggtgctgctcctgttcctcccggtgctccagtctctacgggaatttctgctcaaatcagttccttcactttattacaaaacctccatcactctaggggacaaggcagtaccccttctgcactggtgcttttcccttccctattccacttaatgtcacaagccaggataatcataacgtaagaggactggaatgttacagtgacgcaatagccactgagagctaacaacagctagcactcgggtgccaaacaccctccaaccgttctagatacagcaacgggtttcatcttcgtgacaatctgtgtggtactatcgtctgttattttttcccattatataatcaataaatttaggctcaaagagattcaataacttacaaagtcttcttgtaggccttaggctacaaaccattaattagaccccagacacgcatgctccctcttataaaagcaaagcacacctataaaggagaacagatgaacccatgatccagctcttacgctcttactaaatcttcctgactttgttgatgattgacttttaaggtccctctgaggacagagtgtgaaaatatgtcaggtgttaaagacctggactctgctcagctccacgtctggaacctcttctgggaactcccttgtgctggagcttaaattcattacagggcattcccgaacattaaggtagctttatggctataagtcttaaggtggcaaaccaaggataaacacacatccagacat

SEQ ID NO: 1608 - DNA, 1400 bp, mus musculus
cgatcggattggggcaggcgctgtgttccactcaccagaggtcttaggatcccgtggggagtcccgtgtgggcccttgcgggtgttgggcaagactctgctggcaagtagcccggggctcgagtcgagcggaagggacttgtgccccagatcaggcccgggtagcctgcttccctatgtaccgcagtctcaggttctgagcgatcggattgggtcaggcgctgtgttccactcaccagaggtcttaggatcccgtggggagtcccgtgtgggcccttgcgggtgttgggcaagaccctgctggcaggtagcccggggctcgagtcgagcggaagggctactttcttttttactagaattttggtatcttctcaaatttgacaatttttagcactttaattacttttgcctgcgagcagatttacagcaacggcttgcttcccctagagagcttgcctcgggatctcatctttggagcccaatgctcttgatctccatattttgatttgtttcttgcctggttgttgagcgcagtcaaggaagatttataaaaaggccatgttggggaggcagctgtggagtccttgcatgtagaatgtcattggttgttctcaaatataaaatactccgtgtttccctcaactcacaagactttccctaaaacctttgcgcatgtcttcagggtccctgaactttccctttctccaagtagatgaatgtagaaatgttatcactcatttccaatattattattcacgttaccccctgttgcttggagaattttccctttgtccttagaatgcatgaaagttaagggaatcagatacaaatctaccttgataccctgaatgactagagctctctgaagataacaagatccaggctatgacacttggtctgatttccttgctctctagttgtactctgagggaccacagttccctttgacaccctgctttggtctttcctgagtttcagggtctgaattatgctagtcagtttctatcagctggacacaaaacagttggcagaagagggaatcttaactgagaaaatggcactataagagtgtttttgtaggcatttacttgattaataatgaatgtggggtgggcagctcactggaagaattactacccctgggcattttatatgccaggtggtcctggacaatacaagaaagcaagctgggcaagtcatgggagcaagccagtaagccagttcctgcttccaagtttctgccttgagctcctgctctgaattctcttcatgctggagtacatccgtcaactgaaataaaccatttcctctccaagttgcatttggtcacaacaatcacaacaatggaaaaatctatttaagacaaatggatctaggaaaatcaggacatgtgtaaataca

SEQ ID NO: 1609 - DNA, 1400 bp, mus musculus
cctgtatttcctggatgatttgagtttggatccttctgcattttgtattttctttcattgttgtgccaacattctttatggaatcttctgcacctgagattctctcttctatctcttgtattctgttgctgatgcttgcatctatggttccagctttccttcctagggtttatatctccagcgttgcctcactttgggttttctttattgtgcctacttccctttttatgtctagtatggttttgttcatttccatcacctgtttggatgtgttttcctgttttcctataaggacttctacctgttttgttgtgttttcctgtttttctttaaggacttgtaactctttagcagtgttctcctgtatttctttaagtgagttattaaagtccttcttgatgtcctctaccatcatcatgagatatgcttttaaatccaggtctagcttttttgttgtgttggggtgcccaggactagttggggtgggagtgctgcgttctgatgatggtgagtggtcatgatttctgttagtaggattcttacttttgcctttcaccatctggtattctctagagctgtgcacaatacactcggcggggtcctggaaccaagatgtctgtgcagggtacactcggcagggtcccagaactaagatgtctgctaccaatgctcaggcaaagcgcttccgcgccaggcaggtccctatcctctggctgggaaaatggtcacctgcctgtgcaggatacactcagcgggatcctggaaccaagatgtctgctgctgatgctcaggcaaaatgctcctaagccgggcagatccctatcctctggccgggaaaatggccagctgtctgtgcaggatacactcggtggtgtccctgaaccgagttgtctgctgctgatgctcaggcaaagcgctcccgcgcagatcccaatcctcagaattcttaagatcttgtggctggtgttgtgggtatctggcagtattcagcctactctgcaccctagctaccccagtgctgctcggaccagagggggcttgtgcccctactcagaccgggttttctgctttcctaactaatgcagtcttaggtcccgcgcgattggattggagcagatgctgtgttccactcaccagaagtcttaagatcccttggtgggtgttgtgggtagctggcggtagtcagccgactgtgcaccctagctaccctggtgttgctcggaccggaagggtgattgtttgttttttaagacatgctttccctgtgtaactctggctgtcctggaactcactttgtagattaggctagaccgcctcatggagatctgcctgcctcttcctcttaagtactaggattaaaggtgtgttctaccacacttggctccttcttgtattcttta

SEQ ID NO: 1610 - DNA, 1400 bp, mus musculus
gtgcttagcaaagacatgtcacaaaagaattcaatatgcatttaggaagtaaattattagttatatttaatattaaacagtaatattactattaatgaaatattaattgaaaatgaaatcacagaaggaaatccatatcatatattgcccttattaattatactttacatataactgatattttactctatggaaatttaaaactgttatcttcaaatccatctcaaaatttcacagtaatctgccaataacaatataataaatatcttcatttcttgtatattacctaagaaaaacagtattgcaatttctagctttactcttttagaatcaaactaaagactattttcaatgaaagtccgggatgccaggaaagcaagaggctcccaggacccaacggggaggacattagctgaaatgcccaacaaaggggagagagtacctgtggagatcatatccagaggttaggcatgaccaccggttgaggcatgaggccacccacccatctcaaaaatattaatccagaattgctcctaagaaaaatgcagggcaaagagtggaacagagactgaaggaaaggacatccagagactgtcccacctggagatccattccatctgcagacaccaaacccagacactattgctgatgccaacaagtgcttgctggcaggagcctggtatagttgtcccctatgaggctctgccagagcctaatcaatacagatgtggatgcttgcagtgaacatgagcactgggccctcaatgaaggagaaaggcgaaggactgaaggagctgaagggtttgcaaccccacaggaagaacaacaatatcaaccaaccagaccccctagagctcccaagaactaaaccaccaaccaaagagtacacgtggagggatccatggctccagctgtatatgtagcagaggatggcctcaacaattggaggggaggcccttggtcctgtggaggcttgatgccccagtgttggggaatgctagggcaatgagacaggagtggaagggtgggtgggtggggaagcaacctcataaaagcaggggtgggggttatggaaggaaaaccaggaagggggctaacatttgaagtataaataaataaaataaccaataaaaattttttccaagaaaaagaaagttaaaagtaattaagtgtacattgctgtgctttctctcttgactcacttttctgttttgaagaatattgcacaaccatccacatgctttctttcctgctcagacatgattttggcacgtgactttggagaaaaaaatccatcatatccacgatccttcaatgctggcagaaagagagtaaagtattgctctgtttccacttcctaagatgaaggaaaaattgttatctacatgacagttcaaata

SEQ ID NO: 1611 - DNA, 1400 bp, mus musculus; identical to SEQ ID NO: 1610

SEQ ID NO: 1612 - DNA, 1000 bp, mus musculus
acagacagagacagggagagagagatgcagagacacacacacagatctaattaaaaaacattttcatcagagctgtctgctgattaaattgattaggcatttaaataatgacttggattcacatgatatctatgtagacacctgcctcatccttgaggagcaagcatgtttggtgagcaggctgacactactttggagtttacttgaggtgtcaggaatgagtcatcaccttgctgttcccaacttggagcttagcatgttgttgggcctgatttcgttgccattccacagacagtaaatttctcaattgatctttccattggcagaagttaggcccttttgttttctccacagaaaacaaattgctttgccaagtgataggcaggcagccacacactaatacttttcttttcagtctggaatcaggtaatggtggtccatcattcttactgacagtggggatgacacgctggcctgtcctatatcttttagcacagcccaaggacaggaagattggctggaattttatcagcaagttcaagagctgactgtaggagtggtgtggacaggaatagataattagctcctgaaggctcctgtcctattatcaccaagtcacccggggcctttcctgcgcctccacttccccctttggaggaacacaatcgcaggttatttttttgttgttgttgttgtttttgattcacatgttcctgatctttttgatgtagcatggctctgtgagtcaaatccaaactctggctggtgagctcaggatgggtaagatatttttagatggttagaaaatcaggacaattattttgtgacacatgaaaatggtattcagtgctgcagtaaaggttgactggaacacagtcatacggatttatttacatgctccttgtggctttttctcagcagtcttgacaacagtgacatagttgagtatttgcaacagatatagcgagtgggccatcaagtctggttgaggcacgttagg

SEQ ID NO: 1613 - DNA, 1000 bp, mus musculus
gatagaagtccttgccaacaagtgtttatttttaagacccggacagcctgctcactatggcaattccagcaggcactgtgaaactaccaatgacacagaagagacatgagaaagaagcgagtcgggatgacttgacactaccctgcgagtgcgatgactgtatgctgttcctttagatattaataaggatgggtgggagatgtaagtgatcctgttctctgggagtcaggaagagaagcatgctgctcatttgatttgcctttagcacgagaagttgtcattcagtggcactggcacagagagaaggggctggatggtagctgctggtatcccttgcatctccacctccaagatgaccacgttcattttagagatcagacaaatataaagctgacattgtggtttatgctttacagaaattgaatgtatagtctcagggtctcattttaagcccagagaattcagcggttcctgtcgcagttgaatggtgtctctgggcaatacaacctgcccttttgtagacacagctgacgatgatggtgttgtgaaagaatgaactttttacaatcatgcgtaaatccttcaatcactgtgtgcttgatgctcttacagagctcgccctggaaattctgacagtcacaaagactcaccaggagctagaacactacaggcactcttaaaattctttgtaacacaacctgttttctcctagcttacaaccttgcttatgaccctgcctgcctgttctatactgcctctgcctgctgccctgcccacttacctgagcatctgaccctgacaactaccttccctttgagccaggttttgtccttggatgtcctggtgtaaggctgggcctggcttccagccttggcactgcttgcttgcactgaccccaccttgctctgtgtgctaaacacgtcaagtaaggcctcttgctatttaggatgtttgcctttctctttcagagcaaaaagtaatctctatagattataacatg

SEQ ID NO: 1614 - DNA, 1200 bp, mus musculus
caagaattttattgagtagttttgaattggtattcataagcaagattaatctgaggttttctgtctttgttggttctttgtgtggtttaggtatcagagttgcagtggcttcatagaatgaattaggtaatgttccttctctttgtatttcgtggaatagtttgaggagctttgaaggtctgatagaaatctgcatcaaaaccatctggccctgggatttttttgtttttgttttttgtttaggaggttggttgttttgttttgttttgttttaaagatattttcttcatttacatttcaaatgacatcctgaaagtcccctataccctccccctgtcctgctccccaacccacccactcccacttcctggcccttgcattcccctgtactggggtatataatcttcacaagaccaaggaccttccgtcctattgatggcctactaggccgtcctctgctacatatgcaactagagacacaagctctgggggttactggttagttcatattgttgttcctcctatagggttgcagacccctttagctccttgggtactttctctagctccttcattgggggcccagtgttccatccaatagatgactgtgagcatccactccggtatttgccaggcactggcatagcctcacaagagacagctatatcagggtcctatcagcaaagtcttgctggcatctgcaatagtatctgggtttggtggttgtttatggggtggatcacaggtggggcagtctctggatagtccttctttcctgcaaaactcatgaaactcaagaagaaggaagaccaaagtgtggatacttcattccttcttagaatggtgaaaaaaatacccatggaaggagttacagagacaaaaaatttcagagctgagatggttaggaggtcttgaaaactatttatttttgtaggggttattcgagtattttgatagtttacctgatcttcatgtaactttggtaggtggtatatgtctacaaattgacccatttcatctagattttccaggtttttagagtgtagacttttgtagtaggttgtgatgattttttcaatttcctcaagttctgttgttatgtctcccttttcatttctgatcttgttaatttggatactgtttctgtgccctttagtaagtttggttaaggtttcatctatctttttgatttttctcaaa

SEQ ID NO: 1615 - DNA, 1200 bp, mus musculus
aaaacattgcttacacgcgttgttaaaatactgtgtgaagttgcaatgttttgaaacagtgtctgatcagaaggacaaaatcggatcttttttactagatattttctttatttacatttcaaatgttatcccctttccttatttctcctccaaccacccccatcctatccccctccccctgcttactaacctacctactcccaattacctgtcctggcattcccctacactggggcacagagccttcacaagaccaaggacctctcctctcattgatgtcccacaaggccatcctctgctacatatgcagctggagtcctgagtacctttttggttggtggtttagtccctgggagctctgggggtactggttggttcatattgttgttcctcctatggagctgcagaccccttcagctccttgggtcctttctctagctccttcctccattgaccctgtgctcagtccaatagatggctgtgagcatccacttctatatttgtcaggcactggcagagcctctcaggaaaggccatccagtgactgtcccacatgggaatccatcccatatacggttaccaaacccagacactattgtggatgcgaaataggatcttaaggtcaatatgttggagacacctttggatacatttgtaccaaaacattgtaaatcagcatggttaattacagccctaagtttcccttttactcattgttatattgaaatgttaactgctagggctgggggtgtggctccatccatgaagcccctacggtgcaagcatgatcacctgacttctgatccccagcttctgggacaagctgagtgggaggcaagtgtttataatgccagtactgtgagcagggaacagacatggatatcttagaaacaagtagtgtagatagtttatccaatctgtgagttctaggctccatgagaggcacagtctcaagtcaggtggagggccacagggctgactcagcagtagaaggtgcttgtggctgtcttacaacctgagttcaatcctcagaccccagactattaaaggccaaacctgactctcacaagttgccctatgaaatccatggaaccatggcatgctctgccttccctatcacatcacaaaataaataagggcaagttaaaaaaaatactgtggagagcaagagaagacacctccacaaagacacaaacacac

SEQ ID NO: 1616 - DNA, 1000 bp, mus musculus
tgttgtgcttctcaggatactcctgagtagtggactcaactctactagaggagcaaactttgggtcaccgtcctcatcagctgagtcatcaatctctggggtgggccaaagcaacctgttttacatggccatcctaacccctggtaatttaaactcaggggacctcccagtaaaatgaagaaatgagaggaggagggagataaagggagggaaggtggatggagaagcttggacattaaaactgccttcatgacaaatgtttttcaacaaaccaaagcaaagtaagcactatagaattcccccagggccagggtcccctcacaaattaaagcccaattctctattgttttaggcaggtcaatttctcaggagttaaaaaacaacaacaacaacaacaacaacaacaaaatactttcctcatttcccaactccctttgactctgtcacagttgaaaggcttctggtggtacattcagtagaatcctctgtttcctgtactaaagtgtcagcagcatggagcacggttggatactgcaccattatctgcatgctgagaaccccacaaatccattcactgagcaagtatttcccgagaggctggtgtgcaccaggcactattgagtaagttgagaacaaagtaaagaataaagtaaaagtctgaattttatgggccttacaatctaaggagggagaaagtaaaatgtcaacgctaagaaagtaagcaccagacaaatggatctgtgacagaaaccaacacatggcaaagtgacagtgcctagaacatatttgttactttccttagaacggcgtgatggatcaaacttgaaaaactgactccaaaagactgtgttttgtctgaggaaatgccacacaaatgggcacaccaaatcaggcatggctgtgcatgcctgcattcctagccctcggagactaagtctggattgtgcatctgaagcaaggctgaactacataatggctcctagtctggggtacacatgga

SEQ ID NO: 1617 - DNA, 1000 bp, mus musculus
agagttcctagattagcaaagctaatttctaaagaatgcatagacatttccaggcacggaagacaggggtgtggtgtttaggcagaaggagcagtgtgaacagcaacataaacctgaaaaacagctgcatgaagggaaatattagcaatttggggttaccacagcatcaattttaaacttggagcaagaagacaggaaaggccatgaaagctaaatgacaagcctcgaatgcatgctataggtgccagtgagtccctgagaggaatttgtgtcaaggagtgagatggctgaatttatatgtgagaaacatccctgagggctgggtgcaaggtgggtccagcagatagaaatcaggaggcaaggagacatacaaacactgctgccgagggtggatgagggccgcagcagatgcgcgaggggcagtgcaagcgattgaaagcagggctgagcgggtgagcaggcacaagtggatggctgacgggctctaagtctaagactgccgtttctcaatgatcagaactgaccatcattaaaggtgagatggcacactcagaggaagacccagggcttggtttgggacatgtcacaaagctgtgtacacaacttgtgttgctgctcttcttgctgatgcggttactctgttctttggttctgaagaatagctgtgtttatcatttcctacatatatggattctgcatagttttctaagatgtacagttgacagaaacaattaagacctgagatctccagcacccacagaagtcaggcatggctgcacacacacacacacacacacacgcacacgcacaggcacatgcacacatgcacacatgcacacatgcacacatgcacacatatacatacttgtaccattgtggagaccagcagatcttgagagttcactggccagcaaacctagccaaaatggaaagctttgaattcattaagaggtcttgtctcaaggcagtaaggcttagagacacgaaagaaaatatcctg

SEQ ID NO: 1618 - DNA, 1000 bp, mus musculus
cagtgcccagtgcgagtgtctctgtgatttctgcagaagggaaaagaaaacaaaaaccaaaacctgatggaaagaagacagttgcccacagcaccagctgccagaggaaatgccatagtgagcgagggtttgctttccatctactagttatgggctggaaagtttaagagcgttcatcccacagcatgtcaggttagacagacagtggagcaagcttcaagtggctacacacacattcctctattcaagtcttgaacacctctgccattgggtatggggaaatgagggtcgtgggccacaggagggcgctgctttccaaaagtgtaaagtaacactgttgcaaagcgtccagaggcagcagggccgctccctactgtgcaaaagcagtttctgcaatggagggacaccggcatccttctaaagaaacaatcaggggtgggcaacactgaaaggaaggaaagcaaagcaaagctcttcaggtgagaagcgttaatgctgacaatccttttattcacgtgtgtatttgagcgtttaaaaatggaagtgttgggttcgattttgatatgtatcacagactggaggctgaaacctagaaaggaaggttgaaatttaggaagcataaggcactaaagcagccttcacggtttctcctggagacctgcttatcagggagaacaagtttgttccgaagctgctttcagcccgtagggtacaaggtcactgttgtaccacatgcctgtttctggacacatgtgcatatatgtgcattttagtgcataagtgtgcctgtcaccagggctaaagatggagagctggggaagccaaagccactgtcctttgcgtgaaatctccctccatgagggtgtcaaggcctgtcctttctttcttgggccattagtgaccccatgttgttcatcaaatcacagggcttttagaattgttcatagtattagtgctaagtatctgaaaatgttaaaatctagattaattgttttgattt

SEQ ID NO: 1619 - DNA, 1000 bp, mus musculus
taaattcattgggaatgactataagctttgaaaatgaaaatgctgggcagtggtggtgcacatctttaatcccagcacttgggaggcagaggcaggcggatttctgagttcaaggccagcgtggtctacagagtgagttccaggacagccagggctacacagagaaaccctgtcttgggaaaaaaagaaaaaaagaaaaagaaaaacagcagtcagcactaggaaacatactgactttcaagcctgaccgtctaaaaacagggtgctgagctgagcttcatcctaggtttacagagccagcagcagagccccccagatctcccatgctgagcaacgggacacaaataaggaaagtttgatgcctttgtttgtgtatgaaccacacatacagaaaaccagggcaggacagagctgcctgccgcgtcctttcggagattaggaaaactgagttatagactcagaaagcaggacaggtacgtatgctcccttgagatggggactatagaaaatatttggttttgctgaagaaaaaaaaagtctcagagctgggcgtggtggctcacacctttaatcctggcacttgcgaggcagaggccagtccggtctgtcgagtgagttccaggacagccaccaaacaagcaaacagcagcagggactcactcttgtagctgaggctgatcttgaactgaccttcatctctagttcctagcagctgggactacaggactatgggtctggcttaccacacctactttcttttgcttttagtgaatcaaaactacatttgtaaaatctgcatctctagtcaatgtgtgctggaggccaatcccaggccttcatacatgctaggtaccaggtagcttcagtcatcagtttgacagacctgggatgagggaacaaagtgtctccgacagatggggctggttgggcttgtctgcagggcatttctgggcagagccattcctaggcaggtggggctggactgacccagagcctagaa

SEQ ID NO: 1620 - DNA, 1000 bp, mus musculus
tgagaagcttgattgctggctggaacacaaagaggtagctatggtttggatacaaagtttctcaaaggcctgcatggtaaaggattggtctctatactcctgcctgcttcctatccttttgtttcatagctgacttcaagtgagcaacttcctctgctatggccctggccagaagccacaaagccaactgccctggactaactcctctgaaacagtcaaaggagtcctttcctctcttaacctcatcgtttctggcacttagttacagcaataggaaggagatcccagaggtaagagaccgagctggaaaagacttcctgcagagtacaaaggagtttgaaatccatgctgaggtgactctgacaggtgtctgcatagaggaatgtgatcagacctgcacttaagcgcaatttctgtgtctacagacctaaggctggtgggtaaaggcttgttagagagcaattaacactgcccagaagggaggggaaaatctgtgaggcagggccatgggctgtggaaatggatgaggggagatgagagacagatgatgaataggcaagaggtcaactgttagcatgatacttttaaagcaagctttctgggtcctcgagatgagggataaagtattttcaagatcctgacttattacaacaatgggctactcagggtgccaccttcatgggaaggcccatagtctgagaaacaggcaggcaactaaaaaagacgaggccatgtctgtattgttagttcagagccccgagggcttggttacacattgctgggagagctttggcttcattggctcaagctaaaataaacttccttatttcttctgaaaaacttggatttactgacttacgtgatgacatgtttaattgaattgaatttctaagtggaatgtcacagcgctttgctgatgaggaaggcatctgatcttaatccaaaaaaataaataacaaaacttaaaccttggatgaactgagatagagtcaatactctg

SEQ ID NO: 1621 - DNA, 1000 bp, mus musculus
tggctccttggagagggagggtatggatagaggcagggctgtgtccctgctaagcaggagctctaccacagaccagtgtccctgctgtatcacagggctgcctcacagtcatggactcataataaatgcgttttctcctcttgcaagagcatccccaaggaaccactataaaagcaggggcagctctgctttccaggccccactgcgtacttaggaagagtgttttaaatctgtttttcttcagagccagtggtctttgctgccctcaccttgggctctttagtgggcccagtcattgcaagttcaaagggtcctcattacagaatgaagtatattcctgcttcttcctgtgttgggaaccaaggagctgaaataaaaaaacaccaaggagacgtatatcctggatgtctatgacagtaataccctttcagggtgccttcaacagataaaatgtgttagatttctaatgctgtctggtaaaacaattacaaggaatttgggtggggtcaagagaggtggctcaggggtgaaggtgtttccacgtgtacttgtcaagctttacctacacaagctagagtcactcagaaggaaccccaacagaagaattaccggtatcatgttggaccacgggcacattgatggaggcatgtttttaattaatgttgatgggggagggcccagcccactgtgagtaatgccacctctgggcacgggtatcctgggtatcagaaaacaggctgagcaagccatgagaagcaggcgaatgggcaggattcctttagggtctctgatccagtgcctgcctccaggtttctgtcttggctacgctcaaggatggactgtaacctgcaagccaaacaaacccttttcttctcagattgcttttggtcatggtgtttattgcaacaacagaaaagcaagctaggataccacctaagctggataatcttgagtcaggtggtagaaggaaaaagctgaccccccacaagttgtctttcaa

SEQ ID NO: 1622 - DNA, 1000 bp, mus musculus
tgactgtcccacttggggatccattccaaattcagtttctaaacccatacactactgtggatgccaacaagtgcttactgaacaggagcctgatatagctctttcctgagaggctctgccagtgcctgacaaatacagaagtggatgctcacagccatccattggactgagcacagggcccccaatggaggagctagagaaaggacacaaggagctgaaggggtttgcagcccctaagagtaacaacaatatgaaccaaccagtacccccagattcccagggactaaaccaccaaccaaagggtaaacatggagggacccagtctccagcggcatatatagcagaggactgccttgtaggacatcaatgagaggagaggcccttggtcttgtgaaggcttgatgtcccagtgtagggggaatgccaggatagggaaataggagtgggtgagttagtgagcaaagggagcggggaagggatagggtagttttcagaggggaaatgaggaaaggggataaagtttgcaatgtaaataaagaaaacatctaaaaaaattaatccagaattattcctgtctaaaggaaatgcagggacaaaaagtcgagtagagactgaagaaaaggccatccagagactgccccacctagggatccatccagagactgccccacctagggatccatcccatatgcagacatcaaacccagacactattgatgatgccaaagaagcacttgcagataggagccaggtgtagctgtcccctgagaagctctgccagagcctgatcaatatagatgcagatacagccaaccattatactgaacatgggggccccaatggaggagttaggggaaggactgaaggaactgaagaggtttgcaaccccataggaagaacaacaatatcaaccaaccagactccccagagctcccagggattaaaccaccaaccaaagagtacacatggtgggacccatggctccagctgcatatgtagc

SEQ ID NO: 1623 - DNA, 1000 bp, mus musculus
atctaagtggattagggaacttcacataaaaccagagacactggtcgagggtatcgcttgggaggccaccgcctcgggccgaaggtttccgacagcagctcagctcaaccctcggttcgacttccgaaggagcccgcggcggctccgcggccgactcgtggggaacgcccgaaggagaaccaaggcatccagcgagccgagagttaactgcagcggagaggcacatcgtcgagctgcaccgggccgcctgcgcggtgaggcccgctccagcctgccccgcgcgcggcctctgcgcctgcgcgcgcccggccacccgaccccgaggcggccgggccgggaggtgttggacctccggcctggggcgggtcggcctggggcgtccgctcagagggtcctgcgagaaacccggtcgcacttttgcgttccggacagagaggtgtctgccctgagatgggaggctcgcgaggctcggtttttgatctgcgtcccagctaaaggcttgtctcggtttgtgtgtgtgcgcgccctccagcgtgtgagtgtgttgtgtgggggaaatgggtgctgaggaactgagggtaggactgagctcttacagggaacgtatgtagtacagacatgttgcctgtgcgtgataactcgagcagcctgccatccagtgactttagtaatgcaaacataagacagacgctttacatttttgccccgtgtcctctcatcctttgcctccagtccaagtgagcgaaagaaattataatcaggcaagtttgcatttttccttaggcattcttaaatcaccttttcttctggtttatggatttgacaattgcttgtcaccaccaatatctaaccttatctcccttcagtttcctgacactttagaatacaatagtttgaagatagcattatttatattttaagttttataatgatataagagtgacttgtaataaatctgtgtattaagctctgtgtttggctagtacttgataagaccact

SEQ ID NO: 1624 - DNA, 1000 bp, mus musculus
tacattagatggaaggtggagttttaggcatagaagatacaatagaagaaattgatcctttctggtttctgtcttggcctggtgatgatcctgtgccacagcactccttaccaaaatactacctggcggcagcatgttttccaggagtgctgacaagctgtgaacaaaggtaagaccactacttctgttcagacctgcctggggccctcaggtcacaagaaccaaggagcaacctcagacaggattcttcaggtttccatctgtgtcaggaactgatcctgttccacagtgctccatacacaaataccataggtagagagctggtctctaaggagtgctgactcacttgtgagaacaggtaagactaatacttctgctcaaattcctggcctaatagggactcacctagagtcatcaggactcaggaaccaaggaagagcccaagacaggatctttgttgtttcagtctgcatcagagctgaccctctgccacagctgtccatactcaaaatcctctgagagaactggtcttccaagagttgtgacacacaggcttacagaagggacaaaccacacccagagtcagcaagaccagctatcaccagagataaccagatggcaagaggcaagggcaagaacctaagtgacagaaaccaaggctacttggcattatcagaccccagttctcccaccacagtaagccctggaaacctgagcacacaagaaacataacactctgatttaaaattacatctcatgatgatgataaaggactttatgtaggacataattcccttggaaaaatacagttgaacacagggattgaactcataaaagaggaaacacaaaaaatccttaaagaattgcaggtaaacacaatcaaacaggtaaaggaaatgaacaaaactatccagcatctaaaattggagatagaaacactaaatacatcacaaacctaaaatcagacatggaaaagctaggaaagagatgaggagtcata

SEQ ID NO: 1625 - DNA, 1000 bp, mus musculus
gatggttgtcagatggaacctcagagtctttttttttttttaatttccgaggtgactatggactttgaacatttccttaagtgcttaatgagcatttgagagtccttggtttggtctgtggctggagcacaggaaggcattgaggtgggaggttagacagtgctcgttaggggaaagcctatcccatcgttcaagcatggcaggtcttgatgagcagagatagtgtatggttttagagctttagtgtagaaaagcagggagaaagagaaaagggagaaaaggggagaggggccagccatagccatgtggagagaaggtggaagggagagagagtaggagggctagagaataagaaagatgagagcttaaagagatcgaggaggggccaagcagctatttttatagtgggctgggctatcagttaactgtgggaaggagcatacctggctatagtcaggtaactgtgtggagtctagccaacatgccagaagcttgaaacattgtctgcatgacttacagttacataattatggagttggggactctgtggtgtcaggcacctgtctctgggaacatggctcattgtttcattccaatataggctgcttatcacagccccacaatcaacaaaagccatggcattatgagtccttcagaacatagcaacccttttacagcaatcggagatatcctaacataacagaagctaaagaaatgaccataaatccagtcttataaaggtgatagaagcctgttctctggaagtaccttgtctggcctcagttggagaagatacaccttacttttgagacttttggccccagtaaaggggaggatggagggaagagcactctctctgaggacagggatggggaatgggaagaagaactgtgggaggggaggaggagtagggcaatgtgtggaatgtaaaaaaaaataactaaaaaaatgaaaatgtgtatttttacacaatggacaattacacatcctgtacatatga

SEQ ID NO: 1626 - DNA, 1400 bp, mus musculus
tctctcttttgaccgatttttatactataaaattctctaagaaatcctttccatggatatataccattcaccaagataacatttagtaggagacaatcttttttgttgaatatcagtgagttttataaaaatgtgtctcaaaaaatttttcttttttaaaatattttttatttatttgataatatttatctttaatctttttttataacccagttattatcccccttctggtctgccctctgagattttctcactcattcctcctccagctgtctccaagaggatgttcccattcccacactacccccaccactccaggcctccagtctctccagggttagatgtcccttctctcactaagtccaaaacaggcaatcttctgctatatatgtatcaggggccttggaccacctagtgtatgcagctttgctggtggctcagtgtttgagagatctcagggatccactttagttgagattgctgatctacttatgaggttgcactcctctccacttcttcttccaaccttttcccaattcaaccacaggggtccctgaattctgtccattgcttgggtgtgagtatctgtgagtctctgtcagctgcttgtagggcctctcagagtactgccatgccaggcttctgtctgtaagcaatcatagcatcagtcatattgtcatgctgcggtacctcctgcagaatattccattcattctgctggccctcagggcttcacacttgtctcctacctccacattacctgatcatattccctctttcccctcctctttccatgatggttttcttctctctcctaactgggattggggcatcctcacttgggactttttacctgtcaacattcttgagttctgtggattgtgtcctaggtagtctgtactttttggctattatccccttactggtgagctcataccatgcatgtcattttgggtctgagttatctcagtctagatgatactttctagttccatccatttgcctgcaaaactcatgatgtcctcctttttaatagctgaatagtattccattttgtaaatgaaccacagtttctatagccattcttccattgtaggacatctgggttttttcccacttctggctatcacatacaaggtgactataaacatagtagagcattgcccctttggcatgacgggacatctcttgggtatatgcacagtagtagtacagctgggtcttcaggtagagctatttccatttgttttttgaggaacctccatattgattcaattagttgttataccagtttccaaacccacaccagcaacgtaggagtgttcctctttctccacatcctcaccagcatgtgttgtcacctgagttttttatcttagccaatctgattcatgtaaggt

SEQ ID NO: 1627 - DNA, 1000 bp, mus musculus
ctgttcccggtgtcctgatgcctatcgtctggctaggctacctttatgagacaagctggctaagtcaggcctggtggtacagacacctttaatcccagcacattgtgggtagaggcaggtggatctttgtgagttcaaggccagccagtgacactctgtctctcttagttcaccaccccccacccccacctcctaaaaagacaagcagacagccttgaacattacacacaagcctcaaggaagctatactttgaccacaggtgcttactgccaaagcacagatctggctcctaaagtcctgtccaagtcatgatttctccaacagcttgtttcaggcatcccagtgaacactaacagtcacttcctctcagtgcagggcaaggcacgagagctgtaaaactcatcaccatggacctaagggtcctggaaactgaggcccacccacgaggtgcagtactggtaaatgctgcttactgctgctgtcttcactgctgttggaagctgaggattacaatagctgccaagatccagggcttctggtggttaaagcccagagcaatagcctccaagctgagaacagagaacttttggcttctgaagctggagcaatagatccctagttcccagaggcctggagttgtgagcctctaggtctgtctgtctagtccctaggtggtaagcactgagagccggggaatgttagcattgcgagagcatcttcttgctgttcataattcctttctgggtagagcagaagaacccagtcagctgctgaagaacaatgtggcggtgtgtgtgggtgtcccttatgttcacaaacaagcacaaggcagcaggaacttgccttctcagctggaggccattgagctagctcctctgagtctctttgtcttgcaggccttttccaccttgttgatgccaggatctctggactccagattcagcctccattcttgtcttcggagatcctgtgtatgtgtgtttgagcctcaattatctc

SEQ ID NO: 1628 - DNA, 1000 bp, mus musculus
ccttgatgggtggctgtgtgggactgagactgagcagaaccacactgggtctctaggaagtgctctgtcctccctgatcccagtcaccacagggggtggggccctcattggcctggcctctggtgagcagaggtgagtggactgggagtggactctgtagggtcgaggtcagggtgcccctcctattcccagaggggtaaggcagtgacaggctgtagcactcgtgtgtctttgttccctcctctttggccacaaactccactaacagggactagaagtccaagacaatactcaaagccttttcctgtaattgcctataagggaagaggtccagttccatgactttctgtgttgacatttcattttctgtatacatggctcaggcacacatgcacacacagcatgcatgcacatgtgcacacacacacacacacacacacacgcacacacacacaggatatcaatgcatgcttgctctatgggcgtggggcagggcctctgagtcttcccttgcccacatctgtcagtggtaaatgattaccacaggaaaacatagcagattaagtgactgcactgtttcttatggctttcggcatttgcaccaagggatgcatgcactgcgagaatcgataaaatctccagaaaggacttgtagtgacacacggtaacaagtgtcacatgcacagtgtgccttctgctgcagactctcacatacgctcccgtatggcactcagaacagtccctgagtgaagcagcagatgtgcaccgaagtgcgtgtgcctccgattcctgcacgacccttgcaggaacaaccggagtgggaaggaaacatgtcccttcagggcccttcacacctgccaagtgctgtgtaccactgcccatccctactcctctcctgcaggtgactagcctggttcacctgcagggaggagggtctgctggtcttaggtcccaggaacatatctggaagggtgtgattccaccccatcacccaggtgtt

SEQ ID NO: 1629 - DNA, 1000 bp, mus musculus
aactaagaggggggggcatggctggcgccagggagggacaatggcctgaagagggaacggggagccgcatccacagcttcccatacaaggctttcaaaagagcagctgtgggaagccagtgggcagagcccagtcggcaagggcaggggacacggggtgttctgtgccagctgcctagctgcgccccatggcaccccagtccacctgctgcatcaggactctcccggagctgtcaggcacgtcaggcctcatgggctccccaggactgagcatcctaccattctcttctataaaacagaccaaagtcacctctgtttcctctgtgggtgcagagtgccaagagagtggttctctggaatgttggcctgagaatttgggcctggaaccagtgcttcctggaaaagcatgcagggatcgattagcaatgtctgacgtgagtgcagggtcaggcatgtggggcaagggaactatcaagggattggagcgttaccttgcctgcatggggttgaatgcaggactcctgtggacacccaaatctgaaggaggtcttcatgcttcttatgtagagcgtgtgtgtgggcctgagagcaatgcgcagtctcccaatatttcaaccggctctagatgactacccacacctagcatccaggaaatgtgttgcaggatcagggagtaaaagaaaaccagtctatacctcagcgcacaggcctttggagatcaaccctttcagtcccgggtcaggaactgtggaggggctggctgttttccttcttcctgtgctgtgaattttgaggtaaagtaggaagactcctgggtcaagtgagaattgtaccaggggtggtaatcgagccttgacatttctcaagccacagccacccaggggctgataaatctagcttcataaatgcaattatgaaatgctcactaaggtggcccttgttattctggaacccagagctctagttggaggccagcctgggctacacagtgagatcctatc

SEQ ID NO: 1630 - DNA, 1000 bp, mus musculus
tgtacatacatgtgtatgtgcacctgtgtgcagatgtttgtataccactgtgtgcatgtgcacatatgtgttcatgtttgtgtagttctttttgcatgtgagtgcatgtgtgtgtgcatgtgtgtgtctgtgtacatgtgtgtgtgtctgtgtacatgtgtgtgtgtgtgcatgcatttgtgtgtttccagaacgttcctcccctgcctgattaaagctcagcggcagggctgtggggtagagaataccaactctatgcaccaccccagcacacattgcctgaggatccacctaggacttcatatgcactctggttcagtgagaattccacacgctggaagccaagatcacacatcaaaggggaattcctccttgagtctgtttgccagatcagggctctgcaggggcagaagctctgcctcctccccataagctaagaccattctgtttgtggcacctgacacctctgcctgttcaggtgacactgagggacaggatgggggacacagcccagtacagaacttcccacagcctacagcctagtgattcccatcagatggtctgagggtgggtggaagacaatgcaaggtcctcaccccagtgagctcaggggcagaacgggacttcgggtctccaactaaggctaggggctggggtcacactcacgtgccgctctgcacacgcacggaagacaccttttcctggtatccatgggcatggaagctgggcacatcgtcgtctacaatctccatcttcttgccagtaaagttggggttctcatataagatgatcttgtgctcttggctgtcctgtgaacaaagcacggtgggtgaagcctgggatgcccctcccatcctatcccatcctccactcatctctgccaatatgtccacctccaggtgggactagggtcccctgactggatgcctaaggagcaactgtcatgggacagccaagctcgggtcctgtgctggtgaaggttttgattctgagactccag

SEQ ID NO: 1631 - DNA, 1000 bp, mus musculus
cagctgccatctctataactccggcccttttctcccacaggtctgagtcagccaggggcccccaagacacagatttttctgaatggcgcctgctccccgtctctgttgccagccctgccttccccggtggccttccctctgccagtggttcctgactacaggtgagaggggctgccgacaagcccggcctggcaccgggacacacagtgggggggcagtcagtcccctctttcatgttgacattgtttgttacctagttatttccaagacatgagtgtgtgcacatgtgtaaagtgtgcagagaactgtttcttgggcctccagctaggcagtcaacacaaaccttagcacttggacgcatgttgtactcagggcacatccttgaagttaacagccgtagttaacaattaggtgtgcctgtgaatgctcacactcacctcctgtagtgtaacacacagggctctttaagctttggctttgcctacaaaccccaggtctgtcataaacaattggtgtttttcccacccatcagctcctccacatacctcttccgcttgatggcagttgtcgttcaccatggagacatgcactctggacactttgtcacctacagacggtcaccaccttctgccaagaaccctctctcaaccagcaaccaatggctgtggatttctgacgacaccgtccgcaaggccagcctgcaggaggtcctgtcctctagtgcctacctgctgttctatgagcgagttctgtccagggtgcagcagcaggggcgagagtataggtctgaggagtgacaggccagcccagagccagggcccatggtgaggtccacactgtccaggataaaagcaaaggcatgccacgtgtacacgtgcaagccagccctctagagccctcagccttctgtgtattctgagagcaggctccacaagggagccagacccacacagcactgccagggtgaactggaagatgtcctgtgtgtctagagcgtctt

SEQ ID NO: 1632 - DNA, 1000 bp, mus musculus
tcttactttccattcaatgtcaccaggcagatggtgctgtagtggagacattggtgcatgggtgagtgtcctcccctccagtgctgggcaggctgctgggagctccacccgtgctggaagcactgcacttgccacatctcttcacaagggtcagatagggtgggacgcctgtgagagcaagggcactgactggttctgtccctgacgcttgtactttgcaggggctgggctttagtgcagactgaactcatagggtcccccaactgcttgtttaccagcttccccaggcaaaacagtgtgcgtgaagacctggaaggacctgttcccgaagcaggctgagctcactatgtgaagcaggtggacgccagaagcagaaacggaagcagaaggaccatctgcatctccctcctggtgtgaagtgtcagaccctgggaccctccccatgccccagtggagttggctgaaggctcatggctgagttcctccccaggagctagaactagaagctcaggtttagttatctgggatgtctggacgcgtgcagagactcctctactacaggatgtcacagttgctttaagatgctgctgtctggacacagtgacactcccctgtggctcctgcctactccataggctgaggcaggagggtggcaagttcaaggccagagtaggtgacttagtgaaaccctatctgacaataagatagaaacgggctggggacgtcgtctggtggtggtcacctagcacatggggccctgggattaacacctcagtaccacaaagcaagcaagtaacccacaagtgggaactatgtatctttgaggcaaggatgcagtttttagtgtttctcaaacatcctcggctgtggaacctgcttcctcattgtgtatttgatagggtgggtgctctgctcaactgctctgggacactctgggcaagatgttctgtttgcttatggtgcttgtttattcatgcatgtatatgtttatttattcatc

SEQ ID NO: 1633 - DNA, 1200 bp, mus musculus
catgctccttaggaaatgaaagtctggactgggcctcatcaataccttcagatccttggcatgtggcaaattctgaacagaaccagggctccccaaagtgctgtcaggtattagaaccacactcagggagactgactccgggagatctaacctggaggatcctccaaaccaaacactgacagaggccggatgactgtgattcctggcgagtccatgggaaccaagagcatagattgttgctggtgccttggggcctgtgggtctgtttttcccataaacacacagagtttgcagtgaggatgcaggatgcctgtcaggaagaagagggacagagcctatcagtggattccaggactatggagcctctgaccacatggagccctggcctgtgaaaagcaaacctatgacctgatagatctacaggatcagagagccaagtacaggccccagaacggtgatcaatccacagagtcagagatgcacatggggccttcagaccagacaaaacttatcacagggagatgggaacctaccacagtcacggtaggagcaatgttttaactttcatgtctaagtgtttgtacatgtgtgtaatgctcacagaggccaggagaaggtgtcagatcttctggaaccagagtcatagatagttgtgagctgcactgtgggtgagtgctgccagtcttctgccaaagtacccagtgcctttaactgcctggacctctgtccatctccatgagaaaccaagtttgaaaactatcatgttagacttaaaaaacagaaacaagataccaaagcaggtgttcacagtgcctctggaattctgagctccacatgaggtagtgagccacatggaggatgtccaccatggaagagacaaaacagctcacaaatccatccccaggggagcaaccaagatagaactggctacaaaagcctccgaggagagtgcgccctcttgtggacactggtggttgtacactgaggacagaggccctcctggaaataccacatagacctctgaactgcttctcaggcttcccttctggtgtgtgcttcagaaaactgcttcagactccaagagagctctgtgcttccagcaggccattgttgtgttttctgggaggcctggaagcttctctggctggcctctgtgagaatagagtgtaacatgtagtttggagagatggctcagtggtt

SEQ ID NO: 1634 - DNA, 1000 bp, mus musculus
atatataccatacacatatgtatacacatacatacacacatacacacacactaacatacatacacctaaacacaggtatacataaatacatatcctacacatagcacatgcacacacacatacatgcacatacacacacacacacacacaattatgagtgtgagctgcagaagatacagcttctctctaggctcagccagcagcccacagaataatgctgtcagtctgggtcgcggagagagggacatgattcaagtcaaccccaggtgaccgcagcacacggagaactcaagtgaaccgttaccttgctgctttctagcctttaaccgtggaactctttgttaccacagcctttcccctactagtgctgactaatacacagggtaggatgcaaggctggagacctagcttgtatgaagtcacactcagaaagtctgtggggacaattagagctatgcaatgtgacaccacattttccccccagaggtggggggtctcccctcaacccaagcccgcaagctcctggcttgcaaaccccttcaatcaaagtcagtttcaaggtctccagctctctaaatgatcagctcggttgccgcgtgcgttaacggccccgtctgtccagactgcctgttttatcagaagctgccaacaagataaatggcctcgtaactcattgttccggcagagtacctcacggcgccggcgccaggaataaatcacatatgatcttctccaagccgtggagcaagcgtgggaggccgggagctctgcatggccagggggactttgcagaggattacagagcttctgtggtgtgcctcgggctgaggtctgctgctggtgacagttctcttcctcccccctccaacccccatctctaccagcttctcatccctcagacaagctctgaggccggagtgtatgtgtcctgtgcactatgatgcaggtggagactatatgaggtcccttagtggctgggcagatgaacacagcattgttt

SEQ ID NO: 1635 - DNA, 1600 bp, mus musculus
gcctcagggaatccttctgtccccacttccctgagcttgactcacaagcccacagcacacacctggttatttatattggccttggagatccgcactcaggtccttaaaaaccatgctataagtacatgactctagcctgtctccccatcattcaagaaaaaggaaacattgatggtatcttaggcaggcggcgtctgaatgtttatgttgatgtgggctcaaacaaatgacttgctctgtttcccctgagcctgtgggtctctcccaggagccttatggagccctgcgggatgaatttcttggtcatcactctggagaagtctcttacagaaaactgtgtccaaattcacgtatcctattgctactacctgggtagttgttcccagtgcatagaaatgagctcactctctacccttcctgaaggatatattttggaagatgacagtctttttttttgctttttgttttttttgtgtgtgtgtgtttttcccccttgggggtcctctaaatagtggagccaaatagagtgagttgtcagatcaccaagcccagggctgcactcagacaggctttgctggcaaccctgggatttaattaagtggccctgatgcatttgctatggcttctctgtctgtgtttgtaatacactttgttgcggcttgaggatggatggagttgtctgcaaggctgtgtgcaggccacagtgtcaccccaggggttgctgcaacaccgacagagtcattagcactctctggagcgatctgtgtatttgtctctgagccatttctgcacatcaggtctggaacttagaggatcatcaaatcaagtgtggcgtctggagagacgggactttgtgactttcacagaacagagtctgggggtataaacagccggaaagggccagatgccttctgcatctggcgagagtggaggacctaacacaagttgaagaaagcaggggacagccttatatgtgtaactgagtgagtgtctatgtgtgtctgtgtatgcagttttatgtgtatgtattaatgtgtgtctatgtgtgtttgcatgtgtctgtatgtgcctgtgtctacgtgtgtttatttttttctctgtatctacctacatgtgtctctatgtgtctgtgaattactgcgtgtgtgtgtgtgtgtgtgtgtgtgtgtatgtgtgtatctgtgatatgccttgacttttattattagtggtgagattcaacaggtattccagcagccagggttgctgtccataggcacacgacaatgcatctgtggttcactgtagagcaacagagaagcagccatagggccatgtctggctcagaaaggtgtaggaatatgagtgtgtatgtgtgtgtatgtgtgtgtgtaaacatgtgtatgcatgcatgtagaggggcagaggttaacactggatgtcttcctcaattactttctgttatatataagacatactctcttactacacttccggttctgctgcccagtgattccacttatctttgtctctgcagcagtgggctatgggtgctcgcctgcaatgttctggtttttacatggattccaagagttcaaactcatgttctgcatgcttccgt

SEQ ID NO: 1636 - DNA, 1000 bp, mus musculus
ctatctatctatctatctatctatctatctatctatctgccaatcagtatgctatgatgtctgtatggaggtcagaatataacttgtagaagttggttctcttttttcactgtgtgggttccggggatcgaacttaggctgccagacttggtggcaagcacctttacccactgagccacctcacagggcccaagcttctgttttctaacatcaatccttcctcagcccctcgaccacattttatttcaaggtgttgggtgcagggtcctggcggagccggttctaacgtccatggatgcagaagcttccaagtgggttttggccacggtgagaggcccatactgaaaaggcctctgaatgcaataattgaatagacataattacaaggcttcatgccatgtgaaattgtaaatagactgacaatgtaatttgcactcatttatgatacagtagctcattaaggctccaatttccatccctttcattaacaagctcatctgcccctctgagtgaggccccttttgtgtgaggtgtggctctctgcccacagcgatgcccaagcgagtgcagaagcactcttggtgacagtgcagtgagtggccaagtggtatcctcagggtgcttatccgtcagcaaaagagaaacaggtgcaaattatgggatgtctctctctctctatgtatatttttttatttgagtacatctattttgtttggatggcagagaattcttaacattaaatataagctgtgggatgctaatacaccttccacaatcatagtccctgtgccatggtttcgtggggagaattaaatgaatggccaacctgcatgctaagcgcagggcatggtgcctggcagagcgagtgcttcagagatgtttgtaagggagttgagtgctcagctccacctgcaaaccaaaccttcctctgtagaaacagaatagtggtcagcagggttacactggaaaaagggagtctctatgctgccaaggctggtgg

SEQ ID NO: 1637 - DNA, 1400 bp, mus musculus
ccctgtaaggcattttcttattagtgattgatagatgaggccccagaccactgtgggtggtgccacccctgggcaggtggtcctgggttctataaggaagcagtctgagcaagccatggggagcatcccagtaagacagcacttctctatggcctctgcatctgctcctgcctccaggtttctgccctgctttaagttcctgtcttaacttcctttgatgacgaacagtgatgtggaagcagaagccaagtaaactctttgctcctcagcttgctttttggttatggtgtttcatcacagcaatgaaaaccctagctgagatgtgtattataaagaacgttttaaggaagcagagtaaaatttaagttacaaaccaatgagcagaggaatggatcaagaccactggatcaagccacacctgaaaggaactcgacacctgtatactgctactgggtaaaacacttgacggccttcctggaaggattaaattgagtctcaatttcatcacttgtaacagaagaaacttgacaaaactttttgccctgtctccttgcccctccatccaacgcttacattgtggttttgtgtttcataacgctccaggaaaattaggacaaagaacattgccagaaccattcccatgccagttctgattatatgtggacccagttcctcccttgggtcagccatctgtcagccacaggccacgtcaggtcgtcagctgttgggatgctaattaagcatctgctgttgccattctacagggcatggtcctcacagaccatgagggtgagtgagggtgccatccccggctctgcagagtaggcgcccaccttctatagcatccccagtgggcaagcaaattcttggtaagcctcacataacacagctgtgggatggagcctatcaaccctgtgtgaagattacattgtgagtctgaggctgagaaaccatacgctcttccttgtttggaaggaactttgttccatccaacaaggttgtagaacatccttggtaagagctaaatcagacaaaagctgtgctgacctgccatttactggcactggctttttgaaaaggtcattaagccagaagtgttgaggtctcctggaaattcttttgacggggttctctaggggaataaaaccaacacagaggagttatcaggctggccttcattggttgtcactccacagagcacaccagtatgctggatagcagagcatccaggaccttttcagtacaagaaatcaacagcctcagaacaagcagagaaccaggcaggcctggtccaatgatgaaatggaggctccttgttgagctggttgaagcttcaatgttgagtctgtctgcactggctggttgaagaagtggactagtgactgaggcctgtaggtccc

SEQ ID NO: 1638 - DNA, 1000 bp, mus musculus
tgactgtgaactccaatccaccggcctcagcttcccagatgctgggatcacaggtgtgcaccatcatgcctggtggacagagagctgggaactgaaccagtggctttgtacatgccaggatagcatgtacattaactcttcccgttgagctacactccagctccagggatctgacttcaaagtacatgtttatggcaagtccccacttgagcacaaaagcaacaagcgttatctgcgtgtgatggtgcacactaatcccagcactcgggattggagatttctacaagtttgtggctaccctggtctacagagtaaactccatgaaagctatagatatgtagtaaacccttatctcaaaaataatccaaagacctcatccctcaacacagtgatcaatgttcaatatttaagaatttagtccagatctgtagcttgtgggtactcttctgtcccagctccccactctctaacttaaaagtgatgtcgtgcttcaagtgccagggtctgttcctgagaggtggttccctcctccccttgttccgagcaccccaattgtgggattggggtaaagggagagaagcaaccttcaaacaacatcacattaaagctgtttccttccattcccttccaggagcagcaatttattcagcgaggtcatgcagatgaattttgaaatcgccagcttcagcagcctctcggggacacagcctatcacatggcaggtggagtacccgaggaagggggccacggacattgctgtgtcggagatcttcatcagccagaaggacctagttgccatcgtcccccttgctatggtaagtcacaatgccactactgtgtgcttcctctttcccaggtcattgctacaattatttgattatttgatatataagtgacttttcttcctccaccctaggattgccaacatcacctttcattggctaagtttcccagataatgcgtcatggtactagctgcgtctccataccaaagtccttgt

SEQ ID NO: 1639 - DNA, 1200 bp, mus musculus
cggctttcgggctggtttgtcccctgggaatgtgacggtgatctgtgcttttccaccaggtgccgatccccttgccacagtcgagtctccatggcctgaccgtgtcttgacaataattttgagcaaaatctatgtctaataagaagataaccacatcaagatggttgggaagctgaagcagaacttactcttggcgtgtctggtgattagttctgtgaccgtgttttacctgggccagcatgccatggagtgccatcaccgaatagaggaacgtagccagccagcccgactggagaaccccaaggcgactgtgcgagctggcctcgacatcaaagccaacaaaacattcacctatcacaaagatatgcctttaatattcatcgggggtgtgcctcggagcggcaccacactcatgagggctatgctggacgcacatcctgacatccgctgtggagaggaaaccagggtcatccctcgaatcctggccctgaagcagatgtggtcccggtccagtaaagagaagatccgcttggatgaggcgggtgtcacagatgaagtgctagattctgccatgcaagccttccttctggaggtcattgttaaacatggggagccggcaccttatttatgtaacaaagatccgtttgccctgaaatccttgacttaccttgctaggttatttcccaatgccaaatttctcctgatggtccgagatggccgggcgtcagtacattcaatgatttctcggaaagttactatagctggctttgacctgaacagctaccgggactgtctgaccaagtggaaccgggccatagaaaccatgtacaaccagtgtatggaagttggttataagaaatgcatgttggttcactatgaacagctcgtcttacaccctgaacggtggatgagaacgctcttaaagttcctccatattccatggaaccattccgttttgcaccatgaagaaatgatcgggaaagctgggggagtttctctgtcaaagtgagtaaatgtagtgttttctctctctctctctctctctctctctctccttccttccttctttcctttcttcctttcttttttgaaccctgcattcagctgatgaagatatggacctgtgccacttatggctgctcttgccagcacttgggaggcaggagcaaacttctgtgaattcaaagccaaccaggtcta

SEQ ID NO: 1640 - DNA, 1200 bp, mus musculus; identical to SEQ ID NO: 1639

SEQ ID NO: 1641 - DNA, 1200 bp, mus musculus
tctctctccatttctctctccatttctctctccatttctctctccatttctctctctctctctctctctctctctctctctctctctctctctctctccctctctctctctctttctcagcatttttctcactatggtattgagggaaaactcatggactatataataatgggtattttcttccccaaaatgaatctgccattctgtgttcagcctctcctggtgcagttccccggtgccactgctacatccattctgagaaggcagtgtaaagcctggaacccgtggtctccacagtccacttcttccctctggggcatcagacatcgctgtataccagaccgaggagggtgaagcggcgtctgggacaaattgggtccacagggttctctggtcagtcaggaatgcgaaaacgttccagctcatatgagataaataaacaggttcaggcgctgatgtggggcaggtggccggggcttcaagtctgggcgcagcttcagtggtggcagagatgtctggagcctgagcttccatgtgagctacaggagcttcgccaggtgggcgggtccaaggttcaatgatgagtgcttgggtcggggtggagggtgctttccccaagtgttacagctcagtaaaaccagtctcagatgatccttggttgaaataacgtctgctctttattccatgtggctagagtacattctattggctgaggctaaggctctgaggatgccctgtttgcatggggaagagctccaggtgctgcgctatgtgactgactgcttgtgatcacctggttaggggttctggttaagtgcaggcatggaaacggggatggagttagctctactcccaccagtctcaagttctgagatttcagggatttaagcatggtccacctcaccattcccatgtccattcctctggtggcatggtccacgtgcccctatgaatcttgaagtctctgttagtagtgtgcttattgtacaagaataaggattccagtttaagcccccaacatccatgtaacaagtttggcatagaggcacatgtctataactatacactcaggaagcctaagatgggcacactccctgggcacaggggccatccagcccatctaatcagggagcaccaggtccagtgtgagaccctactgaaataatgtctaggtaactgaggaagacacctgatttgacc

SEQ ID NO: 1642 - DNA, 1000 bp, mus musculus
tcacgggtagaggagccacgatttaaattagtggcccaaagtggttactaaaaagaaactgcagggcaatctcacacagtcagcacggggctcccagctgcattcatctctagaaaaccaccccccaacggagtgccagagtggctccaaaccccacccctgggctaactgagcccctggctgtccctaagaaagggcaccctgcagtttgctttctcctgcctccgcttgccccttgctcctctggcctggcctccgggagttaagatcccccccctgcctccagctcctgcttccctaccactcaggggttaatgcttttgaaagctccctgcagggttcggagtgcagctgttgctgccatttggacattttctttctccaaaagcctcagctgccttttggaaacaaccacagtgccatctactggtcaaagctgcgtattgtaccgcgatgccttaagctttctgaaggctatctggaggcagttgttggctgcctgaggtgtgacctcactacctacatgtgcagtaggagttgtggagcgaggtcctaattcccacgtgggatttctaggatccctgagcaggtaatcaagaacctggactctgagaggaaaaaggaatgaactgcttggggcctaggatgtgaggcctcaccctctgataaggatccaaagggctgacatgaaagatcctgcctgggctgcggtggatctctaggccgaagtggaggtctagactgggtggagcactaggctgggggtggggctctaggctaagggcggagttctggaatgggtgggaggagctctctgaattgggagtggagcacaaggctgggggtttagctctgggattgggtggagctctgaggtagaggtggagctctgggattgggtggagctctgggattgggtggagctctgggattgggtttagctctgggattgggtggagctctgggattgggtggagctctgaggtagaggttgaactct

SEQ ID NO: 1643 - DNA, 1200 bp, mus musculus
gttacaatagagaaaacttaggtcctagagagtccaaagtcacttggcctggaaactaccaattcctgtttccactcagtgtcctgatgtctggccaggggtctttctccctctgccaaactgttctgtgaacgactcagaaagcaaatgggtttttgtcccccaaggttgtgagccaattgaagctagaggatctgtgaaagaaaaaaaaatgttagagactaggaccactgcccaagtcccttcagtgaggtcagatttcctgtaggctgcagaagaaaaacaggcattagcccagagaaatggctgacctaacgcaacagcctccctcaagctgggagctttgccatcatccagctctgccgagcacagcacacacaccccagccctgcaaaacccagggcaagagtgtctttgaactgagggaagctgctcaggggaacaaggggtcctttggaatcagggtcctcttgtaacatccactggcctcttggctttggcagttaggatgaagtcctctaccactgagaggtctcgaagataagacgcagccagttggcacacttccaaacacagctgaaaacagtctacaggggcccatctggagccaatcagtcacactgaagtgaaaaatagcagatgtcagagtatgccagccgccccgggaaaccccagtcctgccaccctccactatggcctcacaaatcattcccgttctcatcgctcactggtgccaggtggcctctcggcttctggcttccctgctgccccagagacccagttgtggctgcaaaacagttctcaagccggaaagaaagcctggagtctccgctaaagaggatccaagagggttccaagcgccacgtactcatggggacatttgagacatctggttcaattcagccttttactattaagaattatttatttttatgtgtatggattgttgcctgcatgtgtgcatgtgcatatatgtgtgcctgaggtttatggaagtcagaagagggtattggatctcctggagctggagttacagaccattgtgacccaccttgtgggtactgagaatcaaactcaggtccgctgtaagggcaacaaatgctatttaacacttagctaactctccagccccaactccacctttttttatggacaaggaaactgagccctcaccagggaaggcaactctaaagagtgatc

SEQ ID NO: 1644 - DNA, 1200 bp, mus musculus
gacagggtggtttttccgtgtaggtctggctgtcctggtacttgctctgtaggccaggctggcctggaactcacagatccttctgtctctgtctcccaagtgcttggatcaaaggtgtgcagtgccagcactgcccggcttctttatgttggtgtgtgcgtgtgcacctgtgtgtgcatgtgtgcatgtgtgtgtgtgtatactgtgtgtacatgtgtaggtgtaggtgtgtacctatgtcatggtatacacgtggaggtcagagaagaacacacgggagcaggtctcttcttctccgcagtgggtcccaggaatggaactcacatagttacatttggcagcaaacacctttattccctaaggcatctccctagctctgtccttgggcttttatttgagtgtttgggatttgaactcaggtcctcaagtctgcatagtaagcaccggaccacccaagctactctccagtctcagaggttttgtgttcgttctatacccagacctcctctctgtcctcacttcaccagatctatgtcctacatcagggttacttggaataaattaggagatccgatgggtacgtcctgctcttctggggaaattctgagcctgtagctgcccagagagggcatagtgtcctccagttgggcctgcatggcccacccaccccatgcctcccagactcctttcctttgtggggaaagctgtttattcccaagggtttctcacctcacaccagagccagcccctgaaggcattggcgtgtcataaaccagcctgaccctaatttatctcatcaccattccggaactggggaagggaatggctctccaaggttgggtggaaggctggcaccattgacctagcctggacggtgaccaagctggattcgaacctggtaccttcccctgctgagacccagacaaagagcgagtgtgtccaaagcgtggggttggtttcctgctttgagtgtgccaggatttccaaaaccacataaagtctgtgccctccctgccacagagctgaatggcttcacgttttcttgggacgtcaccccgagccatcattgggagcctggaacatacatggtttggagggtgggcaccccacggtgtctgcttagcttcacaggcctctgctgtcctcaggaacagcccttaggcacctccaggctctaagcagttcagatgggactgtctc

SEQ ID NO: 1645 - DNA, 1000 bp, mus musculus
ctcactcaaaaagaaacagattaggggccagcaaggtggtttattaggtaaagatgattgcctccaagccttacaacctgagttctatcccctgctgtcacagcccttgggaggtggagggtggcaccttaagttcatggccaaccttgatttcttagggagtctaaggccaggtgaggtgctctaggcctgtcatctgagggtcatgggctcactgaggtctttcagttcaagggatacttttggacaggtcagaggtaagggagaaaagcatcatgagggagggtgagatggcccagtggctcccagaagtagttggtttttataacagagatggaccaaaggtccaggtctacaacaggtttctctagaaccacccgggttgtccccgcctgacacgcacaagggagcagggtcagggatcagggatcagggtcggagactcctgtgccattctcagtaaccctgacctcaccatctcccaagtagtgggaagagagagctaaaggaagttccagctggtggggcaaaggggatgggcaggtggaggaaagagagtggaccaggccagggacaggctgggggacaccacaagacacaccaggctgtcagtctgtccagcaagatcatttctatagagatcttcatgttgactatgctttttggagggtggtgtgtgtgtgtgtgtgtgtgtgtgtgcatgtgtgtgtattatgaatatgtatgtgttcatatatatatatatttgttggtgtttttcgttttttgagacaagaccacccattggcctaaactagccaaggtaggctaggctgacagtcagagagcctcagggtcctcgtgtctctgcctccctgttgtaaatgtgcaccaccaagcctgactttttttttttttaaagatgttatctacttctgtgtacgtggctgtgactgtggctgagtcaatgtgtgtccaggtacccgaagaggccagaagagggcggtagatccccttgcag

SEQ ID NO: 1646 - DNA, 1000 bp, mus musculus
accctcttctctgttcaggcacgcatttccacagatgtctgttgccctctggttaattacggctctagtttaaaaaaaaatggcagcaacccaagttgggttatggccactctgcaatgagagctgggtgtgcagtgattgtatagcctgctccagacccttggttcaaccgtggtgtgggttggtgggtgggggagggtaccaccaggaaatcatagaatagtcacactgtggactaccatgctcaactcagaaagaaaaggcatgaacaccaggtgtgtggcacatatgctgtcttgggaggtggaggcaggaggattgtgagttccagacaagtctggagtacatagtgaaagggagggggaagggatggaagaacttaagtagaagtaggtcactggggcggatcattgtcccaggagatgtctgtctctcttccttggtttcctagtctcctgttccacaccatcctgtggcgatgctctgagccctctgaaacagtgaactcaaataagtacttttcccttcggtggtttacatcggggatttggtaactaatacacaaattgaggtttagcgggagatctttgaggtatccgggccatgcacacaaagacaaccccaacattttaccccttcctcccacggacccataaagtaagcaacagcttcctctatcctgtcgctctgagatgctccacctcaccactgatccagaaacttttgtcaagatagtgaacgcacatgcccacatgcatgtggaggccagaggccatcctgagttcagttcccagtaggtatgtaagtaaggcagggtcagaatcacctgtcaccccagctttggagaatctggctccccacttctgacctctgtagataactgtattcaaacatatactctcccatgcacacacacacacacacacacacacacacacacacacacacatacacacacacacacacacatacacatacacacacacacacatacacacac

SEQ ID NO: 1647 - DNA, 1000 bp, mus musculus
ttgggactatgtctttataggaggaaatcgttccctgggcacggtgggctctgtaactgttcaatgaaaggagacagcgtgctgaggcagactttctactcctgacccatgctgaccatttaagttttagtggaagtcaaagggaacagagatggtgctggcttccctgagggcacctgtgaaagctgtcaatccctgggcttcctggcctcacacgccatacagaccaccgtacatgcagaaaccttcctcgtagctatgtctgtcatggttcccgactccacacctccccagccaagttttcaaacaggaaatccccaggggctggtctgccttcagtagcatcattgaaggctacgcctgcggacagtgacccagggaagccctaactgcaagccgtgtggaaacacggactagaaacaacaaacggaggccgtgtgagacagagagctgccaagacaaaccgagcgggtgtacgagggatgcaagagggctgcctgccaccagctctgctgggctccagccaggagagcagagtcaagaacacatacgtgcagggagacacaactgcagctgagcttcatacgggctcagcttctaggaggtttcaaggcaaggaagccctgaggaggtcgatggagggctagccagctaagtacgatggcacatgcctatagtcctagcacttaacgaaatgaaggcaggagatagtatgtttgagaccagtcagcctggataatgaaaccctgtctccagagggcaacaaaagacatggagacacaacccagcagttaagaatgtgtactgctagccgggcgtggtggcgcacgcctttaatcccagcactcgggaggcagaggcaggcggatctctgtgagttcgaggccagcctggtctacagagtgagttttagaacagccagggctacacagaaaaaccttgtcctgaaaaacaaaacaaaacaaagcaaagaatacacattgctcttaaaaagtttggt

SEQ ID NO: 1648 - DNA, 1200 bp, mus musculus
cgacattcttaaacagcctcctttccagaactagccaggctgacccaaacggaaagaatccaagcttgctatccagaggtccgcctccttctggcagtatccctagctccctccctaactccctccccggagcacagcccctaggattcagccgagaactcactcctctatccgggctaaactcgatatcctaccatccacctcgagctcctcatcccagctctccctctgaagttttggtgagtgctgcatctgtcttcagtcctttgttaagggtcttctgtgaacccctcaagtctccttccagaaattcaaaggtccctccaccggttccagcctcagcttctttaggcactcaccaggccataaggagagcagtcagaaaaaaccaggtcaggctccccagccaccgcccggctccttggatcaacttgccccacaaacttttctcagcacccagactcctccccctctcctccctttgtcccgccggtccaagcagccacttgcttgcttgggcattgatcagtctctctgggtctcttcccctccctgcccctttaccagtccgctggggaaagatcgcctagactgcctttgaaagatgtcacttctaccctcctttcaagtaggaatcaattacatctttttcttttggctttccacaaaacaagagatttattcaggtgaagagacagggagagagacagagaggctgccaagaagagcagctcttgccctgaaggcaggagcagtggtgtgtaatctaaggaggcctggtgttctgcacattttacagggacttcctcatgtaatttgtttgatctccaaattgttttttaatatattaagatactcagacctcaggcttgggaaatacggggttgttctttagagctgcttgctcccaagtgacagactccaagaggcaagaagcaggtagaaattgggccagttacagatgcccagggaaacatagactggaggaaaagcacttgttgcacacgcgtgcggacccaagttcagatcccttatagccatgtaaagacactgggctcggtcacaagcacatcttccctgtgattccagtgatatgggaggataaaaggatcactggagcgttctggctgccagcctagcatccgctttagccagaatgccagtctctccagggaataaggcagagagatatagcaaaac

SEQ ID NO: 1649 - DNA, 1000 bp, mus musculus
atgtttagtagatattttctttatttacatttcaaatgttatcccttttcctggtttcccctctgaaaatctcctatcccctccggctccccctgctccccaacccacccactcccatttcctggccttggtattcccctgttacactggggcatagagccttcacaggaccaagggcctctcctcccattggtgcccaaaaaggtcatcctctgttacatatgcagttggagccatgagtcccaccatgtgtactctttggttgatggtttagtccctgggaacttgttagttcatattgtttgttgttcttccgatagggctgcaaaccccttcaactccttgagtagtttctcttgctcctccattggcaaccctgtcctcagtccaatgtttggctgtgagcatccacctctgtatttgtcggacactcgtggagcctctcaggagacagctataacaggcttctgtcagcaagcacttgtttgcatcaacaatagtgtctgggtgtggtgactgtatatggggtggttccccaggtggggtaatcgctgattggtcattccttctgtctatgttccacaccttgtgtctgtaattccttccatgggtattttgttccccattctaagaaggacaaaaatatccaccctttggtcttccttcttcttgagtttcatgtggtttgtgaaatgtatcttgggtattccaagtttctgggctaatatccacttatcagtgactgcataccatgtgtgttcttctgtgattgggtacctcattcaagatgatattttttagtttcacccatttgcctaagaattttatgaattcattgtttttaatagctgagtatctactcctctattgagggaaatctgagttgtttccagcttctgtctattataaataaggctgctatgaagcaggatgcacatattggagcatgtgtccttattacatgttggagcatcttctggaaatatgcccaggagtgata

SEQ ID NO: 1650 - DNA, 1000 bp, mus musculus
ctctgtaatccatcttttttcccaaatttttattaggtatttttttcatttacatttcaaatgctatcccgaaagtcccctataccctccccaccctgctcccctccccacccactctcacttcttggccctggtgttcccctgtactggggcatataaagtttataagaccaaggggcctctcttcccaatgatggccgactaggccatcttatgctacatatgcagttagagacatgagctctgggggtactggttagttaatattgttgttccacctatagggttgcagaccccttcagctccttgggtactttctctagctcctccattgggggctctgtgttccatccaatggatgactgtgagcatctacttctgtgtttgccaggcactggcatagcctcacaagagacagctatatcagggtcctttcagcaaaatcttgctggcgtatgcaatagtgtctgcgtttggtggctgattatgggatggatccccggtggagcagtctctggatggtccatcctttcatctcagctccaaactttgtctctgtaactccttccatggtgttttgttcccaattctaagaagggacgaagtgtccacactttggtcttcgttcttgagtttcatgtgtctgtaacccatttttaaaattgaattatttgatgtattttaggtgttatatttttgaaaatctctgtctatctatctatctatctatctatctatctaattatctatcatctatctatcttatctatctatctatctatctatctatctatctaaattgtctgtctgtctatatattttggatattagccctttattggatatatatgtagttggtaaaaatatcttcccattccataggcttccaatctatctgaatgtcagtgccctttgttgtgcagaagcctttcagtctcatgaggtaccatctatgaattgttttcctcactacctgtgctaatgatgttttgttcagaaa

SEQ ID NO: 1651 - DNA, 1000 bp, mus musculus
ttagtctagctggccaacttgcaccagggatttccccgtctttgccttctaaacgctgggattagggggcggcttccacagccactcatgtgggttctgagcacctgaactccagttcttatgcttggagcactatgactgagtcctctccccacattctggctgttttgagccagggtcttaccatacagctcaggttggctgcaaactcactgtgtactccagtcaagccttgaaccttcgatcctcctacctcagcttcccaagggcctaagcattcagccctagctttcacgctttagggcaaggcctcaattctcctattccttaaaaagccatcatactggagggattggcttctgttatctgtcttggatatagacacttccaacataccattgtaatactgagccttgcttgcagggctcagaaactaagttgggaccatctcactggataatgttttatgaagcagggctggtgagatgctcaacggataaaagtgccaggtggtcgaggctgacaagctgagtttgaccctggaacacagactggaaggagagcaccaattcttgaaagctgtccttcaacagccacatatgcagaaggcagtcacacatccacatgcaaactgtgctatacacacacctgtatacacacacacacacaccccaccccatacacacgaaaaactattacagaataattttgggggtgtatagttggagagatgactcaataattaaaagcacttcctactcttggagaggaccggggttcagttcccggcactcacaatgtcagctcacaatcatctgcaactcccactctgagagatccaacaccctcttctggtctctttggaaactgcatgtgtgcacacatgcacataaataaaaataatattaaaaaatattgtccctacgctcaacggcacatcctttatcattaacatttgagcactgtgctggatagtttatgtcaacttgacccaagctag

SEQ ID NO: 1652 - DNA, 1000 bp, mus musculus
gagctggtaatcaaatactaccccaccacaacaaaaacagtcttacaattgaactgcaatgaactcaccacaaagctgcacagtggcctttcaaagggaggacagaagatgagagtgtggacaggaaggggcatggacaccaaacactgtcctctaatggagtgtttagaaagagtgtggtaccacaacactcagagaaaggtctactcccaagcactctaacacacccaggatcataggatcagaggtgaggaggacacaacatctgtcccaccaccggaagtgacttggtacagtgggacccaggcacctgagaactccatttcaccattggaatgggttcattctggtctgagtctgtggcctgagcagacattgggcacaaactttgcagccatttccaaatcacccagaggaagctccactcacaggctctctaacctgacttcaaacacaggatcccaggatcccaggatcccaagagcttggtcacaaaaggatctcagggtctcagaggcagcttgactccccagagctctgacacacccaagatctcaggatcacaggatcccagaatcatagaatcacagagacacctggactctgaggagctctgacacactcagcatcccagaatcataagatcccagattcacaggatcacagaaacaactgaactctcaggagttctgacaaaaccaggatcagaagaaggataggctccagccacatatagccagggcaggtagcactagagatgatcagttggtgggaggcaagcataagaacataagcaacagaaaccaagatttctttgcatcaccagaacccaattctcccaccatggcaagtcctggatacaccatcacaccagaaaagcaagattcagatccaaaatcacttctcatgatggtgatagagggaggaaataccagagaatacaggtaaacagctagaagccattgaagaggaaacacaaaatataccttaaagaattaga

SEQ ID NO: 1653 - DNA, 1000 bp, mus musculus
tatcccaggtccacaccaccaggatcagctctgcaatattgctgcatgtcaggtggggctagttctgctctcacacactttggtgggtcatcgagtaccgatactaccagggccagtacaactgttctactaaggcaaggtgtggggctgctttctaaagtgatacagccagcaaggtgtggtaccagctcccccacaatgctcatatgggaccttgggccagcttgcctgtctgccacaggcagtgaggagctagggagaggcatatctcctgcactgtgcccctgcacaggaaatgagggtagggccagcttttctgaatgccatagctgctgagggtcaggcccaattctgcacagatctcagatagcaacatggccccaggaagcaactcagaccaaaggcacctgcatggccttgagtggtaaaatgaaccataaatagtgacatagaccccagctgctgcagtcatagacgcagacatcgtcctcagttgcagcatgggcagggatatcaccatggtctcaggtggcatcataggttattcacatcaggctgttcctcatcgccatcacatctccagttcctcttctcttcacagtgcacaaatggttccatttctctttcattgccatctcacatatttgttcattatagtggcacctgctgacaggtggccctctagatgtcttctgtgtgcctgccaccacatttcagttaattttctattgctatgaagagatgctatgacccaggcaacctaagaagaaagactttaacagagagcttacctagtgagacaacagccatggagcaaggagaaaaccaactgggaatgggatggcttctgaaatctcaaagccagagctgggaggttgtggatcatgcctttaaggccagcactcaagaggcagaggcactcagatctctgtgatttcaaggccactctggtcaacagagggagtttccagacagccagggttatatagtctcaaaaaat

SEQ ID NO: 1654 - DNA, 1800 bp, mus musculus
gtcctctgactgtacacacagttaaagaaaaagtggttggaatgtatgtgtcctgacgctgtaatcagacctccatgggtgtgggtcacagcctctgctgttgtactgctttagtccttgcgtctgtaaatgtgtaaatgtggcttcaatgatctacaagcattaatttaaataatcatactcagttaccagattcttgttaatgtgccttccaaggacaaccgtttgttgacaggacattaaagtaggaaaaatgaagattcacaaatctgggtctctgtgtttgaatatttttacattactggtaaaagagacccatgaatcttaacagtacaaattagtgagtgcagtgtcatgatagagatagattggaaaagaaaagaatgcttgcttgttgggtagaagagttggcaagagatggaagacatgcggaagaactatctccatgtcagctgtaggacccagccatttagttctcttcagcaacccagtgtaatgacagtagtaatgacagtgtaatgacagtagcccagattattttgatgccacacctggcactgggaagaatctactcaataagtcttgatccattagattgagttttaagaatcatacacacacacatacacacacactcacatacatacattcatgaatagtattttattacagatggcaatctactttgcacacaattgtatattttaagaaatacatctgagtgtcatgaacataaaattttaaatgagacatgggcgcgggaaatgtgtacggaagacgcactccccggcgccgctcgtggggggcccaagtccttctgatcgaggcccagcccgtggacggtgtgaggctggtcgcggcccccggcgcgccgggctcggctcttcctggagtcggattgcttgggaatgcagcccaaagcgggtggtaaactccatctaaggctaaataccggcacgagaccgatagtcaacaagtacctaagggaaagttgaaaagaactttgaagagagttcaagagggcgtgaaaccgttaagaggtaaactggtggggtccgcgcagtccgcccggaggattcaacccggcggcgcgcgtccgccatgccggtggtcccggcggatctttcccgcaccctgttccaaaaaaaaaaaaaaagaaaaaagaaaaagaaatttatattagtaaacacagaaattgacttgggactatttaattttatcttattgcttatccagagtccaaaggttgtgggcaaatgctaataacttttaattctattcgtttaataaaactaaaaactagaggtttctatatggctttttaaataacattctcagttttggttaatctttccccctatgtcctgccactgtggatggcaggagatgttagtgcagaccagccaaaagggctttttccaaaaatatacagatgccacatcactatggagcacaaaggggcccccaagtgactaccaacccttggggcacctcagcaagccagcaagagacctagaaatggcagatactctacaagctccaggcaccaaacaagcctttgcctagccagtgcctacctgcagaaggatagaggacttggttttttgttttttttaccaaaagtaatttaatttataatgtctccccaataataaagaaaatggggtttaaaattaacaaaacattttcaggatctgtgtggtcaaaactacaaatttctgatggatgaaagcagacctaaatggttagaattccatactatgttcatggattggaagacacataatagttaatatgtca

SEQ ID NO: 1655 - DNA, 1200 bp, mus musculus
gtacagtctggcataggataccgtatgtgctgaggttctgttttctttcaacttgatacaaggtgggggaagctgggaagaaggaacatgacttgagaaaatgtctccatctcattgacctgtaagcaactctgtgaagcattctattcattaatgctctatgtgggaaggtccaggctactgagggcagtgtcacccatggactggtggtatggagtcgtctgagaaagtttgagcaagctttaagcagcattgtcccatggcctttgcttcagttcctgcctttggtttctgcctgagtttctgccttgacttcccttatgatggacagtaacctgtcagatgagaccaatgctgccttttccagagtgtttttgtcagtgttctaagacagcaatagaaaagaaggctaaaatgccctaggatcagacaggtgcccctcgctcagtgctcagccagttttattcattggtgagcagaggactcagggagagcatagctcagaggaaactaagagtagagtggctgaggaagaatcctaatgtcaaattcctgcttccacccacgtggatatgggcatgaacacaaacgcacatgcataaccatgcatacacataaaccacatgtacacacatacacatacataaatcacatgtacacacaagcacacacataaacacaaacacacaaagtcttttaggggtttactgctgcaaacagatacaatgaccaaggcaacattgatctggagctggctcataatttcagagattcctccattatagtcagggcaggaacataacaacatccaagcaggcatgggcaggaggagctgagaattctacctcttcatctgaaggatgctagcagaatactcacttccagggagctaggatgagggtcttaaaacccacactcacagtagcacacctactccaaaaaggccacaccttgtaatagtgccactccctgggccaagcatatgcaagccatcacacactcacacacacacacacacacagacacacacacataacttgatcatggccaattttgagtcacagctcaagcacctcttaccagctgtggtcaactgtcaggaaggaagaagtgttgatggatctgaaagcagagcatagaagtgtacacagaaaataatcctggaatgcagtgttcacagagtctcactatggagttctg

SEQ ID NO: 1656 - DNA, 1200 bp, mus musculus
acaggtgtttgaggaagtgttgtgtcatactactcctggggagatgtgaataaatgtctacccactccagacagggaatccatgacagatcaaagtacagatgccaccaatgtctatatgggagaaccaatgagtttcattgggtttatttacaggagtatgggtgaggggctacttatagaagcagaagtgacttgaagaccatcaccaaagcccatccaaggatgggtgatagctcacaaaagctgtgaacctggagctcactgcacagcctgcaggcagcccagcaggttgaagatcgtccttacctgtcaggcaaccttacctgtctttgccttttccaggcagtttggctggtctccacttcttccaggtggcttagctggtctgagagtcttctgggaagtttattatgtctaagactgactctcagcagtccttacagattaaatgtgcttggggaaggagggacctagtgaatctggtcagtttcagggacttcctgaagcctttgagttgttgactccctgagcttgactaggcttccttgcatggtggaatgttcctcctcccttccccatccaaaacagaggattgcctcagatgaaatcgttaggggattgaaggttctgtgggagaggacctaagcttgttgggttccttgttagaatccaggtcacaggatgagttttagtacaaaggaggagacttccacataaaagctaacaatggggtgagagttctgctaaagcagtgggctcttcaacatctcctatgtcctggcacccagtggttcacttgccagggcacagcacactagatggacatgtcttcttggcattttgaatcaaaagaagcacctcactgtgtagcttagactggcctgaaatgtgctatcctcctgcagcagttatgccttgtctgctgctaacaagaactaactaactggttaattgcagaattcccaagggtcagtcttgtagttttggagtgaaatattctgccccatgaagaacaaggcagagagatattggaggattagatgtagagctgatagttggtaaaggatcaactctgagagaagaaaaatggatgcccagagaaaaactcaaaaggacaaaaaatatttttatttttgaactaaacactatatattagtctatttaaaaaatgaactaagctggggttgatgtttcaaac

SEQ ID NO: 1657 - DNA, 1000 bp, mus musculus
aaaagctggtgtcatagctgggtatcaaaccagaccctcatctttcccagcatcccacatccctacccaactctcatgcctgtggagcagaagccacacagcaccacagacgtagactccaaaccccttcccaggaaaacgggagctcttacctaggaggccggctgaaatgttcacaattagccctgagaatttggagggctccacgttcttgggtgagaggatggatttcagagaaaacttctcggctaccggtaaaaagcctgtctgtgattcactggcactgaccagctcattctgatctactcgatctagctcctcggtggttctggccatctggtataccagattaggttgttctggctggtacctgtaaagacatgcccactgcatgagtgctgatagcggcttttgttaagaaaggacacgcacatcagtctgagttctcactgtgcattcaaaggttaaggtgcctgggacacaggtcataaaccagtagaacggtgcagactctagcaatacaagaacaaaggacagatcaatggaggactggtaagctctgtctacatgccgtaactggataaagctattctaaaacgctaagttccatggagtgcgtaccgacagagcctgtgaagaatggaccctgtggaatggttgagccccacgttagggttgagcctctaatgacccaggctacctgcagatgaagcatgtgattacatgagggcaggtccttgccttcccaaccagaccgtccatcctcaacagctttgaaaagcagagtcccttttgaattgttttgaggacaatcaagtccaagcgcaagaagcgtgtgtatcaagggtatcaagctagttaactgttcttcctacagactcacgaaggcattgtattttagccaattaagaaagtaggtgggggctgaagagatggctcagcggttgagagcactgactgctcttccagaggtcctgagttcaaatcccagcaaccacat

SEQ ID NO: 1658 - DNA, 1400 bp, mus musculus
gctgtttgatgccattcgtttgtcttcctggtctccccaaagctcagggaaattaacaacagcccaggcatttaacgacaacaaactttcaagtctgaaaaaactactgtaaacaagaaaaaaaattctgaataattaattgtccgattacgtagtactgggaaacgacagaaaggacacccaaggagccccgcaaacaatcactggacaagcgccataaatggaggagagaggacagtctctggagaggcttgtcgatgtctgcagagctggacatgaagatccctgcgttccaaagactccacccccgattggcatgcacagatgagctccttgtgagaggaatccgtaggcatccgcacgtcagtatgctcagctgctacgggctgaccagacagacggctgtgtgtgctgagtgatggataggtctcgacatgatcttgggtagaaaccagtgacaatttgggatttcctgcgtgagctgtggaggagtgttgctgatgtgagattgcctcaagaggctattcgcagaggagctgcaagattccatctatgcaagaagacagagcggacgaaagctagtgtgtgtttagtaactgtcccaggtttttttgttttttttttttttcagttgctgtggtgaacacgtgaccaagagcaactggggaggatagggttcatttggcttatgggttgcggtccatcgttgagggggaagccaaggcagggacaccagcagaggccatgggggaatgctacttgctggattgctctctgtgtcttgctcagcctgctttctcattcaacccgggacaacctgcccaagggtggcaaagcccacagtgggctaccccacctcccaattaatcattaatcaagaaaaatgctcctacaggcttgctttcaagtgactcggatggaggcaagttctcagctgagtctcccagatgactcaagcttgtagacaaaacactaacaccacagacataatggaggggcgggaactgggcgggggcggggccggggttagaggctagaatgcatgggtcactctgccatggaactgtgtttcatgtgtgcacaggtcactcaacagggctcatttgttttgtggaagtgacctcagtcgtacaattgagagtgtgacacattttctgtcatgcttcagtaatatttacccatcacagattaggatatgaacccaatgaagaaagccttattctacgatgacacatgggtgagccctttttcatcatagtcaaggtttacttaattaggccacaaatggttttgatttgcgccctgtgtttagaagggagggggtgttgttttcttaagctttttctctctctctccttgaaagttgaatttttaaaaaatgactgatgatatttttttct

SEQ ID NO: 1659 - DNA, 1000 bp, mus musculus
acattcagtttgacatttctgtgtgtattttttattattcacaaaggaattacatgtacatcgctgagtatgtactgccatgtagacagaacacccttagcacattcacaagggtacttacaggatgttttccagtactatatctggctggatccaaataaattgctggatttctttgggaccttctagtaagatgaaaatggggatgaatgcacctaggattatgtctgccttcatataggtgctgggattccagaactcataacagctcttgcgagtcatctccactggtgtaaataaagattgcaggagcaggaaaagacaattaaaagtaaagtacatattagagtctttaccacacagagacaatgccctgtatctaggctgagccaaggagattactgtcttaggtcatggaacaggctcagaccacaacaatgtcagagaagactttgtatgctacagctgcctcctactgttgtttcaggcttcagtctgtgcacagcctgtggttctcatgacagacaaggacacaggcagaatcaaagttcagacaactgagagtaagtcacagtgctgagattgtcctataaatgttaccagtgtccctaaatatgctggctttgtgattttattttcctctcatgcatgtgctctggggattccataaccctggggttctgcacctgcatcatctatgctggtgaaaaacatgtttggtccttctttcttcccccacctttgtgatttcataatggtccacagtgactgcggagagcaccattgcctgacagagcattgtacggcattacaagtcagctgatttgttttgaaagacagtttgagcaggtgatttttttaaaagccgcacatggactcttcaaggcttgcactttcaatagttcatacaatactttcctaagaagttaaagttgtaatgtcagtttctagtgtctgccattcagaagaacactaatcttgtatctatcttgactccctg

SEQ ID NO: 1660 - DNA, 1400 bp, mus musculus
gtgcctttgtggtttgtggcttgtggctcatggcttgaggattggtgactttgggcccttccagggacagggttctaagacttcacatccatagatctcttctctctgatccccaccctcaggccccaagacctgccttcaaccaagtgtctggaaggagtcggaagcatagtggctgaccaccagggtgaaggtcagaggtctttcttaggaaagcacccagaggtggactcctgacattcaaaacaagctcagggaggagggagaagaggttagaaaccaggaaggaggaaagaaagacccctgggagccggggtgggggtaagggctgcagataccacaggaagaaaacatggaggaggagacatggagaggagagaaaagctaggtacaacccattgggtcacacagtgatcaggtgagaggtgagggtccagcaggccccttgatggagagaaggacaagatgggaccacacgtcagtgtgcatctgatgacaggctctaaccgggagccttggcttgaactagcatccagagccaatggattctgtcctttgatgtcatggcatgctgtagcagcctaggtagataactgaagctccttcctcctcatcccccaagtcctctgaacttcacctctctgtgtccacctcccacgttcttggccatccaccacggaggggtctgtcatgaatgcctgccctcgtaaccaagcaaccatcaaccatcttggggcatcagctgcaccccttgcaaaagatcatacaagctggggttgttgactgctgatacccctcatggaggggtgggaaggttcacaagaccttcacctgaggatccagcccctgtctaccacctgtcacgtgcaactctgcctcagggaggcaggagagtataacagtctgggaagaggagggaaagggggctccatctatgcactcaagccctctccctgcaggataacggatttcaggttcagcatgcagagggagaagcatccacacctctgtaagcatcccccatctatgctttctaaagaatcccagcaaactcattggttctccagaatgaacttgggtaaactcgtgcctgggaccttagaaggaaggctagacattgtttccatctttccttgggaaggcatcctagcaacagagtcctagggcccattttttataggacccagccctatgcagatcctcactgcctgtcaggtggaaggtgagagacctttaaactgaatcatcaaagtatgaggaagggatcattggaggcacccaatctgactgtcccagtcacagataggaaattggaggcttagaaagggaaaatgcagggagtctctaggcttttaccagccctgcaatccctatgcccactccaacactcgcacgggaca

SEQ ID NO: 1661 - DNA, 1400 bp, mus musculus
gatcagtcaggactctacaggggccagaggtcttgtccttgtaatgtttcgccagcaaaactcactcagacaaccagatcaaagctttattgcttacttatcaggaagacctcgaatacaggaaactcagcccttttataacccacaaagagtggttggagacgtgtcagctcctgattagctgctcactatcagcccagatgactgccacgggacaggcagggcacaaggcatggaaaaataccccagcacatgtgcagactacttgtttactagttagaacactggatatcagcaccatcttgtaatggcgattgcaaggggggctcctcacacagagggttgactgtggttcttggaataggtttcctatccaaagtgccaggacttcttacatttgaaaatcctttgtgtttttatggtgagcatggaaaaaagggaagttctaacgcagatttgcaaagccgcgatcctagccagtttcaggtgcagctcccctttcttgggtctgtgcccaaggggatctgaaaaatgctattccagcaaatctgaggaggtcacaggctcttgactacttttggggtcttgttgggttggacccaagcaaactataatgattaaaggccagtgatctggaaccagatttgcacttaagggctactggcaaacttcaaaccggtatttattagcaagccagatgtcttgcagattgtcccacgaccctgacttctctaattgtgtttcttctaatgtaggtcagagtatctcaaacacactataaagctgactagaagctggtgcatctcagacactgctccagttctccctgctttgccagggcagctggattgattttgttttttaaattccaacattttcctttatttttatccatcaggttagtttgaataatgccatccattcttgatggacattttgagttatgagctgatgctgtagctcacctaattgcttgcctaaccctgggttccaaccttaacacatgcctatagttccagcacacaagaagtgaaggcatgaaaatcagaaatgcagctatcattgactttgtcaggaccagcctgagcaaaaagagcaagacactgcctcaaccagaaaacaaggtccaaagaaacgaaccaaccaaccaacaaacaaagaatcatcttgagtactgtattagttagggttctctagagtcacagaacttatggatagtctctatatagtaaaagaatttattgatgacttacagtcggcagcccaattcccaacaatggttcagtcgcagctgtgaatggaagtccaaggaactagcagttactcagtctcacacagcaagcaggcaaaggagcaagagctagactcccttcttccaatgtccttatattgtctccagc

SEQ ID NO: 1662 - DNA, 1600 bp, mus musculus
gactttttaagaagctacaaatgttctcaaagtgaattgtgtcattgttaccttcttctcattcatgggtgtgcccactgtgtaatacagtttcagagaggtctattgcacaatagctgccaaatccagtcagcctcttatgaccggtggaatgatctcactgctattaatttgcatttccctaatacctagtgatgccaaacatctattcatgtagagttgggttttgccatttgtatattttattttttttaaaaaaatactattttatatgtatatgtgtttatctctatgtagtatgggcatgtgagtgcccacagaggtcagaagaggccaccagatccccagaagttataggcagttttgagccccccgtggcggcgacgacccattcgaacgtctgccctatcaactttcgatggtagtcgccgtgcctaccatggtgaccatgggtgacggggaatcagggttcgattccggagagggagcctgagaaacggctaccacatccaaggaaggcagcaggcgcgcaaattacccactcccgacccggggaggtagtgacgaaaaataacaatacaggactctttggaggccctgtaattggaatgagtccactttaaatcctttaacgaggatccattggagggcaagtctggtgccagcagccgcggtaattccagctccaatagcgtatattaaagttgctgcagttaaaaagctcgtagttggatcttgggagcaggcaggcggtccgccgcgaggcgagtcaccgcccgtccccgccccttgcctctcggcgccccctcgatgctcttagctgagtgtcccgcggggcccgaagcgtttactttgaaaaaattagagtgttcaaagcaggcccgagccgcctggatactgcagctaggaataatggaataggaccgtggttctattttgttggttttcggaactgaggccatgattaagagggacggccgggggcattcgtattgcgccgctagaggtgaaattcttggaccggcgtaagacggaccagagcgaaagcatttgccaagaatgttttcattaatcaagaacgaaagtcggaggttcgaagacgatcagataccgtcgtagttccgaccataaacgatgccgactggtgatgcagcggcgttattcccatgaccagccgggcagcttccgggaaaccaaagtctttgggttccagcgggagtatggttgcaaagctgaaacttaaaggaattgacggaagggcaccaccaggcactggacactggacccctgcctcatgaattcacttttttctttcccacctgccagtatgttgaagcccgtgttgtgtattttgggaaacaccctgagagtcatcattagggaggttgaggcattctcttggggtttgtattctgggtccttttcctactgtgatatgctttagagagtcacttcatacttctagacagtatgattatagggcagtgatcttctggcatttaccctttgcacactgctcctttaaaagtttatttggaaaacaaaacttctcaatctgactcaggctaaagcagtgcaggagacaaccacaaagatgaac

SEQ ID NO: 1663 - DNA, 1200 bp, mus musculus
tcagagataccttccaaacatcttatattaataatctattattatatcttatatattatattatattacattatattatatttattatattatattatattatattatattatattatattatattatattatatttgagaggctccaggatagaactgaagttcttgcttgacacacttgaggaattttttcttttttggaagtagggcgattactcactggggaagggagtgtgcagtggactagggcccagccttagagggcagggtactgaaactccatgatgctgagctgtcagcttgagctagacctgtgctgcttctcaggcagggtatatacaaatcaacatctcacctggctaatccttcagaagaaatactcttaagacagtagctaaatgttccttggaaagaagagcccaaagagctcagaagcctctctgtaattcttgttacaggagtcttggggtgcagggtggttggctaggacactgcatagtttattgtgtggaaatgacaattaattgtatgtcttggaaaaaaataccaatgtggagaaaaggaaagcaacagactggggaatgcaaagaggactccacagttccacactgggcagaagacacaaagcagcagcttcacactgagagagtgcagagacacacagcctgctctagaaaccatagctgagctcagtttgggtgggtgtggcctagctccctcccttcactgattccctccccttccccttctaaggtctcaattaccaccaaacaccccagaatggtttcttccaagcatggctgttcctgaacctgaaagtgctccaaagttgaatttcaattattgttgttcacagtcgatagtgttgttcaaactccctgtctaaagagtttttactgctgtaacaaaacacagtggaaaaaaaaagcatgttaaggaggaaagggtttattttgcttatatttccttaatgctgttcatcatctaaggaagtcaagagaagaattcaaagagggcaggaacctggaggcaggagctgatacaaaccatagaggggtgctgcttattgccttgctccccgtggttggcacagtctgctttcttacagaacccaggaccaccagtccagggatgacaccacccacagtgggttgggccctcccccatcaacaactcattaagaaaatgccttagagctgg

SEQ ID NO: 1664 - DNA, 1000 bp, mus musculus
tctgggcccttagttgggtatctgatgtgggcggtttctggagaatctaatgtgggcctttagtggagtatcttgactgtgagtgtactgtgtgcagttagtggagagtctgatgtgagcgattactggagtatctcgactgagtgtactgtactgtgtgcggttaatggagtatctggagtgtaagtgctgacccgccaagtgttaagtgcattgtggtgctgggcactaagtcaaagagctgtgcagaatgatggttaccttgctatttttgcttagtagtcggacacttgacatatttatgatacactaatgaataaatacttgtatttgtataacccgctagttgtttctctattttggcattggtgcctgattagttaagacaaatttaagtgcatgagttagtgacaggttttatatcgggtccttaataattatatttctcacctcatttttacactgtgttaaaaatatttagcttagtaaacatttgacatattttgttttttcttaaggaacataggagagctaacagaagccagcgtgtgtagtttattgtgctaatctgaatgagttgtgattatgatgatgataattttgtttcctgagtttatgcgttccctgcccctttcttcctttcgactgttcattttcttttcctcaggatacgacttgatgaactgagaatgttcttagagaatgagacatgggagctttgccctgttaagtcaaattttagcatcttgcagcttcatgtaagtttttcctgtgaacaaagaaatgtgtcttttagttactatttgagcttttgtcttagtagcagaaacttatgtgagagcatttataaagcaaccaaagtaaagaacagtgccaagcttcaatccatgaaaggcattcctagcaggcccttttgtaggaattatccactgattggcctgtaaaactcccttctttccaaagcttattttacatgcttcagtaagcactgttttggaca

SEQ ID NO: 1665 - DNA, 1000 bp, mus musculus; identical to SEQ ID NO: 1664

SEQ ID NO: 1666 - DNA, 1000 bp, mus musculus
ttcattatctctgtaagaccctcaatatccacatgcttattacagtgcatagatgtcagtgtgtattggcccagggaataagacacatccagcaaaatatttgctgtacacagactaactactgtgggatgtaaaactatgccaggaagtttgataaaatggagcaggtcaagacccagagacttggtggtcacacacctgaggcacccagctccctgacagattcctgacttggaacatgtgccgtgcttcccacataaaagaaatgtatcctatggtcacataggcccaaagtagagttctccatgctaatgaggtacctaggggcccagagggcttagctaataagcttcccttcccagacattcctccctgcaaaaggtatttaagctcatgcccacactgagaattgggttatggttttacgaatacattttctgccatgacaataaactgtttaaaaccatgggctgtctcttttcatcaagatcccaccgtggggagccatgaagaaggccttcacctacagagccacaacgcatcgtaatttcctgtagaagtcttctctgtgctcttacatctgccaagctaaggacaactgtcctgtaaaacaagtgggggcttcctctattcccagctttgagttagatgcagtctgtggcccctgattgcattctctgctcttctgtgactcccagcatcaccttgataaccaagagtctgagaaccccacactccagccttgttgcaggtcagggaccgtgaaccagctctggctttcacacatctcagcctgtactttcccacccctggaggggtgttttggagcttccctacagccccacactcaccctgtgggtgtcatggggaaagcacagtgaaacgtgttccacctcctcaagtggctgtcctcagcagtagagcagaagtgggcttataacctgacaaagaacccccttggttgcatagatattttttggagtttgagctgagagtgtgc

SEQ ID NO: 1667 - DNA, 1000 bp, mus musculus
gggtctattgataatcacaaaacattaaccaagtttaaggattgccacaggcaaccaatctgctaccctggccaaccttagtgtcaacaaagatattgtgtaaacataaaggagaaaggggctcttatactgacatccacaccaacttagacacactgtacaggatgcatctacacccactgcaactggacaaacagcacattgggcagttgagtattaaacggtgaacatgggccttacacttgagttgggtgttcggatttacagccaccccaacacctggccagcatcttaggtgcagaggaacttgccagacaggtcgtgggtggcctgccgttaaggccccacgaccgtgggagagcagagagtagaaagtccagaaagggtgtgatgggggaagcagggagtgtacttttttttcccggaacagtagttctattgccctaacctgggctcaggtagctgccagtccacttgggcatagccccggagctgacatctgggccgggctgcaggccctggccctctgcccccccaacacccatacagtcaccatgcctgtgcagccgtcgccgcccgctgccgccagtgacccggtgaccccggaggcccgtctgggcccggtgaccccggagccccgggcatccggacccccgtcacaggcgcagccgctattaaggcaggaggctaccagggaggaggaaggggaggagacaggcggccagggcgcctggggcaccggcacggctgagcaacggcggcggggttggggggaggccgacgagggcacggggaaggccggcggcacggaggccgcaggctcggacccctcggcccgcggttcgggcgacgggcaagggagctggcggccgcttctcggctggctacggcgcccgccgccccagtgctgcccctgcgcggcgccccttccccgctccgccgcgcactgttgtcatggaggaaccaagatggcggctctggcctacaacctgggcaagcg

SEQ ID NO: 1668 - DNA, 1000 bp, mus musculus
tgtttgtttttagttctatttttactgtaagtgtattacagtcttcagtgttcatagttatacatccctgctttccccactgcttgtagtagtgcacctgttactgtgtgacttaagtatcttcttaaatggccacagagtatcaagtggctgcatctaattccatatgcttgccctgttctttgtttggtttggtttgggttttttggttttcttgggttctttgttgtgggtttttttttttaagtttttatagttttcttgagataaaaaaaaaatgacatttccactttgtagaataaaaaaaccctaatttctaaaatccttaatgtagaatttctacaatgcaaatatcaactgaaagcacataagcagttaacggtctatttcttgctcactgctgcagtgtgtactgtagttggaagacaagtacgggctccttatcttctgcagccttccttccctggcactgagctcagaacggagacagcagggtttctctgatggggactttctcattttacaaatagatctttcagtgaaaactaacaaggcttaatacctttgtatgtgttaatttggggggagtgacctatctcattatagccttctattttatacactctctaatcctgtcttcaaactgcctgtagttacagatagggaatggcaaagggtggaaagtggagactcagtgcagagttgcaggagtgactcctgagtgtgaagtggaaatctgcctgtcccatgagctcacctgtgatgaggagctcagaaatggagtgcccagcaggaagcagctatgcacatggtgctgatgatagtgggcccttaatccttaggaactgagcgccataaggataatagaaaacagtgatgttggctatatatggtacttggtgtttgtaaacgtacattctattaatatacacagacaaccttgattgcaagaaaaccttttaatatttataggcttagaattccttctggaaattaatag

SEQ ID NO: 1669 - DNA, 1000 bp, mus musculus
ttttgtctgcatgtatatctgtgaatgacacacatgcttcgtgacttcagaggccagagaaaggcacttgatccttagaactagaattacagatggttgggagccatcatgtggacgctaggaatcaaacctgggtcctttggaagagcatccaggactcacctccaagcctcatttgcataaaatatttgaacattgctaacatgtagctaggatgcgaccaaaaagcaatgcgcaaacacaacacagagaactcatataacatgaatcttgccccttcccaaggatatgccttcttctttttttctcttggagacagggtttctctgtatagcagtggctgtcctggaactcactttgtagaccaggctggcctggagctcaggaatccgcctgcctctgcctcccaagtgctgggaataaaggcttgcatcaccagtccggcaggataggccttcttaaagaaggctaggtgttcccacatgcaatgcttcttttgttgtgaaccagccacaaagccagttatggaattactcggagaaagtgttaagactctggcaagccttaacttacggaaacccccctccccccaccccgccccagagtgaacaatgtggagctgggaatcagtgcaatagcaaaaggaattttattgttgcagcatgctggggttgccctgcacacgaaggagagagagaacagaccagtacagccagttttcagagcagcagccgtttgcgaacaacgacgtgattggcataacggtgtgacttttaaactgattggtctttagggaatgaggtagcaaaaacttcccttgtctgtaagtggccaacagtcgtggaatgtgtctacgtgctctaggcctcccccacccgcaggtgactgatgatcggcccctaacccctcaccactcccctccctccccaccaccccctggtctgaggaatgtaattagcctttcccttccggaggggaggggtgcctaagtgctctatga

SEQ ID NO: 1670 - DNA, 1000 bp, mus musculus
taactaaggtgtgcgctgccttcagcctaggactgactgtccccgggttccctcctccttgccaggctggcccgaggcggtgctgcgctgtgcggaggccctcccgcgggaggcgcgggtgtggagggcgtgggccgtgggcggggcgagccccgcagccctggtgttgggagctgtcagtgtcaggctcaggagagaggaagtgatcgctccgggaggagcgctagcctagccgcgcagcgtgagacagcacatcctgctggcgcgggcccgctgctctccgtcctcccgcgcctcctccacgacctccagtgagcctccgcgtacagcattcaggtaacccatgggtgggaggtcatgtctatatgcagccacctctgagccccgagcccccggctacatccgcaggacaccggggagcagcagggcagcagtgactgctgcagccaccgctgggcacacagcctgggcccctttccccgtgctcctgcatactgaagcgccccaagctggagccctccagaggcagccctggctgcagctccccaggagcggagaggtacaggcagaggaggacgggtcaagggtgtcatcaccttgtagcccaccttgtacactgggagaggcgcatggcaaggttcctcaccttgtttatttctcctcgggagcaaaaggccagaagctgtgctgtccacatccccgtgggctaccagctcatggcccctagaaagggagacctacagagtgagggaaaggatgctgtctgattacatttctgagctgtctgcaaagctctaggatgctgttgctacccgccaagtcggagggggccaatgcacttccaaccgagctttaattaaacactcatgcaagatgccagtttctttctctgctggattaaaaaaaaaaaagtgtggctggggatgtgttttggtaaacacctccgcggttttccttcccccactcccatccagaattgctctggccacgtaaagctctg

SEQ ID NO: 1671 - DNA, 1400 bp, mus musculus
caatggaggagctagagaaagtacccaaggagctaaagggatcttcaaccctataggtggaacaacattatgaactaaccagtacccctgagctcttgactctagctgcatatgtatcaaaagatggcctagtcggccatcactggaaagagaggcccattggacacgcagactttgtgtgccccggtacaggggaacgccagggccaaagggggggagtgggtgggtaggggagtgggggtgggtgggtaagggggacttttggtatagcattggaaatgtaaatgagctaaatacctaataaaaaatgggaaaaaaaaaaaaaaaagaattgacagaaaattttcaacacaagagatggtgaaattcaggtctgtatacagggtgctatctgctgccatccaagggtacaggctcagcctgagcagccagagttgcagctctctgaggggaatcttgagcaaggcagacggctgggcctcttccttggctagtgctgccccagagttggcggcaggtggcaatacacagtgagtagctaggggccaagatcggggccaacaagcaggaagtggctgtggtcaagcgcatgaacccagctggttgggcctggtagaggtccagcaatgaaagcttccagagagaaacttcttcactgcagtgttacagctcaataagacaggcactctcagatgatctttagtgaaataactccctttcggggtgggttgggacgtagaggcagatgctttctgttgcttggtgtgaggtgttacggatacctcatctccatgtggaagcacttctggtgtttgatctaatcagtggaggcatacatagccctggatgctctgccaccttattcaatactcaactattctcaactgtgttttccccccactttttcacacagagcatcatgtctatagtgccagggctcttccaagctctacacctatacttgtaaactcctgctgcataacatcttcatttccattaaaaatgtaccggaggatccagcaatacctctcctgggcatatatccagaagatgccccaacaggtaagaaggacacatgctccactatgttcatagcagccttatttataatagccagaagctggaaagaacctagatgcccctcaacagaggaatggatacagaaaatgtggtacatctacacaatggagtactactcagctattaaaaagaatgaatttatgaaattcctaggcaaatggatggacctggagggcatcatcctgagtgaggtaacacattcacaaagaaactcacacaatatgtattcactgataagtggatattagccccaaacctaggatacccaagatataagatataatttgctaaacacatgaaactcaaggagaatgaagact

SEQ ID NO: 1672 - DNA, 1400 bp, mus musculus
tcaagtgattttaggacaaaattctaccagactttcaaagaggagttaacatcaataaaatttaaattatttcacaaaaaagaaatagcagaaacattgtctaattcattttacatggtcacggttattctgataccaaaaccacataaaatttcaccaatgaaagaaaattataggctgttttccttcatgaacatagatgtaaacgttctcaaaaaaatatctgtaaaccaaatctaagaacacatcaaagtagcatccactacgatcaagatgcaggggaagttcagtgtatataaaatgataaatgaaatccaccatataatcaaactgaaacaaaatctacacgattatttcatcagataaataaatggccttagacaaaattattattattattaattattattaatacaatttggatattttcttcatttacatttcaaatgttttgccttttccaggtcttgccttcagaaacatcctatccctttttctctcccactgcctctatgagggtgctcccccactcacccacccactccagtcttcccaccctggcattcccctacactggggcagagaataccctcaggcctaaggtctgctcttcctgctgatgttcaactaggccatcctctgccacattttttagcaggagccatgagtatctccacatatactctggttgttgttccagtccctgggagctccagggggtctggcagtttgagactgttgctcccctcatgaggcttcaaactgcctcatctcgttcagtctcttttccaactcctccttctgggacactgcactcagtccaatggttgcatgggagcctctgcctcagtattgttcaggctctggcagagcatctcaggagacagccatatcaggctcctgtcagcaagcacttctcagcatccacaatagcatccaggttaggtgactgtatatgggagagatcccctggtagggcattctctggatggcctttccctcagtctctgctccacaatttgtctctagatttcctcctgtgagtattttgtttccctttctaagaagcactgaagtatccacacattggtcttgcttcttcttggacttcatattgcccatgaattgtatcttgggtattcttaacttttgggctaatatcaacttatcagtgagtgaatacccgggatgataatttcaagttccattcattacctgtgaatttcatgaagtcattgtttttaatagctgagtagtattccattctgtaaatgtaccacattttctgtatccattcgccaaaattgtatactcttctattataaagtccagaagatattagggatacaagggacttatggcaacataataagggcagtttatagcaagcccatagccaa

SEQ ID NO: 1673 - DNA, 1000 bp, mus musculus
aatgttatcccctttactggttttcccccctggaacccccttatcccatcctacctctccctgcttctatgtggctgttcacccagccacccactcctatctccccatcctggcattcctctataccagtgcatcaagccttcacaagtccaatggtctctcctcccattgatgccaacaaggccatcctctgctacgtatgtggttggaactatgggtccctccatatgtattctttggttggtggtttagtcccagggagctctagtaaggatagcaggggggttctggttggttctgagcctctcaggagacagctatatcaggctcctgtcagcaagcacttattggcattcaagagtgtctgggtttggtgactgtatatgggatggatcaccaggtggggcaatctctaaatggcctttccttcagtctctacttcacactttttcttcatatttcctctggtgagtgttttgttccccttctaagaaggactgaaacatccacactttggtcttctttcttgagcttcatgtggtctgtgaattgtatcttggttattctgagcttttgggctaatatccactatcagtgagtacatagcacatgtgttattttgtgattgggttacctcactcaggatgatattttctagttccatccatttgcctgagaatttcatgacatcattgtttttaatagctgagtacttttattttttttttaaatccagttgttagccccctcctggtccatactcctacagtctctcatcccattcctcctcctgctgtctccaagaggatgcccaaccttcactggcaggcttccccatgccctaggccctcatgtttctcctgggttaggccttctactgaagccagactaggcagtcctctgctatatatgtgttggagacctcggccagctagtgtatgctgcctgattggtggctcagtgtctgtgagatctcaggggacctaaccaggttgagact

SEQ ID NO: 1674 - DNA, 1000 bp, mus musculus
taggggtctgcaccaggtcctctgcatatatgttatggctattagcttggtgtttttctcagactcccagtgaagtgagtgtgcctgtgacccttttgagcgttcttgagactgtttttctcctattgagttgccttgtctagcctcggtatgagggctttcatcttgtattattatctgttcctttctgaaaagagacagagggaatggatatggttacacaggtgagttgagattgggaagtttggagtagtggaaggatggaaacctgtgatcaggatgtaccttatgaaaaaagagtctattcttgcagaaaaaatttaacctcaaatggatattaaaatagtagtcagggtcaccttgggcgcggagtccatggacacccccaaggtccctagaggatagcttgagaggcagaccccgttttgggctccaaacatccaggcacctttcctgccagaggagaggtgtccacaccacctggaaagattttccagagcaactggggaagccatctttgttcccagatccctctgagactagtctacgcaggtgagaatgtggactacagaagctaacagcttctgggacagggtgaagagacacagcttctgggtcaggccccgtttcggaccttcatcttctgccaggaggcaggtctgaaagccagatatctgtgtaccttccctgcaagaggagagcgtgcctgcagagagtgctctgactattgaaactcatgagagagctagtctcccaggtctgctgctagaggaacagaatcacgagaggaaaaagctctaaccagagacaactataacaactaactccagagattaccagatggtgaaaggcaaacgtaagaatcttactaacagaaaccaagaccactcaccatcatcagaatgcagcactcccaccctgcccagtcctgggcaccccaacacacctgaaaagctagacccggagttaaaaacaaatctcatgatgatggtagaggaca

SEQ ID NO: 1675 - DNA, 1400 bp, mus musculus
gacttttttagatacttgtttttgtttgactgttgtgtcagtttcttctattgtgtcttctactcctgagattctctcttccatctcttatattctgttagagatgtttgtgtctgtagttcccatcctctttcctaggtttttctatccccaggtttgcctgagtttgtgttttctttattacttctattttccattcttgaacaattttactcatatatttcacctgtttgttgatattttcctatatttctttatattgttttgtttctgctttaaaggtctctacttctttgaatatactttccccttatttctttaaggggtttattcattttctctttaaaggcctctatcatcttcataagattagatttaatatcatcgtgtgcatcagttttgttgggatatagagggctacctatagcagtattgctgggctctggttgtaccatattgccctggctcttgttgactatgttcatattctgtcctttagccatctgtttttctctggtgttgtctggatgatcccaattccaggaggactcctctagaaggcaggagtagttatgggccagacaatggaggtcaaggcactggactctgctggctgtgtttccagtgcatctgattgacaaggaattagttggaggttgttccaaccttgtttttcttggaattactgcagacttccaccatgaagtagatcatttttggggtgtcctaaggcttctcaggaaggtagcacaagccagataatggaggtcagaggagcacatgtgtgcaactcacctcagctggctgtgcctcaagtggaccaactctgcagactatgcctcaggcagacacaactgggaacatattggtgagtcagtgttctaagttggttgttcttggggtccctgcaggtctccaagggaaagcaggatgcacttgcattcccccaaagttctttgggatgggagggcaagcccaaagccagacagtggaggaagatgaacttctttcaacatcatctatttaataacacattaagtgccttttggagcaaccatttaaactgtattctaaatataagcagcgtgaatgtttatatgtaggttatatgtgtataaacttgaacatatgtgtttcttcatctactttcatttatatggtaattcttatttattaaattgaagtgtaaagacagagaaattcttccacgtttctgattttcccctctttctatatcctttatttgtcaaagtaactgtaaaattatattttaatattcctcataaaatttcagtatttatcttgaagtgaactgaattgaattctagcttcattaggaaagagtaaacattgtagaacatagatgaaatgaaaatagagacagggagcatttggggcag

SEQ ID NO: 1676 - DNA, 1600 bp, mus musculus
gcttatgtctgtagtccctgttccttttcctaggttctccatctccagcattgactcagtttgtgttttctttattgtttctatttccattttcaggttttggatagttttattcctatccttcacctgtatgattgtattttactgtgtttgtttatatttgtttgcttcgttttttaatgcctttacctttttaaatgtattttcctgtatttcttttagagatttattcatttccacttcaaaggcctctatcatctttctcagattggatttaagatcatatttgtgtacttcaattttgctgcacccagagcttgctgtagcaggattcctgtgacctggttctgaagctgtcctttaagtcttctggttttacctggtgttacttggatgatctagatgagcgggactactctggtaggtgggaaatcaaggggacagacagtggagatcatgttacccaactctgaatgcttaagcagaccacagtggcaagatattggtggggcaatgtttcaaactggtagttcttggagtcccaacagtcctctactgggaagcaggctggtcttgggatccttgcaaggctcttctggactccatgccaaacccagtaccagatagtggaagtcaggggactctacttaactcacctctcccagctgtgccccaggcagacccaacttgaaaggcattggtgggagagggttacacgctggttagtcttggggtcccagagacctccacatgtacactgggcactcctgggttcctgcagggatccttggtacaaaagggcaagcctaaagctagacaatggaggtcaggggactgggcaccactcacctctgtcagctgttccccgagtagacccaactgacaatatacgtaattatatacataattttcttgtttgtcaatgcgttcttgagatccatggctttattataattaatttagctaattgatccttataattcatttttcatacttagtaaatttttaataaaactttaataaaccttccgcccccccccaggaggaatgtctatttgtattttcatgttaagctataaagggaaaatttccacggatcttactcataatgaatgcatcaatacatttatttacatttacttgtgatttgtaaaattgagtttcaaaaactctttatctgaattcccatcaaaagcttgaaagagtcaatgattaccttgtctagttaattttggttttggtaaaaatggtcattactacaaaaacatttcccttaaggagacaataaaattgcttcagtttatttgttttgcgtttgtttgtagattctgaatctcttctctcctttttggtgaacaatatctagagaaaatcttctttaagctatgtatagtgacagtcacaatgccagaacctgagagaatgaggaaggataatggctgcaaggtggaaaccagcccaaatagcaaagtgagttcaaggctagaaaagaaatttaactgcctttaatttagcattctttctagtaatattttttgctaatttgcaatttattagtttaaaatcagtttaagtaaaagaataaaatattttattctaa

SEQ ID NO: 1677 - DNA, 1000 bp, mus musculus
acaattatctgtatttgtactcctttgtctcataggatgatgtcatgtgagatgagtgagacactgtagattaaataatggacagtgtgaataggctcttctaaactctgtgggatacttttgcctatacaatattaacacatcaataatttgaaaatcttaaagcagttttacccttgcacccatcagtgttaaaatggtgggaggtgttctgtactgaaggaaaggaagtggaaccatgtaatgtgctgatggatgacatcacagcactataaacagaagggagaaggaggggcatgccaattcaataaaaggaagcaaacaccaactcatatctttattatttagagatttatgaagattttaagagtcctgctttgagataccttttccattaatgacagcactggtggctgaacaaggaatgagttcacagactatgagaaagtttagtttcccacagtgttaaagtaggaaagtagagaacattccagtgcttgatatgcaagcttaatattgcttcttattttccttttttctactatagtgtatcaatttaaaaataaagttgtttaaaaccacactgagttggtttcaactggtaagcacagtttctcttggagaggcaagaacagatgcatcctttagctgtgacacaaaaattacaggttcctagactaaaaatagctcccttaatatgtatgtgttatatcgtcactgccattcttcctaaaagcaacagactggcagctgttattaataagtacgttgattgtgggtatctttttcactacacgaagatctcatacctttggcaatctttcagggaagatagttccacattcatgtcattgtaaattttgtctttacaacaagatcttatatgtagctctgagttgtatcacctagataggttagcctgggatgtctgtggacttttatccttctgtttcagactggcaagtgcagagtctagtattttggcccatcatggatagct

SEQ ID NO: 1678 - DNA, 1600 bp, mus musculus
tgaagtaatctctggcactgatcaaatcagtgaatggaactcttatgaaagaacagaacaaaaaataatgctttttgtcagattttaagcaggagagtttatcaagtgagagcactaggaataggagagtgttatctcaaggcatttcatttaacaagatggaaacatagatgggacaaattgtaatcttctttagaaagttgttcactagtctgaccccgattattttgcaattcattcttacactttagaagccatatgtaagcaaagtctcatttaagttacttttctgtgaactcataggaaccttggtatgattggttacagttaagatgccgtgtatgaaaattatttggaaaaaaaaaagttagaaaatcttaccagaaatgtaacaaaaacactggtacattctatgatcatatttttattttttaatttaattttacttgcacaaattattcactttgcatatcatgcactgtttgacttcttgtcactctttcctacaattcttacccaattcctccttcaaattctcccctgagtggtttggggcctctggaataatacctgcaaccctggcatttcaagtctctgcaaagctaggtgcttcatctctactggggccagactaggtagcccagctagaacatataaaacatacaggcaacgttttggggatatctcctgttccagttgtctgggacccacatgaagactaggtcaagcagctgttctttggtcaatgattcagactctgagaactccctagggtacagttgactctgttggttttccagtgaagttcctatccctgtcagggccctcaatccttcctcttcttctttcaaaagagtcttcaagctccatccactctttggctgtgggtttctgtatttgtctgggtcaactgatgggtggatcctctcagaggatatattatggtaatctgtatggttcaggcgtctctggtctgatggaaataggggagaggcagcaggagaatcgaccacattttatttttcataggaagacttccttgtttatcttagaatacaatataattaaaagaaaccatccatgaaaatacttttattttaaataaatataaatgagatctgggtttggttgaagatattctcatttaatagtctggtgactgatcgaagaaagtctttggtcataggttacaggagattgtaaaatgcacctgccaccaatgatcaggcccttacacacttcataccagaagaaattctagaaaaggaggtgtgttgatgcagacaacaaatatgcatggctacagatggccaaaaaacatttgaacactgaaaaaataaacatatttattataaaacatattatagtgaatatgagttaccatttatctgttaataaattatgatttatatattaattgtaaagactaaatattatttatatcacatgactttgaggatttctcttcctccaatagatagacattcagttattttgtggtgaatttctagattttgattaaggtattttggtatgtgttgtaagaaattataaaataatggcatggggtgatggatagattactattcttttaaaaaaa

SEQ ID NO: 1679 - DNA, 1400 bp, mus musculus
ccgtagatttggtcttctcattgtgtcctggatttcctggatgttttgagtttctttttgcattttgcattttctttgattgttgtgtcgatgttccctttggaatcttctgcacctaagattttctcttccatctcttgcattctgttgctgatgcttgcatctatgatttctgatttctttcctagggtttctatctcctgagttgtctccctttggattttctttatttttttctacttccacttttagatcctggattgttttgtttaattccatcacctgttagtgttttcctgtaactgtctaagggatttttgtgtttcttccttaaaggcttctagctgtttacctgtgttttcctgtatttccttcttaaagtccttaattatcatcatgagaagtgactttagatccatgtcttgcttttctggtgtggtggtgtatccaggacttgctatggtgggagagtttgattctgatgatgccaagtaaacttgatttctgttgcttctgttcttatactagcctcctgccatctgattacctcaagtgcttgctgccctcaatatttctgattggagcttgtccttcctataatcccagttgattcaggactcctcagagtccagctttctctgtgatcctttgcttgtgggctcctgtgaacctgagattctgggtgtgtcagagtttttggcagtcaagcttcctctaagaacctaaaatactggcgtgacccagctcctgttatcctgggatcctactgtcctaagatcctgagggtgttacagtgcttggaagtggtgtatcctttgaggaccatggatatgtctggtctgtttgaaatcaaggtaaaccagaactgatcaaaaggaacccgagcctttggttaggaagggctctggtgtccttccttgttcctgctgtcatacgcctgtcacaattggattggaactgatgttgtgttccactcaccagtgatcctaagatcctgtggagagtcctctgggttctgtgggagtgtctgctgattcagtgcccaaggtgaacccatgctggtgccaaccagaaaggacttgtgctcctggtcaagccagtcttctgcttccccactgctgtctcaggtcccgagtgattggattggaacagatgttgagttccactcatcagtgatcctaaaatcgcatggagagccgtctagggaccatgggggtgtccactgactccgtggacctggtgacccagtgctggtgccaactggaaggcattaatcaacttttaattgctaaattttgtcatcattaaaaattcaaagcatcatgtactggaaattgttccttatctttcatcatctctatatctactacttagaaatatttagttatttcttttcgttt

SEQ ID NO: 1680 - DNA, 1600 bp, mus musculus
cccccaaaattccaccagagaacccctcaatctgataaacaggttcagcaaagtagctggacaaatttctttgcaaaggcttattccagttttatgaggctagcacaaggtgtgtacatttttcagggcaaatcaatacttcagaatcagctccttcagcagatgcctggtacctgctcagtccatctagaagcatttgcagaggacaatggaggggcctgacttgtcatactcctggttgctgatccacataagctggagagtgcacagtaaggtcaagatagagccaccaatccagacacttgcgctcagtgggaacaatgatcttaatcttcatcatgctaggtgctagggttgtagtcgtctgcatcctgtcagcaatgcctgactacatggtggtaccaccagacatcactgtattggcatacaggtctttccggacatccacatcacagttcataatggagttgaaggtggtctcatggatgtcacagaacacttgaactgctcattgcccctggtgatcatctgcccatctgacagctcatcacacttctccagggaggtaattgatgcagcagtagccatgccttgctcaaaatccagggcaacatagcacagcttctcctttatgtcccgaacaatttccctctcagcagcagtgctaaaactgtagcccttttcagtcaggatcttaataaaatagtctgtcaggtccaggccagccaggtccagacacaagatggtgtggggaaacacatagccctcacagatgggcactgtgcatgtgaccctgtcaccagagtccatgatgatgctagtggtgtgcccagatgcctacgaggagtgcaccacccgaatggccatacacatggctggggtattgaaggttttgaacattatttgtgttatctctctcagttagtttcggggttcagggggccttggtcagaagcaccgggtgctcctaaggggccacaagcagctctttatagaagatgtcatgccagatcttctccatgtcatttaagttggtgacaatgctgcgctccatagactatttcagagtcaggctacccctcttgctctgtgtttcgtcacccatgtaggagtttttctgtccatgcccaccatgtaggggatgcgctagccattgtggagggaaacatggccctggggttgtcctcgccaccaaaaccagctttgtacttgccagagtcattgtcaatgatgagtgcagcaatttcttcttccattgcaatcagtgaagggcagggcgacagagcagcagaaagaaccagagtataagtcgttataactctaacatttcagagatggcatgtttatttagcaactttccatttctcagtgacccagcttgtcaggtgtcatgctgaatagtactctacagaataaaataattctaatttggctttatttaactttgttgaataaatgccccaaatgtaataaatatcagtcgaaaaatataactttttactgtgcatttttcatataactgaagtgtagcctaatttattattttttttgaaaataagttttattatgttattgtattagttgtcttttattccactat

SEQ ID NO: 1681 - DNA, 1200 bp, mus musculus
tttatttaaaattgtaataaatattttctttatttatatttcatttaatcacctctcctggtttcccctctgaaaacccccaattacctcctgcctcccccttctcaccaaacaaggcactcctgcttcctggcgctggcattcccctctactgggacatagaaccttcacaggacaaagggcctctcctcccattgatgaccccctaggccatcctctgctacatatgcagctagagccatgagtcccaccatgtgttttctttggttggtgatttagtcccagggagctctggagatacggattagttcacattgttattcttcctatgggtttgcaaacaccttcagctccttgtgtactttctatgccttcttcattgtaaccctgtgatccatccaatgaatagctgtgagaatccacttctgtatttgtcaggtgctggcaaagcctcttagaagacagctatatcaggctcctgtcagcaagctcttgttggcatccacaacagtgtctggttttggtggatgtatatgggatggatccccatgtggggcactcaatggatggtcattccttcagtctctgctccaaactttgtctttgtaactccttccatgggtaatttgttcccccttctaagaaggattgaagtgtcttccttcttgagtttcacatgttctgcaaattgtatcttgggtattccaagcttctgggctaatatcacttatcagtgaatgcatatcatgtgtgttttttgtgattggggtacctcacttggcatgatatccttcaggagtggtattgctggatcctccagtaatactatgtctaattttctaaggaaccatcaaactgatttccagtgtgcttgtaccagcttgcaatgcactagcaatggaggagtcttcctctttctccacatccttgccagcatctgctgtcacctgagtttttgatcttagtcattcttactggtgtgaggtgagatcagtgttgtttgatttgcatttcctagatgactaagggtgttgaacattttctaggtgcttctcagccattcctcagttgacagttttttttatctctgtacctcatttttaatagggttatttgggtctctggagtctaacttcttgagttccttgtatatattggatattagccctctatcagatttaggattggtaaatatctttt

SEQ ID NO: 1682 - DNA, 1200 bp, mus musculus
ttttggttgctgttttgttttttgtttttgtttttgttttgttttttgttttttgagacagggtttctctgtatagcccaggctgtcctggaactcactttgtagaccaggctggctacgaactcagaaatcctcctgcctctgcctcctaagtgctgggattaaaggtgtgcgccaccaatgcccggcccttcccagattttaaaggaagaatttgcagttttatacagaaacaacaaacaagccaacaaacaagcaaaaccaggatggcagtggtggcatgtctttaatcccagcacttgggaggcagaggcaggcagatttctgagttcgaggctagcctggtctacagagtgagttgcaggacagctagagctatacagaggaactctgtatcgaaaaactaaaaccaaaacaaatcaaacaaacaaaacaacaacaaaaataacaaaaacaaaaactatcctaaataaagaaatatgaagtccttcctgttggcagggccaactttggcactgggcgtgaactctggggatgatcccacggttcccagaggactctctatgcaacaggtgcccagcatacccaggatcgtaggaacactgctgagtggaacacatctgttccaaaacaaccaggaggggactatgccagcaggaacagggacacaggaaacccacccaaccagaggctagggtttcttccagtaggcaccatgccccaggccactttgggcaaaaactcattggacagttgcacagtccccagaggactctctacactgcaggcgtcctagcacccaggatcttaggatcactgaggaagagtaggctccagagagggctctgatttctggactcaagtgagagctctatcttaaatcccaggtctctcatagaccagaccaagcaggccaaagaagcaacagaccttcttgtatagggtcccttctggccttcatcttcagccaggaggtagatctgagcaccaaacctctgtgcaacttcactgtagaaggagagcttgcctgcagagagtgctatgaccactgggactcaggagagagttggattcctaggagcactgacagaggctaacagaatcagaggaggaacaaactccaaccaaagacagctagaacataaaacaccagagattaccagatggagaaaggcaaacgtatgactcttactacagaaa

SEQ ID NO: 1683 - DNA, 1200 bp, mus musculus
aagttaccataacatttaatatttcttacaatccattttattcattctctcttcctttttctgtcaccatattatagactgtgtaaggctgcctgttttggttgaatgaggtttgctctggtgacccagtagaaaactctacaagggacaggacccagagacaggtgcctgacactacagagcccccaactccataattctgtgactataagtcacacagacaatgtgccaggctcctggcattctggctagactccatcctcacagttacctgactatagccaggtatactcctcctcacagttacctggcaacagcaaagtagtccagcccaatataaaaggggctgcttggcccctcctctctctctttaagctctcacctttcttagtctcatctctagccctccttctttctctctctctttctaccttctctctttctccctgcatttctacaataaagctctaaaaccatagactgtctctgaccatcaaggccggccctgcttgaaagatgagataggtttcaccctaaagagcagcatcatgcactctagcaacagaacagaccaaggattctcacctgtgtgggaaccacccagcaccccctctctcactgccctctcctcccttcggcctgggcatgactgagccacctccagggcccccactttcttctcagctcttctgcgatgtccagtagtgcctggaattcccgagactgagaacctgttatctctagcctctgtgaggcccagaaatctaggacatccccttgtccacccccgtgggctaggtctgtagcttcccacagaaagacacccaccaggggccacatagaaaccttgtggaagtcctctacgtctgcccacccagagcactggaactctggcaggatgtgggttttctctcactccctttactcccccatgcccactgcctgcatagaaccttagccatactgatgaattctaaatacttaaaaggtatagagactatcactgaaagatggagaggctgttttgcctctgaattagacattgctctgtattttagacataactttgcctattcagaattcacaacactgtggcttcttgggactgcattatataaccatcatttctctgtattgatgccagtggtttgcctaactcttgtgaagcagagcaagttctataagacttgcgattttgcc

SEQ ID NO: 1684 - DNA, 1000 bp, mus musculus
tcaaattataggaagagagaagttttgaggaatctcttttatatatgcacctgctgactattacacagctaccttgtatttcaatatttcatttatatcatgtcttcaggtggatttggagaaactcggggctcaccattgtggagcaggtcctaacatctccatgagttctcagcatctgatttcctttctgggtaagaagaaaggacaaacacaaaatgatagcatgcatttgggtataattaagtgcatttgaggaatggacctggaagggagtcaagaagcataaaaaccattatgaggacaaatgcttcacccccaacgtgatatagatacacatttgcacagatattctcaatcactgagaaaagcagcaccattccctagtacatcagacgttagtgtatatcagagtacatttggaaaggaatttctcccaggattttgatatcacaagtatgaatagaataaataaatctgtcagtctaaacaaattactctcaaaaactgctatcaagggcagtattttggcattccctcagacctttggcaacatcaggacctgtcacccatggtcagtgagaagaagctatgtcagaataaccaagtagtgactgagtgcacattctctgacaggcatctatctccatatgaccagttcacttggcatctgctgcccgggttttctcttcttcctcctgacaacctgctctttcagcctccccaagggtgccatttgttgataaagtcttgacaaacacctgtctgagatatcatacaaacattgaaagctcaattaatttcacttaaaatagaaataatgcctggctttcattcaaagacaaaaagaccaccaacagactgggaaaggatctttacctatcctaaatcagataggggactaatatccaacatatataaagaactcaagaaggtggatctcagaaaatcaaataacccccttaaaaaatggggctcagaactgaacaaagaattctca

SEQ ID NO: 1685 - DNA, 1000 bp, mus musculus
agataagggcaacagaacaattgtgtgctatctttaatttcccagctctgctcatctgctgcacaaatagcagaagccatggttaatcaccgcatagccctggatcccagagcaatcgtgcagctttccatatggtctgctccaaacaaggactcggacatatatcaaatacaaattatgcaagaaaatgtgatcatacagtggaaccaggtcgtaagagaaaaatacctgttcaacaaaaacagaaacctacttaataaacactccacattcctggttcccaaggcagagcaataatgtgcagactacataaatccccatcctaacattagctaggataatttctcagacatactcaactggaagctttcattttcactcatccgggcagaagaagaaaagtttaattgatcatttccattttcttcttctttaatgttgtaggctctgcaaggcgtgctacctacggggtgagtacgtccctcttcagctcagtcttaacattgttttcccctaaatttcatctgtaagctctgttcatccctcttcttcttcgacaatcattagctttatgaaaggtaaccagttaaagtggatgcacgtgcaaatataataagcaccattccaaaaagaaactgaaaaaaaattaaaaataggaagtgctagacaaacagatattgttaaagcacctttgggcttgctttttgattaacagaaagcctgtttactaattttaatgctcactttgaagctttgaagtgtcacttacataagcagaaactaatttaactgaaggtttgattctatttttactacaaactacatttgttattacagtcaactgataagtaaaaaaaaaaaaaaaaatcagagttctcatgccacacctccaatacaagtaaacacagagcactgagaagggaaataagccttctaatacaactatagccttatagcctgggtatcctgaccatagaaaaaggggaaataagccttctgg

SEQ ID NO: 1686 - DNA, 1000 bp, mus musculus
ttcatatgagaaagtaaatgtgtgtaatataaggaaggggatggggtatgcattaggaacaagtgacgcctgtgcttctgctgtcaccttctgttgcagcataggccctctcttgactgaccactgctggcatcaagatgagcaggtccaggacacacctgaagggaactgaatcctaaagctcattggcagaaaggggaaggagagtccttactgtgcagctttctcacatcctcagaagcaaggcgatgaggacgtgataccgtctacttagacatcaagtgatgttcacatccacacacatcctggatctgtggtttgtttgaattctctaagaaacacagctgctctgtggctctaataatcaaaatcactaaactgtaaaacatgaaaatattacagttcagaaaatagaactattacttcttccatgtttttcactgtaaagtatgatttccaaaggcttctaattatttgagaaaattggcctaattctgtttcagtctgcatctattctctgcacatagcagatataaaggcacgctgacatttgtcaaaggaagttatatcaggtcactttgaactttgcaaacaaatattttctcacttttcactagtgaggatacatgcacatcactgttagtttcacaaatgaagtttgttgaaattttatgtacgtagaaaataaggtgtaaaaatctgacccctggatggtctcaagtcccttctcatgtgtctctctgtctgtctgtctgtttgtctgtctgtcttcctccagagcagtctacctcgtgtttgtgacaagctttcactgagactaaagctcaatgcttaggtgatgatggccatcgagtaggccacggacatccatctgactctgcctccttatctctgggatactggctaactccacaacacctagattccttttcaagagttttggggatggccctcatctttgcagggcacacacttccccacagagctctcttcagcaaac

SEQ ID NO: 1687 - DNA, 1000 bp, mus musculus
ctctctctaggcacagatgcctgacccctgcacgtgccacatgattcagaatatgagtctttctgcccatatgataattaggaaatgtgttctgtataatcaatcagttcctcctacacatatggtgctgtattacaaccaatcagcccttcctgtccgtattataattaggtgctgtgttatgatcaatcagctcttcatgtacagaaccctaagaaccttgtataccttttccctggaaaaaaaaattaagctgactcccgggagttcttcccgtcatacagcgtgaataagattatttaaaggacaggtagcaagttaggttcattccaagagtggaagcagaaccttataaaaagatagaaagataacctaaaaagcattgctgagaaacaagcagagtgaaaagtatagagtaaggagtgggcacgtccttcaagagttaagggcttgcatttaaaaaatatatacattgaatttaacaacataagaggtgatttgtgacagtgaaaacagttaaggtgtcaccaggacagtgacatgaggcatgaatgggagcgaaggaggcagttctggggttgtgtaaatccattttcaaatctatggctgtgaggaggaacagaaagggggatatttaagaataaatagaaatggtaaggctcaagtgaggcttatgtctggaacaggggttgctcacatggttctgacaagcaagggtaggagagcactagcacaagttgagaacatctaggatgttggatgactcaggaaagaatggaacagaggagaagaccattcttaggcagtggaaaggacatctcatctctcactgcagtagggaaaaatggcaaggtggcagaggctggaggactagaacattatgtgattttttttcttttgcttatgacttagtattcattagctctgtttattattaactgttgacttcagggcattttgagtttttatttctttgtcttcatagatagatttgtttcag

SEQ ID NO: 1688 - DNA, 1000 bp, mus musculus
gctgagagttctatgtcttcatccaaaggctgctagtggaagactgacttccaggcaactggggtgagagttttaagcccacacccacaatgacacacctattccaaccaggtcacacctattccatcaaggccacatatccagatggtgccactccctggtccaagaatatacaaactaccacacttgcacaaaaagaaaaaatagtggttcagacaacatgaaaaggcagactatctctgtataagtaaaatacttgttttcaatgaggtaaaagaacacacgtgaagctaagcaatatagatattgactcaatagtaaagcagagtatgagatgtggtccttcaaaattagaaaattcagacagttcaataaaatgttattataaacacacacacagataaaatatgttcacacacacagacacacacacacacacacacatttaaaacatctcaaaattctagggaagctctctagtgtatttttctaaaatgattgaacagttttgacagagaataaattccaagataaaatctggatggatcagaagccatccacatcatcgatcaatttttccagaggcttccttgaattttctaaaactttatggtattttaggactcatcaagagaattttaaggatttatgtttccttagattaatttgctcaacaagcagttttggacagaatataaagttgggtaaatctaggattgctaaaccatggtctacaggcctggagaaatagctcagtcattaagtttatttgttgctctcatggagaacccaaggcttagttcccagcaccagtatggtgactgtgagccatctgtaactccagttccatggtatctgctgcccccttttggctcccatgtgaaacaggcatactcatgacacacaaaaatacattcagacaaaacacttatgtaagtaaaataaaatgaatcaatttaataaatcctgattttgtaactacccttactacccaaagatc

SEQ ID NO: 1689 - DNA, 1200 bp, mus musculus
catctatgagaccccttagaacttgctgtttctccaggccatgtgcttcacctctgcttttcttcttctttctcctcctttgagtcctctctctcttccattttctccttcttatctttcttaccttccactccacctttcctttatctgcccaattatcagctctcctttatttgacaaattaaggtggtaagcaggtttacaggaaatcacctgagtgctgactcattccttgttcgcagtgcctcactggagaacagaattaacattaaatataattagcccagagctatatctaatatatatatattttttttattagatgttttctttatttaaatttcaaatgttatccccttttctagtttcctctccaaatcccctctccccttgctcatcaacccacccacccctgcttccctgtcctggcattcctctacactggggtattgagccttcacaggaccaagggcctcagaaagggtacagactgcccaaattggattccatctcaaggggaggatccaaggcctgacactgttactgatactatggtgtgcttacagacaatagtctagcatggctgccctccaagaggcccaacaagcatactatacccaactaatatactgaagttgaggaccactgtgcttgacttagggaaagactggaggaagttgaggtggaggatgaccccatatggagaccagcagtctcaattaacctggacccctgagatctctcagacactgagccaccaaccaggcagccttcgaggcacctgacacatatacagcagaggactgcctgttctggcttcagtgagagaagaagcacagaaccctctagcaacttgaggccccagggagtggggaggtctggcagggcagggtggggttggctgggcgggggcatcctcttggagatgggatgagaaggaatgggttgtgtaactgtcaggagggtagactgggagggggtaacaaccggactgtaaaaagtaattaaagataattttaaaaggtagggggtacagatctaaacacagaattctcaaaagaggaatttcaactgactaagaaacacatagagaattgatcaacatccttatccatctgtgcagtgctatcaaagatcccatcttacacctgtcagaatggctaagatccataatattcgtggcaaggagaatactcatgg

SEQ ID NO: 1690 - DNA, 1200 bp, mus musculus
ataattattgtatttatttacatttcagttcttgtgcctctccttccagcaagcacccctcctacaggccctcatcccattcctcctcccccttgctttcaagagcccctcatcagattcccccttcctctcaaggattaagggcatcttctcccactgaagccagacaaggcagacctatatgtggcaggggcctcaaactggtccttgcatgccccatgttggtggctcagtctctgggagctccctggggtcctggtgagttgagactgctctgctagtcttcctatgggatcaccctcaccttcagcttcttcaatccttcccctaattcaaccataggagtccctgacttcaatccagtggttggatgtatctgcatttgtctcagtcagctgctgtttgagcctctcagaggatagctatgccagacccccatctgtaagcacatgataacatcagtaatagtgtcaggtcttggtgctccccctcaccgtgagattggttccaagttggaccagccatttgacctcctttccttcagtctcttctccattttttgtccctgtagtacttttagacagaaacaactctgggtcagaaattttgacttgggttagtaacccagtccctcaacttgaggccatgtctatctactggaggtaaactctataagttccctctccccagtgttgggcattttggctaagttcacccccattgagtcccaagcacctctcacctcccaagtctctgttactttctagagcttcctgcccaccccatccccagacgctgcttatttccattcattctcctggctcctggggcttctctcctgttccccacccccatatctgatcctgttcctccttcccctccttttcctcctctccactccctccctcctttcacccctctgcctcctgtgattactttcttctaagtaggattgaagcatcctcacttgggccttccttcttgttaaacttcttatggtctatgggttatatctcaggtattctgtattattcggctcatatatcctcatcagggattacatatatacatgtccatttttatctgggttatatcaatcaggatgatattttctagttccatccatttgcctgcaaaattcatgatgtcatcattcttaatagctgaatagtaagtattccattgtgtacatgaaccagt

SEQ ID NO: 1691 - DNA, 1200 bp, mus musculus
cttggctaatacaggatctataagagatgctcattttatagctcagtggggaaataatgtcatctagttaccatatagtagctcctaactagcagggtttctgttacagtgtaaaacacttgtgtgctggtaggtctcagtgaggaaggtcaatatctatttcacatcttttttctctgctgatctgtgtagatctcaaaccccagaagccctgagtctcagctcctagcttttatactgatgccagcttctgctactggttctcctctacattggcctgtgcttctcctatggtcctttatcagtgaggaaccccttaggttgggtacaagattcaagggggtgaaatcaggctattttggccttttgttttcttgactgaattcccaggtttcatttgtggactattctactgacatttctaccaataaatagggcacagctttgactaacatatagtggaagaaaaataccgtgtataaacagcatcaggggagctgatcctgtgtcatgatgctccatacttaaataccaccaggagaaatctggtctcccaggagtgtgaaatacctgtgagcacaggtaagaccaccacttctcctcaaattcctggctcaagagggacacaaccaaggaacaactgggaataggatcctaccagtttccatctgcacctcagagctgaccctgtgccacagttctccatacctaaattctccccagagagtactggtcttccaagagtacttacacacaggctttcaggagggacaagccacagtcagagacagcaagaccagtgaacatcagagatgacctgatgacaaggggcaagggcaagaacataagcaagagaaaccaaggctactccgaaccatcagaaaccaaattcttccaccacagggagccctggataccccaacacactaggaaagcaagactctgctttaaaaccacatctcatcatcatgacaaagggttttaagaaggacataaaaaaaaaactcccttaaagaaatacaggaaaacacaaacaaggaaaggaatgaaacaaaaccatccagtatctaagaatgaaaatagaacaataaagacatcacaaagggagacaaccctgatgctagaaaacctaggaaataaatcaggagtcatggatgcaagcattaacaacagaatacaagagatagaagagagaatttc

SEQ ID NO: 1692 - DNA, 1000 bp, mus musculus
tattttttcttcttctatatatgtcacatggaaactgaggacccattgtatattgaatctcaggtgcatgtccccattttagtctcatgaccaatgttaatgtttgctggtttggaagcccattttctatgtcctcgaattctttcccagactaccattcactttcgaacgaccttaagtccagtagggcaaatcagaggcaagtaagaagcagggatagtttatttttgcttgtttgtttcattgcttttgtttggattggttgccttggtacagaaagagaagtcacaaagaatggacttgaggtctgtagaaaacatcatgcaacatgacagttcacccctttgccaacctcttgcttcagttcctttaagctatatggctgaccagttagcaggtcattccttaggatctgttgtctaggttttgccttgactatgtaccttggctaggtcttctaagtgctaaatgttgttcccattccctacaggttaccacgcaaagtgtgggagatgaaatcccaatgctcgctggctgaccaagcagaaagcataacccagcttccacttaagcaacttattccacttttttcttccaggtgcctgctgatttcctgaagggcttgtggattccccatccgtcattccccaaggcaaaccctaatgcacaaagtacacgatttcacatggtagtttagtgtttgtcaagcttacacaaaacctggagacagcttcagttgaggagctgcctccaccatactagcctgggaccaattctgtaaggtcgttttgtaattaccagacacagaacaaagcagttatgggacatgaaaccatgccagaaagtttggtaaggttgagcaggttgaaaccagaagattcagtgggcacacacctgaggcttaggtgagtcccagctccctgccagacgcctgacttagaatgtgtgcaatgcttctcatataaaagaaatgtgagcacaggtcatttaggccccaaac

SEQ ID NO: 1693 - DNA, 1000 bp, mus musculus
aggcggacacctgtcctctggtccggatggtggccagctgtcttcggcccgccaagggtgctgcctcagcggctctgtgcttctgcctgtcccagaagctgtccggttctctggcgcaccctctgacctgtctatttatgtccttcttaatgtcctctatcatcgttatgaaaagtaattttagatctgaatcttgctttcctggtgtgttggcgtattcaggacttggtatggtgggagaattgggttctgatgatgccaaataaccttgatttctgttgcttatattcttatgcttgcctcctgccatctgtttatctctagtgctacctgccctggctatgtctgactgaagcctgtccttcctgtgatcctgcttgtgtcaggacttctccaagacaagttgcctctgtgatcctatgattctggaatcctgtgaccctgagatcaaaagtatgtctgagctcctgggagtcaagctgcctttgggaccttgagatcctggtgtgaccaaacttctgggatcctgggatcccctgatcctgggtgtgttagagcaccagggagtggagctgcctgtgagtgttgtggggatggctgcagagtttgcacccaaggtctgctcagggcaccagcccagacagactggaaggaacctgtgccactggtctggtggagtttctgctgcctgggacccactggtcccagttactccttgtgaaggggacagatgttgtgtcctcttcacctctgatccgatctcacgtgtttctttaccttccattaaaatattatggtataactccttccatgggtgttttgttcccaattctaacacagggtaaagtgtccacacagtcagctattggatggatcacaggacccccaatcgagaaactagagaaagtacccaaggagctaaaggggtctgcaaacctataggtggaacaacaatatgaactaaccagtaccccccggagctcgtgtctctagctgcata

SEQ ID NO: 1694 - DNA, 1400 bp, mus musculus
agttactcacataaatttcttattagttcagaatttggacctgaatagtatattttatctattaattttaatgtgtcaattgatatggtaacatgagtttctatttttatcactgcaacattggaaatttggaccccagattattgtgaaattacacaatattatatacttctgagaaattttcttgcaatctcttagttgtatacatattgatatatttataaaatttacagttggagagaaaggagagaatttttaatatattttaaaaattatttatttattcacattccagccattgcctccccttcccagttccccttcccacagttcctcatcccactcctcctacccttgtctctgagaagatggttccccactaccagggctccctcctcccaggcctcaagtatctctaggattaagcacatctcccactgaggacagaccagacagtcctctgctatatctgtgccagaggccttggaccagctagtgtatgctgcctggtcggtagctcagtctctggcggctccatggggtctgggttagttgagactgctggtcttcctatgggatcgtctttagcttcttcaatgcttcccaaattcaaccataaaggtaccttacctcagtccaatggttggatgtaagtatctgcatctgtctcagttggctggtgaaacctctcaggggatagccaggccagtctactgtcttcagtctcttctcaatttttgtccctgtagttcttttagacaggaacaattctgggtcagaaattttgactgtaggttattaatcctgtccctcctgtcctctatctactggaggtagactcttcaagttccctctcaccattgttgggcattttgtctaaggtcacccccattgagtcctaagagtctcttacatattcactggtacattctggagggttcccccacctccaactcccttacccccaaggctgcatatttaaaaggggagaattttgaagacaaaatgtcttccaagttttgcaagttgtatttacaagggaagaatcaaactcaccaagaagacataaacggtccgagaccggccgaacttaggaaattagtctgaacaggtgagagggtgcgccagagaacctgacagcttctggaacaggcagaagcacagaggcgctgaggcagcaccctgtgtgggccggggacagccggccaccttccggaccagaggacaggtgcccacccagctggggaggcggcctaagccacagcagcagcggtcgccatcttggtccgggacccgccgaacttaggaaattagtctgaacaggtgagagggtgcgccagagaacctgacagcttctggaacaggcggaagcacagaggcgctgaggcagcaccctttgt

SEQ ID NO: 1695 - DNA, 1200 bp, mus musculus
tctgataactgcaaggcacatgctgttgaggatgccagtaatgacattgaagatacagtattgaggatacgataagacagattttaaaattcctgcatgaaaaatagactctctagtctatgaagagaataaaataaaacaacataaagtatgactgctcatttcttcatgtggatggccaccgggtttactaaagtggtggtatcttacacagccatcaactatatttcttgacattgtggcagagttatttattataacctcctttcaaagccttatctaaccaagactaaatgctcctggttataacatgtctttaatgagctcttttattttattctaattttgagacactgtgcttcctgtcttaacctagggctaaaattgagtatcaaaatcccattgtggtttctggttcatcaagaaacacgctgagctcccccacaaggcatatttctctactttcctaacagagaagtgagtgaatctaggatatgtaatgctttccagtctcttttaattattagaacgcagagcccaggcatgacaatggactgtgcagttgattgggtactgaggtctaaggtgagtgctcgatgcggtgggaaaaaagacattcactcagcccgacacatgttcgatcccactctttttcccagatcttgttagcagacccttcctgacacagaagtgctgtgtttgctttagcagagttcttctgcatattgtggtgccgagtctctcaggtcattggcttagaagacatctgacatactgccccccttcgttgtggtgtgttccatgtcttttatctagtattttctgacaaaagctgttagaaaaaagcctctgggtgactcacctaactttctcttttcttcatggcattcagctcattctgttacactacagaaatgatcttgtagaatgtatttttccagattaagcactatgcatctcttggtaaggagctgcctttggaaatctggaggagttttacatttataaaacaatgcaggacgcttcagacaatcctgttcttgttctttccttagtggattcctacaagttccaaggcatttctcatcgatgtatattagaatagtttttaaccttcatgaaagaaccctgatttcttcctatgtaattgttacaggtattaatacagtaattattattaatacaactaggatctagaat

SEQ ID NO: 1696 - DNA, 1400 bp, mus musculus
aaaggcattcgagatgtgtatgctgcacagtgctggacaaagtggacacaacttgagtggcatggggcagaaagccattcagtaaagaagtcccagccaggatggtggaaggtgacaataggaatctgtacacgtgcagcagaggggtgacagaacctgcctccagggagccactgtcctggggcctgtggattgttggggatactctacctactcaatagaaacctggacccagtggcttgtcagctgccataaagaaagagaaactgaaggtctgagcactctatagcgagacagaactggagacacagggatggcaaggaacagcctgatgtgaggagtctgtggtgccacctgaggccatggtgacatcctggtccatgttgcccctgagagccatgtctgcagcatgagagacctgtcttgatattccatggtctgtgttatcaccaagagccatgcagatgtccctggtctgggctgccacctgagaccatgttagtgtccaagggctgtgcagagctgaccccatccttcactgaatatacttgggagagctggccacatccacctacattgggtggtgtgggcttggaagagatgccttccccccatctcatacctttggtgtggctggtgagagagctggccctgatgtcacagagtgctggccccaccgtagcgagctctgctccttatctggggagttcagtagagttgaccttgatggctaaggcataggtgatctatgcaagaaggcatgaggaagggagagctggcatttgggtgagctagccaggacagtgcatgagagctggtgggctaaaaagtcaggtactatccaggcccaggtccagggctttaagttggcccaagccaacatctaccccatgtatgagattctggaattcgtgaatgagctggccctgcagatccaaagcagtaggatctccatgacacagggcaaaaacaggctatcagagaagagtctcagtgaggagccagtattgatggtgtagcagaagccagatgccttgaaccagaccatcgactcattgcaatgaacatttgcaagtaaatatgtttggacaggggagtatactgtgtgacacacagtgacacactgcagcttccagtgtgaggtgggttttttgtttgtttgtttgtttgtttatttgttgttcttttcttgggggggatgtttaaagggcagagggcaggtatgaaggaaaggcgagatgagtgtgattggggtacatgatgtaaaattcacaaagactcaataaaaagttttaaaaatagaaaccagtattctattaaagaaggaggaggagaaggagaagaactaattattactcgaatagtttgtcttagttagggttttactgctgtaaacagac

SEQ ID NO: 1697 - DNA, 1200 bp, mus musculus
acaccatatatcccatcacaattctcattccttccatggttcccatttgggccccccaaataaactaattaataaataataataacaacaacaataataacaacattaataataattagtccaattgtgctgtccatatactcactggagcatgatgaaactccctgtgcccagcaccctaaagaaaactgagttcttctctgcctcagtccttgccagatgccatcaatatggagagctacactttgacatctttatcacaatttttaagagttctctctgatggctttcgttttaggctgttactttgggggtagggtagtcatagaacctttctatgtccctctttctcacctgcagtcattggtatcactactaaaggagctcccttgctctttatgttcatcagaagtatggagcccatgctccatactttcacgtggcctcaggtggagatactggccatatattatcaacatggtgccctacagcagcaaggtcatgtagacatcaacatagattcaggctgcagcataaaccacagactctcacatggcctttggtgataactccgacacagacatcaatacagccacagtaagaccttgaaagccagtctaatagtctaatagtagcatggccttggccatcaccatggcctcaggtggcagagcatgctactcacatcagcctggcccccagccacatcagggccactgacccatacctggcccttggcagcttcttggagcaccactgtggttccttgaggaggtccaatccagaatgtgacccgttccttatctcaggccttgatcattgcctagagctggttgcagagtctgtgttgacagctctccacagaccccactggacaaccatttgttccactgttgacttcagcctctctctctctcacaactcactgcctctctctaccacacacacattgttctgctcttctacctttccaacttcttcatcatacattcattcatcttagtggtacccactcaccctcaaggtggaggaggaagggtgggctatataatgtttctgaagtctgattactagcctttactattttttataggttgtactgtttctcatccatagtagttcttctagactgttactatgttcatggtttgagtttcactggatacaaatattatcataccttattttattgattatctg

SEQ ID NO: 1698 - DNA, 1000 bp, mus musculus
ttacataacaagctatggaaagagaaaaacagtgagagccagctcgtcattcacagtgatggccaagccctgcggaagttgtttagatattttcttctcttcatatttttggcatgttaaatacttctaaaattagtaatgcatattagatcaagattacaaagtcatcctcagctatttaatgattttgaggccagcctgggatacatgagactctatcttgaaacaaacaaacggacaatcaatcgtttatatggcatgcgtcgtataatattggtgatggggaagaagttttgcttgaacatggtttctgagatctagtctacaaagtcccccatctctttcagttctgtgttgttattgttcctagcaaagatctaagaaaggttagatctgcttgtcctacaacagaagccaattagtccaaagacaaggttgcaacatagaagaaccttattttggtgagctagatggtgggaacaggtggggaccatcttgtcggacagggccatctggctgaaggctcagggttggttaatatggaaatggctgagtctggctccaccaatatatttgctgatgaacctgcttcacacagtttgaactacagaattcttcctctatcaaagttgtcaacctttaaaattttgtacacacattctcagagtctcttagttagggattccattgctgtgaagagacacgatgaccagagccacccataaaggtacacatttaactggggcaggcttacaccttcagaggtgcaatccgtgatcatcatggcaggaagccaaaacagctctcattctttccaggaatgactttttgctgctgccgctggccaattgtgagattcctttacagctttcctatagggttgtcccttcaaaagttgcaagcagtccatgaagagatttgtagggcattccatacattaagggtgaattttgaggcacgtgggagaaagcatagttgtaatttctttagtgaccaagct

SEQ ID NO: 1699 - DNA, 1000 bp, mus musculus
gcttgagccactccccactttctctatcacgactaatcctagcactgcgacctgccacatggccaggtgtacctctctgctcaactctcgtccatctttccatttctgtgcccactggcaaatcttccacctctaatttcttctcccagagtccctctctctgcctggaaattcatcctccacttcctgcccagctattggctatcagatctttattgcagccaaatagatacaatgctagattgccttaggtgggtgagaaaggaacaaatagttataaaatatgtgactaatgatgggccactgaccaagatcctgacgacatgtagctctctgcaggtacagaccagtggtagtgagagctcattgttttaatgaatttagagtcagcggatgacacgtgctgactgcagatccacttgctgctgtgacagcctcgagactttgaagcatatgcttggtcatttgttccctccctctcatctcagcagctggaggatgggaagggctttgctttgtatttcccctcccagggagtttgctgcatgtatattctaacaaacctaggtttgtatagattcttattacccaaattagctcttctagatgttctctttgctttggcctaggtaatgagatttgtctcttatatttttatgtccctatatgtaatattccagagtaaacccagatgtaaaatcttcagtgttattggtatgagggtgggaattgtggtctgccctggatagctcctgagattgatgcaggcactcactcacttgctcatcattcctgtgacatacattaaatactcctcctgagacaagtgctcagggctgaggatatagcgataattgtggaggggatacaatctcccacagggcactaggactttaaagggaaacaaaaagaggcattctgtgtgggtggaagcacggtgattttgtaggctcccagaccccaagatgaacatgtgatgagggtgaagtgtaaagacaca

SEQ ID NO: 1700 - DNA, 1400 bp, mus musculus
ttcttaaagcaaacaactcagttttttttttttttttattttcaaacgaatgaactaaggagctgagcagaaatataaaactctaaccaccattattaccaaaatcaacttcaacatcaccagagataattatgtattcttacaacattttctttataaaataattctgtgaatatcctacccaatgtaaaattcacttcctctgagatttgcaacctcattctaatcacagagtgctaacaacattttacaaattaaacatcttctcacagacaaccagacaactattctttaaacatgttgaaatcatagaggacaaggaacttttcaggagccaacatagtttgtgggagaagcataatagttatagacgatctgtgggctggaatagaaaaaacatattagggcaggtaagatggctcagtagggaaagaggctggcgattaatcctggcgactttagttcaacatctcagacccaagggatgtaaaaagagagcacactcctgcaagttgtcctctgactgtggagagccttgctgcgagcaatcgcgtgcgtgccgtgagcaatcaccattataagatggcgctggctgaccaatgggcctctctttctagtgatggccgactaggtcatcttttgatacatatgcagctagagtcaagagctctggggtactggttagttcataatattgttccaccgatagggttgcagatctctttagctccttggatactttctctagctcctccattgggggccctgtgatccatccaatagttgactgtgttatatgccccagtacaggggactgccagggccaaaaaaatgggaatgggtgggtaggggagtgggggggggggacttttgggacagcattggtaatgtaattgaagaaaatacgtaataataaaaaaaaagatggtgctggctttcactgcgcctaactagtaaacaagccttatgcgcaagtgcaagagtgaactcacgcctagtcactgcccatcttgcagtgtagtaatggggtgatgggcgagcaatgaatcaggagctgtcacgccacatcaggtgctgaaacatcacgctgcgggctatataagcagcgcccttttcctggttcggggtcttccctcctgataaataagcaataaaagctttgctgcagaagattccggttgtcctgagtgtgttcttgctggcggggacaaaagctcaggatatctgacattaccacacattccatgacactgtccctattgcccatatgtaaatgtactaaaaattcaaaaggaaaattcacagagcttggaaatgttaaacccaaatgcagtctgtatacaatacagtttggtggatgttgtgccactttactggactaaaacatgccctgatagttg

SEQ ID NO: 1701 - DNA, 1000 bp, mus musculus
ccagctatactacttctgtggatatactcaaatgatgctccaacatataacaaggatacatgcttcactacgttcatagcagccttatttataatagtcagaaactggaaagaacccagatgtcattcagcaaagtaatgaatacagacaatgtagaacatttacacaatggagtactacttagctattaaaaacaatgacttcattacatacttaggaaaaagaactagaaaatatcatcctgagtgaggtaacccagtcacaaaagaacacatatggtatgcacacactgataagtagatattagcccaaaagctcagaatacccaagatacaattcacagaccacatgaagctaaagagaaaggaatacaaatgtgctgatacttcttataatggggaacaaaatactcaggggagaaaatacataggcaaagtgtggagcagagaccgagagaaaggttatccagagactgctcctccttgggatccatcccatatacagaaaccaaacccagacattattgtggatgccaagaagtgcttgctgacaggagcctgatatagctgtctcctgagaggctctgccagaacctaacaaatacagaggcaaatgctgacagccaaccattacactgagtactgggtccccagtggaggagttaagagaaaggactaaaggagctgaaggggtttcaacctaataggaagaacaacattatcaaccaaccagagccccagagctccaagggactaaaccaccaaccaaagattatacatatagtgacccatggctccagttgaatatatagcagaggatgctcttgttggacatcaacaggacaaggggcctttggtcctggaaaggctagatgtcccagtgtaggagaatgccagggcaaggaggtggaagtgggtgggcgggaagggggcactgtcatagatgcaagaggaggggggatggaatagggggcttcaaggggggaaaacgagaaaggggg

SEQ ID NO: 1702 - DNA, 1200 bp, mus musculus
gggctgtttctattgaaaagtcattgtcatatgagcttaattagagtgtgcagctagctcccaagccttgcagtccccactcctgcccttgctgggtgttaagacaagaaaagcaagccatgcatgtgagttcccaggtcccaggttcctgcgggaggccatgatgatagctgtgacacatttccaccaagggctgtgtagatgtttgtgatctgtgctgcaacctgttgccaagatgagacctgtgggctgggatgatgtaggtggagatgagcagccaacagaccatggtaattccaggttctttttactgagggtcacaaatcagctcaggtctgtcttgatgtctgtgttataggttgccaatctgaattgccaccaggggccatgtgtggtcagtgctgccacctgaagtcacactaaaatttgtagactgtccatcctctgaggagctgtattgatgagagtaaacaatgtgtcacctaaggtcatagtgatatctgtatccttgctgaagctgagtgatacacatgggtccaagccctatgtcagctgaggtctgtgtttatgtccatggttccagttaccaccaaaaggcatgaggatgtctctggagttccatgctgccacccgaggccatgtccatacccataaacagtgctgccagcgggtccttactgagctgagtggactgttctgacaccccaggctttggtgatgtctcggtccgtggtgtcactgtgagacatttctaggtccatggtcctactgcagccaaggcttgtattgatgttcttagcccatgtcgaaaccaaggtcatgcagatgtgtatttttctgttctgaagctagaagtcacttagatctgtagttccactctgccactgagggtcacgttgatgtgagtgctctgagctgccacctgaggcagtgttgatgtctgtggtccatgcaaactctgagagccttctctggggctgtggtcctattgctgaagaaagtaatgtttctgctctgcactgtcaacagaaagcaagtggaggtctatgatcctcacttcacacctccaaaatcgtaacagcttagagagaaagcaaagaaaaataactcttaggatatgaaagagaagcagatgagttgttctctacaatccacaacttctaatggagttgtgggaggcgaaagactcagtgctaataa

SEQ ID NO: 1703 - DNA, 1200 bp, mus musculus
tcattcaatttaaatcaatgcatctctatttaccctaccacactaaaaatggaataacctaatggcttgacaattgtaaggcaattaaaattgcaatttttgttttgaattagacattaatattaatattaattcttaaataatgaacttaatttttaaatactgaattgactatgcttcaatagtacctagaatggggatcacctgaggcagagggaagaacctgtgtgggagaggggagaggggaacagggtcaggtgcagggggcatgacagaagcccagatggccaggagagtaaatggaaacatggagcatctggtggtgggaggtgggaagaccctctagaaacacccagaagcctggcatgtgagagaattcaaggactcaatggggatgaccttaagtaaatggtgcagagagggaactcacagagtccacctccagtggatatacaatgccccgagtgtaggaacggagttaccaacccacagtcaaaatttctgacctataattgttcctgcctataaaaaaacagaatgacaaaaatagagaagagactgatggaaaggcagtcctaggataggccctacttggtatccatctcatggcagaggttagggatgaccaaggtatggcactattactgatgttctgatgtgattatggacaggagcctagcatggctgtcctctgagaggccctaccaacagctgactgaaacagatgcagatacttacacccaacccctggtctgaattttaagacgcctatggttgaaatagaggaaggactgaaggagatgaggggaaggcagcagtctctactaactgggaaaggacctctgggaactcccagagaccaagccatcaaccaggcagcacacatgggctggtttgaggcctgcagcacttatatagcagaggactacctgttctggccttggtggggaaaatgtgcctaatcctgtagagacttgaggggagtggaggagaggggagagaaccctctcagaagcaaggagaggggaatgggaagaggaagtgtgggaggggtactggaatgtaaataaatgaaataattaattaaataaaaatattgaattgactaaagagaaagtacataatttttaaaaaaggttgaattataagaacttttaaaggaaattcaattcaagtacttcattatgtcaacaatgggga

SEQ ID NO: 1704 - DNA, 1400 bp, mus musculus
aagcatctctgctttgaatttgttcatttaaattgatcagtagagtctgtcgaagcagagttttcatgagattgtatggaatgagaaataggcaagtaatgaaaaaaaaaccacatttaaactgaatttatttatatttctgttctcaatcatttgtcttattttgtcaaagaagaattataggttctttgaacataattactttcttttactagtatttcttcaaagttattcacagcctacgtgacttcttttaaccctcagacttaaaattggactaaagccttgtctctttaggagttagtctagtcttgtggtgttttttttttttcctttttttaaaattggttattttatttattaacagttcaaatgttatccttcttcctagtttcccctccacaagttccctatcccctccttccgccagcctgcctctatgagggtgctcccccatctgcatacttcagcagcctagcatgttcctctatcctgggaagtgaatccctgtgctcaatccaatgtgagctgtctaatctgcatctgtattggtcaggctctgaaagagcctctcagggaatagttataccaggctcctgacagtaagcacttcttgtcatcagtaatagtgtctgggtttgttatcagtagatgagacgagtccctaggtggggcagtttctggatcacccttccttcaatttcttctctactttttgtccctgcatttcctttagacagaaggaattctggattaatatttttcaggtcggtgggtggcaccatccctcaactggggagcttgcctaaccaatagatatggtctcagctggtaatacctcccctttgttgggtattgtggctaaagttctccccattgggtcctgtgaacttcttaggtccctggcatctgggactttctagtggctacccctcactgctacatagctactttcaaattcctgattgtacttctctaccatctcctctcatatctgaactgttctcccttttccctccctctcctcttttcctcagattcctctctcactctactctccagagattattctctttggtataatttttcttcttgggcttcatatggtctgtgagttgtattgtgggtagtccgaacttctttttgactaatatccacttatcagtgagtacatgccttgtgtgttcttttgtgactgggttacctcattcagaatgatattttcaagttccatccatttacctgtgaatttcatgaaatcattgttttctttcatctttcttctgatgatttttaaatgttgtattttaatagtaatatctttactttgaatattgatctaaatgctactaatagtggacatttttattctttataatgatatataattgtataatgat

SEQ ID NO: 1705 - DNA, 1200 bp, mus musculus
tcttcttcctcctcctcctcctcctcctcctcctcctcctcttccttccttccttccttccttccttccttccttccttccttccctttctttctttctttctttctttctttctttctttctttctttctttctttctttctttctttctgtactcactttacatccagattgctgctccctattagttcctacagtcacttcccccatgttcccatcccttttcctccaagagggagtgggtatcccccaaccttggcacaccaagtctctgcaaggctgtgagcaacctttcccattgaggccagacaaggcaaaccagctagaacatattacacagacaggcaacagctttagtgacaacacctgtttcagttgctatggacccacatggagaatgagctgcacatctgctacatatgtgctggtgttccatagcaactggaacaagggttccagcccttgtatgctctttggttggtagttcagtttttgagagctttcaaaagtccagattaattgattctgttggtctttctgtggagttcctatcctctttggagttctcaattctttcccccactcttctataagagtccccaagttccacccattgtttgggtctttacatccatctgagttagctactgggcagtctctcagaggactgccatgctaagctactgtctgaaagcataagagtagtgtcaaggattagtgcttgcccatgggatgggtatctagttggacaggttcttgtttacttacaagactctcaatcactatagatggtgatttcatttattttatgatttcacttagtgattgatgggaaagacgcagctcattatcggtggggccacccttggctctttttcctgagttatataagaaagcagtctgagtaaactagaagaaaaaaagtcagtaagcagtgcccctccatggcctcagcatcaactcctgcccccaggatcctttcctgtttgagttactgtcctgacttcttttagtgatgaacagtaaccagaatatgtaagccagataaaacttttccttcccaatgtctcttgatcatggtgtttcatcacagcaataataaccctagaaaagacagaatttttagtttttggtctgttgttttaattcaagtcagtctttggaaaatattggcagtagcttattacagtgttctattca

SEQ ID NO: 1706 - DNA, 1200 bp, mus musculus
taaagtcttgctattagtttcttccactaaaccttccttcttttctcattccaatcctttgagcaagtcaccttaaaaacaaaacaaaacaaaacaaacaaaacaaacaaacaaaaaacaacaaaaaaaaaccacttaaagaatcccattaagcacaacccaatattagaaaattgaggaatagacaatgtatttaattccaaaatattttttctaaaatagtataaaagaaagcacagtcacagagattgaaccaccacgctgagagcatacatgggactagccctaggccctctgcacatatgtaacagttgtgtagctgttcttcatgtgggactcataacagtggaagaaagggctgtctctgactatgttgcctgcctttaggacccttccctaactgggctgcccagtctcctcaatgaaagaaggtgctcctggtattactgtgatctgaacttaacttcactacgcagccctacactgcagctaagtagcctctccatcctgaccttgtgagagttgagtatatcctatctctgactcattctgtcaaatctctctcagatttgtcactttcaaacattgatgcttccttctgcaaacgttactttcattgtttgggattaaaggtgtatactaaggacatgtctgtattctacacagagggattaaagatgggtactgaagcttgatctcacacacacctagaatgtttttgggtgtgatcccttgtgagaacagctgtgttgtgggattaaaattcctgtatatctttccctttttctgcttaagctaaaatttgtacgtaaaaaagaaacaactattaactccataaatataagtctattttttataaagaactgttgatacaagttgatatgatgacccttcataattgcagtactgatcatcttccttcagcaattgtccactagagcattaaggttttccaatcggccaatctgatgaacaagctgtccattttcttcctatttgttgagctgtccccattacgcatgcaggtgggacatatcagttttttctgcatcacctgttctgctgtctttctgaaacttttccttcctttagtcatgcttttcatgtggaaggttctcttccttggattggatttttatcaattgtgatggaatccacagtccttcattacctgtggaaacaatttaagaatacaagttg

SEQ ID NO: 1707 - DNA, 1200 bp, mus musculus
aatactactcagctattaagaatgaggacatcctgagttttgcaggcaaacggatggaactaaaaaatatcatcctgagtgagataactgagacccaaaaagatgtgcatggtatgtactcactaataagtggatattagccaaaaataaaaaataaataaaatgtagaataatcaaggtatagtccacaaaactcaaaaacttcaacaagttggaaatgcccaagtgaggatacctcagtcccacttgggagagagaaaacgtagtaacaactggcgaggaagggacctgggagagaaatgaactgagagagggaaggagtcgcggggggtaggggggaggcagaaacctggtcttgtattgggtgagagaaacagaatgaagctctgaaggccagcaggaagagtggaaacaggcaacctcaggaaataggaggttggggtaaccctccagaatgcaccagagacctggaatgtaagagactctcgggaatgaaaggaccttagatgaaatgccagacagtaaggagagggaacttatagatcccacctccagcaggaagataggacatcaattgaggaatggggttgccatcccacagtcacatctctgacccataattcttcctgtctgaaagaattacaaggatgaaaatggagagcagcctgaggaaaacaaggtccagtgacaggcccaacatgggatccagctcaagtggaggtcccaaggactgacactattactgaggctttagagtgctcacaacaatggaactatcatgactgtcctccaaaagacccaaaacgcagctgaaagagtcagatgcagatatttgtccaaccaatggacagaagcagctgacccctgttgttgaattagggaaggcagaaagaagctgaggagaagggtgattctgtaggaggaccagctgtctcaattaatctggacctctgatatctctcaaacactggaccaccagacagcatacacccgctgatatgaggcacccaacacacacacagtagaggcattcttggtctgtgttcagtcagagatgatgcacctaaccctcaagagactggaggccccagggtgtttagaggtctggtggggtggggggacatccattcagagacagagggtgtggagaggaggtgtaggatgtggagcaatcagagagtggatgtggatgaggaatgg

SEQ ID NO: 1708 - DNA, 1000 bp, mus musculus
tattttcctcatttacatttccaatgctatcccaaaagtcccccatacccaccctcccactcccctactcacccactccccctttttggccctggcattcccctgtactggggcatataaagtttgcaagtccaatgggcctctctttccagtgatggtctattagaccatcttttgatacatatgcagctagagacaagagctccgggatactggttagttcatattattgttccacctatagggttgtagttccctttagttctttgggtgctttctctagctcctccattgggggccctgtgatccattcaatagctgactgtgagcatccacttctgtgtttgctaggccccggcatagtctcacaagagacagctatatctgggtcctttcagcaaaatcttgctagagtatgcaatggtgtcagcgtttggaagctgatcatgggatggatccctggatatggcaatcactagatggtccatcctttcgtcacagctccaaattttgtctctgtaactccttccatgggtgttttgttcccaattctaagaagaggcagtgtccacacttaggtcttccttcattttgagtttcatgcgtttagcaaattgtatcttatatcttgtgtatcctaagtttctgggctaatatccactcatcagtgagtacatattgtgtgagttcctttgtgattggggaaatgcaaatcaaaacaaccctgagattccacctcacactggtcagaatagctaagatgaaaaattcaggtgacagcagatgctggtgaggatgtggagaaagaggaacactcctccattgttggtggaattgcaagcttgtacaaccactctggaaatcagtctggcggttcctcagaaaattggacatagtactaccggaggatccagcaacaccactcctgggcatatatccagaagatgtcccaaccggtaagaaggacacatgctccactatgttcatagcagccttgttt

SEQ ID NO: 1709 - DNA, 1000 bp, mus musculus
aaatgtagaaagtctgggtttcaaccgcagtttgtctgatcgaagtcctttcacagtcttgctgctatgagttgggtcatagtccagggatgtagttgactgtttcccaaggcaggattcacaggacaataaggcaagaggtccatagcatggactcatgggagggtgtttgtttgtttgtttgtttgtttgtttgtttgtttttagtgtagatattgagttctgaagtgtgacccaagctcaacacttttctaatggatagtactaaagttttcaatttgcttctcacacattgaggactggcatgaattatttactattggaaagaaattaaccctttagttgacttttggcagcttcaggtcacatttgtgtacagagaataagaaactgaaatattcaacctgaaggtgacattccttcctgcttttcttttcttatttatttatttatttatttatttatttatttatttattattattgggtatttattttatttagatttccaatgctatcccaaaagtcccccacaccctcccacacccactcccccacccacccactcctacctcttggccctgacattctcctgtactgaggcatataaagtctgcacgaccaatgggcctctctttccactgatggccaactaggccatcttctgatgcatatgcagctagagacaccagctgggggtggggtactggttagttcatattgttgttccacctatagggttgcagatgcccccagttccctgggtacttcttccagctcctccattgggggccctgtgatccatccaatagctgactgtgagcactcacttctgtgtttgctaggccctggcgtagtctcacatgagacagctatatctaagttgcattttacaaataatatttttcctattgaaacattaaggccatccatccttctaattgtaagttgtgtcctacaaaatttctcgtagctgggataccattaagtttaattccaag

SEQ ID NO: 1710 - DNA, 1200 bp, mus musculus
accaggaaatctcataggagaaactacatcaagagaaacacttattgtttggtaagttagttatgataggagttaaaaagagacctctaggattagcattttagaggtaactggtaaacctgacaagtatagttttgaaataatgaccacaagacaaacctgaattcagaggataaagaaaaatatgaggaatgaaaattgtgttactcagtatagcaaaatgtctctaattagaccaaagtgtggatactccatcccttcttagaatagggaacaaaatacccatggaaggagttacagaaacaaagtttgaagctgagacgaaaggatggacacatccagagactgccccatccagggatccatcccataatcagccacgaaatgcagacactattgcatatgccagcaagattttgctgaaaggaccctaatatagctgtctcttgtgagggtatgccagtgtctggcaaacacagaagtggatgctcacagtcagctattggatggaatacagggcccccaatggaggagctaaagaaagtacccaagagctgaaggggtctgaaaccctataggtggaacaacaatataaactaaccagtaccctcagagcttgcttctctagctgcatatgtatcagaagatggcctagtcggtcatcattgggaagagaggccccctggtcttgcaaactttatatgtacaggggaacgccagggccaagacgtgggagtgggtgggtaggtgagcagggttgggggagggtataggggacttttgggatagcatttgaaatgtaaatgaagaaaatacctaatgtaaaattggaaaaaaagaaaaagaaaattaaacagttaaaaagtaagattatcagagttacaacttgtcagtaaattggtttttaaaggattatttttaatatggaatataaatagcatcttgttggctttgatcatagccattactacaaagtgaaatatgatgaagataaaaaggaaaatttccaatggaaggttcttgaatagatgctgaaattttgtggtaatgaacaggaggtttttagaaaagcaaatgctacttatttgtttttaaaagactaagtgagcaaagcatatgtgtacccctggaggttgatacacctgactgcacctttctgagattttctgtttcctactatgttatcagtagaaaaaaaga

SEQ ID NO: 1711 - DNA, 1000 bp, mus musculus
tcaggcctaccgtacaggagttctgataccaccgtgttggagtcgtagaaggacatagcaggaactccactcttggcatgtggagtgtctgcccacgcctaatggcaagctgagctcttcatcgcagtgcacagggattcttctccacgagtggatgttttcattgcccttcataagggctactcaatctaagggtctgatagaagaaaagccaacttctcatggtggcgattctcatagaaagcaaacccaaggtttgaaaagcagcaggaatcctaacttaatatctgattctttttgaaacacaggtccactagttcttgttatgtaaatcttacctgtgccctttagcagcctctgtgtggcagcgatgcggggcaagcatgaacgtcagttacattgctctatgtggtgttcagatagctgtgatttctgcacccctaatttcttgttctctatttgcaggtagtgaaatcaaagttatccagacagcaccacgttatcaagatgaaaagatccaagaaccatattgtggggaagtacttcagtagtcaaagcaaactaaaacaacacaattctgtcccaaatcttcattcaccgtatcatgtcagaggcccgataaaccaggtttgtgctgaaatcctgctcagcagaatgtgtgcgagtcagaggtctgcgcaggcgccttgaaagagagccgattgcgcagactccctggaggagagccgaattcactgttggagatgaacctttcacctcaacctgagaaccaaatgagcctcacacgtactctgcaatgactgtacaatcaccagcacaagcgcgcacagccaagcacacagctcacaaaaagcacaatgacacatttttctcatgaccgcacacacccacaagtgaccttgagtatccgttagtttcaggtcgaagcacagagctgtacggagatcacttgaagtgtgatctcaaagtatgaccacgtggaccaggtactggactgcaa

SEQ ID NO: 1712 - DNA, 1400 bp, mus musculus
agattctttcttctatctcttgtattttgttggtaatgcttgcatctataattcctcatgtctttcttagttttttttgtttgtttgttttttgtttttatctccaggcttgtctccctttgtgatttctttattgtttatatttccatttttagctcctggatgttttttttttttcaattccttcacttgtttggttgtgtttcccagtaatttaagggatttttttgtttcctctgtaacggcttctacctgtttacctgcgttctcctgtatttctttaagggagttgttcatgttcttaaagtcttctgtcatcatcatcatcatgagatgtgattttaaatcagagtcttgcttttctgctgtattggggtatccagggcttgttttgttggaagaacagagttctaatggtgcgaagtagccttggtttcttttgcgtatgttcttgcccttgcttcttgccatctggttatctttggtggtagttggtcttgctgcttctgactgtggcttgtccctcctgcaagcatgtgtgtcagtactcctgggagaccagttctttctgggagaatttgagtatggagagctgaggcacaagatcagctccaggctcagacagaaactggaaagctgttttttgttttgttttcttttgttttttattgttttttttgtttgtttgtttgtttgttttgagacagagttcatctatgtagctttggttgtcccagaaatcactaatccactctttagtcccactctctagaccaggctggcctccaacacagagatctgcccacctctgtgtcccaaatgctggaattaaaggtgcttgccaccactggctggcataaaaatcaagttcttaacaaaattttattttaccatataatgaattcatctacaaaaccaatataatctcatccttatctttggatttccagacctgaaatcagtgattttattttgagtgttttggaaatcacttctgactttcctttgtctaaagttattattatccattgttcataaatagattgactttgtgacatatccttgtggctgccatatattaattcacataacacttttcttttgtaatacaataagattacataagattgttagtgagcaatgggccttctctggatcctttctggatttgtaagtatgctgcattaattttttttctctttctcccaccatatctgattccttccatgtaactctcaaaataataataataataataataataataataataataaatatttaagaagctgaagtttgcatgataatgtatcagtgtctttatgtatatatgaaattactctctggccttaagtagctttggggacagaaatcaaagctcacctcttctctcacacagc

SEQ ID NO: 1713 - DNA, 1600 bp, mus musculus
cctgttagaccttctgtgtttgcattcctctgttttatgtaagaatctagtaacctctttgtaccttgttggtgtgtcacccgacttccttattgtcttctgcataaaaagtctgatgctcgatttgacattacattcagatcctacacaaactctcctgtgtgcatctgtctgtcaattcatctgacgctttgtccacccggtttagagacctgttccacgcagacaaaggggcccagagggtctgcagcaaacactgtcatggagagcccttgtggatctttgcctttgacaaaataggctctgtcagatcatcctgtgtgcatgtgaaagtcctccagaaggtgacatgaggacagaataagtatcaaacatttcaaggtatgacaatgtccttatgtaacaaagtactgtatacactgaatatacacaataaaattgtacaataaataatattaaaataatgacaagaccaataacaatgttgaagaggttgggggatgaggagatagctctgtggttagggcttgctactcaagcatggaatttggatccctagaaccatttaaatgtaggatgagagtagccgcctctgtagctctagcttcctagtgaggtagatctccagagagagctagcctggttagctatactagccatatctgagtatttgtgagttctgggtttgcttagggaaccctgtcatatggcctcacacaaccgtagtctgactccaagagtcagtgccttattgagtaagatgtaatatggaaggatgagtcccagcatcaacctcacatgttgccatacatacatgccagttgacctacacatgtgtccaacacatgcaaatgtgcacacacatacccacccacccacacacacacaccacaagcacaagcatgcacgtttgcacaccaaaactagaaaaagacaagaggaataaaaaaacaccaaaaatgaagtagtaatgatttgttgagagaaaccttccagagaaaaagcagtcgcagagagggggcattcccacaatgtgtagtgatacatgaggaagaaaagataaaaggaagagtgtcttggtaagatgttacaactgtttcatcactcctagaacatctctcctaagcccagggggtccctagaactgtgaaaggaaatgcactgggtggaatatggctgtatagtcaggcattgactggaacaatctcagggacagcatggacttaccctccatgcttcagcagctccttgatgttacggtagttggatgcagttagcttagtacatccctcttaacaaagctctctcattgattccttgcaaggatgcagtaaggctctgctgtcccaaagagtggcactgggcttctttgtagcttttgactagagcatttcaggtttcccctgtgaatgccttagatttaagatgcaccatataagcccctcctttctctgggtaaccttacccctgaatgctcatttctatatgagccatttcatactacaaaacaatccttattagcatataaattattctgaatttaacctgtattcctactaggaaaggtacaagttcaatatgtcctatttttcttctagca

SEQ ID NO: 1714 - DNA, 1200 bp, mus musculus
cctgaagttgacaacaggtatcttttaaattattgtctattgtgggaagccacgtgtgccgttgcagggtggcactggctactgctggccaccatgcataagtttgggcaaacaaccaatgtgtacatatgcagtaaagttttttgccaagacactgcctggcccgggcatgataatgaggttctgtgaggtactgagagaataaccaatcagatgtgagacatgcaaatgaggtatgttaatgaggttctgagagagaataaccaatcagatgaggaacatgcaaatgaggtagaatgcataaccaatccgggtgtgagacacgcctcgcctaggcctatataagcagcaccagttctgggcttggggtcttttcgcctctgcaatcaaactctcccaataaacgtgtgcagaaggaccctgttgcaggtcgtgtgcaagagtctacatgttttgttttgttttgttttgttttaatgcaaaaagtaagaagaatttattttcacagtgcactgtggtcatctgcgacccgaaggagaggcagcccatgatttttgttgaggcagagtctcactgactctggagctcatcaaccccagctagttcatgtatctgtcttctctcaggctccactgcctctgtcttctcagggatgggattatagacagctaccatgctggtccaggttttacacaggtttggggaatccgaatttcagtatttatgcttgaacaacaataaatactccattcaatcttgctgtcttcatatggtgttttaacaagcatcagaaaagaggtatataatatgaaacattcccagtatcattgtttttatttgttcaatgaaaaaaactacttatgttcttatcatgattccaggaaaccaaagcaaaccaaacaacaacaataacaacaacaacagccagcctctcttgattggtggggcactgtggaagccatactaatttagctgaaagcatgtccctaggaagtaacatgaggactgagatttaattttagcagaagaggacagagtttgaagatcttaagaccaagatagatgccttttgatatttcttctgagattaagattctgtgagttttcacacactcagaaattcatcttctaaaatatcttagtctaatcacttccctctatttttttcctctctacttcatgtgctagaggcttagataa

SEQ ID NO: 1715 - DNA, 1200 bp, mus musculus
aatggtggggttggttatggaagggttgttaacactcgtcagggttaatcagggttgctctacggctgactttgaatgtattttaagtttggtcttcaagttgtttctgtacatgctgaacagttgcccacttttgaaataagtagctggttcttagctaaccacaagtggccattcattaaaagactacatggccatggctttaagctagtagacagtcattattaggcagccagtaactatactgggtgtttgagatctcagtgtagcattgtgcctttctcagggtggcttataatcaaaaacaaacaaacaaacaaacaaaaaaacaaacaaacaaacacaaaaaccaaccagccaaacaaaaaaactcatgttctgggttgacatacttcagttatcaagaactgttagctaaagtagacctgcagaagctacaaagcaaagttagtacattttgagagtttcccagaattatatggattctgatggactagaattttgtttttatctgggtaggtgatgttgtctaaatgctgaattttacagtctgaatctgtcttatggtttccacttatttgaagagacaacacgaccaaggcaactcttataaagacacatttaattgagcctagcttatagtttcagaggttcagtccattaccatcatggcaggaagcatggcagcatccaggcagacatggtgctggaggtgccaagagctctatattttgatctgaagacagcaaggaagagactttgtctttggcaagcagccaagaggaggctctcgtccacactgggtggagcctgatcatagagtgcctcaaagcccatgtacactgtgatgcagttcctacaaggccacacctacttcaacaaagccatacctcttaatagtgctacttcccatgggccaaccacccacatgcaaaccaccacagaatggtacttccatcccatcatggagtcaattgtgctggggccttattaaaagactgaagctgtagccattctctgtgtcgctgtagcccatttctactttctgtatgccacttccttctcttctggctataaatataacatggccatgtggtgggacaggattctgtaccaattttgggctggagagattccaaatctcaaattgcttcaaaactcaattaagatctgcagaagttaaacttgttggaattttgt

SEQ ID NO: 1716 - DNA, 1200 bp, mus musculus
aataggcagatattttaggatatgtttatataatcttgaattatctgtgaaagccagatgagtaccggggacattgaaatgcaagagcatattcttgggactatttggtttccaaagttctttcagagcatctagttctgcaacaaaaacatccttttgctcctgaaactggctcagacagaacataatgaacaaagaacaatgtctgctggatggagcattggaggtaagcccatcatttgcttaacaaagcaaggcagaagtctacctctccagggctcttttcatctagaaactgggtttggaaccagctagacataagctctgtccagtgggatccatcacttcctgcttttagaaaggcacaaagaataggctcctttgtgtttccctaccattcacctttttttgtcagggctgctgctggaggtgtgcttaaataatgaaggcttgtacacatttcctttttccccaaccgggggattcacatcctcattttcccagagcaaggtgaagctgcttttcaattcggcctactttcaaaagccgatgtaaaataatatgaagaaagtctttcctaatgagacagttaattagaagggtacagtctcccatgtccctttcaatgcctttcattattattatttctcttatccttgaatagctatgacattcttttctgaaagcagggagcagagcaggtgctctttagctatctagatactattaaaatcaaacaagttggcccttgtatcttctagcaagccacttgtttctgtgttctaatttttgtataattaatgagacttttgtgtttgtgtacgtgtgtacacatcacaaggttgaattcagtgctcatcagcgtgaacccagctttgtctcttctgactaccagaacaggtccacctctttgaaatggaaatttacaaaacacaggacaagactgaagtcaagccacaggctggtgctgtggtttaaaaaggggtaacactccctttatagatctgactcatcgtttcattacctggtggacatttcaacaacattgttcttgcttaagtagactcttatcaacgttcacttcttcagacacctactctgatggggaagatgtccacaaagaacaaactaaaagcatctaaccatgaaatttttgtctagcttttgccagacaacttttaaatgctgtcaaaattcacc

SEQ ID NO: 1717 - DNA, 1200 bp, mus musculus
tgggaggtatagggtgggagggacttggcagaaagaaaggagagggagaggaaaaatgggagcaagatcaggtgtgggaggagacaggggagatgtacagaaggtcaggaattaaacagaggtgtgtagcaatgggggatggggaactaaggtgtagccaacagaaagtcccagactccaggaaaacaagaggctcccaggatctaaggaaaagagaggccgaggcatgagaatttctgagtttgtggccagcctggtctacagagtgagttccaggtcagccagggcaacacagagaaaccccatctcaaaacaacaacaatgacaacaacaacaacaacaacaacaacaacaacaacaaaggggagagagaacctgtagagaccatattgagaggttagacacagcccctgtttgagggatggggccatcacccttctcaaaattttaatccagaattactcctgtctgaaggaaatacaaggacagagagtggagcagagactgaaggaaaggccatccagagactgccccacttggggatccatatcatatgcagccaccaaacccagtcactattgtggatgccaggaagtgcttgctgacaggagcttgatatagctgtctcctgagaggctctgccagagccttatcaatatagatacagaagcagatgcttgcagcaaataattggactgagcactgggacccaaatggaggagttagaggaaaggctgaaggagctgaagcagtttgcaaccccataggaagaacaataacatcaactaaccttacctcctccccaagctcccagggactaatccacgagccaaataatacacatggagggacccctggctccagttgcatatgtagcagaggatggccttatctggcatcaatgggaggcccttggtcctgtgaaggcttaatgtctcatcataggggaatggtagggcagtgaggcaggagagggtgggtgggggtaggggagcaccctcataggggtgtgagggtatgcagaggggaaaccagtaagggagataacatttgaaatgtaaataaataaccaataaaaaagcacctaattaaaaaaaacatagggacatagacacaatgacacttcatgcaatagctatgtgattatgacatcattatggacactgtttaagcaacaatgtcatcacttgcttttagcaa

SEQ ID NO: 1718 - DNA, 1000 bp, mus musculus
cacagtgtgtatttaagaaaaagagggggcaggatcaggtgtgggaagagacaagggagatgttcagagagtcgaaaaattaaacagaggtgtttaggattgggggatggggaactggggtagttaccagaaagtcccagacaccaggaaagcaagaggctcccaggacacaacagggatggtattagctgaaatagccaacaaagggggaagagaactgtagagaccatatccagagattatgcacgggccccggttgagggatggagtcccccacccttctcaaaattttaacccagagttgctcctgtctataggaaacacagggacaaacagtgaagcagagagtgaagaaaagaccatccagagactgtctcacccggggatccatccaatattcagccaccaaagccagacactattgctgaccccaagaagtgcttgctgataggagcctgcaataaatgtcttatgagaagttggccagagccttaccgatacagacggtgatgcttgcagccaaccatcagactgaacatggagaccccagtggaggagttaggaaaagggctggaggagctgaaggaatttgcaaccccatggggagaataacaacatcaaccaaccagaacacccccctaacctccaaggattaaaccaaccaccaaagaatacacatggaaggacccatggctctagttggatatgtagcatcaatgggaggtccttggtccggtgaaggcttgatgccccagtaaagggaaatgctagggcggtggggcaggagtgggcaggtgggtgggggagacccttcggagaggcaggggcggggtactagatgggtagctctcagagaggaacccgggaagggggataacatttgaaatgttaataaagaaaataagcaatagaaattaaatcaaaacaaaacaagggaatgacatgttggcatagataggcccaaaaaggggatggttttaggcacccttcttattgctga

SEQ ID NO: 1719 - DNA, 1200 bp, mus musculus
tgaagagaataaggaactttaattagtatacaactatgaactacatctatttttttcttatatttggaactgcaatgcaaagtatattattaaaattctttagtgtgatacctacagtcaataaatgtacaatatccattgtaaatgttctactggggcagactgctggttagtctgcttccctggcagcacgatatcctgacccagcccagaagatctgctgcattcagagcatttggtaagaacactccagaaatcccacaactgcctctatgagtccagtggacatattaccacccaatcccttcccttttgcctggtcctttctgctagggcagactgctaagtagtctgctcccctggagacaccatgccctgaaccagcccagaagatccactgcactcagagtaactgacaccacagacagaggcataccaggaaatctgctgcccacagggcaactgatactgaagcctgagacatccaaggagatctgctacacacaaggcaaccgagcaactgatagtcagcttctatgctcccctgaagacaccacaggttgaaggcatcccaagagctcctctgtatactgggcaactggacatcagacactagagtgtgaagacctgctgaggaatctatggcatgtagggaaactgatacaacagactggaagcctccctggaattctgctgcacacagggaaacagaagccacagtcagtaggaccccctcccccacaaagaacatcttcacacaggacaacagcttgactgctcctctgaagacccaacagtctgaaggtcttacagcagatctgctgcatccagggcaacagagcagcagcctctctgcccctctgaagagcccccagttggacggccccacaggtagtctgccactgccagtgcctcaggcctaccaggagacctgaagcagcacagtgacaaaaacaaatatatcagaaaccaacagtcaactgtctctcaatattaatggagtcaacttacccataaaaagacataaactaacagactggatactcaaacaagatccagcatttttctgcatacaagaaacagacttcaatagcaaagacagacactatctcagagtagaaggttagaaaaagttcttcgaagcaaatggtccccagaaacaagctggaattgcaatcctaatatccaataaagtggact

SEQ ID NO: 1720 - DNA, 1000 bp, mus musculus
aaaagaaatgggtaggtaaggggttcaggagggaattggagggttaggataaggtatggggaaagccaggagaatgggtgaaaatcttcagctgctgggggtgagggagtgggagggaggtatctctaggaagttccagggaccaagaatgaaggaggcttccaggagtcagtgtaggtaagcttaggccagttgtctaaaagtggggatatggaacttgaagtggtcacctcttgtagacaggcaggatgccactgtagtgataaagataccaactcaccagcaaaactttcaacacaaaacttgtactgtctaaaagcaatgcagggacaaaggtggaacagactgaaagaatgataaaccaataaacaggcccaaactgagacccattccatgagcaaccaaccacctatttctgacatgattaatgatactctgttcttcttgcagataggcacctaccataactgttatctgaaaggttccaccgaaccactgaatgaaacagtacagacactcacacccaaccattggatggagcttggggactcttatggaagaactggggtaatgattgaagacaatgaggaggataggaaatccaaagaaagatgaagagagtcaacaaacctggacccctggggagctctcagaaactgagccaacaacataagagcatacatgggctggactgagggccctggaacatgtatgtagcttagtctcatgtgggtcccccaacagttagagtaggggatttccctaaaactgtatcctgatgttggaattggttcccattctccaacatggctgccttgtctggcctcagtgggagaggatacacctaatctaatcttgcagagaattgtagaggtaggggtacttggggtaggagcattatctcagaggacaagggtagggggcttggggaaggcactttgtgagagaggaggactgggaggagggcagcatttgggctataaacaaacaaacaaacaaa

SEQ ID NO: 1721 - DNA, 1200 bp, mus musculus
ggacaaacagtggaattaagaattaagtaatgaagaaagagaataatggaacagaaatatagctttagatttttcaaaacctactttatttagggttctttatttttccttcggctcttggattttattgtttttaagtggatattttatttgtttgcatttcaaatgttattccctttccaggttacccctctgcaaacctcctatcccttccccccttaccctgcttctattagggagctcacccacccacctacccacctattcccacctcactggtatagcattcctctacactggtacataaagccttcacaggaacaatggcctcccctctcattgactccagataaggccccttcagctccttcagtcctttccaaaactccttcattggggtccttatgttcagtctgatggttggcttcgagttcctgcatctgtactggtcaggatctggcagagcttctcaggagatagctgtatctagttcctgtcagcaagcatttcttggcatcagcaatagtgtctgagcttggtctctgcatgtgggatggatccccaggtggggctggcctttccttcagtctctgctccactccctgtacctgtattcgctttagacaggaacaattctgggttaaaattttggatatgggtgggtgtctcatacctgaaactggggaccatgcctaacttctagatatggtctcaacagatctcccccccccacctcctggtttgtgggatatttaagctactggcatccatgtggggtcctggaatgctcttgttttcctggcatctgggactttctggctgctaaccccagttcctcacgctccattgctaaacacctctgttcaatttccagatcctctgtacatcctctccatctcctaccatacctgattctgccccgtttttcctctctacctcctctattcctcccaagtccctcctaccctctactttccttgattatattgttccacctactaaggataactgaagcatccactttgacttccttcctcttgaccttcatgtggtccctgagttatatcattaatattccatgctctttacctaatatccacttgtcagtgagtacatatcatgtgtgctctttttgtgactgagttacctcactcagggtaatattttctagatccatccatttgcctgagaatttcatga

SEQ ID NO: 1722 - DNA, 1000 bp, mus musculus
cctcaaatatagtcacagagaagctagtcaccccacagtcatgccatggggttcttgccttggtaagatgactgatgcctgctctctccgagcagcttgtgtagtaccttccagcactatggttgctggccagccagcagggagcaaacttccagctcagttttagcttgagttttccataccttgcaaccaaggtatgtattgtcttcaggaacaggttctaattctccagttcttgtaggaaaacaaaaagaacagagagcacgtacactgtttctgggccctttggagactttctgatcaacaattcataaggagatagctagcacctgcactgggatatttatttggtagctttcaagtaaagtattatccagccatacaagaagctcgttccaacactctttttaaatttatatttagtaatgatttacaaattaaaaatactcagctataaagagaaatgagattacaaaatctgaaaataaatgaataaaactacacaaaaataactgaaacactacaaaataaaactacaaaataaaaaaaaaaaagtaaaacaacctgaagtaacccaggcttggaaagataaatgctgtgtattctctctctcatgctgatcccaatgtcaaatcaattacttctgtgttcaacttgaatcatctgtacaagtgagcaaaagcaaaatacaaaagttcgattggttggcatgcccttgggatggccgatagtgtaatataagagatacgaaaacagaaatggagcattttagaagtggaaagttcaggttggaatgagagcagagcaagggagagaaggagggaaggagggaggaagggagagaggaagggatggcggaagggggagtgagggttaaacaaagtaaaggatcatgcctgactgtttatggggaagataggatctgaacaaagatccttaggcttgcattgcaaactttttttcaattgacacacttccgcaacttcatactatcacatta

SEQ ID NO: 1723 - DNA, 1200 bp, mus musculus
gagcagagatcttgaagaagccataacgcaggtctgacatacctaggaaaggctagaggggatacagactgaagccgggagttctaaggaagctgtggccaggagttgaagggtccccaatagctcactgagggaccatgaatgtcacatgattgggccatcacgactttaactgtgaccagtcactgggaatagcccaagagaagtaagacatccatgtatagcctgggacagagggcctgggaaaaaaagaggggctaagccaacaagccttcccggagcagctatggaaaggcacggtcctgtggtcaccggcgacaatattctagagaggatcccgtttctaaggatggtgagtttaggatgacgagtccttggaaacaaggactaattccacagggagcaatggctattggcgataaagttacaggaaggggaaagcctgacgcttgagttcaattatagatgtgcatgatacaactctgggttgtatcatgaatttggaccattagaatcttctggcagatgggagtgggaggtggagcttgatgagagcttaatgaagaaaacgatgctggctttgaagaactaataatggaaagaatctgaaagggaacagagagtagttacaagaaatagggaaacggaatcatgtgcggtgaggtttttaaagaagccggggattttgcaggcgggctgaagaaacgcatcgcacggagcaaggagtggcccggcgtcccgcgtggcagagcaggctgcggcagcagcggggggcgagctgaggcgctccgaccagcgacgacgacgccgaggcggccgtggatgcagacgacctgggcgcccgaggtacggcggtgcgcgcggccgcgggagcgcgcggcggcgtcacggggcggctgacctgccgagggcgcgcgccgcgtgctggcgctccctggcggcgccgcggagcttggcgcggcagctggaggcggcctggcgcgtggtgacggcgcccgcgggcggacgcaggatggcggcgctgcggggcgacggcttcgccaggcttcggcccgcacgggcgcagcgaaccccagggaagaaagacaaagacacgccggttagcaacgggcgggaaccgcgcagcccggggccgaggcgccgcgtccccaccccgcacccttcaggtaaagctgcgcccaggagcccggcaccccgcgg

SEQ ID NO: 1724 - DNA, 1000 bp, mus musculus
agaatgtttgccaagtatgtgtgtgggcctaaattcaatccttagttccattatcactccccctgcaaccccttcaacacacacaaaaatggtgtgttaatgcccaggaagttctcaaggcagtctaacaaaggtctttatggcctagggccctcacacccacagtttaaagtcccacagacctccccaatcaattccaaataggggctattccacagttactgtgcagtacaggagctaattctacaggacatcactaaaatcgtctgaaatccttgaaaaggtaactcctgacctcttcagcggggacttctgcgtctcctagttgaattctgaaaagctgtagatgggtctttgttaagagggtcactatgagaaatctgaaaactcagctaaggattttcttatacatctggcctgttgaaaaattggttttcatcatctgcttaagcagttttatccctgaaagaaagaaatgcaaaggaggcctcttcttgtctctccaggttagcagagaagcatgttcccttcacagcgattagctgagcctgcctgcgacttttgtgcctgttgtggcctgccagttccctgcctgccttccctgtggcgttttagctgatctgtgcagtttgtagccatatggtcccctgagcacgtggcttggcttccctgtccttactgctggatctgtgggcattgcagatttcacagacctgaatagcattgttgggggcagggggaaagcgcttgtcatcaagagatgtcttctcactgccctgcttgttagagaccttctctgcttgatagcataaacaacactcaacattgtgttttgaaaagatgtaaaattacgcaaactccttccttcaagctcattctttgagactttgcttgagagctcacatagttggctggcattgagagccaaagccaacattggagagcaggttgtaaggtaactagggctgcagcatggatctgctggagtgcaggtatttag

SEQ ID NO: 1725 - DNA, 1200 bp, mus musculus
tgtgtgcacgctcactcacactttctgacacacctgctcattcttgttgagtagcatccagtgtacagatgtaccattggttatccattctctcacattctctcatcaccaggacatttggtttgcttctaatgtgagacagttatggatagagatgctctattcactcaaatatagattcctgtatgaatgaagtgatcatttctcttagatcagagaggaattgatgagggacgtgataaaccaatggttgatcttatagaaaagtgttaacgtgcttcccagagtcgtacaggaagctcccgagtgtcccgttccagcagctctgcctgtttccagccatttcacagagttaggttggtcatttgatctttgccattcagatagatgttatgacgggggagggagggtgtgctttgaaagcagcttcacccctgcctccagagtgttgcaggtgtggctgctgtgtcacatgtgcatcggtaggtggcagcaggaggagagaagttaacactctgttctgacctatgagcatctgaatgattcgattagtaacctaacattccctgtaaaaggcaagcccaagactaccaccagtccagcgccaaggtcctgcatgcacagggaactcacctgagatgaacaccagtcctgttccagacaggcctgtatagacttccaggacagggaacaagccagagactagaagaactctacctgggaccagagggtccccaggtaagcctgggacagaggacccttgcaaggggccatttgggtgggtcaggcaaggagccagcctgagatggccaccagactaacccagacatggaggtagcatgagatgaccaccagtccagtgccatgcaggcttgggaggacagaccaagcccaagatgacccccgcctggtgccataatgcacaagtggaaactagcactcctgaaaccactcctgagatgaccccagatgctcagagactctgggtgccactaagaggagcaagtgagtgatgaagaaatggaagagtaagagaattagaagcatgtaggcacaatgaagaggggcagagctggagactcgagggtagtgagggacagcctgatgtgagtagccaaggatgccacctggaccaggatgggatcctaacctgtgctgtcaccaccaggagctacatctaggtctgaggccctcagcaac

SEQ ID NO: 1726 - DNA, 1000 bp, mus musculus
ggactggggtatgcataggatacctcagttaaagtagctattttagcaggtataaaggccctccttctcgtgtgatgctggagcagctccagcgactttattgtttgcctcattgtcccctactgttcagctggctgttctgaatttgttttctctagggcctcagagcctagatacatagctagtctgtgagtctaaggaagcaagtttagtttataacaacttggttttgatgtgacacattggggtcttttaaagttattatgtgagtgtatgcacacttacatgtgtgtgcacactgtggtatatgtgtggagatcagaggacaacttagggaaatcagttctgaggagtgaactcccctcagtaactgaggtggtgaagactctgcctactgaggcatcttgccagccttcacacatttcatagggaacggtaaggagctctgcctgccacagacatcctgacagcacagttgtgtctatgccacagggcatttctgctgcctctctgcagagctgacatctgtacgctcttactctggatgctcaaaaacagttttttagatatccagaagagatcatctctaagcagtatacctttcttcaaaccttaaggccatttcttataactgaaagtaattgcttcccttgttttgtgttttctaggtttgaagaaaaggcccaaatggatccccttagtgctctgaagtatttacaaaatgatctttatataactgtggatcattcggacccagaagagacaaaagaggtaaagaaagatggataaatgtttttcttgtgtaagtgcttaaaggaaatgaagaactatgatgcactgcccttaaggatgctcagttggataaaataaaagtgaacagctgtagtgctaaactgctgcactccagcattgggaaggttggtgcaggaggatcgatcactaattaaaggctagccgaaatgacaaggtatctcattacaccatctatctgaggggaaag

SEQ ID NO: 1727 - DNA, 1000 bp, mus musculus
gctgcctagcttttgcaccatgctaagattcaaagggatggttcaagtatggcccgtttgctcactggagtggagaagtcactggggtctgcctgtctctgaggcctgcagatgattctgatggaattgctcatagtgatttgggcctggggcaggtagggtgatgtgcaggagggaagtgatctgtacagcacatgctgcccatgtccccatcattaggctacatggtttctttttgctttgctttttatattccccatggtcctgcaagctctcatgccggaggaagaggagtcactctattccggtcaagcaggtgattctcagcacagtggaccatgggggtgaccagctgtgcagagggacatggcagtgggtgtcttctgcttacagaatgaatgaagccacacggagtcagaagctgtatggatgggatgggggcaacacaagaaagacttcaaggcatgacagggagggtggaatctgcacttgggactgtcagctaggctagagaacgttctccttgaggtctagcttccagtcctctaggttagtaagcatactggtgcccttgattgtagggctacagcagtctcagtggcatctgtgaaataacaatgagctactgattctgggctgcagtgtcaaatttctattgcaaaactccccttggagttgtgcaatgcacagcctgtccagacatattcagcagccatggttgtgagtcttgtccagtaattatgtaagcaaatgggagtcagtctgtttgcatgcccccgttcaaaagaaatagggcagaaaaaggccaagtctccccaggggcacagactgtccttggagtaagatactgatgatactggatgtctaccaggagggcccccacagtgcataggacacaggaagcccttgacaaatagccatgcaatgaatgaacaagtggacacacaagctactgaagaaagggcacgtgtgacttggtaatggttgcctgttttatcat

SEQ ID NO: 1728 - DNA, 1200 bp, mus musculus
tgagacaaggtttctcatgaaaagtagagctcatcattattctgtctgacggcctgtttatccatccattcaatcacggtttcagatggcacagtctaatgtgatgagaaggcatggcagatggcaaaggtctggtttgtgaccataggagcttgcaatatggcatcttggttgatcaggacctagagagcatggttgcaagtgactcttgagtatagtcttcagagtcctgctaaatgtgaccctcatctccagccatgacacctgacccccatcccccaattcacaatttacccagatagtgccaacagctggacctgaggtattcaaacaagtgagcctttgtggctgtttaacatgacagcctctggtgtttacattgttggtggctaagcagaggttcgctcacctttcttcctgacttggcactggttgaagaggatgaaacctctttttccttgtagatgggcgtcttagctagggtttccattgctgtgaagagacaccatgaccaaggcaactcttacaaaggacaacacttaattggggctggcttataggttcagaggttcagtctattaccatcaacacaagaagcatggcagcatctaggcaggcatggtgcaggggatgctgagagttctacaacttgatctgactgcatccaggagaagactggcttccaggcagctaggacaagggtcttaaagtccatgcccacggtgacatacctactccaataaggccacaactactccagcaaggccacacttccaaatagtgccactttctgggtcaagccatccatccatccatccatccatccatccatctttctatctatctcagctaggtttatcacagtacaggatgttccaggcaatgtcctgtctgttccagctcttccccattgcagtgctgtgattaaagcacctgcgagggcacttctaggtttttgtgtagacgatagggagccaaattcatactggctcaactatatctataagtcatctcctcacacccttcttttagtgactcattttttacttggatgtagactgtatcttttagactttaagcttaatcttatagtaactcatatgctacagagatattttaactttaccattgcccattttcccttattgtttcatatatatcatttattccaagctaatccttgtggtgaacttctaaaag

SEQ ID NO: 1729 - DNA, 1000 bp, mus musculus
cttggttgatcaggacatggttgcaagtgactcttgagtatagtctccagagtcctgtcagatgtgaccctcatccccagccatgacacctgacccccatcccccagttcacaacttacccagatagtgccaacagctggacctgaggaattcaaacaagtgagcctttgtggctgtttaacatgacagcctctggtgtttacattgttggtggctaagcagaggttcgctcacctttcttcctgacttggcactggttgaagaggatgaaacctctttttccttgtagataggcgtcttagctagggtttccattgctgtgaagagacaccatgaccaaggcaactcttataaaggacaacacttaattggggctggtatacaggtttctcctttaggccaggagaaggccgatttccagccagctagggggagcgtctcaaagtccaccctaacagtgacacacttccaccaacaaggctacatctaatagtgcaactccacggaacaagcatattcaaaccaccacagtgatcaagggcaaacttcctgaatagttcatttaagcacttcaatgaattttctaccaaccatatacaagcatcttattagtgtgtgaagcagtttatttaagaacattctcagggtcagagtgatgaagataggaatgctgtgaggaacagggatctttggaagtaaacacttatggacagctagaagagcatgagaaaatcttcatcttctctgtcattttcttggttttatatctactgtggctgggatgcagttacagcaccaacacagcacagtatctaaaggaataggtatttggaaccccaggatggtagctctgaaaccactgagattaggtttagctccttgggaactctagaggcaaagatgaaaaaaaacaggaaacctgtttatatgaaacacacacacacacacacacacacacacacacacacacaaaatttaaaaagggaaaggcttcctgctc

SEQ ID NO: 1730 - DNA, 1000 bp, mus musculus
cccaggtaaaaaccagacatggtggtacaagcctgtgatcctagtgctgtctaggcagaaacagaaggatcccttaggcttgctggctggccagtgtttgcagtgagtgagctccaggttcaatgagtgacactggctcaaagcatgtcagacccgtgcatgtctgctctctagaggagaaagtgagtccatctacactgttgctgaagatgattacgtccttcactggcatcaggacccaccttcttcagccttccaacatgggcctaaatgctagtggctcttcaggagcccccagccctccagcaccacattaggactgctgacgcatccaacatcgtgatctgagcagctgccatgttctctgcatcttcagcatttagatagccatcgttgcactaagcagtacatattgtgtaagccaggttaaataaatcctctttcctacaacatgcccacatgtgcctctacacacaccctcaagatttagtctctaaacctgataaagccgaaaactcattggctaaagtataataagtcatagctaaattaggcaaagtttatactgatgactgttcccttttgttccctgtggcctagcatcagagtatataacctcaggaaagagactaagagaatctcaacatctcccaaaaggggcagagcagccaaagacactaatgttagaagttgtccagtgaaggaggcctgccacaagaacatggaaagaggccttgagggaggagggaaagatggaacagaatgcatgtgacatggggaggagcttcagcaagtggaggagggagaccagcaggagtgggcagaaggatgaggccctacaaaaacaaaaacatgtatgaaagtgtcatctgagccgttactttgtgcactaatttttaaaactatttttacatttattgattgattttttttttgtctgcatgtgcacatgtatacatgtatcatggcacatatgtggaggtccttctaccacgtgagt

SEQ ID NO: 1731 - DNA, 1200 bp, mus musculus
ggggaaatgagctgtagttctcacaactgcacaaccacagccatctccccaacacttaagagctgcttgtccgatatgctgtcttagcaatgagaaagcgactcgcacctattgagatttttctcatccttggtttgggattatgaaatagcttgaacttcactcactcaccctcttctccttcactaacacctcaaaatatctgtgagtcccagctgggcccatggcagaaacttcgtctaagcaaatgcccttcattattaccacgggcccactgtcatccagccagggggtagtgccctgctctgccagaggtgacttgtgccctgtttcaagcttattactttaagtcacccagtaccattggcctgaggagcaaggagtggggtaaaatgaccttctgtgtatcttactgacctgggtcctagaccttcatccacagcagtctcgtccaatgaccacaccagcacagaaagatctctgtgtgtacttattggcattccataggagcttgagtgacggggctggtggaggggtcttatgcatcacgaatatgaatatcattattcaaatcactctggtagatgttgaagataaaaggaaatgttttattttgtgttcattaggcactagagggtacgttgcccctggctgccgactcattatgcctgttatggttaatgggagttaaactccaatatcacatcaagggggagaaatgatcccataagtatttggaaattttttcctcccaattgcagatcaaagctaggttatgaacttctatgctgtcttgctaatggattagactaatagcattctttgaatttcccccatatgctaactctctgtgtggggatgattacgggaagtctgcgagcctgggagattgcaaggtctaccagagtctgctgtcagagtgaattctcctggcagggaagaaaaccagcaacgcctaaatgcctgctgtaagtcagaagtttgcttctgccctctcacctgtcctcagcaagacttagatgaggggaacagaggcaagggtggttaaggaactcatcaaatcacatgggtcacaggtgacaggcccagggctttggggttcggaagcactgtttgggggcttcctcctgaatgtctttcatcttcaacaagatgtgcaaaaaggctggagtgggtatttaacgagagcagtgtgatagt

SEQ ID NO: 1732 - DNA, 1200 bp, mus musculus
ctctccaggaaattcccaggcagtttctgggccttcagctttggactaggactacttcactaatccccgttgatacgtggcttctagcttctttaactgagtacccactgggtatctgccttgccagtgtggagaaagtcactgtgggactacccaacctccaataatgtaagccaatctactaaaccatctatctcttgggtaatttttttttttttttttgcaaaaacctaatacagcacttttgcatctcatggttcaacacacagatgtccaagtgataattataaagttgaagagttttatcttaagctaaataaggataaagtaatcaacccaaacacacacacacacacacacacatacacacacacacacacacacacacacacacacacacacacacacacacacgagcacaccctcgtttcccttgcagggcagcatgatagttcaaagtggaacactgtccgtgcagaggagtcttgtccctgcatggcctctcttacatctggaaatctgaccagagcagctcaaaaaggcagtaatctaaccctggtcacattgtcagtgagttctcaagtgtcacacagtcttcctgacacatacctacagctgagtttcccttcaggtgaggccaggccagctaactgtttcagaatgagatcacagtacctgccagggtaggtttagctaaaacccaagttttgagggcaagctggcctgctggagacttgctttatcactatttgttacaagccaaacagaccatggctgatgagtctgcgaggaagccatgaggaggttgtatcatttcctaatgactcataaacagtctggtattggggcaaaagcctccgtgggtgggccccagtaatgtgagtttgtttgtttgtttttacaagctttctgggagattctggaactaagtaacctagagaactgctttagtaagactacttactatttgttcttctcatatactccaaggtcacagtcccttccttctccgggtgagatgctcaccctgaaagggctcagcttcccacccagccaggcctaggaatttaactgtaggcaaagacaaagggctctgactggcgtatctcagtcccctgatacaaagtgtcttttttttttttttttttcattgtatattctctttattttcattttttttttccattttttattaggtat

SEQ ID NO: 1733 - DNA, 1000 bp, mus musculus
taatctctggagtcagttgttatagttgtctctggttagagattgttcctctcgtgattctgttagcctctatcagcagaccttggagactagctctttccctctgagtttcagtggccagagcactccctgcaggcaagctcccctctttcagcgaaggtgcacagatatcgggcgttcagacatgcctcttggcagaagatgaaggcccgaaacaggacctgtcccagaagctgtgttgcttaggcctgtcccagaagctgttagtttctgtattccacactttcaccagagcagactagtctcggagtgatccgggaaccaagatggctcccccaggtgctctggcaaagcctttctgggcagagcaaacacctctcctctggcagggaaggtgcccgaatgtctggagcctgaaatggggtctgcctcagaagctgtcctctagggaattgggagtgtctgctgactctgtgcccagatgaccctgtgttggcgctgaccagaagggatttgcaccctggtcaggctgggttttctgcttccttaatgctgtctcaggtcccacgattgggttggaacagaaattgtgttcactcactggtggtcctaagattgcgtggagagtcctctaggggaccttgggggtgttcgctgactctacgcccaaggtgatctggtgctggcactgaccagaagggacttgtcagcaatacattcttatggcaacaaaaattcaagtagcccagacaaccggccaccttcctggtgagagcacaggggtccgtccggcctgagaggtttctgcctcaggttccggcgggagccaccttggctccgggactccgcggagggcaggctgcacaggtgagggtgtggaatacagaggccagccgtttctgggacaggcgagagccagagaccttccgaggtggcaccatcttcggctccagacaactggccaccttcctggccaaagcaacacagcttctgggaaaga

SEQ ID NO: 1734 - DNA, 1000 bp, mus musculus
tttaagggaattgtgctgccaacgaagttacatgtcctaatttggagagcaaaggtgcttggatgtaacagctatggtttttagtgtaaacatcaccttcagtccctttcagtaatttagtcatttgctatgtgtcttgacagcaaaatgatttatttacagtggttcccttcactccacccccccaagttttgctatttttctaatgctggaaattgatatggaacataaaaaaatgtctagagttgcctgacagctccccaggaaacttttaaaagccattaatttagaagcaattttgcttctatatttcatttctcatttggttgtgatagaagtaattgtcctattcaaagggagagtcgtgaccacaagcgatccataggcatcaggtgctttggggacagctttatttggttaaaagacctcagttacaaagggaagcagaagggaaccctagaagcatgactcagtgacagatctcttttgcaaaaacagtccaagtaccaaggccagagccccatatactgaagtaagagaaaagggttcctttctggtgacttgattagacttagtcagccatgcacaggaattaagactcccctctaggtatgtctgtgtgtggtcatttccagagaagcttggctaggggagaaaacacacactgagtgtaggtggctcatctcataggctggggaaaactgccagggcaggcatgctatacctgcttcgggtccagtaagacgtgagaagtctttgccacagactcctgctgctttgatgttctgtctcagtccaagaccaaaataatggagctggctaaccaccgaatgaaacctctgtctgatgttctgagctgaaatatgtttttcatatctgaaaaattgtttctcttagattatctgtcacagagataagaaactgttcatcacatacccaacccgtttaattagacaaggttgtgtccttatattctaccgtcaagcatattgagtacttc

SEQ ID NO: 1735 - DNA, 1200 bp, mus musculus
taaaaaggggaccatgagaggtgagagagtgtaatgaatacaggtgactggaaagcagaagagagactggttgaagagaacaagtaagaaacaagtacaatgaggtgtgtatggaaatgccactatggaacccatttactttttatgctaacttcaaaacactcataaacaatgaaggaaaataaatcccttgtggaacgtctataggtgtattgaaaacaatgcaaatgatagagaggctcagatgagccctgcacagcgcgaggtgtcaggaagtcaaacccaggatttatttagataaatggaaaagatgagacctgttcctctctcagatgccaagtagatggattgctttagtgatgcttagtgggtgcgtgaatggcaggatgagaagactggctgtgaatacggaggagcccaggtttagacctcaccatgacaactctgtgcctccaaccaagttccttaagttgtgtgcttcagcagctaagcaaagctagcttctgaaaccacatcagctaacaggatcatggaagaatcactctgcctggggaaatctggtttgctagagcaaatgcatctctgaaaggcgccactgtttcttcagtggctggcggatgaagagagcctctttctcgggaaggcctcagaatggatacattattttgaggtgatgcaggacattctgtgatggcagtggacagctgtcatcaagtgcaggactgaaaacttgggtggcaagaatcaggcaaccagcctgcaggacttgatgtaaggaaagctatcaaggaaacaaaaactagagctacaaaaacatctataaaaagcccagtggcgtctccaaaactccatacgccctgctcattgctattgtattttgaatcttgtgagcaaggccaattatggcttaatgaattcttgggcttctgggatcaaggtcttaatttagagggagaaacattcttaacatacatttttatctgggccaaaggatttttcaaaacttgttaaactggagtgtccagcttgattgaaaatgtatattcttgtcctaaggtgaagtgtaaaaataaacttagtggcttatcttcatatatatcctggcaaaagagcagtcaaggggagctacagcctgggcccaaataaaacatcaccctgtatcccacacagcacatagaaaacaaacaaacaaaaacctgg

SEQ ID NO: 1736 - DNA, 1000 bp, mus musculus
ctaccctctgccttcctctccccaccaggtccaagggttattgctgagtgggtgtggcacagtgaaaatgcagcatcaggtccattctgttcttcaggcagtattcatactgtacacacaaactgctccaggcagggggagggggaactccggcttccacgccccgagaccggcatccaaagggaagagtgactgtaccagcagctctgtcacacgaagaagcgagcatggccatttctgttcaatttcagaatcttcccaagacgttgtttggctgttgccattcctttttttggacgtttacctataaaacaccaacaacactcttaatactcataaaaagtatatttgtcatatgtcatataatgcctggagacttaaaatgtaaagctttgtggtaaacacgcttgttgcgtgttccaaaagcggtcccatctctgagcgtcatgctttagagccctcccactttatcacacacacagagagagaaggccactgtccttccagactgtgtttcagcaaccacgtggactgcaactcgatgcattcccaggaaccactgtcctccggtgtctcagtcatgctctctcctctgctctcattgtttattctgcaccctctctcacctcaagcctggcaaactcctcatccccttaaggacctgcttcctcctgagccacagaaaggcaatcctttcccttgggatttgctccagtacctctcatcgttaccgcacccacaggtggctcgtacccatcactatcatgctgttgttagagtactggttcttaacctctgggttgcaaccccttttgagggtcaaataacactttcacagggctcggtggagaccatcaggaaacaaatatttacatttgtttgattcataacattagaaaaattatagttttgaaatagcaataataattctatggttggaggtcaccataatgtgaggaactgtattaatcagctgcaacattaggaaggttgagaacca

SEQ ID NO: 1737 - DNA, 1200 bp, mus musculus
ggttgtacaagcttgcaatcccaccaacaatggaggagtgatcctttctccacatcctcaccagcatctgctgtcacctgaatttttgatcttagccattctgactggtgtgaggtggaatctcagggaacaaaacacccatggaaggagttactgagacaaagtttggagctgagaagaaaggatggaccatctagagactgccatacccggggatccatcccataatcagcctccaaatgctgacaccattgcatacactagcaagattttgctgaaaggacctgatatagctgtctcttgtgaggctattcttgggtctagtaaacacagaagtggatgctcacagtcagctattggatggatcacagggcccccaatggaggagttagagaaagtacccaaggagctaaagggatctgcaaccctataggtggaacaacaatatgaaataacaagtacctcctggagctcctgtctctagctgcatatgtagcagaagatggcctagtcggccatcagtggaaagagaggctcattggtcttgcaaactttatatgcctcagtacagggtaacgccagggccaagaagtgggagtgggtgggtaggggagtggaggaggggaggacatgggggacttttggcatagcattggaaatgtaaatgaagaaaatacctaattaaaaaaaactcagaaaatacagcaaatatatctaaactctcatgtcacagaacagtaaatagaaattaccacaaaagattaattttcaattgttatttgaaataaatcatcatcagctgaagttatgagacctgaattcaagattaccagataggaatattttctaaagaattgcaatacagaatatgtgttgaactctggacagcccggaactgtgttaactacaaaagaaaattacagccacaacaaaaatctcttcacaggatgctttgtgacaaacatcacttctgtatgttaccaatgcatctgatttggttgtggttttgttttgttttgttttgttttgttttgttttgttttgtttctctctaagtgtctccctggaggattcagtttcttttgtcgttttgtctttctttgtccctttttaaatgcttatgattgtaatgaaacacatgataacaaaaaacgttcattttgatgcttgtacatgaggtatatttgtttactctatgcc

SEQ ID NO: 1738 - DNA, 1200 bp, mus musculus
gttcattagaagcatttaactttgatcagcttctctagggataaagacagacaaatagagtactgccttctaagtgtgaggcatgatgggaaggcaacacagagagtaaaacctaccttgatttcttaacaatgtcttcaacagttggtgtctttttttcatgttttctactctattaggaatgctttccattacatttttgtttgatttgttgtttttttttcttctatgatagattcttctttttataatcacctttttttgaattttttaaaaattttaaactacatgttttattcccctcctggtccaccctctgactgttccacatcccatacctcctccctgctgccctgtttccacaaggatgtccccacgccccatctccaccccaccagacctctaaaatctctggggcctccagtctcttgagggttaggtgtatcttctctgactgagtccagacctggcagtactctgctgtatatgtgttgggggtctcatgtcagctgatatatgctgcctggttggtggtccagtgtttgagagatctcagggatccagattaattgagaccgctagtcttcttacagggccggcctcctcctcagcttcttccatctttcccctaattcaaccacaggagtcagcagcttctgtccattgattggatgcaaatatctgcctctgaatgtttcagctgcttgttgggtcttttggagggcagtcatgctaggtccctttttgtgagtgccccatagccagcataatagtgtcaggtcttggagctctttgtttaatttcataaaaaatgtcttcaattatctttgcttcatttgatgatctatgttaactcttcttaaagttgctgattgtttttttaattagacttctaaattctttgcccaatattccattatattagcatatttggatactctcatctgctgaagagtggtggacttctggtatggttgtgttcacttgtctattcatgtttcttgctcatatggtaagagttctccaactattggtatggatatttttttctggtggtttactggtgccttctgagcaaagagctttctcttggtagttcaattcctagcactgctcagagaggagaaaatgagccattggaatgcaacaaaatcaaaatcaataagttatgaaatcttaataaacaaacagaagaactca

SEQ ID NO: 1739 - DNA, 1000 bp, mus musculus
aaatgttttcacaatcttctgcaggacacctctccttttgaaaaatttcttctaattctttgactcaatgttcttcatcagaactcgcctgaaagcagccttcacatccttgttcctcagactgtagatgagaggattcatcatgggggtgaccaaagcatagaagatcactaccaccttgtcctgctcagcagaggctgtggaggcgggctgcaggtaggtgaagagggccatcccataagacatggagaccacagtcaggtgggaggcacaggtctcaaaggctttgcggcgtccctgggtagaatggatcttcatgatagcagccacaatgtgggcataggacagagagaccagagagcagggtatcatcagcaccaccacactagaagctagtatcaccacttggttgagggtgatgtccacacaggccagtctgaccagtgtcagtgtctcacaggccacatggttgagcacattgtgcccacaggtaggaaggcacatggtgactgctgtctccacagcagaattaactacacccacaaaccaagagacacctgctagacccatgcagagccttgggttcatcaccactgtgtaccgtaatggattacagacagccacagagcggtcataggccatggcagccagcaacagaaactcagttcccccaagagtcagagcaaaaaggagctgggtcccacacagggcaaaagagatggtctttttctccatgaggaagtgtgccagcatctggggaaccccactggaggtgtagcagatgtccaccactgacaggtgacagaggaagaaatacatgggcaggtggagtcgtgggtcgagtgcaatcagtaggacgatgagtccattgcccagcagagtcagcaggtaggtgaccccaaagaggacaaagagtccagcttggatgtttttgtcacttgttaaacccataaggataaactcacttacccaggtcatgttttctctcatggtgcaattg

SEQ ID NO: 1740 - DNA, 1000 bp, mus musculus
accaagatggcgaccgctgctgctgaggctgaggctgcctcccgagccaggtggaaacctgtcctctggtccggatggtggccggctgtctgcggcccgcaaagggtgctgcctcggcggctctgtgcttccgcctgtcccagaagctgttcggttctctggcgcaccctctcacctgttcagactaatttcctaagtgccatggagtcccggaaccccaaaccacagattcttaaacagcataacgttgctacttaaaccatagaaacaaaacatgagagaaatatgaaagagaaatcagcccaattcttacctattgcacacagataaaagcttatttaaaaaaattgtgacccaggtctaccatacaaaatgagtatatgttatgagaaaatgcaaaaattgtttgacatttaaaaatataaatattttgctgcagcaataaattagaaaaatacaaatgttttagtggctacaattaagagtgtaacaaaactcaacaaacattagggataaaacttgatgtaaggcaatacagtaatcaatcctcttccagagaatcaactcaaactcaggtaagggaaaaattttcccctttaagcctatgatgaggatacacagtgacaccactgtatttcctttatttcacttttctcagccactctaatgagtataatttaaaaaaaacagaaagaaaaacaaaacctgtgagcaagcacacatttgagaacaaagattcaaattgtaattatccacaaaggatatgattgtatgattgtaataaatctcaaagtatcttctgataatttaccaatatataagaaaatttaacaaagtcacttaatataaaattgataggttacttcttagaaattgatgctgacagtccatgggtggacatcacatagttatgccatagacacagaaaaccaggctggtgctcacctacaagcatcatccttaatggctggctttcatagtactacaaggtgctatgcat

SEQ ID NO: 1741 - DNA, 2800 bp, mus musculus
aacaaaaaaaaaacaaaaaacaaaacaaaacagttctgtgctgaaagacagggaaaatattgtgatggccacgtcagctcacacggatataccaccctcttgggcatgctggcaatgagctgtgtaggttaggttagcctctgggtatatctgtgaggggtttcctagatcggattgaggtaacgagatccatgctgaatgtgggcaggacccttccctgctcttggagtcctggaatgaagaaaacaaggaggcaagctgagcaccagcactcatcaattttgctgtgccagtgtgaggcagcattaccagctgcctcattctctgtctctgtgactctcctagtatgacatagtattcttgtaatgtgagccagagaagactcttcctccaatagggcatttcagttattttgcttcagcagtgcagatagtaaacgataaggaaaaccagcctgtttgagtccctgggattggttaccttatcaaatagatcagcaatattgattgtgaaattaataaatactaaagtgctagtattaatgagtgtatttttgaagttcaaatccattaaaagttatagataccatacagcccttggatcctagcattcttattactgaagggctaatatagtaatgctcttagaagaaccatacaaagtgatgttaactatacattttcctaaacagcctttactgagtgagagaaatgtagttgtattcctcatcaagaatggttttggtttttgacaaatgctggttttttttttttaattggctattttgtttattgaaatttcaaatgctataatgctttcctgtttcccctccacaaacccctatcccttccttccttcccctgcctttatgaaggtgttcccccacctgcccacccacttctgcctcagcaccctagcattctcctaccctggaacatcaagcctccacaggaccaaggggctcttctcccgttgatgcctgagtagagcagagactgaaggaagggccatccagagactgccccgcctagaaatctgtcccatctgcaaacaccaaactcacacactattgctgatgctaagaagcacttgctaacaggagcatttttaaaaaatagagattgagatgaacactttttagtgttttaatgtggcaagttgtattaattttaattttaagtctttgttttttgaaatataattataattacataattttcctctccccctttctgttcaatgcctctcatgtgcctagatccttctgcataacccctttttctttgttatatatatattcctaaatatgtaaatatatcctgcttgattcatatgtttcttacatataatttcagagcttaatacttggttattataaacatattcataaaagtcacaatttttaacaacttaaaatacaatttatacattatgaagtctacctatttaaacaaaagtaagatgtaggtggtttgtagtatgcggtccagtggtatacattaaacctaggattgtgttacacttagcagaaaaattttgggtcatttttgtttttctccaaagcaaccccaggtattggcaatcactctccatttctttctaattttttccccacgtcttcctctcaaccatcactagcctactttgtatctctctaagtttgcttattgaaggggttccatataaatagaaactaaaaatacggtctattacaagcatattcacttatataacatagtattttctgttttattttttattaatccttttattcatttacatttccaattatatcccccttctcagtttcccctcccataactcccccatcccatcttcccttttccccctctcctttgcctctatgagggtgctcctgtacccactcacctactcctacctcaccgctcaagcatccccctatgctgcatcaaacctccacagggccaaggacctcctcttctattcatgtcagataaggcaatcctctgctacttatgtgtctggagccatgaatccctccatgtataccttttggttggtgatttagtctctggaagctctgtgtagtctggtgagttgatattgtcttcttatgaaggtgcattctccttctgctccttcagtccttcccctagctctttcactggggtctccagtctcagtcctacggttggctgagagtatctgcacctgttttggttaagtgctggtagaacctctcagggaacaaccatactaagttcttgtcagcaaatgcttcttggcaacagcaatagtgtctgggtttggtatctgcagatgggatggatccctaggtagggtggtctctggatgacctttccttccgtttctgttccattttttgtccctgtctttcctttggacaggaacattgctgggttaaaaattttgagatgggtaggtggttccattcctcaactaggagttgtgcctatctactggaggtggtctctacaggttctatctcacctttgtttggtatttcagttaaagtcatccacgatgggagcctctcgcttccctggctggggctttctagtggccacctccactgctacatatttttatttaatttcttaccctctgtacttctctcctgccccttctaataactacctccttttttccttctacccttcatctttcctcataggttcctccttccctctacctactatgactattttgtttccccttctatgtaggattgaagcatctacactttggtcttccttatttttaagctccatatggtttgtgaattgtatcatgggta

SEQ ID NO: 1742 - DNA, 1000 bp, mus musculus
gaatattaatagcacctgaagttgagctactgagtgaaagatgctgatttcaaaacaaacacgtgatctagatttaaaaaaaattcaactcctgtacctcctgaagagcttgtatccaggatatagggataacccctataataaatgatcagagggcagataaaacaattgcaaagtagcaaaaccttgaatacaacaagattatattggacagcgttctctgggataacaaaagccacagaatgtagatattatgaggatgatttgcaagaatggcttagagcctaaaggtctgggtagcacagaaaatacttgatgcacatcagagagattaagaatgcaatgatgtccagtctatgaatttcaatgcttctttagtcccagtttagtgctaaagacctggaagattcctagagctagtcactagtctttaatctatgtttgactctgatgatgctgggatctgatgtcagtgaagaataaaatcattcaccagcaagcagtgaagataggcaggcagcaggcactacttttcactgggacctatttatagctggtccaccaaaagtttctgcccacactagttagggtcctcttctatcagttaatccttcatgaatatgatctaacaggaccacccagattcatgtctgaggattcgttccattgtcgtgggaaagcagcatcgcagtgggaacatagtgtcagtatgccggaagcagagactggatagaaagccaggctgggctatgacatgtcaaggcatagtgacacactttccccacatgaatctccatttcctttagttttcataatttccacagtgtctagctagaaatcatatcaacataagaacttaggggctatctttgattcgaatgtcactgggacatatgcaatggcataaagaaatcagaaagatattatgttgaacataagaaagtctagagaattcagtatgtttgggttcatttgcatgatgttataggagctccaaaaa

SEQ ID NO: 1743 - DNA, 1000 bp, mus musculus
taggatagtcaacagtttatctttgtcaagatagagaaaactagtccttcatagtttctgcttcatttcaaggtctgccagatagttctgggccagaaggctgaagacagatgctccaacattttgagtaataggggactatcaaggtagtcagatatctctgcggcttgtttatccctatgtttttgtgcttcctacatattcaggtaatatttaattcattctcatatttctaatggcgttgaagactaattatagtcttataatcaaacctaagttatttagaattgaagaagatgatatagaaaggatggttttcagatggtaatacaaattaaagtcagaacatattcaggtatacaattgcaaagtgtttaagtcaggatagatggtagagtactttatctaactgaaaaatatgatggactggatgttagttgtgtatcatacttagtaatctacataattgttatggttttgctcaattgatgtctgagagaagagcctttttaaaaaatttggacagaaagggtgagatgttgaggattagttctcattctttgtcctattttgactcccaaatgccatgcttccagatgctgaaggtccctgccctcagctgacattgattgataagaaagaattgcattacagccaatgtctagacagggagatggaggtagaacttttagattatgcaggcaaggaatggaggagatatagagaggagagtcaccatgatggggaatcagaaagatcaaactaaaaggctagatgatgtgtaagaacctggggaagcagccagtggggccactcccctgcttgagtctggggaaccaaaggtgaaatatacattttaaaagatgctaactcaagattactggaggggagtgtgtgctagctgcagagagatttagaagaggcctaacattgatctagtcaaggcatatcaaaattaggtggcatgtatatgtcttttactcacaaatccagagctttt

SEQ ID NO: 1744 - DNA, 1200 bp, mus musculus
attgatgggtgaattttcaatgaagcatagattttagttttatatcctgcatctgatacatcataaaagttagaattgttgggggtggggacagactgctagctagtctgctcccaagaagacacagtatcctgaggcattccagaaaatcctctgtactcagagcatttggtaagaaccctcctgaagtcccacagctgcagctgggagcccagtggatttaggtacccatcactcctgaagaccactccattttttccaggtactttttgctggagcagactgctagctagtctactcccctaaagacagcccagaagatctgctgcatgcaaagcatttgatataaaatcatgagaggcataccaggagatctgctacactcagggcatctgacaccacagcctgagggatcccagttgttctactgcacacagggcaactgagcaactgattgccagcttgtctgctctcctgaagataccacagcttgaaggcatcccaggagttcctctgtacataggacaatggggcacccaacaccacagtctgaagacctcctgggggctctgtggcatgcagggcaactgacacaacagactaaaagccttcttggagttctgttgcacacaaagaaacagaaaccacagtccataaccccacttcccccgagaaatcttcatgagagacaacagcttctctgggcctctgtagaccctttagttggaagaccccacaggagatctgctacagccagggccacagacttaccaggagacctgaagcaacccagtgacaaaagaggcagactctaaacagagtcactcagaccagcaaacaccaggaaaaagagatggcaagaggcaagcacaagaccataagcaacagacgccaatatatgtgggcattatcagaattcagttctccttccacagcaagccctgaatacaccagcacatctgaaaatcaaaaagctgacctaaaattctatctcatgaagataatagagtcctttgaggaggacataaataattcactgaaagaaatacaggataacacaatcaaacaggtaaaggaattgaataaagcaatcaaagacctaaaagtggaaatagaaacaaaaaaactagaaacaaaaacaaaaacaaaagcaaaacaaaaacaaaaccacaagaggaggtaaacctggaaatataaaac

SEQ ID NO: 1745 - DNA, 1600 bp, mus musculus
atcataaatttatgagatttggacggttgtcagaaccttacttctcgatagaaattaacacatacacacacaacatcttcattccttgtacaaaactaaaaatttattcacagattatttttattctctctcttggataggtgtgaaatttagtcatattaccaccatagcaataaggtaacaaacatatctgagtatagtaaaagcatttgttattttggcttttaaaaccacagaaatattataaaaatgtgggggtttttttgtttggtttggtttggtttttgtttgttttgttgttgttgtttttgttgttgttttttgttgttgtttttgttttggtttttttttgggggggcgtctaatatggggttgctacacattgtccacaaaagctgactgtggtttgcctcatgctctagtatgagcataattttgtcatccagatattttatgcaattgagtaatatttggaattctggggaattttgagagggcattataattatgaccaaccccaacgaacaaccaaccccaaaactacagcccaacagcaataacctcacttctcagggtccaaagctcatatcgagcttcctcaacctcttgcagcttgctccatcaaattgccaatgactgtctaaatctgtgccttatttctcttgcctgccttattcatgaggatgggaaacaccagacagcattaatattttaaagttagccagataactcaatggctgggtgaagaatatcttgccccatccttcttggcctctacccacagtataagtggccctgagacctacatgtgtgtgctccctctgcttcatatcctgctctgcctcctccctctcatccccttctcttcctcctggaacccggaagccccgcctttttccctttgcttggcttctggtttcttaattgacataaccatgaactaattaggaaattgatgctagagattcacagaagcatgtgttatagtgtaattttgacaatataaactttatagagtacacatggagggactcatgactccagccacatatgtagcagaggatggccttgttgggcttcaatgggaggagaggcccttggttctatgaaagttcgatgtcccagtgtaggggaatgccatgtcaggacggcagagggagggtaggtggaaaaacacactcatagaagcaaaggaaaggaagatgggacagggaggtcgggggggggggagaccaggaaaagggataacatttgaaatgtaaataaagaaaatatccaataggaaaaaaaaaagaaaaataaaataaaatttaggcaattgtatattatcagacaatgttgaatttttctgatcaaaagcaggtttttcaatcatatcattcctaataggttgatacgattacaacttcctaaatctcagattagtttttataagtattactataaatatgttaattttacctaatcattttcttaattttgttgtataagacagataaaagcaaatgctctttgagtggttcagtaatggaaggaaacaccatccatgcatggaaatcatcttgtgaggctgctagaaacaagaatttaagcaaagttg

SEQ ID NO: 1746 - DNA, 1200 bp, mus musculus
agagatatgtttaatataaaattagctaaataccctctactagagactcattttcttcttacatgctatgcaatagacatattgccttggaatgagagttagctatattgtacataatgtatttgtttcaatattaatgaaaatcaacagtgaaaattgtattgatataaactctttagaatttttaaagtatttcacattttaatcatataaataatatataatataatggtaagaagactctacactaacattctactaatggcaattgccaaattcaaataatccatgaggttgctgaaatcagagtaactttcatatatacacataagtgcataaatgtcttaaaacaagaaaaaaagtcttaaggtccataaaaaacaaaagaaaacaaaacagcagaacgagggcattagctggggtgcggattgaggaacctggaggggatattgactcaagaagatgaacagaattaactaacatgaacccttggaggctcccagatactaaatgcctaactaaaatacataaaaggcctgtgtctaccccctccatatatgtaacagatgtgcagcttgattttcatgagtgtcccccaacaactttagtaggggctgttgctgactctgctgcctacctattgatcctgctccccaaatgcagctgccttgtctggcctcagtgggagagaaagtaactagtccttctgtgatttgacatgccagggtaggtttttgcccaggggtacctcctctgcattctcagaggatggggaggggaatgattgggggcccatatgagggtgcctaaggggagagggttgcaaagatcatgatataaaatgaatatgtaaatcaggatgagaagtgttttctaataatgtagaggagcattggagaaaaaggcgaaccagcatcttataaagtaaccatggaaataaaaagttagaatcacaggaaccacaagggccttaaaatacacttctcagaaaacttggtactggatgtacttggagagaacattgaaagttgaatttgtgaaacacatgatgtctaacatggtgatttctaattgaaatatatgaaaatagatagtttatccaaacactacttccctgtgaattttttttttgactaagcacacttaatagtattcaaagctttaatcaagttgttgagatgcgtgaagtcttcagatcct

SEQ ID NO: 1747 - DNA, 1200 bp, mus musculus
gcatatgtggagtgtacatataaacaagtagacacacatttatataaatacaaatatttagttagttagttagttagttaggtagttagctagttaggtagttagttagttagttagtttttcaagacagggtttctttgtatagccctggctttcttggaactcactctgtagatcaggctggctttgaactcagaaagatgactgtccctgcctccaagtgctgtgattaaaggcttgtgccaccactgcctggcaatgattttaaagtttaaaaaaattaaatataaccttggtgtgacattattacttttacactttaaggttatttagttggaaattgaacagtttctcaaacgtttaaattattatccaaattgactataatttcactgctttcaaatcctatctttacattttttaaatcctattttaaagtgttcttaaatgttttaaccttccttgtagcccactacccaccaaggtagtggaaaagaaaggatgcaggggaagtggaacactttaggaaggttctttggagcaactcccatttgtgttgtctggaagtaagtcagcaattcaattcacaggtttgcagcggcagctcagtccactcacaaacacctcaaggatagaccagtagtccaattcaggttagcaacagtggtgacatgacctggcagagacagccaggcctcagcctctgctcaagtcagcaggaggaccaacaggaacaccaggagaaattttcagctgtgcctttcacagggaaactaagagcaacatagaagcaagaccaacaagcattagctatactagcaagccaagctgtgtcttcagtccatggtggcttatttataccttccaaacatcacgtgtcctccatgtgccttgccttagtactggtcttgcctcagcgtgtgcatccaaccaggccgagtctggggaagtagaaccaaactgcagcataccaccagaagtttgtagtgtgtttcgagatcaatgttgtatcgacaatagagctcatctacacaatatacggtagaccaatacatgaatgttcttagcaaagaatcttttaccatgtgtcctttcacatgcttgctttagcagagcattctctctccttcctttgtctgcttcagcaaaagttccttcccgagtctgctttagcttttcacacctgtgtcaactttaatg

SEQ ID NO: 1748 - DNA, 1000 bp, mus musculus
aaagtataagaatctatatgtttctcagtcccacgaggctagttgtttaagctgatcttctgtagaaataggtgccaacaaatgtactggcaagtaagggcaagcactcaaagaatagtgaatctcccttctttccaatgtccttatgtaggcctccagcagaaagtgtagcccagattacggtgcataccatcacacctggatataggacttgctttgtaccaagctgtccttgaactcagaaaattccttgcctcggtctcctggggttaaaaacatttacttccttgccttgttctaagattttcatggccactatagctcaagatctctgtgtcaagatccaggtcagaaacttgcatcttccagactcaagatctttatcacaggtgtccccttcaattcgggattgtagttcattcaggatatggttaagttgacaaccaggaatagccaacacattaagtatggctacataagccttgtaccagaaatattgcatgcataggaatcaaaataagaaagtatgtataatgcaaggagtcacaatttgctatattctattgacagattcattgtattgtgaaacatgcttgtgaatatcacagtataatatgagaaaccaagtctttttcctttttgaaatcataaaaataggagccggaaattttgatggcatggcatttataaacttatttcaacatacttgttctgttattctttctgttgctgtgattagacactgaccagaagcaatatagaagaggataggcttgctttgcttacaattccaagtcactgtttatcaccaaaagaaggcaaagaaaggaatccagcaaacagtaaaccagaagaatactgcttgctggcttgctgtgaggctcatgtttatctatggttttctttctctatttctttccttccttccttccttccttccttccttccttccttccttccttccttccttccttccttccttccttctttccttccttcc

SEQ ID NO: 1749 - DNA, 1000 bp, mus musculus
aaataaatacataaagaacactacctttaaaaaactaatttaaaatttaaaatgtgtcagcagcaaattggaaaggagaagaaaaatataatgtcaaagtatacagtagagaataatttacaattattttggttgaactttgacaaagagtttttctccctgaagcaatgagaatggtagggaggtaggaaaaattggtgtgaagcacagaactgaaaaaagtcatatagaaagacagtttgctgacattaagggtctgtttattacttaaacactgacacacacacacacacacacacacacacacacacacacacacacctcccaatcacagaaaatctctttagcatttctttctcaactttattagtatccagtaaaaaaaaatgttttaacatccaaaacacatgggagtggaagctgattgtaaatgatacagtgcattttcacagtaaaccttgatatttcaactcatttttaaaaaattttattagtatatgttttctttatttacattgtgaatttatccccttccctcatttcccctccaaaccccctccctccatcacatccttccctccccttgctcactaacccacccacccctgcttccctgtcctggcattcccatacaatggggcattgagccttcacaagaacaatgaaaggacatcatcctatcattgatgtcccacaatatgtaaggctacatatgagactgctacatatgagactgaagacatgggtccctccatgtgtaccctttggttggtggtttaatctctgggagctctgggggtactggttggctcacactgttgtttcttctatgaggctgcaaaccccttcatcttcttgtgtcctttctctagctcttccactggggaccctgtgctcatttgaatggttggctttgttcatctcagtcacttagttaaaacatttcacagtgacttgagaaccatagatttggatgattgaatattgcatgcaatatttt

SEQ ID NO: 1750 - DNA, 1000 bp, mus musculus
tcacacagcatctcccccattccccatccctatctcccctgataagaaggagcctcgccacctgggtaccaaaccaccctgtcacatcaagttggtgcaggactaaggacatcctctcccactgaggccagaaaagatagcccagctaggggaacatggtttcatagtcaggtaacagagtcagtgtaagcccttctcctgttgttagtggacctacatgaagaccaagtacctgagaccagctccagacctctggttctcacttgaggagacctgggtgaaagaattgaggaggagtggcaaaggggacaggatcaggcatgtggggggagggggaaacagaagagaaacctagagggctaggataataaatggaagtatgcagctgcaagaggtgggaggtagggagtggtgtgaacctctagaaagacccagagacgtgggatgtgaaaggctcacaggactcaatgaaggtgaccttagctgaaatgcccaacaatagaacctgaagagactagccccagtagatagactgggcctccattggagggatggggtcaccaacccaccttcaacatttttgacccagaactattaggtctaaaagaaacgcagggacaaaaatgaaacagagagtaaagtaaaggccatctagtgaccagttcaacttgagatccatcccatgggcaggcaccaaactctgatacagatactgatgttatgatgtgcttacaaacaggaaggtagtatggctgccctctgagaggctctaccagaaggtgaatgagacagatgcagatactcacagccaagcattgaattgaggtcagaaacccctatggaagagttaggggaaggattgaagcagctgaaagatatgacaaccccaaaggaagaccaacagtgtcaactaacttggacccctgggggctctcagacaatgagctgccaaccaaagagcagaatacatgtgttggtcctaggccccaggctgccttgt

SEQ ID NO: 1751 - DNA, 1000 bp, mus musculus
aaatctgattatatcacatctgtacttaaagagagttaataaggttacattgactgagaagtctaaaataaatttgaaatatactttttctgtgccactatgaaataccacacctggctgatgagctattggcaatagatgtctgctagagttcccgagaggctactcatgttccagtggtcatatgcccattaacatacaggtagaactgaatagaatcagtcaccttaaaaatagttcacaggaagttggaaaggaaaagtaatgggatggtagggaagacattgcatgggatggaatccaacaagacttggtcaaagcacattacaggtatactaaaaattcggaacacacatacacacaaacacacacacacacacacagagagagagagagagagagagagagagagagagagagagagagaggctacattttaaatacaagaatatgtaacatctgcccagccatcaggagcctctgttagcttcagccagttacatgttgcaacttatacttcattcattcaaactatgtgtgtttacagacacacagatgacatacttctttcacatgtgttcattcaggctgttcaactcgcctggaaagtcatccccctttcccttcacctggacaagttttcttgccttgcaacatagagatatattcactattcagatataacttcactaagaattatttttaccctgcacctgtttaccttgagcacaaactcagcagccagtctaacatcccccagaggaggctctactcccaggtgctctagcacacccaggatcttaggatcaggggtgagtagaacacaacacctattccaaaaccactggaagtaactgggaccatcaggatacagggatagaggaagcctgccccaccagtggctcaggttcattccagtctgtgctggtttaccttgggcacaaactcagcagccagttccacagtccccagaggaggctctactcccaggcactctagc

SEQ ID NO: 1752 - DNA, 1000 bp, mus musculus
ttgggaacaacaattattacaatgggtatcacagcaaaggcagttgtgtttccatttgtattttatactacatagtaattatagtctcttttgtgttctttaaataaatctaggtcatatttaatagtcagtataagaacagttgttcatacttccttgatgtaagaatatagtaggtagactcctattacactggctggtaatattaacttcaaatttaacataatttacattttgtgcaagtcatattgagtctataaaagagatagtcctctcatgttcacaaagaccatgtcctttccccttaaactatttgactttcgttcttgcagattggtctgaaacaaaggacagtaaggcttagtatgggaagactcaagaggctcttgctagagtggaaaaggggggaatgcactagtttgatattttaactctcatagtgtaaacaccttactatggtaacttcatgctatcaattggattttaagggtgtggcttctaaaaagatgcccactgtcacaccattacaaaacaaagtacttgtgttggataggtgttgtataaataacctaagaatatatatcatagtaagtgttgagattatttcaaagtagatattaacattctctttatatagtttaattcaaatgctctcatacttgtgtttcaataatggttctatttaatacacgtcctgatgaaccaactaatacaagctggatccaagagaacattgttgggttagactgaatacacatgttcccattcttatcagtgcacatcagcaaaagagatgtgatgtatagctttgcacctttgacatggctcagtgttgacattaccactgtgtataaaagtagccccaaaattttccctgtctcttcttctctgtagtgttattatatcatgaactggagagatcactattagcagtcaaactgctaactagatggtaccctgagatggaagaaatatatattttggttttttttccaagaca

SEQ ID NO: 1753 - DNA, 1000 bp, mus musculus
aaaggacataagctacccctaagatggatgaggaaagcaacaaacacaggggggagctggtgagtgggagaaggggggggggttctcaatcaaactaacaaataatcccatggccccagttgctggagaaaatgactggaaggagagaagaatgagtgagaggagtgcttgagatcaggatgtagatgggccactttttatatttactaatcatcttatttgcttacaattcaaatgttacaacccatccaggtctttcctccatagacctcttaccctattctcttccccttgcctctaagagggtgctgttccacccactccctcctcacccctctagcatacccttttttggggcatcaagcctccacaggacccctcccctaccactgatgccagatgaggcagtcccctgttgcatatgtagcaggaaccatggactggctcatgtatactctttggttggtggtttagtccctgggagctctgaggggttcagttaattgatactgttgttcttcctatgaagttacaatcccccttagctccttcagctcctcccctaactcttccattgtaaaagatcacactgtgcttataacacatgtgtgaggggagggggcaggtagtttagaggacataaatgttggaaataagatgtcaggacttgaggtgccaatctccctggtgggtcatcatgcaaatgctgacctaacagaaatgattttagggaaaggtcagacagagacctgtcggcaggagacaggtactacgaacaaatggagtcactcagatcaaacatataaaccaactctgttacctctgttgcctgcactcactgcttcaatgaaagaatcgaattaattttctcccaacttatagcttggaggtttctcattctgtttctctacatataagaccctagagatcgtcgccatctgctaatcacagccctttcagaccaactaatcaaaaagcatgtgacaatatgaacattgga

SEQ ID NO: 1754 - DNA, 1000 bp, mus musculus
aaagatgaagtccttaggctacatagaaaatctgaagaagctggatggaaaagttagtgaaggatgacagcaagagctgtcaaaacaaactcaccagcaagggttgacagagcaggtgaaagcaatatcctttctctcatacctccttatatctgtgccaccagccatgctttccctcagacctctatatatctgtaccacaagcagaaggtgccacctactctaggagagaggttttcctgctctgttgatacttacaataaatacacatacaaccctgtccatcagagtgcctctttgttgatttcagatctttaataaccaatatcaaccacaatatagggaagtattctgctactacatatggcaggaagtaagcttaatttgctatattgcagttccactcaccatgaccctctcttatccccatctaaatccaccaacatcccaccttcactgatgtgatgtggcatgggtatagagctattcattgggactagaagagcttacctttaccacctcgcctcttcaagcacccatctattgtcaacagctctcagggaggacctaggtccatggagctcctgctctagacattattgagtgttgaaggtaatgctcgtcttaatgcttgtcaccataatgtctatgatctcatgagtgtaaccaccatgtcctgtccagaagacagcatttcacagctctgctcttacattctttgtttcccctctttgtggatggtcctgagccttagaaagggtgatgtggatgcctcctcgaaagctgagcactcaactgcccttattcttagcacttgaatgagtcaaaaaaatctctgcattcattgacatcattcactgcaaaaagaagctcctctggccaagcgagggcagtcttactgatgctggtgaacacctaaaagaaacaaaagggtacaaagaataacctgtcatggtttggtttgggtttacttacattcagagtattggcaatgtccaaa

SEQ ID NO: 1755 - DNA, 1200 bp, mus musculus
agttatacagcaagtattttttttacatttactttttgtattaattgcttattatattcatttacattttagatagagtctcccttcctggtctacccttcccacccaactcccaccccccacccagtccattctccctctcctatgcctctaagagagtactcccccacccactcacccaccccatctcaaccctctaacatcacccaacctactctggggcaacaagcctacaaatgaccaagagcctcccctttcattgatgccagatgagacaatcctctgctacatgtgtagcatgagccatggacccattcatgtatatactctggttagtactttagttcctgggagttctgagggttccattttgttgatactgctgttcttcctatggggttgcaatccccttcagctccttcaatccttcccataactcttctataggagtcctgacctgattccaatggttcgttgtaagtatctgtatctgtttcaatcagctgctagtagaatctctcagaggacagccatgccaggcttctgtctgcaagcacaacatggcatcagtaatagtgtcagggtttcctgcctatgcatgggatctcaaggtggtacagtctctagatggcctttcattcagtctctgctccatctttttgcccctgtgtctcctttagacaggaacaattctgggttaaaattgaggtggatgggtggccccgtccctcaactgggggccatgcctatctactggagttggtctctttaggttctatgtcctctctgttggatatttcggcaaacatgggtcctggaagcctctcatatccctggtatctgggactttctagagcctacctgccccaactccccacccctactgctacatacttctatttattctccctgccttgtataatctggacttccatcctgtctcttctcatatctgatcctgctacccctttttcttccccatcccctctccttcccaggtccctccctccctccctttatctcctgtgattattatgttccctcttctaactaggattgaagcacctacactttgctttcccttcatatcatctgtgatatgtatcatgggtattctgagcttttggacttatcagtgagtacataccatgtgtgttcttttgagtctaggttacctcactcaggatattttctagttcc

SEQ ID NO: 1756 - DNA, 1400 bp, mus musculus
tagctccctaagtaatattaattccacggaggaaggattcccacccatctgtttacacattcgatagctacatttcttctgatgacccggaaaagtaaaaatgtttgaggttctgtgtaacgtgaaagtatgcctaggtccgttaccgctgctgtagccacaggttgtgggcaaagcaaagggtggccctagggctccctggccggggcctgacaccctcacgccggtgggcgcgtttcactcttctcgagaaccgctcctctgaactctgttcaaaccagaggcgagatccgagacctgggtctgctctcactccggaatctgtcacttctatctgtattaaacatggagcctgggagccgagaagatggggcggtttgtttcctttcttcagctccgcgcagagaagaggaacccgtcgaaacgcacacaagagaaagtcttcatgggccgctggagcctgaccacacggctgcatccaagcatggagactgcgtgtaaactcgcgaggcgggcgcacgctcgaggatgctccgtccccacagagaaataacgaaggctgcttctgctctgtctgggcggggcggccgccgatggcgcggaaaagcgacctagggcggggctccgacgctgacgggctgccctgcaaggattcagaccctcacccagcgccgggagaggcgccgccctcgccggagccgctcgccgattggtggaggcagcgagcctatcatcgacagttgccgcctctggagtcttagctggtctccacccattggccctcgggccgcccctgtatttacatattttgtggcgcgaaaataaccctttgctcccttgttggctgggctgtgggtgaggggtgggcttccgctcgcagcgctcagccctttaactgttcgccccaagtccggcagcgcgtggtacccggggccagcgtggaggtcggggttttggacgcgcacgaccccgaactcatcttttatttttaggtcttcgaatgtgtcggtctattttccttttacttttttttttttttttcatttcaaagaagcacaaccaaattatgttcccaggtgcctgaatttaacaaaacttctagagaactcgttcaaccccctccctccccagctccttttgtggtccgcacggttgttttaaccaaaaccaacctctgaaagggggggcggggggtcgagagcaaacgaaaaattccgggtaaaaatcagctttgctaagaccacgttttcgttgaagctgccctaagaccggtgaagttgaaaccgaccttgaaggattaacgatttctgtagctgaaatgtactaatttcactgacgtttggtggagatggtgagaaaaaataaatacgaaattggtttggaaacatacgaaacaaacg

SEQ ID NO: 1757 - DNA, 1000 bp, mus musculus
ttttgtggaatagtttgcagagtattagtattagctcttctctgaaagtctaatagaattatgtactaaaaccatctagccctgggttctttttggttatgaggcttttaatgactgcttctatttctttaggggttaggggactgtttagtttacctgatcttggtttaactttggtaagtggtgtctgtctagaaaattatccagtttgtttagattttccagttttgtgttttgtggagtacaggcatttgaagtaagacctagtgattttttaaatttcctcaattttgtttgttttgtctcccttttcatttctgttttgttaatttggatattgtctctgtgtcttttagttagtttggctaagggtttgtttatctttttgattttctcaaacaactcttgtttttttttttttttgattctttgtattgtcctctctgtttctaatttatttcaggtctgaatttgagtatttcctgatgtcttgggtgtttttgattttgttatagagctttcaggtgtgctgttaagttgctagaatgagatctctccacatttttcatgaaggcacttcatactgtgaattttcctcttagcactgctttcactgtgtcccataagtttgggtacgttgtgccttcattttcattaattctagaaagtctgtatgtttcctctagaaaggcttcttgtacatttatagccatctctttctttaggttatggaagttttcttctatgaaattgttgaagttgttttctggccctttgtcctgggcatcttctccctcttctatgccattaggagttgctttatggttatgttcacttagcagacagaatagtagtgggttttccccaagggtaatgctcgttctagtttttggttcttggcttcattaattaaacaatgtcagctgtaagtttcacttactaggtgggtcttaaatccaactaaaaagtggttggttattcccataataatttgtgtcat

SEQ ID NO: 1758 - DNA, 1000 bp, mus musculus
ttatatttagatctttggtctattttgaattaaattgttgtatattttaagaagtaatattccagtctcagtcttttatgtgtggctatctgtcccagcactattggtggaaaagaccattttgtaatcattagagcgtcatgtcattgctgtcaaaatcaggagatgatagactctgaattctcttctgctgtcttacagaagttcctctattattataggattatggctttacaaacatattttaagtttaaaatgcatatggtccacattacctgcagagtttacagcttagcacacgatagactgcagagcattgcttgatgatcttgatgagcacatgctgatttagagtgcagatcacagaggatgcccagcatcactgagaggattatactacacattatttgggaaggatcaaaatttgaaatttgaagtatagttttagtatgtgtctgttcctttgccagtataatgttgtcttgatatcactgttaatagatatctgaaattgggatatatgagttatacatgttgttctttaaaaaatggtcagaattattattctgatctataaatttcagaggtagcttgccagcatctacaaaagagtcagttaatctaaggcttttttcccctgtgtggttccttattagtgttgattgctgatccacaaacattgatgattccccatttatttagaaatttatttctttcaactataccttgtggttcaaagtatatgtgtttgaaactcttttgtttaatcttcattttaatttattttatgtatgtgagtacactgtagctgtcttcaggcacgtcaaaagagggcatcggatcccattacagatggttgtgggccaccatgtggttgctggaaattgagctcaggacctttggaggagcaggcacggctcttaatccctgagtctccagcctcctgcgtaattattcttagttattagttctaatgctttaacatatctctgtatcattt

SEQ ID NO: 1759 - DNA, 1000 bp, mus musculus
cagcttcacaggtgctggcaaccgtggctccttccagacctccacggttggtgcattttaaatgatagtgaaggcaggaagcacatcacaaccgtcagactgtatggagaccatttggagagtacatgtgaagaccccatccattcagggttggggagacagttcagtccagaaagtaattgtcatacaaacatgaggcttcagatttggcccccagaacccaagtaaaaagccaggtgtgttagcatgcactgcttaagcactgagaggggtccctggggctcagcgaccagccagcctagcctaagaagagcccaggtccagccagaaaccccgtctctaaagaaaggcagactgtggctgaggaaaatacccaaggttatcctctggcctccaccccaagctcccataagcagtgcttgttaacccccccccccaagactatcccaaagactattgcctatccctgagatatgttcttttagctgggctgccctgtctggcctcagagggagaggaagtgccaagcctcacagagacttgatgtgccagggtagagggatacccaggggtctcccagccgctcagaggagaggaggtgggcaaaggattgtgggagggagtgaccaggaggggagtaatgagcaagatgtgatcatacaaacactggaaggtgagttcttgctgggacaaggtgcccatgaacctgggtctagcctcagagccctttcaaaccaaggagccaattgaccggaggtggaagccttggcaactctgtataacatccttggcaatgagcatcagggagcagttaaacactgacagagggttaggtcccagggcagtaaaagctatcccttcatccccagctgagctatgaggccagtatgcctgtaactagccatgctggataagtcatgccatcctttgacttatgtggggatcctggtactgagacccacgaggggaaaagaagccaggtaaagcctgtcagttacct

SEQ ID NO: 1760 - DNA, 1000 bp, mus musculus
acagtcccagtggggttgcctgacccctgtgtcaggcttcaaccctgatggaaatgggcagaaattgtcacaggtgtcacaaaggtctgtcattaatggctattctaggagagaaagcagacccaagcaggctggactcaggattagtatgagatcagaagatgcaaacagctccctcctctggagtcgggtagatgtgcattttaggaaaagctactgcctttcccattagttctaaagaggttatctgtactatgaagaaaagactaagatctggaatgacagctggtagaagggctaaggacctggaccgagactctaggtcacctgcttctaggtacactcctgaacttctaagttacctgggtcaataaactccttctttagtctgagctggtcaatgctaaagagtcctagctttgtgtgcagccaggtagaccttgctcagctgtaagggcttactagtgcagcgctaaagaatggtttaaagtctgtactcttaataaatggctagtgcacagagacatatgtagcaggcacaaagactgtggagggatcagatgagcatccagggtcagggggatccacagagccctccagtctgtcaggagaagttaaatctacacctacagctggcgtccaacagcccttcctgctattcaaggcaagagccacaagaaacgatgacatgaatttagactgcaaatcactgcccatgatgttgggacaatttggatagtagctgtacaacccagcagagtgacaatacttcaagaggaacaggtgacttgtaaggtcaaaaacgcagggcctgaaacagcatcactgtggcaaatgtgaagggtctggttacctccctgcctgaaactcaagacttggggaggaaaaaaaaaaggtgctgaaatgtctgcagttggtagtgacacctgagaactgagtgtgcacgcccaccccatacatgaggagcaagccttttgctgcaaatagctttgaaccttct

SEQ ID NO: 1761 - DNA, 1200 bp, mus musculus
caaattgaccctttcataggagtcacatatcagatagcctgaatattaaatatttacattctgatttataacagaagtaaaatcagttatgaagtattaacgaaataattttgtggctgggggtcaccactacatgagggactgtattaaagggtccctgcactaggaagattgggaaccactgctcagatcccaaacagagaagtagctgtcagctcagagctgggtcacatatgcctatccccacactcctgacaccctagcgtctctcacatcttcctctttcctttcagcctccctgtctcccaaagtcaaggcacacaatggcaccaatacacatcacttgtgatattgcaaccccttctttctcctgggttgtcagggtctaaattgctaccaggtacagagactcactgttcaagctttgagagcctcactgattgcaatggattcaaaaccctctctttaaaccaatctgctctctgttcaataagcagggtttcttgaatctcactctgagagcagtaggatgagtgtgaggttctggaccaaggggaaggttggatcaaaagagcttccgagtcccttccagccctgcagagctcagtggacagttataatctaatacgctttagcgcttacaatatggtaaacacttccagttgtctgtgctttaggtctcttccttcctctaattctcacaatagtgttgtgaaggaagtgccatcccattttacaaatggggatgctgactgagtcttggagaatatatatgtattgtaggtccaaaggttcaaggttactaagatgaaataagcaggactcaaatgcagactctgtttacaagctgcctgtcctggcctttccctacctgtccttggctccaaccctcactctctgtgctcacaggcaacctaaaacaccagggattcctccccagggtagcacattggaatcactgtgggacaaactcctgcatcctgactcagattggcttccctacagatacacattttgcaaggtgcttctttgtaaccctgccagacacctttgttacaacatgatggggggcctgccctgctggactccggccttcctatccagctggcatcacctggctccttcaattgctcttaatcccgttgtttttcaggagaaaaatattttgacagcacagaagaatggtacatctggaggtct

SEQ ID NO: 1762 - DNA, 1000 bp, mus musculus
cagcaccccactcctgtcacacacactgcagtaacacagaggcagcaccccactcctgtcacagacactgtagtcacacagaggcagcaccccactcctgttactgtcttttgctctcaatcggtcccaactcattctggacccattaagctaatcacactataaaccctgaagtgccttctcattgtgtggctgccctggaactgactgagaaacctgttttcacgcaatttctctggaagaagtcccctgcagcccatttgcaaatgtgtgcatcgataaatcaaaagtggcagtggagggctggcatttgtgagaaggagaatggggaggtgggaaccacacaaccctcctatttctgagacaatcccctgatgcaatcacatagctttatctgaaacagtctctgagtaggaaggtctcctccagctgccttattaggtctttctctggaccaatgcttccagggctcctcatttcccaagcctggcaggaatgtttcctcctctcctgtcactctccactgagccaagggatggaaaccggctctcctggatgtttacagggttcctcttcggttgtcacttacccaggtagaacacatgccatctttcatttgtcttcattagccagtccccaaattcctttccacttgctcctctgtgcttccaccgtgatggcttatcctggagctgaaagtcttgggatgcgcagcgttccagctgcagctgacagaacacctggattttcccatcaggtcacagccatgttttcaatagagcttcctgtgtctccatctggtgctctgcaaataagtcttagctgtttggtcttagaggcatcgcagaataagatccaggttgacaccagcctgtgggggtctggagctcacacaccagcctgtaagggtgtagggagctcagctttcttgcacatagttctgaggtttccaatgaacacaaccttttctgtaaacaaaagcttttttgatacatagacc

SEQ ID NO: 1763 - DNA, 1000 bp, mus musculus
gaagattgccaaaacgccagtataaaaagatcaatgcgatagctcgagtcagggtctggaggtaagctcgctggtgaaatggaaaatctaggctggtccctaaggaccttgtgctataggggattttgagctggatgcagaagagcagttctgagacagaaatgaattttatagaggaaagtgccatggtaaacctcatgcccgtttacccttgaaaaggtcaggctggttgctatgtggaggagggctggacacaagcatgagagcttgctttatgacacagccccaggagacaatgcaggaatttgtgaaggaatggggcagggaacgaagccgacagtggcccatctagacagcagagttgcaccattgcataagataacctttcatggggtagcaaaaagtccagacatcacctgtattcttcagcaccagcgaaggggccgctcatcctgtctccaagcaagaagcgagcaagtacagttctgcgcatgtgttcgcgcagccttggtgtggatatccggcttttgcagaggttagacaggccgttgattctgctcacgaatttgaattgcaatttggaattctaaaaatgaaacataagactgtgtatggcaaaaacgcctcgttcttgaacagcatgacttaggtaccatttggagtgcagagaacatcgtgtcgggcctgatgggggagagtgggtaggccacccctccttcacaggatatttccgtctctctcctggattcagagttccctgtgttcttccgcgcaaaaagcacagcagcaggtgggaggctattctagctgtccttgtgatccaggcttggcaataaactgccaaagacagttataagctgctgagacctgtctgcccacgagtctgaggctgctggggtagcctagggctgagataatgtgcaggccccgtgtgccagggaacctgtgcaccccttttcagtgcaacagccataaagagaaaagcataaatctgacatct

SEQ ID NO: 1764 - DNA, 1400 bp, mus musculus
ttctgtggtggaggaggagcttcaactcaaggccatggaagagccaccagaaatagtcaacccagatatgaccctcatcaagactatcatggtgggagaacacccagagagtgttgctggacctgtggtcacttctacttctacatgtaataacacaatgggggtcttggtgactcatgtcacagaaaaggaagataggtctgtaggccacaagggtactcgaaaaatgctgatacaaaggcaccactttgagtcaccaaggtcattcaggattgatcagccttcagacaatttctatcatgtggactctgagatcaccaaaacagaggacaactgcaaagtctgccctgataccaagcaaagctcactggtgcaggagaggccagcacagcactctcaccagcacagaggagccatgccctataaaggcgaccttgttcaaacctctgaaaagtcaattccccaccttgataagccacctggacatgttcccactgactcaaatgctgccagctcttggtctgtgacaacccagatgtcctccaatctggtgtcagctgctcagagggttgcagacctagggacctataataaaggaacagcttttgaatgcactccatgtgaccctcttaataccacagacctaaaactgcagacagaaacaaggcaggtcaaggatgttgctgttcagacttatgcacatgaatgcaagctcaggccatcacataatgacttcattcatgggcctcggcccctcgccaaatccatctctttggatacaggttttcctagtatctccgcaacaggcttctgccacaccatacctgcccactgttgtgtctgctgtcatcactgccccaactgccaatggaggaggcaaagccctggcccagaaccctctatttgcaggcattccctgtattcacaagcagaggatcctaaagtgcagttcatgaagacattgaaaatactccaagacactactgtgagggacctgtgttctgtaagtgtttcctctacaaactgggatggcagatgcaccaaccacattctgacgctacaaagatagtgtttttcctcctttatagcagagaaaactcagagcatatctctttttttaagtgttagtcatgtttgttgagtgttttatagtttatgagataaattcatacattcaaggttataatatcaattaacctgtatcatctccaagtcagtataagtgagaattctgacttttaaatccagtaggctatataatcttgactgagctatttagagtctctagggcagtcatgaaaaacagtggaatggggactatggatgtagctcggtggctaagtacttgcatacggccctgggtttaatgcatttacatatatgtacatatatatatagga

SEQ ID NO: 1765 - DNA, 1000 bp, mus musculus
gtttcaacctataggaacagacaaggactttctgttttcagaatgtttgcctgcatgagatctacagaaggcagtaaatattcagtaacacttgagtatgggactcccagggccctgctctgcttggttcaagggggtgatgtcaatcaaggtctgctgaatgaaagtcattgtcttcagtgatagagccacaggtagtgagtgactcttgctctggtgaccagcttcactgaggtctatgttatccatagttaaattcagtatgtcagaaagcaaaacacaaagataggaatgtgggatgtggacttggtaagaaggagggtcaatgtgaagaaggaaggtaaggaggcagataggtggtaggaagataatgatggaatgtaggtagcaataggaaaaggggatgcacaggatgcaagatggagaggagaagaatgagtgtgactacagtgtattgtttatatctatgaagctttcaaacaacacttaatgttaaaaacaagaaagtatcaaggttttgccgagaaagcaagatagactggatcatgtacccactttaaataaaaggtttagttgcaatgttgaaaaatattgctgcctagtattagtaatattagtagtaacttgaactaattgtaatcattctatgctgtcatttctgtaaagtgcttatttgtatggtgcactaaatctaataatttatattcatacttcatttaatattcacaagtatctaagatacatattatcagtctgatgacaagatgagaattaaaacacatatatctttcaaggttaaatgaggtgtggagagttggaatcctttgtcccccgaatctcacctctaaatggcttgattgtaccaacactcaaagcttatgaaaacacaccaatgaaggaaatgcaatttgataatatttaacttttctttagttaactttgtatgtgattgccttggccccttctaaaaatccttcagattattttgggcagacttgat

SEQ ID NO: 1766 - DNA, 1000 bp, mus musculus; identical to SEQ ID NO: 1765

SEQ ID NO: 1767 - DNA, 1000 bp, mus musculus; identical to SEQ ID NO: 1765

SEQ ID NO: 1768 - DNA, 1000 bp, mus musculus; identical to SEQ ID NO: 1765

SEQ ID NO: 1769 - DNA, 1000 bp, mus musculus; identical to SEQ ID NO: 1765

SEQ ID NO: 1770 - DNA, 1000 bp, mus musculus; identical to SEQ ID NO: 1765

SEQ ID NO: 1771 - DNA, 1600 bp, mus musculus
ataaaaacagacttagtgaccaatgacatagaattgagcattgtattaatcagagttctatatatatacacatttatgcttacacatacgtatacatatgtatacacacatattaaagtaatttattaaagtggcttacaggctgtaaaccagctaatctaacaatgactctctactattggaaagtccaagaatacagtagttgttcgatctacaaggctggatatcatggtcgattgtcagtatacattggaatcctgaagaactaggttctcataccagtgaaggttctaataccttacagcaagaaagaggaacttgtcagcaacaaggagggcaaacaggcaaagaccgaaagcttcatttttccatacctttttatattggctgccataagatgtagcccagatttaggacaggtcctctcatcataaatgatccagatttagggtaggtttacgtacctcaaataatccaaacaagaaaaggtcctcatagaatgcccagctgcttgggttccagttatttcagaggtattcaagttgacagccaagactagccatcacaaatacccacacatgagtctacgcttgtgcaccaacctgatttttaacaaagagagaacaacaatatagatcttcaacaataaatggtgctggttaagctagggagccgcaggatggagaagaacaaaactagattctcatctctcaagttgtacaaaacttaactccactgagtgttttgtttgttttgttgttggtttttggacttgttgaccagaggggccaaaagctctcaagtatgataggatactgacaacgttcctggtttctctccagaacttgacaagaagactctatgaagacaccacaaactcaagtcttagaaaacagagaaatcaagctggtattcaaccactagatatctagtcctggaaggtgctattcacattaccagagaagaaacgtattatcaatcttacctagctgtgaggcctgagagtgactatcatgactttcctagcaagacattctcactggtacaaggtggcatgaatagcatgagagcaagtaaacattttctggatttaagtcccaagccacaagatgaaacctatacctagtaccattaataggatgagcatttatggctagacagttcctaggccatagggagaacctactactattttatgctgctaaatgggcatgttatcacactaactcctaatgactttatcattataacccctgaaggggataggaactccacaagaagaccaacagagtcaatgaacctggatccttggggctctcagaatcaccaaccaaaaaaccatacatgaactggacctaggcctccctacatatatgtagcagatgtgtagcttggtctttatgtgggtcccaaacaactggagcagggactatcccaaaagctgttgcctatacatgggttatgttcttctagccagattcccttgtctggccttagctggagaggatgtgcctagcttcacagagatttgaggtgccagtgtgaggggatatccagaggacccccatccattcagaggagaaagagagggaggtgaggg

SEQ ID NO: 1772 - DNA, 1600 bp, mus musculus; identical to SEQ ID NO: 1771

SEQ ID NO: 1773 - DNA, 1600 bp, mus musculus; identical to SEQ ID NO: 1771

SEQ ID NO: 1774 - DNA, 1600 bp, mus musculus; identical to SEQ ID NO: 1771

SEQ ID NO: 1775 - DNA, 1600 bp, mus musculus; identical to SEQ ID NO: 1771

SEQ ID NO: 1776 - DNA, 1600 bp, mus musculus; identical to SEQ ID NO: 1771

SEQ ID NO: 1777 - DNA, 1400 bp, mus musculus
gcttaggccgcctccccagccgggcgggcacctgtcctccggtccagacggtggctggctgtccccggcccacacagggtgctgcctcagcgcctctgtgcttctgcctgttccagaagctgtcaggttctctggcgcaccctctcacctgttcagactaatttcctaagttcggcgggtcccggaccaagatggcgaccgctgccgcttctttttgttctaaagctttcagctttcaggtttgctgtcgttagttgagctttctccactttttaaatgaaagcatttagtgctatgaactttcctcttagcattgttctctataagtttggatatgctgtgccctcattttcatttaattctagaaagtatttaatttacttctttatttcttccttgctcagtaatcatagaggagagagttattcagtttctatgagtttgtacgttttctgttgtttctaatgttgttgaaattaggctttaatccatggtgatcttaaaagatgtaagggatgcaatagcactccatagccaaatacctccgggaaagcactggcctatcaggagtgtggaaacacctgtgaacacaagtaagaccaccacttatgctcagagggactagcccagagccctcataacacaggacctgaggaacagcctgggacaggatccttcctgtttccatctgcactgggagctgatcctgtgccacagtgatccatgcctgaataccttcaggagagaattgaactcccaagagcgccaacgcacctgtgagcacaggtaagaccacaacttctgctcaaaatcctggcccaagggtgacatacccagagcgatcaggacacaggaaccaaggaacagcctgagacaggatccttctggtttccatctgcaccccagagctgaccctgtgccatagccctcattacccaaatttttcccagagagaactagtctcccaggagttacacagacttgcaggagggacaaaacacagtcagagacagaaagaccagctaacatcagagataaccagatggcaagaggcaagggcaagaatataagcaatacaaaaccaaggctacttggcataattagaacccagttctcctaccacagtgagccatggatacccccaacacacaggaaaagcaagattctgtttaaaatcacatctcatgatgatgatagaggactgtaagagggacataaataactaccttaaagaaatacagaagaacacaggttaacaggtagaagctcttcaagaggaaacacaaaaatcccttaaaaaatagcaggaaaacacaaccaaacaggaaggaattgaacaaaaccatccaggatctaaaaaaatagaaacaataaagaaatcacaaatcttggagttagaa

SEQ ID NO: 1778 - DNA, 1600 bp, mus musculus
agggaaccttcattcactgctggtgagattgtaaactggggcagccactgaggatatcagtgcagggaattctcaaaaggatatacatagatttatcatatgatttagttataccactgattggcataagaccaaaggactcgacatcctactccgcagatacttattcagccatgttcactgcttctctaagaaatgaaaacaacctaatgtcatttaactgaagaatgaataatgaaaatgtggtaaatgtactgtagcatacaattcaactgtaaagaataatgaaaccatgtattttgcaggtaagtgggtggaactagaaaagataatattaagttagataattcagattcccccccaaaataaatgttgcatgctctctcttattagaaactcctagtgtcatttcatcagatgtgaatgcatatcccaatggaatggcagaaaccaggaaagtgaaaaagagaccattgtcaagcagggatttagggagcaatggagaggggaacagaagtggggaggagggtaaaataatagtaattatgtctgaaatcacactattggttatttacctaaaaaaaccaaatatatacaaattctctcacaactctatagaagacggagtagccaccagtacccaagagagccacatggaggcttcacgggagcttgggtgatggagcatgaacctgctgagcacacaatatccatggaccaactcaagaaagacaggttttatcagagatgcctttaaaaaatggtttaatggaattggagcatagtagagggaagtggaactaatgacatggcaaggctgcagtagacaaaggacaatgtccttgggtcattatcaggtcttctcactccactgttgcctgcttggccagtgtcaccactcaaccacaatgaccaacatgacatgataatgccaggagtgtagtagtggcatgtacaccttagcagtacccagaagctctctagttggatttaagaccttttcaacaagaaaacaaccattcctggtactggaaacccagccaactagacagggatagtaaatcatggatcttggaggaaagcctacaaccaccactttactaaacacaaacaatctctaaaattactctctaaatgtttgttcttatatccacagatatgtttaatctttgtcctttgtcaaagaaatttctctttgtaacagagaccattacagataaaccacaatcaattaaacgtagagcctatttccaatagatacatttatgaaacaagtactacatttaattctcagggggacattgaagaatgcggggcagaaagagtctatgagccacagggttagggagactgtctcctagttatgtcagcaagaatatctgtaaagcctcaccgacatgattgcctaaacatgagctgaacaagggcgacaatcaacatgccaaagtggatggagtaggggtgggaaatcctgatacctgaaccatacacaatgaactagaagcaactgaaaaatgctgagtgggagaaataggcttccctggctgagagcactggtattggttatccaggaccaaatgggatccctgaaaatttacac

SEQ ID NO: 1779 - DNA, 1200 bp, mus musculus
tcaattgattggttgattgattgtggttttgtgtgccatggtgcacatgtggtgggcaaagaaccatttgtgacagttgcttttctacttccacaatgtaaattctggggactgagctcaggttaccagacttggtgacaagtgcccttacccactgaaccctcttgccaacccctctccatgactcttctttaaaaatatctttattattgcttattttacatgtacatgtgtatatgtctgtatatgtgcatgtgcctgaggttggggggggggcatctgctggagctggagctacaagcagctgtaagctgtgtaatgtggatgctgagagttgaactcaggtccttggtatgaacaatacatgctattacctactaaaccatctcaccagtttctcttcgtgactcttaaatacaatttctctccaaaattgttgtccgttgtaacaactgagaaaaattaaacattttgtgactttttttttaaatgttctgttgtttgtggaggctcacactggtaattccaaggccagcctgtgctacaaggtctcaccctgtagcacaggctgccttcaaagttatggtgattctgctgcttcacacatattgggattataagcctccctacattgggattgtaagtgtgagctaccattcccaggtcaaagtgttcttttaacctaatttcagggcaaataaaatagttatgtttaaatatcatacacatcaacatgccctttaattgcacaattctaattacctttcaatatcagaacaatgcctttgattatttatgtattcatttaactttggagagttgaaaccctaacaccaaaaagtataaccgcatgacagattacataacgtaccttaaaaggtaaaggcacggctgactgcaggctagcaagcgatgcgatggacactgtgtttacttttcaagggttttgttttgtagactatggaatctacttaccatttcaatccttttcattgtttcctttatcctaagcttaatatcttggagaacactatttccgcagcacatacagcaggggtttctacctcagccattcaggccaccccatatcaggtgacccttcctggctccacatcagattgtgaccaggtcagggagcagtcacacaaacccagagtgtccttctacactgtttctttgagggggatggaggctgagagt

SEQ ID NO: 1780 - DNA, 1200 bp, mus musculus
tagtatttgctcacacctgtagttcttcccagcaacccctttcaacctttccttctagcctgccaatgtcactccctgcccatgtcactcctctaccaggaactccaaagctaccacacttaggtaggactcaaggaacccatagctaccacacatgactatgacccagattgggcaaggaatagaacacctcccaaaaaagatgagatgccactggggaccatggtggtgtcctggcctgtgctgctacaaggggccacctcttggtccatggccctacagcagcagaggtctgctgccaccaaagttctggtgtacatccctggaatgttgatatctgagtgtgtgcagaactgaccctacccattgtgagaaagctggccttggcagcaggagagcagaagagatgacctcacccctaggcagctgcagtattctggagagcagccctgcacattgtaggtgaattggccttggccctggccctgaggatacaagcatgggacaggtgaccctacaatttgttttccatgccatggtatagataagggagagataccctccttcctcctcacccttcaccacctacagcagggaggaggcttggtcctgggatcatgagagcaggagacctggtcctgatcctcagcaggtgcagcactctggagagtgagccctgtgcctccctagacagcacagtagagctgaccctgatggtggggatgtgggagagctggacttgagggtgtgagatggaacttacctgttatgtggtgttattggcaagggagagatgccccttgccacctatggcaggcgggagagctggcctcagggttaatcagaacagtggagttgtgctgaagcactaaggagagcaggtcctgcacctcatctgggcagcataagcagactagaagacagaaacactgggatcatctcactagatgcagaaaagttatttggcaaaaatccaacatctcttcttgagaattgccctaaagactaagagtataaggggcatactgcaagataataatgacaatttacagcaagcccccacaggcaatatcatcttagatggaaagaaactcaaaatttccattgaatcaagaacaggacaaggacatccattctctctatttaatacaacacttgaaatcttagctaaagcaataaaacaactgaaggaaatcaagg

SEQ ID NO: 1781 - DNA, 1200 bp, mus musculus
agtctttcaagggttaggtgcatcttctatcactggggccagaccagtcctctactgtctatgtgttggggggcctcatatcatctggtgtatgctgcctggttggtggctcagtgtttgagagatctcaggtgtcctggttagttgagactgctgatctttctatggggtcaccctcctcctcagcttcttttagctgttccctaattcaaccagaggtatccccagtttctgtccactggttggatgtatgtatctgcctctgactctttcagttgtgtactggctggttttgtgtgtcaatttgtcaagctggaattatcacagagaaaggagcctcccttgaggaaatgcctccatgagatcgagttgtaaggcattttctcaattagtgatcaagggtgggagggcccattgtgggtggtgccaaccctggtagtcttgggttctataagaaagcaagctgagcaagccagaggaagcaagccagtaagtggaattcctccttggccactgcatcagctcctatttcctggcctgcttgagttccagtcgtgacttcctttggtaatgaacagcaatgtgaaagtataagatgaataaaccttttcctccccttgcttcttggtcatgacttgtgcaggaatagaatccctgactaagacaagccccttgttgggcctcttggatggcagctatgctaggctcctgtctgtaatcacgccatagcatcagcagtagtatcaggccttgcagcccttccttgagctggaactcaatttgggcctgtcacttgacctcctttcccttaggctcttctctatttttatccctgtagttctttttgacaggaacaattctgggtgagagtttttgactgtgggaggggaaccccattcctccacttgatgctccatctttctacttggggtggactgtacaagttccctctccccactgtagggttaatttattttcttttcttcaacccttggtaaactttgaagaagaaatatgatcctaggaggtcaaactaagtttttgttttaagtagaagagagatagtcacctactttgtcttaatgatactgatcgtggtagacattaatgtgaaggcgatctagaattgtaggttattgtagataacctctactctaaactgacatccaaagcttcttcctgcctattccagaagtgaac

SEQ ID NO: 1782 - DNA, 1000 bp, mus musculus
tctattcgctttctagttgacaatctatttcccgtgttgatttttttatttttgttttgttttttgagacaggatttctctgtgtagctctggctgccctgcaattcactctgtagaccaggctggccttgaactcagaaatctgcctacccctgccttccaagtgcctggattaaaggtgtgttccaccactgcccagctatagtctatttcctacttatactgcttaagaatttcctgtactgttgactacagttcaaatatctttttctttcttttttccatagatgattatattgaagccatattcacctttagtggagaactgaacatctctgctgagttatgatggttaattttagatgttggcttccctagataacaagatgtgcagatagatagtaaaaatgcagtgcacagctcttattcctgggatagatttaggatcctacagcccattcattcctacctcccagacttactctttattactctgcagtactatttactactctccttttattcccctgaaattctgcctcttgttcctaattagttctttccttcttaactactcaaccttcccttctagccaatcgttattcctttatgtcagtaactgatatacagaaacactttctaccaggaactcccaggggccatattgggctgggattcgggtaggtgattttcactatgcttcctcacccccatctaaatctctccaggcttattttagttcttcagcaacctgccaataggagcctctcctcccaccctacctctattatctggagatgccttccctgggtgcagacccagacatcacaccccacccccagctctttcccactgcttctcacaggctttactttcagctcatttgctattcctttgaatacctacctacacagaaaagcactcttgaccccacagtaacaatgttttgtctaggatccagagtgggaaacaacaaccaaagaatgtaacacttacccaa

SEQ ID NO: 1783 - DNA, 1400 bp, mus musculus
tttgtttatacaatccaaactaaattataaaagattgtcatgtgccttacctgctggaagcagagggtcatcattagctgattttccatatcacaacttccatacatatggtaatgaagaaatatattaactatgaaagtttacatgtctacagacaacactgaagtcaaagaggccctgaaaggattcatccttgaggatgctaaaagaatgctcagatgctcagatctattgctaatgctatgatgttctatagtgttcttaaaaaaggaagctagcatgactgctcaatgagaggcccaaaatgatcactgatagagaagcacatattaaaccaaccaatggtctgaaatagagatccctgttgttgaaatagggaaaatctggaagaagtttaggagaagggcaatcctttagcaagaccagcagtctcaatgaacctggaccccagagaactcttagacaaaaagccaacaaccaggttccgggactcctcagaaagttgtctgcacaggcaagagtgtggactacagaagctaacagcttctggtacaggcgagagccacagagcttctgaggcagcaccgttttctggctccagacatctggccacctcccggccagaggacaggggtctgcccagcccgggaggctaggattttgactcaggatgggtgggagccaccttggttctcagactcggcagaaagcagcctacacaggtgagagtgtggactacagaagtaacagcttctgggacaggtgagagccacagagcttctgaggcagctccattttcaggctccagacatccggccaccttcccagccagaggacaggggtccacctggcccgggaggttcctcaggatctgcggaagccatcttggctccgggactccgcagaaagttgtctgcacaggcgagagtgtggaccacagaagctaacagcttctgggacaggcgagagccacagaattctgaggcagcactgtttttgggctccagacatccagccaccttcccggccagaggtcaggtgtccacccggcccgggaggccctagcttcaggatccgctggagccattttgttccaggactccacaaaaagtagtctgcacaggtgagagtgtggactactgaaattaacagcttctgggacaggctaaagcaacacagcttctgggaaaggtcctgttttggcccttcatcttcggccaggaggaggtcaaatgccatataactgtgcacctaccctgtaagcggtgagctcgcctgcagagactgctctgaccactgaaactcagaggagagagctagtctaccagatctgcttatagaggttaacagaatcaccagaggaacaatctctaaacagagacaactataaacactaactc

SEQ ID NO: 1784 - DNA, 3400 bp, mus musculus
gttgttttcccttgtagaaaggaaggatactaagtttttccagctaattttatattcataaatattgctgaaattgtttatctgctgtaggtgttctcaggtaggactttttgggttgcatatatactattgtatcatctgcaaatagtgatatcttgagaaaattgtagcaattccactgaaatcaaggacacatcaaagcttcctaccctatccttatctatttagtatagtacctaaattctaattaaagctattagataacaagggacatctagtggatacaaattgaaaagtaagaagtaaagataatcactacttacagatgattgttttcttgaaattactttatctgaattaggtaaaagaactcctgtttagtgttgggagctattaagacaacacaattgtcctgatgtctgaattggtcctctccccctgaaaagaatagggtgccaaaagcgggccaccaacgcaccacttcgagaacaaccacatattgttccagccctaagtaagtgccggatgtcctgaccccaagatgtaccctgatactaccaagttcctgcttcccagtgaaatttttctattgtcccacccctcctgctgataagtacctgtacttccccttttgcttgtgcaattctattgccccaccctttcttctaaaaggtacttcctcttttgcttgtgcatttaaaccttgggcctggctaatacagtgggaccttaatgccactcagaatgtttctgtgttgttcttgcacaaggttctcatctctctctatccccccatttcattcttaggagaaggtcccctctagaccctcgaataacaggacctgctggacaggtcagtttagaccccaagggaaaatagggttaatctgaaaaaattcaaaaagaaagtaagaaagaatgaatgaactaagaaatgaactttagccttagtatttcttgcctcaactttgtttttgtctatgtgttcaccagacagtcatgtgttgtttagtcaggctatttgttttacatccagtctatgtgttatttgtcaagtctaggtgttgaccattttctgtgtgacagttgtttgtgatagctgttttgaagttgatttgcatgcatatggtagagaaatcagtatctgagaaagtctgtgagagtaaatcatctgggctctttttttttttttaatgtattcatgtcctagctgatatgagattttccctggtcagatttaatctttatgaattttgttgatatgtgtattttcatttactgtacatacaggaacataaccacattctcaacttaaaactattgcaggttttcattctaatgtcaacacactcttttagtatatttgttgtcatatttccttagatttttagataatacagtgtctctcatttgctgttctttcttcacaatcattaagacaatttagtgttaacaaggcattatttagtctgtcccttgggatttttactctctctttttgattaattagcatctcacttaaggtacatatggctcttcctataactgattgtcctttgggcttgtgtgatactacaataccatgctttatattgtaatatgtaggcaattgtttcctgttattatctaatatggaacattatcagttttaatttgtgcaggtaacaccaaaactttcattatttccaatagctgtgtaataaaactatcaggttttcagaacttcaaggagttgcacacagaaaacgtgagtacatgcctattttatggtgtatatatgtttgttttctaacttctgcaaaatggaaaacttccatctgtcttttgttttgttactcctaggtacaagcaggtaatcaaattttgtggtatagagaatatttagggctattattactattattattattactattattattattaattttattattaattttatttggcttgttttcaagtgatggagttttaattctttaagattcttccaagtataggttgttttcaggaaaatttttggtttatcactcattacctaataatatctggtcaatttcattatttccttaagctaatcgacatggcaaacctgtatgagactgaataggagtaatatatagtgaatggtttctacttctgatggcctgttgtaattgtataaataataggattaattctgagttataaggtacaaactcaacaatttctacatgcagaaaaattcttcatgcatataaagagtcagtgattataataagagattaaggataatctgttaataccataaggcctgcatatatttctgacttttgaaccatggtagatggactttttagctccttctttatttgatctaatttataacatgtgatcctcatcttgtttataactgtatagaatgttggtttctttggtatttgtgtgctctttacaatatgaaatggtacaattccttcctttttattggctactttctttatttacatttcaaatgttattccctttccaggtgtcacctctggaaagcccctattcctacctgccactcctgccttcctgtcctgacattcctcttcactgaggcatcatatgcccttaggcccaagggccactcctcccactgatttccaacaatgacaccctctgccacatatatggctggagcctgggcacctacacgtgtactgtttggttggtggtccagtccctgtgagctccagggggactggacagttgacactgtttcttctcccatggggcagcaaactcctttatgtccctcagttctttctccaactattccatctgcaattctgcactcagttcaatggttggctgcaagcatctgcctctgtatttgtcaggctctcacaaagcctatcagtctccagacatcaagcacttcccagcatttgcaatagtgtccaggtttggctactctatatgggatacaattccttcttttataaattatattcatttgcttttctggtatttggtactagttttacccaaatgattactatagtttctttgccaatctccaatgaccatgctatatcagcacatataagaggtactacaatttaactggacctgtccctgaacattgacctaatctaatactacctattataagtaacttggaaatcttttctataaatgtcttcaattttttgttttatgagctaagaaaagccatttgatagtactatcttctctttgcacaatgagcccagtaggagaatgaatttaggtataatgactaaaatatgatcaagtataggaacaatttgatctatgtatgcattgtgcagttcttattctacaataattaattccctttttgcttcagctgagagacatcttgggctgtttaagtttgaataatgtttgg

SEQ ID NO: 1785 - DNA, 1200 bp, mus musculus
ctttgtgtggcatcagtgtagctgaggcttcatagaacgaattgggtagtgatccttgtgtttctatattgtggaatagtatgaagagttttgatattaggtcttctttgaaggtccaatagaattctgcactaaatccatctggtagtgggcttttttgcttggaagacttttagtgactgctttgatttcatgaagggttatgggattgtttacatgctcttgctgactgaagcctgatatacttgtcccctgagaggctccaccatatcctgacagatgcagatgctcacagccaacaatcagaatgagcacagggaccccaatggaggagttaggggaaggactgaagatgctaaacaggccttatcaatggaatcaatggaaggggaggccctggattctgtgaaggcttgatgccccagtgtagaagaatactaggatgatgaggcaggagtgggtaggtgggtgggggagcaccctcatggaagtggggtctgggaggatgggatagggggtttgatgaggggaacccagtagagaagatagcattcaaaacttaaataaaataataaaaaataaaattctaataaaagaaaatgagaaaagtcttttgttggtgagggtttttgtttgtttgtttggtgttttggtagcctggttggttttgttatttgaggaagttgtcaaagtgatttattctgaaatttagaatctagaaagttacagagatcaacagttgctggtgcttccatgcataattgttcgaaacccagacaatctgcattgcttagactcttgtgtcctggatggctctgtggattcagattgccatggtagactacaatttaagattacttagtgagggactgtggttaaatcttcctgagggcaacagacactggaatagcattcccataatcagcatacatcataatcacacatatgggcaacaggaattggatatgatggcaaagaaaggaagtgtagctgacttttgatgttctatacgtacttctatcttctacccttgtccatttcttttttacacactcaaccctctaacaatggataagaggaaagaataatagaggggaagagagagacagagagagaaacagagcaagagacagagagacaaagatatagagcagcacagaggacactgaatcctttcttgttttatgtttgagaaataca

SEQ ID NO: 1786 - DNA, 1000 bp, mus musculus
gactagctctctcctgagtttcagtggtcagagtatactgtgcaggcaagctctcctcttgcagggaaggtgcccagatatctggttttcgaacctgcttactggcagaagttgtgttccactcaccagaggtcctaagatcccatggagagtcctctggggaccttgggggtgtccccagactctgcacccaaggtgccccggtgctggtgctggtgtcgaccctggtcaggccgggttttctgcttccctaattaatgctttctcaggtcctgaacaattggattagagcagcagttgtgttccactcaccagaggtcctatcatcccgtgtagagtcctgtggggaccttggggatgtccccagactccatacccaaggtgcgttggtgctggcaccgaccggaagggacagagtgtttctcttttgtttcctgtttttcttttataattttttggaaaagatttaggcaaacattcgatttatgttagagaaggtcgttgcattggataagagtttgcaaatagaggtagaactgcttcaaaagcaatgaagagccagtggaaggaaaactacagcgtttagaccttgtgtctgacaccagaaatatactacatgatgaaaaaggaagaaaaatagtctggaaggtaacctactgccgtgaggtgctgcatgcattttgactgccattttcccagagaactatcctgaaattaacagttgagaaaagtaggagatgatacaaatagaacctcatagtgctcagccgagtccaccaccagaggatctgcttagacctacccaggtactttcagccttacaagtctttctgcagcatatgccttataatgagggtgctcccgattatagctagctaagctggtgtctgatagaaatggcagacctaaagcattttgaagaggccacagaattgtgtgcattatactctgcatttatttaaaaaatattaaatacttgggctatgcagaatagagttat

SEQ ID NO: 1787 - DNA, 1000 bp, mus musculus
aatgtgagagctatggggattttgtttgtttgttttcattgacttgtcttattcagctttctactacagtgacaaaagcaatgaaaaaataaacttaaagatggaaacatttgcttggtcttaacattgcagaggactcaattcacagttaattagccccattgcctttgagcctgtgaggcaataacatcatgtcaaagagaatgtggtagggcaaaattgtgttcctcatgtctgggaaatgaagacagacataaaggaaaggctactactgacattaacctaatttcatcccactaggcccagtcctttaaaggttctgtcggtcactgagcaacacttctgggcaacaacagttctcaagaagtggacattatccttcagggcttgcccttggccctgccaacataaccttaaccatagcgcctcaggctgaagagagaccaaatttttatcttatgaacttccagaagacatttaagattcaaaccacagggtcctagaagcagaataaatgcttagggcttaccgttttaaataaaacacagtgtgatttgtagcattggccatcttctgtggcatcaatgcaacacatacctgatcacaaattaccaaaccaagtcactaaatgcattgttatgaaagcagctgcttctcttgactgtcttttctgagagcttctgctcaggattggcatcccatcatccaccacactgtgcctttggtggactggtgtatacatgctttgttactgaatgatgcctcctgtctgccttcccacagccataagaggtgacagatattcaaaatggagagtttatatttaagttgcactctattgtctagaataaaacactgagattattgttccccttagtaagctcctttaagactatttgcaggtggccttggggctagttttgacaccgtcctctcagcgatggtaaacatctcagtctcctgatatgatcaaagaccaccagttaaaaacacctaaaag

SEQ ID NO: 1788 - DNA, 1000 bp, mus musculus
gggcagagaggtcaattccactgcggttttcatgagggcactaatgttgacatggcacccgagggaaatcaatttcctggtgaccacaaaaactcaaaatgagagaggaatgtggactctcgttggaaagacagcagtcaaggaaaagaaggtgtcagcttcagggatgttaaggatgttaagggtgtctgctagcttgtaagtgagtcttttggatttgcatgggctctagtgcaggttattcaatagagtggtacattttagactgtattctttgctttaaagggactttctcatgtaagacagatcagcatccagatcatcactggagacatcctgtgataatattgtgtccttctttgtttgttttccctacttgtgaaagagacaagtgacacatgtgttccacaaattgtgaagaaggaagaatagccacttttagtgaagaacagatcttatggattgaggttttatttcatcttacaattccatgatactatctattatcaaaacaagacgaagccaaaacttaagtatcaggaacatagaggcagagattgtatagaaaccttggaagaacacttctttttttttttttttttacacatttttttaattaggtattttcctcatttacatttccaatgctatcccaaaagtcccccatatccctcccccctactcccctacccccccccactccaactttttggccctggtgttcccctgtactggggcattgcaagtccaatgggcctctctttccagtgatggccgactaggccatcttttgatacatatacagctagagacaagagcttcggggtactggttagttcataatgttgttccacctatagagttgcagatccctttagctccttgggtattttctctagctcctccattggggccctgtgatccatccaatagctgactgtgagcatccatttatgtgtttgctaggccccagaatagcctcacaagaaacagctatatc

SEQ ID NO: 1789 - DNA, 1000 bp, mus musculus
aaaaaaagaaaagagaatgctaaaatggagttttatattttatgtgtcttataatgtttccagtcttaagtgaacagttactaaagatttatgcagttcttaattttaatttttaatttttttttacactccagattttattcccttcccggtccatcctctgactattcctcatcccatacctccttcctgcactccctgtctccacgaggatgtccctagctttcacctcaccccaaaagacctcttaacaccctgggacctccagtcttttgtgggttaggtgcatcttactgaatccagacctggcagccctctgtatatatgatggagacttcatattagctggagtgtgctgcctggttggtggaccagtgtttgagagatctcaggggttcaggttaattgagattcctggttctcctacaggttggttgtgtgcaaatatctgcatctgactctttcagctgcttgttgggtattttggagggcagttatactaggtcccttttgtgagtgctctatagcctcagtaatagggtcaggccttggggcctccccttgagctggatcccactttgggtcagtcactggacctccttttcctcaggctcttctccatttccatccctgcagttttttcaaatgggaacagttatggctcagagctttgactgtgggatagcaaccccatcccttacttgatgctctgtctttctgctgaaggtgaaccctacaacttccctctccccactgaaggacatttctaaggtccctccctttgaatcctgagaggctcttatgttccaggtctctggtacattctggactgtcccccaacttccaagctcctgaggttgcctgtttccattccctgctccccacccaaccaataccagatcatgtttccctcttcctccccctcagcctgcctcccacttgtgattactttcttctccctcccaagtgggagtgaaacatcctctcttgggcccttcag

SEQ ID NO: 1790 - DNA, 1200 bp, mus musculus
tcccctccccaagttcttcatcccattgtatgtccaacttgcctctgagagggtgctctcccaccaattcactcatgcccaccttatccccaccgtcatctcccttccttgaggcagcatgtctctctagcattaggcacatcctctccctctaaggctagataagccagtcctctgctgcagatgtgccaggggacatgaaccagcacatgtatactctttggttggtggcttagtctctggaagctaccaggaatccgaattagtagatactgttattcttcctatggggttgcaatacccattcagctctttcaatacctcctctaacacttccgtgggcatccccgacctcagtccaacggttggctgtaagtatctgcatcagtctcagtcagcttctaatagtaattctcagaggacagccatgttagactcctgtttgcaagtacagcatggcatcagtaatagtatcagggtttggatcctaggatggatcctaggatcataggatggatcccatgttgagctggtcactggatggtctttccttcagcctccaatccatttttgtccttgtattttctttagaaaagaacaattctgggtcaacaaatttgaaggtgggtatgtggcccccatgactcaacctggggcaatgtctatatactatatatgatcttttcatgttctaactccctactgttgagcatttggctatggtcatctctgagtcctgggtgtctctcatatccctggtctctggggctttctagacaggttctcaccctctgacaccatttctgcctctcctccctctccccccctccgcagcatattttcactcattttcctggccctctgggcttctctcctgtctccccccatacctgatcctgctcctcctttccccttcctctctcttctcccatccaagttcttccctcattctgtctcccgtgacacctaatttaaaaacttggttaataaacacaaagttggaagggagatatactaaatgtccaaataaggctgtgcctaagagtaataagataatacattaaaaatcccagtgccagatgagtgagtcaaccatagaaattatgggtaagagactccatattggtcactaagataatatatgctcttacatattttttattgttttcataccagaactaagtgataataatctcttgt

SEQ ID NO: 1791 - DNA, 1200 bp, mus musculus
aattcttacccagaattgtttttcactaaagaaagctgcagagaaaagaatggagaagaaacagagggaaagttccagtgactggtccaaattgggatccatctcaaggggatgctccaaggtctgacacttttactgatgttatggtgtacttacagacagaagcctaacatagctatcatgagaaacccaacaagcagctgaccaagatagaagcagatacttacttacacgcaatcagtgtactgtaattggggacacttgtagttgaattagtgaaatgcttcaagaagttgtgaaggaaggtgaccccaaaggaggacgagcagtttcaactaacctagattccagagatctcttgggcactgagccaccaaccaggaaccatactcttgttggtaggagcccctgcttccctatccccgacacatatacagcagaggactgtgtggtctgtccgcagttagagaagaaacacataagcttcgagagatttgagggcccagggagtggggagacctgtctgggtggggtattgtagtgtggggtgggtgggcattgggttggtgtgatggggatatcctcttggtgacaggggccctggaggaatgggataatgaactgtcaaagggtgaactaggagggggataatgacttcactgtaaaaagatattaaagagattttctctctgttgtctctctaaagcgagttcactgaggagaacacaggccacagaagcagcagagcagctggaatagggtcctaagggcctacatctatagcaaggaggtggggctgatcctcagtcctctgtgcgccttccctgccagaggagagcttgcctccaggaagtgtctgaccacaggactgaggtgagattgccattttctctctggtgactctctaaggatcatccactcaggagtgcagaggctgcagaagcagtagagcagctgggacagggtcccttggacctaaatgcagccaggagaacaggacgttcctaagccctctgcccactgatcttgccaggagagagctagtctcctaggagtactgacacaggattacagacttatagaaggaacaagctcaatccagagacagcaagaatatctaacaccagagattagcagatggcaaaagacaaacacaagaatcttaccaacagagaccaagactaattgggatcatcagaa

SEQ ID NO: 1792 - DNA, 1000 bp, mus musculus
aagaattggaatccacgtaggtagctttcaagagaatgtgatacttatatacaatgtaaattactcaatataaaaacaaataaaataaaaggatttccagaaaaatggatataacagggagatcattagcataaacaagataaaccgattcatactctaccacatcacatagtctgcctgtctcccaggaggtctgctctaactaggcacacagtaggcttgctcttggcaggcacattgaaggctccctcaaacaagtcatagcctggtctgtctcccaggaggccaggcctaacctaggtcacagagctctaccttcctccaaaggaggccagctcagatcagagacatcaggccagttaacataagaaataaacaaatggtgagaggcaagtacaagatcaaaagcacaaaagccaatgcgtcaaccgaaccatcaaaacccagttctgtaaccacagcaagccctggatagcctaacatacctgaaaagcaagattctggcctaaaatcccatctcatgaagatgatagaggcatttaaggaggatataaatcactctcttaaagaaatataagaaaacacaggcaaacaggtagaagaccttaagaggaaacaggtctcttaaagaaatacagactaaaccaccaatcaaagaaaacacatggtgggactcatggctctagctgcatatgtagcagagaatggcctagtcagtcatcagtgggaggagaggcccttggtcctatgaaggctctgtgccccagtgtaggagaatgccagggccaggaagcaggagtgggtgggttggggagcaggggaagggggaggggatagaggattttcagaggggaaactaggaaaaggggtaacatttgaaatgcaaataaaggaaatatctaattaaagaaaaaagaaaaaaaaagaaatacagaaaaacataatcaagcaggtgaaggaattggacaaaatcatccatgtcctaaaaatagaaataaca

SEQ ID NO: 1793 - DNA, 1200 bp, mus musculus
ggcatttcctggaaagagtgtgctactactaagagaagaaagcacagaggagagataaagtcaaatatttccacaaatgtaaaaaacattaactaacatatagcttggttagcatagagcccgaagagactcacttagtgttctttccactaatattctaatggggcctggggctttgtggatttgaagcaattatataatccctccttttatcagaattttagctatgatttaccattttaaaaatgaactaatgtggtccaaaattgatttacctttgatttatgtacaataaggttttatggaactttgaaaaacacactaaaggcacgttagtatgtaaattctatgatgattaaaaggtgccatgccaatgcatgtataactaggcattgcagcttatgtaattctataaatactaagatgaaatgctaaacaaaatcaatcatgaaaatgcaagataagtgttttggtttctcaggtccaaagagctcctgggcaatgtgtattcaaaggctaaggggtaatctccaagaacagaagcaaatatgaaatatttgagaattaataacagagtagacatagaagagactcaccgctgtaaatgagacatgatggaatttgtacaaagggattttcactgctaatggcattatcatttcactgcatttgcctttatctgaaagtaaagaagatattccagaagtttgtggttgtgctttcttttgttttgtttttctgcaagtatctgatggtctgagataccccattttatctcattcacaatggctattgtcaagaaaacaaatgacagaagatgctggtgaggatatgaggggaaaggacatgtacacaatgctgatgggaatgcaaattagtgccacactatgcaaatccctatggtgattctgacaaaagctaaaaataagtccactatatgatcaaactacactatttctgggaatcaaaacccttttctaaaaagattaaaaacatcttcattatgtagtctttcaaaccaaattttgaggtcaaaaacactaaggattcagtctctggtatcatctgaaaaatgtgaatcctaatatatatatacttcagactattattcctgagattaaatgacagaacttccagtttttctgtgcttgtaaaagtttcttcatatgcagtatttacctccccaacacaccttctctg

SEQ ID NO: 1794 - DNA, 1400 bp, mus musculus
atgctttgcacctgcatttttgttgttattgtttagatttaacagtttcattgattgatagagccatttcttcttttttcttgtcttttctacccaacattcagtctcacacttctcacacttgattaaatctgttgctgagttttccctcttagcttttctttttaaaagattcttgagtttttcatttatttcaaattttatttgaatctagcttttctccagagagtggacatctttattaaattccattttcatatatttatgaagtaaatatatatttcatatatttaagtgtttttttttctcgctcaactctggtctatctatctgtgttcagaaatgtattcagatcctcttatggttccttgagtatatttgtaattgttatgttgaagtcatcgtttagtgcagaagctaagctgcttttacagggtaaactaggatgacaatgctagttcctggaagagacagtgtgtcgctttttcctgtttgtgcttttgtggtatgatttaggctcctggagttctgtcatgaatggcattttttggtatgggcatctgcactagcctttttggtgtgtttatgcatgcttttactccagtgtacaaggctgtagatcagcttgatgtcactgatttttcaaaccttggctactctgggaatgtgcataagacttgtcttggttgcaggttggaacacagtttttgtagcagacaggcaagagtgagggacttgctctggagggcctctaacgaggtgaggccccacagaagagaggaataggaaagtgattatcaggtaggcaggccagtggatttgtactacaagtttagtcccagatctttgcagtagatgaaatacctaataaatgggcaggcaggagattgtattggctctggaagtctctaactcaggctcaaggtgaaggttcacacagtctgaggacccacttatataaaaatgtattccttttttctagtgattaaattgctgtttcaccgaaaagagttttatgcaaggcaggcccatgaaaataaagaattccctgggctaaatagttttagcaagagagtcaggcaccatctttcatgaattttttttttaaacttacactgcactggaaaaagctacaactgaagatataagttcattttttaaatcatcacttaaaaccatgatgcaagattgcaaagccctattaattattagactttgatcatatatacatgttcctaaaatttgatattaatttataattttcatattttttctgtttctaattacctcactggctacttcagaatgtttgtcatatgtagtcactggttagtcatgtgttctgtcccaaacacaaatgaagagtataatgctttaacatttgttaagaagttgtattt

SEQ ID NO: 1795 - DNA, 1000 bp, mus musculus
ttaattagcattttaaatataaggagtattttttagaaaattcttgtttaaagtgttaggttctgctatttcaaatattcagtattcaaattattcaactattactgctggattgttattttgttgttgttgtttttcaagacagggtttctctgtgtagccttggctgtcctggaactcactctgtaggccaggttggcctccaactcagaaatccacctgcctctgcctcccgaatgctgggattaaaggcgtatgctaccacgcccggcttgaattgttattcttttaattttttcccccaataagtgtattctgaaaaattatgaaaattgtatgcttttaataatttttctcttgtattttatgttatttttatttttgcactttagggatcatacccatagttttttacatgctaggcaagcactctagaactaaaccacatcccagtcctaaatttttttcccctgtaaaaaatattcaaggggggcttcatctagcagctgattgaaacagatgcagagacccaaagccagacagtaggcagcggtcagggaatccttctgaagaggggaggattgcttatagaagccagaggggtcaaggataccacaagaaaaacctcagaatcaactaacctgggcctatagggaaccacagagattgaatccacaaccagggatcccatgtagacctgacccaggttgtctgtatatatgttatagttgagtagcttggtgttgttatgaagctcctaacagtggagttcagactctctctctctgactcttttgcccacttctaggacacttttcctcatattggattgtttcatctagccttaatacaaggggcagtgcccagtcttactgctcaataagccatgtttgcttgataaccatggcaggcctgccctttctaaagagaaatggaggaagagtgaagggggagagaggaatggaaggtaggagatactctgagcaggatataaaaaaat

SEQ ID NO: 1796 - DNA, 1400 bp, mus musculus
aactgtgtgatcattaatgtttatattttaataatatttgttttaacagtttactattagcaacttttataatattaaaattttataaactaacgtaatgaatcccagttaagatttctcagcctaaataattaaaatttttttgagttcaagcttttttagtaccaaaatatactttacaccacagttatcgtccatcaagaaactgggaacttcatttttcatagcatatttttacaaaaatcttaatttatttaacagattgtgtatatttagcagtttactttatcatagggatatgattacagatgagaactttacaagaagatatttataagaatataaatcactgcaattagtgtttatcataacttttgttatgactcaatttttctttcttttttttaatttatttattatgtattttcctcaatgacatttccaatgctatcccaaaagtcccccataccctgcccccccacttccctacccacccattctcattttttggccctgtcattcccctgtactggggcatataaagtttgtgtgtcccatggacctctctttccagtgatggccgactaggccatcttttgatacatatgtagctagagtcaagagctccggggtactggttagttcataatgttgttgcacctacagggttgcagatctctttagctccttggatactttctctatctcctccattgggggtactggttagttcataatgttgttgcacctacagggctgcagatctctttagctccttggatactttctctagctcctccattgggggccctgtgatccatccaatagctgactgtgagcatccacttatgtgtttgctaggcccctgcctagtctcacaagagacagctatatctgggtcctttcagcaaaatcttgctagtgtatgcagtggtgtcagcgtttggaagctgattatggggtggatccctagataaggcagtctctatatggtccatccttttgtcgcagctccgaactttgtctctgtaacttcttccatgggtgttttattccagtcttcattcttctagagtttcatgcatttggcaaattgtatcttatatcttgggtatactaagttttgggctagtatccacttatgagtgagtacatatttctaatttttctaaatggttaagacttaacaaagtttgcaagaacataagtgattaccatgattatatatgcacttataagttagtttttatttccatgaacaaatcgctagagccttaagaaattataatcttaatcctcaaacatagcacccttaaatcccatccatcataaatcatgtttaaattattcaaaggttttataacttgatttcaagcttttataattttttgtcctcattg

SEQ ID NO: 1797 - DNA, 1200 bp, mus musculus
aaaacctttcaagttacactttactcaagcacaatagccattgtggctgtgttcctcctcaggcaacaagttatctgaaaaagattatttgaaggcaaaggccagtattcttgaaagagttacattctcagaacaaaagtcttcttgcttaatgtattagtcagggttctctagagtaagggaacttgtgtgtgtatgtgagagagagagagagagaaagagagagagagagagagagagagagagagagagagagagagagggagggagggagggagggagggagggagggagggagagagagagagagagagagagagagagagagagagagagagagagggagggagggagagagagagatgaaagcaagcaggcaagaagcaaaaacttcctatttccatgttcttccatctgcctccagcagatggcgtgtcccaaattaaaggcaggacttcctatctcaaaagacctggtcttcccattcaaagatcctgaatagaaaaaaatcttcccacttgaaattaactaaaaatccctcactggtgtgccatgtttgggggttttaccatttcagaatcagttaagttgaaaaccaagaacagccatcacacttagggtcagggcataaaagtgactaactactaagagtcacagaaaacgtgaagaactggttgcactgtgaatctgtgatctatgcttcatcagaaaggagagcaaaagtgggtttccttacagaggctggaagaggccactgaaatcattaccctggatgacatgtggatggagcaggtattcctgcttctctcaatctttctcagcgttcataacacagaaatagaaaagaattgtgttcttccagtgtctactgtggtcttcagacaagcagtcttctgtgaccacgagttctttttgtctcctagagtgctgagaaatcttaccaactgtgcttctgtcctgggtgtaaggaagccccatatctgcacgcaggtaagcatcagggatatctgcatcagggatatctgcatcagggatatctgcatcagggatatctgcatcagggatatctactgagagaccaatggagctcaggtttgtaacctgagctttagagtatgaaggtttggtgttaagctttaaaaaaaaactataaaaacaaagatcttgaccaatattcattcatacatttaagaacattta

SEQ ID NO: 1798 - DNA, 1200 bp, mus musculus
tgtagctacaatcattaaataaaaaacactttaccattgtcaaacacattaatcatgaaccatttattagcttttttactccgaaacttagaggctgtgcactcgcctttatttcctaaaacgaacagtttttccagcaggggccctcccgccatgtgtctgattcctgtatgaaacacgtggcagctctcggctttgcagataaagtttttttataccatctttattatccaacacaaaacatagaacattcattcatacagactggacatgaacatacatgaattgaacacgagaacagattggtgcaccggacattagacaagacacaaaaggtaacagagtactcctgctacaaggcccagagagaaatttctctctactttttgggacattttcctcccttatgatgcattttttattaactggggcaatccgcctattccttttaataaaccctttcttttctcacacctcatgtagcttcggagagctacggcctaccgcctgatacccagctcctcactgctgaacctaagtgaaccagcgctcgggtttaacgctgtctcagcttagcccataccttttccggtatgaatttcctttattctttattttatggagctccgaaccagcagcgtctctttcaaaaatcctttgccgtttctcagccccacgttgggcaacaattgttgtgtccggccagcagaccacaacctgggttctagcctggaaaggcattttggaaacctggaagagaagaggggctaggtggcgagagaaaagaatgtagctaagacaattactctgatcaaggctcaaattttattgttgcgacactagttatgaaggaagggggaggagacccgattcccgccgaataatctctggtccagtagaaaggtgcacgtgtgtggctcctcaggttccagcagtgggcgtggcagaacgaatgagcaggaagctccaccccgagcaagcaggtttcaggctaggggaggggagactacaattctgctgcttacaagaaacccatctcagggaaaaaggcagacactacctcagagtgaaaggttggaaaacaattttccaagcaaatgttctgaagaaacaagctggagtagccattctaatatcgaataaaatcgacttccagcccaaacttatcaaaaaagacaaggagggacacttcatactcac

SEQ ID NO: 1799 - DNA, 1000 bp, mus musculus
gggtgattttgttcaattcctttgcttgtttggttgtgttttcctgtaattccttaagggatttttgtgtttcctcttgaagggcttctagctgtttatctgagttctcctgtatttctttaagtgagttaattatgttcttcttaaattcctttatcatcatcatgagatgtgattttaaacagagtcttgcttttcctgtgtgttggagtacccaaggcttgctgtggtgggagaactgggttatgatgatgccaagtagtcttgatttctgttccttatattcttgtgcctgcctcttgccatctggttttctgtggtgttttctggtctttctgtctctgactgtggcttgtccctcctgtaagcctgtgtgtcagcactcctgggagaccagttctctcctggtgggatttgggtatggagagctgtggcacaaggtcagctccgggtgcagataggttctagaaggatctggtccgaggctgctcctcggttcctgtgtcctgagggctccaggagggtccctcttgggctgagcatttgagcagaagtggtggtcttacctgtgctctcaggtgtatcagcactcctggaagaccagctctctcccagaggaatttgggtttggagagctgtggcacagggtcagcttcacgagcagatggaaaccggaagctctatattatttttaacttattaacaaatatatcgagtttttaaatatttttttaaataattttttataatatacttcagtcttaacattcttcttgttatcataaaatttcgaaaacaattttaatgagttaattaaaaatggaagaccaagaggctttatgtaaaacacaaaaaacatggtgttttagatatctaatagttataagtagttaaaatacattagtagttttgtgaccaaatttaaattaagtatgtgttaaaatttaagcccttatgcggtataagatgacatggaatttggttgttagaaacatcattt

SEQ ID NO: 1800 - DNA, 1000 bp, mus musculus
aaaatccataagcaaatacactggaaatccaagcacaatccagcattttgctacatacaagaagcacacctcaatgacaaaggcaagcagtacctcagagtaaaagactgaaaaaaaagtcttacaaccaagatgtcccaagaaacaagctgaagtagtcattttaatagtcaataaaatagactttcaaccaaaagttatcaagcaagaaggggaaggatacttgatatacatgaaagaaaaaaatccaccaagaaaaagtctcaattaagaatatctatgcctcaagtgcaaggttacccacactcataaaagaactttactaatcttcaaaacatacattgaaccccacacaataatagtgggactttcaacaccccactctcaccaagcaacagagtggagagccgtgccacgagcaatcgccattataagatggtgctggcttccactgcacctaactagtaaacaagccttatgcgcaagtgcaagagtgaactcacacctagtcactgcccatctcgcggagtagtaatagggtgatgggcgagcaacgaatcaggagctgtcacgccacatcaggtgctgaaacgtcacgctgctggctatataagcagcgccattttcccggttcggggtcttccctcctgataagtaagcaacaaaaactttgccgaagaagattccagttgtcctgagcgtgttcttgcccgtggggacaaaagctcgggatacaacagttcattgaaacaaaaactaaacagagacacagtgaaactaatagaagtttgaataatgtggacttaagagatatctacagaacatttcaccctaaaagaaaagagtataccttcttctcatagcctcatggtaccttctccagaactgatcaaataatcagtcacagaacaggctgcaataacaagaagattgaaataataccaagctccctatcagatcaccacagacaaaggctagacttcagtaacaaggaaaacaa

SEQ ID NO: 1801 - DNA, 1200 bp, mus musculus
tctagggactagtcttttgagaagatatagtaaatcaagagaataaatattgcaatactgataaatgataaggtgtctattgcctttaaatccatccctgtcaaaccattcaaaatatcatcaagtaaagccaaaaggatatgtattatttttcccatctttaagtatcaaaaggttatatatctctttttatatcagtaaattgcctggttgggggccctttgtacctttatctccatgactctttatggataagaagacactgagacctgcgtggtcatctgcgtggtcatctgtgtccctggtttgggtttgggttgcagctggcattgtgtgcttgtgtgcagatttcaggaaatccacagcataaacaagcagtcaggagctccaatctggctgtcctagacatgagagtgggggaggcaaagtggggggcgaaggatacggagaagcgaaaacacagaaaggcactctcaggcatagatgcccctattagttcactgtgtctgccccaaaactacctcacaggcagttgtgttccctacagctccaggctgaggtgctaccctggctgtagctctcagtcagggagttgggggaatgagcctctctgttgttctctgtaggccactcagactcagtctgtttccaatgcacactgctgcagcctatattgttgcccaagccctattcagggattggggggcagtaaagttttatctcaggttagctgagttcaaataaatatgttgggtgccattttgttgtggtaattctcctcccaaatatgccccaacaatgaaaacacaactcagttaatatggttacatgatgtgcatctagattgggcagatctaccacagaactaccatcttccacatctatgagacagaccccttagaacttgcagtttcttcaggccatgtgcgtctgctctgcctttcttcttcctcctcctctacctcctctctctctcaaacatccttcttttctttctttctgctcctccttccctctctaccttctccctctgtgcccaatcatcagctcactttactttaaaaattaaggtgggaagaaggtttacaagaaatcacctgagtgctgactcatttcttgttcacagcccctcacaggagaacagtattgtcatcaaatatagtaagtcccagggctagctactacgtgtgtgtttgtgtg

SEQ ID NO: 1802 - DNA, 1000 bp, mus musculus
ccacttcttgacccttgtgttcccctgtactggggcatataaagtttgcaagacctaggggcctctcttcccaatgatggctgagtaggccatcttctgctacatatgcagctagagacacgagctctggggggtactggttagttcacattgttgttccacctatagggttgcatacccctttagctccttgggtattttctctagctcctccattgggggccctgtgttccatccaatagctgactgtgagcatccacttctgtatttgccaggctctggcatagcctcataggagatagctatatctgcccctgaaaatcctcttaacatattttggcccactaacaatgtatataaaattgaaaataatagcacgtcttttggtgcatacttctttagttttcaagggatccttgatcccttgctatggtgttctcatcgttatattaattttattttaattagcaaatcctctaggctatcaatcttggaatttgtcaagtaatttttcttcatgtactgccaaactttccttcagaaagggaaaggggacagtttctgtggagagccgcaataacatttgccgtcacaagatggcgccagattccgctgtgccagctcggcctttggagacaaactgtgcacatgtgcaggagtaatgcgggccaaagtcacaagcccacccccagggcctatgagatcgtgggtaagcaaccagtcaggcatggacacgccacaccagggggtatttaagcagcgcctttctgaggcttctttgtcttcctcatcaatatgcaataaagtttggctgcagaaggatccttgtgtcccttgtgcgttcttgctagcgagaacaatagctcgggacaagtttcttctgtcttatatactatcactcaagttttgttttttaattctaaccattttgccaatgtttacacgatttatgtaaatgaaaagagactactgttacattggtgcataagagaatgatttc

SEQ ID NO: 1803 - DNA, 1000 bp, mus musculus
tggttaagacaaagggtaagaatttgtgggcaacctagcctctcacttctgcttccctgggtggtttttgttatgatttgtatcactgtgggtagaagattatcatactgtagacaataataagttgcaatatcttcaggctccaggttgctgatgctgaaggaataatctctcccagacccacttccactgaaccttgatgggatgcctggctgtaatgtagatgtgtaatgtatgagcagcctaggaccttttccaggcttgtgttggtaccaagctatatacttgttaatgtcttggcttgccttgcaagtgatggtgactttgcctcccagagatgcagacagtgaggatggagactgtgtcatctggatgtcacactgagcacctataattaaaaagaacacaaatccctatgaaattaattatattcaaagaagatttttctgaaggaccagaaattcctgatcacatactctttttagcatattcaatgttaaactccttaccatgaagccagaacaacaagagccccaggaactgaatagacggtctcatttctacaacgtctcctgaccaagaatgactgttggagtgtgtatgatcagattattaaatctctggggcagtagaatatgatctcagcacatgcaaatcagcttcatctggacagtgctgggcacagctgcagaataggcttattttagtaactcaaccaaagcgtaacaacctctgatttgttacatcagaccagcacagacagatttttctccaatgaaggtgctcatctttggaggcacaaaaaatagtcttaaaaagcatttatttaatgctttttaaaaatttcccccttgttcagtacatcattctattcctatatgttgtatatgctagggagtttcaggatttgcatgttcacagaaacttcaaaatgtccattaatagttatctgtagatatcactggcataaaaattcattcttgtttatgattatacctag

SEQ ID NO: 1804 - DNA, 1000 bp, mus musculus
aaaatcacacacacacacacacacacacagacacacacacacacacacacacacacacacaccttatcacctcaaacctcaaaagaacaggaactaagagtgtgagtgaagatgcttcaatagaaagctataaagggagacagagggagggagggacctgagtgggacgggagaggagagggttgtaccagagacctgtgaggtgagaaactctcacaactcaaagggagggactgtagatgaaaagtccaacgtggaggaagggaacttgtagagtcaacctccagtagaaagatggggcatcaagtggaggagtggggtggccatcccctagtcaaaatctctgatccagaatggttgccatctaaaagaactgcagggacaaaaatggagaagagactgagggaaaggcaatccagtgaccggtccctggatcggtctcaacgtgaggaatccctctcaaggtgaggatccatgacctgacaccattattaatcctatggtgtgtttacagaccggagcctaacatagctgtcctccacaagtcccaacaaggagctgacagcaacaaacatacacacttacatgcaaccaattgactaaagtatgtgacaactgtggttgaattaaggaaagcctgattgaagctgtggagaagggcaaccccataggaaaaccaacagtctcaacttacctggacacctgaaaacactcaaacattgagccaccaatcaggcaacatagaagagtttgtctgagcccctggacacatatacagtaattactaggattgcctggtctggcctcagtgggagaagatgggcctaaccctagagagacttgaggatccagggagtggggagacccagcagggagtgtgggttatatgtgccatcctcttggagacatgggggagtagggatgggtgaggaactgtgagagggtagatggggcaaggtacggactagactgtaaaaataaaataataaaaaattaaaat

SEQ ID NO: 1805 - DNA, 1400 bp, mus musculus
ggtttaggagttctctggtggaatttttagggtcacttatatatactatcatatcatctgcaaatagtactattttgacttcttcctttctaatctgtatccccttgatcaccttttcttttcttttcttttctttctttcctttttttttttttttttttttttgtctaatttctctggctaggatatcaagtactatattgaacaggtaaggagaaattggacagccttgtgtagtccctgattttagtgggattgattccagcatctcaccatttagtttgatgttggctaagggtttgctgtatattgcttttattatgtttaggtatcaatgaatttatgaaattcttaaagaaatggatggatcttgagggtatcatcctgagtgaggtaacccaatcataaaagaactcacatgatatgcgctcactgataagtgagtattagcccagaaacttagaattcccaaaatacaatttgcaaaacacatgaaactcaagaagaatgaatacccaaatgtgggtacatcgtccctccttagaaaggggaacaaaatacacatggaaggttttacagacacaaagtttggagatgtaggaaggaccatccagagattgccccaccaggtgatgcataccataatcagccaccaaacacagacactaattcacatgccagcaagattttgctgacaaaaccctgatatagccctctcttgtgagggtatgctagagcctgggaaatacagaagtggatgctcacagtcatccattggatggaacacagttcccacaaaataggtgctagagaaagtacccaagaagctgaaggggtctgtaaccctataggaggaacagcaatatgaactaaccagtaacctctgagcttttgtctctcgcttcatatgtagctgaagatggcctagttgaccttctttgggaggagtggcccgtggtgttataaagattatatgcccccacactgggcaatgcaaaatccaggaagcaggagtgggtgggttggggagcagggctaggggggagggtatagtggactttcaggatagcttttgaaatgtaaatgaagaaaatacctaataaaaatcgttttttttcttttttttaaaaaaacaaaacaaacaaaataaagaaatgtgattgtgctgccaactactgttaagatagccaaagtgaaggcagggttgcatcatgtctattttggagtctagaagaaatactgcatttacagtgctgtgtgccaagtagtagtatgttaagaagaaaaatgtactgtggcaattctttatttccagtggttacaaacataaatgaaatagtgttcacacagacacattcacacttataccacattttatgacttcatgaaatgaaaaaaca

SEQ ID NO: 1806 - DNA, 1000 bp, mus musculus
aatcaggaaaaatattgagaataaataaacactggcaaaaaaagattacttgagaacagcactgaattatttgagaacagcagtggattattaaagagacattcatccaaagatgcaaatgactttgtgaagcagaacacgctgtgtggacttctgcaatcaaaccactggccacagtttatctctaggaggaagtagcagggccctaaggagttacggtgtttttgtttcagtatgtagcactgtgtgaatgggtaaccactccactgctggcagtaataagttgcatcatcttcagcctccacgctgctgattgtgagagagtaagaggtcccagacccactgccactgaagcgagctgggactccagaagccaggttggatgtcctatgaatcaagggtttgggggaagcgcctgacttctgctggtaccagtgcaagtaactggaacttacacttgagctggcactgcaggtcatggtgaccttctgccccagagaggcagccattattgctggagactgggtgagcacattttctcctctggacattatgactgaaaaaaagagaaatagaggaagatggattagtagaaatataggtaaaaaataattttataccatccaacatttagatgtaagaaaaagaaaaaaagtacattttagactcaaattccccaggaataagaattttagttgcattctaatctcaaactccctgccctctgttacctgtgacactgattagcaggaagctgataatctgcacctgtaaatccattgtgtctttgaattttagttcctggctaattactcctattctcacaagtactttgctttaaaagaactgtgagatatttgtggttacagaagatgaagtatgcaaatagcaagatatagtatacgcagttcttggcttataacttggtctgttaactaaggtaaatcaggttaaaccaggacaatatctatgtatttgcattcactacactgaaaaagaa

SEQ ID NO: 1807 - DNA, 1600 bp, mus musculus
gtttggttttgttttttccattttctggctattataaataagggtgcagaggtagcatctccttcaggactttcaatatatctaggatcactggtgagaccctgactccctccacaaaacctggcctaaatgggacacacacacacccaggacccagggtacacagccagaagcaagagtactcccagcttgcacttgtccccaagaacagagcctgtgctttgccttcattaatcgactcacatccagatgtagcctgtcctccaggatttctggcagatccagagtcacaggtaagatccccagactcccccacaatatatgtcctaactgggagctgccaggacctaggggacacaggcaaacctacccaactagaagcacaagcttatcctgagcacacccaatcctagggacataccctgggctctggatctccacccactctgccgagaccaagaagcagcatgtctcccaggacttctgacacaccaaggatcacagagaaagcagctccccaaggagttctgacataaccagggtcactggatcacaggttctcaggagggacaggctctagtcagaaacagcaaagacagctaacactagacacaactagagggaatgtaagcaatagaaaccaacgctgcttggcaccatcagaacccagctctcccacaacagcaatccctggataccccaacacacctaaaaagcaagattttgaattaaaatcacatttcatgatgatggcagagaactttaagtaggtcatatataactcccttaaagaaatacagtagagggacggggcaaaacaagaacaaaaagaaaaaaagaaatacatgagaacacaagtaaacaggttaaaaaacaaaaaccttaaaaaggaaacacataaagagcttgaattaatacaagaaagcacaaacaaacaaactacatcaaatagtgctggcttcctattgtgtttctgtttttgtttttgtttttgttttagtgtttctttttttttttttctatttttttattaggtattttcctcgtttacatttccaacgctatcccaaaagtcccccatacccaccctcccaatcacctacccacccactccagctttttggccctggcgttccactgtactggggcatataaagtttgcaagtccaatgggcttctctttccagtgatggccgactaggccatcttttgatacatatgcagctagagacaagagctccggggtattggttagttcatattgttgttccatctatagggttgaagttccctttagttccttgggtactttctctagctcctccattgggggccgtgtgacccatccaatagctgactgtgagcatccacttctgtgtttgctaggccctggcatagtctcacaagtactaagactgtcaaaacaggccactttgcccttctctgcctatattctggctccctctcctggccatttgatgtagtgtttgtagttgacagacacctgtgcatgcttctttacatatttcattgaactgtgagtacaatataattcaggtttttgcatagctggagtcacttggaaagaacagtacctcaa

SEQ ID NO: 1808 - DNA, 1400 bp, mus musculus
ctcctatcacttttcctatgagtaattggtcaatatcatcatttccttaagctaaagtactaggcaaacctgcatgagcctgaagataaataatatataatggatagtttctgatgacttgttgaaactgtataattaaaaaaattaactctcagttatcaggtacaaattcagcagtctctatatgcacaacaactctctctttgcatatagaacaccagtaattatattaagaggttcagaataatctaataacaccacaaggatatcatacaattctgatttttgaaccattatgtacagacttttgaccaccttgtttcttttatctgacttataacctgttatccctatcttatttgtacatgtaaaaattttggtgcctctggaatttgtatgctctttattatacgtgaaagaaaacaattagtcgtttttataaactgtatttgcttggttttttttttttttgcatatttgctattaatttcacccaagaagttactacaagcttttagctaatcctcattaatcacccacattgacacaatcccagcatttgtaagaggtactgtagcctcccccagcctcaaagcaggcttatccagactttgaccttgctaccactaagaaggagattacctagggtggagccttccaacctagatggctctattgttctgtcacctgccactgctctcctccaagacactgctacctactgagaggcccctgagatattctggaggaacaccctatcttgcactgttgcctacaggatggctccagacaccaagaatggactggtgggggatgggccttcccccttataagcacagtctcttagtaaactggcaggctttgaacagaatcatgtcttggtctccattaatctctctcacagtctaagtctctttcagccccagcctgcctcccaggtgtacctggttcatgtaggccacaggccggcatacaacaaggtacaacaatctgttcctgccaactgacatagacttaatctaccgtttataattaattcagaaatctttactatgtacatcttcaattttttactttgtttatgagttaagaaaatgcattctgtaatactatctttcctttgaaaagtgagaccagtaggagaatgagttgaaagtaaaatgactagaatacaatcaagtttaggatcaattccattcacttatgcctcttgcagtctttgttctatgggaattatcacttattctgctttagccattagacattttaaactgtataaattcgaatcttcatgtactgtttgaaacaaatgacttaactcatatggacttaatccagttgtatatctcagccagttaataactaccaattatttttgaaaatcaaaagtttgcaattgt

SEQ ID NO: 1809 - DNA, 1200 bp, mus musculus
atggtggctcacaaccatctgtaacaagatctgactccctcttctggagtgtctgaagacagctacagtgtacttacatataataaataaataaatctttaaaaaaaaatatttaagtctggtctttgctgctggggcagacccctagttgctctgcttccgtgaagactccatatcccaacccatcctagaggaaccactgcactcaaagcagttggtaagaaggccccaaccccaacaccagagtccctaagctgcagctgagagcctggtggactcatgaaccatcacctaacaaagcacccaccctcccaaacagcaatccccttctgtcccttccactcattccacccaatactttctgctggggcagactcctagttggtgtgctcctatgtaaactccataacccaatacatactagaagacccgctgcactcagaggggttgagaacccgctgcaatcggagcagttagacaacagattgactgctccactgaagacccaacagtctgaaggcttcccaagagatctactgcagtcagggcaacatatcagcagcttctttgcccctgtgaagattcaccagttggaactaccaacatgcggtctgatacagccagggacacaggcctaccaggagatctgaagcaacccaaggacaaaagaggcagattccaaaaagttaccaagaccaacaaacaccaggaatatccagatggcaaaaggtaagcccaagaccataagcaacagaagccaaaatacgtggacatcatcagaacccagctctcccaatacagtaagtcctgaatacaccaacacacctgaaaatcaggaatctgtcctaaaaaatctgtcttcacagttaaacaggtgaagaaattgaataaagcaatccaataaagcaaaaattgataacctaggaaagaagtcagatattacagatgtaagtattccaacagaataaaagagatagaagtgataatctcaggtgtagaagatactgtagtagagattgacacaatggtcaaagtcaatacaaaacattaaaaactcctaacccagagcatccaggaaattcaggatgcagtgaaaagaccaaatctaagaataaacagaatagaggagaatggagattcccaactcaaaggacctaaaaatgtcttcaataaaatcatagaagaaaacttccccaacct

SEQ ID NO: 1810 - DNA, 1000 bp, mus musculus
ttgctgctggggcagacccctagttgctctgcttccgtgaagactccatatcccaacccatcctagaggaaccactgcactcaaagcagttggtaagaaggccccaaccccaacaccagagtccctaagctgcagctgagagcctggtggactcatgaaccatcacctaacaaagcacccaccctcccaaacagcaatccccttctgtcccttccactcattccacccaatactttctgctggggcagactcctagttggtgtgctcctatgtaaactccataacccaatacatattagaagacccgctgcactcagaggggttgagaacccactgcaatcggagcagttagacaacagattgactgctccactgaagacccaacagtctgaaggcttcccaagagatctactgcagtcagggcaacatatcagcagcttctttgcccctgtgaagattcaccagttggaactaccaacatgcggtctgatacagccagggacacaggcctaccaggagatctgaagcaacccaaggacaaaagaggcagattccaaaaagttaccaagaccaacaaacaccaggaatatccagatggcaaaaggtaagcccaagaccataagcaacagaagccaaaatacgtggacatcatcagaacccagctctcccaatacagtaagtcctgaatacaccaacacacctgaaaatcaggaatctgtcctaaaaaatctgtcttcacagttaaacaggtgaagaaattgaataaagcaatccaataaagcaaaaattgataacctaggaaagaagtcagatattacagatgtaagtattccaacagaataaaagagatagaagtgataatctcaggtgtagaagatactgtagtagagattgacacaatggtcaaagtcaatacaaaacattaaaaactcctaacccagagcatccaggaaattcaggatgcagtgaaaagaccaaatctaagaataaacagaataga

SEQ ID NO: 1811 - DNA, 1000 bp, mus musculus
gatactcataagtggacattagctataaaatgcagggtaatcatgctacaattcacagacccaaagagactgggtaataaggagggcccaagggacaatgtgtgagtcttactcagaaggggaagcaaaatagtcatcagaggtggatggagagagggagctagatgggaaaaagggtgaagaggggaatggggatggggaccaggtatggggagggggttcaggagaggactgggagtgagaatggaaatcggtgagagggctatctctgggactagctggagacctgggattggagaggacttgggagagtctatggaagtgaccctagctgactgagattcctaccagcaggggatatggaaactgaagtggccacctcctgtagccaagtgggacttctagtgggagtgggggacatcaactcatccataaaacctgccaaccaatgactgccttaagacccatctggtgatagagccagtccctgacactgttaatgatgctctgctctgcttgcagaccggagcccagcatgactgtctcccgaaaggcctcatccttcagtagataaaaagagatgcagagacccacagccaaatatcaggcagagctcggagagtcttgtggaagaatggaggatagaattgatcaagctggatgggtcaaggacatcacaggaagacctgcagagactcaaccaccaaccggaaagcatgcacaggctggttctaggccctctgcaggatgtaaagcttggtcttcaggtggatcccctaacaattggagcaggggccatctctgactcctgcctgcctttggatcccttcccctaatcagactggtctcagtaggagaggatgtgtttagtccttctgcaactagatatcccagggcagggtggtacccaagaggggcttccccttctctgagaaagggaggagctactggagagaatgatttgtaagggtgggactgggaggagagggctttgtttagg

SEQ ID NO: 1812 - DNA, 1000 bp, mus musculus
aaggtgctgggactacgcacatgtaccaccatgcccagctcagaataatgtttctcaaacacagatctgacatcacacttttgtgtcaactgattctcaaccttgttaaaatataatccaatctttttgcaaagacacataaactgaaaaatcctccttcccagctagcaccttggctctccactgaccatggaatccgagatatgacgaggtatgattacttactctctgtgccagacacttttgtgcatgccaaactatacactggcacctccatgactgcctgcctggcatgcctattaccgacccacctccttctcttctaccactcaggactcttcccagatgctcccacgaggaggcgactctgcattctcttatcacagcacttaacacactctgactaccttcttaaacaattaccctccccatttagccagggagctcctagaataatcatattccttatcaccacagctctaaaactcagcaagaaaaggaaagtgtaggatgacccagtactagggagacagagacaggcagagtttgagtttgaggccagcctggtccacacagtgagctccagaacagtcagggttccagagtgagtccttgtctcaaacacaaaaggatgaacaaatggatgtgctatggtgctgcataagaccccgagacttcactcgtagcagtcagaactggactctgagagatgagagtgagccaacagttccctgagcatccagtggggaacatgccacaggtggggaacacagcacaggtggcagctgctcaccaacaacacgctcttgccccagttctcccacaagcaataccaccatctgccaaaggaaacagtttgtcttcactcagctgcaatctctttggtttctctgcacaggacccactgatcagagaagaatgaagagcctaatccactatccatggaccagtcccttcagctctatcaggattcgctgcaaagtggaaatgaatgtgttcg

SEQ ID NO: 1813 - DNA, 1000 bp, mus musculus
atttctgaagatgtactcctgttgttaatagttgttttttaaagtttctatgtgtgtgtgtgtgtgtgtgtgtgtgtgtgtgtgtgtatgtgtgtgtgtgtgtatacatatatatgtgtttatatacacacataaatatgtatatatgtgtgtgtatgtatgtttacttattcatttatgtattatgtatgtatttgtgtctttgtgtttatgtttatatttatgtatgtgtatgatgtttgcactgtgtgtctgtgtattctttatggtgccaggccttctgaacacagaagagttcattgaaccttcagaagttgatgatttgttcttatagaaaatgtggtgtgtgtgtccgtttgtctgcctgtccaaaacgttccacttcttctaagttatcaagatggttagtgtttagttttcataataatttcagtgatgccagaaagggcctatcatgaccgccctccgaaagacccaagaagcagctgaaagtgtcagaggcagatatacacccaaccaatggacacaagctgctaacccctgtggttgaattagaaaaagctggaagaaactgagaagtatgaaactttaggaggatgagaagtctcaattaacctggtccctgagatctctcagacacaggaccaccaaccaggcagcatacaccagctgatatgacactgccaacacatatacagctgaggactgccatggttagactcaatcagagaggatgtacctaaccctcaagatactagaagccccagagagttcagaagtctagtggggtagggtgtgtgtggagtggggacatcctagtggagatggggggggggtatggaacagtcagagggtggaccaggagggggataaaatgtggactgtaaaaaaaaagattaaataaaaaatgaacaaagagaaaaaaaagaaaagtataatttcagcgatgcaattgtggtaccaactgtaacatctttgtattttagttttgaattttatt

SEQ ID NO: 1814 - DNA, 1200 bp, mus musculus
aatggtatctactcaagctagacctccaaaatacagccattgaccttgaccaatttatctggtgtgctaatgaggatattagtataaaaatgttgattttcaagacaggattccatgattaaggaagcaggtataaggcatagaaggtcatagacataggttttcatatacttgacattaaagatagaatagagggacactgaatatctaaaatcttattcattctctagatgaagttgactttcaaagtggcataatagaaggaacattccacaaaacaacaacaacaacaacaacaacaaaatctgtgttgtccttctagaaaaaggtaacagaaaattctacttatttggaacgatttgtcaatggtatattattttagaattcctggatacccaaataatgcagggagggatggagcctcccaggggtgcagacagcctgtgagtgcaggtaagaccaccactgctgctcaaatgagctcatccagaaccctcaggacacaggaacctaggggctacctgggacaggagtcttccagtttccatctgtgcccagagctgaccctgtgccacagagctacacacacaaatacccccaggagagagctggcttgcaggagtgcctacacactttcaagcacaggtaagaccaacacttctcttcaaattcctggaccacgagggaccctcacagagccatcaggacacaggaaccaaggatcagctgggtacaggatccttctgatctctgtctccaccccagagctgaccctgtaacacacctctccatacccatgttcctccctgagagaactattcacccagggggtactgacacacaccacaggcttacaggagggacaaaccaaagtcagagacagaaagaccagctaacaccagagataaccagatggtgaaaggcaagtgcaaaaacataagcaacagaaacctagattacttgccataatcaaaacccagttcttccaccacagcgaaccctggttaccctaacacactggaaaaacaagactgacttagaatctcatgatgatgatagaggaattcaagaaggaaataaattattcccttaaagaaataccagataacacgggaaaacaggtagaagacttaaagaggaaacacaaaaatcccttaaagaattacaggaaaacacaaccaaacaggtgaaagaactgat

SEQ ID NO: 1815 - DNA, 1000 bp, mus musculus
acaggaatggtatatttagagaatttaatgaatgcatgtgagaatgaaaagatcattcttttttattattatgtatttttttcatttatatttcaaatgctatcccaaaagtcccccatacactccccctgcccactctcctacccaccaactcccacttcttggccctggcgttcccctatcctgaggcatataaagtttgcaaaaccaagggacctctcttcccaatgatggccaactaggccatcttctgatacatatgcagctagagacacgagctcccagggtactggttagttcatattgttattctacctatagggttgtagacccctttagctccttgggtactttctctagctccttcactgggggtcctgtgttccatccaatagctgactgtgagcatccacttctgtgtttgctaggcaccggcatagcctcacaagagacagctataacagggtccattcagcaaaatcttgctggcatatgcaatggtatctgttttggaggctgattatgggatggatccccaggtgtggcagtctctagatggtccatccttttgtctcagctccaaaatttgtctctgtagaaacaataaagaaaacccaaagtgagacaacgctggagataaaaaccctaggaaagaaatctggaaccatggatgtgagtatcagcaacagaatataagagatggaagagagaatctcaagtgcagaagataaaagataattcttgtgggaggtaactttaaattttaatttaggcattcctatttgcatagaagcattataggggtaggcaggatggatggaaagtagcttttttgattattttctcttgggattggtttggtttggtatggtttttggtaggttggttgtattttgtggggacaccatctgtctctgtagcggcagctggcctagaatttgttgtgcctacaaggctgccctctatctcaaggaatcctccccctcctcctcccaaatgc

SEQ ID NO: 1816 - DNA, 1000 bp, mus musculus
taagaatctgttttagttaccttctattgttttaataaagcatcaagagcaatacagaatttggaagaaaatatttatttggagcttacagttccagtgacaggagtccttcaccatcatggctagaagcatgggagtaggcaggcctggtactcaacctgcagttgagagcttacatcctgacccacaaacaacaagcaaagaaagcctactggaaatggccaggaagcgttaaaaccagaagcttgaccccagtgactcaccttctccaatgagtctacacctccatcctgaaacaaccacttgatggtattcaaatggaggatactcatgaagatcattctcattcagactagaacaggatcattcaattgtctttttcctgcaataaggagatttcaagtttcctcagcaaaagatgcatagttctgcgtaggaaaagtaggaaatgtagtaagtagtagggtgtcatcagattattgtttttagaaaaaatgtacatactatttatgttttgtgtccttttttgttgttacaaacccatgtatctatttaccaacctacttatatacatataaatgtataaatacaacctgttgggtccacttagtggttgcttccatcttgatattggataaatacttaggtgacacttccatggagaaaaaatgactctctctgtgtctccatctctgtctctctatctctgtctctctctgcctctctctctctctctctctctctctctctctctctctctctctcctcggcagtcatcaattatctctctgtctctctgtctctgtctctctctgtctctttttctctgtctctctctgtctctctgcctctgtctctgtctctctgtctctgtctttgtctctctctctctgcctctctctctctctctctctctctctctctctctctctctctctctctctctctctctcctcggcagtcatcaattatctgtagcttttcttctaggatggggcct

SEQ ID NO: 1817 - DNA, 1000 bp, mus musculus
ccaacccactcttctaaactctcttttatatgcatggcaatatacatgaggcaaaaatcacagatgaaggctggggctcaactcataaagtgtgtgctgcacaagcaccaggaacaatatttggatcatcagaaccaagaacaatctaggcatgtgccagttcctgccagtaatttcagtgtcttgggttcagaggcaggaagggtagagacaggtagaaccccatggttaaattgccagcatgtctctccccaaatccaggagtgctacatttaatgggaggctttgtttcaaaacatgaagatacagaacacctgatgagctacacatgtcttttacctcagtcatctacatgaaaacacatttacagacaccatacacatgcaccacacatttactctgcactcccccatacaaaattaaaaatacgagtagggttgaacataatacatgaagaaagaaaaacaaaacatgtttaagtgactagaattttaaaatgctatcatcccaggatttcctaagtaatcaatcaactaatttctttagtattttattttatttaattttttttgcattaagaattttaaaaatttattcattttaggtaccagtgtcagtctctccttgtttccaagtaccccttatatagatagtcccctcatttttcctttactttttctctgagaagggggaatccccctctggatatctgctcccctacttactacacttcaagcatcaagtctctgcaggactgagcacctcctcttcaactgaggccagacagtgtccagccaggggaacgggatccataggcaagcaacagattcagaggcagccttcactccagttgctggggcccctgcatgaagaccaagctacatagagcaaataattttatatacagaattataattaagaaaatagttagttcatattgccagaggggtggacaatatcctgaagaaaatgtttaactctgggttgcagaggttgtata

SEQ ID NO: 1818 - DNA, 1400 bp, mus musculus
acccactttctctagtgtttagacaaatcaaatgaaactcaaattgctaaaattagccagacagaatcaatgactcctaaagaagctgtgggcagtgataagttaatcaaaagatatgtctccaatagtgaatgtttggtctccagagcatgtgtttaaagtataacaaattttgactgaaaataccttaatatgtgagatgtttctaacactaaagtgcttgtggtttcaggtccagaatggaaacaatgctccttcagtattgtattatgcttaccaaaagaaataaggtttttttttgttttgtttttttgttttttgtttttttgtttattttaataaatggacctctctgggcatcagaaaatgctacctggctgacagaacaattgattttctctcctgcccattgtgtagataacaatattgatgaaatacagaaaagacaaaaagaaggcatcaaatgatccttcatatttctggaaagggatgagagctttagatgagagtggtgtttattctgagcttctgggctaatatccacttctcagtgactgtatactaattcacagaccaaatgaagctcaagaagaagaccaaagtatggatacttcagtccttcttagaagggggaacaaaacacccataggaggagatacagacacaaagtatgaagcagagactgaaggaaagaccatccagagccggccccacctggggatccagcccatattcagtcatcaaacccgaataccagtgtggatgccaacaattgcttgctgacaggtgcctgatatagctgtctcctgagagcctctgccaatgcctgacaaatacagaggtggatgccctcagtcaaccattggactgagtgagcacaaagtccccaatggaggagctagagaaaggacagaaggagctgaaggagcttgcagccccataggagaaacagcaatatgaacaaatgagtacctccagagctcccagggactaaaccatcaaccaaagagtacacatggagggatccttgttccctctgcatatatcacagaggatggccttgttggacatcaatgggaagagaggcacttggtactgagaaggttcgatgtcctggagtaggggaataccaggacaagaagcaggagtaggtgggttggtgatcagggggaggggacatgggatagggtttttttccaaggggaaaccagaaaaagggaaaacatttgaaatgtaagtaaagaaagtatctaattaaaaaaataaataaaagtaagtgccatttatgtgcttgactgtcgcagcattcccatagagatactttcatcaatatgttgataaacaccaaaaactcaaaatcaaatctttagctataacagaggttgattggtagatattgc

SEQ ID NO: 1819 - DNA, 1600 bp, mus musculus
tgccatcataattttctagttagtgatgtgacagattacttataagtatgttaggttttttttgtcacaatcatattatcatttgttcttaaacaaaaacccttgtattattcaatttatcaattaattacccatcactattgtactctataatctctatctttatacctgtattttattgctaatagaagtcaagacattatgataacttttcaaaacctagattaatgaataaattctaagtaatgcatataagtaaggaatgacacttaagtatctaagtatgcacaaaagtggccatagactaatacataaaatataaaaaaaaacactttaaaaaagatttatgtattttatgtatatgatgatactatagctatcttcagacacacaagaagagggaactagataccattacagatggttgtaatccaccatgtgtttactgggatttgaattcaggaactctagaagagcagtaagtgctccttttgtattgattattttacttatttacatttcaaatgttgtcccccttccaggtttcccctaagcaaatcccccctatcacatcaaccctccacctccacctcactgccctagaatcccccctactctggagcattgagccttcacaggaccatggcccttccctcccattggtgccagataagaccattctctgatacatatacagctggacccatggatccctccatgtgtattttttggttggtggttttgtccctgggagctctggaaggtcctgttagttgatattcttgttcttcctatggggttgcaaatcccttcagctccttaggtcctccccctaactcttccattggggtccctgtgctcagactgatggttggttgcgaacctccacatctgtattggtcaggttctggcagagcctctcaggggatagctataacaggcaatggatagacaaggctccaggctgagggatggggccacctatccatctcataatttttaacccagaatggttccattcttaaggaaatgcagggataaagagtggagcagagacagaagtaaaggtcatccaatgatcaccccacctaggaatccattccatctgcagacacaaaaccagacactatttctgataccaagaagtggttgctgactgtaattgctcttaattaactactgagccatctcttcagccccataataaaggtttgttaaaaagaaattttgatctgacagaattcttgactgccaattttcctttttttcaaatgaaattcctaagtgttatgagtctatatcaaaatttgagagttgcaaggccactgattctatgatggagatatatcaaacatttttaatagggtttgcaggatttatcaaaagtaatgaggcctttaaggtgggatagtgggtgagagagatgtaagtgggagaaattaagagagctagtttcaaacatcccagggctcttccccacagtgagtcagatttggaaaatcaaaatgagtctcttaatatgtctaagagtttagtactaaagaacacttaattatgaatacttcaacaggtatatcatgtttaataaggaatgcatttt

SEQ ID NO: 1820 - DNA, 1400 bp, mus musculus
gttccctagaacgaacttcattccttccatgtacccttcttattagagatattcctttggagttatggcttcataatccaaatacataatgaagattatgatatttaaggaactgtggtcgcaagattttattcaggtagactttaatgaaattgttatgataaactttcttgggtgatgacatgtccctacaggacacagattacgagttataaaaacaattgaaagatggtttttgccaaattgatcctcatgtcaagtgatttaccaacaaaaaaaaaaaaaaaaaaaaacaaggcagacaagtagaatgatgaagtacaacataataaaaatattaatggcccgcaagttggctagggtggaaagggggctatatttcgaattcaggacctaagtttgatccacagaatcacaagcttggaaaagctaagaacattatgtaaaattgtcctctgacctccatttattggcagtgaaatttgtacctgttgtggatgggcctggtgctatttgtacgttgtgcttattctgctctcctgggaggggttgaagacaaggagtgagtcatactcaggtgactttttgtgagccaatcccctaaagaataaagcagccaatcactggggaagtaggcgggacttcagggttggagaggagaagaaaagaatcaggacagagttattggtccttttggagagagagagcttgaggacaagatgtaaccactagtgtctactggcttaaggtgaatcctggcagatttgccacctgagaaatcagatttagtaaggcttacaagactggaatttagttgttgcatgcagcagttgagatcaccagctcgtctgctctgatactgagattatgagatgctcacaaaaagggcctatcatgacttccctccaaaagacccaaccagcagctgaaagagttaggtccattatatttacatccaaccaatggacagaagttgatgaccactgtggttgaattagggaaaagctagaagaagctgaggaggaggtcaaccctgtagggggaccagcagtatcaactctcctggatctcaggttgctttcttataaagcctaagactaccaggccagtgatgacacacccacaataggccaagcccttcctccttgatcactaattgagaaaacaccttatagctggatctcatggaagcatttcttcaagggaggctcctttctctgtgataactctagctgtgtcaagttgacacacaaaaccagtcagtacatggtccaagacctaatagtggaagtagaaacaataaagaaaacacaattggaggcaacccttagaatggaaaacttgggagagcctcaggaattacagatgtaagcaacaccaacagaatacaaagagaagtg

SEQ ID NO: 1821 - DNA, 1000 bp, mus musculus
atctaaattgtacagtctatgggatatttggaattctgattcttttttattattattattattattattattgggtatttattccatttacatttccaatgctatcccaaaagtcccccacacgctcccccacccacacacttccacctcttggccctggtgttcccctgtactgaggcatataaagtctgcatgaccaatgggaatactgattcttcatattataaaaatatattggttttactacttttttttgcaaatctgtttgtttgtttgcatgcataaagatacatgttgtccattcatacaaagaggttaacaaaaattgccaagtgttccattttattattctctgtattattcacataaaataggatttctgactgactcagtagctaggcagtagtggcaaaccagaaagccccataaccctccaggctctacttgctcccaatgaagctggggttagacgtaaacataattacatgcagatttctaggtgagtgcttgagatttgaacataagtactcagagtatttcatgaatccctgttatacatggagccagctgcctacccatgcacaagaattttattcttaaaatctttaaataatacttagaaaatccgagctgtaaaataatttatatcagtttttatagaataaagaatatgctattatttctacatacatatgtacgatatgtatatatcatataagtaatatatatatactattttcttttcactattcttttcactatttttgtacttgaaccctgaacttttcactggtttagaaagttggcacacatttcatgatctatatatttaacacattatgttttgccttttcctttatactagatcattttcacacacttagaattttctccataatatatcagtctttggtgtggcacaccgtctttttacatcactttgattttggaaggtgcttctgctggttacagtgaactccactgacagtcattgttctat

SEQ ID NO: 1822 - DNA, 1600 bp, mus musculus
aagagttcttgtttatagtgcaccatctaggttcagtgagaccttgtctcaaacagtacagtgaagaaccatagaagatagtggatattgacctctgacccctaaatgcagagatatgtgaatacaggtatgcacatacattcatgaaaattatgcatacacttatgttcaaaaaacactccaaataaacaattattatagataaaaataatttaagattataataatctattttcagactttattgttctaataaaaatgcagagtataaagcttactgccttaatcctttaaaagtgtatcgctcagcaaggtttcaggaatcatgcagttggcctggacttgataccttacggggcacatgtcatatgtttttctggttataatctatggctcctccagttcctaaaaacaccaatgcattcccttaggcagtgaatcttcaggctgcttcgtgtttctctttgtgttttcttagtagtcacagaatgcactagctcagaaacattatgctcattaaacaatatttctatttttcttctccctctgaaactttaagaaataattttctttgttaattaaaaaaataaacttaaagtataacaaataaacgtcatctcttctctcattagtttcttttttaaaattttagtagatattttctttatttacatttcaaattttatcccctttcctcatctctcctccgaaaacccccctatcccacccctcctccctgcttactcacccattcactcctgcttccctatcctggcattccactacactggggcatcgagccttcacaaaaccaaggaactctcctctcattgatgtcctacaaggccatcctctgctacatatgtggctggagccatgggtccctccatgtgtactctttgtttagtggtttaacccttggagatctgggggtactggttagttcatattgttgttcccctgatggggctgcagaaggggtttcttcagctccttgtttttatttttctctagctcctccattggcaaccctgtgctcagtccaatggatggctgtgagcatcgacttgtgtaattgtcaggccctggcagagcccctaggagacagctaacaggctcctgtcagcaaggtcttgttggcatccacaacagtgtcattactttcctccagacaaccttcccatgtgtcactgtccctcaaatctatgccaaattgatgggctaatttgttatcattgttgttatctatatttatagcaaaagtatatgaatattagcagatcactccatttcaaatagcttagctatagttgatttcacgactaactactttacaatgcataatcaattaggggttcatcttcccactttgcaatgaataatcaattagggggctcatcttcaggagaagctagttccccttctttcagtagtcagttgcttcttatagttctcagcctaggattaggacccactgagattccccatatcatgttagtatgcttattgatattgtaattgttttggtcttgtgaagaggagcaatatcactgaggtattatgcttgaatcgttcatactagttcaaatatatatattct

SEQ ID NO: 1823 - DNA, 1000 bp, mus musculus
agattttgtctggcttgagctttccctggcagtatgcatgatgtttcaaacacagtgagttgatttctgcagcatccctgttgtttccagaaacagtttccttccattgatcctctcccactgacccttactcttcccaatccctctcccatgctgatccttgaactgtggaaggaagtggtatagtataggtatatagatttaagtatgacatcatttctcattctctccacctcgatgggtctccgagttaatagccatctacttcaaaggaagcttcttctgataataggcgtgactttaaaaacatgaaaagattgtaccacaaaaaaaaaaaaaaagaaagtcaagcagatgatagattcacgaagagccctgaaccgaaatgatccttagtttcatttatccaaagtgattccggtaggattgccagactgtaacaggtggctacttttaagtacagatgctaaatgtcatacctgcagatggttcatcagtagaacatgtaaaaaacatcttaattatatattatgaagccttttcataaaaaattaaaagatagcattcattatgcttgttggagctagattgccgagtgcagatgctcgtgtcagttagctggtgcttaaatcaaaacaagtatcagtggatccatttaatgataagagaagttctggctgcaggttggaaagtttcttgtgatgtaaatttcttgcactttcctgatttatgcatcaaaagcagtaggctctcctctgctagcctctcacaggtgcctgagtacagaaaaagactcagctggttatcctcagcagcatccctgtttgcagtgctcctgcagggagaccacaccatcacacctgaaaactaaagctggatgtttaattctacacatggactctagggtcattcagccctacatgaaagagcagagttgattcatgcgtacatccatattatactcaaatttcattttgttttagcatgattggcctgtttc

SEQ ID NO: 1824 - DNA, 1000 bp, mus musculus
tgccatatccgacactcttaaatagatttttcttgcctacagaataaagtctatccctgcagcactgagcaaggaataaatgatgtctcacatgcttaactcttaaagctgccttttctgatagaacttgagtggtgatgtactaagtttctagatacttaaactgaccatttttctttggcatgctatcactgttgcattttctggttcatctgccctccaatcatgacctacctggagaccgacatcatgaccgatgctgtattctgagcatcccttgccaggtcagtactctgttccctccctcctaccatgttttcaaagctgcttcaccaatgatctgttggcttttcagtagtctccacttgctgcaaattttcttgaacaatctttgggccccctatatttcttgcctaattcctacttacttttctagacttcttttgtaggaaatgcttactgcccttttgtgttcctttcctcctgccttgcttagaacaactacgctttagctgcttatctccttgcccaacataggctacacctcctgctttccctgtaagtattgtcttcgggatgaaccgatacctcgtgcacacctttttttgaaaccataagttgatagataagtgaaagagtgaagcaacctaaatcacggactcacaatttccaatagaatatcaacatttccaaggaaatgtgtctttaaatagtaagttaatgtaaataattatatttaattgcatcctatcacatgtaatatcaaagttcctgtttgtatgcattccgttggtcacagcctaagaaacaaaccactgtcaggctgaaagcttggaagaaacaggggaaagcaatgtgctttggaggagtcacgcacattctcctgtcagcattaatttcgtcccctggctctggagaaattgagtgctgaaaggttaagtaaaagatcagctcagatgggagaatgggagcagagcatttggagctatctgcaacaaac

SEQ ID NO: 1825 - DNA, 1600 bp, mus musculus
agtaaatagagctttaagcatttgtacaaatattccatttccataatgaatgaaacactgaacactctgtaaattaaacattagagcttatagaatattttaatgagcatgaaaaatattgtcaacatataaattccaattaaacacatattttagcaacagagttagaaaaggtattgttagaaaagacactgctcttttcctttttattcaacttagattcttttctcatacaatataatcttaatacagcttcctctccctctattcctcccagttcttccatatcttctctcctccagatctactcactttttatctctcattagaaatcatcaggcttctaggagataataacaaacaacaaaataaaatgtaataagataaaacaaaagccatcatatcataatttggataagacaagtcaagagaaaaataaaatagctccaagagaaggcagaaaaatcagagattgacttgttcacagactaagaggtccaataaaagtccaaaagttaaaagctatattatacatttgggagaactgttgcagactcatgtaaacccgggggttactgattcagtttctgagtccctgtgaggtcttttagagatagttgatcttctggtggggcccctccccactatcgaccaccccctccagtccttctgcctcctctgttatggggttggttccctgaactctggctcagaatttcatatcaaattccagagtgattgttatagagaatctagtttagatctgtgtgttcgaaaggatcccccctctctctccctacctcctattcttcccaatcaaccccctttttgtttgcctcttctccatggagacttcttaaccaatgaccagtgttgaaatccaatacttcaaaagtcacaggtcagatgccatgtgttctatagtgcttgttgctctttatgcttcccaccctgtaaacttttgtgaacctatgaaataccacttggatgcagaagggagaactacacttaattctattcagcagtcttcaaaactacaaaatctgaatgtaaggtgaaaacagaaaatggtgtatgtatcttttgctctctgatctcaacactatgtattcaagtcagtaataaatgtgaatatgccatcaacttcctcttgaatctctctgtgtaatcttacccttttgtgtttctctgatgagagattactgcacgatgaactttccccaatgttagtgatttgaaacaataagttattattctttctcatggacctgcaaggtgactgtgtttaactttgtagtcttgtcttagtcagggtttctattcctgcacaaacatcatgaccaagaagcacgttggggaggaaagggtttattcagcttacacttccatactgctgttcatcaccaaggaagtcaggactggaactcaagcaggtcagaaagcaggagctgatgcagaggccatggagggatgttctgtactggctttcctcccctggcttgctcagcctgctttcttatagaaccaagactaccagccctgagatggtcccacccacaagggcctttcccccttgatcactaattgagaaaatgcctta

SEQ ID NO: 1826 - DNA, 1200 bp, mus musculus
aggcttgaatttcacttagaaggcggaataaagtagtcatagttggcagagggaggaagaaaattgggtggaagagtgggtggggagtagaaaggaggttgatcaggagcagaaaggggtttggtcagtatcaggtgtgaagagagacaaaagagaggactagagggccagagggccaggagaatgaatggaaatcttcagctccctcaggtatggccagtgagggaatgtttataaagtcccagagatctgagatgggagaggctgccaggagtcaatgcaggtgatcttagccgagatgcctagtagtagggttagggaacctgaagaagccatgtcctgtagccaggcaggaccctcgatagaagcaaaaggataccaaaccacccacaaaactttgagcccaaaatttatcctatcaaaaaaaaaaaaaaaaaaaaaaagtgcaggaacaaagttgggacagaaaccaaaggaatgtctaaccaataaccatgtcgattgagacccattctatgggcaagcaccagtctctggcactgttaatgatactctgatatgtttgcagacaggagcctagcataacggtcctctgagaggcactacctggcagcttcatgaaacagatacagagactcacagccaaacattgaatggaattctgcggaatagttaggggaaggattaaaggccctaaagaggataggaactccacaggaagacgaacggagccaaccaatccttgggagctctcagagactgagctactaaccaaatagcatacacaggctggacctatgcccctatacattgtgaatgtctccatgtggggcccccaacaactggagcagcggttgaccctaaagctgttgcctctctgttgaatcagttttccaacagggctgccttgtcctgcaccagtggaagaggatgggcctaaccctacagagacttaatgttctaggttgaggggatactggtgggcaggcactctgtcaaaggagaaggggtgggggtaggggaaagaactctggcatgggggggggtaccaagaagggactgctgtgattgggatgtaaataaataaataaatagaataaacaaaacccaaaaacaaacagaaacctaaactcaataactgcagaaatgactcttgctcttttctggtaaggttagaagcaggttacaaatctatattag

SEQ ID NO: 1827 - DNA, 1000 bp, mus musculus
agagcttgtgagggaggttgattgaatctttctcagaagagggaaaaaaaaaaaacagaaatcagaagtcaatggaagaagggacctgggtggaagaggggatgggaagtggaacagggtggagggtatggtatgtagggagagcatgagagatagaagggagatgggtttggggcaggggcaatgtcgagcataaataagaaacctgggatggggagaggctattctaactgaggttcctagcattgagatatggatcctgaagtggctgcttcccgtagccagataggactcccagtggaaggataaggacaacaatccactcacaaagctttcaacccaaaatgtgtcctgcttacaagatgcacagggacaaaaatagagcagagtctgaaggaatagcctaccaatgtctgccccacgtgagacccaacctatggctaagaaccagtctccaaacactattaatgctattgtgttatgtttacaaacagaaaactagcataactgttctctgagaggctccacccaaaagccaatggaaagagatgcagagactcacatccaaatagtagctagacctcagggagttttacaaaagagtttgaggaaagactgaggaacttgaagacgacagaaacaccacagaaagaccaacaaagccaacaaacctggaacctcaggtgctcccagagactaaatcaccagtcaaaaagtgaagccaggctgcacctaggccccccggccatatgcagcagatgagcatcttagtcttcgtgtgggtcccccaaataaatggagcaggggccatagctaatcctgttgcctatctgcctgcctgtggatctggcacctctaaatggacagcattttctggcctcagtgagagagtatgtgcttagtccagcagaaacttgatgtgtggcgtagagggtagagggatggggaggggggttaatgagggcggggaggtaaggatgtgggggtaggggaggaatgg

SEQ ID NO: 1828 - DNA, 1000 bp, mus musculus
ttttgttttgttttgttttgttttgttttgttttgttttgctttgctttgctttgctttgtttttttcaagacagggtttctctgtgtagccctggctgtcctggaactcactctgtagaccaggctggcctcgaactcagaaatccgtctgcctctgcctccgaagtgctgagattaaaggagtgcaccaccatgcccagcgagaactgtgccattttttggttgggtgtgtgtatgtgtgtgtgcatagtggttgtatttttctcttttcatgatatctcattttgatacaaaaccacatatgacattgatatatgaactaaaactttctcttctttccaattttttttacatgaggcaagtgcatagctcaggggaatggtgattataggcttctatgtttgaagccagaacactttaggagcatccttcgaggaaacagttaaacttgatttcttttctgaacgattgtaattaacaacttctggtcttgcagctttaatatattttcctaaatgttttcctttatgtattatataattatctagctccatgaaaatcagttaatgtataatttttattctgatcttagatttgtgaggctgatgataacatcctttccttcattttcgttttgcgtgatttcagaattgtatcttttatcctggtcatgctaagctcaacgtgtctacattcctactgttctccaagcattcccctctgttgtttttatcgtatttgtgtaaggatgagatgacgacctgtctttctggagctcttcttctttcactgcatggatcatagcagtggcactcagctttttagactgcatgtgtgagcactgactcactgagtcactgctcctgctgtcacacctgaattttcttggtcaatttttattttctgttcgcagtgcttattctgctgtactccttattagctcatttctttgccctacctcttcttaaagcatttaattactctgtgtagtaatgtagg

SEQ ID NO: 1829 - DNA, 1000 bp, mus musculus
gttaaacatgcacggtaacaaatttgaagtagggcatttgctgtcatgagttcttaccattagtactttacctttgcactcactgggggagtttccccttacatcagctacttttccaatcagtcatcattagatatagaatgtgtagcaagaacggtggctccacctctgaataaacaccggagcgggagggggaggggcatgcatccacaaaagcatctcctattggaggacctaactgaggactgactgagagaacaaggattgctgaggcagacaaggccagccaatctggaactgctgttaagaagggatgttttctcagtaccaatggctcataggtggaaggtattaaaggagcctgatatagctggctcctgggaggctctgccagtgtctgaaaaatacagaagtggatgctcacagccatccattggactgagcacagggtccacaatgaaggagctagagaaagtacccaagggactgaagtggtttgcagccccatatgaggaacaacaatatgaactaatcagtacccccagagctcccagagactaaaccaccaaccaaagaatacacatggtgggactcatgactccatctgcatatgcagcaaagaatgacctagtcggtcatcaatgggaggagaggccttggtcatatgaaggctctatgccccagtataggagaatgccagggccaggaaatgggattgggtgggttggtgagcaagggtaaaggggaggagagagggggttttcggagggtaaaccaggaaaggagatatcatttgaaaatatctgttttgctttgttttttgtttttcaggacagggtttctctgtatagccctagttcttggaactcactctgtagaccaggctggcctcaaactcagaaatctgcctgcccagaaaatttctaataaaatataaaaatagagcttgcagcattgttcagatgagcttgtgcagtgtttctcacctgcttccggagtc

SEQ ID NO: 1830 - DNA, 1200 bp, mus musculus
gacttcattctctaaaatacttacaatagcaaacccaattcaaattctgtataaacagcagccatactaaaaattcaatagtacactagcaggaaagaaaactatgttgcataaaatacaagtgcaatttaattctatactatttttgaggatcagtttattgaagataaggatagagaaggctgatttcactgcatgtcttcatttgttatgtttgcacaaattattaatttggattgcattttcattggagatatgagcctgacctcaccttttgtgacatggctttctaagcatacagggccatatacacagaaggtcaacaagcttctgagtggtttcaaattcattatcatatgatacgtttccatttctatgtcttctttttcatatatatatatatgtgtgtgtgtgtgtgtgtgtgtgtgtgtgaatattttctttatttacatttcaaatgttatcccctttcccagttttcacccccctcccagaaacttgctattccattcccactcctcttgcttctatgagggtgtttctccacccacccacccatccacccattcctgtcttcctaccctcgattcctctacactgggcatctatctagtcttcctgggaccaaggacctcttctctcattgatgcctgacaagaccatcctctgctacatatgcagctggagccatgtgtactccttgggtggtagcttagtccctgggagctctaggaggtctggtgggttgatattgttgttcttcctatagggttgcaaaccccttgagctccttcagtcctttctctaactcttcaattgagtaccccacactcagctgaatggttggctgttagcctctgcatttgtaaggctttggcagggcctctcaggagacagctgtatcaggctcattttaacaagcatttcatggcatccacaatagagttggtttgctaactctgtatgggatgaatcctccggtggtacaatctctggatggcctttccttcagtctctgctctacactttgttttcatatttgtcccatgtgtattttgttccccttctaagaaggaccgaagcacccacacttcgatcttccttcttcttgagtttcatgtggtctatatcttgggaattccaagcttttgagctaatatccacttagcagtgagtgcatactatgtgtgttatttttgt

SEQ ID NO: 1831 - DNA, 1000 bp, mus musculus
aaagcgatgctacctctagtttagcaatttatctcaggcactttctcttctcatttaatcaaaaggaatataatgcaaatcagtaggcaatgataatggtgatattcagtaccagaggttcacaggcctgtgcacatgtgatcagtaacataatgacagagctttcaggatttgggccccagcttacaaacacagaaagaactgaggtccagagatgtgcagtaaataccatgtgtccagtcagtcctggcaggggtgggtctgaagcctccagaggtatctccaaaatgtgtctcactggccatactcttcatctgactcctctctgtataggccacccaccttacaaataccagtgacggcagctaggtgacatcccagctagcagatcttagaatggaggatgagagcatgtatagggggaactttcatcctaacagccattcatcttgtcagtttaccaagcctttctgctttctatcagtaaaggcctctgaggaatgggtggtggaacgactttcctccctgagcccaggcaatatagcaaatgcgtgaatctcactgttacccatgaggacacatatcagagtctgggatggatgacataaccatcagacctgggccaccagagctgatacctgctgtcatttgggcagaatgggcaagacctgcctggaggccacctgccaggcgctgcctgctattgattatctccatcgtgatctcccctgctggggggaggagcaaggaaggctgcagggaagccaggaaggatggcagaaccccctcctactcacagcaggcacgcagtccctgccaaccagaaatgccaatgctctcagcatccacggttgcaattcttttgttgctggtttcttttctggcactcccttcactctgttcctgatcaaggcagttttgggaggcgatgcctttaagtatttacctcttgttacaggcataggctggacacctggggtcaccacacagcaagggctcc

SEQ ID NO: 1832 - DNA, 1200 bp, mus musculus
tttttttttttttttttggttgttgttgttgttgttttttcgagtcagggtttctctgtatagccctggctgtcctggaactcactttgtagaccagactggcctcaaactcagaaatcctcctgcctctgcctcccgagtgctgggattaaaggcgtgctccaccatggctaaccctgaacttttaaaatttgttgtcaagcactgggggttgaatgcagcactttatctgaagccccatgactgctcctccatgacttagggtactttaaccaagcccaggtcccaaccagagcctcagtgtccttagctatcatgatgccatgattctcctgtggctgtagcaggtaacgtgtgacattaacgtgggttgaggggccttgggaggcttcccagagatcagagggaggtgctggcaggagggaatgtgcacagtggactgcagagcccccaagtatcctccctgcggcccatattagcacagatgcaaagacaaaactagccactagggggcagcgtgggcctgcagcaagccgaggaaaggcgcccagttgtgtgataggcttttccaggctttttcttatctgcagagttgaggcttccctgtgagtacagagcatggctcatgggctcccagcacaacagcagggtcagataggaacaactgacacctgctgtggccaggaccacagaacatctgggtctataccctgacctatttactcacttgctgactttggaccaggggtactcagtgttgtcttatccctacagcccagatgttgtgtgtgtgtgtgcacacatgtgttcgctgtggccagaggtcacaagcagaggtcagctacataggcaggaggtcagcatcaggtggccttcccattcatttctctacgtttgaggattcattcttagtttatgtggatgagtgttttgcctgcatgtatgtttgtgtgcgtggtgtactcaggggcaagaagacggagtcagagtccccccaggaatagagttacagaacccaactagtcagtttactccagttttgcagcaccaagtgctgttaactgctgaaccagccttggcctcaattttgattaagtcttggtttggggtcttcctttattgctggactggactcctgagctcaagctgccacctggcctcaccctggcagctgggctgaggtgtgctgcacaacaaact

SEQ ID NO: 1833 - DNA, 1000 bp, mus musculus
gccacctggataggccaacctagctctctcccttgggctctttgtctgggactatgggtcttgggagatggagttcaaggttaaaagccagctttccaggacatgctgatgctcagagcccttgagtacaggaggtggtggggattaaaagtctgggctgggagagcctgccctgtgttcctactgcatctcagtccccatgggcaaccttgcctctggccacaaggaggccgcttcaagattagccatcaggtggggttccaaggtcataccaggttttgagggctctgattccttcccctgggcacccattgataccaagtgcactcaggtggggttgtacagctgaggataaccaccatagacagtgtcaggtgctgtaagccctgcgtgcccagctgcgtggctgggctaagggaaagggccagaactggacctcaaatcgggtctgggaaaataggctcacactgaaggctgcgctcctgtcactccagctccagtttgcatcctttccctcccatccagctcctctcactcggtccctggtcattgccctgcctgccactctcctccttcaaaccagctggccgccacctcacttccactcacctctccctcggaaaggcccaccctgagaacagcagctgaggagcgagcggcacctgcctccagatctaccttttcacagtagagagtacacagtagatgcctaatcatttcccacctatccttctggaccttcagccccacaaggacggcttcatcctaggcttcctggtgtacacagcaggcacacacaggatgtgctaactggacacacaaaggcatggccaggccacagtcatgcaaaccttcagtgacaagcatgtgcacaaacacacatccagcatcatgctagcacatgcatttgtgagtggaggcatgcttgccccccacctccagtagagcccagtgggagtgttatcacccatggccctccatctaggcagctgggctccac

SEQ ID NO: 1834 - DNA, 1000 bp, mus musculus
acacatacacactcactcacacacacacacaaggccagcctggtctacataatgagttccaggagagtcaggagtctctacataataggaagaccttgtctcaaaacaaacaaacaaagtgtgggagcatgtgtcttactataatcatgatactacaggagggaagacagcagacaggaatgtctctggggagccaggccaaggcctgtgccatgcgggatttcaggatggtaccaccatccttttcactgcttctctgccctgccacccttggcccctctggacaggatggactgaacttacagacaatgcacacagacaatgcttagacaagtcatcagcttgtcccaggtgcccctggagctctagctacttactccataatcaggaccgcccagctccttgatgcggacctcccagtgtcctttctccctcagcagcttgttaatttcgtcattcaggtcccgaattcggaattcccctaagccagctagaaaacaaaaaatgttaatatcatttcttcaagatgccatgcccaataatgaatgtcagtacttccaatcatgtactcagtgttacagctttagaaagaaaggcttcaaccccaaaggtacactgcataaaactactcattgaagttcagaagaaaaggcctggtgtggtggtgcatgcctttaacaccagcacccaggaggcagaagcaggcaaacctcagtgagtgagtactagcctagccagggatacacagtgagactccatctcaaaagtaaataaataataaattgattaaggaaagtcactaacacccaaataaaggaagaccaagtactataaacaaagattcccaataatgtggggttaaaagtctttttaaaaacttcatcctcagccgggcatggtggcgcacgcctttaatcccagcactcgggaggcagaggtaggtgggtttctgagtttgaggccagcctggtctacaaagtgagttccaggacagccaggg

SEQ ID NO: 1835 - DNA, 1000 bp, mus musculus
agcctggggacctgcaagttgtcctctgccctccacatataccaccttttcttgcttattcgttgaagaagaatctccctaaaccttgggctagcattttcttggccaggctggaaagcaggaagccccagtgtttctctcccttctgcctcctttggagctgggatcgcctacctgacctagatgtctggcttgacatgtgggtattgggagttaaacccacatcctgtgaaagagcagccagtgctcttaactctctattcagcctctattgtgtgcaattttatatagctaagtgcagggtaatttttacttaatatgtcatgaataatatctaacttcatttggtatgttccaaggacagagcagttgttgatttcaaatgctgctgaaaggtagagcaagagaagggacacgatacaaaaaccttacaggattcaaaacaggatccaaaaaaaaaaaaaaaaaaaacccaggatccagctgtttcgatattagtctttactcttttaagaagtagggctcaccgtgtggacccccaaagttgggagtctgtagacatcaggttgcttgtgatagtaaaagcagcagatgaggtagggatcagcttccccactataagcagcgggtctcagctgaggtaggggtaacttgctctgtcttggaatctggaaactgaccactctgaccagggagaggccgcacaccaggtttatacagactttcataggtgagccctgattggctgtctgcagttaagtaaagatgtgaagaataaagaccaatcaataaagagcctggcaaaactagggtggtggggagagagggtccccctgtatgaatgagcaaagccatgtcaaggacactagtgcctcagcctcagggggatggcaagggacgttgatgaatggctggcttttcatgaaaaccggtatgtgcaggaagtaccatctcagcatcctcatcccatgcctgcagcttggggatgctccctacagag

SEQ ID NO: 1836 - DNA, 1000 bp, mus musculus
agacctctcctctcaggagctatagctagggcgcgcctttcactggttgctgtatgccctgtaaacatctgcaagaacaggtttctgtgaagatctgttggaagaatgaacaaaggagtccttgcatggacgctgctagtgcaggctggctgaatgggagtgttatgtcacattcacagctgagatgacaatagggttccgcctattttgggcctggaggacacagttgaagtacagaatctgctggagaaatgacttgtcggttgaagcagtgccacttacattgtgtacctcgggcttgctctgtgtcctgaagcccaccatgtccccacagtggcaggtatctgctgagtgagctgcaggaaggaagggggaaggagaggagttgagagcagaggtctagaaatgtggaacaggaagtctctcccaaagtctaactgtgtctccgcttctctagctggaggatctggaagttactgtggctgatcacatccaaaaagtcatgaaagtgaactttgaggcagcctgggatgaggttggggatgaatttgagaaggaggaaacgttcaccctgtctactatcaagacactcgaaggtaaagtgctgctgacgtcatctctgacgatactgtggctggccagtgtgccttcccgcttcccaccaagaatccagagccttaagggatacctagcttgggactgactggggggaggtgggtgggggtgggaagtgcatacttaatgtgttaggcccaggatttcactagcacccaacaaaagcacacaaatactcatatgcctgtggcttaatgttgctgggattttccctacagaggctgtgggcaatattgtgaagttcctgggaatgcatccttgtgagaggtcagacaaagtgccagaaaacaagaacacccacacgctgctgctagctggtaagaaacgtctgtggcctgagtagcttcacggtgggagtgccactgggttttgtctgccgccatcc

SEQ ID NO: 1837 - DNA, 1600 bp, mus musculus
cggttctgtagctgtggtggaagtgtgcctggcggccccagccctgcccacgcgcctttaccgcactaccccctgtgcccaccaccggagcgccagatgcatggagggaggggggaattcgagagtggtcgagccatgggagtgtcggcccgcccacgcatgcggtacgggggggggggggggcgcggcgggagagcgcggtgacctgggccctggtatttggtgagggaacactaggagtgggatgggttggcgcgcatgccgagatgcgccgccccgcccccccctctccgagccaccattcccacagggccttcccagcagtcccggagccagtcatggagcaccgccatggtggaagtgcgcttggcgcaccataccgccccctgagccctctgccagaaggagggaaggagggggaatgatgcgcgggtggaggagttttcgctgcgggcaccttttttatttactttcctggtgctccttacctttggacagaagccttaaatgaatggatgcttagcatctcagggtggggccttctgaaaaaagaaaactcttaaaatgaaagcagttagtaacagactggatgcaagggaagtgcaggcaagcatctgtgcgcctcagaggccgcctgcacttgccaccccgcactcgccataagcataataaaggatgtttgaagctttcactgctctctctccccacattacagctatttcttcttttgtccccaccacccttggcacttctcccccacatccgcagaagcggcgccgctactcttgtctctttctccttgttctattcctctcccaggggcatctctgtcccctatctaagtgctcccttttttgagctccttaccccactctgtttctggcatgtgttgtacatgtgtctcagagttttctttccgccatggttctggatcatctccgctggagcagagggccttctctttggcgctagccgatggtgaggcagtgccgggattcagcgccatttgtcctgagcttttgtccttgcccgcaggaacgcacacaggacacaagatccttccatagctactttattacatcttgacgagaaaaggcaaaaaggctcagaaacgtgttgcttaaataccctctggtatgtcgtgtctatatacgactggctgctttactcacaatctcatagctccggggatgggccagtgactttggcgggcttttgctcttagtacatgtgcacatagcttgctctttgtttaggtggcataaggcactgcggagccagcgccatcttatgatggtaaatgttattgcggctctccacaaggggattatttgattttctggagtccaccctcttgagttctttatatatattggatattagtcccctatctgatttaaaataggtaaagatcctttcccaatctgttggtggcctttttgtcttattgacggtgtcttttgccttgcagaagctttgcagtttcatgaggtcccatttgtcaatccttgatcttacagcacaagccattgctgttctattcaggaatatttcccctgtgcccatatcttcgaggcttttccccactttctcctctata

SEQ ID NO: 1838 - DNA, 1200 bp, mus musculus
gaggtgttttatatgcagttcaaactccaagtgaaaattaagaaaaaaatagaatattacctagcatgaaagcaactaatcttaaacaaagtgtgggctattcttttgtattgtaaaacaatcaatccaatataaacatacccagtgttgtatttttccatcaatacttagtatcatatgcacttaatatgtcagaagaacaactttgtgaaatgttatgaactaataccacctacatcctatcacctagtgtagcctcccccagccttgagcagtctggctcacagctgttctgccactgtcagctagcccacctagggtggagttttcagacctagataggtctattgttctgccacttctgcagttttctccaagatgctgctacccactctgagtctgaacctgtcttcctgaggcaatcctgaataagcaagagcctggcaatgagggcctggcatggtgagggatgagcctacccttttataggctcagactcttaagtaaacttaggaccttgatcagcatctttgtcttggtctcaatatttctcttgccatctcttttcatacgtccccagcttccctttcaggaacaagctacaacctagaaatgtttttattaggtcaatatggtcatttaacttgtacagttgtcatttcttactcatttttaaaattgttattgatgctttgtgaatttctcaccatgttcccttgtatatttcctttatccttgcaacctcccccaccccaaaaaataaataagaaaaatagagttggatgatcacagcctaccatcagactgagtgcagggtccccaatgtaggaactagagaaaggtcccaaggagctgaaggggtttgcagcctcattaggggagcaacaatatgaactaaccagtacccgcagagctcccaaggactaaaccaccaaccaaagagcacacatggtaaaactcatggctccagcttcatatgcagcagaatatggcctagggagtcatcaatgggaggagagtcccttgatcttttgaaggctctatgccccagtgtaggtgaaagcctgagcaaggaagcaggattgggttgattggtaagcagggggagagggggagggatagaggggttggggggggaaccaggaaagaggataacatttgaaatgtaaataaaatatgtaataaaaaataaataaatag

SEQ ID NO: 1839 - DNA, 1000 bp, mus musculus
tcccccaagagccatcctccaagcaatacgcagccttaccggagacttcttgatgtccgaaacagcgtaattcccttgtgacgtccatctggcagactccgttaaagacagcccagtcccataaaggttgatgctaaagcgcccctggaacacaaagccaacacaaaagactttcagcccatgtgacataccaaccaaggcagagctgacacacattcaaaggcactttggtaagcagaaaggtgttaattaattttgatggccgctaatcgttgaaggtattttgttgttccgttgtcagagctaggcgccttacattcatgatttctaggtagggattttgtttacaggcggtgaaacccaggatcacagccgatcgactccctcctgaacacagaaagccctcaggtcatctttactgacttctaaatcctctctcagagcttcctccagccggcctccgtagcacggtaaccctgattgttgctcacaattatcagattccttcaggaccaaaatgccgcagtgtaatttttctaacaagatctagctgccaaagttcccccctcccccccccccccccccccgcttccagttccctggggcgaagagcaagcacactttgtaccaagcaccgctgggtgtgagttcaaagcagaggcgcgtttccaaaagcagccagaagagggcgcgcatcgcctgctgaagatagagcccactcccagcacatctaaggctgttccccgcccccctccgccccgccagtcttagttcaggaacagaattcccaaaggccacaagggtgtgtggtctgggcctttgataatgatatttatctctaaggagtccctgcagtagagacatcctgaaacggtctctcctctctttcaaaaccagatccaacactggcgggttctgagctgagaacgttctgtgaccctgaacatgcgtgctctcaggattactttctccagaactgagaacccacaactttgacaaa

SEQ ID NO: 1840 - DNA, 1000 bp, mus musculus
tctttctaagccctagctacttcacagagcacagtttcttcaagctttgcccatgttacagcagagattaaggctgaataacatcttatggtatgtgtaaatatgcacaaacctttgggttttagggaaggagtctctgaaatgtggatcagtgttcttgtttgcttcccgctgcagtgacaagaacactggtcaaaaccaatctggaggaggaagtggtttattccatctgacagggaacaaacagtccaccataaagacaagcaagggcaagaactcaaggaggtgcagaggtcaaaccacaaaggagtgctgcagttgtgtcaggaaacatttgtgattcccaaaaagaccaccaaggagccgaatccaatgcaatcacattaggatctctttattcaagttcaagcttggaccatctctgatgcaggagaacgggagggggcatcctgagctcagtgttaggcaagcatttatagaggcaacaagggttatctagcctggtacatatctgatttggggaccattacagcttttaacataattggctggtgctaagagtcaaaccacaaacttaacttctgccttttacatgattgggggttgttaggaggtgaaatgccagggcaggcttgttacctggaggtgcagatttgttggggaataacctggaaactggtgctagacacaggtcttatggggtaggggtagcctggaaactggcgctaggtacctgcctgttagtttacttgagttcaaccttaggtcaggctttctaagatggagtttgaaccccaaagatttgatctctaactgcttactggcttgctcaccttgcttttgtatataacccagggctaccacccgcagtgggctggaccctcccacatcaatcaccactctagaaaaggtcccatagactcacctccaggccaatcaaggaggcatcttctcagcagaggtttcctctttccaaatgaccctgccttgtgccaaggtg

SEQ ID NO: 1841 - DNA, 1400 bp, mus musculus
atattcatgaggaaaactggtctgcaattccttttttggctgaatttttgtgtggtttgagtatcagtctgatgtggcctcataaaatgaatctggcaatgctccctccatttctatttggtggaataatttgagaagcattgatattaactctttttttgaaagcctggtataattctgcactaaaactctctggccctgggcctctttggttgggagaattttagtgactacttctatttctttatgtgttataggtctgtttatccaaacttgatttaatttgataggtaggtggtacctattgagaaaattatccatttcttttagattttccagtttgggaaagtacagatttccaaagtatgcctaatgattctctgggtttccttggtgtctgttgttatgttccccctttcctttctgattttaataacttggatattttctatcttttagttaatttggatagggtttgtccatcttgttttttctcaaagaaccatctctttgtgaaagacctccgtggggatacccccacccgagtcacaagatagcacgcacccaaagaatcacaagggaccatcttgatgcaaacacacgaggtagtttaatgacagaagtccgggcctacatgtatctcacgcaggagacagaggtatcgaccccaaggctcaaaagttaggggcttatataggaaaagagtggggataggggaagaattggcacggcttcacacaattggatagtttaaacatcagcaaactgtatgtgcagagtgaagtaacagcaattctgaggggcaggggcttatgactcagctgagatagtccagacatccctgctgagatagtccgaatgtctttgcaggtcttctcctatctttatggctagccagttcctggaatggcttaacagcaacagcctttgttctttgcccttggcccaaaacgccctcctaagtagcaagccacatgagtcatggaccttgaatttaattttctttcatttgtttcatctattctgtgtattgttctttgtttctcttttattgatttcagctctcagtttgattatttcctgccatctacttcccttgggtatgcttgcttctttttgttctagtgcttatggatgtgctgttaagttggcagtatgagatctttccagttttttatgtaggcatttagtgctatgaacatgtttcttatgaaccgtgttcctatgtatttgggcagattgggtattcattttcattgaattatggaaagtctaattctttcttcatttctgtcttgactcatttttcatttagtagtgagttgttcagtttccatgagtttgtaagctttatgttgtttctattattattggtatccagctttattctgtggtagtct

SEQ ID NO: 1842 - DNA, 1000 bp, mus musculus
cacaatcatgttcctttgttcaaacataaagatccctagaataggccatgtatcaggccacaaaacaagcctcagtaagtggtaaatactctagagcataccacgtatcttctaaaaacactacagaataaaagtagagattaataatcaaggatggggagtggatgaagtacttggtgtacaaatgagaagactttgagttcagattccagagctcatataaaaccaggcacagcatcacacctctgtgatgccaactcctactgcaaggtgggagatggagctgagaaaatcccagaaactctcaggtcatatacagcatgaacacaaaagactctctaccttaagtaaggtggcattgagaaccaacaaccaatgttgtccatatacatgttgtaacaaaagagtgcccacactcacacatacatacaccacacatacacaagagatttttataggccaggatgacatctagcttgctctataactgaagataccatttaaaaggtacttcagacattataaaatacataaagagctaacatgctatagaatgaatagtagatcactgaagaaatgaaaagggatatttaacaatttaatgagaaaatagaaatgcagcataccaaaactatgagatatgacactgttgcagtctaaataacaaatgtctcccagtggtctccggctggtggtgctgtttggaaaggctgtgaaagctttcagatatggagcccaaatagaagtgggtcattgtggatgagtcttgaggctttgatttcatttcattttttaatagacagagtcttatatagtgcatgttgacatctaacttgctctataactgaggatgaccttgaatttttgacactcttacctctacctcctaaatgctagtatgcgccattgttctgcattttataaggccctaaacccagggcttcttgcatgcagtaccaactgagctacactctatgttcaattaattacaaataaaaaa

SEQ ID NO: 1843 - DNA, 1000 bp, mus musculus
tttctgggaaccaatctctaggtttctgaaagaactgtatatgctcttaaccatttgtcgagaccccatattaatctatatattttatttttttcacgattataacaaaattagatgtgggttaacttcataaagataagagatctatttatttcatagttttgaaagtaaggttgaagagtcacatctatttttgcagagcccgaaatgcagtataggaacaaagaacaacaaattctatctgtgggcatgtctgtcttcttttgttcctaaggctaccacaattcaatagtgaaggctgcaccctgataatcttatgtaagcttattgacatctctacacaggacaggcagatgaagcttcaccatcccagtagcattaacctgtaattcttgaaatcctgcatatgctttcaggaaaaaaacaacacttaactgtagcaagagcctcattttaatcactttgtagcaggacattttaagtcaatcaacaccaggacgtaaaccctaagagaaaatagatatatgacctcaccattcacagggagtttggacattgttactagcattttgtaaaatccctttattgttcttgagccctgctaactaaggttgaagttagcaaatccctgagcttgctgcacaagtgattccctttcagcagggtttctccttcttaaaccttgtctgagggatccaaaaccaccataccctctacctgtggaatgtcatgaagcctaggtaagattataggttcagctttctttcatctataagaaagcaagcacctgagattcctggaatgcctccctttgctaatgctactgtggcttcttagtaccttagccttcagtcaatgacctttgcccaccctggatatttatgtggcctttcctgaaactgtataacccttgactcactccaaattaagttgatctgtgtccctgaagctgatcctggaatgttgtccttttcatttatactcatgggtaatcctaaac

SEQ ID NO: 1844 - DNA, 1000 bp, mus musculus
atggatggaactagaaaatatcatcctgaggtaactgggacccaaaagtgtgcactcactaataagctgatattagccaaaaactacagaatacctaggatacaacccaaaaaaactcaaaaaggttaacaagcagaaggagtaaggatgctttaatcccacttgggagggagaagaaaacaatcttgggagagagggacctgagtgggagaggggatggggagaggaagaagggaaaatgattgggggcagagacaggagagaagccctgagggacagcagaatgaatggaaatatgcaacctcagagagtgggagtaggggaaccctctagaaagtatcaaagacctgggaggttaaatccagtgacctgcctaacttggaatccatctcaagggaaggctccaagacctgacactattactgatgctatggtgtacttacagacaggaacctaccatgactgtcttctaagaagcccaagaagcagctgactcagacagaagcagaaatacccgaccactggaccactggactgaagtcaggaacccctgcagttgaattagggaaagctagaagaagcagaggaggaaggcaaccccatagaaagaccaggagtctcaactattctggacccttgagatctctcagacactgagacaccaatcaagcagtatacagagctggtcttaagcccctgacacatatatagcagaaaactacctggtctggcctcagtgggagaagacaaccctaaccctcctcaagagacttgaggccccagggagtggggaggtctgtcagggggggagggccatactcttagagacaggggaagggagagatgggtcaaggaactgtaagagggcagacctagaggggaccaacaactggattgcaaaaaaaagtaaacaaacaagtaacacaacactttgccattgttatcagaccatacaaatgtcaaactcagatggaaatcgaaacacagtatagaagccacc

SEQ ID NO: 1845 - DNA, 1000 bp, mus musculus
tccatgtttaaaaagaaatcggtttataattattttttcattgaggtttttgactaatttattcactttctatcccaatagtagcttcccctccctccagtactcacagtcctttcctctgatctccccttcccctttcttcctagaaatggggaggcctcccatgtacatcaatcagctccagcatatcaagtgacagcaataccaggcatattctcttccactgatgctagaaaattcagcccagttaaggaaagtaaactaaaggcagacaacgtagttagagacaatcccatttcccactttaggaaccccatatgaagacacaggtcaactactgctacatatatataaagggcctagtttcatcttattcatgctccgtggttggaaatgcgtgagaccaaatgggcccacgttagtagactgtaggttttcatatgatgtccttgaaccatatggttccctcaatcctccctctccctcttccccgggattctccaagctccacttattgttttgctgtgcatctctgtatcagttaacatcagttgctaggtgaagcctctctggtaactgttatgctaagctcctgtttgcaagtacaacagaatatcagctatagtgtagtgtcaagggtgggttccctctcatggcatgggtctcatggcatgagtctcaaatgatttgcccttccctcaaattctggtccctctcctaatcctgtactcttataggcagaacaaattgtgggtctaagagtttgtgatgggatttatgttcaaatcttttcattaggaaatcttgactggttacaggacatagcatgttgaaactatatcgctcattgctagaactctcaactaggctcattcttacagctcctggaagtttccattattctagagatggaccaaccccaatctagttgtctctcccagtattctctccctccatactttgttgagtttttatgtgtttttttttttttttaacatgg

SEQ ID NO: 1846 - DNA, 1200 bp, mus musculus
tgggattcagttattcgtgggtgcgagggggaccgcaaacctggaaggagatgggaggaagaaaaagaagagtaggagaccaggaaggatacctatcgaggtctcgtttattatgttgaggtgccttctttttaaagcatacatcttggggaatatgggaggggtcgagggagaattatacaaagaacaaagacatgggcaactgctgacatgggggccgaagtcaggcgccaggcagcgggcactctgcatcttatctctggaacatcgatcctccttgacagccttggggttcaggctgggctcaggcgtaactcatgtccttggatggcatgggaactcaggaagagatagggaagaggggactataattcagcttttacagcctcagttgccaagaaaggaatagggaggaaggggggtgataaccagctcttagtacaaggacatttggcctgttagggagattgtgaagggctcactttctcacgggatggtctctgacagttacagacccctttagctccttgggtactttctctagctcctccattgggggccctgtgatacatccaatagctgactgtgagcatccacttctgtgtttgctaggccccggcatagtctcacaagagacagctatatcagggtcctttcagcaaaatcttgctagtgtatgcaatggtgtcagtgtttggaggctgattatgggatagatccctggatatggcagtcctataggtggaacaacaatataaactaaccagtaccccggagctcttgtctctagctgcatatgtatcaaaagatggcctagtaggccatcactggaaagagaggcccattggtcatgcaaactttatatgccccagtacaggggaacaccagggccaaaaagtgggagtgggtgggtaggggagtggggggagggtttgggggacttttgggataccattggaaatgtaaatgaggaaaatacctaataaaaatatttaaaaagaaaagaaaaaaataccttgtggaaaaaaaacttagagaaacaaaaattacattaacagaagtagagttaatatatttgtatggaagcacaaaagtctccagatagtcaaagctaaacataacagaaaagaaaatttgaagatatcataatgttatcttaaatcatattacatagctacagtaacaaaaataccatggctc

SEQ ID NO: 1847 - DNA, 1800 bp, mus musculus
gagctcttgccctcgctcttgctctcttgcgctctggctcctaaagatgtaagcaatagagctcttgctctcttgcgctctggctcctaaagatgtaagcaataaagcttttgccgcataagattccggtttgttgcgttcttcctggctggtcgcgagaacgcgtgtaagatgtgtgtatgtgtgttgtgtttgatgtgtttgtgtgttttctacacacagacattcacaaagagtagcactttctatatttatctttacttcatgtgctaaagtatagtaatgatcagcctctaaatgctgacaccattgcatacactagcaagtttttgctgaaaggacccagatatagctgtctcttgtgaggctatgctggggcctagcaaacacataagtagatgctcacagtcagctattggatggatcacagggccaccaatggaggagctagagaaagtagccaaggagctaaatggatgtgcaacgctataggtggaacaacattatgaactaaccagtaccccggagctcttgactctatctgcatatgtatcagaagatggcctagtcagccatcattggaaagagaggcccattggacttgcaaactttatatgccccagtacaggggaacgccagggccaagaagtgggagtgggtgggtaggggatttgggggaagggtatgggggacttttgggatagcattggaaatgtaaatgaagaaaatacctaattaaaaaatgaaattaaaaaaaggtatagtaatgatccagaattgtatctctaatcagaaacattttcaagataatgtcaattaaaaaaaaaccaacggatgtgtttttccaacggatgtgtttttcagtgtaactcactcatctaatatgttctacagtgtggttttttatcattttccatgttcctcattgtaactcattgatatacactgttctacaattcccgtttccaacgaatgtgtttttcagtgtaactcactcatctaatatgttctacagtgtggtttttatcattttccatgtttctcattgtaactcattgatatacactgttctacaaatcccgtttctatactttctcttgtttttcatgtatttaccttgcttgaaagattgcttgatatatttcatacactgttaagatcttttgtgtatatttaaaactcatacattttcttggttttatcatttgggcatttggttattaaactttttaaaaataacaaatgtcactaatacttggggtggattttactttatcatctagattttcatggactaaggacgataagccttttgatctttctgatcctcggataattgcggctaacaattcaggcacattcaagatcccaaatgagggccacatctctcactttcaaggaaaataccgctgtttcgcatccaatagactaggaactgcagtatcagaagaaatagagttcatagtaccaggtaagtgtccaggcacagattgaatcgacagttgctctagtgaagtgttaaatggacataatagcaactaaagaaagatattagtatgaatttaattagtgtgtatttaattattagaaaaattttcatcagagtcttgatatttacagtttagattttaggagaaagtagcataaccactctgtcagcttcactaaccatctatgtaacctggggaaagtaattagttttcatatatgatgatggttaaatctatgattagtgaaacctagctcagtttcagtagcacatgatctcaaagcctctacatcaacacaaagacactcttt

SEQ ID NO: 1848 - DNA, 1200 bp, mus musculus
caatgatattgctgatatgttgatttagaattgtgtatcatgttgctttatgtcatttcttgcttgctttgctctacaaaagcgtttcaatttatataatcccatatgtacaaattgttgttcatatttctgtactagaatagtctaacaaagtccatatatatgtgtatatattgattgtattgctttcgctaagtttttatctaatagtttcagagttgcgattttcccttttctacattatttatttacatttcaattgtttcttcccccatcctcctccctgagttctttactccttatccactttgcctcttagaaggtgaaccccacacaactacccacttctctcacccactcaccccccacttcacctcccgaggtgcccctgcatccctccttccttggagcatcaagtctctacagtattaggttcactctcccactgagatcagacaaggcagttggaaactggttggaggtttagtctctgggaactctgaggagtccatgatagttgaaactgttgttcttcccatggggttggcaaccccttcagtgtcttcaatccttcccatctctcgtccataggggtctgtgacctcagtccaatgtttggctgtgagtatttgcatctgtctctgtcagctactgttagagcctcttaggggacagccatgctaggttcctgtctgcaagcacagcatggcataagtaataatgtcagggatttgtgcctgcatatgggatggatcccaagttgggctggtcactggatgggcctttccttcagtctttgctccatttttgttcctgtatttcctttagacatgaaaaattctaaatcaaaaattttgaaggtgggtcagtggccccatccctgcactggaggctctttctgtctactggaggtggtctcttcagctccccactgagcatttcagctaagctcatacccactgagtatgaaagtctcttacttccaggtctctgtgacttactagaggttctctgtgccccttcacccctacagctgcatattctattcattctcctgaacctctgggcttctctcctgactccccctatacccaatcctgctcttacatggaaagttttttgtttgtttctttgtttgtttttgttttttatacagttccaagtatgttctctacaggcttttatatatggatcatgtgg

SEQ ID NO: 1849 - DNA, 1000 bp, mus musculus
ggaacagtctgcggtccctcggggaactgccagagtctggctcagattatctagcaccgcagactccgctgggtgctgtggaagagtcagtgctggggtccctgaaccacacatagaccagggatgtcaggtcctcagttttcgacatctcagacacctctggatgttgcagaagagctgagaacagagtggggcctgggcttactctggcctggggccaaggggaaaatggtaggaggagagagctcttgtaggttattgcagggaatccttgtgttgcctggcaggcggcttgggttggtggaattcatggctgaagcacctggaggtttcctggcaggaggttagacaggcatgacttgttagaggaagacctgatccattgctcaagcatggcagatcccaatgagaagaagcagtccgtggttttaaagcattttttgtagaagggcagagagggagagagtagggaagtagaggtcggccatggctacatggggtgtggggaaggagtaagagcaggagggcaagaagtgagagtaaaagcaagagggtaatagagtaagcaagagagagaggagggttcaatagccccttgtataggggactgggtctacctggctgttgccaggtaattgtgggggtagagtccagacagaataccaggagcttggggctttgcctacatgactgatggccacataccttaggtgtgaggggtggggggaggctgtgggaggctatagctccaacaggagctaggggcccaggaggcatggcagaacacttgctgacctttagtgtcaccagggttcaaggcctgtgcttaaccagcgaccaggctgtctgtgcacagctcatagcctcacaaaagagtgtcagatcccctgaagctctaggtatagaaagttgtgaggcttctaggtgggatgatgagagtcaatctcaggtcctctacaagaacagcccaggcacactctccaaccgtcagcagtgtctg

SEQ ID NO: 1850 - DNA, 1000 bp, mus musculus
tggaccttaaaaacacacttagaagactcattatctgcaggtaaccaaggtctcctaaggcttcacaaaggccatatgttcttgggttatttgaacgtcagcacctccagaacttagagtctatgggcatctcaagtctggagatgctgaagggaagccttcagtggaaaggctttcctgaagaatactaggcacttcccttcacttgttcatacttgcctgctgactatgcctactatgtttccttctagaaagcctttaaacttcataggtttcttgtattaaaaattttaatgtcaattcaatggccttctgtatttcttgtggtgagttttatatttgcttggtgaaatgttgaagaggacgaccaagtgtgtttatgtcaacaatttgaatcatttgatcatacagaaaatgtgaggattcccccctccccagaattaaaagtgattttctgtcctgtgtgtgtgtgtgtgtgtgtgtgtgtgtgtgtgtgtgtgtaagtgtgtttcatgcatatgtgtttacatgtgagtccatgcagatggtcttacatttatatgtagaggccactagtcagcatggagtgatttctaccatcgtcagcctagtatttgagacagggtctctttgtgaacctgagctcttcagttcagctaggttgaacagcctcctgtgtctatgttctttcatcaccatgtttaaaaagagacatgacaacacttggctttttagtgtgtgcggggggggggagggggtccaacctcaggtgctcatcctcaccaggcaggacattaactggatgagccattttggcaggattcaattatttttttcaatattttttacactttgctatgattatgttccctgatctgtttggaaacaatgccaagccttttgaaaacagtctaataaaaaaatgcacaaagatactgtataccatacactctattcccactagttgtacaaataccataaattattagaatttaatatt

SEQ ID NO: 1851 - DNA, 1200 bp, mus musculus
tgtccttggtgcagtttcatcatgaaagaacagattggatctctttctttttaaaccatggccatttaaataggataatctcagctaagcaattgccccagaggtaaagaagatgatactgttttacataagaaagcattgatttaaatctgtttgttttgtttgcgatttcatggtgttcactacaagtgggaactacttttgattacagaactagctgataatggagttctgtatctttgtatgggctctcttccattcttccttcatttttcttcattttaaaagtctgtcaagtctttcacaactgactctgcttcatttcctacttttactgttgtaatcaactaaaatatatgtatgttaattcccttatatgcaaatttaaaacaaattttttttgtggttgttcactttagtgttttcagttgtttaacaaacttcacaatatttctgacaccttgaccacaaatactggaacctttgtctttgcaatcacttcttgtactatgcttagccaaacaccacaagggtttcacaggcatgctgcaattcttagtaaacagcaccccctctctctgtggggcctctacatcaacttctgcctgcagatttcggccctgtttgagttcctattttgatgaactgtgatatggaagaataagaaaagaaaagcatttccccatcaaattgcttttggccatggtgttttatcatagcaatagtaactctatgatgaccttaagtatttctgctcaaagttttagtatttcaacttgaatattttaacaaaattatgttgtttcaatgtacccttttaaaatccccttggcttataatcaagaattgttcatttgttcgccatttttatttgtttgttttgctctgtgttgagtgattttatgtaaaccctgtaggcacatagtgaggactagtgagatccgtcgttcagtaaagctgtttttcttgaaagtgtgaagatgtacattggatttcctgaatccatttttaaaatgctgttaggatgccagtgcagaaaaagtagagagccatatctcccttgaagaagttgttcacagcctcaagaaagacacatgagtttgaattatatatttcatgcaggtgcacattcatatttctctctcatacacttctctctcctcttctctctctctctctctctctctctctctctctctc

SEQ ID NO: 1852 - DNA, 1200 bp, mus musculus
gttctcttttcatcttcagagacttttactatttatcattgcagaatttgtttcttaactatctgcaaatctcaaaatccaaaattttcatataactcagtgatacctttggggacgttattttgtgagtgtacttcatcaatgtgttttttccttccacttttaaatattttaatgtacgactctttgtcagccattatatttacttttcttatcttacttaaaatcttagacaaatggatggatctggaggatatcatcacaagtgaggtaatccaattacaaaagaacacacatgatacaactcactgataagtggatattaccccagaagctcagaatacctaagatataatttgcaaaatacatagaactcaagaaggaaggtctttggaagaccaaagtgtagatatttcaatacttcttaggaggggggacaaaatacccatagaaggagctacagagacaaagtgtggggcagagactgaaggaatgaccatccagagactgccccacatagggattcattccataaagaaccaccaaaaccagacactatgtggatgtcaacaagagcttgctgacaggagactgatatagctgtctcctgagaggctctgctagtgcctgacaaatatagaagtggactgagcacagggtccccaatgaaggagctagagaatgtacccaaggagttgaaagggtttgcagctccatagaaggaacaacaatatgaatgaaccagtaccctcagagctccctgggacaaaagtaccagtcaaagaaaacacatggtgggactcatggttttagctgcatatgtagcagaggatggcctggttgctcattaatgggaggagaggtccttggtcctgtgaagcttatatgcctcaatatagaagaatgccatggccaggaaacaggaatgtgtaggttggtgaccagggggatggagaggggattaggatttccagaggagaaactaggaaaggggataacatttaaaatgtaaataaaggaaatatgtaataaaaaaagaaaagaaaagtaaggaagtgttcaaaagttaataacaaataaataaatattgcatagatagatatatagttatgagctacttctcttcggataatgaatacctcaaactagtgatgactttatttagactctgtgctcatggtagcaatgtaatacatattt

SEQ ID NO: 1853 - DNA, 1200 bp, mus musculus
atgcttatattacgcttatatatttcactttattttcatggagtatttttccccataggtagctccattttacagatgaggaaactgtctcatagattgaacaatgatgtgcttgaaatctcacagatattatgtgcctatgcctagatttcaacctaagcagcgtggctgcagtgtttagtgggcaagaatcttaaccagtgtgttcctttcctttcttttttgcaatttttaaattctctactaccttttcccccaatattttagtttatattcactttacatctccttcttccaagagaaggggagccccccttgggtactcccctaccctgaacatctagttccagcaggcctaggcatatcctctctactgaggcccacccaggcagtctgggtagggggaaggagacccaatggcatggaccagaaactgagatagctccttctccacatgttagagatcccacatgaagactgtgctggatatgtgcaacaaatgtgtaagatctcctgaatgttcccatgtttgtggcctaggtttggtgagccaccatggtcccaggatagttgactttgtgggtatggttgtggtgtccttgacccctttgacttactcacttttattcctactccattcttccataacactcccagagctccatcctatgttttgctgtggatcttggcagctgcctccgtccactgctggatgaagcctctcaggaggcagttatgctaggtttctgtctacaagcatagcagactatcattaataatgtcaggggttccctctctcacatgggatgagtctcaagtcggggcagtgattggttggttgtttcttcagtctctgctccatgtttattcctgtatgtattataggcttgaaggttttgtgggtggatatattgatgttcccctccttccttgggaagacctgacaagaggtagctacttcagtttctatattattctagtaggaatctcagctagagtatagaatctattcctatagattccctgtaaccccccctgtcacaggctgcgagccagccaccacagattccttttgccaatttccattctcactcacagccctcccactcccccacctcatccccatctttccacccctgatagcaatccctattttcctctttacccctcccttcccagttccctctctccacccacctc

SEQ ID NO: 1854 - DNA, 1000 bp, mus musculus
tgttaattaatgttatgcattgacatatagatgttaggtggtaattcctccatattctaaaatgcttacattgcctttaattctagagaattaaacttctactctgtaaatttagttgcaggtactgtattatttacccctaagtttgtaacattatctattcctctaatggtctgtagcttaaaaatgtgcattatgaatgaagaaaaaaataaaaaatatctaaatcataaaaaacgtgcattatatcaatgtcattagctatcctctgtgagactgtatgtatgtgtacattcatgcatgcgtatgtgtatgtgtgtagttgtgtgtgtgtgaaatatgcatgactgtaaatgtatgtgcaagtgcatgtggggtgtgtgtgtgtgtgtgtgtgtgtgtgtgtgtgtgtgcctgcataaatgttgtgtttcaggcagaataggatgtacattgtccttcatttacatgccagtttactcttttgagtatgagctcacattgaacttagatgtcaccattttcatctggcttgtagccagcaagtcccagcccatgttgtctctctatccctgatgctgggattacccacattcccaggtacactggactttcaaaatgcataacggccatgggaatatgaattaggtcatcacattaggtctgcatgtttgccctgcacgcatttgctatctgagccatctcaacagcctagtaattatttttttgactaccacatactaaaaggattatagtgttgggtagtatgtgttcatgtatacagaacttaccatgtaagcatgcgtttaggtaatcatagttactgatactgataaatttcaaaatgttagaaaaattagggaacagctgagattaattatgcaatgttcatttaatgaatacagcttattgatgacaaatcacctctaagacaaatggaagtattttctatcaacaacttttaattcttcagctgcatcttcatgcacattttagtgga

SEQ ID NO: 1855 - DNA, 1000 bp, mus musculus
aaagttcacctagaagaaatagtttgcttcctactgatgctgggaaagaaatgaagggaatgtttgttgtgttttataaaaatagagaaggaatatgttttggtggatgtgtagtcaggtatggggaaagggtgtgcctctgtgggcccatgctgaggcatcccttcaccctgagggaccagccacatggtatagtatagaatagagtttattcagcgcatggggaggggagttgagagggtagtagagacagaaaggaagagagagagagagcagaggagtagaggccggtcatgagcacctggagggggcagaatagggagagaggaggaagggacaggatgagagaacagagtgagagcaagaaggcaagagagagcagaggggcaagcagcccctttaatagtgagtcatttaatagtgccaggtaactgtgggaggagctaacaatgttactctcgttaacaatgtatacataaagacttagtcatagtcacatttgaacattctaccccctcctcactttctcatagacaagtgatacactatgtaaaattaatagatgataactaggtataggtaggccaatgaatagcatagaagagagtctcaaaatatagcctaaatatcagaggtctggttctggacagcagcatacatgctctgcttataactacccaattccattcccagtcaatgataaagcattcctcgggcatttgctatgtgctaaacctactgcttggcactgagaatagaagggaaagatagataaagccagtcctcaagatgctcgtagtccacgaccagggtccacgagcaagatcgcatgatttttttcagtaactctgaggactaggttataaagttgatatattaagtgtttaaaagaaacactgaaaaatgaaaggcggcaatagattgtagagatttcaagtttatgtctgaggaacttagactcggacctgaacaccctcaatggaattgaaggattttaatg

SEQ ID NO: 1856 - DNA, 1000 bp, mus musculus; identical to SEQ ID NO: 1855

SEQ ID NO: 1857 - DNA, 1000 bp, mus musculus; identical to SEQ ID NO: 1855

SEQ ID NO: 1858 - DNA, 1600 bp, mus musculus
agtatctgacaaaatagacttcaaaccaaaactaatcagaatagatagggaaggacacagtatcctctcaaaattctaccaagagcacattgcaattcttaacatctatgtacaaatacaagggcaccaaagttcatgaaacaaacaccactacagcttaaatcacatattgacacccacacactggtagtgggatctctcttatcaatagagaggtcatacacacgaaaactaaacagagatgctggagttaacagacattttaaaccaagtggacttaacaggtaattatggtacatttcacccaagtacttagaaactcatataatttttctctaaaaatgaccacttacttagacacaaagcaggtctcaaaagatctggtcaccatgtattaaagctcgatatcagcaataacagaaacaaacaaaaaaacttcaaacccgcaaaaattgaatatctcactaattaatgaaatatgtgccaagatgacaattaagtaaaaaaaattaaagattttctaaaattgaatgaaaataaatacaaaccatacccaggcttataggatataataaaggttgttctaaaaggcaagttcttggcactaagcacctacataaaaatttgagagatcccatttgtgaaggttaaataggtttggccctcatagactcatgtacttgaatgctttgctcacaacaaatggcactattaggaggtgtggccttgtttgagtaggtgtggccttgttgaaggaagtgtatcactgtgggggtgggctttgaggtctcctatgcctaagctccacccaatgtggaatccgagcctcctccttgctgcctttagaccaagatgcagaactctcagcttctcctccagcaccatgtctgcctgcacactgccatgcttcctgacatgatgataatcgactgaacctcttaaactgtaagccagtctcaattaaatgtttcctttataagagttgccttgggctggagagatggctcagtggttaagaatatgtactgttcttgcaaagcaccttagttcaactcctggcatgcacatcaggcaacttacaactgcttgtaactccagcatccaaagtatgaccctaacttcaggcatatgcacatatacagaaatacacatatgcatatgtaaataaatatggtcataaatattgttttggtcatagtgtctcttcacaatgagaaaacccaagtaagacaccattctagtaacttaacagcacacctgaaagtttagggaaaattgaagagaagaaatcacacctcaaaggaatagacggcaagaaatagtcaaacttgggcctaaaatcatcaaatacaaacaaacaagcaagatacaaagaattaataaaaacaaacagttcattctttgagaaaatgtataagattaacaaacgctatccaaattaagatgcaaattcacaaaagaagaaacgataaggggtgatataataacagccactaaagaaatccagagaataataagggtacactttaaaaacctgaactttaccaagttggaaatccaaaaggaatggataatttctcgatatacactacttcccaaa

SEQ ID NO: 1859 - DNA, 1000 bp, mus musculus
aaggcacccagttaggctgagccagcatctttccagagatgctacccaggcagttaaacacagacatgcactgtcctcaggccacagcctggagctaattaggcagtctagaagaaacagaatcttttttaaagggcccctcaaaaccagggcacagacatcatgcttcttcacagaaccatctccgttctcaccatcaagtatcactacacagacagacagacaggcaggcaggcaagcaggcaggcaggcagacagacagacagacagacagacaggagtgagcatgacaaaagtgtcatgaccaatgtaatctttccatgattctgagtaccaaggcatgggggcaaaaaaagacccacctttcatttcctgtaggtgtcgcttgtaagcatctaccttggctgtcctttcattaccttgaaagtgtttttcttaggaaggaaatggcccagttgaagctttccatcaagtttgattaactgggtgataaaacgtacacttttacaaagtaaatcctcagaaagtgaactcattataaatgctgagatatgtcaaaggacaagagcccagactcctctggactataaaagcaatgtttaactacctaatatcacacatcattacagtaacaatttctagcaactctgaccccaactctcatctgttaatagatcagacacaagtatgaccaatgcatctgacatgagcaagaaaggaggagtacaagagtgttttgttgctgtataattcttgtctttatgaaatacaaatgctgtgtgtgtgtgtgtgtgtgtgtgtgtgtgtgtgtgtgtgtgtgtgtgtgtgtgtgcaggttaacctgtatgtgcaaacatccctagtggaatacatgaatgtttgtggagatctaaggtcaacctccttggttgtcattgcttgggtaccgttcacctgagacagtgtctcctactagcctggcacttggaacccagacttagaaggatctgcttctcaactg

SEQ ID NO: 1860 - DNA, 1000 bp, mus musculus
atgagggaggctcccagtagtgtatggggtaactttagctcagaatcctagcaatgtgaatatggaacctcaagtggccatttcctatagccaggcaggacccgcagtggaggggtaaggacaccaggccacccacaaaactttcaattagtaataatcgtgcctcggataaacctcattggctacgatcccacaaaactttcaatccaaaagttgtcctatttaccagagatgtagagacaaagatagagcagaggttgagggaatgaccaaccaataactgacacaacttgggacccatcctatggtcaagcaccaatcccagacacaattaatgatactctgttatacttgtagacagaagtctggcataactatcctctgagaggctccacccagcagccaatggagacagatgctcagagccacagccaaacattggaagaagctcgaaagctttatggaagagttgggaaaagcattgaagaacaagtctgggcttggaactccacaggaagaccaatagagtcaactaacctggattcttggggcttttagtgactggaccatcaaccaaagaacatacacaggctgaacctagacccctgcacatatgttgaagatatgcagctcagtctttatgcgggttccccaagaacaaaaggagggtctgtctgttgtctgttgcctgcctgtacatcctgttctcctaacagagctgctttgatttgcatcagtgggagatgatactcctagccctggcaagatttgataggtcaaggtagtggaattcccaaggggtcttcaccccagaggagaagggaagtggggatgggaggaagcaactgtgtgagaggggaaaagggacgaggtaacaatcaggatgtacagtgaatgaatgaatgaataaacgaatgaatgaatgaattaataaaaagaattgaagttttctagttcctgaaattaaataattgccaaattatttatccaaaacctagtc

SEQ ID NO: 1861 - DNA, 1000 bp, mus musculus
ctttaagctgactctctctgtgacagcaggagagagggggaggcagggagacagagagaaccactttgtgtgcagcagctcataagtgcatacctgagatgcagcagagagtgtcttcccaaccagagtcattagaaggaggcagcacaatgccctttccaaattaagaacatagaggacaaaactggcccgtaagaagatccagctttggtttgaattggaagataccacccatactatcagaacagcctgtgtaatatatttttttctttttccaattagtgtggtgtaacttgtattcattttgtgaaattagagaataaagatgctaattaacagtgtaccataaaaagcattggtgactattgggatacctttatttctggagaattcactaatgtgagatgctacctttcaggacagtagtcaagggattaaagaagaaagcactgtggaaattaccaagctttattagactggcatctgttttatctcatgtttataaatatcactaaaatagtctttgaactgaagtctacagttgctttactgtagctctagtgacaggtattctgagcaatcatcccctgctacttatatacattgcgcttgcatcagaggtagctctgggattcatgctttcttgaatcctgcggtctctattatcctttctagcatttcctcattccttagttggagtgcaactctcatgttgagtttggccttttgattttctagtgacaggagatgcagaaacgatgtgcatagtgtcttttactgtgactctttctaggaatgcattctttattctctctctacttctgcattttccaaagaaggagcagaggatagaaaaccagtaaatagccacatgacctgccatacccagcactaacattttatagtatcaaatagatgaaccctataagtgtatgaggaatcaatgaatgttattttatgattctgagatgtggaagagtttgcaatgtagcacttttat

SEQ ID NO: 1862 - DNA, 1000 bp, mus musculus
ttttaatcttgtttttacaatccaaattgtatccccttctctgtccaccctctgactgttccacactccataccttccctgcccctgtctccacaagtatgtccccatccccccaccaccagttcccaccccaccagacctccggaagactgacagccctctgaaagacccaagaagaagctgtgcccactccttgtagcctctagtctcttaagggttcagaacatcttctctgactgagtccagacctggcagtcctctgctatatgtgttgggggcctcatatcagctggtgtatgctgctttgttggtggcccagtgtctgagagatctcaagagtccaggttagttgagactgctggttctcctctcctacagggttgcattcctcctcagcttcttccagcttttcactaattcaaccacaaggggcagcaggttctgtccattggttgggtgtaaatatctgcatctgactctttcacctgcttgttggttctttctgacggcagtaatgataagcccccttttgtgagcacaccatagccttagcaatagtgtcaggcctcagggcctatccttgagctagatcccaatttaggcctgttgctggccctccgtttcctcaggctcttctgcatttttgtccctgcagttctttcagacagaaacaattatgggtcagagtttttgactatggaatggcaatcgcatccctcacctgatgccctctctttctgatggaagtgggcgctacaaactccctctccctactgtaaggcatttcatctaaggttcctcactttgagccctgagacccacctcccaggttctggtatattctggaggatgcccccacctcttacctcctgagattgcctctttccattttttttttctgctggccctcagggcttcagtcctgttccccctacccaatacctgatcaagttcccctctttccctccctgttccctttcctacccaggtccctctctct

SEQ ID NO: 1863 - DNA, 1000 bp, mus musculus
gtaagccataggtctggggatggggaaggcgcagcctgaggtccccttggacctgctggagtcgaggtcagacttttgggcaccacagacaccactgggtcccttggaagaactggttctggggttcctgagcctcatggaggccaagaatgtcaggttctcagtctttgacatcccagatgccgttgtatgtcaaagaagagctgagaacagagtggggaccctctcacaaactctggcctcgggaccaaaaggaaaagggcaggggggagatctttatcgaagggacaaggagagtcttttggcaggcaagttgcttggattggttggcagccatggctggagcacaggaaggcctcctggtgggaggttagaccagcagctcattagctccttagaggaatacctgctccattgctccagctcgcatcccattgagaagaggtagtccgtggttttaaggtttattgcagaaaggtagagagagggaaagagtagggaagtagaagctggccatggccatgtggggggagggggagggtaagggggatgaagagaagggagtaaaagggcaagagagaagcaagagagtaagagagcaagagagcaaggagggggcaagcatctcctttcacagtgggttgggtcattctggctgttgccaggtaactgtgggggtagagtccagacagaataccaggagcttggggcatagtctacataactgatggtcacacacctgtctgtgggaggtcgggggtgtgtgtgtgggaggggctgtgagaggatgaagctgtgacaggagccaggggcccaggaggcattgcctgtgctcaactggggacctggctgtctgtgcatagctccctgccctacaaaagatgacttgtgtgaaccatgaaatgcaaaatcaaagccatgaaacagggaacttgaaactacattattacattcaatcaaacctctgtatcaccagggggttctactcccttggtttctt

SEQ ID NO: 1864 - DNA, 1000 bp, mus musculus
agaggactggagcacaacagtgtcttctaaacataaaaaataactatactagcccggcgtggtggtgcacgcctttaattccagcacttaggaggcagaggcagacagatttctgagttcgaggccagtctggtctacagagtgagttccaggacatccagggctacagagagaaaccctgtctgaaaaaaaacaaaaacaaaaacaaaaacatacccaacaacctatacttacacaatcacatggctgcataagatcagtccttgccaggcactcaggaggcagaggctactagatctctgagtttgagaccatcctgctctacagagtgagttccaggacatccagggctacacagagaaaccctgtctgaaaaaaaacaaaaacaaaaacaaaaacaaaaacaaaaacaaaaacatacccaacaacctatacttacacaatcacatggctgcataagatcagtccttgccaggcactcaggaggcagaggctactagatctctgagtttgagaccatcctgctctacagagtgagttccaggacagtcagagcaacacaaagaaactttaaatcccgctaacatgcctcatcagcctctaccccttgataaaaatctattgacagttggtggttcctgtacaatggagaatcagcacatggcccttggtagattcactatgcaccagtggttgtccccatactcatgaatatatgggaagcacaaattaggctgaataggttataaacttttaaaagagaacattgagttggaagcagagtatgggtggctctttgaggaattaaagataggaggtaagaaggagtacaatcaaatacatcacatgtacatataaaattttgaagtatttttctcaatagccaggcgttgtggaacatgtttagaatccaagcgctggggaaaaagagacaggcagacccctggggcctactaattgataagctttaggccaatacaagaccctttctcaaaacaag

SEQ ID NO: 1865 - DNA, 1000 bp, mus musculus
gacctcaggtcctagatacagccaaatgtcccctgatgcttctagatgacagttaccatttagatacacagctaatgcctcattactacactgccacaaggaacttggcatggtcttgggagcagggctgcccaggaatgaatgacccaagcctccaagacagacagggcaggtggcagtgtccctgctgtcaaaatagagcatatagaggtgactcagtggtcaggtcctaagatatagaggggttctgagtttgagttctgggaagattctgagactactccagaatatgttgattgtatgaaaggtacaaagaaaattagcatcagggagggaatggatgcaggaaaaggacattgccaaccatgggttatcctgtcattggttgctgaagtctagagtgtaatgctaatggagacgtcaaggtgacagcattaagcaccacatacttaggaggcaaaggtatttacacaccaattccaatcagccagtggttacatggggcaatgtctccccaaagcaggctccagggataagagaattccttcagcatgagatgagagagccagcttcaggcagtcagtcatctatgccccttggcatgccagggcactgcagtatctgatactgtcaaatgtgtcaggtcaccgggcctgatgggttcactattgtcttagttaggattttactgctgtgaacagataccatgaccaaggcaagtcttataaaaaacaacatttaatgggggctggcttacaggttcagaggttcagtccattatcatcaaggtgggcgcatggcactatccaggcaggcatggtgcaggaggaactgagagttctacatcttcatccaaaggctgctagtggaagactgacttccaggcacccaggatgaggatcttatgttcacacccacagtgacacacctactccaaccaggtcacacctattccaacaaggccacccctccaaatggtggcactccctggtgcaagaat

SEQ ID NO: 1866 - DNA, 1000 bp, mus musculus
cagtcccaccccagtgaccattgcacattatgtgaggcagagagtattggcagctgggcactaatctgagacatgctagctagaagattcaaactccgctgatttggggtgtgagacgtaccctaggcctcttctgcagccacccatgaaggcccaggatgccttataggcatcagaacagcttccactgtggacttactggccccagggctgaagccatgtatgcagtgggcacacctgccagtgtacacctgtgtgcatcggacacagctgttgaatcatttgagcctcacagtggtcatgtcacttatgtgacttatgacactcattacttcccctctccaattttcagggcagaaagcagaggcacagagacctgaaagaagtgtcgtaagtggctcaagggtatcagcacgggaggtggcctggccctctgcccattcacatacgttagcagccttctggagggctagctgtgggaagtcaggaactgtcccctggctcccttcttaccatccactgaacttacacatccctccagcttccctttggtccaaggcgccaacttctaggttgtctcccctaatgctggtcatttccacctggcctactgccttcccagagaccaaggctccctggcacactggcagtcccataaacccagcctctcatacctgatgcagagatgatggggattcctgcttggggtatcttctgagttccaggccccccaacacaaactcccactctggcttcttggtgtcagtgccggcaatccagtcgtctgtagcccttggctatacccgctgaggaagcccctccctggcaggtgaagcaggcagtgcccctggtccctagctgcttctctttctggtctagggactggcaagaggggaagccaggctggcaaggggcggggagcatggctgggcaccagagattgaggactggcttcttccattccctgacaaaacacaggactctgccaaaagcagtgtgg

SEQ ID NO: 1867 - DNA, 1800 bp, mus musculus
ccctgatcccaactctctccatccctcaaatcgttgcattgcattagcacatatgttttctctacagagcaggccacatgctcccacttctggccgggaggtaggggcgaggacactacttcaatatgattagaatgtgtgtgtagggctatggtgaatgctgagctctaggtagctcacggggctctcctggcctcgcatgtcagacatcagccctgactggatggatggcgaatgaactgagatatgccacaactgttatgttatatgagatatgccacaactgttagcctttgcccatctgccccaccttccctagctggtttgttttaactgaggtagggactaagcagggacaaccctcctcaccgctggcacctgacaggagccaaggcccaggagaaagtgggcctctttgtgtctgaccagagccggtgagtggcagccctcagaccccaaatacccttttgaaatccgagcccatcacgagacatttttttttcagataaggaacacaattgattctagctttactgcttcagaggagggtgaaaggacatgcaggggtgctggaggccagcccagcctaggcctggggcttctgcttttttcagacttttgttatcagaggaggaagggtctgcatgggtcactgggcagtagcagggctgagcaagacatcactctctgtttagagttagccataccatgaggcattcagaaggccaaatctggggacctgatactctcatgagctttggggattagggttgttatggccagggtcaaggtctttgggagaaagggctacacctgacaccctcaaggcttgggttccgctttctgtattggttttcctcagagttcagggcctgatgcacaccgaccaggtagagttaccgaatccattccacgtcccgacctcaggttcctggaggtctcagtggggccagctcaagggtatccacaggggtctaaagacatggttagggtggtgctaagggctccccctaggagtggcccatgtcacccagggacctctagtggtgacccatctccactagatgacaggtggttcatggcaggaatgtaaaagagaacgtgttagctcagtgggcagtgcacttgccagctccttggagagacttctgaagtagggagtatggcctaaccatacaggactcactgtccacccagaatttaagccttcttcaatcatttgtttttcagtcagggcctctaacccacttgtagcagagtaatctttaactcttgatctttctgcccctacctcccaaactgggattagaggcccagcttcaaatttcttaattgctgttttctatttatgattgctgctctgtccatttatggaagcaatttcattaaaataaaattgttttggtaatagtgatgatgatgacgacaacaatgagataagctcatccaggcaggagtttcagtgctggcactctgaatggcagctagagagggagggatgtaaagactgggctccaggagtctgccacagcttacactggtacactaaatgcccatgctggcgtcaggacccttgacagacacagcagcagtgttcacagtaagagctgggacaaagccctcaggggtggtgattgcacccttctttgtgaggccaagagcagagccctctgtcactgcaacccctcagaacagaggaaatgaaggcttctggccctgtgccaccgggtcctgcacgctccaaggaaatgagcctgctcatctcccaggaagccattcacagagtcagcactcggtgac

SEQ ID NO: 1868 - DNA, 1000 bp, mus musculus
gttagccaggtgggcgcaaggtcaaggtattaagggaggcgctgggcgcacaaggtcaagtcactggacttgcagcgcccctaccatcccgggattcaagcgggcaggaggtggcctgggcatcgtgtccccgtcccgtgcggtccgacccgggcggctccctcggctccacccccggctcccccgcccgccgctcgagcctctcaaaagcccgggcgcccggggcggcggcgcagagccggggccggcgcacgaggcggcagggcggccatgactgcggagcaagcgctgcccctgggcaacgggaaagcggccgaggaggcgcgggggtccgagacgctgggcggcggcggcgggggcgcggcggggacgcgcgaggcgcgcgacaaggctgtccacgagcgcggccactggaacaacaaggtggagttcgtgttgagcgtagctggagagatcatcggactgggcaacgtgtggcgctttccctacctgtgctacaaaaacggcggaggtgagcgcggcggggatggcggggacgcggggcgacacctggggtggggtgacacctctcgtgcatggccccgatcccccctcccagtccccaggagctgtgggactgcacggggcccacctgtttctctgcgcctgcgtgcacagagcccgcttcgcacctgagcgcaccaccatctgccacctgccaccgggcccagagcagcgtctgtcacctgcgtgagggacagacctggcccaggagctctgctttcaggccactctcactggtattttaggcagaaacctgttatttagcctcggatgttccctgtcctcacaggaagagactgatctgagcaatcttttagagaggtcgccgaagtgccaggaataggggcccagcgttagccatgtcttgtaaatttttaaatcgtctcacagtcagtcaccttggaagggaatgctgttatggatctcaacgacgatggtactaagcatctaagaaact

SEQ ID NO: 1869 - DNA, 1000 bp, mus musculus
gtgaccagaatgcctagatttgtaccatggcctgtgcaggcccctttggttatgacattgtgtggacccaaaagagattttgggatagtccataccaattccactcaggtggaggtatccgtggctgaaggattgcaaattggattgccaccactatgtcacacctaaaggaatgggccagtattggtggattggcactgtgctgtgtgctcatcactgtcctggccttttggtgcatctgccacatgcaatatcaccaccacagggctcaagcttttttgatacaagcctttgcagctgtggagatgggacaatctcctcaagtgtggcttggcatgctagggaagtagtcagtgatgggtaaggctccctggacatgttaccaacctaagacagggatcagaccactactgtctgtatctgatgacggggaaggagcattgttgcagagggcaacctaagacaagcattctctctgccaatttaaagattaagggggagatgtgaggagcgggtgtggccgcggccccaagatggcgcccgggactgctgccaagtctttttttttcatgttttttttattgggtgtttatatcatttacatttccaatgctatcccaaaagtccccaacacgctctcccacccacccactcccacttcttggccctggcattcccctgtactgaggcatataaactttgcacgaccaatgggcctctctttccattgatgaccgactaggccattttctgattcatatgcagctagagacacaagctccaggggggtactggttagttcatattgttgttccacctataggattgcagatccctttagctccttggatactttctctagctccaccattgggggctctgtgatccatctaatagccgactgtgagcatccacttctgtgtttgctaggccccggcatagtctcacaagagacagctatatctgggtcctttcagcaaaattttgctagtgtatgcaa

SEQ ID NO: 1870 - DNA, 1200 bp, mus musculus
taaaggaaatgagggcagctagactcagagtttcagcgcactgtcatgaaactcctgaagtctccatgctagggaggagcggtatctaagtgctctactgtaaagcatccactcttcggagcggctttctcctctacctttcacttcttctttttaaaaaggccggaagtggctccctttacctggcggatcccagccaccgccttcctccctttgccccttttccaggacaccgggtgagttttcaccctggcatttttgcccctcttatgtggcttcttttctttgtgcaccttcatgtgctgcctcagatgggagctctggctgaagcacttgtcacactcctcacactggtagggcttctctccggtgtgggttctctggtgctgaatgaggtgggaactctggctaaagcaccggccacactcatcacagcagtagggcttctcgccggtgtggatcctctggtgctggatgagattggagctctgcttgaatctctctccacactcgtcacacttatagggcttttcccccgtgtggatccgccggtgctggatgaggttagaactctgaaagaaacttttcccacaatcggcacatttatgggatttcttcccagtatggatcttcttgtgctgaaagagcgtggagctctgactgaaactcttggagcatttagcacacttgtaaggcttctcgtccacgttccttctccgtcgactcaagcccgagtcgaagcgaatggccaccccccatttctgtcgctggcgggctgtcttgcgcttgctctcataggcttttccttggctggcgcttcgagaaataccccctttgggctttcctaacctcatggtgagtaggcaaatgtgtcggcaagagatcctactgtcttctgaacttctgaactaaggtctcatatcctagagtgacgcaactcggaattcccttctgtagaagaaaaagaaaaatacagatatttattagttcagcactagcacctcttcaatctatcaaaactgcatccatgtgtagccaaagcacacctagtacaagtgcaatgacgcacttttaagagacaggtgctcgttaggtgattctaatgccagaggttaagcttaatcagcatcatcatcattttgcaacgtttctgattttggacaggcaaaagagaagacgaagaaaaacataaacctgtta

SEQ ID NO: 1871 - DNA, 1200 bp, mus musculus
tgattgagacatttttcaactgaagtttcctcttcctagatgaccctggcttttgtcgtttcgacaaacaagcaaacaaacaacagcaaaacaaccagaataccactaaaccatcttcctggtcctccatagttcattatgggcttgtttatagaggaaaggcatcattccaaattcataagaaaccggcttctgtgagtgtctctacatttctttctctgctttaaaaaatgaaaggtctcaggatggatggattgtgttaaataaggcacaggggctcctgtgtcagggccagtgagcaatgcagcagcagggcatacactgtgaacttgccccctcagcaatatgttcaggttaaactgaacttccctcagctaataacacaccatgaggcagcaataagcacagtaaacatgtcacattctcagctgtctgtagcattctattttttttcttctagatttaaaaaaaaaaattattagatattttcttcatctacatttcaaatgctatcccaaaagtcccctataccccccccccctgccctgctcccctacccacccactcccacttcttggccctggcattcccctgtattggggcatataaagtttgcaagaccaagggacctctcttttcaatgatggccgactgggccatcttttgctacatatgcagctagagacatgagctcttgcagtactgattagttcatattgttgttccacctatggggttgcagaacccttcagctccttgggtaatttctctagctcctccattgggggccctgtgttccatccaatagctgactgtgagcctccacttctgtatttgccaggcactggcatagcctcacaagaaacatctatatcagggttttttcagccaaatcttgctggcatatgtaatagtgtctgagtttggtggctgattatgggatggatccccaggtgaggtagtctctggatggtccatcctttcatcttagctccaaactttgtctctgtaactccttccatggatattcttatcttgagctggtggcagccagtgagtgcttagggaagtgtctgatggatcagggacttggcaggggaagacacctgcaggacatgtgactaactagctttgtttggcccaacacaatggacagaaaattaaaataagatattataatatatgtaaaatacatattag

SEQ ID NO: 1872 - DNA, 1200 bp, mus musculus
agaaaacaccaatgtctcagactaaggtgtatgacagaagtaattccctctgttgtctttcagcctaaggcttcgagtgtttagttgaggcccaagtgcatcagggaaagcagtctgttctgctcacccagagacattctcacagacccacccatgctaacattcggccaaagactcagacactgtgtgaaccagtcaaactgacacatgaatttaactatctcagtagctcagggtaccctgagcagccctggctgagcagataggacagcagcctggatgggtccctgggcatgtgcttcatcctttgtaagtacacgttttaacagttgcccgtgtcccatgcgcccatgactggcaccagcaaatggaagcaccacagaggccctgttcaggtagcttccatcagtaagctatggccagatgaggactctgtgcccgggagggatccgacaactgttcaaggtcccacagccattcagagatgacttggatctgggagactttctcaccctcatatcacctgtcccccttccccacaatgtacccacatggcttcatctactctagctagccatggcggtttctgaagccctggggatgtctggtcagccttaagctttctggaaaaaaagctgcgggaagggtgaacaccctttgcttactcagggaagactgcatttcttacacagtcttaccaggtgctggtttgtggggcccagaaaggacagtcagagggtggctgggtaaacttgaaggatgaatgtgtttcatcctctcatgaagtgatcttggtcatgactctggactcagcacaagaactcagatagaatggtcttcagacagcctaaaaatggctccttccaagatcaatactggctctgaaatacgaaaatagttttaatacatgttgagattcaagggactgagttcaacattctgatgtgtggggaggggtgggagtgggagggtgcacggtcagggagggagggatcaaggagcatccctggcagggaacgccttgtgcactaagttgtgttgaagatctctgtccacatacagttcatgagccctggcttcaaggaccagcaagctcacatctttcctagtttaggcctccggggtcccacagaaagagacagggttctactggcccaggacactggtcactgcgtctccctgaccccaatgggcagcccc

SEQ ID NO: 1873 - DNA, 1000 bp, mus musculus
tacgcagaagaggtttcactgtccatcgtttctggacgaggtctaattctagcagtaaaggagccagccgccttatgagcatagataggtcccgaagcatctcttccttggtttggagaacgcccatctggtgtatgcccaccctaccctaatgcccactcaacatctaatctgatcttggaggctaacagggtcaggcctggctaataattagatgagaaagaaagcccctctgctttccatcccaaagaaaggccacctgctcttgtgcttctgggagtctaactgcctgagggtaccaaggagtctggctctgtcattctgggaccctgctccacctttcccatgtaaggacacatattgctctcatttgtttccttcccctcgggcagttcctctgccacaacggagaggtattccacatctaaataaattgtgcaataaatctgcaaacttgcatggaaggtattaaagccatcctttgatgtctggtattgagtttcctggggtagagaggtaagtttcattgaattccaggccctaaaaaggcaggtattattgcccctgcttccagatgaggaaacaaaagtagcaagtcactgagagaatcctgctgagagctgtctcactctgtctagcgaagcctcagccctttttctcagcttgatgacaatggcaagggacagacaactgtccatcacctcctcccactttgctgggaaactgaagcacaaacctaatccagtagggtagggtgacgggtcttgtgacaaggacaatgtgctcaggaagagaggaaaggagtcccactcttggcagaagatgcctagcatgttatgttcattccacaggcctgcttgccaacggtgtgctgtgcatctcagagatcatacacagggtggcgaaaggttctggcttatctgagccaatgggtctattcctgttagtcctacgttgttattaatactatctcaaaagaaaaagatgatgcattgaagga

SEQ ID NO: 1874 - DNA, 1000 bp, mus musculus; identical to SEQ ID NO: 1873

SEQ ID NO: 1875 - DNA, 1000 bp, mus musculus
tgcaatggcatctcaagacccacacaagccagcccccaagacggtgttctgtatcctgcagattcctgttagagtggagtgcctggggatcttggcaggacaaagggtcagagggtaagtgcgaggaggcagctgtgggcagcactttggtaagctccttggaaggcttttgtctggggtcagtgacagcagggtgggtgtcgaaatgttcatgttcataatctcatctcattcatctcctccccctcactccgggctcccttacctctgtgtgtgacgtcacatcacctctgaacaccttcgctccgtgtgacatcatcactgcttcatgacatcatcaccgccctatgacatcattgccaccctatgacatcatcttgccctcatgtggtcctgtgcctttcctgtgccatgtccaaccctgtggtgggctcatgccctgagcagccaaatctgtcttccatcactgtaagtaattctgactgaaagatcctaccgtatccgggtataccagggagccacacaggctcgcctttaagcctgaacccagggagtgagcacagacaagctgagttctttatctggtcctttatcctaggacactccttgattgggagggtccccaaacccttaatccactttaaagccctttcctttctgggaagaaaggaaagacagagttccagccgtctaagtacagccctgccttaggaaacagccatctcctctcaagaggctccagttatgtagcggagatgctactaggtcaccccagagacaaaagcattgtcacctgtgcccaggtatctgccagcctcgacaaggctcaacacttgaacgaaagaaattgtgcctaaggccaaagcacctcaaagacaatgacaggctgaggtggccttaacacaaagcaaagggaaactttgtcccagctgctgttgatgcttgctgtcagcctgggaaaggacatctgttctttacaaaccaagagacacacatggca

SEQ ID NO: 1876 - DNA, 1200 bp, mus musculus
tatgacctcctttcagcagcgtcaggtctcaatggcaagcaggcaagtctcttaaaggacttgtctccttcacccaaccaggcagaacatttggggacgttgatcaactctttaggccactggagaaatgctaaatgtagggtgccaggcagctcctggtcaggagccacggggctctcgtgcctggcactgaggaatcgtttagaacaccaccagagcagctgaagagaaggcatttcatgatgctctgtccctaccatggacaccaggtatctcccaaggtgtgcctgcctctcaattctgagactagtgccgccaaaggacatgtaggaggatggccaagacatgacgtggcaagctaagccctcctcagtgagtgatcataactccaccaagacactggaagactgcagtctggattaggtgaaagatctggcaccttgactttagaggaatgaagttggcacccccgagattaaatgaatggaatgcagcattctggcatctttccttatctgtgttgccttcaaccacaagagctggagccctgtcagaagcaccaggaatgtgccgctgagcttatgtgctagagtagaaccacctcaaataaaaggcttcaacagcattttgtgatgctacgtcaagttttggttcaggggacatagtagtgaccacatcctagggtcagaaaagcaagcagagaggttgagaggggctcagatataaaagagcaagggctcggcagcttccgaaatactctttatggtgaaccatgcatcaggaaggctgtaaaaggtaacctgacaggtgagagcatatggaaccagggaaggtaatgagtcatatcctacggcaaacaacaggatgaagcagatgtgcacctgcctcgtaattctgagtctagtgtggccatagggcaggaggctgcagcctgtctccctcagtcgtttctgaggggcccagccatggagcacttagattgggtgtggggaagtatcagatggcttgtgcccagtaaggctgtccctgggctacagcagcaccaccctgagggtttcaagtggcttgcaaatggagcggacaaaatacaggggcccagtgcatgtggtcaggttccacacagccctgaggccttgatggtcactttaaccaggtatagagaaagctcaccttttttagacaaggtctgtgtaagcccag

SEQ ID NO: 1877 - DNA, 1000 bp, mus musculus
cgcaaactttatatgccccagtacaggggaacgccagggccaaaaagggggagtgggtgggtaggggattgggggtgggtggatatgggggacttttggtatagcattggaaatgtaaatgtaaatgaggtaaatacctaataaaaatggaaaaaaaaaaaagaaagttaaaaaaagaaaaaaaaaaaaaacaaaaaaagatttcctcaccattatctttaatcattgtgtaacggtggcaccttccacaagcttaaaagtgtcattggaagcactcaggctaatggatcaggccccatttttctttttttcttttttcccttttttctttttgtttttctttgttcattaaactaataaaatttatttaaaaaaaaaagtgaaaactatagcaatgaaagcatattattaccaagacacgatctcacaggtaagcatggagcactgactgctgaagtttgtattacactactgctcatcttgctaataactgttctttttagaagtggaggagggtaggtagagagagggactcattcagtcattcctacatgaaccaatttttgtgctaaaactgagagctgtttggagacagagctacagtaaacataccagagctatttacaggcttcttccagtgagagcctcacacaccaggtgctaaatgccaagataaacatctgtgtgcctacattaacacacacacacacacacacacacacacacacacaccccccttcctaagagctcaagctgacccttgccctaatggggtcctcacactactgggtagatctccctggagcacgtttgcaaattttacagggatatatattaacctcaaatttccggaaaccgccaatagagttaattctattcatttaattcatgcaaaacttttctaaaacagagtaattatgttaggtggagattcttatgttaagcacaaaatcactggtggccacaccccatgtgcaggtgttctaacacacaagagcag

SEQ ID NO: 1878 - DNA, 1000 bp, mus musculus
ttttatttttaaaaggggggggggaatgtgatgaatgctagcgaggtgccacttctctgcctcttccgggcttgctgtcccagctctgggcccccacatcggccggcttcccagagcatggttaacaggcacagtcttggttggatgacacagggcactcctgtttccttgagaggctaaagagggtctcctaaacccccaaattctaagccagccctgggaacacagtgagacacccactaaaagaaatgtttaaaagatgggatgcaagtctttagagagagcacagactgaataagacttggtgttggggatgttgagcggcaggctgacaagcattcgtcaagcgtgcctgaggccctaggtttaaacctcagtactacaaagtaattaacttgtttttaaaactcaggtaccaggccctcagcctctatgctcagaggctaggagcccacgaggctaaattctgagcctagccttccttccatagtccattcttcgggactcaggacagtgtactattctggtcatgacactttggggacatctcaagtctgatccctgtctacagataccctagaaagcaagagatgaaacaaagaggccttcctagtaggtcatgtgtgaatggaacaggggaatgactgaaaagagccaaaataaatagcccagaggaaggaaccagccctgagtcagacactcacagaagacttgtagatgatgtacaggacctgtgctgggccctcactaggccctcagcaaccctggcctcactcacacgtggccatgtgaccatgtctcttgatgtaccaaggaaatgtcagccttcctgtcctaaatccagtggcagtctctcagcagcagacagcatttccacagcagagggacagctatccaaacagtagaaagagggtgggttgggggccagccagagccggccatggctcagagatcatttcttttcacagtcattgaaattaggtagcaagaaacacagcga

SEQ ID NO: 1879 - DNA, 1000 bp, mus musculus
ggaagatcaatattggtaaagtgttattaagctaatgatctcatttaaattacactgatttttatgttgatgagcctttctagtccagattctacctacactccaattcaagatcccaggatgcacttagcgtttctctagtctcctgtatcctaaacttgcctatgtatcttttcttatcctctgtgatctgaacactatattaattactcatctaggcgctgcagcaaaatacaaaagcgacctgaggaaaggtttatttttgacccagtttgaggagacagcctgtcctgtgggaaggtcaaggcggtgggagcttgaggcagctgaccgcattgtatctgcgcctcagaagcagaggcaggtgcgtggaagcgcttggtctgtgttctcctttccctccgcccaggactcgagcttacaggtagggttggtcctcccaccccagtgatccagtgatctaagcagtttctcacagggatgtccataaagaacagttgtttgttgtacgtcctttgcttggggctgtgttctgttctctcaggatcaaataggatgattggcaagaggagcagtgtattgtgcctgcatgactgactcttcatacacacttcaggaagtgaatggtacccgtgtgttctatggctgcgtgcttcctggcctttctaccatgaagttaacatctttccctttgtagtgtataaatatctgtggggaagacacttagaaactatgaaaattctggtcttcctccaacttgtattcacagatctaactggtgttgtggttactaaagttgtctgtccaatggtgggttcctatttctgtctttccttctacatttgctaactggaattctgtcttagggaaaaggtgcatttttgtcccccattcagctgcttatttattatttatattaccacagacacgagtgaattttactctgtggtcacagtctaccgttgccagtatttcttttacttctcagattgtcaccatc

SEQ ID NO: 1880 - DNA, 1200 bp, mus musculus
gtctttagattattttgtttagatttatttacttattattaaccattccattcgtttacatctcaaatgatatccccctttttggttaccccataaatttcccatcccacatccacttgccccctcccttttgcctctgtgagggtgctctcccacccacccacccacccacccatccgaccccactgcttcagcatcctcctacactggagaatcaaacctccacaggaccaagggcctctcctcccattgatgtcaaacaaagccatcctctgctacatatgtatctggagccgtaggtcccgccttgtacactccttggttggtggtctagtccctggaagcactgggtggttcggccagccaacattgttcttcctatggggttgcaaccccctccactcctccagtccttccccagcttccacaccagggtcccagctcagtctcaaggttggctccaagcatccacatctgaattggccagttgctggcagaacctcccaaggaacagccacaccaggttcctgtcagcaagtgcctcttggcaacagcaacagtgttgtttgttgtctgtagacactgtggatccccaggtggagcagtccccagatggcccttccttcactctgctccatttttttttgtccctgttttccctttggacaggaacatttctggtttaaaaactttgagatgggtgggtggccccatcccttgactgggggccgttcctatctactagaggtggtctttgcaggttctatctcccctttgctgtgcattttggctaaagtcatccctgttgggtcctgggagcctcttgcatccctggtgtatgagatcctccagtggctatcctcagttcctcatcctccactgctacatatttttattccatttcctgaccccctgtatctctctcctgtccccctcccccagtacctgatatggcccttctttattccctcctcctcctctctccttcccaggtccccctctccctccacctcccacgatcatcctgttcccccctcaatgcaggacttaagcatccacaccctggtcttcctttcttctaagctccatatggtctgtggtttgtatcatgggcattatgagcttttgggctactatccatttatcagtgagttcataccacgtgtgttctcttgtgtctgggttacctcactcagaatg

SEQ ID NO: 1881 - DNA, 1200 bp, mus musculus
caattttgtaattaaaaatctttattggattatagtcacattaccctcccacccaaattaaggggaaaaaacaaagacaaacatgaaaataaagaaattccagtcagagccccttagagttcataaacaactatgcgctaaatgctagctgagagaaacagcagacatttcagattatttaaaacacttctgtattgtaaatggatgttttcctctttacaaatcttgaaactgaagtcatgctactaagtacttggatcaaaaccattctacataaaaacaaaagcaagagaccatggggagaaaaaaaaaaaaaaaaaacctttcacgttctcatggcctatgagcagggttttcatacgtaactgaaaaggttaccatgagagcctgccatttctctctgtgtcacctagtattcctctgtgaaatccataaatgaatcactaccaggggcctcatctattttcctttcttctaaccaatcttactgtatctgtaactcaaccttctgaacattctccatgaacagcattgcaagttggttaaagggaaggtgtggggtgcagggagacagttttacaagggttttgttgtttaactatttaccagtggagtcactccaccaggagtttgatttcattggctagcagctggttcatgttgaacagcccccctgggagcttggtgagcatctctcgctcggtggtgctttcagggtcgctatcaacagagctggaactcgcgctcatgttgtcgacagcagcgctggcagggggaccaagctccggctcactagtctcactggcagtggacaccacagagagcagggacatgcgccgggtgagccggccagcgggcagaagggaggcagcatagtctgctatgataccagctacatctagattacaagccttatcaaaggcgatgaaacctacatttgcattggcctcgcagacacagaaggagccgtcatctttcatcaacaggtcaatgccacacacatccgtccccaggatattagacacttggatagccagctgctttccttgttcactcagtgagcacatcatccccacgccgcctggaagggaagaggtggggagctttagaggggaagcaatacagttctaatgtacaaccggtttttgttttgtcctatcaagactagattaattattagactactaaagaacagagtct

SEQ ID NO: 1882 - DNA, 1000 bp, mus musculus
aactctgggtactgatgcaactgggaggatcttgtcccagctgaacccctgttcctgtgccctatgtgctcttggcttgtcctgctttggacagttattggagagaaagtggcaatctcacctcttagcccaggagtgagagccctcttgggagaccagctctctcttggcatgatctgtctacagaagcctgtggaacagccttatctctctggtgcagatggtgactggaaggatcctgtcccactatttctatgtttttttttttttttgtggttgtttttttctctcctctgtctttcactcttgccatgtgtgattatttccttttattaagtaatttgtgtatgacttaatttttagtatttgtcattgtcaattaggaattcttgtgtacctatcactttgatgatttatcatccctattagtgttttggtagatgctttagagcttatgtgtaaagttacattacatacagctaaatatattttgatttcctttcacacacacacacacacacacacacacattctttcattgttgcgggccgaccagcagctcacgaggaacggtacaactgagatggcagctcgggctgaaagagaggaactaaacagaaagaagaaagaatggagccaagtcaaaatggactctgatcaaagctcaattttactgtccaacacgcagttttgaaggaggggaagggaggccgattccagccaaatagtcctggagtccagtagcagggtgaccacgtgtatggctccgaacagcaaagtggcaggttccagcagtgggcgtggcagaacgattgagcagcaagctccatccaggtgtaaacagtggaaccattaaggctgggggaggggaggctacatttcattattactctagataagacttcaagtactatattgaataggagtggagagagtaaactttcttacattgcttctgatctcagtagcaatgattcatctccagggtgttggctatggg

SEQ ID NO: 1883 - DNA, 1000 bp, mus musculus
ataataaaaaaactagtaggaagcattgctgctgtgctctggggaggctttgcaattggaaacattttcaggaagaagtgacagctggacaaccagaggacagtacacagagcatacctgaacatcaatcatagccctgcatattgcgcacagacccaaacatcactcaaagccctgtatatcactgcacatcactcacagaactgcacatcactctcagccctgcaaaccactcatcctttgcaatctctcagtgtgtgattgtacagtggcctcatgctagtgtacagtaccaggaatacataaggaatactcccacaagaatcatattacaaagaaaagaattaaatcatatgcaaatacttacttagtcataaacacatatttatggtgtttctactattcaacataggaaattatcccagggtcccaggctcccaggctcccaggctcccaggctcccaggctcccaggctcccaggctcccaggctcccaggctcccaggctcccaggctcccaggctcccaggctcccaggctcccaggctcccaggctcccaggctcccaggctcccaggctcccaggctcccaggctcccaggctcccaggctcccaggctcccaggctcccaggctcccaggctcccaggctcccaggctcccaggctcccaggctcccaggctaagaagtgcttcatctgccatcaatcacactgatacaatgattttagcaattcctcatatttgaaaatccctctatattttatctcagctatctctaggttttatgatcatcacaatttacatagtttctctgaaatttaatttccttgtgaataaaatgttgattattagtagtattcattgcaagtatgaaataaggtcatgctttataatccatctcatagtttagggtatacagggagcactaactgtctacagtatacagagagtgctaactttactcatttatactgctaaagctgcaaagtaccattag

SEQ ID NO: 1884 - DNA, 1200 bp, mus musculus
cttttatctttctttccgtttattggttgtctctaacttcagaggtatgaatgacttcatgattggttaagtaactgagggattctggagacttttgctaatatggcttaagctaggtggtgggggagcttcctcatggctgcccatgaagttaattttcttatcctggaattgacttgttttggatggttgcagttttgggaaacagaaacttgggcgtagtcttcaaaactgtcagtctgttaggaagtcagcctggctctgactgtgtccgctcattccaacctctgatttgtaattgaattgaatcattgatctgtcaaaaaattttccccaaagtcttagtcattacctaaggggtcaattgaaacttaaaaatcatgaattaatgtcagaaatacaggcccttttttacttagcacctcagcctgtgaggtgacataatggatgccatttttttaataattgattttttttctattattaggacattcattgtttccttgggggctcaggaaggctgaaatgctattcaaagattgggcaataggtcatggataagaagcatctggtgatgtgacccagctgaaaggcaagggtccatcatgtggattgggctaatgattaacatcaagttttaatagtcagcattcagcagtttgcagtccccaagtgacccctgaatgtcagtgtaacagtttggggttggacagccattggcaaggtaaattacaaagtgtcccatcaataatatggggatagagataacaagtttttgtcacatggttatcttgtcagcatccttgaccagcaggggagtggcagctatgatccaaaggcactttcgccaatttcaggtcaccaggacctatttcttggataaataagtctctttcatggtaccaacttttaggtaagttcttttcttttttttttttttttcagcctgtaatttcttcctcttttattttttttccactttttattaggtatttaggtcatttacatttccaatgctgtaccaaaattccccatacctacccacccgcactcccctacccacccactccccctttttggccctggcgttcccctgtactggggcatataaactttgcgtgtccaatgggcctctctttccagtgatggccgactaggccatcttttgatacatatgcagctaaagtcaagagctccggg

SEQ ID NO: 1885 - DNA, 1200 bp, mus musculus
ttcttcaatttttatctatttaagtcagtttattacttttctaaaataaaacatagataaataaaatataaataaataaaataaaaataataaagaagctgtattgaatttgatactacagagcaagaactgcacttagaagagttgcaggggtgcctgctgtgtcacatgtacaccagtaggtggaagagaggagagaggttatgtccacccactgtgttctcacctaggaaaatttgaatgattaacagcctaacactccccggaaaaggaaagctcgagattaccactattccagtgctgcataaaccccaatgactcccagaatgaggaatagcccagagactagaagtctttctaggcctgaaggccagaggctagagtataatcacaatactctatacagacaatcctcagaaggggccattcagaccaaaactatgattctaatgtaattccttcaccagctgcagtacacaggagaatgaaccctgcacatcccatggtcagcacaattgagctgacccgggtagttggggacacaaacaaaccaggcccaactgcatatgcatgacagagctgatgagccacttgactgcatgcagtgacatgggtgagggagagatgacctcttcattgcctcttgttatctacaactggcaggaaggttggtcccaaggtcatcagagcaggagagctgtccatacctcttatattcttcagcaatcagaaggccaaatcctgaaccttgcctggtcagcacagtagagctagggatggggattgcacgtgagccagcatgaagaacatgagtaatgggagatacagagcttcctcttatctgctggctggtggtgctaaccaaggagagattctctcttaccctcccttgttccttgccatctatgacaggcagaagagctggccctgggattatgagaatgggaaaagtggccatgtccctcactagttgcactacttgggagaacagtccctgaacttcacctgggtagcagggaatagctggccctgtatatggggttgtttgtgaactgaatctaaaagcataaaggaaggaaggtctttatgatctaggcctttgaattggtccactcgaacatctacggcactatgaactcctggggtgaaaaaggggccactccaaaatatctaaaacttcagaatctccacaacacagga

SEQ ID NO: 1886 - DNA, 1000 bp, mus musculus
gcaattggaaacattttcaggaagaagtgacagctggacaaccagaggacagtacacagagcatacctgaacatcaatcatagccctgcatattgcgcacagacccaaacatcactcaaagccctgtatatcactgcacatcactcacagaactgcacatcactctcagccctgcaaaccactcatcctttgcaatctctcagtgtgtgattgtacagtggcctcatgctagtgtacagtaccaggaatacataaggaatactcccacaagaatcatattacaaagaaaagaattaaatcatatgcaaatacttacttagtcataaacacatatttatggtgtttctactattcaacataggaaattatcccagggtcccaggctcccaggctcccaggctcccaggctcccaggctcccaggctcccaggctcccaggctcccaggctcccaggctcccaggctcccaggctcccaggctcccaggctcccaggctcccaggctcccaggctcccaggctcccaggctcccaggctcccaggctcccaggctcccaggctcccaggctcccaggctcccaggctcccaggctcccaggctcccaggctcccaggctcccaggctcccaggctaagaagtgcttcatctgccatcaatcacactgatacaatgattttagcaattcctcatatttgaaaatccctctatattttatctcagctatctctaggttttatgatcatcacaatttacatagtttctctgaaatttaatttccttgtgaataaaatgttgattattagtagtattcattgcaagtatgaaataaggtcatgctttataatccatctcatagtttagggtatacagggagcactaactgtctacagtatacagagagtgctaactttactcatttatactgctaaagctgcaaagtaccattagtgaaaagcatgggtataaagaaaagaaaataaactcagtgcagacttgcag

SEQ ID NO: 1887 - DNA, 1400 bp, mus musculus
tccctttgggtagaagtgtctggcttttatctttctttccgtttattggttgtctctaacttcagaggtatgaatgacttcatgattggttaagtaactgagggattctggagacttttgctaatatggcttaagctaggtggtgggggagcttcctcatggctgcccatgaagttaattttcttatcctggaattgacttgttttggatggttgcagttttgggaaacagaaacttgggcgtagtcttcaaaactgtcagtctgttaggaagtcagcctggctctgactgtgtccgctcattccaacctctgatttgtaattgaattgaatcattgatctgtcaaaaaattttccccaaagtcttagtcattacctaaggggtcaattgaaacttaaaaatcatgaattaatgtcagaaatacaggcccttttttacttagcacctcagcctgtgaggtgacataatggatgccatttttttaataattgattttttttctattattaggacattcattgtttccttgggggctcaggaaggctgaaatgctattcaaagattgggcaataggtcatggataagaagcatctggtgatgtgacccagctgaaaggcaagggtccatcatgtggattgggctaatgattaacatcaagttttaatagtcagcattcagcagtttgcagtccccaagtgacccctgaatgtcagtgtaacagtttggggttggacagccattggcaaggtaaattacaaagtgtcccatcaataatatggggatagagataacaagtttttgtcacatggttatcttgtcagcatccttgaccagcaggggagtggcagctatgatccaaaggcactttcgccaatttcaggtcaccaggacctatttcttggataaataagtctctttcatggtaccaacttttaggtaagttcttttcttttttttttttttttcagcctgtaatttcttcctcttttattttttttccactttttattaggtatttaggtcatttacatttccaatgctgtaccaaaattccccatacctacccacccgcactcccctacccacccactccccctttttggccctggcgttcccctgtactggggcatataaactttgcgtgtccaatgggcctctctttccagtgatggccgactaggccatcttttgatacatatgcagctaaagtcaagagctccggggtactggttagttcataatgttgttccacctatagggttgcagatccctttagctccttgggtactttctctagctcctccattgggagccctgtgatccatccattagctgactgtgagcatccacttctgtgtttgctaggccccggcatagtctcacaagagacacctacatct

SEQ ID NO: 1888 - DNA, 1200 bp, mus musculus
gaatattagtgtggatatattttcttcaatttttatctatttaagtcagtttattacttttctaaaataaaacatagataaataaaatataaataaataaaataaaaataataaagaagctgtattgaatttgatactacagagcaagaactgcacttagaagagttgcaggggtgcctgctgtgtcacatgtacaccagtaggtggaagagaggagagaggttatgtccacccactgtgttctcacctaggaaaatttgaatgattaacagcctaacactccccggaaaaggaaagctcgagattaccactattccagtgctgcataaaccccaatgactcccagaatgaggaatagcccagagactagaagtctttctaggcctgaaggccagaggctagagtataatcacaatactctatacagacaatcctcagaaggggccattcagaccaaaactatgattctaatgtaattccttcaccagctgcagtacacaggagaatgaaccctgcacatcccatggtcagcacaattgagctgacccgggtagttggggacacaaacaaaccaggcccaactgcatatgcatgacagagctgatgagccacttgactgcatgcagtgacatgggtgagggagagatgacctcttcattgcctcttgttatctacaactggcaggaaggttggtcccaaggtcatcagagcaggagagctgtccatacctcttatattcttcagcaatcagaaggccagatcctgaaccttgcctggtcagcacagtagagctagggatggggattgcacgtgagccagcatgaagaacatgagtaatgggagatacagagcttcctcttatctgctggctggtggtgctaaccaaggagagattctctcttaccctcccttgttccttgccatctatgacaggcagaagagctggccctgggattatgagaatgggaaaagtggccatgtccctcactagttgcactacttgggagaacagtccctgaacttcacctgggtagcagggaatagctggccctgtatatggggttgtttgtgaactgaatctaaaagcataaaggaaggaaggtctttatgatctaggcctttgaattggtccactcgaacatctacggcactatgaactcctggggtgaaaaaggggccactccaaaatatctaaaactt

SEQ ID NO: 1889 - DNA, 1000 bp, mus musculus
gaaccaggttcctaaagggaaggctggagctgtatgggaagaaatggcggatgaaataacaagaccaagacaagatactgatcaaggccccagagtttactaagagtctgagcttataaagggggaaggcccatccctcaccatgccaggctcttgatgctttgtcaccaggctgtcagcacttggtcaccacgctgttgccattcaggaatgtctcaggaagacaggttcagcctctcagcaggtagtggtgtcttggagaaaagtgcagagttggcagaacaatagacctatctaggtcagaagagtctaccctaggtggtcttgttcacagtgacagaacaggtctgagccaccctgctcaaggctgagggaggctacaattcctccctaaatacataataaaaattagctgggctggggcataaaatttacttatactgcatggtcctgcctgaaaattatggtggctggcagccgtgcctgtcttgggactttggtcttctatgaacttattcttatctgtcctggagaacatgtacagcttgcttgtgtttatttgaacaaacatggctatatggtgttatgaaaaaaccacggcctcttggcacatccctctgccttagattgaataattcagagacccagtggccagtctttggctgccagccctcatagcacacccttttcccaatcagaccaaagccacaatatgtactcaattcatgtcttcaaattgatgaatttctgccacctgcacttgctgaaggcaagtctgcatgcttgctgaagaccagcctgcagggaggtaactgacctccttgaaatacaaaggctagagttgaaaagcaacagaattaaggctgtctgtggtgaagtccaagtactctattcagttgcaaattagcaacaaacaagcccaagctctgtcctccaggtgtgggggaggtggctttggtaatcagcagaaaagctgttacttatcacataaataggctat

SEQ ID NO: 1890 - DNA, 1200 bp, mus musculus
ttaaagtaacacattattcagcctttgaacatgacctgaagggactaccaggtgctaagtaggtagttttgcttccagtggacaaaggttcctctgtataggacaatgctgctaacttctatgtctttagaaagccctattgagggagagaacaaagagaaaatggaagagggagaggacacagacgaggagaaagaaggagaaaagcggagcagaagcacaaggcctggagaaaccgcaagttctaaggggtctcatagatgtgatctaggcgcacagcatgtaatcatatgaactgtgttgtgttttcattgccagggcatatttgggaggagatttaccgcaacagttatgagtcacctaagaggaactgatcccaactgtcagtgagcagacatagcccaacagtgccacaaacaagactgcgctgctccagtcatagtgacaactgggctcctctggagtactaacacactccctcagcagtctgtcctggtgacagccaaattcagcagaaaagctgaaaaagattcagggtgttccaggcctcagggagtgacctgaagctacacagaaaggctcattaaatggcatcaaacggaggggcttctgacggtgtttgagccgttggttgatttaggccattctctcggcccaaagtcccctcaacaatggcgagagtcagttgcggggcatccagcagctactgcaggcagccaagaaggtgtccaaggcctgcaagtgaaagaaccggaggccgaagcaggccaaagaagccgccaggctgaaattgaacagtactgcagaggccaaggaagctgcagcactggggtctcatggcagctgcagcagtgaggtggaaaaggagacccaggggaagatgaacgtcctccagaaccacttcgagcagaacagggatggagtcctgaatgacctcttggcctctgtgtgtgacatccggccagaaatccatgaaaactaccgcataaacggataggaggtggaagcgcctgctctgtgggttggcatgagatctgcccccatagaataggaaacctccacagagctcgagttctgttctggaaggcattaaattatttctctatgccgttgtaggacccttcacgttttaagagtatcaaatctagctttttgtatggacttactatgtacctgaagttccatcttcttatcttgtgt

SEQ ID NO: 1891 - DNA, 1400 bp, mus musculus
aaaaatccaccaagttgaagtctcaattctgaacatctatgccccaaatgcagtggcactcacatttgtaaaaagaaaccttactaaaggtcaaatcacacattgtagctcacgcaatgatagtgggtgacttcaacacctcactctcatcaatggacagatcatggaaacaaactaaacagggatacagtgaagcttgtgggtcaaaaaatggggtccagtgtccagcccaggactcaggccactgggcaaggcagacaaagggagtttgcacacaccccatggcacccctgggcaggtgtcaggctgtgggaagcctcaggaccccactaagggggtgaaggaggcacagtctggggtccctatggacctgaacctctggcaccacagatgccactgggtattgcagaaatgcgggttctggggtcaacagggtctcactctgggacatcctagatgttgctgtatgtcttggaagagccaagaatagagcggggaccctcaggcagactctgacctggaggcagaaaggaaaagggcagagaggagagagctctggcagattaacaagaggatgagagtcctaggctggttcggcagctagattggtgagtaggttggcttggttggcagcccttggctgggaaatgcaaggaagctagatgagtgactcattagagggagagctgttttattgctccagcatggtgggtccgatgagaagaggcagtccgtggttttaaggcatttattgtagaaaggcagagagatggagagagtgggaatgtagaggccagccatggccatgtggagaacggaagggaaggtggagagatgggaagcaagggagcaagtgtaagagcaagagagtaagagataagagagtgaggagggggcaagcagctccttttatagtgggctgggctatcctggctgttcccaagtaactggtggggtggagtccagacagaataccagaagcttggggcattgcctatgtgactgatggccacacacctctctgtgggggaagggaactgtgggaagctatagctgcgacaggagccaggggtctaggaggtgtggctgaacaactgccatcccttagggtcaccggggttccaggcctgtgtttgactggggaccaggctgtttgtgcacagctcactgccccacagaaactaatagaagttatgaatcaaatggatttaacagatatcaacataacatttcaccctaaaccaaaagactatacaattttcttagcacctcatggtatcttcttcaaaactgaccatataatcgggcacaaaacaagcctcaacagatacgaggggatcaaattaattacatgtattctatcagatcaccatggactaaggctggtcttcaataacatc

SEQ ID NO: 1892 - DNA, 1000 bp, mus musculus
caatgcaaatggtcttcgaaagaaccttttttgttgttgttttgttttgttttcgagacagggtttctctgtgtagccctggctgtcctggaactcactctgtagaccaggctggcctcgaagtcagaaatctgcctgcctctgcctcccgagtgctgggattaaaggcctgagccaccatgcctgtttttttgtttttgttttaagtgatggagctgatgggaaaattcctctctgggcaacaatgttgcagaagggatgtaaggccctgggagctgaggacatgctgcagaaatcggttcaggcactggttaatttctgctaccataacaaagcagaacagagcaggcggctcatacacccaagtcgcctgttggtcactgctctggagcctgaggctctgtgtcaggacgctgggcttccttctgccgaggcagagtgctgaaagctcaaactacagagagaagacaggggaactctctgcgtgccaccttgtaagtctcctcggtgaagctgtccctgtgatggagtcacattggtctacagtgtgactataactacaactccaaaggacgaatagagaagtggaggccagaagactgaagagccggtggcaggcagctttctgaaatggggggaggcaggaatctagggctgaggaaaggacaaagtacacgaggtgggagaaattaaaaagggaaatccctgggctggcgatcctcagcagttaggagcacaggctgctggctcagagcagctgcctttccctgccccggctccctcttctggcctcctgggacatcgcatgtagtggtgcacaaacaacatgcaggcaaaaagcttacacctgtaaataacaggtaaatcttacagacatcccttgtgggtacacggaggcaaaatgaagacccccagaaccaatgagaagattcaaacagtgctacagagacagcttgcccagcatgagacgggacaagctggccactcgtctcactgctga

SEQ ID NO: 1893 - DNA, 1200 bp, mus musculus
cttgggctctgttcagattagcttggtccggagtggagtttcactgtagctggtcatatctgtcccaaggatgacgatgatagcacactcctcatgttaatgtcgcccagctacccatgtactgcaattgctctgcatcgatttgaaagccgacttagcacaatagcagcttctaatttgtaagcaaaaccttcagtgacataaatcaaactgttagcagcaacgccactgccgcatgttaatggagagttaatagacacgggaggacatccggggcatcgggccctgcagcttgtaacctgcccacattccacccctctgtctgggcaccatggacatctacatggccagagccgtgactgagaccctgagcatccctgaagcataaatcctgcattgaggcagtgaagagagatcagctagtccagtgtccttgcaccaggtaagatttaaggagaaagccaaatcatgggagaaacaaggacttggggaggccagatctgctgaacctcagcttcagccccagactctggctcatgcttactaaggacccactggagatgggccttgcctcaggcatgctcatgggaagagccaggacccagcaggaggtgcccactgccttcccatcacagtcccatcagcacctcgcagtagccacaagccccagagaggctatcagtttaggaacagactggggttaagggccaggatccctgtgcactcatctagaagcattttcccaaagccaggatggtcaactggcctgacactgggaaggtccagggcctgagtctgtattggtaaatgccctggaagtacccacagtcctctgctactgtcaggatccagcctgacaacctgcccgtggctgctcccaactctggacacccaggacctgtgcccatccaccctggatgctgcaggacccaccaggccttaccaagttgggacagagccctgtgcataggaggtagagatcaccactcatacacctctcccaggctgctgagctatgtgcctccctgctgtgtcctggcaaggctaagctcagcactgcccctgaacacattcaaagtccaacagatgtttatttggggaaattttcagaaaaagacatcatagaactctgcctggctcaggagcaatgtgtccatagcagagcaccccaggcagccatcaccaccttcccaatgtgtt

SEQ ID NO: 1894 - DNA, 1400 bp, mus musculus
ctcaacaacgtgtttctgcgccatgaacggtttgaacgcttccgaacaggccagactgctaaggcctccagtgaagctgagctagctactgacctgattgacatgggtcctgaccccgcagccacaaacaacctctcatctcaactggcaggaatgaaccttggctccagaagtgtgagagctggcctgcagtctctggagacctcaggtcacctggaagatgactttgacatgtttgctctgactcggggcagctcactggctgaccaacggaaaggggtcaaatatgaagctccccaaaccacagatggcctggctggggccctagatgcccggcagcagagcaccggagcgatcccagccactcaggcccgcatcatggaggacattgagcagtggctgtccacagatgtggggaacagtgctgaggagccctctggtgtcaccagtgaagaatttgacaaatttctggaagaacgagccaaagctgctgatcgacttcccaacctggccagcccttcagccgagggaccccccagaccatctcctggaacagcccctcggaggaagacccaggagaaggacgatgacatgctgtttgccttatgaatgcagggtctggcatcctgcagcccagggcctgacactctcatacccactggggcccctccctcccttggtattaaagctgcttgggggtgttttgttaccccgcttctcttctcccagagcctgggcagcaagggggtcaactgaaggaataagtcagccctccactggaatcctggctggtcctgccttcttcccatcctgctaacgactatgattttactgagacctggggccccagacaagctgacctgataggacctaattgacctggtgtaaggctgcttctgtgatattcccctggtcccttccccagagaatcccacgggagccctccagactctacactaacagtctaggcaatagaggagacattaccacagccttgcctatcccatccccctgcagagtggggcccgaaaaaagcttcagtggcttttgggatgggctatggtggcccctgctgagctgcccactgtcctggtacgaaactgcacccatcgaggaaacatctcactgcccaggtgtcaagatgagacctcgaggattctgggtacccagagctccccagttcctccactgcctttcccctatccttgctctgtacctccagcagggctccacccacctggggctcacctgttgattggtcctcaggtacagggagaggtgccttttgtatccccaaataaaagtagaaaaccaaaaaaaaaaaaaaaaaaaaaaacaaggactccacctaagattcacttaatcttagaagtcagggtcaagggcttcgtgcccttgcc

SEQ ID NO: 1895 - DNA, 1600 bp, mus musculus
attgaggaaaatacataattaaaaaaaaagaaaaccttcactttaccaattattaactgtgcaacctttgaccatttacttttcaaaacctttttgctatacatgataataattactcaataaattgttatcaaatgacctaaaaaaatattttaaaaaaatggagtcaaccatgccaataggtgtgggcagatggggaacccagtggcttgcctgtcactacacaacatggcagggaagaggaagacaaccagaggtcagtctgtagccacactgcacaggaggctatatagacacacagaggctgccctgcagccatgccacactgcgtgggcagagggcacccaggagtcttcctgttgtcacgtcacacagagcaggcagaggaggtcacccagaggccctccagccttgtggtccacctgcagtgggaaccaatacactgtgcaagtatgtggcaggcagatgggagagaaggggaagccgatcagttgcaacattatgaagagagttggaattggagacatgaggatggagaggaatagcttgctgtgagtagcctgccccaccacctgaagccatggtgaagtcccagcctgtgctgtgattgagggccatgtctggatctttggccatgcaagcacagaggtctcaacgtttgtagctcatattaccactaaagaccatgtatacatccttggtctgggctgccactcaggaccacataaatgtccaagggctgtgcagagctggccctacctctcactggttgcagcacttttgagaatgggccctatatcttgcttgggcagcacagtagagctagacctaatggcaaaaccataggtgaaccagccctgagcatatgagagcaggagagctggcccagccccttgctggctgcagcactggggagactggacacccctacacctctactgagcaacatagtagagctggtgtgattgggtaagctggccctgagagcatgatagaggaaaagctgaccatggtccctgccagctatggcattgggtaagctagcctgggtagtactggagatctcaccctggtgttgtgtgtacagaagagctggtaggctgaccaactcagctaccacccagagccagatccagggctttgagttggcccactgcaacatctacctcaatctatatgctagagtgtgaaagggctggttctacagatccaaagctataggatatatacaacacagggcaaaaacaggggagtcccagctaagatccaatattgatgatgtagcagaatctagaggccttgaaccagaccaacaactcactgcaataaacatttgcaagtaaaggagtgtggacgaaagggtacacggtagggcacactctgatataatgtagcttccacaaaaaaaaaaaaaaaaaaattaacattgagccttgatcagagaactttgtcttggcctgttatttctctcacccacccatcttatttcatccccagctcttcttccaagtgtacccagttctccatggctgctggacagctacaatgacccatctgttatgttctaccctgtgcctacagagcccttactgagatgaaa

SEQ ID NO: 1896 - DNA, 1400 bp, mus musculus
cttaataaaggaagcaagacatgtttcctcctcctcctcttcctctgcttcctcctcctcttcttcttccttcacctgatttctttgtgtatacttggctgctctggaactcactttgtagactagactggccttgaactctcagagttcctcttgcatctaccttccaagtgctgggattaaagtcatgtgccaccaccactgccatcgccactaaccagttagacatatattgttaaatcagtctctgttagcctgaatagaccttaggtatagagggacattttataggctcttttaggtgctgggctcctctgagtttttctcagtatcatcaaggcttcctcaggatcccaggcaggtcagaaaaaggacttgtggctctggctgaactcctaattaaccagaaatagacaatgggtcatggcctgcctccttttgccttgaacagaggaatgcctggccttgggccttcaatgcccagctcagcatcctacagaaccaaaaggtgtttactgtttccttcttttatgatgtggcccttcactgaggaagtccagtgaactgaagatgtgtcttggggccttggtccaagatatgtaccccctaaagtgcagctaatcagctccagaggaggagaggtttgtgcctaactatctgtagagggaggggctcctgcaggagttgtggcctgatcaccaggcagctcaagatgctagtgacaaaatctccacttactcattcttctgtgaaatgtaagaatggttgattcttgcacttgctttgtgctacaggagatgcaaaccacactgtttctcagcccgggcattgtacctcatgcatataatcacttggtagggaggttgaggcaggaggagggcactgattcccccccagacccccaaagcagctgtaatacctttcatgtctactccactcagcatattgtattattgttatttaagaaaatatagttgcttttgactcaggtcttttgtcaagttcatatatagttttttcttatttcctgcatgataagactgatagaacattttcttactgttttatcttgtttctggttttggacatagaaacttctaaaatacttagacttgcctgagtgttgggagtgtgagggcaatctatagttgttcacatccagcccctttcaaccatatatacctgaggttttagtaataaggtaaattttggtgggctcctaatagcttcagggtaaaggctaccatgtgattagagcagtggccctttaaatcttacccttctcttccagggagggaagagggatggaaactgacttaactactgaaaaggatctagtcaactttgttcccacaagaattcttcataaactttctaaacaatgtggctcagggagcttc

SEQ ID NO: 1897 - DNA, 1000 bp, mus musculus
cagagctattttatgtctaagactcataaaaaacaaaccaaatcaaatcacatccaggcaacctaatgtgctaggaggaagacagagacctgcagactaccatgccacccacagaactgcactccagtgtacaagacaggtcggccatagactcctgcttacaggtataggaggatgtcacccaggggcccgacagccatgtgagacagcctgaagctggagctggagccaccacagattgttgagtgtatagtggtcatatgggaaagaaaacaaatgaagcatcttgagcatatgaagaaagatggaactgaagcctcatggctggagaagagtggactgttgagtagccagccctgccaccaggggaatcagtgagtttcccagcctgaactaccactcaaagtcatgtctgagactatggctatgcatggcacaggttgggttggttgttgatttctgtaattccggttaccactacacaacatggagatgttagggcagcaactgtcgattacctggatgctctaaggctttgagaactagccaaacacctcatggatggagtcctctgaagatctggccccatctctcatagcaggcaatacttgggagagcaggccctttgccttgcctaggcaggacagtaaaggtgtcactaatagcaggtgtgtgggtaagttgggcactggcatcaggagtgtaggagaggggacccagccaagagcctgcaatggggtcgcaagggctagggagagctatccttcactctcatcaactgtatcactttggagagtgggctctgaacctcgcctgaacagcaaagaagagctatgcctggtggtgggggcacaagtgaggcagcactgagggcatgagagcaggagagttaaagctgcaccctgctgatggcagtactgggtgtcatcaccagaacagtgctggagagctcaccctagtggtgcaggtaagagagagccattgggctgaccagctatgt

SEQ ID NO: 1898 - DNA, 1400 bp, mus musculus
cttctctttgtgagacttaaccgagaacaaagtctccgccgggcttttttgaaacttcctttgtcaattcaattaatataattaatccaagtctcctcaccttagcaccaggcagacttttcagacaagggtaaaaagtaatcatattcttcaccaaaatacccctaaaacagtctttatgctgaagagtggaaaatgctgactgccctgagaacatgggccctggccccctgccagatggcctaattacccggaacttttgagaaaaacaaccacagtttcaatgtcctaggtgccttgaagtaaatatctgcccctagacttcccctatttcctccccgatcctccccctggtttgtggtttttgcctttataagcctgctgaaaaatagggtcggagtcgaactcttctacccctgcatggtgtatgagtcttggccccggcatgctggtttgagctcttgtcttgtcttctcactgttaataaacttcctcatgtgattacagcaagttcggtctcagtgtctcgctaggtgcgcactattcctgagacttgacttgactcccttcaggggtctttcaggtgggggctcatccgggatctgcgtgaccacccaggggtcctagacccacttggaggtaaggttctctgttttgtctcggtcctgtgtctatattctgtctgaaaatctggtgtaatcgcagtttcggttttgtggacactctgtgagaccacactctgagagggagagcggggaggatagagatagacgtatctggtgtccaacatccgttcgccctaggagacattccaggaggacaggggtgcctcctggacccccgtgggaatagtcaggagataagtcttctccttgacgatctgtgtcagcgatctgcttccaggccagctgactcttttcggtgtttctggtcgactcggagtcggcggttcattttggctctttctgtgattgtctttgtgattgttttcattgtaagtgttatagaaatgggacagactgtgataacccctttgactttgactttaaattattggacggacgttaagagtagggctcgtagtttgtctgttgaagtaaaaaagggaccgtggcagactttttgttcatctgaatggccgacatttggcgtcagctggccgcaagacagatcctgtcatttacccattatctacgctgtaaagtgtcttgtttttcagacaccagggggctatccggaccaggtcccctacatccttgtttggcaggatctggtccagaaccctccaccctgggtgcatccctggatacccaggactccttcagtgaaggccgctgtttctatgtcaaaatcgaaaccaaatcagcagccgacccgtccctcagctcccccacagatct

SEQ ID NO: 1899 - DNA, 1000 bp, mus musculus
tctattggattaaatggtagactatacactgtgaaaagaaacacatgaacccaacatgtgtcaggtgactaatacccaaatatataaactcaagaaattagataacaagactcctggcagcagcaactctaggtcaccttgggtgcaaacttggcaaaaggtcccacagtccccagaagactgtcctcccgattttaggatcactagtgagtggaacacatcatctgttcgagaccaaatgtgataggcctgtgacatcaggagcaaagattgctgtctgccctgcctacccagctgattaggttccttctaattgctactagtacaccttgggttttgaacgcaccagacagacccactgtcctcagaggagacaccaattctaggcactgtaacaagcacagtttctttctttctttctttctttctttctttctttctttctttttctggttttttgagacagggtttctctgtgtagccctggctgtcctggaactcactctgtagaccaggctggccacaaactcagaaatctgcctggctcagcctcccgagtgctgggattaaaggcaccatgactggcacaagcacagtttcttaggattccaggatcccaggacaacagaagcttggttacactaggatctcagggtttcagtggaggctttactgccaaaaaccctgacacacacagaatctcactttcacaggagaccaaaatcactggatcacagagaaacctggactctgagtagtcctgaattaacctggaatataggaaagacaggatccaatcagatatattgagggcagcaagcacttgagataatcagatggaaggaggcaagcataagaacagaagcaacagaaaccaaggttacttggcataatcagtaacagattctcccacatagccagtcctggatacaccatcacaccataaaagcaagaaatggatctaaagtcacttctcatgatgatgatggaggactttaag

SEQ ID NO: 1900 - DNA, 1400 bp, mus musculus
ttattgaatgatatgccaccttcatttcatttgtaaagattctctccagtatggattctgtggtgagcttcatgatctgagtgttgtgtaaaggatttgccactttgattatatttataagttttttcccctgtacagattctttggtgaactttaagctctgagttctttgtaaaagatttgcatcaaccaaaaaataatttagggtttcactcttgtatggattcggtagtgaactttaaggtctgtgttccgtataaaagacttgccacattcattacatttgtaaggcttctgtcctgtatggattctgtagtgaacttgaagtttgtaggactgtgtaaaagatttctcacactcattacatttgtaaggtttctctcctgtatgaattcgttggtgaactttaaggtctgagttctggataaaagatttgccacactcagtacatttgtaaggtttctctcctgtatggattctgtagtgaactttaaggtctgtgttccgtataaaagacttgccacattcattacatttgtaaggcttctgtcctgtatggattctgtagtgaacttgaagtttgtaggactgtgtaaaagatttctcacacgcattacatttgtaaggtttctctcctgtatgagttatgtagtgaactttaagcactttcttccatgtaaaagatttgccacatttgttacatttgtaaggcttctctcctgtatggattctgtagtgaacttgaagttgtgagttctgtgtaaatgattttccacattcattacatttgtaaggtttctcacctgtgtggattctgtagtgaacttgaagctgtgagttttgtgtaaacgatttcccacattcagaacatttgtgaggtttctctcctgtatgaattctgtagtgaacttgaagctgtgcgttctgtgtgaacgatttcccacattcagaacatttgtgaggtttctctcctgtatgaattctgtagtgaactttaagcacattgttccgtgtaaaagatttgccacattcattacatttgtaaggcttctctcctgtatggattctgtagtgaactttaagctctgcgttctgtgtaaaagatttaccacattttttacatttgtaaggtttctctcctgtgtggattctgtagtgaacttgaagttttgaggactgtgaaaatgattttccagagttactatatttatgaattatttctcctgtacagttttcatggtaaactttaagacttgaggaacaggtaaataattttccacattcgttacatttgtaatgtgcctcttgggtagaagctctataataagcttgacgatttgaggattggataaatgatttctcatacttattacattcatttgctttatgtgttatcttta

SEQ ID NO: 1901 - DNA, 1000 bp, mus musculus
ttaaggtgtgagctgtccagaggttcaaatggatgggtacacctgagtggcaggctggcactgaaagagagggaaactaggcggacgagagagagatggaaccaagactgtattctgatcaaggctgaactgtttaatggcggacactctttataaaggaggggggaggcacatttcagccaactcattcttggagcccaggtgctggtgaccaggtgcaggatagggcgtaatctctggaatagacctggggcctctcagcaggtagcagtatattgaagaggaacagagacattggctgaacaatagagtgatctagggaggaaggctccaccctagataatctccttagtggcagcaaggtcaagttctggttcagcctgcttcaggcttgtgggaggctacattaaggtcctccatcttcatcatgagaagtgactttagatccatatcttgcttttctgatgtgatggtgtattcaggacttgctatggtgggagaggttggttctaatgacaccaagtaacattgatttttgttgtttctattcttatgcttgcctcctgccatctgattgtctccagtgcttgctgccctcaatatatctgattgaagcccatccttcttataatcccagttgattctggactcctcagagtccaactttctctgtgaacctgagattctggctatgtcagagttcttggcagttaagcttcctctgagaccctgagatcctgatgtgaccaagctcctgttatcctgggatcctgatatcctgggcatgttacagtgcctggaagtggtgtctcctctgtgggccgtggggctttctgatatgcttgaaaccaaagtataccagcacccatcagaaggaactcaagctgctggtcaggcagggctcccgtctccttgctcctgctgtcacaggcccatcaaaattgttttggaactgatgttgtgttctactcaacaaagatcctaagatcgtgtggagagt

SEQ ID NO: 1902 - DNA, 1000 bp, mus musculus
aggaaggaagaaagaaagaaagaaagaaagaaagaaagaaagaaagaaagaaagaaagaaagaaagaaagagggaaaaacaacaacaaaacaatatacagttaagaaatatttttgccgtttctttctctccctcctccttcctcctccactctctccaattttttaaaactccagtcattatctccctcccagtcctccttctgactgttcctcatcccatacctcctccactgtctccaagaggatatctccccctgactagacctcccaacttcctggggcctcaaatctttcaagggtttgatgctgctgcactcactgaggccagaccaggcagtcctctgctgtatatgtgtcaggggcttcatagcagctggtgtatgctgtctggttggtggctcactgtcttagagatctcggaggtccatattgattgagactgcaggttttcgtatgtagtcacccttttcagctttttccagcgtgtacctaattcaaccactgtggtccccagcttctgtccatttgttgagtataagtatttgcatctgactcagatgctttttgggcctctgggaggtagggtagggcagcaatgctaggttcctgtctgtaagcacaagataacattaattttgtcaggaattgaagcttccctttgagctggattccaatttgggcctgtcactggacttcctttcccacaggctcttctccatttttgtccctaaagttcttttagacaaaatatggttctgggtcagacttactaactgagagattgcaatccaatcactctacttgatgtcctgtatttctactggaggtcgactttacaagtgccctctccccactgtaggacatttgatttaaggtccctctctttgagtcctgagagtctctcacctcccaggtctcatacattctagagggtccccatacctcctaactcccaagtttggctgtttctactcttgctggccctcagagatttagtt

SEQ ID NO: 1903 - DNA, 1000 bp, mus musculus
aaagaccatcatatatgtgaatgcatacagactgatacagcatgcactgaacctggatagatttctaccagttaatgccctagtgctgaaaacagaagtgatgaaaaaattcccattcctaactcatatcttctactgggaactacttgcaaataaacatttggttctatccaagagaaccccacagagaaaatgaacgactgcatgcccaggagtatatgaaaaacattaaacattaaagaactcaacaataaatttggagctttcttgcctcataagataatatcatgtcttcccccaacccctgccaccaataatttcattttctactcaacgttgtgtcatgtgtaattcccagagcttccatatggataaatgccaagggactccggtggagccagcttgtgaggcagtaatgccaaaaagctgctcatgagaaatgaatttctaggactcttctcctggaagtctgacgaaagtcagctctccaggttgggtcagtttgacaggcgtaaagcctggaagctgttcttgaggatagaagttccatgaaaattcccctcccggaggtttggcgattactcctaacccataataatcaaatttccaccgccttagtctaatgtatagattcacgtacactctattaagcattaccttatagtaaatgccttttaagtttgtattctaacatagctaaagccttttcccagtgttcttagattccagatagcagcaaggggtttaacctattcattaactaatttagctctaccataaaacaattaagcactagccataaattcagttgtctacagaaagattctgaaattctcactgagataaaaaattattacagactacattccatgccaagagcaaattaatatactatactgaataatgggaattctccagacatagataagaattaacaaggcctaagaattccaaggttcatgacactactttattcctgaagccaggcaagagtttatac

SEQ ID NO: 1904 - DNA, 1000 bp, mus musculus
ctactggtcagaaaaattgaccatattaaatttggatagaaataattactgtcaatataaacaaatgtgtatgcacactagttttaccccaatgcacactgacacacaaaaattgtcagctaatgcaatgagatatttatatattgttagtcattaccttcaatatctgggttatatgattacataggagtttttttctagtagggacactagcagctagctcttccttacctcatcctgatgggcaaaagtcccagtgtcatataaaggatgaaaggtgacattcttctgctcctccttataaaggcagtgtcttacttcttccagcacagactcgggagaaactccagagcctcttccaagatgctggtggtcctgtttacagtggccctgctggccctgagctctgctcaggaaccccgtgaaggtatgagaatatgggggtgggtactatgactcttcttaaataacaggatacaacagtgtaggggaagagagaaatggaacaaaggactggagatgagatatgaatgaggccacatagtatttttagtttttaaaaatatagacttgaatttgaagacaatgtggtagataaaattaactatatatgacattagccttgctttactgttcaacaaaagaagacaagagaaaaaatataagagccatttggaggatagcaactgaagtaattaactgaaactattatgcagaaaaataataacagcttttaaatttcatttttctgcactcattcattattccaatatattatcagtgcccgtgtaatagtttacacacacacacacacacacacacacacacacacacactcacatatatatatatatatatatatatatatatatatatatatatatatatatatatatatatatcttctctttaagaagacagaaaggtagaagatttaaataaggaagagttcaatattttaaattacatagagatagaaaattgatggatgaaagataaa

SEQ ID NO: 1905 - DNA, 1400 bp, mus musculus
tggagattcctcagaaaattgaaaatagatctacctgaagacccagctattcccaaaagatgccccagcatgccacagggggacatgttccactatgttcatagtggccttatttgtgatagccagaagctggaaacaacccatatgtcccacgatagaagaatggatacagaaaatgtggttcatttacacaatggaatactacacagctattaagaatgagaacatcctgagtgttgcaggcaaatgacaaatcctgagtgaggtaactcagacccaaaaggaaatgcatggtatgtactcactaataagtggatattagccaaaacaaagaaaaaacaaaacaaaacaaaaaacaaacaaaaaacaaaaaggaaaaagaaaaattccattcagaatatacaagattcagtccacagaattcaaaaggctcaacaagctggagtgctaaaatgaacatgcctcagtcccacttgagagagagaagaaagcaatcacaagtggggaggtagggaagaagagagagagggacttgggagggaatgtgaacctagtgcagaggacagtggggagaagaggaaacctgatctggtattgggagagggaaaaggactgaagccctaaaggccagcagaaagaatgtaaacaggcaacctcagtaaataggaggttgggggaccccccagagtgcaccagagatctgagaagtgaaagactcccaggactcattgggaggaacctttgatgaaatgcctgacagtagggagagagaaatatggagcccacctccagcaggaagacaggacatcaagtgagggatggggttgcagtaccacagccacacctctgacccatgattatttctgtctgaaggaatttcagggatcgaggtggagaggagcctgaggaaaggaaggtccagcaacagtcccagggtgggatccagctcaaagggaagtcccagggcctgacattattactgaggctatggaatgttctcagaaagggatctgtcatgactgccctccgaaagactcaacaatcagctgaaagagtcagatgcagttgtttgcacccaaccaattgacaaataaaattaaacttaaaaaaagttagctcccagtaaacagaaacacattatacctgcaagacagattgctaaggagtaaggtccacaaaaaatctcatgccgaacaatagacagccaccacaatctctaaaaccagagaagaaacagaaaccatcaaacaaaatgcccattcaacaacaatgaaaacaatatacagcttctagaactaaaattttaacaatcccagatgtctagataccaacataaaacaagatcaataacagtcaagacaatatttctacactagagcccagctatcctacaatgaagg

SEQ ID NO: 1906 - DNA, 1400 bp, mus musculus
cagggttgttgtatttgtttctttctgttgtagtcatgtttctcaattctcattacttctgtggaatcttaaaattggaaaccacatggcacagtaatgacctctagaaaacacagtaccaaagtgtggatactttgttccttcttaaaatggggaacaaaatacccatcaaaggggttacagagataaagttcccagctgagaggaaaggaaggacggtccagagactctcccaccaggggattcatccaattaactaccacaaaacccagacactattgcatatgccagcaagattttgctgacaggatcctaatatctatctcttttgaggctatgccagagcctggcaaatacaaaagtggatgctcacaatcatcaatttgatggtacaaaggacccacaaagaaggagctagagaatgtacccaaagagctaaaggggtctgcaaccctataggaggaacaaaaatataaactaaccagtatccccacaaagcttgtgtctctagttgcatatgtagcagaagatggccaagtcagccatcaatgggaggagaggcccttggtcttgtgaagattatattccccagtgcaggggaatgacagggccaggaatcaggagtgggtgggttggagagcattgtggtgggagggtataggggacttttggagaggaaattaggaaaggggatagcatttgaaatgtaaatgaagaaaatatttaataaaagaaaaaagaaaagaaaagaaaagctccccagggagagtcttaagcagccatgaggggattccgtccttagcagaagtactttgaacagtaattttaaagggcctgtgaaataattgaggaggtgagaatctcagtctgaaatttgattctgagtagaaaaatggtaacacagttgaggcagtgctcacacaatatattgcaatatttcagcattacggattatttgtcatcatttcacaagttctaatatcctgctgtggcacagttaggagtcatcaaaacatgacttttcagccagctatgcaaatgaacagaagaaccagagtaatcagttactgggaacccttcccaaccttatcagaatggaagacaccccctctctctttcagttccttaatctctccctccttcccccttcttctctccttccctccctccccatctctatccatgcctcctgtcctgcatttgtatatttatgttagaaaagaagtctccttctaaacagaaacattctcagaaattaatggcttttaccccaaaatctgtgctgcagctagaaacacgttaaatatatattttctcgtccaagttcttattttgttaacttcacatttttgtatttgttagtgtactttcttttcactatgaagatttacatttttcta

SEQ ID NO: 1907 - DNA, 1000 bp, mus musculus
atagttttgcttacccactcttctgtaatctgatttctgtttccattgaaatcagaggtgatatttttctttcatgatacagcacactctgcactcagtgttgacactgaaggaagtcagggaatgcatctgagtggaatgacatttagcagaagctaccactgtgttggaggacaaggtcaagactggcttcctcctggacttcttcttccaggagtacacagtatgaaacatagagctttattctttgttatgctgtttctctctctgtttcccaatgaagccttcttaagacgacaaatgaaaaccactcaggacattctctttgccaatttagtatcaggagaaatcatacggtccacatgctttcgatagtaaaaacccccaggaccaagcactgtctctttctcccataaaccccttaagtgtagagagaagtattgacttagaactggagtagatttgccaacttctagaatcttcactttagaacacactcatgcgcatctggtcggcaccagcactgaagcaccttgggctcagagtctgcagacacccccaaggtctccacaggactctccacgggatctcaggacctctggtgagtggagcacaacttctgccaggaggcaggttcaaacaccagatatctgggtacctgccctacaagagaagagcttgcctgcatagagtactctgtccactgaaactcaggagagaactagtctccaaggtctgctgatagaggctaacaaaatcacctgaagaacaagctctaaccaaagacaactataacagctaactccagagattaccagatggtgaaaggcaaacgtaagaatcttactaacagaaatcaagacactcaccatcatcagaacgcagcactcccaccccatccattcctgggcaccccaacacacccgaaaagctaggcacatatttaaaagcgtattgcatgatgatggtagaggacatcaaaaggactttaataactcac

SEQ ID NO: 1908 - DNA, 1000 bp, mus musculus
tgtcattttaattggctgtatctaggttcagaggatctcacattgattgtaatatattctaagagacacaaagccattgtgcagtacagtctacgaacaatcatagactgccatatgggcctcatgcctgccaacaatcttaagcctcggagtcctgccatagttggttattgcccaatccaggaaagtcatgagccagtggcaagatggagttggagactttacattcctttgtaagcctcagactgaatctctgcagcccccatccttctctctcagcagagatactcagaacatttgtgatctggttgtctagtgggcatagccttatgccttagttgcagtgaactaaactgggttgttgggcccatggctggttagtgtgcactcctgctccctatgtgctgtagacaggcctcccttcttcctagcagtatctcttctgtaagcacagaccttctttttaaaggttttaaagcactacttgttttccagcctcttgtttttttaaagatattgaactcaaaaattattttgtcttgggggagtgtttgggctttctggtttgtacttgggacttttctcagatcagtttagatcctatgcctaaattgagtgacatttagatgttaagcctggttcttcctttcagacttgtactaccagaattaaaactcaggctccaaacacattcacaaataccttggtcataaatgtagctaggctattctctgactaaattataacttatataacacatttattctaatctacatcctgccatatggctggttaccagtctgcatttaccacccatctgtctcatcacaccttctcaggtgaatctcccagtgatttactctatctcagaattctatctgctttccagatgtcccacatcttattgtaccatttcatttagaccttaagggttttaattgaaagttgatttatccacaaaatgcacaagatattcccactataatgtgtaaatatgtgt

SEQ ID NO: 1909 - DNA, 1000 bp, mus musculus
ctcatcttaaaaattctgcttgatggatggaagaagagtcaggccagaaagggaaggctgaggtcaccagcagagtctgtactctgtaccggttgggccccttctctccactgtcagcctggccgggggtgaagctgctggcccagagatgaaagcggacatgtgccagtgaataagcaagtgtctgaggaatccaaggccaaaggaagcaaaatactccattgttccccgcatctcccccttggcgcctcccccatacccccctcctctgcccactctcctaggccagctcacaagtgtctgtgggggctggtggactccccatcatgggcttcctcccaggaaatttcctgtggtggaaactctggggaaacttcctgttgggtaggttcctgcctgcgactgataaggggaactgcttaaaacccccgccagccacagctgctgttaaagggtggcatggtctttctgtttcctcagtctgaaggaacaagaaagggcaagtaagcagaggcctctgaagtctcccctggctagaatattctggaagctgaaagttccacttggaatccgcaagttccttcagagagttggtgctcattgaaacatgcacttttgagtatggggctctacaaaccttctaaaaaaaaacccaggtctgagtgtttccatatcatttccaagccttcctcttagtcttcactgtcatgcatcttcgagtttcagtgatagtgtacagggaattttaattagtcctcgccaattacagatacagtcgatgatgtgaacaaagtggttcacatgataccaatgtgtgaatcgtctgaggtacgctctgtacgacagtctttagcctagcacagaattctcagtaggcttcatgattctgcgacctggcctggacttgtagttgcttattgtgttgtttgccagcccttaggcaaagataattatccctaaaccatcccatagggttaagctcagctctgaatatttcaat

SEQ ID NO: 1910 - DNA, 1000 bp, mus musculus
cctatttcccagacagctgtttgtacagctttggtacatagctgtcccattctgcctggtaacacgtgccggccaccggggctcccaggtgatacttcttgcggaaggctgcagttttgaacttcccacgatggtctccagaccggttggtgaggatgggttcgtcacatctcagtggcttgtcctgctggtacaccagccagacatagcgatggaggccagtgcccttgggaggtccggaacccacgtaatccgagaggacgttcccactgctgatgtcattgcctttcatgttgaccaccagaaaatggtgccattccctgtacacgggtttcttcctactgggagcatccgggtctgtgaggatcaaggtgtagagtttccctgtgtcaaggccatcccatgaaatgcttccgggtctgtgcttaacctgggtgggcgtcagcacttggcccagctcttccacctccgcctcggtgtaggtgacccgcagtaggtgctggggctgctcatccacttcgtggaggctcagcggcccggtccacatgctcatgtctgtaggcatggtgagaggctggagtggcggttgggtgctgctgaaggcgcgtgctgcgctgagaactggccgtgaccacacaagctctgcagccgcgggagcacacagttttgtatttttatatacctcaatgaatgactcccaaagttcaaatttttttttagtgctaaaattaaaatatcaagaacaaatttttacaaaaaattatgaaaaccatagtttgaaaagtacaagatattgttgaacaggatctaaataaataaagagaaatcactccatgtttgtgggtaagacttgggaattaacaagacattaatatcctctaactaagatagtgtgtagattcaatgaaagtcctgtccaaatcgcagcatctttgtagaaactgctgagtttagaatttgtaaagatggatttgcaaggagccagaatagtcaaagctat

SEQ ID NO: 1911 - DNA, 1400 bp, mus musculus
attactccagacttctaaccagagactatgaaagctagaagatcctgggcagatgttatacagacccaaagagatcacaaatgaaagaaatgaagaaagaaagagagagagagaaagagagagagagagagagagagagagagagagagagagagagagagagagagagagggagggagggagggagggagggagggagggagaggttgggatgagagggaaaggaaggaaaggggagaggaggagaggggaggggaggggagaggaggagaggggaggggaggggagaggaggggaggggaggggaaggctggaccaggtgtggtaggtatacagctttaatcccacatcaatcaccagtgaaaagagtgccccacaggctgcctggagaatagtctgatggggatattttctccattgaggctccctcatctcagatgactgtagtttttgccaagttgtcagaaatctaaccaggacagtggtacacatctgtaatctcagtgttcaggagagagaggcaggaggatcagttgagcagtaaatgtaaggccagtctcatgacaccgactcagaaaacaagaacaaataaacaacagcacaaccctttacaaccctcctgcctctgcctcagaagtgtggtctttgtcttaagagcaacaggaagaaagtccttgggatttaggaagataaatgagcaccgtggttcctgttctattcctaggaagagacaccatgaccaaggcagctcttgtaagaaaaaataataaaattaaaataaagcccttaattggggctgacttacagtttcagaggtcattacattatttcagcatggaagcaggtgaagagaggacgacgaggaagaggagaaggagaagaagggagagactggcctggtatgggcttttgaaaaatcaaaacctactgcaagtgacacaccacctccaacaaggtcacaccctctcagccacaaatcctaatctttctcaaatagtgccaggccctaatgacaaagcttcaagtatatgaatctgtggaagccattcttaatcaaaccaccacagtgactaatcagattttcattttaagagacaatttgagatggctcagcacttaagagcccttgctactcttcaagaggtccccggtccaaggccttgaacccacacagtcactcacagctgtcttaaactgcagttctggctgatccgacaccctcacacaaacatatgtgcaggaaaaacactaatgcatataaaattaaaaataaattatttttttaaaaagaatttgagccgggtgtggtgatgcacacctttaatcccagcacctggctgggagtccgaggccagcctggtctacaaagtgagtttcaggacagccagggctatacagag

SEQ ID NO: 1912 - DNA, 1000 bp, mus musculus
ctcttctttaaaggctggggagactccgcgaatgcgacggcagcgctcagcccctgacctcaaagagagtggggcagctgtgtgagtcccacatgatgggcagacagggcctagtggggcccttgttagatggaaggtgcccactgcttccccaagaagccctggggcagggaggccagaaagcagagagcaagagagagggaaggtccgagtaggtggtagaagatgccagagagtgtgctggaggctgagggaaggaagagggcgcggagttgccaggagcaaaccaaagtcaaagagggtccgtaggaagttgtcttggggctacccattgcaggggggaatcccacaaacgctgccatgggtgggtaggtgggctggggtctgcatagccagtgtttgactttctttttgagtgggtgcaacggggagagaaccgagagtgaggtgggttctcctccccagctcttgtctgtccgtctatccgtctgtctgtggtggatttctgtttccagggaggtgtggtgggatcctaagtcattcccttccccttccaggcctcctgctatatttaggggacctgtctggtttggctggggtcccacaaaaatgtggggcctcttaataaaggatagcaaacaaacaaacaaaaaggctggggagagttatcattagggacgtttgttcatgttctcagtattaattaaagtaatcactttcaggcccattaacatgatcatctggggatgaggagatggtattgtgagtaaaccttttccctgcaagtgttaggatgggagctcagattcctaacaccaacacaaatgtcaggcagccacagtgtagcctgctgtaatcccagcatggggaggcagagatagcctggagtaggtggccagctggcctattgagatctacagactctggtacagattctggtctctggtgagagaccctccctccatataataggtaggaaagtcaaggaagatacctgcca

SEQ ID NO: 1913 - DNA, 1400 bp, mus musculus
gtttaaaaattatagatgtaaaatcaagctaaatttaaaacgtctattatcattccatgcacatacaggtacacatatacatatgtatacaaaaagtctttctttggcacccaaaaatagacatctcaattttcatcaaaaggaaaaacaaatcagtggggatatgaaatatggcactcaatctaaacttccgggttagaatattttttcctgatgatatgtaaagttttctgcctacagcatgtttattttacaagctgtattctgaaatgtcaggaaaccagactctattagcatagctgctgttattttagagagacaattttagtgtatctcagatcagaaaaggcaccaggtgctggaaagcaggacattccgactcatcctaacctgccgtgaactcagctgggacgaacgcctggccttatcagagccacgcatctctttgctgtctatgcagtagaaggagggaccggcaagcaaacacttgatatttctgtagcatttcaaaaaggggaacgtgtgatgtgaattcacaaaaaaaccacccggttactcttgcaaccagcaacacgcacgtcaaattaggaggcaacagggagcacaattggagaaggggggggaagaagaatcccttcgtgtccttggatctgtttccttatcctcattgtctccaaagggatacaagaagaactgatcaaatttgtgtgcactgatttcaatactatctttttgaaatatccccatctatccatctatgcatctatccatcatctatctatctatctatctatctatctatctatctatctatctatctatctatctatctatctatctatctaactatctaactatctaactatctaactatctatctatctttttttgaggggtggaggttgaggcaggctgtcatgtgttccaaggtggtcttgagctctctatgtagctgaggatgaccttggccttctgattgatcctcttgcctgaacttcccctgtgctggggttatagattacacccaggtgcttggtctcatgctgtgctggggcttgaactcaaggcttcccccatgccaggcaagcactctgccaactcaaccacatctccagtccttcttatttttataacgggcacacaatgttagtacaggaaagacaggtggcaattctgagcgcacctagtgctgacaagaagggaagatgtttctttgcatgtaacactaatattgcgcgtggaagatggtcttgcttctgcagtagatgatgcttttctaacagggctgatttaagagaaaaagggaaattatatccaataaagaaacattaaggattatgcttcaaaccagaatatcagatttttttttaaccctgcggagcttcccagtgcatattatt

SEQ ID NO: 1914 - DNA, 1400 bp, mus musculus; identical to SEQ ID NO: 1913

SEQ ID NO: 1915 - DNA, 1800 bp, mus musculus
aaagatgcaaagttacaggtgaagtgacatctaaatactgcaccggcacagtttcagttagcaggtaaggttagcgggataaaatccacaagaaagccttttggaaatctggggcttgcagtatttatgtctcacttctaaggtggcccaaatataaggcaatcctgagtttcaagagtgtcccccaccccagattgccacagatactaaaaccatcaaaacacaccccacacatgatgttaaaactaaattgtcactcaaaacaacacaccaacgactgaccaaggtgccttcccaggaagacaacttaacacctgtggaagggacccttgggctttgtggctgttactcagggttatgactcatcccagcagatggtgtaaaggtggaagggggtgctgggaaggtgggagggggagggggactcaaagagagctagagagtgttgctagatacagaggggagggaagcatcagggagagcatgggggaagagatgggaggtggataagtgactgccacaaaggtaagcaggagaggaagtggtttctgatcctcccagcatctcctcggaaagcattggtgtgtcattacaaacccacaagatagttctcttatatttgggccaagagatatctaaagcaatccaaacatagcaaacatcaccaaaagttccacttagcacacaccaaagacacttaatatatatgttttgttccctagacaagcatgtcctttgcgcttcacttcgtgatggcttaatgaaatcgtgtcagtgttccaaaagcgccagaatttcaatgattgtttttttttccccaaaacctatgccaacggaaagtgctacaggctctgagtgccacaatgtgattcattctgcctgcttccataaaaacaagaacagctagtgtttttctctctgtggaataatacagtgagacgctcagaacatggtggcagtgtcacaggcaagcctggagccaggctcaccaagtattcgagtcccggttcatccaacccctgctgctgtagaaggcaacagtaccatcggacctcactcaacaacaggtcaaaagcgtagaccgaatggaagctttgaaagccatgtagagccattctcatggtctgtgccataaattatctttacttgcgtaccccctctcccctcagtcttctcagcctgcttcatgcctccaatctctgaccagagaagggagagagggccagatcctccaatcagtgtgactcattctgaaagtcactgagtcaggactgacccttgaccttatgctctaagtccctccccaacacctctgctcctctctgcctactgctaagcacctgctctctgctatcgcactcctgtgctggactcttcctgttggaggcacagaccaatgactcgcaacacacctcaagacctagaaggcttccttgaacacagttcacttggagccttttcttcacgccccaaggaggcccaggttccaatctgatgagaaatcttggcccagggctgttcccaggaatcaccactaaactccacagccctcccagtgttgctaggatagacccacgtttgtataatgctgtcacttcccgagtcccatcaccgtctctcacaaacgccaagctcctctgtacacaaagcatcctgtgtcgttctctgagaagactcagaatgtctctgcctcttaagaaatgcactttcctactaagtcagtcttctttaggagccaaaactgggtaaaacctctcgagcactgaagcgatggagactaacacacctgactgctgtgca

SEQ ID NO: 1916 - DNA, 1400 bp, mus musculus
agcccctgtgccaagcacttaaattgtgttattttacttaattcttaccaacttaaagaggccattaaaaccgcttattgccattctaatggttgtgggacttataaaagttatttataaaattttaaaatgacttggccatgatgccaatagttatcccataagagggctgccccaagttatgcttttaagtgctattaaatactagtattttgttttcactaatggccaatccagtactagggcttaagcaatgccaacagcaaaaagttaaagtcaaaatgaccttggtaaatcagtactcaatattcatccagcattgatcagcaccagccaacccaagccctaacccattcactcatcagatgtgcccgtctgagttctacagccgcctgaggttgttgctgggaactgaactcttgttctctgcaagagcaacaggtgctcttaacgccgagccttctcccagcctgtgttgttgtggggtggtggcagtggctgttttagaaggcagagcctcattctatagctcaggctatcctggaattcactaggttggtcttgaactctcaacgtgtctcctctcttagtctcctgagtgctgtgattacccggggtaaagtacaatgacgggctcagagttgaagaatccgttacatcagaaccactcagcacagagctgagcgctcacgatgtagaaagccaagattccccaggaactggccattatatttttattaaatcagcttaaatgtaaacataaattgctaatgtgattaatgcctcccatgaaggatagggcagttctatacatttattctataggagacaaaacagatatgattcctgctgtggtttaggtaagtgttccctaaagactgtgtgtatatacaccaccggcctttggtactattggcggggctttgaggtctcatatagatgctcaaatctggccagtgtgatccaaagcatcctcctggctgcctttggatcaaggtgtagaactcttggctcttccttccatgatgataatggactgaacctctgaaactgtaagccagctgccgttaaatgtttactttcataagagttactttggccatgctgtcccttcacagcaatgaaaccctaacaaaacacatggaaatagtcatttcctgccacaggtgtctgtggggaaactgatgggagactacatcaccttggtgggtgatcttgatttagaatcacctaggagacgtgcctctcgctgtatttgtgggggcatttctaaagaggcttacctaaggctgaatgacccatcctgaactcaggtggcaatattccatggactagggtccccaactaaacaaaaggaagagagtgtgctgagaaccagcatgtctcttgtctgcttccta

SEQ ID NO: 1917 - DNA, 1200 bp, mus musculus
ctgatgcaagccctgtggtatgggacaaaagcccaccttcccagtctgcacttggcgctgcccctgagaagctacagtttaatatttcatgactgagttcatcacagatttatgctttctatattctctcccttaaacaatattaacttctataagaacttctttctgaaaacataactgaacagggttgttgacactggaatatgtttatagaaaatctcttaggaggactgcccaacctgcagaaagtctcctctgtcgccacgtgtgctgctgtcggctcaaggcttcatgcgatttggttgtttgccattcctcaacaatggctacaagtgccctactgctgagctagctgtctgtgtgttactgaggcagggaaccacttcgctccattcgtgacactgctccgggacagtggtcagattcatagggaggcttctggttgctctgcggcagtggtcaagttcacagggaggctccctgttgcttccttggctcctttctccatgctattcgtggtgcctcctgcttgtgtgatctatctgaagaaagccccagtgtggcttggcagcttgtgggtatagatttgtccactcttttggatggttatactcctaggacaggcgaatccagggcatcatgagattactatacatgggacctgttcttttcttttgctttttcttggatattttctttacttacatttcaaatgttatcccccttcccagtcccaccccctgcccccagggaaaccccctatcccatcccccctccccctgcttctctgagggtgttcctccacccacccacccactcccacctccccgccctccattcctctacactgggacatctatccagccttcatatgaccaaggacctctcatcccattgatgtctgacaaggccatcctctgctacatatatgcagatagagccatgtgtactccttggttgatggcttagtccctgggggttctgcggggtctggttggttgatattgtggtacctcctatggggttgcaaaccccttcaactccttcagtcctttctctaactcctctattagggaccccatgctcagtccaatggttcgccgagagcacctgtctctgtatttgtaaggctcttgcagggcaattggatggaactagaaaataccatcccgagtgaaagaacaaaaagaacacacatgt

SEQ ID NO: 1918 - DNA, 1400 bp, mus musculus
ctccttgaatgcgttggcacaggagacaacgttctgaatgacatggataatgcagacatcaagatcaataattaacaaatgggtcaacataaaactgaaaagcttctgtaagacaaagccaccatcaattagacagtgtagcctcctgtaaaatgagaaaagttaaaaataagacaaaacaaaataaatcctctgatagaggagaaatatccaaaatatataaagaactcaattaactaaatatcaaacaacctaatttttaaaaataatcaagtacaaatctaaatagaattctcaaaagaggagactcaaatggctgagaaacactcccacccatctcaaaaaaatttaacccacaattgtctcagtctaaaggaaatgcaagaacaaagagagtggagcagacaccaaaggaacggccatccagagactggggattaattccatctgaagataccaaaccccaacaccatttattgctgatgccaagaggtacttgctgacaggagcctgatatggctgtcccttgagactctctggcaggacctgactaatacagatacggatgctggcagccaaccatcagactgagcaggggaaccccaatagaagagttaggggaaggattgaaggagctaaaggggattgcaaccccataggaagaacaacaaatcaagtaactgtacccctcagagcttctagggactaaactaccaaccaaagagtccacagagagagacccatggctccagctccttatgtagcaaagggatgccttatctggcatcaatggaaggggaggcccttggttctatggaggctcaatgccccagacttggaggatgctagggtggtgaggtggaagtgagtaggtggatgtgaacgtaccttcatagaggcagggggatgggatagggtgggggagtttgtgaaggggaaaccaggaagggacagaatatttgaaatggaaataaacaaaataaccaagaaaaaaagaaaaaaaagttcaatatccttctcaatcacagaaatgcaaatcaaagcaactctgatattccatcttatacttgttagcatggctactgtgattagtgttgtgagctaatttgcctctctctaagtcaactgtaacattcttttccagtaagcagtcccctgtctccactagaacttagggggtgattactaccctcaatgcaccatgttcccgtatgatctcttccaagctggaatgtgtcgtagctttaccatcagagctcataagtttcaataaagtgtgagattaagtcacttttgtaaagatctgagattaaactgccttcacctattcttgctggcagataaatacaagatcacttcattatttacttgatgagttcataattcttgcaaattttccc

SEQ ID NO: 1919 - DNA, 1400 bp, mus musculus
ctgtgaatcaagtagcaattggccttagccatctcatgaaagtgtagtagttttgtttttcattttctttgatactaagggatattcagagggttgcgattgacaggaatgtttgtcttatgcaggaaatagtaaaataagcaaagtaataattctttgaatttaaaacaggacttcctgggattacataaaatatcttgctataggaaaaaaaaggtttatttgatatctaccaaatttcttgaagtatctattgagtaaaacaattattgacttcagtgtatatttctatagaagaaaaaataaaaaaatctaaaattcatatctaagtttggaatctatgaagacttcattataaaaggcattgcattttaacttgattagatatttacttgacatttagtatggttctaaaagttggcgttgtatatgaacctcaaatggtatcatcaaaaacctgggtgttttccttcagcgtcactaacctataaggaagatggaggtcaacagtcaatgctattggacccatccaaatatttaagttgtcaaggttgtgggaaagcagccaaggacaaactcaacactcctctccttagccactgtctggcttagaatcttcattgtaactgaaagagatgtgttgtctatgagctaatgagtcggcactttctaactttacaccatcaccagctacttcagcacaacacaaagaaataagattagactatctgagaataggtgatgagcagcactcaaagattcagagttccccacaggtcactggcagcatccttcttctcaggcatgccatcctttgaggcttgcattctggagatttctaagacacttgctaaagagatcagactgagtaaatccaaacttaaagtgtatatattaccaatcttacgaattaagaagcattttttaggactggagagatggctcagtggtcaagagctgcttttccacaggtcccgagtttaattcccagcaaccacatggtggcacataaccatctgtaatgggatctgatgccctcttctggtgtgcctgaagacagctgcagtgtgatcctatatgtaaaataaataaataattctttttaaaaaagaagcattttttagacttgtgtttgaaaacttggcagcaccaaacatactctccaaataaatttaatttgtcatacaaatccattcagactgatgacattttaaacatctttagatgaaaactgaagtaaggaaacttagcagtgcaacattacaaacacaataatgtgttctaattataaactttctgaagcttaggaattaattcaaatgagtgcttctaacttacctgctcatatctcacatcaatgtataacaaagtatacatgtattggcatgtattctaaattc

SEQ ID NO: 1920 - DNA, 1000 bp, mus musculus
aatttcataaatatagttgctaaatgtttgttaggggcatgctgcagggtagatagggatggactgatttttacacagtgcttattagttgaaatgatactggtttaaaattctataacctctggtttggagtaaggtatcttctatcattcattgtccccatccctcaccccatgaacactctccaccccactcctgccccatgaatactttccaccccacacccctcgaactctctccattcagaagtaactgttggtcttttaacagcaacaacataagagacatgccactgatgcattatgataccgacctgctgcaaatataactttagtatgtccaatggaacaaggggcctacttgtcacaaactttatactgaggtcctggatcgggagcccctacgaccctgtcccctatgttctttattatgagatggtaggaaatctcggacttcctttgatgaaggaaaagttagcgcctttttgttttacatattttaggaaaaaataaataagacacaattttcagatgctggtcctgatgcaaccaccaccaccaccacctcctcctcctcctccttttgtctcctcctcttcctccacttcctccactgcctcctccacctcctcctcttcctccacttcttcctattcctccactctgtcctctttctccttctccacctcctcctcttcaacttccccttcaccctcctcacctcctcctccacctcctcctcttcctcctccttcacctcatccttatcttctttttcctatttgtcttccttctcttcttcctcctttccctccctcctcttctccatcttcctcatctttctccttcaccattacagtgacatgtttttgttccttctcctctgttcttcctcctcctcttcctttgttcttcctttctttcttcttttttatcttctccctgcttcttcatacagagtccatagtggcccaggctggtctctacttactttgtgccca

SEQ ID NO: 1921 - DNA, 1200 bp, mus musculus
cagacataactcacaacaaacaagcaaacaacacaaaacaacaaaaccagtggcttattcttcccaagtgggcaccacttcctaaagtttgcagaaaacttcctttatagcataacgagatagagacctagtactgaacacaggaccacatttaaactgtgtcatttttatgtgacctgtttgtctctacagccagcaattccatcacatcgctactattcggtataaactgagccaagttgcctattaatattgaaacttaatctaactttaaagtcaaactattacatcatttgtgtgcttttcctgtttatccctgacttctctctcacagatgtctgcttcatttcttttcctcacccaacagtggttccacctacgtatgcacttttaacttgtgactgcttttcttttagtttcttttttatatatatactttttattaggtattttcctcatttacatttccaatgctatcccaaaagtcccccataccctcccacccactcccctacccacccattcccacttttcggccctgccgttcccctgtactggggcatataaagtttgcgagtccaatgggcctctctttccagtgatggccgactaggacatcttttgatacatatgcagctagagtcaagagctcaggggtactggttagttcataatgttgctccacctatagagttgcagatccctttagctccttgggtactttctctagctcctccattgggggccctgtgatccatccaatagctgactgcgagcatccacttctgtgtttgctaggccccggcatattcttttagtttcttaaacagtaaaagtaagtaaataaataaagaatgctgaaaggtaacttccccatacttccccccacatcatctttataaactctatgtcacatgttacacttctgctcccacgagtttgtgtatgtcagttgctgggagctactgtaaagaaacacctgacactgggtattttcgtgtgtatagtgattcttttgaatgtctgaagccagaagcccaggttgccagtggctagggcctgggctatttgcttctgagagatgtgtgaaaaaatcatttccatctctatcgccaaagagaaaaacaaaacagtgtttaagaaatttcttacttttttttttttacagttttcaaagtaccaaaagagcccactgagcta

SEQ ID NO: 1922 - DNA, 1000 bp, mus musculus
caggttcaattcccagaatccatgtagtagctcacaactatctgtaactctagtcccaggggttccaatggcctcctctggcttctgtgagcatcggatacttgccggtattgcatagatatacatataggcaatgcacccatacacataaaatagtagaattttaaaaattaaaacaaaacaaatgagccacaagaggactggcaacccccaggctcgaggtatacgacttgctggagccacaggttcagctgcagaggcaccagcgtaactaacttctcgctcgtcgcagtacaggaacgtacacacctggcttgagacttaagacgccagtgagacatggagaagtatgtacacgaaacagatggagcgtgcttcagaacttgcatagtgtgcaagtggatcaaaaaagcccaaggaatgcgatgtagaatcctcatttttttgtacttcggggccactgagatgttgtagttcccccttttctgaatgaatcctctctgcttgctgtttctgtctatgtccagttccttgtttgctcagggatgtgaattgaatatgcttggcccatgggaagtggcactattaggagatgtggctgcgttggagtaggtgtggccttcttggagtaggtgtggcctcgttggagtaggtgtggccttgttggaggaagtgcatcactgtgtaggtggccttttatgtcaggtgctcaagctccacccagtatggaagagagggccttctcctggctatctacagaagccagtctcctggctgccttcgtatcaagatgtagaactctcagttcctccagcgccatgtctgcctgcatgctgccatgcttactgacataacgataacggactgaacctctgaaaccgtaagctagcctcaattaatattggcttggtcatggtgttgcttcacagcaaaagcactcaagctgagacaccggctgttagctgatgtcacaaaaggactcccacaccctgagcacagg

SEQ ID NO: 1923 - DNA, 1000 bp, mus musculus
catcacagtcttagaagaacttgctctgtatattatcattagatgcacatctaagagggtgaaacagcacttgcctcagtaatattagtaagtagacacagactttggtcactgctgttgaaattgtggctctgtcatattgaattgtgtatgcagcaggcatattgctcggccactcagactttcattcccatggcacacacttgaagtctgtagagctattagctcatgtcacgcgtgtagtgaggagatagaagttatactaccagtttcatttaaggagatgacttagagcagctgcttctggaaatgtaggtacaacctagggctgttcagagggagagtcctcacctggtgtcctaggtcctaggtgcagttctcagcgctgtgggtaagacacgaaagaggaacagctgcctgccctggtaagtttataggttagtcggaacattttcataattacagatatgtggactttacctttctatgggtacagtgaatacctgaagcaagtattcaatgagccaagtcttgagtactgagtagaggttataaggtatagagggactcaacaggttttcctaggagactacacagcgtacgcagtgtctggtggaagacagccatgctttggggcactgggtatctgacagcaggcagcatggttgagcagaggcggtgggaaatagagctgttgagagtgggccgaaatgcttcaggacctaatttttcttgctaaagactgcaggatgaaccctgaaggaagctactaaaagtttagtcatggaagtgtgctttactttgttttgaagtgatgtttcatgcgttctgcagataatgaattaaaaggggccaaggctagggccgtgtccaaatatttgcacagagttgtggcttctttttattgtcctgttgttcccaggagctatttaatagctctttgagtgttcaaggaagaataaataatggcttaatcagtaagtgcagtagaccagcagcc

SEQ ID NO: 1924 - DNA, 1000 bp, mus musculus
aaacagagaattcagctttttataaaaaaaaaataaaataaaagcttggcttgttctttttaaaatctgttataccttaacctaaaatattgaatgaaaactttatcatctgtctttttattacttatctttaatttttggaaaaatagaatcaagtgaaccaagagataaaggatatatccaaactgtgctctagtccttctatgcaaatgcagatgaggagaagtgggctctggctttgaccatggatgtctacccattcatgtcattgaacatttcttcctatcctttcaaggcaatgagagactcacaataaccaccagctggagcctccttgaagcatattgcgggcatgctgatttgcatattaggcattaaaatgcagttcagtttctgcaaaactatgcagtgtcaattttttaagtgttactttgccagatcacaacatcaacccagaccaggatacctgaccattgttcccattagaatgattatgtaacatctccaaatacaagaaaatagcatactgaaacatctcaaaattttgaattattgtttttagcattgctactgtatggcgcacacatcttatagtcaagccatttgctcttttaaagaaagctttagttagagtgatgtatgacattattgaacacttatttgcatattctagttaagagctttaaaatcatgttgaacaggaaacagtgtatcaataaccccttaacaggtcaaatttaattatatcatttttgtaaaggattatggttttgttttgttttgttttttcaaggcagggtttctctgtgtagccctggctgtcctggaactcacgctgtagaccaggttggcctcgaactcagagatccgcctgtgcctgcctctgcctcccaagtgctgggatttaaggcgtgcgccaccactgctcagcaaggatcacatttttttattttccgactgaaagccgtgttaggaactttatttaaccgtcagtctagaa

SEQ ID NO: 1925 - DNA, 1000 bp, mus musculus
ctaaaaattaaaaggtggaatttgcttctaaaatgaaaaagaaaacaaacctttgggtctcaaaataatcttcctactgactgattctttataatatatttaaactaaacaaatattaggtcatttgatgttgctgggagtgttttctggacccaatccttctgattggtatctgtgcctgtaagtggaccctgagctccagccctccccaacccaatcatacccagaaacagcttgatccctaggatttctgacatgcccaggctcacaggctcaccggacgggcaggctccagtcagagacagcaaggtcagctaataccagagatgaccagatggttagaagcaagcacaaaaacataatcaacagagagcaatgctacttggcatcaccagaacaaaattttcccaccacagcaagccctggataccccaacacacctgaaaagcaagattctgatctaaaatcccatttcatgatgatgataaaggactttaagaagacataaataatcccttaagaaatacaggagtacgcaggtgtactggctagttttgtgtcaacttgacacaggctggagttatcccagagaaaggagcttgagttggggaaatgcctccacaagatccagctgtaaggcattttctcaattaatgatcaaggagggaggtccccttgtgggtggtgccatctctgtcctggtagtctggggttctataagagagcaggctgagaaagccaggggaaggcaagccagtaaagagcatccctccatagcctctgcatcagctcctgcttcctggcctgcttgagttccagccctaacatcctttggtgattaacagcaagttggaaggtgtaagctgaataaacaatttcctccccaacttgcttcttggtcatgatgttttgtccaggaatagaaaccctgactaagacaacaggtaaacaggtagaagtccttaaagaggaaacaaatgaatcaaaaaaaaaaaaaaaa

SEQ ID NO: 1926 - DNA, 1000 bp, mus musculus
atcagatcctctggaagtggaatttcagatggttgtgagccacctatgggtgcaggaacagaacctaggttctctgtaagagcagtaagtgctcttagctgccgagacagctggccagcccctcagagcactggtttaagaatgagctggtaggcagacagtcctcagctcagtacctgctcagggtgagatttcatctacactgttggtagtccctgaaaatgtcagtctccctgtgatgcacaggaaattgttgagagcggctgaacacttggtgtccagtgcctgcaaaatcaatgtgggaataaacagctgactgctaaattattgttagggcaatgctgactacaaatataatgtctgtccctgccttcggtttagccacttctaactcatgggatggagtcaggaaggaaggaagggagccaagaagtatcagtagagagtgtctgtggaaaatcagagccatccataagagagaggccatttctaagctgcagtctggcagctctgacagtccagagtctaaaaacagagaaagcctttggggggttgctgagcaaagtgacgggttcctgtgctgggctcttgcctctcacgttctgagagcacacacaccctcatttcccatcctgaaactctggccccaagaacctcctctacctggcagcacaggtctcctcaggaaagcagtcacctagctgttctgaccagttctgagaacgactcacagtagggatcttggagcaaccagagtcctacatctttgaagtctctgtgggacctcaggggacgcttcccctgcaaggatctagctacaatgcagactctctcagttcctcagcccttggcttggattgcagctctgagagaaacactcctcaggattgggtggagagaaaactctcgctgaatgtcgatggtaaataaccaaccaagctttaaaatacttgctctagccaggggtgatggcacaagcctttaacccagctctcagaag

SEQ ID NO: 1927 - DNA, 1000 bp, mus musculus
tccagcgcaggtcagggcaagcacaggctgtctctgtatctggaaggagccttcctgctgactttactctggtgtcttagttacttttccgttactgtgctaaacacccggatcaaggtagcttataaatgaccatgtttaatctggcttatgttttcaaagggcagtagtccatgatggcagcgtaagctgctgagagctcacatcttgatctgccaagtaggatgcagagagaactcactgggaatggtgctgcctttttaaatctcgaagcccaccccaagtgacacacctcctccaacaaggccacaccccctaatccttcccaaatagttctactaccttgtgaccaagtactcagtcaatacatgagcctctggggtccattctcagtcaaacccccagacatggttagattgaataggatattgtctcaaaaaaaaagcaaaataaatttgcattattttaagctacttttatggcaccgagtctgtaggagtttgcaataaatttaccactaggggagctaggcatggtggcacccgcttgtgttctcaatacttggtagctagcggcagagggctcagagttaaaggacagcttcagctacagagcaagtctgagaccagcttgaactgcgaaaatttacatcttaaaaaaatccatatgcatacacatttacattcatgtacatgaacataacatatgctgaagcctgtctcagtggatgaggaattgaggaaggatgacctcgggacacacaaagggacacgtcagttagaaaacccactctaggcgcaccagcgctctgacttctgaatcacttcttgctcccagcatctttcagcacgatagagctcgcctctaagtggatgtggccaagttcttccattttccaccccgcccccttggagcagggtggggttgggtgggatgggatgggacagggcaccaatgttttcttatttcctcccagatcctggtagaaactccaggcaag

SEQ ID NO: 1928 - DNA, 1600 bp, mus musculus
aggtttgtgcgtgagtgcagtaccttgcagagaccagaagagggtgctgaatcctctggagcagagttagacgcagcagtgagcctcccagtatggtgctggtccctgctggcagagcaggaattgctcttaagcactaaggatctctgtatctcttaaatataatttaaatgttccgttccctcttcagggttagctgcaatcccagatagcaggtataagcagcatgacagtgaggagatcattactgcgagcgtttccagccttaccacaatcagcttgcaaagttccccagaggttgtgttcaccaaccgcgtcagaccttcgccctggacttcaccctgtgaatcactgtcaagtctttcccctctatctggattcaaaataaaccactgtcgccagaaattctcagggacagatggcttgcttcagcttctgggtctcgggagagaggggcgtgggggggggggggggatgttgccggcaggagcattgcataaggcaacatcacccaagcagcagttgcagcaacaatggataaggagcctgcctctaagttcggccaacaacaatgtggtctatccccagacctgaggtatgggttgggcatgcctctcaccatgatcagcttgggaaaaaatgcttttcaactttcttatcaaacaaactgatcactataattgaatacaccttttatgtgttttgtgaattctagatcacagttccgtaaactgtggatcatgatggggtcatgcaactgagtttagggcattatgaaaaaaaaatctgacatgaaaaataaagggtttgaacaccccggggacccaaaattcaaaatcaaaggtggctgctttctctgaggtggttctggctgctcaccgtactgcagccttggcttgctctgcactgagcacacttcgtagctcacagatcctgatccctgtcccagcttatgaggggagacaatttgggacttcctcccaggaggctgtgcgtcttcacagagcagtccaaccacggatcctccatgatgctcagacagagaagaaaatgtgggtgcaggcaattcatccatggggtaaacaagtccgggagtggtactgtttgaggaatcatgactatagcatgatagttaccctaaagcctgcactggagagctggccttttcatggctatgtctcccagatgtactcccataaacacaatgttgaaagagaagactccctacagtttcagacacacccgctctgctcccaaataaaaggttctgcaaactcctccaaggtctcctttcccaaccaggaggaagggagggagggagggagggagggagggagggagggagggagggagggagggagggagggagggagcaacacactgcatacatgggttcaggggacaacttgtgggagctctctccttccaccagcctgctttcagggattaaatcaggtcagggctggctttacctgctgagctatgtgctcagccaaatgaggttttactccatgccttcctgctctgctcttcccatgtgtgtggcttttccacgccgctttcttctattgcagtaactattaccaacaccctagctctg

SEQ ID NO: 1929 - DNA, 1400 bp, mus musculus
gctattgggtattaatacaatttcacaaacaggaacaataagtgtgagtacatcagaaatgtttcaggcgggcactgctggggcagaactcagaactcccagttggagattccttttacccacgtgcggattctgtgtgctgggagagctcaggttcgccactgtgagagcaaagcagggccacggtctgcaaaatggccacaggttcatcttcattgttagcaggcttagaatgagcgtggaaacagatttcttcaggggtgtgttagggtgtttcaggcgatgcttactggaaaggaaaagaaccccctgagtgtggcccatgccatctcatgggctggggtcccacacttagcaagaaagagaaagaaagccttcttctctttttcctggccatgggtgcaattgacagaccatgtcaatcccctaccccacagcttccctggaatgacagactatatccctgggaactgtgagcccaataaactcttctctctttaagttgcttctggtagcacaggatcactctgtacatgtggaggtgaaaggacaaactgtgggaatccattctctcattctaccacatgggtcctgggataaaactcaggttctttaaaaagaactgctgctgccaaccaccaacgccgctgccgcggccactgctgccaccgccgccgttgccaccgctgcattttacttatctttttggctgtgtgtcacatatgcagtgcccatggaagccagaagagtatcagatgtcctggaactggagttagagatggttgtaagtctttatgtggatgctgggaatttaacttgggttgtctttccagagcagccagtgttcttaaccaccaagatgaagctcagactcttaagttgggtagcaagcctttagggtcatctcattggccccacactgacctttaaaggccccagtgtcttggaaagtctacttatcaggtaccataactagctcctgaaagttgggtaatctggggatatgtggctgaggccaagggcacagggttggccttttggtggaagcagccaagcttcatgtgtttgaaagctgctattgggcccagagaggaaggggcagttgaccaggcctctaattcttcaattggcaaaaggttaaggtggctacctttctcccggcatgggtggagagtgagtctggtctgatgtcaccatacacaagggaacccattatggtgccttgatgtctactccccttgacctactgtgcccagtctatgaggggtagtggtctcccagctcctctttggacgtacaatatcctggatgcattcccaactcatacctgatctctgagcagggatgttctttccctggacctcctcacaaagctgctgtttcatccccttaaatcactg

SEQ ID NO: 1930 - DNA, 1000 bp, mus musculus
agaaagtaaacaattcagaagcttcaaaaagttcctaaaactgacaagactcactaggcccctctctcttcaagtgtatatgagcagtaaggacccctaagagatactcttagacaactcagttacctggaagcagctcagatcaattgaactgcctggaaaaaacaaacaaaacaaaacaaaaacctctccagctatcgatatgcccataggctgtgcagtgcactccaggtatccaccttttgtgagctgtcacccatgctggggtgggctttggtaatgtagctgtctttgagtcatttctgctcctgtgagtaactcctcaaccatacttctataagaaccccagtgaaactcattggttcaccacgttggacttagtggtttcctttctttgaagtgtgagtcactggtttcctatttgattagatgcttgttcatgactcctcaggaacaatgttgcatgagacctggaactggagtgcatggtgtgggtacaggagctgaacttgggtcctctgcaagagcagtattcactttgacctgctgagccatctctccatcccctgtgacatggattatctgtaagactcagtttgagagaacaagggagaaattccaagaggactggagcaggccaggttctgccatgtccgtcagggacagccaccaggctcagctcagcctgcaaaatcaccaggcagcaaggcaaccattgtcaggtgtcagccaaaagggtggaaggagctagcagcaaccttgcagggaagggacaataccacaaagaaccaagacagaacacagaacagcccacatagaacaaagccaccagcttacaagccacatcctgtcaggtgagacctaaaagacctcagtagttaaccgaatggtttgcttaaaatttggtaattggatcaaattttcacctgggaagaattcaaatcggctgcttcttggccacctgggagacagagcttccttaagaatcagagcagttgct

SEQ ID NO: 1931 - DNA, 1400 bp, mus musculus
gctaagtcatatgacttgcacctgacttcctcatataagacacaaacatcttgagtgctgcgcaggtgtaccaggatacaggtgaatccaatttggtggagatttgcccctgctgccctgattagctgaagctgcgtacctggtgaggtggcgtggcctgctgtgcgtggatgggaactgagagtataaaagagtgagaggcccgggttagagggaggattattattcgagagaggattgttattattgggagatataaacgagggagagatataaacaagggggagatataaacaagggagatataaacaagggagagatataaacaggggagatatagagaaagaagaaacaggactgaataaacgtgtgcagaaggatcctgctgtggcgtggttcttgctggcgagttgggggcgcgctcgagagttggtgccgaaacccgggaccggacaagaaacatcttcaggcacaagtgaagaacccctgctacagggaggattcagaactgcatcacggggaaggagtggttaataaagtgttcctgtaaaacagactgttgagaaggatccggcgtggattcagaactcttcagctggggaacggtactgatgaagagaaagaagaaagatgaagacggaataaactgctgttagaaggactggtggtcgtgtcgttcttgctggtcgagagcggacgcgacaattggtggcccgtacggggaaccgactcccccaccgagttcagaactttcagcagtcagtggttgccggcagggtaagttcacggtgagtgaaacttgcgaccccaggagtttgggaaggacctcggataaaatagaggcaagtataaagttgccaggaagcaggcacaaagtaactcagtatcccgggattgggattaggctctcggtaaagagacagtaaggctctcggtaaagagacaaataggctctctggctctggagacaaggaagtgaaagtaagagagaaagtgaaagtaagaggataatagggacaagttaaggttcctggctttgggacaagttaaggttcccggtttggggacaagttaaggaactatgataacctcagtgtagtgatcaatagatcctcgctgtgtagttatgcttttttctcccattgaccctttgtgggtaggtctgatagttttggtcttgtttgttctgatatatggactctgttactgtttgaatcaagaggcagtcaagacaggtcagaaaatccttatagagcaacaagaaagtatgtcggaagagaagggcttaaaaagaaaaaggaaaaagaaaggagacacagtgttatcaggtggacagaaaggacaaaataaaagagctgaggcggaggaggaaggcgaattagcttctgcgtcctctccct

SEQ ID NO: 1932 - DNA, 1000 bp, mus musculus
agaagggcgtgtttccgcttgctcctccgccatggctcgtggtcccaagaaacacctgaagcgtgtggcggccccacgccactggatgctggacaaactgaccggtgtgttcgcgccccgtccgtctgccggcccgcaccgcctgcgggagtgcctgccgctcgccatcttcctgaggaacaggctcaagtacgccctgaccggcgacgaggtgaagaagatctgcatgcagcggctcattaaggtcgacggcaaggtcagaaccgatgtggcctacccagctggcttcatggatgtcatcagcatcgacaagagcggcgagaacttccgcctcgtctacgacaccaagggccgcttcgcggtacaccgcatcacgcccgaggaggccaagtacaagctgtgcaaggtgaggaaagtcttcgtgggtaccaagggcatcccgcacctcgtcacgcacgacgcgcgtaccatccgctaccctgacccgctcatcaaggtcaacgacaccgtgcagatctcgctagacagcggaaaaatcaccgatgccatcaagtttgataccggcaacctgtgcatggtaaccggaggcgccaacctgggtcgcatcggcgtcatcaccaaccgcgagcgccaccccggctcctttgacgtggtccacgtgaaagatgccaacggcaatggcttcgctacccgcctctccaacatcttcgtgatcgggaagggcaacaagccgtggatctcccttccccggggaaaaggaatccgcctcaccattgccgaagagagagacaagaggctggcggccaagcagagcgggtgaagtggactctgagggacattgcggggaaggggcgtttacgtttgtttatacttaaaagttttttaagcagcatgttgaattaaaaaagaaagcaagcttctttctggttgcatatgtttcttcctgtgccatgatgggggaaccacccagatgggtgttcacctcattttgaaaaagaaa

SEQ ID NO: 1933 - DNA, 1000 bp, mus musculus; identical to SEQ ID NO: 1932

SEQ ID NO: 1934 - DNA, 1000 bp, mus musculus
cggctggctcagtccctgcggctggctcagtccctgcggctggctcagtccctgcggctggctcagtccctgcggctggatctctcagctgctcttcagtacatgctgaagtcctgaaggagcaggctctcatgccatgagggactggccttgccagcagagggatggaagcagacaaagagaacctcttgcttctcccacatcctttccccaggctgcaccagaaggtgtggcccagacttaacgtgggaagagaagatgtgggttaaaggtgagtcttcctactttcaattattttttatttatttatggggggaggatttctttgctttagagattgcggtctaaggcaggcattttaaaaagaactgaagcagaagccacggaggaatgctgcttattggcttgctccctgtgctcttacagcacccaggaccaattaagtaggtatggcaccacctacagtgggctgggccatcccacatcaatcattaattgagcaaataaccccacagtcttgcctacaggccatctgatggaaccagagatggcatcagaatacatggagatttgaaagatgtgtaaagcataagacggtatatgccccttcttgtggctgcatgcctttagtcagagggcagaggcaggcatatctccgagttcaaggccagcatggtctacaaagtgagttccaggacagccagggacacacagagaaaccttgtcttcaaaagcaaaacaaaaaacaaaaaacaaaccaaaacaacaaccaaaaaaatatatatatatttaccaattcccttctttcccagcaacagagaaataactagagtagagaggaaaacaattaaactgtttcctagagagaatgccggggcactcctcctgccattcattctttatactgtcccaggcccatgctggcttatcctaacagccaagaatggggcacttaggtattttagaagaaaataggaacagggaccggcaaagagaaaca

SEQ ID NO: 1935 - DNA, 1400 bp, mus musculus
agtggagaaatctcagaagactataggtacaatgcctgacctgcgcatactcattgtcctaggctgccaggcatgtatgcagggatctgatgttaccactgctagttctgtattcaggatcttgcctcagtatcctttattttcagttttagagcagatcttcacctctcatgtaggatgacaatgtagattaggcacttcggtaaaatttagaattgagattagcttcctagaagctagattggaaaaatgaatccctcttgatagcatgaaatgtttctattgtttctttttttattagatctttttaatttacatttcaaatgttattccctttcctgattttgccttttaaaaccccctatctcctccccccctccccctgctcaccaaccattccactctggcttcctagcctgcacattcccctaaactgggaccaagggcctctcctcccattgatgaccaacaaagccattatctactacatacgcagatggagccatgagtctcaccatgtgtactttggttggtggtttagtctctgggagctctgggggtactggctagttcatatttgctgttcctactatgggactgcaaagaacatcagctctttgggtcctttttctagcttctccattgggacgttgtgcgcagtctaatggttgactgagagcatccacctctttatttgtcaagcataagcagagcctctcaagagacatacacacagagagacagagagagacacacagagagagagagagagacagggagagagagaaggagagaaagggaacataactacaaatatagagcttatgaaattccttggtttagatgatcagttgatgagctgatgacatgggagaacaggtattcatcattgctgccaagcctagaaacctgaatatcttccttggaatgcacatagtagagagaacaatcctcccacaaagtgctctgttcttcatgtttgtgtgtgtatgtgcatccatgaacccatagtatttctttacaaaatgacttttaagaccatagtgaaatctaatgtggaggaatcctgcagatttctattagtaatctctcatggcaccttgcatgttacactacttcaacacaccctgaaacctgccagtgtagatgttcactgagagactgtggtatgcatcaccaccctgaagatcagcaatattttgatgtattgcattctgcaattcctaaggtgagacaaagcctcatctcatagagaggtaggtaggattcgctgtcagggaataaaggctgaattcagtcaatttgatacaaagagaactgtacaaagaatttgtgaaaccaagagcctgtgtgttcattaaaatcaacaaggtagacaaatgcttagccaaactaactga

SEQ ID NO: 1936 - DNA, 1400 bp, mus musculus
gctcttcactttgtaagctgagagctgtgactctccaaagaggggcttcaagctgctgggtccccctgctggtctgtcccctgacgtgggcctagatgggactggggagagctgagaagtatggtccttgctgccagcctcagactgccaacggaaagaggaagaggaggaagcagacgggctggaagccttccacttgtacttgctgggagagaggccaggcttggatggtgtggccagtttctccggcctcacctctgggtcaactttaggctgtggcttctctgtctttccaactgtacccaaagtggccttgttccccctctccagagttgttctgggactgagggctctccgagcgacccgtgggctcttttctgaggcagctacccatttgtagttgtttttccgaaacttgctggttcgacaggacacgagcagtgaggcctccctgacctgcctggctgttgctggtctgactgaagccaccactggccccaaggaagctggctggtctgagtggccagtgtttgctctttggtctccaatgaactgttcagaatagctggtagaatgagggcctaccttcctgcccagagccacagcagtgtgatggggcaggacagatgggaagtgtaccctgagggccacttcattttcactgactgtccgccgatgctcgggagagctgtcactcaccctgcccacagacttcactacccgaggcttgccaggctccttctggcagaccaagagggggtcgtccacactgtaacccaccttggttcttcctggccttgcaggctgcagttgtccaccagggacctcaacctcacttccttggggtctttggccactccaagaggggtcatcacagccttccaaggacccccgctggacccctgaagcattgatggcacctgactttgatggtggcttgatcttaataaccatattctgatctggactgagctggacctgtctctccagtacatactgctggggttcaggatgctggctatcctcagacctgagggatgtctgaaaagcaggatcgctggctgggtcagaagattccacaggctgattcacaagggagtatttcttgcgccacgaagggccatggtgtgaggagaagcccctccgacttggacgggagtagcgggcgccaaaggtcctgccacccgggaacacgggtggctgccaccgagtagctgatgagttgcccagggcagggccattgccgtggagtgttttatagtcatcaattagacctgagaaggcagaatcacacgctcagttaccctgcaggaggcgtatctgccgccgcagctgctccttttcctccatctccggagtccgccggtcctatggtttttatgaacagattctgccagaga

SEQ ID NO: 1937 - DNA, 1200 bp, mus musculus
acctggagggcatcatcctgagtgaggtaacccaatcacaaaagaactcacacaatatgtactcactgataagtggatattagcccaaaacctaggattcccaagatataaggtagaagaaggaaggagaagggagggaggcagggggagaaccaggatagggggacagactgacgcagagacccgagctgcgcgggccatggcagaggccaggcaggccgggatggaagcaaacagggaagcttggagagagacagacagacagacccaggggcgacgaggcacacagggaagccgggacggggcctcgcggtcggaagcggactcgggcttggtccccggggagaaggaacgagggagaaggagggagaaggaaggagaaggaaggagaaggaaggagaagggagaaccgggggctgcgggactcgtggaagccgggatgggtccctcgatggcggacgccgacgccaggcagccccgggtggaagggaggaggaggaggaggagagagagacttagagtcagacagagggacagagagagagacttagacacagagacagagagacagagagaggctctgtccctgcactcctacaggtacaacctggagcagcggacgcggacctgaacccccgtctgcccggggacgccgccgccacggccacaccgctcgtctggaaccacggctggccttcgggtcccagatccgtccccacgaggcagagaaccgggggtgcacttgcgcgtttttcgccaccgggtggccccggagatcggcgctgggccctagacgcactacagctcccatgagcgcctgggcccgacttcctgtccaaaatggaggcacttcctgtatctcacaaagtacaacctcccggggattgaccgatggaaaacgcgaccgcctcgcggggtcggatccaccagcctggccggcttcccctcaccctggccgggatgaagcaggcacatccgaccccttggaggaagttttttccggcgtgctctctgtcgccacctggtggtgacagagaagaatgcggtcatcgtgaccgttcgattttccttttttcaaatgacacttgtttttggtttttgatactttttaaaagaatctacgtgcacattcatttttcttttattatcattgatggctcaccactctttgcatatgtgtgaacccagaatatgtcaacc

SEQ ID NO: 1938 - DNA, 1600 bp, mus musculus
cacgaggcaggggctttgactgtgacaaaatcactcacagtcatccccctgcctcacacagtcactcgcggtcaaccccctgcctcaggaaatcactcagtgtcatccccctgcctcagacagtcactcgcggtcatccccttgcctcataaactcactcagtgtcatccccctgcctcagaaaatcactgcccgcctacttggcaccgccgcccgctgcagccgccctgccctcggccacttcgctgcccgcctcggcctccggctacgaggcgctgtgtgtccttcactctgtcccctgcgcgctgacctaaacccgcacgaggccgcgcctcgcctctacttgctcactcagcgtcatccccctgtctccgtgttcagcttggctgaaatgacttaaatgccttcctcatccgggacagttttgttgttgttgttgttgttgttgttgttgttgttttgttttcaagagagctgtgtttctctaggcacagaactcaggcgtggtgcttctaaatgccaccaaacaggcagtttagaccatttaaacaaaatgtgtgtctgtgattccgtttctctccagtctctgtcccctcctcgtagctttcccctttcagactccgaccccttggaggacttccggatcggaggtttttcccggcgtgctctctgccgccacccggtggtgaccgaggagaatgcggccgtcgtgaggattccattgtcttctttcaaatgacgtcaccaccgggaggctcgatggcggccgcgctgcagacgggaggggccgggggtccagacggtccgtgtggattcacgtgtcccgtctgtctcgctttccccagggcgggacccctcccccacccccaaatcactcgccgtgaggaccaaaggccacagggatcatccccctgcctcacacattcattcgtggtcatccccctgcctcagaaactcactcacagtcatccccctgcctcacacagcatcatgcccctgcctcacacactcactaagcgtcatgcccctgcctcagaaacacactcacagtcatccccctgcctcaaaaacacactcacagtcatccccctgcctctgactcccgagtgctgggattaaagaccaccaccatgccctgccctgcctcagaaacttacagtcaaccccctgcctcacacagcatcatgcccctgcctcacacactcactcagcgccatccccctgcctcagaaacacactcacagtcatccccctgcctcagaaactttttttggttttttgagacagggtttcgctgtgtagccctggctgtcctggagctcactctgtagaccaggctggccttgaactcagaaatccccctgcctctgactcccaagtgcagggattaatgatgtccaggcaccaccatgccctgccctgcctcagaaacttacagtcaaccccctgcctcactcagcgtcatccccctgcctcagaaacacacccacagtcatccccctgcctcagacagtcacttagcgtcattcccctgcctcacagttactcgtggtcctacccgtgcctcacccacagcagtcactcatagtcatccccctgc

SEQ ID NO: 1939 - DNA, 1000 bp, mus musculus
caggtccttaggttcactgagccctttccctcatgtaatgccagtagaggtcactccagggctctttgtcagagctcatgccctcccacaagccttgagaggtacagtccaccagacactgagtcagagggtatagttctagcaatctagcatacagatgtcaaaaaacaaaacaaaacaaaacaaaacaaaacaaaacaaaacaaaaaacaaaatactaaaaacaaaacaaaacaacaacaacaaaaaaaaccaaaaatcaaaacaaaacaaaaccaaaaacaaaaccaaaaccaaaaccaaaaacaaaaacaaaaaataaaaccaaaacaaacaaaaacaaaactacaataatttcgtccaccggtgccctacagtcggagacatgggagtctaccctgttggctcctgacccagatctcagtgctccagaactcaggtatttgggcgatcactaggcactcacctggggcagggctccaccagcagcctccacaatcaccatcaggctccagtggccagccgggccctgggatgtggccatccctcctcgaagcttggattagatcacacgggctgtcgaaaacctcagctctgtctccgtgacagaggaaaaacgcctcaactctaccattttcctgccatgaccaatactgataaaaccagttttctgtgaaccagactgacagatccagaaagtttcaaagaacctcctgcatgcaaatccaaaagtcccgcccagcttccttttgttgtcactaacgcgcctattttcattggctattctcggtgcaatgtcttctggacaatgtagttcagacgtgatcaatcgccaggaagtggacacacctccccagatggagccttacactcaatctgttagggagagtgttgtgattatagatgtgtcaatacttccttgagctacaaaagccggacttgctgaaacactcctgaattacagaactgctggcagaggcaagttgatgtttgggattag

SEQ ID NO: 1940 - DNA, 1400 bp, mus musculus
ctccatcaaagatctgaacaccaccatcacccaccctacaactcccccacccctgctacagcttgcattccaactcaaacatgagtgcacaggatttacccaaggattcacaggtctctgcctacacccaaattacccccaccccaagctaggaaaatgactagatcgaatctctcacctgttcaaaccttcttggccaccagagtctctctaaacaaaagtcaggtccttaggttcactgagccctttccctcatgtaatgccagtagaggtcactccagggctctttgtcagagctcatgccctcccacaagccttgagaggtacagtccaccagacactgagtcaagggtatggttctagcaatctagcatacagatgtcaaaaaacaaaaaacaaacaaaaaaaaaaaaacccaaaacaaacaaacaaacaaacaaagaaacaaaaccaaaaccaaaaccaaaaacaaaaaataaaaccaaaaccaaaccaaaacaaacaaaaacaaaactacaataatttcgtccactggtgccctacagtcggggacatgggagtctaccctgttggctcctgacccagatctcagtgctccagaactcaggtaggtgggcgatcactagacactcacctggggcagggctccacctgcagtctccacaatcaccatcagcctccagtggccagctgggccctgggatgtggccatccctcctcgaagcttggattagatcacacgggctgtcgaaaacctcagctctgtctccgtgacggaggaaaaacacctcaactctaccgttttcctgccatgaccaatactgataaaaccagttttctgtgaaccagactgacagatccagaaaagtttcaaagaacctcctgcatgcaaagccaaaagtcccggcccagcttccttttgttgtcactaacgcgcctattttcattggctattctcggtgcaatgtcttctggacaatgtagttcagatgtgatcaagcgccaggaagtggacacacctccccagatggagccttacactcaatctgttagggagagtgttgtgattatagatgtgtcaatatttccttgagctacaaaagctgaagtgctgaaacactcctaaattacagaactgctggcagaggcaagttgatgtttgggattagaaactagcctgtcacagtgagttccagaccagacagaaaacctctgggaaccttacagagtgaacatttccctaagctgggccatgtgaggagaggagatctgaaaagagaaagaggggcctccaaccaagaaggaccccctgagccaagagactagcacagctaaaagtggctgagttatatagtggtcagaggagctggaaggaggaaagcccaggggatcacctggac

SEQ ID NO: 1941 - DNA, 1000 bp, mus musculus
tagctcaaggaaatattgacacatctataatcacaacactctccctaagagattgagtgtaaggctccatctggggaggtgtgtccacttcctggtgcttgatcacatctgaactacattgtccagaagacattgcaccgagaatagccaatgaaaataggcgcattagtgacaacaaaaggaagctgggccgggacttttggctttgcatgcaggaggttctttgaaacttttctggatctgtcagtctggttcacagaaaactggttttatcagtattggtcatggcaggaaaacggtagagttgaggtgtttttcctccgtcacggagacagagctgaggttttcgacagcccgtgtgatctaatccaagcttcgaggagggatggccacatcccagggcccagctggccactggaggctgatggtgattgtggagactgcaggtggagccctgccccaggtgagtgtctagtgatcgcccacctacctgagttctggagcactgagatctgggtcaggagccaacagggtagactcccatgtccccgactgtagggcaccagtggacgaaattattgtagttttgtttttgtttgttttgttttgttttggttttggttttattttttgtttttggttttggttttggttttggttttgtttctttgtttgtttgtttgtttgttttgggttttttttgttttttgttttttgttttttgacatctgtatgctagattgctagaaccatacccttgactcagtgtctggtggactgtacctctcaaggcttgtgggagggcatgagctctgacaaagagccctggagtgacctctactggcattacatgagggaaagggctcagtgaacctaaggacctgacttttgtttagagagactctggtggccaagaaggtttgaacaggtgagagattcgatctagtcattttcctagcttggggtgggggtaatttgggtgtaggcagagacctgtgaa

SEQ ID NO: 1942 - DNA, 1200 bp, mus musculus
gattatcagcctgttgcagattcatctcgtggagggcatgggctatggcatgcacagcattgtatatgttatgactactctcactaaaggtcatgtcaaacttctgttccattagccaatcaaatgaggcatcagatgaattgttcttcagtattttacagttagatgctgagtcttcatagttaaaatatttccactcttgcattagtagatataaatctgtgtttctgacatggaaccatgtctgtacaaaatttttaaagccagaaatctcaccatggtggggtagaaaagtaagtgatccatagaatgtgccatgatttatgtctgtattactggtagggaaattccattctattgtggtgatccatattctctgtaaagtgggagggtccaacattctgaagatcaagtcaatgaaattgtatgtttctccataaatgataataatatttgttaatgacatcacaatttggctgtagtacatttcagttgtatgtggaagtgaaacgtcatcaacagagatcattttcacaaacgcaaagcaaatttccttgttttcactctgtttcttcaactctaaaagaaattggtttccttgatcgtcatctggaatgacaaggccaatccagttccatttgaagtaaagtatgaaggagaccattgccaatgctagagatgggccttttggggccatctgatagagatagggatattgttcatcatcactgaacacagattggaaaggtccataggtaagcataaggagctacaacacaaggagcagcatgaggtgaggtgcatgtgaaaacacttgtaatcatatttacctgcaaacagttgattacctgttactttttctcatatctctgattcaaattagcaaatgtggaagcctggcacatccacttctaatggaaacagcaagcatagctgtttgacaaagatgtaacaaatgtgttcacatgttataatgactgcctttctgtctttcagttttagtcttgatatctgtgtttcatatgtttgaagggaattttatacttttacaatttggagatatttgattaatattttttaaaaaagacttttatgccataatccataaatacttctaagattgaagaggaaagtcctgtacataatactgatatagcatttggaagagatattcttatattgccctacttgacagtaata

SEQ ID NO: 1943 - DNA, 1200 bp, mus musculus
aaatgataaaacaggctgagaaaaaaattagggaaacaactcacttcacaatagccacaaataacataaaatatcttggataactctaaccaaacaagtgaaagatctgtacaacaataacttcaagactctaaagaaagaaatcaaagaactcagaaagtggatgaattggaagaattaacatagtaaaaatggctaccctaccaacagaaatcttttatcccgacccgtgggacctagttatttggggggtcgaggggaaccaagcctgaaagagaaacgggcgagaaaagggagcaagaccaagcaaattgttgtcaaggtctactttactggaggctggaagcctgattataagcacacagtgagaggaaatagggaggggctgaggggaaatgatcaaagcacagagagggacagacatttggggcagatgctgagtgcaggcttgaaacattttgtggcttatctttgaatgctggttccatccaaacagccccaggtgtctggccaagacaagggtcagttgattctcatgatcagtcttgtgtgaaggagggggtggctcggctcccaacaaagggtcaattgattcttagtgtgggagctgttgaaggtctggtttccctcagtctggtctcccaaaatctttagattcaatacaatctctatcaaaatccctgcacaattcttcaatgacatggacagagcaattctcaaattcatctggaaagacaaaaataaaacaaaacaaaacaaacaaacaaaaaacccagaatagtgaaaacaatacataacaataaaacaatggctgggggatatatcattcatgacctcatgctttactacagaaaattgtgataaaaactgtgcagtattgatacaaagacagacaggttgatcaatgggatagaattgaagacccagaaataaaacaacacatttaagggtacttcatctttgacaaagaagccaaagatatacagtggaaaaaagaaagcatcttcaaaaaatggtgctggtctaactggctgttgatatatagaaaaatgaaaatagacccatattttgtcaccttgcacaaagatcaagtccaaatgaatcaaggatctcaacataaaacctgatacactcaatctaataaaagagaaagtgggaaagagccttaaattcattgacacaggaggaactccaatggct

SEQ ID NO: 1944 - DNA, 1000 bp, mus musculus
tttccttgagcggagccaagtacacacgcccaaatttccccctgcccagaggatgcccaatttcaaagtcattgctggtgaaatgcttcctgaatagatggaagagatggcctcgtctcagagactaggaagagttaggggtccacaacagctccccttcctcattcactgagctcacaacctcagctgtggtcttccatagggaaaatagcattttagatccatgagccaatgctcctcttgccctgcttactagtcacctgagtcccattttctttcttctggaaactttggcaaagcactcacctggttgaggtgctgggctccatctggccagtagctaaggaaagagagaggaaaaacgggtctggtgatgctcaatagcaaccctagtctgtgggaggtagacaaggaggccggagttcaaagtcaccctccactccatagcaactttgaggcccacttagtacacaagagaatcaccctatcagagactgggggagggtggcagagtaagggtatataacagaggggaaagggcatcaagaaagttgtgggggggcatggaagggaaaggaaaaagggagacggagaaaaagaaggactgcaggagaaggagaggtggagagtaagcccaggaaaggaggggagagagttaaatagagggaggagagggggaaaggagagggagagagcaagagggagtgagggaaagggagggtgaggcagagagagaaggttgaagccttcactgccaatgcacacacacacataccgcacccctggctgcggatcccagtgacctgtaactgtccccatcctgctgccttgtcctcctgctttcagggatctttcatatatgtgccaccactttggagtcagtccaggttctcctacctcttacttgagtgtgaagcccagcccgaaagaggtgactcttccctgaactctaaaggggtgagtgcaagttgaagtcctgctagttgcttagatcctggaa

SEQ ID NO: 1945 - DNA, 1200 bp, mus musculus
gtggggcagtctctggttggtcattccttcagtctctactccacactttgtaattcctcccatgggtagtttgctcccccttctaagaaggatggaaatatccacactttggtcttccttctttgttgcgtttcatgtggtttgtgaattgtaccttgggtattctgagcttctgggctaatatccacatatcagagagtatataccatgtgtgtttttttctgattgggttacctcacacaggatactttctatttttatccatttgcctaaaattctcacaaattcatcattttaatagctgagtagtagtgtgtatatgtaccacactttctgtatccatgcttccattgagggacatctgggttctttccagcttctggctattataaataaggctgctatgaacatagtgtagcatgtgtccttattatatgttggagcatcttctgggtatatgcccaggagtggtgttgttattacttgaaattgttttaatttgagacaatctcgttaaattggccgggttggccttgaacggaacttctcctgcttgagcctcctgaatacttaagattgtaggcatgggtgactaggcctggcttcagatccatcaaataacaatgcacacagcgcaggagggttcgggcctgggtaagactgacattatttctgtatggaatgtagattggagtgttgcatgtctggaacgttggcccaaaaccagggcaaatgtaaagctggtaaactgagtgctctagagaggacccccagttttacacatacatcatctctccttatataccaacttcctttcatttaggggttattttatgtgtgtgtacgcatgggtgtgcctctatccatgtgcagaagcacggggactgagtttgatccccagcaccctggtacaagctgggcttactttagtgcttctgtgatcttggcactggggagctggacataggagggtcactgtgttttatttaccagccagtcaagccaacttggtgatttcatgttcagttcagagatttatcctctagaatatgagatgcagagcactagagggagccacctgatatgggattctggcctccacctctatcactcatgtaagacaaacttttcaattcaatctacacactaactcactcaagcaagaaaattgatgctaaagtaatcagttttaattaacat

SEQ ID NO: 1946 - DNA, 1600 bp, mus musculus
tctatcacttgtattctgttgatgatgcttgcatctatgagtcctgatctctatccctagttttctatctccagggtagtctcactttatgacctctttattgtttccctctccatttttcaatcctggatgtgtagtatgcgagcctgaggcctacatgaactgggtatttctggaaggcaggctggggcagaaagagacttagactttgagaaaagattaatgaagccaagacaaatttttctgatcaatgcccgcgagtttactaagagagtgtacttataagggggaaggacccccaccccctcacccccaccccctgccagtccattcttggtgcctggagccattctgtcagcacttgttcatcaggctgttgcttattcaggaatgtctcaggaagacaggttcagcctctctacaggtagcagaagagcagggcagttgtcacttcaaaagaagtcagtcaagtctgaaagctgcaccacaggtggccccacctcggtggcgacaaggtctgtgacagcctgcttcaggctggaggaggctacatggatggttttgttaaattgcttcacctatttgattctgttttcctataattctttaagggatttttgtgtttcctctttaagagcttccagctgtttacctgccttcttctctatttctttaagtgagttatttatgccattaaagtcctctaaagtcatcatgagatgtgattttaaatctgaatcttgcttttccattgtgttggggcatctaggacttacaatggtgggataactgaattctgataatgccaagtagccttgatttctgttgtttaggttcatgcgataatctctttccatctggttatctctggtgttagttggtcttgctatttctgaatggagccatttcttcctgtgagcctgtgatcttaggtgtgtcatcactcctgggagaaaagctctctccagatgggacttgggtatggagagctgtgccacagggtaaactccagtgcacagagcaagactggaaggatcctttccccagtttctccacagttcctgtatcctttggtttcctgacaggtcccactttggccagttattagagaaaaagtgttggtcttgtctgtgaaattaggaatgacagcactcctgggaaacctgctttctctgggcaggatttggtacagagagctgtgccacggggttatcttcagggcacagtagactggaagccttgtgttcttgaatgagttgtgaggattactaaatttactctcaaaatgctttatagacataatcttacattggtaaaaatctctaaattttggcacgaaattgaattatacttccttatattggtgcaaaatttatatactggtacaagtttaaagcttacattggaataaaactgtatattgatacaaaatttaaaattaatggcgttactattagataagcactgtgcctatacaactcattctttaagtaactcaaattctggtcctgtacattagaagattttcactgtactagggactggtgtcaaagcagaggttcatagtgtgtaaatagaattcaggccagcacaggggaaa

SEQ ID NO: 1947 - DNA, 1200 bp, mus musculus
ggccttcaataacaagaacaacaaaataaaaaccaaaagccaatatacacatggaagttgaacaatgccctattcaatgataacttagtcaaggaagaaatacagaaaaaaatttaaaaactttttagaatttaatgaaaatgaaagcacaacatgccccaaattatgggacacaatgaatgcaatgctaagaagaaaaactcatagcactgagtgcctccaaaaagaaaccagaaagagcataaactagttgcttaatagcacacctgaaagctccagaacaaaaagaaacaaatgcactcagtaggagtagatggcaggaaataatcaaactcagggctgaaatcaaccaagtaggaagaaaaaaattacacaaagaattagcaaaaccaggagttggttccttgagaaaatcaacatgatagataaatcattaaccagatggcacagagacactatccaaattaacaaaatcagaaatgaaatgggagatataacaacagaaattgaggaaattaaaaaatcatcggatcctactacaaaagcctatgttcaacaaaactggaaaatctcaaagaaatggacaattttctagacagatacctggtaccaaggttaaatcaggatcacataaaccatctaaaccatcccataactcctaaagcagtagaagcagtcattaaaagtccccccccccgccatccctcccccagaaaaaagcccaggaccagatggcttgttcccaatgaaagagctagagaaaagacccaaggagttgaaggggtttacagccccataggaggaacaacaatgtgaaccaaacagcattcccagaactccaaaggactaaaccaccaaccaaagagtacacatggtgggactcatgatgccagctccatatgcagccgaggatggcctagttggtcatcaatgggaggagaggtccttggtcttgtgaaggctctatgccccagtgtaggggatagtcaggagcaggaagcaggagtgggtgggttggtgagcagggggagagggttggcaataaaaggatttggcttttggtgggaaaccaggaaatcggataacatttgaaatgtaaataaagaaaatatgtaatatattaaagaagaaaacaataaaaaagaagacctaataccaatactcttcaaaatattagaaacagaaggaacactaccttat

SEQ ID NO: 1948 - DNA, 1000 bp, mus musculus
ctgaggagaagggcaaaactgtaggggcgccagctcagttaatctggacccctgagatctgtccaacactggaccacccaccaggttgcatacatcagatgatatgattcccgcaacccacatacagtagaggaattccaggtttgtattcattcagagatgatgcacctaactctagagactggcggccccagggagtttagtggtcaggtggggtggaaggtgggggcatccatgtggagtcaggatggggaggagatttgggatttggagcagtccaagtgtggcctgggagaggctgataaatatggagtgtgaaaacataattaattaattaaaaggaaaaaaaagaaacaaattaagcctgatagatataaaactgaatctcattgtaattttgatttgtatttcccgtccagggccaataccaatgggaatcttttttcttgtctgttgttcttgaggcagaggtgagggaagagcatcaacagagagtaatacttggttttatgagatacaggcataagagtttgtcttacttgaaatttagggttgctgtataataataatgtttacttattgtactggctggttttatgagtcaacttcacacagactggggttatcacagagaaaggagatttagttagggaagtgcctccatgagatccagctgtggggtattttctcagttagtgatcaagggggaaaggccccttttgggtgggaccatacctaggctggcagtcttgggttctataagagcacaggctgggcaaagccagaaaagaacatccatccatggcctctgcatcagctcctacttcctgaactgcttgagttccagtcctgacatccttagtgatgaacagcagtatggaactgtaagctgaataaaccctttcctccccaaattgcttcttggtcatgatgtttgtgcaagaatagaaaccctgactaagacacctatctaagttaccttgctactgtagttgacatg

SEQ ID NO: 1949 - DNA, 1000 bp, mus musculus
gctcaagctctgtactggggtcggagtaaagaagggatgcacatagtgaaagaaaacatctccaaatgaaagtgaaaagaaggaatgtgatcttccctctggtcagcaccagctccaggtcaccttgggctcgaacttggcagacagtcccaaggtccccagaggactcgccactcaatcttaggatcactggtgagtacaacacaacatctgttccaaaccaatcgtgatgagcctgtgacagcaggatcaaggacacaggtcctgaccagcagttagggttccttgtcattggtgctggtatacctgggtttcaaacatgccagacagcctcacggtcctcagagaagacaccacttccaggtgttgtaacacacccaggatcttaggattctatgatcccaggataacaggagcttggtcacacaaggatctcagggtctcagaggaagcataactgccaagaactctgacacaaccagaatctcaggttcagaggagcatagaatcacaggatcacagagaaagctggactctgaggagtcctgaatcaaccaggattataggaaggacaggctccagtcagatatattgaaggcagcaagcacttgaaataatcagatggcaggaggcaagcataagaacaaaagcaccagaaatcaaggttacttggcatcatcagaaccaaactctcccaccatagcaagtcctgaatacaccatcacaccagaaaagcaagatatgaatctaaaggcacttctcattatgatgatggaggactttaagaaggaaataaataacatccctaaagaaatgcaggagccgggcgtggtggcacgcgcctttaatcccagcactcaggaggcagagtcagtcggatttctgagtttgaggccaacctggtctacaaagtgagctccaggacagccagggctatacagagaaaccctgtctcgaaaagacaaaaaacaaaacaaaaacaaacaaacaaacaaaaaat

SEQ ID NO: 1950 - DNA, 1400 bp, mus musculus
cagtgagcgggggagcccctccccatacagaatttcatatggagtgagcttaaattttcccagtgtgttcttaatgcagaacaagacaaaaggaaggagggctgtccagtaattttagctggtctctcaggtcaaattagacaaggtttcttttagagttctattcatcctttctacctgtcctgaactctggggtctataagcacaatgtaatttccaatcaatccccagttggatggccagtccctgatttacctgggcaacaaaggcgagtccattgtcagatcctattaccttaggtattccaaacagtggaaaagtttcttctaggatttccttaacctcaacattggcagtttctttttttgttggataggcctccacccatcctgaaaaaggtatctataaaactaaaagatagatccggccactttcttgaccagaggaaaggggtccacccggtgcgggagcgctttgcctgagcatcagcagcagacatcttggttccaggacccatccaagagtattctgtacaggtgagagtatggaatacagaagctaaaagcttctgggacaggcgggagccacagagcttctaaggaagcccccttttcgaactccagacagctgaccagttacccgggcagaggttagggcccccccccctccctggcgtgggagcgatttgcctgatcatcagcagcagacatcttggttccgggacccagccaagagtattctacataggccccagacatccggccactttcccagccagaggaaagggatctgccaggtgtgggagcgctttgcctgagcatcagcagcagacatcttggttctgggaccccgcctagtgtattctgcacaggtgagagtaagaaatacagaagctaaaagcttcaggaaaggccaaagcaactcagcttccagacaggtcctgttttgggccttcgtcttcagacaggagggaggtcctgaggccagatatctgtgcacatttcctgtaagaggagagcatgcctacagagagtgctctgaccactgaatctcagaggagagagctagtctcccaggtctgctgatagaggctaacagaatcacctgaggaacaagctctaaccagagacaactataccaactagctccagagattaccagatggcaaaaggcaaatgtaagaatcctactaacagaaatcaagaccactcaccatcatcagaacgcagcactcccaccccacctagtcctgggcaccccaacacaaccaaaaagctaaacccggatataaaagcatatctcatgatgatggtagaggacatcaagaaggactttaataactcacttaaaaaatacaggagaacactgctcaagagttaaaagtccttaaagaaaaacag

SEQ ID NO: 1951 - DNA, 1800 bp, mus musculus
gtagtgcgattgtttgaaattcagtttaggtcttaattttttattgttagagtatatgttcattaaataaaaggagaaaatagtacttttaaaattcttttaattcattattttattcatttttccagtccttactcccttagtacccctgacccacagttccacatccaacacatgctgtcagatattttcctctaacatttatgcatgcaaaagcaagaatgcatgtatgcaactgtctttggagttggagtaaaaaaagagtgtaggctctcctgtagtgaaactatagacagtggtgttctcacaggtgtgagcttggaagtcaactctgatcctctgcaagatataaatcatgtggagtaatcactctgagagcacataattcagagtccattggtagaaaatgatactttgtttagtatatatttggggtggctgtggattcatgcaacatagggacccactatcaagtcaactccagttatatgagttcctatgccctctccgtgcttcagaggtcaatacacgcaacaggaaccctcaaatacaggcacatcatgcaatcatatgatagaaaaacaataaatctgataaatactgtgagtaacctccccacagaactatatctcatttcttatgtacaaaataattttgtttattttcagcactaatagctaatatatgtgaatagaggtcagaagaaatttggcagggattattattctctttcatccttgttagtctcaaggctggaacacaaggtcaggcattgtaggaacatgcttgtccacaagagccgagccacctacagggcccttctgcactgctgctctttactttgatactgggtctcactgacctgccaagcctgccttgagttgccttctggcttcctcaacctggagtggctggtctcccagatctgaaacaatacctgacttttctgagtttgaggaataaccccattattcctttttaaaagtttttcttcatttttctttctttatatatttatttatttacactttcgattttatttccctcccaaccccaatcgaccctctgactgtttcacatcccatagctcctccccatcccctgagtctccacaatgatgtccacaccaatcatcctggatccatccagaactctaaactccctgggacctccagtctcttgaggattatgttcatcttctctgactgtacccagaatcaggagtcctctgctacatatgtgttgagggcttcatatgagttggtgtacactgcctgatttgtggtccagtacttgagagatcttggaggtccaggttaattgagattgctggtcctcctacaggttctcctttctcagcttcttccagcttttccctaattcaaccacaggggtcagcagcttctattcattggttgggtgcaaatatctgtatctgactctttcagttgcttgttgggtcttttgtaaggcagtcatgacaggtccttttgtgtgagtgctccatagactcattaatagtgtcaggccttggggcctccccttgagctgtagcctactttgggcctgttgctgaaccttcttttcctcagtctcctcttcatttccatctgtgaaattatgcttagggggagatcagcctgtctcccactctctcttaatgcagcatagtttgcagtgctccaggagttctgctacacccaaggcacataggaggcagggtacagacagagacatctcgaccagccaaacttattgggcacaatgaaagcagtgccaagggaaaaatctgtagcacaa

SEQ ID NO: 1952 - DNA, 1000 bp, mus musculus
aaaaatgttcaacatccttaatcatcagggaaatgcaaatcaaaacaaccctgagattccacctcacaccagtgagaatggctaagatcaaaaattcaggtgacagcagatgctggcgaggatgtggagaaagaggaacactcctccattgttggtgggattgcaggcttgtacaaccactctggaaatcagtctggcggttcctcagaaaattggacatagtactaccggaggatccagcaatacctctcctgggcatatatccagaagatgccccaactggtaagaaggacacatgctccactatgttcatagcagccttatttataatagccagaaactggaaagaacccagatgcccctcaacagaggaatggatacagaaaatgtggtacatctacacaatggagtactactcagctattaaaaagaatgaatttatgaaattcctagccaaatggatggacctggagagcatcatcctgagtgaggtaacacaatcacaaaggaactcacacaatatgtactcactgataagtggatactagcccaaaacctaggatacccacgatataagatacaatttcctaaacacatgaaactcaagaaaaatgaagactgaagtgtggacactatgcccctccttagaagtgggaacaaaacacccatggaaggagttacagaaacaaagtttggagctgagatgaaaggatggaccatgtagagactgccatatccagggatccaccccataatcagcatccaaacgctgacaccattgcatatactagcaagattttatcgaaaggacccagatgtagctgtctcttgtgagactatcccggggcctagcaaacacagaagtggatgctcacagtcagctaatggatggatcacagggctcccaatggaggagctagagaaagtatccaaggagctaaagggatcttcaaccctataggtggaaaaacattatgaactaaccagtacccctgagctc

SEQ ID NO: 1953 - DNA, 1000 bp, mus musculus
catatggttattcctagtgtttgctggcctggttgcctctgtctggatgtagaatgcctcttttgtccctagcctgcttcaggtcacctggtaggccagtggccttgactgcagcacatgtcctgtggtgccttctgactgttgagtcttcacagggacatgcacactggtgacttgttgccctggctacagtggccttttggatgcctttgaactgtgggattttcaaagggacagagaagcttctgatatgttgccctggctgcaggagatatattgggatgccttcagactattcagtcttcagaggattagtcaaggtgttgtcctaactgtagatgttctttgtccatggaggcctaaggagtgtgagttctttttccctatgtgcagcagaactttagggaggctttcagacagttggtacagttactgaagatctgctgggaattcttcagactttggtgtcagttgtccagtttccttgtttgtagaagaaatcctaggatgtgattagtcattggtgtcagtgactgtgttttgagcacattgcctgggagtacttcaggctgtgttttttcaggggggggggggttgccaatgagctggttatcagttgtttggtgtgcagttgaacttctgagatgtctttagcctgtggtgtctttagtagagcagagaagttggtgggagttccctgcatgcaaaggaactcttgggatgccttcaggatgtgttttttcatagaaggggcagactaggtgttggtctgccttagcagaatttgcctgcctgaaagacaggagctaggacatttaaacatagggggagaacaaccaattgtcagcccatctggactaacagtctcttactaacactgctgtttaatgcatatttattgcaatactgaaaatacttgtaagattgggaaacagaggcagttgttcagaaagaatgaaggtcctgattgattcctgctccaaaaggtccacaacacatg

SEQ ID NO: 1954 - DNA, 1400 bp, mus musculus
cctattgtctcttttccaactatatgtctttaccttgtacaacaaacacgtccatcaaaaaatgaagataaaatatttcttcttcataaaaaagataatatattattattattatgattttggcagaagagattgctgttgtcgaattgacaacaaatttaatccctagcacttctctgacactatgatcctatctctttgctgatagtattgttttgagtaccagcatccttccataagttcccaagacccttttataacacttcatggtcctttgggatattagctcatagttgatggatgaactggctttcccatcacagatcatgctttgagcattgttctcaaataacacagagatttttgtttggtgaccttgtattctagatcctgagggaatttattacctttaggatgtttgtttctcagtgataggagctggacaaggctaggagagtcctcttgcaacactaactggatttccattttgactttctgcctcagcctcacagccatgcagatccatcttacctcccatattctttcttttatcctttaaactttggggaggggaagttaagaaaagctttctccttgtagccctggctgtcttggaacttgctctgagacctgcctggtcatgaactcagagatctccctgactctgctgcctaaatgctcatattaaaagcattcacgagcgggggatgttcagaagccctccgtgtaccagtcctgccaggggagatgtctccagggagtgctctgtctctgagactcagggaagatctccattttctctctagtgactgtcaaaggtggaaccaggcaggagtacacaggatgcagaagaggcagagcagccaggactgggtacttcctgcctccatctgcatccaggaggtagggctgtttctcatacctctgatcttgccaggagagagctggtcttccaggagtgttgacacaggtttacacatccaaaggaggaacaaactccagccagagacagcaaaatatctaacaccagagattaccagatggtgaaagtcaaaatcaagaatcttaccaacagaaccaagattacttggcatcatcagaacccagtactcccaccacagtaagtcctagatactccaacacactggaaaaacaaggcttagatttaaaaatcatatctcatgatgctgatagaagattttaagaaggacataaagaactcccttaaagaaataggagaacacaagtaaacaggtagaaacctgtaaagaggaaagacaaaaatcccttaaagaattacaagagaacgcaggtaaaaatgtagaagcacttgtaaaggaaacacagaaatcccttaaagaattacaggaaaacacagacaaacaggtgaaggaaatgaa

SEQ ID NO: 1955 - DNA, 1000 bp, mus musculus
ttcatactacacttttaaaatttcatatatgtacatattattttaaaatttgtcctcctccttttttctccttcccttctttttcctcctccttattctctttctcctttaagaaatcatgttatataacccaggcaaatttgaattcactagttagagatgaccttaaattccagagcttgttgactttatttctcaatatcagaaatggcaggcatggaccaccaagctgtgttgggttcaattaattagttaattaattatttatttacccccatgaatgcaattagagctgtccaaataatagttaaagtaaagccatcaactggagcatggttaacctaccatgtaccataaacttaaataaaactgactcaaccctgagcagcatgctctcctatgggtaccaccattctcttgctgcctttaaacccacctccatcagacctgatactcctgaaccatataggttagcttcccttctcccactcaccttcccagcttgctgagccctctgggacaagtcgaactgagacctgagcaacctgctatcccagggggacctccattctctcaccaccactccttcacctccatcatactcctgaaccattacaggaaaggttcccttgtcccacccatcttccctgctctctgagccctctggtccaagctaagctgctctgagcagcctgcaagcccaggtagacatctattctcttgccaactctctgtccacctttatttgatctgagtttcaagaaccatacaaaactgcagatccagaaccatacagcccaaggatatccagcagttgcctgtcacaccaggaccatcagagttcaccccttccaatacttactacaagaacatccaggtactaaaaacacccagatgactaaagaccctcaaaagaatacaatcaacaaaagtgaaggcaatatgatacctccaaagcacagctatcccactacaaccagccatgggtatcccaatacaa

SEQ ID NO: 1956 - DNA, 1000 bp, mus musculus
cattgtagatgtctgtgagccaccatatggtggctgggaattcaactcaggacctttggaagagcagtcagtgctcttaaccactgagccatctctccagcctgacgacccctttgtttctttagtctgtggctggctgggctctgctgggaacctcctctgtgggggtgcaggagctgagtgacaggtggcaggtgccaccatggagcattggtaccactagttcccatggcttctccctgtagtcttctccaccaggctcccagcctgctcatcacggtcccgttcagcaggaagtgggtgctatgggccattaagggcagggcctggatgtgcacagtgttatccctatggccctgtcagtcggatcagccctgagtgccggccacagacagtgcaggaaacataaactgccatacttgaccacagtgcaggcacccttggatttgaatcctggtatcaccactgattggctgtgtgatattcagagcgggttgccctctctgagcatttattctgtatttcaaaatcaggcaaacatctggcctttgttgtgcatgtctgtaatgccagccctgggagtctgaggataggaggaagtatgttcaaggttcatcttggttactagccagtttgaggtcagcctgggctacatgagattctgtcaaaacaacaaaaggaggtagtcataaaacttaaccccaagattcctgtatgatagtggaaggctctgacctagagcctgtggactggttgttttcagtggctgggagggcatggagtctgttgtcatgtgagaatagggcttggtacactgataaggactgtctgcccttgtgtctctgctttgtgatttcctctgggtgtgtcctgggcacaccattacctttctgcagagtagagtacttatgactgatgaccagtgccctctgcatgctctgaggccagtcgatagcatggcccacagccagcctaaggaacctgggcaagttatttaacc

SEQ ID NO: 1957 - DNA, 1200 bp, mus musculus
tttttctctggttaagtcttatgaagagaagtctgaacaagcatagcaagccagtaaggaacaccctccatggctctgcatcagctgctgcttcctgacctgcttgagttccagtcctgacttccttggtgatgaacagcgatgtggaagtgtaagctgaataaaccctttcctccccagcttgcttcttggtcatactgttttgtccaggaatagaaaccctgactaagacagggcgctagatcccctgcagctggagttacgggggttgcgagccatcggttctgggagtcaaacttgggttctctagaagaacagcaagtgctctcagctacctgtccaggccctcgagtggacactggtaacgcacacctccactcccacaggttagagacacaggttcacgaagggacttgcctgaggtattcacagagaacatttgagctcacagagagctgtgaggacggctcagctctaagtgcctgccaggcatgcattaggacaggaatccagacgcctaaatcccaccgaaatgccaggtgagcacggtggactcctcttggtccagccttgaagacagagatgttgtcaccaaagcaagatagccaggaagaccagacacgtgtgtggttgaggggcctagcctcacggataagatgagagagagtaagttctccaacagtaacctcaggcctcttcatgcatccacacagaggatacagagctggagagacggacagagtggcctatggcaattgcttcttttgcaaggtacctaagttcgattcccagcacccacattaggcagctcataaccttccatctttgactccagtcccaggggatccaatgcccttttctgccctcacaacatttattgtgagcaaacacataaataattaacaacatgcaaatagaaaaaaataaaacgtgactgaactgcagacactagcacaacagggcacggcaagtgcctggggtagctgagctattagccagacccttggaaaaggtcttagcctcatgttggaagttcacaaagattattccactataaaagccattctcgccaggcagtggtggcgcatgcctttaatcccagcactcgggcaggtggatttctgagttcgaggccagcctggtctacagagtgagttccaggacagccagggctacacagagaaaccctgtcttgaaaaa

SEQ ID NO: 1958 - DNA, 2200 bp, mus musculus
aatattctttgacagttctttcattctcttctactgtatcttctacacctgagattcgctctcctatctcttgtattctgttggtaatacatctgtaattcctgtcctctttcctaggttttccatttctaggtttgcctccatctgtgtgtcctttatagtttctacttccacttttaggtctttgattgctttattcaattccttcaactgtttgcctctgtgtgtgtgtgtgtgtgtgtgtgtgtgtttctttcagtgaattattgatatcctccttaaaggaccctattatctccatgagataggattttagaacagattcttggttttcaggtgtgttgttgtattcagggcttgctgtgttgggagagctgggttctggtgatgcccacgtgttttggcttctgttgcctatggtcttgtgctttccattcccctggtgtttgttgatctgggtgactgtatggaatctgcctcttttgtccctgggttgcttcaggtttcctggtatgcttgtggccctggctgtatcagaccacctgtggggccttccaggtccagagaagctgctgatctgttgccctggctgcagttgatctcctgggaggccttcagactattggatcttctgtggagcagtcaagctgttgtccaactgtgctgagcatagccggttctcaactgctctgggttcagaaggtcctcaacctctctgtttcagagaatcctctaggatatattgggatatggagtcttcaagggagcagaccaactaggagtctgccccagcagcaagggccaggtagaaggggtgggagggatagaaggagggggagtggtattcaggagggcgggattttgataggtaatgtgtcccaagttcaccaggctcccagcagcagctccaggactcagggtagtgtgggaggggtgttcttaccaactgctcttgagtgcagcgggtcctctaggatggattgggatatggaatctttacctcttcaaaaattcttaaatttatgtaaattctatgaatcccggatcaatagtctcaactccaatttccttaaagcagatactaaacacgaagcaaaagcatatttccttataggtttatacatcctgttctttgtgggtagctgggaacagctcttgtggtttcttagtacagcagacagcagtttttagtaacgattttcatggaaaaacagaaagataacagactcctataattaaaatgattccttacaaagttttaaatttatataagtaaagtggttagctctctttaatatcaagatgtagaactctcggctctcccagtacccaggctgccatgcttcctgccatgatgataatggactgaacctctgaaactgtaagccagccttagttacgtgttttcctttactttaagagttgcctgggtcacatctcttcacagcaatgaaacccaaactaagacccttctgtagctccagttctgggaaacctgatcaccccttctggcctttgtaggaaacgactttcatgtggtaggcacaattattattattattttaaagtagtgtcagattcacaccagaatttgagaaatcggaaacagaatgggctcctcagaaacacgcccatccactggttttcatataatgcaagagatccaagatagttcaggaagagagctggttcaacaaggatccccagtcagccaccatccgtgaggatagctgagtctgtgacaccatgccttctttcttcccttgatgtaaaggataagccttgaaagctgtacagtagccacccctgtaactagtaactacccctgtgttatccatggtttccattacccatagtgccccactccattttcatatgagttacctatgctcaaagttactcatgctcaaagacattacttaacatagtgttgttttaatctttaaaaagattgttttgcttcatctaatgtgtgtgtgtgtttctgagtgtttgtgtgtgcaagtgcctgaggaggctgcaagagagaattggattccctgcaactggagttccaggtgggtgtgagctgcctgacatgggttcaggcaaacaaacctgtgtgttctgcaagagaggtgtgctcttaacctcagagccgtctctccagcccatgttttaactttcattacaatgtattgcaattcatcttctacaccat

SEQ ID NO: 1959 - DNA, 1200 bp, mus musculus
ggagttcaagattattgttgaccacataaggagtttaaggctagcctggactacatgagaccctatctcaagcaacattccaacatagaggagggaggcatgaaatcccaactggcaactgatacctcctgagagagagttgaagttctttaaagatgatcatactccagtggaaggccaaacatccaaaagtagaggagagacagaagaattgtacttaaggctattcaaaacctggatacagtttagtggcaaagtgttaggtggcactattcatatagagacatgaactagttctattcaccccagataggaaccaatgacagaacaaagaatgtgccacctgaggccaacacgggtgagccagtgagttttattgagttactcagaggagcagaactgatgcaaagtctgctccacctcaaagcctactgaagcatgggtgagagcttacatcacaaagctagggacctggatcacatcgccccttctgcaggcagctctacaggttagagtgtcctttccaaacaggcagctggtctctgtttcttctaggcagtcatgctggtgtctacctccaagctgctggcatggtctctgaagcttgggggttgggaggcaggggatgtactctgcatagtctttactgttattcttcagtgggtgcagggaacactattgtatctggtccttctggagctatgttgagtgagatgctttctgtcttaaggagctctgactgggtggaatgtttcagctcccccacaaaacactctcttacactctcttgtgtcacgtccttgtaaaaaatcctgtcctaaaagatcctcttgttttcagatcactttcacatcctgtgttttatggagtttctctccaaggtggcagatttttaatcaactttatttttttttaactgatgaaacgattctggccagctggagcatggtgagcatggctctggcagaggccttgcccttcttcccaattcctttgtccttgctaaacccccttagaattcattcctaaagcgagccattcctcttgaggctgactaccaaggtccagctatcaaagtgtagacttccagcaatcaaaagccccctttggttcacctaattagcatgcccaattaaaattaaacacctcatcctaacttgggatttcccatttacctttataaagctccattttctgatg

SEQ ID NO: 1960 - DNA, 1000 bp, mus musculus
tgtattattattattattttgttctgtttagttttgagtcaaggtttctctgtgtagccctggctgtcctggaacttgctctgtagaccaggcaggcctcaaactcagaacgctgggactaaaggtgtataccatcaaggcaggcatggtggcacatgcctttaatcccagcatttgggaggcagaagcaggtatatctatgtgactttgaagccagcctgcttgccacaaagttccaggtgagacaggcctaagtagagaccctgtcacataaaaataaaaataagtcacagacaggccatggagaacaggcagctatgaggcttatgtgaggtcctgcctttccgactgctccttagactgttctgacccagcagatgtgtagaattgtgggggagagagatgtcttacttagggttttactgctgtgaacagacaccatgaccaaggcaagtcttataaaaaacaacatttaattggggctgacttacaggttcagaggttcagtccattatcattaaggtgggagcatggcagcatccaggcaggcatggtgcaggaggagctgagagttctatgtcttcatccaaaggctgctagtggaagactgacttccaggaactagggtgaggatcttatgcccacacccacagtgatacacctattccaaccaggtcacacctattccaacaaggccacacctctaaatgttgccactccctggtccaagaatatacaaaccatcaccggagagcaagcgggaagaagtctatctagcactatatccatcgcatggccccacccagccatagggatgctgggggaagtagcataggtgtgtgtcgggagccacgggtctcacagtggagcagacagaccattcagaacttagtggtttaggaaaatgcctgctgagagccaggggcagagttgtgcacttgtagccgcaccactgtggaagtgcagcaggagaccagcttgtctccaaaccccgaggcgg

SEQ ID NO: 1961 - DNA, 1200 bp, mus musculus
tctcccttttcattttgattttgtttggttttatactgtctctgtgccctctagaaatgttagctaagaggttttacaatcttgttgattttcacaaagaaccaagtcttagttttgtggcagaactttcccctaatgaataaaattttcagggtaccaataactgggcaaggagtaggtgaaacttctgggtcagggacaagaatagtggaggcaggagagagatacaggctttttggtcagggacagcttggaggacaatatgtaggtaaaaagtagcccctggtttatatggcaaatctgccaggatttgccattggaggatttacatttaatgtggcttacaagattaggatgcttgttgttgtgtcttgagattgagttacccgttgattccgaactacgtttgtgtggtgttttccttcattcagcaactcaactgggttctagagagaaaaggtatgttggcaaggcacactagccagctgcaggaatttggaagtgaaaggctggcgtggcagccacctgaactgccaatgggaacttagtgacccaggtggggagatttcagaggtccaaatcagaaactctccacaggatgagaacatgccagtgccttgcctgtgatagcactggctgcagagtttttgcccaaggcaaaccagcaaagactggaaggaacccaagttactgtttaggtggggttcctgtgttcctggatactgatggtcccagtttctcctggttgtgttggaacagatgttgtgtcctactcaccccgatcctaagatcctcagtgtgctagagtacttgggagtgtagcctcctctgggcactgtctgatttattgattgtgttcttatgctgtcatttaggcatctggttttccctggtgttggttggattatcctgatgatagcaggacttctcagaaaggtgtacggagctgtggagcagacaatggatgtcagggtacctgactctgatgtttgtccctactggcaaggattgttggggccatattcccaggtggtagttcttgtgttctttgtatgcctcacaggggaagcagaatgctcttgtgatccagcatgcccctctggaccaaagggtaagcacacacctgcacaatggcatacagggcaccatgcacaaatcagctctcttctgacttctaggaagacctctgtggttagtctt

SEQ ID NO: 1962 - DNA, 1200 bp, mus musculus
gggatttgacctctatctccactttcagtactgggtggcctgttgcttctaaaataaaagaaaagggggagatgtgaggagccgccctcacagtcgccattacaagatggcgctgacatccgttgctcatagtaaaatgtgcgcaggcatcagggtatcgttccattacctgagccctgcctttctcgtggcattaactgactgatagtgggcagccaatcccagtggtgcacgtctccaaccgttttttcgcagcctataaaagggaagggttttctgctctctgggtctcctctcctgaagctgatcatctatctctcgagatggattaaagctgtactgcagaaggatccgagtggcctgcgtgcattttgctggcgagacggtagcgtgggtcatctgtagtccaaactctcatctgcgcagactagtctcggaggtatccaggaaccaagatggctcccccaggtgctcccgtaaagccttcccgggcagagcagacacctatcctctggcagggaaggtgcccacccagatgtctggagcctgaagcggtcctctagggaccttgggggtgtccgctgactctacgcccaagttgaccaggtactggcaccgaccggaagggacttgtgaccctggtcagtccaggttttctgcttccctaatgctgtctcaggtcctatgtgattggaatggaacagaagttgtgttccattcactggtggtcataagttcacgtggcaagtcctctagggacgttgagggtgtccaccgacttcgtgcccaaggtgacctggtgctggtgctgaccagaagggatttgtgaccctggtcagtccgggttttctgctttcctaatgctttctcaggtcccacgcaattggaatggaacagaagttgtgttccactcactggtggtcctaatatcacttggagagtcctttagggaccttgggggtatccggcgactttgtgcccaaggtgacccggtgctggcaccaaccagaagggatttgtcaagagtagtcatcttatgagagcattaaaacagctctctgtgaccatacagccatacaaatctcagagcagcctcagagaggcttgtgtgactttcttttgtcttgctaatgctgcctaagtaagatcttgaaacttgcctctccttgcctcccaagggaagtttacttcaaatcttcg

SEQ ID NO: 1963 - DNA, 1000 bp, mus musculus
ttggttatagtcttttctacataagatttctctgtgtggccttggctgtcctttgtgttcctctgcagaccaggctggcctcgaactcagagatctgttgcctccgcctcctgagtgctgggattacatgtgtgtgccaccataattggctgaatatttatattttaaatatgtcagacctgaatctactgaatatgaagtatgcctattgtaattagcgagcctgggccgctgccttccccccccctcaatgctgaacgacctttaaatcccaaggagtcctggatcgcctgggactacatttactgaatgagtgacgctcaccctcttctcttttcattgttcgtgtgtgtgtgtgtggtgtgcacttttgcatgtatgagtgggagtcagtgtgctcacagatgtgcaaaagcaaaagatcaataagaaagaaacgattccaaacaatgcaaactaaaatgaaaatgtcacaagaatacaattgagatcattgtgttggctagttactcctggcatggagtctgccctgaggtgtggttgatatacccagcaagacaatagtggagaaatacaatttttccattgtcagtgcatattaacaacagagagttcacttgtcagaggtcagagcccatgtctactcccctcccccccacacacacaccccatcactgttgagaatctgtctggtgtaaacctgtgcatgctctgtgtgctgcatggactctgagagttcatgtgtgcatcatcagtcttgttgtgtctgtagcccttgtcactgagggcagaatgaacacagtgatcaccgctccacagacagacaaagtgaggggagcaaaacctgtcacccagagctcctccttccctcagtcatgagtctgggagacccgaggtctggcctcctagaacaagtgtgagttgagtggcaggcagacttgtggtggaacatgtgtgcaatcccagtgctggggagggcaatccaattggatcagtagtt

SEQ ID NO: 1964 - DNA, 1000 bp, mus musculus
tgatgggacccaaatttgatgcgtggaacccacagggtggaaggaaagaaccaattcccacaggttgccaaatggcctccatacttgtatcagggcatatgcatacacataaataaattaattaatcttatattagagcagtagacgcatgcactgtgagctgtgtgtagacacaccccagctctctccctgtctatccctccatgtaaccctcgtctctcccagcacttgcccctttgcttgaaccttcgctgtgcacgaggactccagccttggtgatccctcagctcttctgtcactcaagtctcacttcttcatttcccctccccctccaccaggtgaatggtctccgcgtggatctcccagctactgtgttaacatctgtgtctgtgaggaggatgcccgacggctccatgcttgtccaccagaaggctggggtcacggtgtggcttggaaaagatgggcttctggatgtgatggttggtgatgaccttgcagccatgctgtgtggggcctgtggaaactttgatggggaccaaaccaacgacgcatatggttctcaggggaagacaccgatagagaagtggagagcacaggacttctccccatggtgaggatggagaatggaggccagactttgggaattagagaaagaggtagtgtgggtggatgcttactgtgcaggatcaagtgctaagtgtctgtctcttgcagttccaactgatcagtcaccactggcactgaaggcatcaagacctgctccctcccagaagttacagtgattggaagatgccctgtgtgtcccttccctgtccctccccctttgctgagccactgaggccaaacctgaaagcattgagtaaataaatacctagacacagagtgtgtgtctcctgctgtctccccaactttctccccgctgtgggggacatggatggttgacaagtccttattagaagacaaaaggtgcatgtgtgggtacatgagtagatgaagggtc

SEQ ID NO: 1965 - DNA, 1000 bp, mus musculus
tctgtcctagacacactggcttcaccagcccactgcacaccttatctaagagtggcatgtgtggggtgggcctatgatgacagtcctcacccctgcatgttccctcctgacctccaggcaacctgatttacctgtattaaagttgactaggtaaaattgcccagagtcaattttcactaacaacagcaggttcctctcatcagtgatgtatgtagcccagtcgatgctgcagtttttacctgttgggggagagaaaaatccacagcagtctagaatccagctatccccataacctttcacaccatttctcaaaggcctaccaccctcctattccagatcccccacacacacaaaaaaaaatgagtacctggtaatttttcacatactgaccagccatctggcaccatctcgaaggacacgaggccatctgtggatcaagtcagatgccactctcaggccttttctagtccaccagcacctgcagggcatgctacccaaccagaactccatcggggtcctccacaccttgaacctcttagtccaggggttctagggttcaggctgactcccggcattctcatctttacacttgacctacacttaacctaatgtctcaaaaacctttttagatatggaggtgtgaccaatacaggccagtcagagtgcatcctgtggctgggtgttagaagtgatgtagtgaggtgtgttggtgcacaatgggtgacctagcatttactggtagattccatacagactgtctaatacttagccacactctggccctgcgtttgtcttttttagttcaagatggcttccagctcttggtccttcagccttagacttccaagggttatgactaccatctgtgcaccaccatgtccagtgaatttatttaatcttaatattaaccccctcccaatactacagtactgtcatctggtcccattttacagatgggaaagtgtgtgagggaactcctattacttggcgagagccacag

SEQ ID NO: 1966 - DNA, 1000 bp, mus musculus
gagggctcagatccattggagctggtgttacagacagttgtgagctgccatgtggctgctgggaaccgaactcggatcctctggaagagcagccactgctcttaaccacagagcaaccacagagctgccttttcacacccctccccctttttcttgagataagtactcagtgtgtaaattcatagcaatcctcctgcctccagtagaactattgacccagggagtaatttcagcttcctccaatctttctacctgcccctgcccttttctcttgcctatcttaggctccattcccgccctgtttggccccagatcccacttcgaataagctgttgcccaaagagacacaggccttggggtgggaggcctctctcctgctctgttctcagaatcccactctgtctgtaggacttcgtccaggagctactggccaagcttcggggcctgcacaaacagccgggcttcccgcagcccagcccctcagatgaccccagcctgagcccccgccaggaccgggcccacactgccccaccctgactgcgcccgcctctgcgctccacccccaaagcccagattgtttctaagttgtatttaatggttctgtaactgcctctggtgtccggattttcctctccccattaccctggccttctgcagccccttgtccttggtcccccaagccacagctggccctgacagacggagaaacattcctcctggccacagagcctgagaacataccctactgaccctgaggcgtcctggagactcacatcctgtccccacctcccccatatggacccagtcccagctcctagggaaggccagggccagatcccctggccttcagggtcacgggggatgtgcacggcccactgtgaccctctgtcatcttcccatagggcatcacacagcgatgaggccattagtccgctctatggagagtgtgcttggtgtaactgtatgagctgaggccacagaacagcggaacatagcatta

SEQ ID NO: 1967 - DNA, 1000 bp, mus musculus
ggcagctaagtagcaggtcattgctattgtcgtcccccaggtcctgctccaggttctctttgcagttcaaatcctccgtgctggtgaaggctgggtccagagtccccaggctgtgggctcgtgatgctgtgagcgtcaccatggctgaggctgctgaggccgctgaggccccagtggtggtgttgcgcctctgggccacggacaccctgttggcagctgcctcgttgaggtcaaacagcatgctctgcacatcaaaatgggcaaagctcttctggcagacccatggtctgctggcttctggggggcttcgactttcctcagtctctcccagaggccgccccacttccccctcgggcttactgctcctcagtttcctgaagatggatgagtctacagtgtccccactgcccaggccccgcacgggtttcttccggctcttctccttctctttgagaggctgtagactctggagactatctttggtgggctggccattgcgggggtctcccttggtgccacagctgccccctgagagggcgccaggatccacctgcaggagctccctgaggttctgggagccccgagcctctggctgctcgctgcggaactcattgaggatgtcaaagaaactctgctctggtacaccctgcacgtcgatggaggacgtgctgccatactctcggaagaggggcagcacccctgggtgccgggtcccccgtgggtctcctggttcctctacatcacactcactgagggtgatctcgctgctgctccgatgtcgtagagggagaaaggcccggccaggggaccggggccacccatcctggaattctacatctttggaccttctcctggacagtcgatggaaggctctggatcctgaggaagccggggtgctggaggggagctgtccattctgtaggttcctcatggaatgggctaccttggtggtcttcacaccatctgtgtcttgtgaggggctgggattgctctgttctct

SEQ ID NO: 1968 - DNA, 1000 bp, mus musculus
ccaaacctgcctcaaaatggtgacccttcagccttaatctccaaagggctgggttacagttgagaaccaccaggcctagctgggttttttttctggggctgggaaggggagggggtttcaggatgtcagatccagagccttgtgtatgttgggtccgttccctattactgacctatcccttagcctgggaattcagctctttttcttctaatgactgtgtggaaatattgcatttgtatctcaatggcctcacttccatttcgtagcgattggcatggttttgtcacatgtccctcctactaggagtgagaccatttctattagaagcacatggcttgagagtgtggttgggaatgttattcagggtgtcattactaaggatgtgaggatggggcaaaagcgtgtgtgcgtgtgcgtgtgtgtgtgtgtgtgtctgtctgtctgtctgtctgtctgtctgtgtgtctgtgtgtgaaccctttttgtttttgtcttatttttttaattagagtctcactatgtagccttggctggcctggaactcactatgtagccaaggctatactcagactcacagagatccacctgcctctgcctcccattcacttgtatttaaggtgtgcaccaccatgccccccccccacacgcatgggacttttgtggtcgtgaaaagccatgtaccaaagagagatgtaatgtgagtccactaaagggcatgttcatattgatggtgaacccagtgacattctgccctgctgtcctagggtcacgctgtaaataagtgtcctttctgtgacttacttaggactgtggattttttgattctcatttgttgttatttttgtaattctaagtagtccccaaacagaaggctaaaatgctctgtcacgttcctaagttcaagaagtttataggggctgtagagatggctgagccctggctgctcttgcagaggtctggagatcagtttctggcaggcactgggcgtgagctcacaggc

SEQ ID NO: 1969 - DNA, 1400 bp, mus musculus
taggtatagcctttccccaacgtgcaccactgtttacctgagcagattggggtagggataggggacaggttgggagctgtggtcaagcagctagcagttaaacatgctagtggaaccctgtggaatccccacaagccttactttcctgtctctgcatggtgggaacggtagatatgctatgatgtcataggtgatggcgctcatactttaggactcacaagaggacactgtgtgcaggtgatctgtctggtcctgactccaccctgtactagactaggatggagaatgagcttcgattttcccacctgtaatggggactcctcgcctcagagggtttctggaaggttcagtgagtgaatgtatgagagccccttgccacattgccagcaagaatcgagagctccgtgtttgcttctcttcttgttgatatgtggctgttagagcccaggggttcctgatctgagtgacaggtggcaatgggctttgaacaggttggaacagctcattagaaagtgtctgagctgttcaagcctgaaggttacctcaaggagcctcataatcagctgcaatcagctggttctgctccacccccacccaacctgggtatatcaagcctggtccagacccaagtaggctctgtaggccaaggagggcagagcaccaggcaccatggggaaggcagtgagtggcatctgggggattttgcggctggaggtggggggcagaagtcccagtggcagctgacatctcttttgttccatcccaaccccaggagaattatgaactgtactcagtggaactggggtctggccctggtggggacatgactgccaagatgagcaagaagaaggcaggaggtgggggaggcaagaagaaggagaagctggagaacatgaagaaggagatggagattgtgagcatgggggcggggcctgggcaggattgaggtggggtctgggagccaggcagtgggcagggtggggctgtgagagccagacagtgagtgacttgttccatcactccccagaacgaccaccagctatcagtgtctgagctggagcagaagtatcagaccagcgccaccaaggtgagctaggagtgggcgggtatagtgatgatggacaggaaagaggaacagagagagagaaaggtgtgagaatcaccagagagtgatgggtgtggggggaggggggaatagatggagcaatagaggagaaagaggaaaggagacatggcaaagagaagagactatgcagagaaacgaggaaggggagagggagggagagagggagagaagttagagatagaaggagaggtaaagagaatgggaaaggaagagaaagatggagggagacagtggaaagagagaaaggagaagaagatgagaggagggggtggga

SEQ ID NO: 1970 - DNA, 1200 bp, mus musculus
ttggtgtatcagtttttattaacaaatcagagaataaatggggggcaatgtttatacaacattgaaacagaagatactaagtgtaagcattacaatgccaggtctgtattacaatcagataagggagcagagaatcagcacttgaataacacaagtgcaaaacaccttatgcctacaggctttgatggctgagatattaacagatagcctgtgtaacagagatggaaaagacataggtacctgctacaagtgcatatagatggctgaggttgaagctaggaataaggcaaagcttccccaagtactgtgagccaaaacaggatggcctccatggctacatgtcctaagtactcaggatgcctttgttgtgagccataaattgctatggcatgggacgagaaaaaacagtagagttgatctatgagtgatgtccttgtaggggcgtaaactgatattcccaggaccaagtgaaaaaagcaagccagggtctgtgtgagaacggggaaaacagattgggagtgagtctaaggcagggagtgggaaagggactttcaggctaggcacagagcttaagatggcatttatctgttcatgtggccttcctggatgtggtcgacaggatgaccagtagaagaaagagcagggcagtctctcaccagcttcatactgtccagtgaaataagtcaggacatggcaggggtcttacttgctttgggacattttgggtagactagggatggagagcctggtgaaagacactgctgggttttttcctcctggtagggcaacgaaacgtttcagcatgacgctgtgcacttctggaggattaaggatgaaagatagagacaggtccatggtgtgatgctggaggactctgccctggcaacccaccttgcttctcctgtctcctgggctgaggtcttttccttttttcagagctactctgattctcggggtcatccatagattctattttcttctttgttttccagcataagttttgtgaatggcaggctgcctaagcatctacctttatcatcctgtagcttctcaacctagtgctcagaagcttgccagggaatgatgcagaataggagtcttcccacaagccagagatcttaccaggcaaagcttcatcctggcaggaacacagcctggaattgtccttctgccacatgctgccaataccctcccactgac

SEQ ID NO: 1971 - DNA, 1400 bp, mus musculus
acttgtgggtttctttattgtttctacttccctttttaggtcatggatggttttgttttattccatgtcctgttagattgtgttttcctgtaattctttaaggacttctaattctttaacagtgttctcctgtatttcttttagtgaattattaatgcccttattaaagtcttctatcaggatcatgagatatgattttgtatccgagtcttgcttttaaggtgtgttggggtatgcaggactggctgaggtaggtgtgctgggttctgataatggtgagtgatcttggtttccgttagtaagatgcttacatttccctttggccatctggtaatctctggcattagttgttagaattgtctctggttggagcttgttcctcctgtgattctgttagcctctgtcagcagtcctgggagcccagttctctcctgagtctcagtggtcagtgtattcgctactcaaaatctctcttcttggagggaatgtacacagaggtctggctttctgacctgccttctggctgaagatgaatgcctgaaatatggcctgtatcagaagatgtgttgccaaagcagtctgccagctgacctgcacagactgttctctgaggaaccagggacacaccatggctccctcacctgctctggcagtcagtgccctccctgtcagacagttctcctctgttggagaaggttaccagatgtcttgagcctgaaatgggatctgtcccagaagttgtgtcacttccgcagaccactcgctcaccctccacagtccgagacctgacctgggcagactggtctccaagggatccaggacccaagatggctccctcacctgctcaggccgtcagagacctccaagccagacagctctcctctggcacggaaggtgtccgaatatctggagtgcaaaaccaggtctgtcccagaagctgtttgcttctgcctgtcccagaagctgtgtcgcttctgcagtctgtactctcccctgagcagagtggtctctgagggactccagacacaaaattgagacttgaagtttttatcttaaagatctttcaactccttaattagagtcactcaaacacattttatattatttgtgactattgtgtatggcgttgtttccctaatttctctctcatcctgtttgtccattgtgtatagaaagtccattgatttgtttgtgttaattttatatccagctactgcactgaagttgtttatcaggttaggagtactgtggtgtaatttttaggttcacatatatactacagtattatctacaaagggtgatcttttgacttcttcctttccagtttgtatcctcttgatctcctattgttgtctaattgttctgggtaggacttcaagtactatattgaataggtaggg

SEQ ID NO: 1972 - DNA, 1200 bp, mus musculus
ctcagctcatcttaatggcaccagctcactcataattaaagtccctcgctcaaaagtgcagtttccatcactcctcacatgaatcttcaagcctctccacatgcagagaaaactcagtcccttcttgcacttggtgagacaaacagagaaaattgctcaaggaagttgccctggtcctgatcatctgggccaggttgaaaagacctgggcaggcacagctctgacttctaatgtgcatttggatgcactcaagtgcttcctggggccacaacaccttcccaggtagtgtgtccatgtggcagctaccaggggttaaacaaggtagttccaggctatgtcccaactgaagccctgccagcctgtaccacaatcacttaagcagtgtcctcctgagcctgacttacatagttttcttgagtttctgagttccttaactcgctgcagtcgcccaaactcagagtcttcaaatcaaatagacaaagcctcagcctgacaaaagctggaaggttcaccctcggacaacaagctgagtcttatgggtaatgaagttctcaaggcatgaaccttcataggcatgaacatcgtcatgttgcacaacagacacataaatattcttggttgcctcacttgctggtgttccaaagttctgctccttctcttgctacagtggtatacagagattaccatagaaaggactgaaactttgcacatgaaaccttctttctgatattttttaatattatgaaaccagatgacaaaggaaaccatatgttcacccaatgaccttgaaattaatattattccctaatttctattcagatgcatgtggtctgaccttttaatatgtcagctatgggactggtactgtggctcaatagctaaaggcacttgttccccagcatggcaacctgagataaaactccaagacctaattggtacaagaggaggaatcctaattctacaggttgtcatttgttcttggctaataaacatgaaagaaagaaagaagaaagaaagaaagaaaaaaaaagaaagaaagaaagaaagaaagaaagaaagaaagaaagaaagaaagaaggaaggaagggacaaaggaaggaaggaaggaaggaaggaaggaaggaaggaaggaaggaaaaacgatggtaaataaaacagagaaagaaagagagggagagagggggagggggagaagagaga

SEQ ID NO: 1973 - DNA, 1000 bp, mus musculus
agtactctctgcagacaaactctctccttgcaaggagggtgcacaaacatctgcctccttggtgatgatgaatgcccaaaacatggcctgtctcagaagatgtgtttcctctgcagtctgcatgctcatctgcacagactactctctgaggaacgtgcgacgcaagatggctctctcaccagctctgaaagtcagacccctccagggtgtacacctctcttctatcgtggaaagtgcctagatatcttgagcttaagttggggtctgtcccagaagctgtgttgcttttggagtttgcttgctcaccgtctgcagagctgacctgtgcagattggtctctgaggcatccgggacccatgatagttccctaaccttctctggcagtcagagtcctccttgggagggcacctctcctctggcagggaaagtgcccggatttctggagcctgaaatgaggtttgtccaagaagctatgtcacttctgcctgtctcaataggaatgtagtttttttagtcaacattctcacctatgcagactagtctctgaaggacctaggacccaagatgattccctcaccttctctggcagtcagagccctcctgggtgaacaccttttctctggcagggaaggtagctggatgtctggtgcccaaaataggctctgtcccagaagctgtgttgcttctgccttttccagaagctgtgtcccttctgcagtccaattccacaccctccacagatctgatctgcacagactgttcactgagggacctgggacccatgatgactcactcacttgctcctgcagtcagagtcctcccaggagggcacctctcctctggcagggaatgtgcctggatgtctggagcccgaaaaggggtctgtcccagaagctgtgtggctactgcctgtcccagaatctgtgttgctactgtagtcaatactctcacctcacagaatagtcttcaagggacccaggacccaagatggctccctcac

SEQ ID NO: 1974 - DNA, 1000 bp, mus musculus
gactgattagctagcattttatctggctggtacttttctctctcataacaagctgcttcctcctccaagtctgtttcttcagaggagctaaattttttatctgattcagagctactcgggtataggctccttctcctagaaacctccgctgattgatcttttttcttttgttttttctcctctttccttccaatctctccccaggtttttttacctaaccttaactttttctcgggtttaagacccgtggaaaggcctgtatacttaattggtgcaccatgtttcctctttgctcctactctctctccccgctttacttttgatagactatcttgaatttcgtccagaatttttcaccctatcttaaccacttgataacatgtgaaaaggaacaaaaaggctcctaacactggagaaagtttaaggccagaataccttgtaaagctgttccccactttacttctgatggactgtcttgaatttcgttagaaagtttaaggccagacataccttgtaaagctgttccccactttacttctgatagactgtcttgaatttcgttagaaagttcaaggccagacataccttgtaaagctgtaatgtgaccgtgacccgcagttctggttccggaatgagggatcttccttgagccggtgtgatggtagttcccaggtttcttggcgcctcttattgcccgaactggaatcttctgcagcaaaagctttattgcttacttctttaggagcaagagagagaatggcaaaaccccatcccttttaaggagaattatcctccgcctaggatgtgtcgctccctgattggctgcagcccattggctgagttgtcgtcacggggcaggcagagcacatggagtgaagaactacccttggcacatgcgcagattatttgtttaccacttagaacacaggatgtcagcgccatcttgtgatggcaaatgtgagggcggctccccacaattaatgactgcttctacttcttt

SEQ ID NO: 1975 - DNA, 1000 bp, mus musculus
agtctcagggtcgtcattctgggagcaggagctgaaaggaagaacaaatcatctctttttacactggctcatgacaactgccttgagaaagttgtccaagtttccagtgtgacttagaggatgggtccatttgctcgtcagaaaaaatagaagaaggcaggtaggtacccgagggagaggagctggagttccaggctggcctgggctacacagtaagaccttctctcaaaacaccggcaacaaaaagcaagcaaacaagctaaataaataagggttagggctgtctatagcttattagtgggggggctttctgtagtgggggatcctctcccttgaaatggaagggtttagcctcacatccaagtctgtcaggaaactggggaagggcaagtgtgtgaaattgcagggtctcctgttcagtcagtgagcgcatgccacctactctgcctggcatgcttggtgatccagcatggcgggtgctgggcacgggaaggtgtgccggcaagccaacaggatgtacatcttacttgggtggcatttcccaggacacacacaagttcctggtcctgtggaagttagatgaaggccaggagcatgcctgtttcatggatggatggacggtgtgttctcctcctcagtgcagcagcagtggccaccacaaagtctctgagtctgacattacatgcccccagaactgctgctaggcatccgctggctggaacccactctccggcttcgaggtcttctgtgtgtgcacttagcgtgagctgcactttttatgtagtcctgaggtcccatagagctggctgggagttgtttcccattttgaaattgatatacccagaggcctccctttagttttaaatgaagctttcagatctgaggggcctggagagatggctcagcagttaagagctcttgcagctcagctcagtcatgaagtccagaatttggattccggcacccatatcagctggctgacaaatgcctgtaactgcag

SEQ ID NO: 1976 - DNA, 1000 bp, mus musculus; identical to SEQ ID NO: 1975

SEQ ID NO: 1977 - DNA, 1400 bp, mus musculus
aagtccatatagaataaatttagggaaattgaattagtatctataaatccattttcttattaaaatccatataacagaaatgaattaaccttcacagataaattaagcctatcttggcaggtgtgatggctactgccgttaatcccagcacttgggaggctgaggccagcctggtcttcatgagctctaggtcagccaggactacacacaaagactccgctccccaccatcccccaaaaagctacccaaaatcagtgaatggaaaatttttagtcaattttctttaaatagtgtcatcaaaattatggtggaaaaacataaaacaaatcagaaagtgtttccacaggtctggccccatgccatagctcccgaccccacgtgaaagctaataactcgttttccgtacacctcaacttcaggaacccaagctataaagcttgtcaacacccacggactctgtccttccgggagctgcccctcgactctgggtgtgtacaaaacacccacattagcagcactgcagtctgctttcacagaacagtaagcgaccagaactacacaaacagcaccttgttcacgtcacccttagcagtgatggaaccaaccatgggactaatggggtcacgtctgtgtgacgcaaacttcagcacaaatatactgagctagtttctcagtatattttcttgcacactaacaaatggactctcttagaaatatactagccacttgccgaatggtgtttctgacaggaaactgcttgtgttgtttgttttcttgtggctagatgtacatgagtgctcaactgctatgcatagccccaggttttcaaagttctcaccaaaattttacttgaagactttattgttagtgttttgcctgaattatgcctgtgaactacatgtgtgctcggtgaggccagagtgtccagatccccagcacttgctgtaagtttcatatggttactgggagtcaaacctggatcctgaggaagagcagtcagtgctctaaattgctgagccatccctccagtccttttaaaaattattttgtttaatttttttgagatgagacctcactttgaagccttagctagcctggaacttgctatgtagatgaggcttgcctcaaactctgatatccacttgtgtctgcctcctgactatgtgaaccataccagtcttttattcaaacagactgaggttggaccatccttagtcacctgggttgttctattaagtgtaactacactcataaattcgaagcagagcaaaccgtaccagctgtgctactttgaggcacctgatcattcgacaagggatctttttaacctcatgaggcccagtcctgctaatccaggttggcctcgatcctgcaatcccctgctcacaacacctgtgaat

SEQ ID NO: 1978 - DNA, 1200 bp, mus musculus
ttgtgtagtgaaatccaggtataattataaacaagccaggtgttctgtactctgccttgcttgttctgtgttgcttgccttatgtctttcatggctacttcaggagaacatgcctttgctcctgactgtgagtgaggctgccacagcttggtgggaaacagccacagttaaaggctgcttgctggttagtttagtacacctgtgattcctttgaattaaaaaccctgctgaaaaccattgagggtttgatcttccaagccccagagaatccttacaacttgaggacctcaaaataaatataaactgtgtcctgggaagatgagactgtagcttatttgcagggtccacgactaatatgcatgaagtcctaggttcattcccaaacccacaaaacttgggcatgatagcatattctagtaaccctagcattcaggctgcaaaagccagaagatcaaaaagtcaaggttactgtcagctgcataatgattttgggccagcctgggctacataagataatgtctttcccaaattaaaaaaaaaaaaatctgatacatcaaagtatatagagctactaaaacaccacagaaaataagaaaattaagttttctttgggatgatattaatctttagcatgaagaagcaaactacttctatgactgtcttagttgccattctgctgccttgaaaagacaccatgacctaggcaatgcttacataagaaagcttgctcgaagcttgcttatagttttagagagttagtctatgatcatcatagtggggagtgcggggctgcagcagaagctgagagcttatgtcctgatctgcaggcaccaggcagagagagacactgggcctagaatagacttttgaaacctcagagcccacccccagtgacacacctgctccaacaagaccacacctcctaatccttcccaaacagttcaccacgctggtattaagcgttcaaacatatgagcctatggtgaccattctcaacccacaatggccctgtaactaggtcaaaagcagaacatacccacagagagaatgggcccaatcaaacacatctctaagcaggtaagaaagaagcagatctgcaatctgactccataaaaagggcaagcaagtaaattagagcccgactgagactctgaaacatcagcttgaaagacctttctacacagtaagcattttagggga

SEQ ID NO: 1979 - DNA, 1000 bp, mus musculus
agcaaaactaatgcaacttacttctgacccacggccactctgggtatcatagctcctggaaggggccagagcacattcctgggcaccctatagacgagcttcagggttgggaatggcctctagtaagctcaaaagtgcccacagtaatatcctcggaaggaacgggtgctgtgcttgtcatggccatgctgcctgccctttgggtctcaccatggagacacccggccaccacttcccttcctctgagtgcatctcttacctcgggcttccacttgcgcagcctgcagcttaagcacttcctgtaacattacttctacagagcaaatatttatactagtaaataccatcaaaatatgatctgcattcaagtgtttcctataggtggttgtgaggaacaagaagaagtcgctgcctaagtggagaggagggggaatggagcccatgggcagccctgacaactgacaaagcacctccctgtggggctctctgctcttgacgtaacactgcagcattagtaacatatgccttccaacagcaaggcccaggggtccctgatcgggtactcagaactcctccagcatgtagaatctatggtttgcacagactcacagccagtagcccatacaagtgctagtctcaaacacacaggcctctgtgccccatggtcttggaggagataaagcagaggacagtggtgggacccagagaccaatctgggaaaggcaagtgacttagtgtctgtgtagtagcacctaggtcaagtagaaagaactgcttctagaattttccaaaagttcttcaacacgttcatcccacctctggtgggatgaatgctaaagaaggcacatgcagaataaaggagagagagaaggccttgccttttcatgcccagaacggtactcatcaccttgatgcagtaggcctggcctcccagatctccttggcactcaatatcactgctctttgagaagttggccagtatgaaagacttatctgattt

SEQ ID NO: 1980 - DNA, 1200 bp, mus musculus
tggagtgtggggtcccgggttctgaggtgactaagtgcattgtttggggtgtggggaggtgtgaatagtaaaggaactgagccaccaagtgcatttttataaagaggggaggactgcgaatacccaaagccaaatgaaatcccgtgctaagctgtctcctgtgcttgcctgtgcagggctgttgcccttttgagaataagttagccgaaaacaggtccgagccagctgtcttttgctttttttattttagagaaaggcatcagtgatggtcacatgtaagtgaggaagggtctcttttgctcatggtttgagtctttcatggttcagaattcgaagcaaagcagctcccaccatgatgatgaggaaagggtgtggggaaccagtgcaagataacgccccatgaactcacacacacccagtgacccacttcctccaaggagtccccagttcccacctgtcaccacctcccaataatgccattgtagaacccattcactggatagagcacccaaggatgcaataggctctgaaatgccctcacagacatcccagacctagccacggtggtctcctggcctctccccatccaatcaaaacaataagtgaaggttttaatcatgacagactcctggacaaaattaaactttcatgacaagcaactctttcatctgtcccgcccatctgattcccccaatgaacactgagggtctgggacccagagagtcaacccctagccacagtccaagtgagtctgtgcagagcagggacacagtcagatctctggtttcccagttcggtgtctccccagcagcccgtgtacaaaggtttggtgagtcgcaccactaagcatgtcccattgtggccactgtgtcagccccatgtataccctttgtctgaatcaaggacttctcacggctccttcttcatcctaacagactggggacattgcaaccatcctggagggctgcatttttcaaaaagcaaaagaactgtgaaagaaaaaccagtctactgctcacagattcaggcctgactggtgtgtgtgggctgttaatggaggaccacgatagccagctgatacatcccaggtttgtcttaaggtgataacaactttccgagtagcttggagtttccctgcctggcatccacactcaacttctggtaggttctactagaacacacccaacccctagtctcaga

SEQ ID NO: 1981 - DNA, 1000 bp, mus musculus
gtgagttgctgtgtggttgctgggaatcaaaactctctccctacaagagcagtaagtgttcttaacttctgagccagttctctggttccaagatccacttctcgaagagaagatcatccaagccaccatctgaggacctacttgtcaaagtggcacatagatgtaggaattcccgcctacagtgtctgtcctgccctcggtgcttcttttacctttcaaagccattctcttctgtgctcccttcccttggtgacgctccctcacccctcatgttgggtatctggcttgctcagagttgatctccaggtcaggatctgctctctctcactaagtcccagttaacagttcgggggatgtagcacttctccaactttgtcttcagatagaatacagaccccgtgcgcttctaaacctctggtgtactagttaggtttcagtccccgtgatagaacatcatggccaaaagcaactcggggaggggaggatgcatttcatttccatttccacaccacactctgttctcaaaggcggtcagggcagaagctcaagcaggaacctggaggtaggaactgatgcagaggccatggaagaacgctgtttactggcttgctcttcacttactcagcctgccattgttaacagagttcgaaaccaccgggaaaagaccccgggcttactaaaaattataattagatgaatttattaatactgctagcagaaagacagcctccaagacaagtcgaaggtgtgtcactcagaaggggctacgagaaggggttttaaaggtggagaccgtgattaccctgtttccgtggaatttgcagctgcatgggaaattgctctactcctctcagctgttaagtagctgtctctctccccctggtccatatcgataagtgggtttacaaaagccggagcaagaccgtaattatctcaccacagtcacatcattcgggggtgggggtcaaggaatcagagttgccttgagcatatcttttag

SEQ ID NO: 1982 - DNA, 1000 bp, mus musculus
agctttgcagtttcatgaggtcacatttgtcaattctcaatcttacagcacaagccattgctgttctattcaggaatttttcccctgtgcccatatcttcgaggcttttcccaactttctcctccataacccataattagcctccaaacgatgacaccattgcatacactagcaagcgtttgttgcaaggactgtgatatagcagtctcttgtgagactaggccggggcctaacaaacacagaagtggatgttcacagtcaactattggatggatcacagggcccccaatggaggagctagagaaagtatacaaggagctaaagagatctgcaaccctgtaggtgcaacattatgaactaaccagtaaccccggagctcttgactctagctgcatatgtatcaaaagatggcctagttggccatcactggaaagagaggcccactggacaggcaaactttatatgccccagtagaggggaattccagggccaaaaaatgggaatgggggggaggagagtggggggaagggtgtgggagacttttgggatagtattggaaatgtaattgaggaaaatacaggcaggacctgatgcagaggccatggatgagtgatgtacactggttcctcagcttattttttaaaacgatttatgcatgtattttatatatgtggatgcctttttattttttattagatattttcttcatttacattacaaatgttatccccaaagccccctataccctccccaggccctgctcctcaacccaccgactcctgcttcctggccctggtgaatgccttttttaaatgcacatcataaaatgaaatcagatcccattatagatggttgtgagccacaatttggtttctgggaattgaactcaggacctatggatgaatagccagtgctcttaaccaatgagccatctctccagccacactccaccagttttcttaggggttctaggtccatcagcctaggaatggcaccatgt

SEQ ID NO: 1983 - DNA, 1600 bp, mus musculus
aggttgaaatggacattcttcctcacatattcctggtgagatggtttatgatgtaggctagtgggtttgcttttcatttatgcttagtatggttattagagctatcatatgtaagtggaagcaagaagaaaccaagggaaggcattgctagataccttttaaagtaagctatatataccacatgccctacagaaccacaaaccataacattcaaggtcactcaatttggcaagcaggagaaagatagtagtaaatactgtttgctcctgagttcccagaagatgaaagcaaattctctcattgcttttgaggttcctggttttctttagagttgaacctctgactattctccactgatgtgccactcggtgatgtattttccaatatgtcatacagccagttgtttcaacagacttatttgacagaatcctgaagtttgttctgatgaaattggaactcttgacactttctttacacaacaatagtattatatcaagtctctctaccacggactgcctgtttcaaactcttcattggcccatggaaaaccccacagtgttaatcagacttgtaagcttgagatctacaaacctctctagctgccttcctatccatcatctcctaggcaccttctttttgccagacctggataaatgactctcagtcatcaaaacggaaaccccatggcctcatccccattaggttttcaaacacagtttcccattccttccttttaactctctattactgtgatggaacacttgacaaagctactaaaacgaaagatctgctttggcagcatggtgctcacatcctggcagacaggaagcaaactttccctttttcccctcaaagccctagccttgagggtggtgctacccattgtcagagttggtctgctttctttagttcacgatctagagtgcccagagatgtgattgagaggttcaggtgcctctcagtcataccaagtggacaatgacatcatcatttctttccttctttcataatctatcacctcttccttaactcttatgtccagggttaggctccaatatcatccttttccatctctccctgaggcaagaatctctgttgtaagtgttaaaacacatgaagttcatcatagatggtggaacagagaatgggttctacaagaagacaaagccacttgaaaagatacacagctctgtttactttattttactttattacttaatataaatgtatttattttaacagggttctattaattctttcagaatttcacacaatttgattacattcatccctcactgctcttacagccactctttccaccctccaatcccttcccaaacaactttgagattttcagtttttcctcctaacaagtctagtttgtgttgctctgctagtcttaggaatggagcctactctggcatgtggtctcccaaggatcttatcttcaaataaaactgactatgactctgtggttaaaattccttagtgctcttgcagaggacctggtttcagatctcagaatacacgtggcaactcataactatttgtaactcccacttatggaaatctcactgagatccctgccccagagagagat

SEQ ID NO: 1984 - DNA, 1200 bp, mus musculus
gtgtatcaggactagacagaaaaattagtaagcagtaaaacatggaagagatttatggatgagtagagagaggatttatattgttactcaccacgacaaaataccaaacacatgcaatttaaataaaggaatcttcattttgggctcatggttttacaagatactgtggatccaaagcgagacggagcactgtggtgggagcaaatgttagagcacagctgctcacctcgtgtcagccaggaagcaaggaggaaataaagaactaggcctgcataatatatagtcccccaaacaatcctccagtaccttaactccaaccaggcctcacctccaaagatgttcatacactctcaataataccatcaacttaggaatccatcaatggagtcatcagtgattagatcagatccctcatgatccagttacctctccatgaatagattcaccagttgaagaccaagcctttctgatccttgggggaagaagtatttcagatccagaaagaggatgtggttgtctccacaaggatggatgagtgggttgaaaatggatggaaaaagtagctgctgggtagatgggaagagggatgtgggaatgggtgtgtggctggttgaaaggggctagacaaaaggataaaagatggatgggaagatgggtgagtggggaccaggtgaaccttgctcgatacctggtttggggcatgccatcatgcctaggtgtagaatttctggcacacataccaggaaagatgccatagaaagaaatatcccaggcagtgatgtgatcagaatgttattccactctatgttctgtgcccacctctgaaccactggatacagaaggtagagctgaggcacagccagcccacaggtcaccaccagctttctggtacaggtgtcgtgtaccctccagtgactggatactaagttatctggggaacacagtgtggccctatacttcttgatgatcatcaaacgatactgtaggtttgtctccgcagacctatgtctagtctctaggtgaatggatgaactgtatttgctttaaagcttaatgtaacaagaaaatacacaagggcatagttcatgatgtgttctgttctagagtcatattttaatgcttgacacattctgggccgttccttggcactggttttatttaatgaacacatgttatacaatttttcaagcactatccctc

SEQ ID NO: 1985 - DNA, 1200 bp, mus musculus
ctctttcctaggttttctaactccagggctgtctccctttgtgatttctttactgtttctatttccattttttgatcttggatgcttttgctcatttccttctcctgtttgattgtgttttcctgtaattcttcaagggagttttttgtttcctttttaagggcttctagatgtttacttgtgttttcctgtattttcttaagggagttatttatgtccttctcaaagtcctctatcaccattatgagaagtgattttagatccaaatcttgcttttttttccagtgtgatggtatatccaggacttgctatatgaatatgtaatttgtttgtttttagagacagggtttctctgtgtctccctggctgtcctggaacttactttgtagaccaggctggcctcaaactcagaaaccccactgtctctgcctccaaagtgctgggattaaaggcatgagcccaccacctcccggcttgttgcttatattctttttgtttgtttttgtttttgattttgttttttgagacagggtttctctgtatagccctggctgtcctggaactcactttgtagaccaagctggccttgaactcagaaatcatcctgcctctgcctcctgagggctaggattgcctcccactatctggttatctctattcctacctgcccttgctatatctgactggaacctgtccttcctgtgttcctggttgtgtcacaactcctcaggtttcagctgtctctgtggtcctgacattctgtgatcctgtgatcctaagatcctgtgtgtgtcagagctcctgggagtcaagctgcctctgggacgctgagatcctgttgtgaccaagctcctaggatcctgggatcttgtggtcctgggtgtgttagagcacctgggagtcgagcttattttgggcgttgtggaactggctgcagagctcacacccaaggtctgctcaggtcactggcccagacaggaaagagttccttggctcttgtatagactggctatgttggatattatcaagactaccactctataagagttacaattaaaaagggaacaagggaagaaacaatcttattcatggaaaaacaaggctcccattctgtaagaattacaattaacaaacgtaacaaagatagaaacaatcttattcatgaaaatgccttctaataagtatgcaaatcctaataat

SEQ ID NO: 1986 - DNA, 1000 bp, mus musculus
aacccatgtccaagaacataagatcaggtagacatgttctctaccactgagtctcacacaaggccaccaatttcaaattctgataccattttccattccacttttaagattgtgaaacatggggctggtaaaatcattagttgtttaaatgcttgccttgcagccgttcctaagtgtgtttagatacttaaacctacattaaaaaacaagatactggggtcatctgagtaatgacattattcaaaggatcaggtaagattttggaaattatggaccagacaacctagttccacgaaaatgagagtcgctcttaataaagacaaaggggaagaaaagtgaggagcacacttccaggtaatttggtaactggcctactgagggttttctgccacaaaccatacaaacaggaagaaaaacaaaaatatctgagaaagcatgacatgcaatgatctccagaaacaaagcagtcaccatcggtctgcccacaggggtagcatccaagctcttcatcaagagctcataggaatgtcctcccactgctgcaggggccaaatgctgtggtctatgaaatgggtcggggtggggagcatctcatttgcccaaggcactgacttcttccttcacccttttccagtggttcaaatggagacatccctgggattgccaccttcaggccagacacactgtcagctgcagagtccagaactctgcaacacctgtgtccaggtttcccaaataaggccaccagctgtcaatggggacaaggcattaacagcccccatccacagtccttcagagttcctggccttgcctccagctccaagcctggaacaaccagagaacaaaaccatgcctgagataaaagagggcacaaaagaaaaccaagacaggccagtcctgactttggagcaccctgacttgcagcagcctctgcactgcactgacactgagagcctcaggcagaagcctgattctgataatgcccatttgggatgcatct

SEQ ID NO: 1987 - DNA, 1000 bp, mus musculus
acttctcctgtctaaaggaaatgtatggaaaaagagtggagcagagactggaggaaaggccatccagacacttccctacctgcagatccatcccatctacagtggctaaacctagacactattgctaatgccaagaagtgtttactgacaaggacctggaatagttatctcctgagaggctctgccagagcctgaccaataaagatgcagatgctctgatgcttacaactgaccatttgactgagcatgaggaacccaatggagaacttagtggaaggactgaaaaactgagtgggtttgcaaccccgtaagaagaacaacaatattgaccaaccaggacttcccctcccaaagagctaaccaactataaagtacacatggagtgacccatggctccagctgcacatgtagcataggattgccttatctgttatcagtggctagggaggtccttggtcctgtgtaggcttgacgcccaaattatggggaacactggggcaatgaggcaggagttggtggcaggagcaccctcacagaatgaggagacaatgggacttgtataggagtctgctggtgttagaataaataaggggaagaaaaactcgaggagaaggtccttgtgatctcttggtgacaggttctgatagaaaaggagataaaaatattctcttatagagttggaaatgagagtgggggattttatttaaggaacagtagatgtgctgctgtacatcagcgttagcctgatttttgcccccagaaaagcagctcttgggataacagaggggttttgttgaagaacaagtggggagtggaaggcaaaggtcacgatctgtggaatccacagaaggtgagaacacggggccacaaagggctgccaaaattattctgctagacagctgggaatggtgtgggggattctggtctaagaaaacacagagagtaagtagaaggtcttggggcagatcacttggctttctagaggttatagtctacattt

SEQ ID NO: 1988 - DNA, 1000 bp, mus musculus
cttccaaaggtcctgaattcaaatcccagcaacctcatggtggctcacaaccactcgtaatgagatctgacaccctcttctggtgcgtgtgcgacagccacagtgtacttatttataataaataaatctttgggccagagcgagcagggaccgagggagcagaattgaccagtgtgagcggggcgactggagcgagcagaggtccgaaattcaattcccagcaaccacatgaaggctcacgaccatctgtacaactacagtgtattcatatacaattaataaatcagtctttaaaaaaaaaaactgtggaaactcaagaggtttactttagaagaccataaaccaaattctctgaaaaagaacaaattcagaatgcagggggctcgatgatgattcagcgtgtcaatggctctctggctggggatttcgattacaaatgtgtccatcgcaaaggtcccacagagcagcctgtctcaccaagcccgaagtccatgatattgaaaggtctgaagaagaatatcagttgatcattcttgcatatgatggtatctgggacgtcactggaaacgaagagctctgtgactttgtgagatccagacttgaagtcacttatgaccatgaggaagtttgtgatgaagcagtagacacctgtttgtataaggaaagtcgagacaccgtaagtgcgattttgatctgttttccaaatgcacctaaagcctcagcagaagcggggaagaaggaggcggggctgagcgagtacctggaaagcagaggagaagaaatcataagaagcagggggaaggcgtccctgatttagtccacgtgatgtgcacggtagccattgagcacatccgcagcctcccaccagggggtgaattggcaagcaagcagaaagtaattgaagccatttacaatagactaaatacttacaaaaatgacgacaatgattctacatcaactgatgacatgtggtaaagctgctcatctaaccatggttcac

SEQ ID NO: 1989 - DNA, 1400 bp, mus musculus
gaatacaggtcaccttgaaaggtttgtaataaagttagggatgagattcagggactggacaagaaggaacagtaggagggaggggaagatttgtagcaagactactcgattccctggcaggaatggcctgtgggttagtatagagtacctactggtgttggaggctggaatcaatcaacaagttgtagggggtggaggttaggagaagaaggtctgtggaatccataggagatgtgggcacagggaaatgggaagctgcagcagctgttttgttgcacagctagggatgagtttaggaggttggtttggagaggttgaagtagtgcaggtattcagtgagcttacctcttcctctggtctgctcagcttgtgtgattctagggaatgcctagtggtgttggaggctgggataatgggaagcattggccaaagtaacgttggaggaggaggtcttcatcatccattggggattgggtcagaaaggaaaggaagatggtaacaggtggtctgctatggagcttagaatgaacctgagggatttatctagaggagaagaggtgaagatctgcattcaacctacctgcttccatgtcagaagtctagatatggattcttgataccactgtggagatgatagtcattagaaaaagaggaggtcctacgggctcctccacagtgagaaaataggttgattatggtgtatttgtcagaatgtgtacctgtcagtgagtagtgtatgaatgcctgacttagcagtggtccaacccatgtctaggcactcagtaaatctttgacatgacttgaactcaagccaggtgctggactctactgaggtttcctgtttctaactcaatctctctaagttctcagttgccacattctcctagatttgtctttctgaatgatgcacaggttctataacctgaacacatctttatctggtatcctcccttgtactgaagtctggctctccttcaactttcctatccacggataatgtttttctgtgttgtcatagtacccagttcccagctgtcttgatttatttgagctcccataacaaagtatcataagatggacagttttaaagaaacacatttggacttctggtggttctagacatgggacatctaaatacggtagatctggctccttgattttttttttttttattctcatgtatcagaagtaaaggatgaaacacatgaaactcaagaagaatgaagatcaaagtgtggacactttgccccttcttagaattgggaacaaaacacccatggaaggagttacagagacacagtttggagctgtgacgaaaggatggagcatctagagactgccatatccagggatccatcccataatcagcttccaaacgctgacaccattgcatacactag

SEQ ID NO: 1990 - DNA, 1200 bp, mus musculus
tcttctttccagatctgctggtaggtatcgtggaccctgctacaaagagcgagggagagctggactatactgatagggccgtttatgcctgaggcagggaggataacacaagggtaggcagtttaagaacacagccacacaagaaatctccgaggccacttcaacttttagccatgagaaaggaacccttggagaggggctctagggactttggacatctatgcagaagtccctgtgggtaaaggagccatgactagcaggtttgcttggcctgtgcatagggtggagtagaggacagtctttgattgacatatgccagagtttgttctgatgacagtagccagagttggcccacctggtggagggacccaagtctgaattggtggaccactaattagatcgttgtggagggatttgggccaggatggccttaggcattcttaaacttccttgtacttcctctgctgcttccttggggtgggaagagtcccccagccctctttgtatctgctcctggaagtccagagtggaaggaactgctgggcctacatgggcatcttcagggtgagaagccagggtctgccctttggtctggccttggttattccctgccccaggggagaggaggctggtgtctcgcccaaagggctcagcctctgtggtgatttgaatagatttggtccccatagactcatgtgtttgaatgcttggcccatagggagtggcataattaggaggggtgaccttgttgggataggcatggccttgctggaggaagcttttcattgttgggtggactttgaggtctcctcctatgcttgagctccacccagtgtggaagagaccctcctcctggctgcccgaggaaggcagtctctactggctgccttcgcatcaagctctagagctctcagctcctccagcgccatgcctgcctttcctgacatgatgatgatggactgaacctctgaacctgtaagccagccccaattaaatgctgttcgttataagagttgccttggtcatggtgtctcttcacagcaatgaaaccctaagctgacagcctcctaccctgtttggttccccactggctcatagccgtctccctaaaccctgtactgtcctttccccgagaggaccgtcccacactcactgtcctagcattaaggggtctgtgataccccgctgctgccctcgttc

SEQ ID NO: 1991 - DNA, 1200 bp, mus musculus
gtctcttgatgaaacagaagtcacattgactgatatattttggaactgtgccaaccacttttttttttaaatctctatggaatctcaagagtattggcattttttcaaacaagggacaggagcttgggatatttaaggatacacaggcagggagaggtatagcagaggtttgtctcttgggctgctccactctgtctcaagggcaaggaccatggcaggctcatatctgaggtctaggacctgacttggggcaatgtccaagggacatggagctctttgattcatgacttacgccctcaagcttgtccctatctgactattggcagccgcttgcctccaccacaaacacaaagccggcacatgctgaaggactttgagtaaagcccaaggctgtcaacaatggtccgtttttttcttcaagtgtggtgtccccagaggaagtggctcctgcctgggtttgagtgctggccctgccaagcccaggagagtccataagaattctgttcagtgtgctgcagggaggagccagtgggtttcctcccgagttttgactcaatcattggccccactcctttctcttttaatgtccttgaatcatttaattgctcagccctggtgtctccctctgaaaaaggctcttagagccacataccatacacacaaaggccttctaaccgtgtgctctgtaggcttggatgggctgccagataccacatcaatgctgtcacatgcagagcctctgagatgagaccgtattagaccgtattatgcagatatgattacaataagggttctggggtagggggtaagcaggttgttctggtttatcttggttggccctaaatggtaccacaggtgtccctcacttttggtgctagatttgaatgtggagcctgtctatgctaacacactctgcactgagctaaagcctacgccataagtatacttttaaggggaaggcaaggggggattcgatagaagatgaggtgatgtgacagttgggagagacactggagcaatgtggccacagatgaagaataccagtaaccaccataagccagaaaaagcaaagacttggtttccccctctgaggaaatcctctgaggagaggttgcagatgcaatgaagttaaggatgtggtgatgaaccccagatggactatgtgacaaatgccggtgagagatggataatggcaaggag

SEQ ID NO: 1992 - DNA, 1800 bp, mus musculus
atgggactttaattcagagtcttgcttttcttgtgtgttgtagtatccaatgctcactgtgttgggagaactgcgttctgatgattccaagtagccttagtttctattcattatatttttgccctcagttcttgccatctggttgtctctggtgttagctgctcttgctttctctaactgttgtttgtctctcctgcaagtctgtgtgtcagtactcttggtagatgagttctttttgggaggaatttgggtatggagagctgtggtacagagtcagctctggggtgcagatggaaactggaaatatccagttccaggctcctctgttcctgtgtactgagggttccaggcatgtccctttgagcagaaatggtggtcttacctgtgctcacaggcttgtctgcactcctgggagaccagctctcttggtggtattttggtatggagcaccgtgatacaggatcatctcctggctcctttatctttacattcaggtacagaacaatcacaggcaagagagtcatggttctggacctttgttatttccatggcaacaaaagtcccaaagaaacagcaagaaagcttcaggggaagatagcatgagaatttgattaatgtcaagaaggatgtagacatgatactttctgattaatgctattattcaggagaggtagaaaacaaagtcagtggagagctcttggagatggtggaccactgaggcatgtctagtcagtaagctgagaggagagtggacagtggtcaagtacatcagggcagtgctcactccaaagccacctctgagctccaggcagaggctcttcatcatggctctgctttgcctcttgacatctctaccatgttttcagctgtctcaggagtgtcctgcagtacattctggagaaccattttgagggtttggtgcttcaaccgatgcctgaaagagcccacgaagaagtaaatgatggggttggcacagctgttaacagcactcaggacgagtgatgccagaaaaacatcataagcaaatacaccataatcaatcttaatccagattaacaggaaccagtagatggcagagggcaacccacagaggagaaaaactaaaactgtcagcatgatggtcacgaataatcttgtaaatttcatcttcccagcaccacagaacaacctggccagcagagccagagtggacagacagaggactacaaacaaaaacatcaggtatgcattaataaagaaattcgatgccagacacccattgtcatttttatatttggtatctaagagaccacagaaatacgtattcagaaagcagatcaacagggacaggtcccgtatagcagcacatatgacagttgatgtgtgttttgtgcagtgggagcgataccagatgggacacaggacagacaggcagtgcttagtgttgatggcactgagcatggtcaggcctgtgttgtagagcaccatcatgattgtgtaaaaacggtaaagaaaaataatgttgaggtaggaaaccttgagaagttgcattgtggaagctatgatgtgaccaaggaggaaaaggaagtcagctatgaccaaatttaagatgtagattgagaaagcattcctgtgcaagtggaagagcaggagccagaacacaatggcatttcctgtcagtccggccagtccacacatccactccaacctttctgtccttgattcccctacactgggtcatctatcgatccttcataggtacaaggatctcttcttccattgatgcatgacatggccgtcctctgctatatgtgcatctgg

SEQ ID NO: 1993 - DNA, 1000 bp, mus musculus
gtacaaggaacgacatgtaaacagtctgagtagcatcaaggtctcactgtattcagcaaggctcaaggcttaaatgcacaagcaaaaggggaagtacttctcagcaggaggtatggggcattggaaatgcacaagcaaaagaggaagtacttctcagcaggagggatggggcagcagaaatttttcttttggcagctacactgggaagcaggaacttggtggtatcagggtgtggtcaggacatctggcgctgacttagggctggaacattctgtggttattcttggaacggtgcatcggtggcccatttttgacccccttttcttctctgggggagaggcccaatttggagatcaagacaatagagttgtcttaataattcccaacaactagggaccaattaaaaggagaaaccacacaaaaataaaggaatatgtaaaagtatatgtgtacatttctggtgtaagatatgaagaagtcacaaagcccaccttttagcatttcaacaataataaactagtgagaaagtggaataattcatgagtcaaaaagtaattcagttagaaggggcagaaatgactgaccaaataataaacccaaattgaaccaaacaataggtacgtgtaactctgtgcttcaaaactcagcaacaagaatgttctagaactcaggatcgagagactgatactgcctcctggagggagcgatactgagagaacagtttccttttgcaggtataaggtgggatgctgccagaatggaagcatctcaaagcaggcttccagcatttcttttcctattttcttattatctatagcaagatggaagaaaggatgcagacataaccaggttaattggtaggggtagctcaaacaagggtgaatggcaccacacagacacacagactcacacacgtgatacatgcacccatgcatgcacccacaaatggtggttccaagtgtcctgttggcactgttttacaaagtcctaatggttggat

SEQ ID NO: 1994 - DNA, 1000 bp, mus musculus
agggaaaggaagatagtgcagtgtgagtgcctctgcagagagggaattgaaacatggccaagtctctctggggactgctaagtgaagtacagtaaataagaaagacaaacctaacacaacacaagccttctctttagtttcttctggaaaacgaggagttttctgtaatgatgaaagctttctatgcagatagtctgaagaaaagatgagagtgaatagtgatggcatgtaatcctgaagaacaatgccattgttatgatgaatacattgcttttattgaaaatatagtgtttcatataatatatgctgactatggttttcccttacctaattcctcctacatactccctgactcccacaccaacctaaatccatgtcctttcttgttcctctcattagaaacaaccagcatcccttcctgtcggcgcctgcaccgggtcacctagggtccggagtccgtgaacacccccataatccccagaggactctccttgcgatcttaggatcactggtgagtggaacacaacatctgctccaatccaatcgtgccagacctgagacagcaaaaaggaatcagaaaaccggcctgatcaggggcacaagtcccttcagttggctccagcactgggtcacatgggcacagaatcagcagacacccacacagtccccagaggactcttcacgtgatctaaggatcactgactggacagctttatggacctcaaaggagacaccacttccaggcactgtaacaagctcaggatcttaggacaacaggatcccaggataacaggagctgggtcacaccagtatttctgggtctcagaggaagcttgactgccaaaaactctgacacattcagaatctcaggttcacaggagcccacaatcaaaggatcacagagaaagctggacactgagaagtcccgaatcaactaggattataggaaagacagtctccaatcagatatatattgagggcagcaagcacttgagataat

SEQ ID NO: 1995 - DNA, 1000 bp, mus musculus
tcaagaagaaggaagactgaagtgtggatacttggttcctccttagaatgggaaacaaaatacccatggaaggagttacagagacaaagttcagagctgagaaggaagaaaggaccatccagcgattgccccacatggggatccatccccaatacagccattaaacccagacactattgcatatgccagaaagattttgctgacaggacccttatttagctgtctcttgtgaggctatgccagtgcctggcaaatatagaagtggatgctctcaatcatttattgggtggaacatagggcccccaatggaggagctagagaaactacccaagaagctgaaggggtctgcaaccctataggaggaacaacaatatgaactaatcagtacccccagagctcatgtctctagctgcatatgtagcagaagatggcctagtcggccatcactgggaagagaggcccttggtcttgagaagattatatgccccagaacaggggaatgccagggccaggaagcgggagtgggtgggttgggaagcagggcgggggagggtataggggactttttggatagcatttgaaatgtaaatgaaggaaatatctaataaaattttttaaaaaaaattaaaaaaagactgagttgttttcttagctctcattgtccttcactggagaggaaggccagggttttaccctctctctactgctgggaaagttacgaatcattgaaacacacataccaagtgaatttaagcttccaaagtccgcactgtgtctttgatgtatatcttttcagttaatttggcatttgtttaagaagcttggtttgtgtgtcccgggtttgtgacatgtacaacctccatgttacaggcttggtcaccatgtctgccatccacaatattaccaagaccattaccacctttccttctccttctccatcccctctgcccctccttcctacttattccctcgccttccttccctttcaaaagtgccccgt

SEQ ID NO: 1996 - DNA, 1200 bp, mus musculus
ttgacatggctttacttgacatattatgtggggcaatgggctacgcacagacagcctggtctccagtagagtttaggtcttgaatcccggtgggacccggtgggtggtaatttccacctccacggaatggaaggcattcgatcatgtctcctggacccctggctcctgttgaagttactgcccccatagccctcacagcccccacaggggaggtctgtggctatcagtcacccagatagtgtcccaagtttctgacattctagttagactccacccccacagttacctgactctagccaggtatgctcctccccacagttacctggcaacagcctgatagcccagcccactataagagggcctgcttggcccctccttgctctctttaagcttttacctttcttactctctagccctctttctctctttcccttctcccctctccccacgtggccatggttggcccctctctttcaaccttctttcctttctccctacctttctacaataaagctctaaaaccatagactgtctcagatcatgaaggcctgcgtgcttaaatgatgggataggcttctcctagtgagccatgtctaacctcccaccataaggccatcctgtgctccagcacctgaccaaggactctcgcctgcatgggaaccatccagcactgcttgcctcgcccctgccccagggccccaatttgttctcagttcctctgccatatccagcatcagatgccagaagctgagaacctggtacctggggctgccccttgtccaccacctgccgtgtggggtcagtggcttaacacagccagatgcccaccggggaccacgtggaaagcgtgcgcagttctcctgtgcctgcccacccagaacaccagaactctggcaagacacgggttccctcccactcccctctttcccccacacctatggccccacaatattaaaatgaaggcccctttccctgatgtcctgtggtggtggcagagttcaggacatttccttctccacaggatagacccttggaaagaccacaagaactccaggtgccagtcaggggagggcacagtgctgggtgccacccataaaggaaatgtgacttgtcagcatggttttacagaccccagatccaacagttctcagtctatgtcagtgaacttataggtcttgattgattctggtttgttcttct

SEQ ID NO: 1997 - DNA, 1200 bp, mus musculus
tacttacatggtttccactgaaatggggttattgtcttattgattgtcatagcacacaatacaatgttttcattacattttcacacacacacacacacacacacacacacacacgcacacaccactgcagttttctcttatttcccctcatttcccaggttttttccactttccacttcttgtctgtttccccaccactctggaatgaattcttaatcatattcattttaactgcttatattagctctaatcctgaaacagaaacatgtcttttctattaattaatttatttattcactttacatcccaatcacagccactcctaccagttcccttttatattgcctctcaccagtatcacccctattctcctcagaggaaggggaggcctgtcctgggtaccaacctaccctggaagatcaagtcactgcagtgctaggtgcatcctctctcactgaggccagacaaggcagcacagttaggggaacagaagtcacacactggcaaccgagtcagggatagcccctgcttcacagaaacatatttttaaatattcaaagaacatactgatgtttatcccttgggtacacttagcaatgtttccattttgacttggctggctccaggaaagaaaggctgtgcctgctttgaacaagatgggaagtagacaatatagattcagagctaagaagtttattctgtgagctctatggtgcatttgcaaggcttgatttttggagtacatctgtgcatatgttttcctaatcacaaaaccttcttgaccttacttcgcaacaggatgggaagatattctgccggcggacagcttgtgattgccagaatccaaatgttgaccttttctgctgcccagagtgtgacaccagggtcactagccaatgtttagatcaaagcggacagaagctctatcgaagtggagacaactggacccacagctgccagcagtgccgatgtctggtatgtcctgtccctaaggatcctggtgcctttactgtagaaaacgttataaacttgagagcttttgggcaggagttccaagatgttcccagtattatacagagtatcatgggttatgcttaaccagtggccatgtgttatgcctggagatatttacattgcatttaaaatgttgcaaaagtaaaaataatgaatttatagaacagatttaacctgagcagtttg

SEQ ID NO: 1998 - DNA, 1200 bp, mus musculus
gggtgtgttggggtgccctggactgtgcgaagtgagagtgctgggttctgatgatggtgagtggtcttggtttctgttagtaagattcttacatttacctttcaccatctggtaatctctggagttagttgttatagttgtctctgtttagagattgttcctctggtgattctgttaccctctatcagcagacgtgggagactagctctctcctctgagtttcattgtacagagcagtctctacaggcaagctcacctcttacagggaaggtgcacagttatctggcatttggacctcctcctggtcgaagatgaagggccaaaacaggacctttcccagaagctgttaatttcagtagtccacactctcacctgtgcagacaaatttctgcgaagtcccagaaacaaaatggctcctgtggatcctgaggctagggcctcccgggcagggcggacacctgacctctggctgggaaggtggctggatgtctgaagcctgaaaatggcgctgcctcagaagctctgttgctctcgcctggcccagaaactgatagcttccgtagtccacactctcgcctgtgcagacaactttctgtggagtcctggagccaagatggctccctcagatcctgaggcaaaaactttctgggctgggcggacccctgtcctctggccaggaaggtggccggatgtctcaaaattcaacattatgatagtagtacttagcatatcctctttcaagatgttgtaagatgttagacatgtaaaacaagtcatagtgcagtctttagtttagaaacaaagagtcagctcagatataggaatacacatactctgagaagggccacattggtcttcccagccttgcgtactgtctgtgacatgcctagatcttaggtctgggctattggtgtgtgggagtgctaaccagtttttcatgtggcttgtctccttggtgatcagtgatgaagagaacataatatctacttgatggtcattttccttataaaatatctaattggttattttgtccatttttttcttttgctattatataattctattttgcgggcaaggtgttcgatgcctatcaatagatgctttgaaattttttccaccaatctgtaggttatccttttattttgcagttcctttattggataatacaataccaattgttcattactgttttcttgtctg

SEQ ID NO: 1999 - DNA, 1200 bp, mus musculus
attccttcacacatctcaatgatattccagattatcacagcacacacggtgcattgatcactaatttctcaccaactataccttgctacctttgtttcaaaagatatttaataatttacctcttataatagtatcctgatcttcagtagaacatcatgctacatattttccaccttctttctgataccctgagctggttctacttaaaatttttaataagggagtgggtctgtctgggataccttgcagagttgagtggcatagtaatttcctgatccacatgtctgtctctgggcttgctctttggtccagaggaaccttgtaggacacaaatagcatcctacctcctcatggaaaccttcaggggccttcaaactaaccagcttggaatcccactggcaatgaaagctagtcttgccattgcagtgggccctcttgggacagtttgcagactcagctccacctgccataccagttgagtctgactgggacacagtctgcagagtaggtagggtcggccctggatatagcctgaggcataaccagcaaagtcaatttggtaccctgacctccactgtcaggtccacagctctccctaccttcctgagaagtcctgttgccatcaggatcatctagccaacatcagaaaaaaacagatgcttaaggacagcttaggaacacaatcagcaggactcagagcaaaaggtacctctagagccttaactatcctgctagagttaactctggataccataatgaaactgaagcacaagaagaggatcttcaattcaatctgatagagggttttaaagagggcaagaataaatcccttaagggaatacaggaaaatacattcaaatagacagaggcattaaaagatgaaacaaataaatataacgaagtagaggtaaatagaatcatacaggcaaaggataaaaataaaactgtccaagacctgaaaagagaaatagaaacaataaaggaaacaaacactgaggcaactatgcatatggaaaacttaggaaagaaaacaaaaaatacagacataagcatcaccaatagaatacaggagatggaagagagaacctcaggtgtagaagataagatagaaaaaaatcaacatatcaactgaacaaaatgtaaaatctaaaaaggtcatgatataaaatatccagaaaatttgtgacatcatgaaaggcc

SEQ ID NO: 2000 - DNA, 1000 bp, mus musculus
ttttgttcatttccatcacctgttgggatgtgttttcctgttttgttttgttttgttttgttttgttttgtttttttgacttctacctgtttggttgtgttttcctgtttttctttaaagtttctcctgtatttctttaagtgagttattaaagtcatccttgatgtcctatatcatcatcatgagatatgcttttaaatctggttgtagcaattcgggtgtgttggggtgcccaggactggctgaggtgggagtgctgggttctgatgatggtgagtgatcttggtttctgttcgtaaaattctcacatttgcctttcaacatctggcaatctctggagttagttgttatagttgtctctagttatagcttgttcctctcgagattctgttagcctctaacagcagacctggaaaactagctctctcctgagtttcactggtagagcactctctgcaggctagctctcctcttgcagggaaggtgcacagatatcaggcatttggacctccctcctggcagaagatgaaggccagaaacagggcctgtcccagaagctgtgccactttggcctgtcccagaagctgttagctttgatagtccacactctcacctgcacagactagccttggagggattgggaaccaagatatctcccccaggtgctctggcaaagccctcctggctggggcagacacctctcctctggcagggaaggtgtcctgatgtctggagcctgaaatggggactgcctcacaagctgtgtggcttcagcctgtcccagaagcttttagcttctgtagtccacactctcacctgtgcagactagtctctgagggatccaggaaccaagatggctccccctggtgcttcagcaaagcccccctaatgtctcttttgttttgttttgtttgtttgtttgtttatattttgcatgacagcatatttacagcagtaagataccttatgtgatgacacactacaagaaatacagaatttt

SEQ ID NO: 2001 - DNA, 1000 bp, mus musculus
ttactggttttcaaatttttcttgatgtgacatttgtctataatttttctgagtgcttataaatttagagattactaatggataatgaaagaaataaacagaaaatttattaacacttgttctcatggctttgattgatattatagtttacacaatgtacatacaattatttcataaacaaaaacccaagtaactaaatatatactcttgtggtaaatcacattttatgtgataaacataggtgcctctaattttcatactgtttagtaaagcatacagaaccaatcagatgcgttgacagcagaataatcttgaaaatgggtgtagatactgtagctatttgaattggcttagcccccatagattcatgggtttgaatgcttgatccatggggagcagtgctattgagaggtatagccttgttggagtaagcatggccatatttgagaaagtttatcactgtaagggtaagctttgagtctttatgcccaagcttcacccattgtggaattctagtctcttcttgcctgcctgtgaaagtttcctcctagctgcctttagatcaagatgttgaaactcttggctcctccggcaccaagtttgtttgcatgatggcatgctcacaccatggcagtaatggatagatcctctgacattgtaagccagccccaagaaaatgtttacctttataagagttgccttggtcatgatgtcaattcacagcaatagtaccttaaccaagacagaagttagtaccatgagctggggtattgctatgatagcgtgaacatgttttcattgggaagaatgtatatttttgaactatggattaggaaagcagtagaatactttggagcttactaagccatactagtagtaggaacatggaaggtagttgtactgagagtgatttgaactctgggggcttggctcaagaggtttcagaggagaggaagtttagtgtgttgcctagagatggtttctgatactttactgaaaa

SEQ ID NO: 2002 - DNA, 1200 bp, mus musculus
actgacttgaagttgcccattccggtggcaagaaatgacactgaagaaaatgaagtgatacctccatgatctagagacctgatcaaagagaagcctgtgtctaaagcaggaaactcacttcagaaagtaggaaatccactgaaggcagtggaaaatgagccagccttttggctagcagttcctcaggaccttatcagttcccccaaaagtcattaagtgagtcttcagttaagtcaatgaaaatgggttcctccgctgctcccactgaaaagaattccctgaagacaacatgttttccaggatgtaaagtcaaactcaaatggactgttaaaattacttccacctcttcatcctcgactaccattttatccttctttgctgtgtttgtcatagatggcctactcctttgcatccaataatacctcatatacctcagctacttgtttgaatatccatgttggttcttcatttttttccagctgtcatttaagtgtctgtttcccatacacctttttaatatcctccagtgaaacaggtttctgtatgcccaggacttcataggaatccaccattttttaagacagatttttggaaaaattccacgacccagttgccagcagaggtcgggtggggtagggtaggggcttaggaggaatagagaaactggtctccttgcaggtctggcacagctgctctgatggtagtggcattcacagaaataggtaacgttttaatggttaatcaatatatcaatgcaagcttatcacaacatgtttaataaaataagcgtagtaaacactgcttaaatatactgaaattctcccatcccgagactgtgtaggttagcactgcagctgtggtgacaggaaggtaatgttgaatgaattacacgtacaggaataacaaatacatggctcagggaggttatcgttcgtgttttgtagttctgatcacagaagcaaacaatctttgtggaagcaattgtatgctcaccatgaaatatttaatttgtaaagctattagcatcagataagtaatgaggaacagtggaaatcacaggaaatagaaaccaagcttctcatttgcatagaaactccctgacttattgcttctactcaggtcatggtgtattgttgcgcagagaattctgggacaccatcagttccaggaaaagctcaaaaccccaattttatgcgaagg

SEQ ID NO: 2003 - DNA, 1000 bp, mus musculus
atcatggcactattgagttatcccaggactaaggacatggaaggagaaagatctctgactaggcaatacagaaatcctatgccatgagtcatttgcccttaaaactgactgtatcttaattatgtgaatattaatgtatttatgtgagactcgtattttgtaattattatgtaccttgggtatcgggtctgatgtagggagaaagtgaagcctagtattttacataggaaatgaagaaggaacttagtcaacaaaactacaaatttaatcaggctgacattattttcttttccttatgaaaactgacacagcacattggatgaaaactatttcaggtctgagtttaaaggtacatgtcaacctcactcagctaaagtcccggcactatcaggtctgctcagttctgtggactccagtagacagtgaacttcaatgtccttttcagctcctacaggggatggtacttctctgatatctcctacttctgtctttaaaaccagcaaaccacaatcttccattttctcctgatcatgacctaagcttttgttatcctatctcctaccacaactgaccttaccttccttttagaaggactctggtgacataattggataagcttggatccaaaccttagtcccaatgccagtgtgtttgagctcatcactctgccaagttcatctcaccatgtcagcccaggcacaggttttgggattcccaagtgtgcatcttcctgcctctgtgtgggaccaggtacaggtatgcagtgctttttttcatacagacaggttctttttctgagcctggtacttcaggttgcctgcagccagcaagccacagagattctcctgtgtccctatcctccatgctcagattctaggtgtgtgcatgactatgcccagattttataaggatgctggggtctgagcttatatcctaacatttgtgcagtaagcacttctaactgctgaatcatgtgcctaaccccatagtcatcttttgt

SEQ ID NO: 2004 - DNA, 1000 bp, mus musculus
gagttctttatatatgttggatattagtcccctatctgatttaggataggtaacgatcctttcccaatctgttggtggtctttttgtcttattgacgttagtcccccttctaagaaacaatgaaacagccacattttggtcttctttcttcttgagcttcatatggtttgtgatttgaatattgggtattctgaacttttgggctaatattcacttaccagtgagtacatagcatgtgtattcttttataactaagttacctcactcaggatattttcttgtttcatccatttccctgtgactttcatgaagtcattgtttttaatagctgagtagtactccattgtgtaaatatatcacattttctgtatccattcttctgttgagtgacatctgggttgtttccagcttttggctattataaatatggctgctgtgaacatagtggagcatttgtccttcatttcatgtgaccatgtttgttatttcacccaactccctaagttctgaactttatgtaaccataaaataatattcaagatgaagttaacattgagataatactattaactaacctagctcaatttagcaagccatttcctttattatgtttttatagttcaggtttgaaccccaccctctactgtggtgttagaagcatatctcacatctggacagaccacacaagcccaaaactgttgcaggagaaaagggcaaaggtggcagcaaagaaaagatagaaaagaaagagaggtcagaggagtcttccttttatttcgacagtgacataaccactcgcaggtaaaggtgagaggtgagccaattggattctgggaatgtgtggtggtttccttggcaacagatgtgcaggctcctgtcaccgatgtgtgatgtcactaggtttggagctaatctgcagcactgataccctgataccaacaactactaagtacagctttgaattgtttatttcccctccatccagaacaaaagcttccct

SEQ ID NO: 2005 - DNA, 1400 bp, mus musculus
tcccaatgttatttttgattcaaactacaactctacttttcaatatgtttaatatccctttctatgctttgtgatccttccagcacttgtgctgaaatttgccttctagtatagcaccattttgtggtaggaccctaaaggggtgaataattcatgagtacctcttctgaataaatgaatcatgttatcataagaaagggctagctaccttgagagtgagtatttttaaaagtgttcgaccaaatttccagcctgtctcattcctgcttttatgtcttcataatactaaatgccaaactgcacatgctgcactatgaattctgatttgtttctatgggattttatagactagagcatatttgaatacatatttatctttaagggtttagttccagaaaagtaggtcacagcagctatggatatttgtacaagattggtccctcctactctccactataggcggaaaaaaaaatccatgatgccacatcccttcttgggtagctaaggactgtaaaatgttcatattgttgttccacctatagggttgcagaccccttcagctccttgggtactttctctagctctattgggggccctttgttccatcctatagatgactgtgagcatccacttctgtatttgccaggcactggcatagcttcactcgagacagctatatcagggtcctttcagcaaaatcttgctagcatatgtaatagtgtctgggtttcgtggctgattatgggatggatccccgggtagggtagtctctggatggtccatccttttgtcttagctccaaactttgtctctgtaactccttctatgggtgttttgttccctattctaaggaggaatgaagtatccacactacccccagagctcgtgtctctacctgcatatgtagcagaagatggcctagttggccatcattgggaagagaggccgctcggtcttgcaaactttatatgccccactacagggccaagaaataggagtgggtgggtaggggagcaggatgggggagggtgtagggaactttcgggatagcatttgaaatgtaaataaagaaaatatctaataaaaagaagaaaaaactgggaagaaaagaagtatgggatgaaagatttatgtatcacgtgagaacctgcctcagttaccatgtacatacattgagttgattaccaagttctgtgaaaagatgtccaaaaaaaagtttctggaggaagagatgatattttctctagtggtgtagccactaggggactaaaggaaggagcttgaaatggagaaactgagatgacaaagaggaattgaaggctaaagacaataacaacaaattttataaatgagattgtcaaaaagggaaaaaagagtacacttagggaacagtttttcaa

SEQ ID NO: 2006 - DNA, 1000 bp, mus musculus
ctttaatatgggccacaccttctgctgtcagccgggcatggcacatgcctttaatcccagcactcgggaggcagaggcaggcggatttctgagttcaggcccagcctggtctacagagtgagttccaggacagccaggactacacagagaaatcctacctcaggaaaaaaaagaaaaaagaaaaaaagaaaagaaaagaaaagaacataaaagaaggaagctggccccctttcaaaaggaaatgagagacattttattagaattagaggaaagtaaacaggtcaagcaaaatggaggtctcagcagcttctagaaggaggcagactgtgttgagaggaagagagaaacctatgcattctaacgttcaagatcgcagaccagctcagcagtgctggagacctgagattgcatacacggtgggtgggggtggtcggctgggaggatggctcatttggagagcatgggagtgctctgagtagttgtagagcagactggcttagaactttggccagtgttcgtagagttctgcttcaggcaggcttagcagtgagggactgtaaacattaaagatgaatacttctagcttagtaagtacatatgccattgatagggggaaaaaccattttgtttaaaaaagaaagcaaaatctagccacactttgctgggaggagacagcttttccttgtcacgatttgccgggaggagatggctttccttggtgggcctccaccttttcaaatggcattttcagttttgagagggacagctgtggtgccttttacatgccatttcaaattctaaggaggaggagttctgatatttcccccttccttgaaactagtgtgttaccagggaaacaagctgctcctactagctgacctgctgtcagtttggagatgtttattttcctagttttcttcccaattctgtccattttgctgtggaatttgaaggttttgggttcgatgcagacagagctaaggccattctgccatcagag

SEQ ID NO: 2007 - DNA, 1000 bp, mus musculus
cctgaaggctcagctgcccagagagtcactaagatgagcaagtaactggtgagagaggaaagagagagaagaagacaactggtgtgtgcaaaatggtgagagatggaactagagacttgagggtagtaaggaaaatccggatgtgagtagccagcaacaccatctaaggctgtgctgagaaccatgtctgggtccatggccctgtagctgcaaggtttgttaacaccaaaggataagcagatatccctggtttgggcctgctgtctgagcagagctggccccacccctcagcagctgcaacacaacaccttgctcagtaagtatagtagagctggccctgtttgcaggaaagaggggaatgttgcaggtgagccagcactaagaacagaaactcaggattgctggtcctgttccactgagactggggtacagatttgctccccccacccatcccttgcagcctgtggcaagcaggctggagagtgagccctataccttgcctgggcagcacaatggagctgcctctggagtgagccagccctgagtgcctaagaactgggaaactgactctaccccttgttgtttgtgactttaggtgagccagccagggaagtgctggagagctcaccctaatgggttgggtgtggaagagctgatgggctgaccagatcagctaccaaccagtcccagatccagggctttgagttggtccatcccaacgtctaccccatctatgaactgatggaacatgtgaaggcttggctctgtagatccaagacagaaggatcttcatgacacagggcaacaatagtatatctgaaaggaatccagataaggatacagttttgataattggtggtgagcagaagccagaggtctctggccagaccaatgattcattgccacggacatttgcaagtaaagatgtgtggacaaaacgttatactttgggacacactgcaacatgctatagcttccacaacaagattcttttttcttc

SEQ ID NO: 2008 - DNA, 1200 bp, mus musculus
tcaaattttattcttctgaatgtgggcatccagttttcccagcaccatttgttgaagatgctttcctttgtctttatggtttagcatctttgtcaaataataagtggctgaagttacatactacggacttcgatttagttgtactggtctataggtttgctttgtgcctgcatcatattggtttttttttttttattacagtttctctttaacatattttgagacctgggaacttagttcttcctgcactgtgatttttgctcaggattgtttggtctaaccagggtcttatgtggttccacatgaattttaggatagtttttttttctagttctatgaagaatgaaatatatgctttgattgtgattacactgaatctgcaaatagcttttggtaaaatgaccatttttttcacattattaattctaccaatccgtgagaatgagatatctttctattttctagtgcctttatctatctctttcttcagatgtttaaagctttcattataggtatccttctctttcttgttcaggtttagtcctagatattttatttttctttgagactattgtgactgggagtgtgtccatgagttctttctctatttgttattgatgcacagaaaagtgattggtttgcacaattgattttgtttcttgtcacactgctggatttgttcatcatttataggtatttttggaaactcccatatagtctgcaaatagggttgcagtgtcttcttttcctgtttctgtccctttgctttctttctctggccctctcgctccagccagtgcatcaagcacagggttgaaaaggagtaggggtagtggccatccctttctcattcttgacatcagtggggtggtgctgagcttgtctccacttagaatggtgttggctgtggttttttcatgtagagcttttattgtgttgagctatgatccctctgtctctatcttctctagggctttttatcatgaaaacatgccagtttttaacaaaggctcttcctgcatgcattgaaataatcatgtgtcttttggttttaagttcatttatttggtttattacatttatttctattgtatgctgaaccatccctgtattccagagataaagccaacttggtcatgatgggtaatcttttgatacatgtctgtattctgttttaaaatattttattatacattaaaa

SEQ ID NO: 2009 - DNA, 1400 bp, mus musculus
tcttacaattatttaagacaggtgtgagagtgcatgcttttgctttcagcgcttgggaggcagagataggcaaatctttttgagatcaaagtcaatagtcaatctggtctacacatcaagtttcaagccagctagagttatacagtgagaccttgtctcaaaatacaaaaacaaacaaacaaacaacccacaaatatttgaatctattattctgtagactctggtaaaatcttccacataaatcttctcatttaatccataaaacaaactaagcaggatatagtaatggtgttaatctttacacaaaggcaaaggatgtttgacatcaagcctgaccacttgtggaaacaactccatgattcaacacacatgctgtggctggcaagtcttaccattctgtggtatgcgtgtgcacacacacacacatacacacacacacacacacacacacacacacacacacacacacacacacacacatttatttaaaacaattgacacaaaaagcagaattgaataaactctcagaatcatgcaggggcatttaattctcttttcatttccctgtttagctctacagacctgaaaacttctaaagataggaggttctgtatatcagatacctaaagaaagaccttcctttattcctactatctagctcagcttgtctcaaagaagatttataacagactatgaaaatgaaaccctgtacagtctacaactgacatgtgcttagtgttcaggcctgatgacccaacctggaagccatatagagatggatgcagaaggccaattccatgaagctgtcctctgacattcatttgcacagtcacacactcagagattctgctgagatgagagcaggtgggcctgcccactggtgcctggctggccagtccaccagtgcattgccagcatagtgtggattgtttttcttaatatttcatgcaacagggatccacatgactttgctttccaaaacctggtattaaaggcctgagccaataccacctggcaataaaaattttaaagaatttttatgaataattctgatgtgtataactttccatttgaaactttaaaaatctaatcctaagaatcatcctcactgttactgtcttaaccaagatatgaacacatgaacatatggcatgtttcccaagcaggattttacagagcagatatacacgggaattatgaagtaaagaaacatcatataatccacactattccccaaactgtgcctttcttctttgtccacttctacatctactattaactataggtatgagcactgtactggaagaaacataaaggatatgagagggaaaaatcaagcaataacatgggaaagctgactatgcaaactgttaaaattttataaaatggaatggacagca

SEQ ID NO: 2010 - DNA, 1800 bp, mus musculus
tggaaccaagatggcgaccgctgctcctgaggctgaggccacctcccgagccaggcggacacctgtcctctggtccggatggtggctggctgtctgcggcccgccaagggtgctgcctcagcggctctgtgcttccgcctgtcccagaagctgtctggttctctggtgcaccctttaacctgttcagactaatttcctaagttctgctgagtcccggaaccaagatggtgactgctgctgctgaggctgaggccgcctcccaagccaggcggacacctgtcctctggtccggatggtggctggctgtctgcggcccgccaagggtgctgcctcagcggctctgtgcttccgcctgtcccagaagctgtccggttctctggcgcaccctctaacctgttcagactaatttcctaagttctgctgagtcccggaaccaagatggcgaccgctgctgctgaggctcgttggtctcttcttaatcattgctattttcttagcttcagctaatccacatcaatcatcccagtaatgcaaaggttttgctttagtacttctggtatcttgttaatcgtagttgattcttcagccccagctaaccaaaaccacagaaccttcacaatcaaattagtaatggccctgagaagagtctttaatcttccatctgaaaatttcacaagccaggcctccatcatttgcactattctcaacattatcttcccggcttctacaaaacatccaacatagctcttaacacccaatggctctgctagcccaaagttccaaagtccttccacagtcctctccaaaacatgatcaggttgtcaaaggaatatgctgataccaatttgtcttagccagggtttgtattcatgcacaaaacatcatgaacaaaaaacaagttggggagaaagatttattcagcttacagttctacattgctgttcacaaccaaaggaagtcaggactggaactgaagcaggtcaggaagcaagaggtgatgcagaggccatggagtaatgttacttactgacttgcttcccatggcttgctcagcttactttcttatagaatccaggactaccagcccagggatggcaccacccacaatgtgctctcccacccttgatcactaactgagaaaatgccttacagctggatatcatggaggctcctttttctgtgataactccagcttgagtcaaatttacacacaacaccaaccagtacattttgtttaatgaagggaagaaacacaaataaaatgtggtatatcagaaaattcttccagttttgatgagagagaagaatcctggtgacattgatattcatagattcttcttgaatctatggcattcaagaaaatcctaggagaaaacctccacaaactaaggaaagatgcacacatacagatacaataaaaatgcagaaaagcaaataggctttccacagcatatcatacctaaaacaaaaagtgtatagaacaaggaaagtgaattcaaagcatcctgaaaagtgacctccaaaggaaaacccaccagaattataggtaatttctcgaagagaactttgaaagactaagaatcctggagcaaagcatttgagtcctaaaagactcagtgccaatatcctactaacatatacatcaaggccatctgctacgtgtgaaagagaaataaaaacactccataatattaacagcctaaaaaatgtatgtccaacaaaccacacctagataaaaatgcatgtagcttttaatttctctcttaatttgtcttgacccactttttattctgtggagag

SEQ ID NO: 2011 - DNA, 1400 bp, mus musculus
cactgagctgcatggtcatatctagtggattcttgtggagacttgactacatatgcatggttgaaggaatcgccagctttgggcgataatatttaacctccagcctctctcctctgaaattagtgagtcttaatttcacaatatcaaaccttaagaaagaatcaggaggaaaaagagggaaaaccaaaggcaaaggaagataaattggggtgagataagccattgtgtgcaactgaataataattcacacatgaaactttaaactttgagtaagtcacaaaaatagtatgtgtgtctgtgaatcttatggtgtgcttggagtccagaagagggcatggcattcttgggaagtacagttatttgctgtcgtgtgcgtactaggatttgaacctaagccttctggaagagcagccagtgttttaacctctgaactatctctccagactcaaagtttttctttaagagtgaatattcttgtctttcttttcttttcctttcctttcttttctttttctttctttctttctttctttctttttttttttttttttttttttggtgttgttttttgagacagggtttctctgtgtagccctgactgtcctggaactcactctgtagaccaagctgacctccaactcagaaatctggctgcctctgtctccccagtgctgggattaaaggcgtgcatcaccactacctggtgaatattctcttattgtctctcggtagtaatttctattatcataatgcctatggactttgtacatgggagaagataatatgaaaacttttattcttcttttcttaagacatgtttgtatacaatatagctgtattaaagctcttagagtgtactgagaagaaatgaatcgcttttggcaagttacagtatcaagtttctcataagggagaagaaagatgagaaatagccttcagaaaggcaccgagagtcagtgaagatgtgtctgcgtgctggagtacttatcttccccacacccttggagtgatccccagcaccataattaaaaataaaaatgtatctttcttctgaaagaaagaggaaagtcatttatatggcttcagcaaagagcttctgaaagcctgttttgacagaatgggggttctgagagcatcaagacataagatcaaaacgcccacaagactaagatgagaggagaaatgcctcccttgtgaaactcagccagctctcttttaagcaaatctcttgtaaagttttttttttcaattcagtgtctagatttgcacaatgtaaatccagagcagagactcattggacaatatattatttacagtcatgtctggaataaaaggcttacagttgtcagcaaagacatagtgagtcttcagaaatatttgttttttaaacatgtttcata

SEQ ID NO: 2012 - DNA, 1200 bp, mus musculus
gcaaaacagcccttatttggggatttcattcatttcattttagttcagagtttcatttaatctcaatgaatgaaaaatcaaacagtgaaaatggcgatctaacctgtatttggaaaagccagtctaacagtctcagcaccaaaccctgaggacaaggctcctgacctaccctttctcagcaccagtgtgctgatccattaaactattgtttctcctactgcactgcagagggtatagccgaggtttagaaagagaggcaagtctgagggttggatgtgagctgtatgcaacgccaaagagcagagccaccaagatccgcaaagccgcgcgtacagagacaatgcctccagcactgcagggactgaggactcagtactgccgcgcaggcgcaaagacagcctgccgaaacgcagggcggggcgctagagacggaagcagctttgaatgattcaacagacttaaactagaagttgttttcgtcagttcccacatggtctagcggttaggattcctggttttcacccaggcggcccgggttcgactcccggtgtgggaacagcagctttttttttttttttcttgtgacgtgctcagcgtttcacagtatgacatacaaacagtggtcaagctgttagattctgaaaaattccctggtccttagtcccctatggccagttgttacgaagtgaaaaacttagaaacactatcagtgaacagaggaaccacctttcaggacctgcccagttggagccctgctttctttggaaagaagctttgtgaaggggaatcgcaaaggctgagatactaagaaagcaaactcccagaagaaacaactttatggacaagtgcagagtaatacaaaaggcaactggagaggccacattcatttattcatctcctcacactttgcctaataacttacaggaaacaggcatggaagcagtctctgggtagaattacagttttagttaggctcaagcttccaagcaaagccatattttcagaagtgggagaccttgaaatcttcaatgctgcaaacaaatccaacttgcgtgtttgccatggtaacccaagcctgcatgtgttagtgcatacgtgcaattgtttcaatgtttgaaccaatccctgtgctattcgtagagcttaggtaaaccttgtaaccaaccgcaccatgctccagttgcttgccttaatgcagtg

SEQ ID NO: 2013 - DNA, 1000 bp, mus musculus
ttgacattactgtggccgttgtcactgttctgccaccacagacatggctgcagccatatcccttattgagacagtccatcgtacataataattccactcatgtcaacgtgtccatggctgaaggattggccagctggatcgccacagcagtctcccacctgaatgagtgggctgacattggtggacttgccatgtgtccaattctcattggcatcttggccttctggtgcatctgccgcgtacagagtcatcagcacagagcccaagccttgatgatacaggcttttgtggcagtggaaacaggataatctcctcaagtgtggcttggcatgctagagaagtagtcagtgatgggtaagactccctgggcgtgtcaccaacctaagacagggatcaaaccaacactgtttgtctcctgatgatgggtaaggggcattgccgcagggggcaacctaagacagacattctctctgccaatgagtaaagaaggggaggatgtgaggagcgggtgtggcagcagccccaatatggcgcccggaactgcagccaagtcttatgacttgcacctgacttcctcatacacctgaaaataagccgtgtccatcgtgagaactgcacagatgcaccatgatgcaagatcggaccatatgatgagtggtgattctggccaatgaactgctgttaaatggactgggctgatggggcatggtaggagggttatataaggtattgcaattgggggtggggagagagaaaaaagaagagagatttttttttcctgcatacatgttgaaaggttcctgaataaactgctttgagaagaacgctgtgccgtcgctcttttctgctggtcagagacagaagcgacaactgtgcttttatgaaagtgggcttaaagaattgctttctgttacccttatgtgaggacacaacacttggtggacttacaagaatccatcagactggcacttcattttagacttcttaactccagaaatgt

SEQ ID NO: 2014 - DNA, 1000 bp, mus musculus
ggtttggttagacatgattcatgttgcattcaatattagtcaatgcataaacaaaaaattcactaaaaaaatccaagtacaggaaaagagtactcatttatagttcagtaatatacctgggggaccattagcattgatgtttgctaggtgaggaagtgtcactttaaaaaaaaaaatgtgaccactggtaaaaatacagagaacatattttgactaaagagtgacattatggttccaggactccaccgagactactctgcacaggtgagagtgtggactacagaagctaacagcttctgggacaggcagaagccacagagcttctgaggcagcccccttttaaggctccagacatccgggcaccttccctgccagaagataggtgtcagtccagcccgggagggctttgcaggagcacctacgggagccatcttggttcctggatacctgtgagactagtctgtgcaggtgagagtgtggtctacagaagcaaacagcttctgtgcaggcctaagcaacacagcttctgtgacaggttctgttttgggccttcatcttcagccaggagggaggtctgaacaccagatatctgtgcaccttccctgtaagaggatagcttgcctgtagagagtgctctgaccactgaaattcagaggaaagatctagtatccaaggtctgctgatagaggctaacagaatcatgagaggaacaatctctaaccagagaaactataacaactaactacagagattaccagatggcaaaaggcaaatgtaaaaatcttactaagagaaaccaagaccactcaccatcaccagaacccagtactcccccctcgcccagtccagggcaccccaacacacctgaaaagctaaacctggatttaaaagtatatctcatgatgatggtagaggacatcaagaaggactttaataactcacttaaagaaatacaggagaacactgctaaacaggtagaagaacttaaagaggaagcaca

SEQ ID NO: 2015 - DNA, 1000 bp, mus musculus; identical to SEQ ID NO: 2014

SEQ ID NO: 2016 - DNA, 1000 bp, mus musculus
tggaacatttataatatctttgtgttgatgaacttaaattcacaagacttttaatcttagaaaccactgcatgaaatgtatttacaccagcaaggctacaccatcgaaaccataccaaacaaatccacagcttaggaaccaagtgacatgcccaagtgaggatgcctcagtcccacttgggagagagaagaaagcaatcacaagttgggagggaggaaggatcttagaggaaaagtggatgggatgtggggggagtggggcagagtggagaacctgatctggtattgggtgagggaaaaggactgaagccccgaggaccagcagaaagaatgtaaacagaaatcctaaggaaataggaggttgggggcatcccccataatgcaccagagacctgggaggtaagagaatctcaggactcaaagggaggggctttagatgaaatgcccaagagggaacttatagagcccacctccagcaggaagacaggacatcaagtgagggatggggttgccatcccacagtcacatctatgacccataattgtacctgtctgaaggaattacagggataaaaatggagaggagcctgaggaaaagaaggtccagtgaccggcccaaaatgggatccaattaaaggggaggtcccaaggcctgacactattcctgacactaggagcactcacaaaaggggatctatcatgactaccctttgaaagacccaacaagcagctaaaagagtcagatgcagatatttgcactcaactgatagacagaagcagccgacccctgttgttgaattagggaaggctgaaagaagttgaggtgaagggcgatcctttaggaagaccagcagtctcaattaatctggacccccaagatctcttaaacactgggccaccaaacagacagcctacaccagctgatatgagggccccagcacacatacagaagaggacttctggctctgtgttcattcagagatgatgcacctaacccccaag

SEQ ID NO: 2017 - DNA, 1000 bp, mus musculus
ttgggcatatctccaaaaaaaagaagtccatatcatactatatagacacttactcatttctattcattgcatgtatattcatattagtaggaagaagagacagcctaactgcctataaatgaggaaatggttaatgaaaatgtggtacatcacacaatggaatattactaaactgttaaaaagtaataaaactcagagaaatgcagcagaaaaaactcatcctgagttacccgttacctcccacacaactcagaatattgcctaagctgttgattgctcttcacaaaccaatgatagctctaatgcagattacacttacatttttattaaacatagaaaagataagcaggtgcctaactaaaacctttaccttctgcatagtgttgctggcattgaaaattattccgaatggttcctgaggggaaatttaaacaacaaacccagctctatactctttgatctgccacagacaggacagctgccaatatgatactctgctgtaatagttgcccttttgagggttaagcaattactatctgactggattagaggactactccatgagacaaaatacatttttgatgtagttctcatggcaaaatacctgagaataaggtaaaaacatgtaccattgtctgcttatgatatggaccaatacaaacattctgttatacccatagttcattataccattgcaccttcatcatagaagctaatatatacattagatgaggccagatacatagacctataaccggacaatgtgcagagtaaaagactttggctcatccaatcataattcatatattgctatgcaaactcctccttcatgactcagtgaaatttgtagaatacattgtagaatgacactaaggccaatggtgtttggagcaatgccaacaaggtaacaactcctaccagacattatagggctgatgcatatatgaaatcctacagagaatgacacttgcacagggtctgtataggtcaaagttatttg

SEQ ID NO: 2018 - DNA, 1000 bp, mus musculus
cccactccctggacatccagtatcttgaggttaggtgcatcttctctgactgagtacagaccctgcagtgctctgctgtatatgtgttgggggcctcatatcagctggtgtatgctgccttgttggtggctcagtatctgagagatcttggggtccaggtgatttgagactcctggttcatctatagagtcaccctcctacacagattcttccagcttttcccaagttcaaccacatgggtcagcagcttctgtccattggttgggtgtaaatatctgcatctgatatctgcatctttcagctgcttgttaggtcttttgaagggcagtcatgataggccccttttttgtgagcactccatagcatcagtaatagtgttagtttttggggcctccatttaagcaggatcccactctgggcctatcactggatctccttttccttgggcttttctccatttttgtccctgaagttctttaagacaggaacaaatatgagtcagaatttttgactgtgggatggcaaccccatccctccagttgatgtcctgtctttctgctggaggtgggctctacaagttccctcttcccactgtaggacatttcatctaagattccttcctttgagccctgagaatctctcagctcccaggactctgatacaatctggatggtcccccacctcctacctcctgaagttgcctgttcccattctttctgctggctttcagggcttcagttttattccctccaccaaataccagatcatgttcccctgtcctctttcccatccaggtccctccctcctctcccctcctgaaattgttttcttttttgtagaggtttccatcaaccttcctgtttcgttgaaagctagatggcgctgtgagcacagacataatcacttcttcaaacctggcttcaggttttaaggacaagaatcaaatctgtgtctaggatctgtgagtattgaagggactttctgctgtgagaatacattt

SEQ ID NO: 2019 - DNA, 1000 bp, mus musculus
taagcacagccttttttttatacttgggtctctgaatttttttaactccagattttatcccagtccaccctttgactattcaacattccataccttctccctcccatcctgcctccaagaggatgtcctcccactcccaccccaccagacactccactatctggggcctccagtctctgagagttaggcacatttactctgattgatacagtcttctgttgtatctgtgttgggggcctcgtaatagctggtgtatgttgcctgtttgatggtccagtgtttgattgatcttgggagttcaggttaattgagactgctggttctccttacagggttgccacagcttcttccaggattcctctaactcaaccacaggggtcaagtagcttctgtccattggttagatgtaaatatctgcacctgactctttcagctgcttgttgtgtcttttggagggcagtcatgataagtacctttttgtgagcactccatagatcaataatagtgtcaggccttggggcctccccttcagctggatctcaatttgggcctttcactggacctcctttttctcaggctcttctctatttattcccctgtagttctttaggacagtaacacttatgggtcatagtttttgactgtgggatggcaaaccctctttcacttaatgccctgctttgtgctggaggtgggctctacaagttccctctccctactgtagggcatttcatctatggtccctccctttgagttctgtgagtctctcagctcccaggtctctggtacattctggaggatccctccacctcctaccttccagggttgcctttctccactctttgctggctctcagggcttcagtccttttctcctacccaattactggtcacactcccctcttcccctccctgtccccttttgaagaggtttccatcaatctttctgttttgttgaaagctagatggcgctgtgagtacagaggtaaccacttgttcaa

SEQ ID NO: 2020 - DNA, 1000 bp, mus musculus
gaaaactatgaaatgaaagaatccataaacattactagcatattaagcaaaatgtttccttatgttcactaaaacctcctttctcctcatatttaggcagagatattataagtggagttgcagaaatgtttttaaaaaggtgtagcaaataacattttaaataacctataatgtccaaatcaattgacatatatatatatatatatatatatatatatatatatatatatatatatatatatatatatataaaaccttaagtttaaaatacttggtaaaatcatgaattattcatttgaaagagaatactaaaataaattcacttaaaataaaaagatcacatttattgaaattcatatgaaaagactcaactaatggaagcacaggcttggtatgctcatatagttagcatggagctgatttccctgccttgttctcagagacatagcagaggcctacatcattagctgcctgagcacctaccaggtgtgccaggagtgctaggtatgtgtagcaaaagggccccccaccatcctagatctctctctgttctcctgtttctctctctgttcctggcatatgatctttctctactcccctttttatctgccctccctgaactgctcctttttatctgcttatctacatgtgcacttctctgcatctatcccttgctcatattcttactcctcaatcctccccaataaatccctttcataccagatctgctgcatggcttaatttctcaggggtgcacattcctggactcaccaaagttaccctctcaaaacattatttttcacatatacttttgacatacaaaaagtgtgcttatttagtcagtcaattttcaaataaacacaactaatttctatgtttccccccccccagagggactgtaaggcacagcaaacagcatttgccatgcagacccagagaggcattacaaataggtcatttgtgtttattggtgccactttcttagactcacagatttcta

SEQ ID NO: 2021 - DNA, 1600 bp, mus musculus
agtttaattttattcagttgcaactgctggatcacaggcatctgcgcatctcatattcagtataaatattacccaacttttcctcctatataccatgcctttgaaggtatatgcgtggcaaagaaatcatttgtagttcatttctgattcctttatatttctttcttattagatattttattcatttatatttcaaatgttatcccctttcctggtttcccatctgcaaaccccttatcccatcccctcttacccggcttctatgagggtttttcccccacacagccaccattctgccccaccatcctggcattcctttacactgtagcatcaaccctgcacaggaccaaaagtctcgcctgctattggtgtcatataagggtccctcagctccttagtcctttccttaactcttattacggttcctgtgctcagtctgatggtggcatgcaagtatccacatctgtattggtcaggatcgggcatagcctctcaggagacagctatatcaggctctggtcaacatacacttcttggcaaccacaatagtgtctgcatttggtgaatgtatacgggatggttccccatttggttcagactctgtatcgcctttccttcagtatctgctccatgctttatccctggatttcttttagacaggagcaattatggtttaaaaatttggaggtgggtgggtagccccatccctcacactggggcccctgggtaacctctggatatggtcttgacaggttctccctcgactttgtagggtacttcagctaatatcacccccatggggtcttgggaggctcttgccttgttggtatctatgactttctggttcctacatccagttccccatctcccaatgctatacacatctgttcaatttcctgaccttctatacagctcctccatttcttcccattcctgattcttcctctatcttcccctccccctcttctcatcctccaaatttcctctcacactctatttcccttgataattttattcgcccttctaaataggactgaaatatccacctacactttggtcttcctccctcttgagcttcatgtggtccatgagttttaccatgtgtatttcatactctttgcctgctatcaacttattattgagtacataccatgtgtgttcttctgtgactgaggtacctaactcaggataatattttctagatccatccatttgtctgtgaatttcatgaggtcattgtttttaataactgagtattattccattgtataaatacacaacattttatccatcaattcctttgttgagggacatctgagttgttcccagtttctggctattataaatatggctgctatgaacatagtgaagcatgtgtcccgataacatgttgaagcatattctgggtatatacacaggagtggtataactgggtcctcaggcagtagtcaattttctgagtatttgcaagactaatttccagagtcattgtacaagattgcaatcccaccagcaatggagtagtgttcctctttctctatgtcattaccaacatcttctatcacctgagttttgatcttagccattcggaactggtgtg

SEQ ID NO: 2022 - DNA, 1000 bp, mus musculus
attacaaggatattatttaacagtaaatcctcatgatatccttcaagagaaaaagaatatctaagaagtagcttatatatccacatgcaaattctttagtctcatgaatgctggacattttttctaacagagccaatgataaagtcaaaggtcaaaactaaaaagatgatatacagtgggtcaagaatttgaacagagatgtgtaggaatggagaaatcgagaactgggagtagccatgagcaagaacagatgcctcgaaggcaagaggcttctaggacccaagagggattagtttagatgaaatatcaaacaaagtggaggaagaacctgtagagaccacacccagacactcgaggaggcacctggtgggggatgtggcgaaccactcatctccaaatttttaaaacagaatggctactgtctaaatcaaataaaggaacaaaggttggagaagagactgaagggaaggtcacacagagattgctccacctggggatccattccatatacagacactaaacacaaacactattgcttatgccaagaagtgcttgttggtaggagtctgttatagctgtctcctgagaggatttccaatagcctgacaaatacagaggtggatgctcatagtcaacccttaggctttggtcaacccaggagaagggataacatttaaaatgcaaataaagaagatacccaataaaaaataaaaaaaaaggaaaaataagaaagtggatcatttgaaaaatgcaaagagtcagaatgagtggggctgaaaagacaggcactgatggaaggattatagaatatctgtctgagaaatgttgatccccaaaaatgggactccagaggctgcaattttgaggtactttaagggttttttctaaaaacattcatagtcagaatttatggtgatcagatcaccatttatgataagccataagtttataaatcatggttggaatagatagggatgtcaacagtaccctatttagctaa

SEQ ID NO: 2023 - DNA, 1600 bp, mus musculus
catgctctctcttatgcattttatttccagagagtaattaaacttattacaataactactacaattatgatagtcaaaataaactactaattttaacactaatagaaaattgtgagctcattgttactaagtgtagacatatgaaacaatataataaaagatttcaaaggtataaaattgagaataaaatatcataataggtattaccctaggtaaaatatcatcctaggttgccttgaaagcttatataaatgtaaataaaagtgtcttacctgcatgagtaattctttgagcacaaattttccaaagaagctatgcaaaaaaaaaaaggaaataaaaaataaaaaaagatcaacatgttaagccttatgaaagcacaaatcaaaacagtcttaacatagactgtatgactctaagagctctaatctaagtgaagaagcaaattttgaaataattttcaaatgggtaattcatctaagaaggtagaattggcaatttaatttactctatattctgtatatggtgtttgcatgactttgaaagttttcttatgtctttcacttattttattagaatttcatgtttgagtattaaatttaccaatatttctaccacatcaaactcttcctgtaattgtaggcacaattactcatcatgtcttcttctcctcctcctggtgtttctggtcctccaggtcctccagatcctccaagtcccccaggtcctcctgctcttcttgctcctcctactcctcctattgtttcccctcttacactgctgttgctgctgctacagttcctggcactgctggcagtggtggcactgctgttgctcttcctgctgctcttgatcctgctgctgctgctcttgttgctgcttctgttgctgctcctgttgttcctgctgctgctgttgttgttgcaggcgctgtctctgcctctgtaatttaaatgccaaatataggtaataggaataccagattttaaaccctcaaatatttcaccatgcaatcatcacttgtttctctgctcagaattccagatgaagatcgatgagctttcctagaatatcagaagttcatgtctccttttaggacatcatattagtttataggattgatttcatagtgttatccctagaaaataatatattttcttttggaaatataacaataattttaagaaaaacaaaattcaaaatctaatatatgtaattcaaaaatttaaatttcacttaaaaagaaaacaatttgtcacactatacacatgcaaaaatgataagtgtttacctttcaggaggtataagaagttattcataaatccaaatctgattcatcataataattcatcataatttattctctgtctctctgtctttgtgtgtgtgtgtctctctctctctccctttccctctcctcttgctctccctctctctctagctctccctctctttcccccctcctccccctccccctctcccctccctctctctgtctctatctctctgactcatatatttatttaggctttgaacacttgtagaagataaattgaacatcagtgattgaaggagatggattcaaagtgggtatacgcaatag

SEQ ID NO: 2024 - DNA, 1000 bp, mus musculus
aggacccagatagagctgtctcttgtgagactatgctgggacctagcaaacacagaagtggatgctcacagtcagctattggatggatcacagagcccccaatggaggagctagagaaagtaccctaggagctaaagggatctgcaatcctataggtgtaacaacaatatgaactaaccagtaacctcccccaccccctgccccggagctcgtgtctctagctgcatatgaatcagaagatggcttagttggctatcattggaaagagagacccattggtcttacaaactttatatgcctcagtacaggggaaagacagggccaagaagtgggagtgggtgggtgggggagtgggtgggggagcatatgggggacttttgggatagcattggaaatgtaaatgaaataaatacccaataaaaaaagaacattaaaaaataaaaaaagatagttcatcaccaaaaaaaaaaaaaaaagaatagcacaatagtgaagttatatcaaattgaggtaaagtcttctggaaagtgtttcttaaatgtcaacacacagagtggttggaaaggttgctcagtggttatgaacatagaatgttcttccagaggacaagggttcaatgtacagcacccacatggcagctcacaagtgtctataactccaagatctaataccattaccaaacatacagggtaaacaccaatacacgtttaaaaaaaaacgagtcaacacacagatgtgttccatgatcttttaaggtgattcctcctgttagcagccaataccagtactgtaaatgtcatacagctctggatttgaaggcatgagagctgtagggcaagtgtgagctgaaagaatgggactggaataggagtgaggttggtaggtttctaaccccctaaaatcacttcataaaactacagtcttatcttgacagcagcaagaataaggactccctccctaaattctttgcctgaatgctgcagggcatatagccccacaa

SEQ ID NO: 2025 - DNA, 1000 bp, mus musculus
ccagccgggccaaataattacctcttaatgagaaacattgtctttcagctcatagtgtcagagacttcagtgtatgattgactgctgctaggcttgtggcagacaacaactcacaggaggagcattcaagggaggataaaatctgagaaatcgatgaagggaagcgaaaacccaaaacgatatcctctgtaagtttagctaaaggtgatctagtcattaattgaactcataatggtagcatagcaatgtacaacgtgaaaacattttttcattggcttcatgacatagcaatgtgctatattaattcactcttcaactggaagacgccttccatacttgaaatatgttttatactaggtcattgtgtgtaatatttccatgcattattgcagtcagtttgcttatcttttgaaatattttgcacttatttcagaagaaaataatttacctgatgaaggactaatatctgaaatcatataataaatatggaactactgaagctcaaatattccagctcaaataacaggtgagccaactgaatacatatttgtccaagaaaactagtaaatatgcagtaagcataaaagtgctttaatatcagttagagagatggatcaatagatgaactccttgccacacaagggtaaggacctgagtttggatactcagaacatatacaaaattcagactgggatagtctgattctgtaaccccagcattactaccgtgatttacaaaccagagacagtagaatccctagatcaatctaggccaatcagccttacaaaaccagagacagttaagagatcttgtctcaaatgaagtggaaggtgagaactaacacccaaggatttcttctaacattcacaattatgctgtggcacatgcgtgctctcattgccacaaaaatgttcacatacatacatacatacatacatacatacatgcatgcatgcatgcatacacatgcacataataaacaaacatacataaacaaaat

SEQ ID NO: 2026 - DNA, 1000 bp, mus musculus
ctgaactgagatgtgcacatttgttatgcttttctgcacaagtctcctctatctgtgaaaggacaacataaaccccatttgtcctcatttaaggaccacatttgtctccattttgaggaccaggactgatttccagacaggctgtaagggcccagtttcagaaatagaccacaagtcgcagaaattagatcctaagacgccagctctaggaacagaccataaaatcctgaacaagatcataaatccctctcccaaagatcagcctggggataactacaaaaaatggggaaatatcttatctcagaatgggacatctgagctggacagccctatttcatcacatgaatgaaggctcatggaataggactggagaccacctgtgaccccctagtacccaccaatgaaattttagattccttaatccttctagagtcctagggttccctataagaaggcatgcttgcctttatctgtcattgccatttcaaagaatgattgacccccgcatgataattgtttctgtagaataaaggttctttgtttgggcatactgagtctggggtcttccatcagcgatttttggacctttacatctgtacaataattattagtagaaaaaaaaagcaggacaaacatttctgactaagttggtcaatgattttttacacaaatctcaaagtcaaatcaattgtgaatcgcatgaaactacaaagatttttttccactcaataaaaatgatcaatagcttccaaactttatcaagaattacacagagagtgttgaaatatatatttgccctttccttataagtatgaatatacatttttttcagttaaggttctggtccacgtttgatataggtgatgcaatctcagttatgttctgaccctgacaatggaaagaggagactgaaagatccagataatgactttagtttagaatcaggccacagggctaccctctgctcaatgcaaaaacaacaccttcttattccagttct

SEQ ID NO: 2027 - DNA, 1200 bp, mus musculus
aaggatatataaacctaatggcttccattatcaatgaaaacaacagagatttaccctctaactgtaaagccaacctggcccttcgatggtaatctccatggatttcctggagatgatttactttctaccaagccagctgtactaggacagtaggaaacatggcaatacaagtgagttccatgaacaaaattccaacctctacactgttttggctctgaatttctagattagaaataatgttatcaacaagatccttccggtttccatctgtgctcagagctgagcttgtgtcatagctctccttacccaaataccagccaggagtgctgcaatgtctgtgagcacaggtacatccaccactttcaattgaaggaacctgggccagatccctcaggacacaggaacaaaggagcagcctaagactggaacattccatttttcatctatggccagagctgaccctatgacagagctctccatacacaaatactgcccagagagagctagtttcccaggagtattgacacacctgtgagcacaggtaagaacaccacttatgctcaaattcctggcccaagagtgacctgttcatagctatcaggacacagaaaccaagggataggatccttcaaggttatatctgcaccctatagctgaacctgtaccacagctcttcaaattcaaagtcctccctgagagaactggtctcccaggagtactgacacacaggcttgcagaagagaaaagctatagttagatacagcaagaccagctaacaacaaagacaatgagatggtgagaggtaagagcaagaacataagcaacagaaaccaaggctacttggcataatcagaacatagttgtccaacacagtgagtcctgtacaccccaacacatcagaaaagcaagattctaatttaaattctcatctcatggagactttaagaaggacataaataactcccttaaagaaatacagggaaacaggtagaagcccttaaagaggaaaaacaaaaatcccttaaagaattactggaaaacacaatcaaacaggtgaagaaatggaacaaaaccatccaggatctaaaagtggaaatagaaacaataaagaaatcagaaagggagacaaccctggagatagacaacctaagaaagaaatcaggggtcataaatgcaagcatcaccaacagaataaaagag

SEQ ID NO: 2028 - DNA, 1000 bp, mus musculus
acacactctgctcatgcacatgtctatccattcttacccataatgagcatacatacaatgtgcacaacccatacccacaggcattggcatacagaagctcacacacatgcataaactcacatgggcatacacacacacacacacacacacacacgcacacacacacacacacacacacgcaagaattgcgtgtgaacatgctcatcatgggtgtgtaaacacacatgcacatgacccacggcctgactagagtcaagtgtagcacagagtatgagatgtaggctattttattatgttttattacttgttcatgtccatttgttctggcaccatttgttggaaagtctctcctatctcattggattgctgtcctacctgtgtcaaaagtcagttgtgtgcttcctgctacattgatgtatgggtctatctttccatactcattaggctaccctgtctacatctacccacttgtttggatttccccatctgaattttgttatcttgatacgctctaatttctgcaggatgcccttgctgtatacaccatttctgtatacatctttttccctctttccctggctatgcacttcatcgttctgcacgacataaacacacacacacacacacactcacacacacacattcaatcacatggagccatcccattgcttccttgcaaaatccccaatgctcctggggcttgctgccatcccataacatccccaaagcctcctgtatcctctcctgtctcctgtctagggtgatgaatctttataagtgcctccccactatcctgcttctctctaacactaaacagcatgtaaggtacctactttaattttttagactatcagcttggctactcctagaagtcagaccatgcctaatttgggagtgtatccatgtcacatggcacaaagcaaggactcagtgaaaactgactttctgaaaggcatggaagaggagcttgacagtactgttggggcttttctctgtgtca

SEQ ID NO: 2029 - DNA, 1000 bp, mus musculus
cagtttttttttttttttttttttttttttttttttttttttttttggtggttgttgttggtttttgtatttgtttgtttatgtggcagggaacacacacatgccacagagtaaaaggccagaggacagcttgtgggagttactgctctgcttcgatcataggggttctgggggttgaattcagttcatcaggtttggctgcaatgcctttactcacagagaaagctggttctgggttatacttttcgtgcttgccctgaggtttcctggagttgaactcttgagactggtccacctcagtcaattggagcaatgttaggctcctaagtggtcagtgattccccactgtccactccacccacacctacatcctctcgcagcctgatttctgtagctttatttccctaagcaccatcccttgaagctgcccagctcctggcagacagcccctgcctggtttatccttgttttaccacccacccactctgccacagtcttccaccgtggccaagccgtagtgttcttccttgatgactccagctaaggtgggctcttaccctctcatcccttgacctcaagttgttagtcttgtttgtacctcagcatggattcctgctctgtggccccctcagatgcctgcttggcttgctctatgatttattccattgtctgtttatataccagctccctgacccccccctccatatgttggctctgcttcccgattgttaatggagctagtgtctctccttagcacccaaacccattggctcactcatatatgcagcactcattgtttcttgtctgtctcttactactcaaatgtaaagaccgttcactcctgtatccctagcgtctagaactgtgcctggcacatggcagatcctcggtgctattgtgggatgaatggatgcctgaaccccaagggcgttgttatctttgcctttccctataactacggctggaaccaaatggtcttcatatttggatcctgatacct

SEQ ID NO: 2030 - DNA, 1200 bp, mus musculus
tcttatcttgcccatctactctagagactctttcctacgcaggcacaagggaccagagggcctgcggcacctctttaactctcacagtactcagctgctttcctaaccaaagtcccaacttcccaaaatgcagcaggatcaggcttgtcacagcaatacccagctcctggaactagcttctgtcttagttatttttctacttttgtgtacagagaccatgatcaaggacacttataaatgaaagtatttaattggtggcttgcttacagttctagaatgtgagtccatgactagcatggcagggagcatgcatggcagcaggcagacaggcatggtgctgaagtagttactgagagcttgcaccacgatgcacaagcagattgagagaagggggtgcaccaagtggcaaagaaagacagagactatgtctggcgtatttttttgaaacctaaaaacctgctcctggtgacaaaccttttctaacaaggcaagaccttctaatccttcttaaactgtcaaccaacttggaactaaatattcaagtatgtgagcctaagggaagccattctcattcaaaccactgaataactagataggctggttattgtatgggtgactgcatatataggcagctgagtgtatgggtgggtgaatagaagggtgagcaagtaaatgaatgaatgtatggatgaataaattggtaaatgaggagatgggtgcacaggcacatggataaatgagtgatgggtggatggataagtatgtgagtagctaaatggaagcattggtaaatagacagatgggtggatgcgtggataggcaggtgggttttgtggatagataggtagataactgaatagtgaatgagttaatgggtgatcaggtacatgggtagacaggtgaaaggaagagaaaatgaaagcagagagaagatttgctttcattttcccaattatctatcacagaggccaacagttcagactttcttgccctaaattcaatgaatattcatgtcggtccctcttgccacactgggatgaatggcttggctagcatttggatcatgtctaggcttcaggaccaggcaaagtagctaacacattcattagcagaggtggagatagggtatggagctgtattggggagagcagtgatagtaatcgaaatttctggtttctttggagattcagttgtatcatg

SEQ ID NO: 2031 - DNA, 1400 bp, mus musculus
aaatgagatgcctttttcttatacataaaaacaatttctgagtttacaacataaatcaataggaaaccagaatttgatatattatactttctctagaagcaactggtcaagaatacatttattctacaaaacaatggataatttaattttcatatcaattctatgtacagggcttgtaagatgttgagatcatttattacttcagtgataattttgtaaattttttttatcatagtcacccctcccttgactcctcccagattcaccctctccccttccggccaactttatcttttttttagacaaagtcatcctctcaacttatcaagttcccactacagaggcgtctaaataggcacagtttctgtttccctttaaacattcagtcttcaacacataggtctaaactagctatgcccaacttaaccataggtatccacgagatgagagctaggagattttatgctatttctcatcttgcatacaagccttacttaatatttatccctctgtgtgcttgtgaagtagatcctccttcctctacatgccaccatgatgtatcatcctttccaatgatgggatacttattttaacctcccctattttatcaaccatcctaatgtactacaaacctatgtaggccttatatcttttttgctaagcagtctctgtgagctgaaacgaggacttaacttcaagctggactggactggactacggtaatgacacacattaacacccaattctccagtccaccaccctgccactcactgagttgtgtctacagttctatctgcattcaggtaaacttctacactgacctatgaaagcacattttcagtactgtgaagagtctactgagcttgcagaagctgttcttaaaacctctacaaacttcccagtgataccatccttccatactgaacatgctctgaacatgaggaatgagaagctgactataatagtctctgaaattcttttttcttcttccctctaaatcaaagtcagtcaacttttcttaaaactatagacactataggtgtgtgggttcatttcagggtcttcaattctattccattgatcttcctgtctctgtaccagtaccatgcagtttttatcacaattgctctgtagtacagcttgaggtcaggcatggtgattccaccagaggttctttcattgttgagaatagattttgctatcctgggattttgttattccagaagaatgtgcagattgccctttctaactcagtgaagaattgatttggaattttgatggggattgcattgaaactgtagattgctttctgcaagatggccatttttactatattaatcctgccaatccatgagcatgggagatctttccatcttctgagatattctttgatttctttc

SEQ ID NO: 2032 - DNA, 1000 bp, mus musculus
taccttcacagtgaaaaggtggggaacaacccgcagccaatggcatacgatcaatactggcgagaggaggggtgtgtgggctggacagcagtttctcttatttctttatcccatctcatctttcctctaacaggactacttgtcagatgtcgaggccgggaaccggtttggagattcttgtgtgatcgtttgagggtgtatggacatccacagagtgtcactgcttagccagtgtggtccatcttgttagaccatgactgtgcatgcatggccagtcagaagcctctcaggaggtgacatacatgctggcaacactggggaatgggccacacatgtcctgggtcactcattctcttgacttcctttactatgttttatctttcatcgttctaacaaaatatatgaatctgggtgctgtaccttcagtgtatccagtaggctttgtcagtaaggttttggtctccaacagggcatccctaggaggtggaggaaatcttaggggtggagcctagtgggagccaagtgggacctatctattaggtcattttggatgttgtcaaggggattgaggaacaccagtctcttctcttcttttgtcccctgtcatattgtgagcttggttgtcctaaataggggtcccatgatcatgtgtcatcacaggccgaaagcaatgggtccaattggtcacggaccaagacctccaaaactgtgggccaaaataaggctttcttctctataaattgattatctcaggtctttttgtgtcgtgtgaaagtctgagtaacaaacttggtaacttaaaaaagaatagcttatgtgcctcatggatctggaggaggctacatgctaagagcagggtgccagtatcttgttggtacctggtcaggcatgtgatgtagtgatgcagaacaagctcttaggaaggggaactgagcatggcatctgagcctgccacatagaatagggctcacccacatcatgcacaccagccagtgtggtc

SEQ ID NO: 2033 - DNA, 1000 bp, mus musculus
aagagtacagtacacaggataaagtggtgttgatctcgggagctcttgggtttctttacataagcaacaacaacaaaagaatcttacctcagtaaatacatgtaagaacatgtttgaagaaaatccagctctatttttgatcgtaagagaaaaagacaaaaagctccttaatttgtcaaaggcttcttatgaaaacttccaatgaacataatattaaaggtgaaaggctaagtgcccccacactaaggtgaaagcaggatggaaatattgctgtcaagaaattttcattccttattgcatcggaagctcttgtctaaccgtcaggcaaaagcttacattagatcctcctattccagtccacttacccccatccatctgtaaatatctatttttatttcccttctgagggagacccaaaacccccatgccccctccccagtctcttactctatacccaacctctgtggttatatggatcgtatcctgattattgaagactcaacagctaaatattttctttattacttgtccattggtggatatgtaggttgtttctaatttccagctattataaacaaagcagcaatgaacatgtttgagccaatgtctttgcagtaggatgtagagtcctttgggtacaagatcaagagtggtacagctacatcttgaggtagatctattcccagattcctgaggaaccaccgcactgatttcaatagtggcagtacacctttgagactcctccagcgacaaaggcgcattctccttgtcccacatctttctcaccatgtgctgtctgccacttgcattgttgatcttgccatcctggctggtttaaagagaaacctcaaagtagttttgatttgcatttccctgatggctaagaatgttgaacatttcattaagcatttctcagccatttgattttcctctgttgagacttcttggtgcctagtgacctacttccttcaattaggccctgccttctaaagcttcaaga

SEQ ID NO: 2034 - DNA, 1000 bp, mus musculus
ttactctgctaataacaaattggtgccgagcacaactgccatcagaagtattatcccacaactaatgggcacagatgcagggacccacagccaaacattaggcagatacaggggaaccctacagaagatggagaggaaagctcataggagccagagggtagagaacaccaggaaaacagggtctacagaatcagctaatcagttcttataggggatcacagagcctgaagcaacattcacaggctcgccatgggcctgagctaagaactctgcacataccttatggttgtgtagcttggtgttcttgtgggactcccaaaagtgggagtgggggtgtttctgactcttttgtctgactttcagaccctttccctgctacttggttgcttcatccaaccttgatatgagggtttgtgcctagacatacggaaacgtgttatgcctcaggcagttggtatgactgggaggcctgctcttttgcagcagggaaaaggaggaggaatgagtggacctgggggcggggacggagggaaagctgcagttgagatataatgcatgagagaagaattaagaagcaaagactgcacagaacacattatgactttggtgcccttttaggatatcattaaccctgacgtagaacactaacataaagaaataaaaattcatgtttgggcataataactgagaggccaataacactcgagttggaaaattgggaggcaatgtagatggatgtgctttatgttggtattgtctaaactctaaccccacagctcctgacaggagccaggtatgctcctccccacagttacctgcaacagtcaggtaggcctcgcccactataaaagggctgcttggcccttcctctttctcttactctcttgtctcccttactcttgcttcctgcttgccccttctctccccattcccttcctcccctctcttcatggcagcttccacttctcttcactctcctttctctgactttctttgccta

SEQ ID NO: 2035 - DNA, 1000 bp, mus musculus
aacagaggtcatcggagagggacagggccttgaggcctaagggaagcttggtcaatgtgtcctaagttgtgagagaggaacaaggaatgtggtgtttagttgtcaccacagggtgaccacatggagcactactgtactgtatggtttaagattctacattttcataagacctgattttttaactcaataaatgtatgctaagacaaacatatttaacatgatttaagtgtgctttatcagcatgtattgaaatttcacataataccctgaaagtattcaaatcttcatatttttatgtatccattaaaattttaaaaattcaaacaatactcaaactaaatctaatataattggagggaaaatggaaaaaatgcagaaaccagtgaaacaatttgtaaaacacaagaaaatcaagaagaaggaaggccaacatgtggatacttcattcctccttagaatagggaacacaatacccatggaaggcattacagagacaaagtttggagctaagaagaaaggatggaccatccagagactacccaacctggggatctatcccataatcagccaccaaatgcagacactattgcacatgccagcgagattttgctgaaaggaccctgatatagctttctcatgtgaggctatgccagtgcctggcaaatacagaagtggatgctcacagtcatcgattgtttggaacacagggcccccagtggaggagctagagaaagtacccaaggagctgaaggggtctgcaaccctataggaactaacaatatgaactaaccagtacccccagaactcatgtctctagctgcatatgtagcagaagatggtctagtcggtcatcattggggaagagaggccccttggtcttgcaaactttatatgccccagtataggggaacgccaaggccaagaaatgggagtgggtgggtaggggtgcagggcagagagagggtataggggacttttgggatagcatttgaaatgtaaa

SEQ ID NO: 2036 - DNA, 1000 bp, mus musculus
agatccagtcaaaacaaaccctttcttcatgaggtactcagtttgtgggattatatgacgagcagcagaaaattgaataacagtagaggtaacaacttcatccaatttagttaatccacatcaaccaattttcttctatgtaaagtgaaaattatagcagcagctacctcacaaatttggggatatgtatctggggtcagggagacagagcatgtaaaataccttactgagcagctcaaggagacgatgtaacaaatgagaactcttaacgccacagtgagttgggagtttgttgcaagtttgccttagatatttcttgttttcctcatcactgcaaccaaatacaggacaaggtacactttaaggaaaggggaccaaggggtttatttcagcacacagtttcgtggaagaggtgccatcgtggttcttgttgtgtcttggtgtggaagcttgtggctggccacacatctattactaaagcaaaataggtccaggctatatgcgtacactggtctccactgaccaatttctatgagctagccaggcctcacctcccaatggttcagtcactcccaaagagcaccaccaactgggcaatgcttgttcaaatgcttgaacctctgggggagaacatttccatcaaaccatcacaccttagaaaggagttggaagtctaagaaaggcaaggggaccattaggaaattgcatctgcgtgaaaacacacatcagcctaatgtctctctcaagtcacttgtcacagtaatgatagcaaaggcaaagaaaatttattattccctagcctcattctggtaccaggcactattctggacttcttacatgaactgatccatttcactatcacaagaacctcatggagtagatacaaagtctccattaccattggcttgcaggtgtacataaggaggttctgttagagtgctggtcaccacgtgtttttccttagacatgtaaatttaatccaatatcatgaatgtagggg

SEQ ID NO: 2037 - DNA, 1000 bp, mus musculus
aagttatacatggagggcaaattgtcctagcccctcaatttttgtctaacaggatcctcatctttgatatgaatttcagttgaataaaacgagatcaaataccactgggtaaaggccagacaatggctctgacagagcaggaaaggtgaattctaaaacctatttatcaggtagatgttcttggaacattgagaagtatgccctttctcaggaacaaagccgtatttagacatatcccaacatacagttgatggcttatccttagtcagctttgcagtaccacaaaacaattgctaaagctaactcacagagaagccaagtttctctcactgtttggcaggctgaaaatcccaaataatgcaggcttatcagtttggcttctgatgagggtaaagacggtaacacatagcaggagtgtgtgtaagaggccgtggccatagcttaagcccaagtacttctttgttgccgtggtagaattacatggccaaatgtagcttagatgggaaagaagttcttttggcttttggtcccagcatgcagcaggaagcttaccaagcacatttcatcttatagacaggaagcagaaagaacaggaagtagagtgaagcctatatgctctcaaacctatgcctggtgacatacttctgccagcaagacccctcttcctaaggcttttataactgcccccaaacagtgccaccaacaggaagccaagtctccgtgtgcgtgaacacatggaaaatgtgtcccattcaaaccgccataccaaggaaagagtgaaaggcaatgtgtacacagtcatctttttagataccgccgcttctccccatgaagtgggaccatgtcactaaggcctgtctcttaaactttcaacaacttcaagataacattaccctggggaccgaactttcactgtgtgaaccactgcacgacccagtattgcacctgtggtaggaggatggagccgttgtcattctcagacttacaaatcctgtccttt

SEQ ID NO: 2038 - DNA, 1000 bp, mus musculus
tctgagactgatgcagtctcttaactgtattgccctgtaaaatcaaaatgaacacatatacattagtgttccaaaagggagcatagtgaggaaataatggaccaaagcaagaccaaaaatcatttgggaaaactcaaaactctgcatctccatgcctggtgccaaaatgctctacagatctccaagccctttcagctttgttgagcacaacacacttctttctcttgggctggttccactccctgctatcagctttccttggcaggtatcccatggctctgggcctcatgtagggatatccctgctacatgcctagtgtcagctgctttctttagttgcagagggtagactccataaccgctttcttctatccttgtctcgtaagtcagaaccacgtggatgaagtttccaagttcttgctgcagctggaacatggcctctcattcaataacagtttcatcagctttctgttttcgatggtttccttcactgcctaaggttggctgtcctgaaattgctctgtagatcaggctgaccttgaactcagagatctacatgcctccatctcctgtgtgctgggattaaaggcatataccaccatggttggacctgaaccattcgttgatcccccttcccccattggatggaagcttagataggtgggatcttgccctgaggtcaccacttccttaatctctgatatctttaattggtttatctccttgaacacaggatttagctccactctacttcctgatacccctttagttcttgaaccatatactttgtactttttcttgctcaacttgctccttcccatcaaaacgctctctgtaagagtgaacattagttaccacatgacagagtctacactaggctattttgagttttcctttgctagtgcaattagtccaaaactctagccccaggcaaactcttcaggtaagggcaaaaagcagccaaattatttgccaaaatataagaacagtctttaggccac

SEQ ID NO: 2039 - DNA, 1200 bp, mus musculus
aaaggttttgttttgaacttcagtgacttagtatattgctaaatgaacttcctgactgaaggttgagggtccaatcagactaataagcaaaattgtctttttcaagtgaagaaagtagtttatagactaataccttcattgccatttaacgttactgatttctttaacgaattgggtttttttattttcttttttattggttaatatatttatttacctttcaaatgttatctcccttaccagtttcccctccacaatcctcctatcccttcccccttccctccatgagggtactccccacccactcgcccacccactccacctaagcaccctagcattttcctactctgagtcatagagcctccacaggaccaaggggccaccctcccattgatgccagaccaggcaatcctctgctacatatccagctggagccacgggtccccccatgtgtactctttggcttagtccctgggaactttgggggctctggttgattgatactgttgttcttcctatggggttgcaaaccctttcagcttctacagtcttgccctaactccagcattggggttctcacactcagtcaaatgtttcgctgcgaacatctgcctctgtattggtcaggctctggcagagcctctcaagggacagctataccaggctcctgtcagcaagcacttcttggcatcagcaatagtgtctgggtttggtgtctgtagatgggatggacccctaggtggggcagtctctgggtggactttccttcagattgctccactctttgtccctgtatttccttttgacaggaggaattctgaattactatttttgagttgggtgggtggccccatccctcaacctggggagccatgcctagccactggatatggtctctacaggttctatcttgcttttgttgggtatttcagctaatgtcctctctgttgggttctgggaaccccttggatctctggcctctgaaactttctagtgactacccccagtttcctctcccccactgacacaccttccttcaaattcctgaccctttgtacttctctctcatcttctccatatctcaaccgtcccacctccccccccccttctctgatcccactctccttctacctcctgagattattttcttcccccttctgagtaggactgtagcatccaaactgtggtgtggtcttcctt

SEQ ID NO: 2040 - DNA, 1600 bp, mus musculus
ttcattttatttctgtacttacatatttatgatattttgtctaggtatgaatatatgaatatacctgtttcaattcacagaacattttccacaaaatgtctcccctgatccaaatgtcagcagctctggcatagaggccaaataagaatttatatatgagatgtatattcatgtttattttttggacaaactatttcaccatttggccagttgctatattgtcaagtagatttttttccttacatcactgtctcaactccaaattaaatgactataatacacataaatatcacaggagatgctagttcacaaacaaggaatggttatatggctatctctgtcttcatgggttctttttgtatctcaccatgacttcctcttatatgtacattctatgctctctggtatctggtcatttcctgcctccctaccactgtgagtacaggacacatatggatcataaatcctgtaataccccaaagcctcatccaattgtatgattatcaaggcaaagccaagacagacattttgtgttcaagcaaataaatgcactaccaataagccaataaaacctttacagaagtaggacataaactatcaagatatgtgggtcacaatctataagtgcttgcttctttaggttttacaaaccctgtacttgagccctggaagcaaaaccaatcaaagctaataaaaatgccaaggttttatctatcttgttcctgatggattgttccccccacctgttttgtttccagagtgaccacaggctgtctctgctcccaaatggaagaggcacaggccagcatacccaagaactaatttcaaatacatctttaatgacaatgactttccaatttggtgctgaatagtgaaagaaaactaagtcataataagttgatcaggatctagccagtgtcttatgctccaaggagcagaaccccaaacaaagctaaagcctggaacttgaattctccagctgcattttcaggtggtcaactttatatgggagctgcaatagtctgtgctatatggttagaacacacaagtatgtatgacttgtttgataaaattaaaagaaaaacatatcctaaagtggaaggcagagtatattactattagaatgttaatatcttcacatgaaatattttgcctttggacaacaggttttggcaaataataaaacaattaagattgtattctgagccatgaacctgaatattctatgactcaaatgtataatatagaagaataaaaggaaggagatgaagagaaaagtactggagaatcagtcacagagttcaatacacagggatatttgttaacttcagaaaattgacttcaagaaatacccaaatcaagtttcttataaagtgactaaggtacttttgtatactatgcacatcacttcataaattcttgaaatctttcttttgtgtggatgtgttccctacatgtccatatgtgcactatatgtgcacacatttttcatacaccagaagcatgggcatgcttaatctggcataggcctgtagaggatactagctttcctggaattggaattatgtataactgtgagctaccatgtaagtactgggaa

SEQ ID NO: 2041 - DNA, 1000 bp, mus musculus
tcctctctctttccccgctcgctttcaggatgacatcacagacgtccgcgtccctgacaggccacccgcaggctggtctcggctttaaagcagctgtgcccctgtcccctcgaagtccagcgggcagccaccgtgtccacgtctgggagtgtgccgggaccttcctacctcctctcggtgtgaacattgcggtggacagcacagacgaccggagacagacaggtaggtacccacggaggattccaccacagaacatcctccacacccacccagtccccgcgcccacgctctcactctggggcaagggatttcttccacaaggaagcagtgcagaggctttcttcctcggctgcctcaagcctcagtgggtaaaaatctcatttagtgcccccatacccccggatcccttcccccttgtcaagggctcctcttggaagggctgccaacaccaagtctcaactggattcaggaggtcaagtcccaggatgcccgggagggaagggaaaggatctgctcagccacaggtgcgatgtctccctttctccaaactgggggtgggagggagggggtgcgggtggtggcggtggctgggaaagccgttctggagctagcgctgggctctcctgccagctggagtaagagggttgcatgtgagctaagccccgcgctgccgctgggtctctggtgcctttcgcccagactctaggtgtagccgacctgttgcctgcgggaaagcgtcccacaagatctgagagccaggagtccgtgctgaagtcagccgcgatcttacgggcgagcatccccagagtccagcgcccacgggaggaagacgtacacggtgccgggaaaagcagcgggtaaccatcccaggacaaccaaccccttttcttaccctttgtgtcattagttggtggcccaacgaacccggggaaagggagtgtgagggctggggaagtagctgatgaaaaggcgcaaacagggcagataaatcccagtcttg

SEQ ID NO: 2042 - DNA, 1600 bp, mus musculus
gagggtactagtgatgtgtttgtgtgtcaagttgacaaggggtcaattgtattggctagttttgagtcaacttgacacagttggaattatcacagagaaaggagcttcatttgaggaaatgcctccacgagatacaactgtcaggcattttctcaattagtgatcaagggggaaaggccccttgtgggtgggaccatctctgggctggcagtcttggttctataagagagcaggccagtaaagaatatccctccattgcctctgcatcagctcctgctttctgacctgcttgagttccagtcctgacttccttggtgataaacagcagtatggaagtgtaagctgaataaaccctttcctccccaacttgcttcttggtcatgatgtttgtgcaggaatagaaaccctaactaagacaggtaccatggccagacaacagatgctcagagagccaccatggccagctgactgtctcaggcttgatgaggtttctttactcttcagaccgctcagttttcatggagtctgctatttcagaaagggctctccctcacccacatcagcacagcaccactgccactgagggcggctactgcaggggaaggttgtccaaccaccccatctcactgcaggaaggaacacataccttcgtgagctgcagctcggaggagaatcccaaaccgaacacggtgttggctctgctgtcagcccactgcccgaacttctgtgacgttttggtgaaagtcatgttcggggtgatagtgctgtttatgatcacctgcaggagaagccagagggagagtgttaactctgaactagagcctttcagtcctctccagacaaagccagaggctgtgtttgttcctgagttgttctgaccagagtagacaatcaggagaaagggcatttcaggcaattaacaatggaagcgtctaaaacaagatctttcacactatcaataagaaaatacttttcccaagaaaagcatggtctccaaaactgacgttttattaccccaaacataccaagcataaaagtatccttaaaggccagccctgtgcactttcccagaggaaccacccccatagcctcccacttttgaaatccctgccactcagatattcagaaaaaccagttaatacttccaccatcaggtgggcctttgcttcccaaggggaaggagaagacattccaatttggagagtaggtagagggttaattgacacagattagtcatgctggtataacagggggtctgtaaggaagggcacaggagcctagtgctggctgttaactacctatggcctcagaaagaagaaaagaggccacagaccctgggaaaaaagattgtatagaacatgtgttttctaattttgtatttctggttagcagaattgctgccatgaaataaatgtccaataaatgtttttaatacatgaatgaacacatcatacaccagatgacctatgggtcaatcacaaacacaccccaaggggtcctttgaatgttagtagattaaagtctgaccagtttagcacacatctcccagccttgcccctaacaggctgttccaaagttagtcacgatgcaataataagag

SEQ ID NO: 2043 - DNA, 1600 bp, mus musculus; identical to SEQ ID NO: 2042

SEQ ID NO: 2044 - DNA, 1000 bp, mus musculus
ggtataaatagggatcagcggggcgatggagagcgagcttagcttgctggtacagctagctgtgcagcgcttgtgggtctcacttcttcgctgatctttgcttccctgagagaggcacagcggagaacttttcatggtgtccctccaggtccctcctgctgctgactccagcagaggctgagtcctggctgtctctgctaggtcatgtcaccctggtgctaactgaactggactgctggtgtatccatgaagtgtttgccagtggatcgagctcccgctacctgctaacctatgaactgagctgccaatttccagacaacacagacgggagttgctccaaagaacatttctaaataggttcttcccccgtatccattgttttcactacctctggtgggtgggctaaagggaggttaaagcatttaagaaccaccattttaaaaaaggatttgtcctggcggtggtggctcacgcctttaatcccagcacttgggaggcagaagcaggtggatttctgagttcgaggccagcctggtctacaaagtgagctccaggacagccaaggctacacagagaaaccctgtctcaagaaaaaaaaaaaaaaaaggatttgaaaaaatttaaatacacacaggtatcaagggtttttactctttggatcatgtcctttgctatgaattctatagcactgacttttccctatttgggggaattcccgtcatgccagcagatctgggcagatctaaatagccggaataggtctgggcactggaacagcaaaatgtaaaccagcagtcagagagctagcattcagagtcactgaccatctgcaactcatatccctcctggtgtagaggacagggcagcatttgtctgtgtgctgtgtgcaggaaggaagtgccactgtcagaggtcagaagcaggatgaaggaagtgtgagagggttcacttactatgcggttttcctgaagcctggcctcaggaacagagatgaggctat

SEQ ID NO: 2045 - DNA, 1000 bp, mus musculus
tacttgtttactgtttaagggttttcatctgctttcttgtgttttcctgtatttttttccaatgagttatttatatactcatcaaagacctctatcctcttcatgagattggactttttttgtcagaaactggattttcaggtcttttaggtgatcaagagattgctgggtggaagaactgggttctgacagtgctaaattacattggcttccatcacttatgttaggacacatgcctgtctccatttggttatccctggtgttatcttgcccaggttcctctgactagagctggcctctttggaggcagtttatgctcagtttcatgtgtttgagctgttctcctggaagggagtcaattttgtccctggttgaaggtgtggagacctcctgtgtctctggttcttgatgaccttctgtgtacctgtttggggcagacctcatgtgttcctttccatgttaacctctgggagacatgaaggctctgtgctccatagacaggttctgccataatagtagatgggttgatatactaaaatagtgtgaccctggttatagtagatctcctgtgtctctggttatagtaggcttcctgggagtcagaaggctgtatttatggtttctgaagacctcctggtagacccacaatctgagtatggagaagcagaacatgaggaatattgagctcctgagtatgacaggtgggtccagaatcagcttggatatggtgagtgtataagctgagatgaaaatttggaaatgagtctcacatgtgttactgcagacctcctgagagacaggtaggctgttatgacctcaagtgtcttctttgaaactcttcttcattaagaggaaccattttaatttattggtgttctgttcatgaaaatttccccagtgcccatgtgctcaaggatcttcacaactttattttctattagtttcagtgcttcttgttttatgtggtttacttaattcacttggacttgaattttgtaca

SEQ ID NO: 2046 - DNA, 1400 bp, mus musculus
ttatacatttgcctccctttttgttttcaacattgtttctccttccacttttaggtcttggaccacttagttcagttctttcatctgtaggattgtgttttcctacatttctttaaggaaattatttgttttctctttaagggattctgcctctttatctgcattttcttgtatttcttaaaatatattatttatatcctctttaaggtctatattattttcataagactggattttaggtcagcttcttgatttttcagttttgttggtatatctggggattactgtgttgggaaaactgggttctgataataccaaagtatattagcttctgtagtttgtggccttgcacttgcctctccccatctggttaaccatagtttaagatggtctgggtgtctgtgtctgtaacctgcttcttctctccctgggtagctgcaggtctccttggagatctatgacattgtctgtagctaacctattgtgaggtcttcagactgttgaatcttcagaggagcagatcagctgttggcctgtgcatactattatcctgggagactttcacatgatgagctctgttgccatgtctgcagtagaactccagggaggctttcagactgtttggtgagttctgctgcatgcatagaaactcctgagagatcttcagtctttgctctcttcagaggaaaagacaagttagcaatctgccctctcagaaggtacaggccagaaggggagtagaattcagggtgtaggggctttgatggctttgatgagagatggatcctgagtctactgggatccacaggattccatactgcagtacctgtttgtgagactcttgtacctatttgaactgtttccagcagaatacctagaaggccttcagtctgtgatatcttcagaggagcagacaagctggtgatctgaccagtcttaaacttaaggaaaaaaggttacttaagtttcataagtggtatctgtcttgaaaaaaactatacatttcatttagattttccactattatggggtaaagattttgaaataagacctaatgatttttttgtaattacattagtttgttttgttatgtctccctttttatttcttattttgttaatttgcatacagtctacatgccttttagtttattgtctaaatgtctatatttttttctaaaggactatgcttttgtttctgcctctttgtattgtttccccctttttcctaattgcttgatttcaaccttgagtttgagtattttccgctgtcccctcctcttgcaaatgtttgcttcttttgttcaagagctttcaagagtgtcattaagtttctgggtaggatttcgcccatttctctattaacatactttgtgccatgaatttttaactgaatactac

SEQ ID NO: 2047 - DNA, 1000 bp, mus musculus
ctttttagaagttatcatcaccatggcagtgtagttagagagctagaacatccagagattctcagtctttaaagccataacacagtattaccctgtgacctgtttcaacctgctccagtcggagaggcttccagcatggatcattgaagtttggcctcttcccaatacttactgacagaatatccaggaactaaagccatcgagacaactaaagggctgtgaaagaacacaataaagaaaaaatagggcaatatgaccccctcagaacacagctacactactggactactgcagcaagccctatataccctaagacaaacaaagaacaataaaatggccctaaatccagtcttatataatagaggcctttaaagaggaaaataataagtcctttaaagaagttcaggaaatatgtagcccagggaggcctccaactcattatcttcctgactcagcctccttcagtaaatcttaccatcatgcactaccacagctctgccagtgcctgacaaatgcagaagtggatgctcacagccatccattggcctgagcatagcttccccaaagaaatagctaaagaatagacccaagaaggtgaacaggtttgcagccccataggacgaaccacaatatggactaaccagtaccccccccccccgagctcccagggactaaactaccaggcaaagagtacacatggtgggacccatggctccagctgcatatgtagcagaaggtggcctagtcagtcatcaataggaggagaggctcttggtccaatgaacgttctataccctagtgtaggggaacgccatggccaggaagtgggagcgggtgggttggtgagtggagggagtaggaagggataggggtttccacaggggaaccaggaaaggggataacatttgaagtgtaaataaagaaaataagtaataatagtagtagtagtaatgttcaggaaaatacagtaaaaaaatgtagaggcttttataaatgaaac

SEQ ID NO: 2048 - DNA, 1800 bp, mus musculus
cattgtgtcctggatttcctggatgttttgagttaggatctttttgcattttctattttatttgattgttgtgcccatgttctctatggaatcttctgcacctgatattctctcttccatctcttgtattctgttgctgatggttcctgatttctttcctagggtttctagctccagtgttgcctcacttttgggttttctttattgtgtctactttcttttttaggtctttgatggttttattcaattccattacctgtttggtcgtgttttcctgcaattctttaagggatttttgtgcttcctctttaaagtcttccacctgtttagcagtgttctcctgtatttctttaagcgagttattaaagtccttcttgatgtcctctaccatcatcatgagacatgcttttatatccgggtctagcttttcgggtgtgttggggtgccctggaatgagctaggtgggagtgctgggttctggtgatggtgagtggtcttggtttctgttagtaagattcttaagtttacctttcaccatctggtaatctttgtagttagttgatttagttttctctggttagagattgttcctctcgtgattctgttagcctctatcagcagacctgttctagcagactagttctctcctctgagtttcagtggtcagagtactctctgcaggcaagctctcctcttacagggaaggtgcacagatatctggcattgggacctccctcctggccaaagattaaggcccaaaacaggacctgtcccagaagctgtgttgcttcggcctgtcacagaagctattagcttctgtagtccacactctcacctgtgcaaactactctcagcggagtcctggaaccaagatgtctcccacggatgctcagggaaagccctttcgggccgggtggacacaacacctatcctctggtggggaaggtgccaggatgtctgcagccgaaaagtgggctgcctcagaagctttttggctctagcctgtcccagaacctgttagcttctgtagtccacactctcacctgtgcagactactctcagaggagtcctgaaacctcatatttgttcttatgaaatattttagcatgatttcttttgtttttatttaaaattttttataagcatatattttcatataatactattgcacaaagtatcttcataatcttattttaaaagattttacttttcagtaattttgagtatactgttttatttgtctttttctacctttctgtttcagcacattattacataacttatacaggttactatacacagtttgaagacatgtaattggtatcaaattgattgaactaattatattctctagaattttatatgtctcatgtatttttataatatttaattcctttgtttcttcatttttcctgttttttaaatataatacatataaagatatggcttgctttttttaattccttgccattctgtgatgaaagaggatgtgtgttattttttactttgagttcttgtatttgagttctccattaaaactaataatgttactgttttgtgaaaagattgcttttcaaataatttataccattgttttaaaagatgacagaatgttttcgttctttgtaattgtatcttcatgttctgtgaatacttattatttttttaaatgttcgtatctatttctaatttatggagtaactttaaataaaaaatttcatcacctcaattcctttcctctatctactccctaagtattattttgattaacctttccatgtcacttcactctcaagcaat

SEQ ID NO: 2049 - DNA, 1200 bp, mus musculus
ttagttatttatatgtaatgaatacaagtcctttattagacatttaagttttagattcaatttgataacagatgggctatttctttaccctgttgttggcttctttgatattcaaggaatatcaaaagatattagccttagtctgatataataacataccatgcttttagaattgaatatagaacaacctaatggaggattcttgttgtgttttcctgtggcagtttgacagttttgcttctgatataacagactaattcatttgattagtgttttgtcattggcattacatgagattctaactctattatactgaatataaatatcgaatttctcagcataattattttaaaagactgttatattttctttgttaaattttggtgttttacaaaaaaatatctattgactgcatttaattacttattttatttgaaagactttaatggaattatactatttctccattccctttcctccattcaaaccatgacaaatgctcctctttattctcttttaaatgcatgtcaggaagcacttgctgacaggagcttgatatagttgttacctgagaagctctgccaaagtctgacaaatacagatgcagatgctcagagccaactacaagactgagcattgtgacctcaatggaggagttaagggaaggactgaaggagctgaaagggtttgcaaccccagaggacgaacaaaaatatcaaccaaccagaccccccagatctcctagggactaaatcaccaaccaaagagtacacatggaaggacctatggccccagctgcgtatgtagcagagaatggctttatctggtatcaaagggagggggaggattttggtcatgcttgatgctccatctcagagatcctctagggaggtgagtcaggagtgggtgggtggaagacctcccttagagaagcacggtagagggggcatggggtaggtggtttgcaaaagggaaaacaggaagtgggataacatttgaaatgtaaataattaagataaccaaaagaaaaacccaataaaaatatattcaggtcctatttttccattaaatgttacctgcatctatgtttatgcttatatatatttgtgcatggatatatgtatatacctaaggtcatatgtttaacttccttatacataaatacaactagaatattaattgtgtttcgctctttagggt

SEQ ID NO: 2050 - DNA, 1600 bp, mus musculus
gcttcgttttgtgctcattgtgtcttggttctggaaacgatgaattttttttaaagtcggatgtgatctcttcattcatttacatcatcttgcatttccttcagtatctgtctttcctaggaataactatgaaattagattaacttggcatagatatttttcagagtgaggaacagaaaatagcctacagttgccaactgtctttgtcaccctaataggacaaaaatgacagaggtgttgaaatatgacagtgatgaattcaaattctgaatttgtcacttgcatggtgtatgaccccttgtgtatgatttatttccttggatgcaatggcaaaatgtctagctaactccaaaggttcttaggaaaattaaaaagaagtttgggcatgcctttccttcaaggtaagaaaatggtgtgttttattctgttttaaactaggatgcacacgaacgtttccaagccacactactgccatttggaaattattgtttcctcctaacagaaagaacaggtggtgtatgatgcctgattggttgtccagtgtctgaaagatccacgcagcctaggttaattgggactattggtcttcctatagggttgcctttctcctcggcttcttccaacatttccctaattcaaccacaggggtagtagcttttgtacatttgttgggtgtaaatatctgcatctgactccttcagctgctggttggaactattagagagcagtcatgatacgcctctttttgtaagcactttatagcctcaggaataatgttaggccttgaggcctccccttcagctgaattccactttgggcctgtctctggacctccttttcctcaggcttatctccatttttgtcactgcagttctttcagacaggaacaactatgggtcagagtttttgactatggaatagcaatcccatcaatcactcgatgccatctttctgctggaggtgggttctataagttccctctccccactgtaggacatttcatctaaggcccctccctttgagtcctgagagtctcacctaccgagtctgtggtgcattcttgaggttctccccatacttcctacatcctgagattgcctgtttccattatttctgctggccctccatgcttcagtccttttcaccgacccaatacctgatcatgtccctttcttcccctccctttcctctttctcactcatgtacctccctccctgtctccctcctgtgattgcattcttctccctccctagtaggatctagatgtccttacttgggcatgttaacctttttgagttctgtggactgtatcttgggtattctgtactcttttgaactaatatccacttattagtgagtacataccatgcatgtctttttcggtctcagttacctcactaagaaggatatccatttgttctatccatttgtctgcaaaactcatgatggcatcattctttttttttttttcactgatgaacaatttttattggatattttgtttatttccatttcaaatgttatcacctttcccagtttcccccctctgggggacccccatcccatcttccctctcccctgattccatgagtgttcctcc

SEQ ID NO: 2051 - DNA, 1000 bp, mus musculus
ggagttgtgagaaatcttttttccccattctataggtgtccagtatttgaatgaataatgacattgtataaagcacaaccacctccttttttgaaaaaaattatattttttatttttttgagagcaggagctaatctccaatgacagcagaaaaaaatcacaaagtccacctgagtaaacatcctatgcaacacaacctccttatgcacaaccagtaaagctcaatggctggaacaacgtacataaagataacataagacatcctgcagagaatagacaccctgatcatcctacttgtcaggtggttctgctctcaacacaaatcctgcagattacacaagaaatgcagcatttaaaatattaacttgctgatctgtatggaaattccccaagtttgatgtaactacaataaaacccggaacccctagaccaggggctctcactctgattcacagagaaggggatggtggaagatctgagttttacatagatatctgccctttggtggtcgtttggaagctgaaatttgggaataacaatagaaccctctaattatcatgagggaccatttaattgtagatcttagattatatccctattgtgttctgagcctgacaaatacaaatatggaatcttgcaaacaaccattgaaatgagtatagggatccaagtggaagtgttagaaaaaggactgatgaagctgaaggtgtttgcaacaccataggaagaagagtatcaaacgaccagactccccaaagctcccagggactaaaccaccaaagaaagagtacacttggagggaaccatgcttccaactgtatatatagcagagtatggccttatctggcctcaataggaagagagacccttggtcgcttataggttttatgcccagtgtaggggaatgacagggaggagggattgggtatgtagatggtacagcactctcatagaagcagggggagggggattggatagggagtttgtggggaggatatag

SEQ ID NO: 2052 - DNA, 1200 bp, mus musculus
cctcaaactctttggcacaattcttaacagaattccaatggctcaggttctaagatcaagaattgataaataggacttctgggcctgaaaaccttctgtaaggcaaaagatacagtcaataagaccaattggcaatgtacagattgggaaaaagtattcactaaccccacatccaaaagaaagctaatatccaaaatatataaagaactcaagaaactaaccaccaaaaatacccaaacaacccagtcaaaaatgggttataaaactaaacagagaattcataatagaggaatcttgaaatactgagaaccacttacagatatgttcaaagtccttagtgatcaggaaagtgtacattgaaaccaccctgagattccacctcacaccaaccagagtggctaagatcaaatactcatgcaacagtacatgctggtgaagatatggagaaaaaagaacactcttccattgctggtggaattgtaaaatggtgcaaccacactgaaaatcaatctggcagttcctaagaaaactggcaatagatctacctgaagaagcagctataccactcttgggcatatacccaaaagatgctccaccatgccacaggagcacgagttcccctatgttcatagtggccttatttgtgatagccagaacctggaaacaacccagatgtcctgcagtggaaggatggatacagattatgtggttcatgtacacaatagaatactactcagctattagaaatgagaacatcatgagatttgcaggtaaatggagggaaagagaagatatcatcctaagtgaggtaacacagactcaaaaggacatgcatggtatgtactcactaataagtggatattagtcaaaaagtatagatcacctagaatacaattcacaaaacttaagtttaacaagcagaaaggccaagtaaggatgtttccaatcccacttagaaagaggcaagaaataatcatgggaggcagagagagagagggacctgggtgggacagggaagggggactggaaaaggggaacaggtgcaggtactggggacaaggagaggaacccagagagccaggagaatgaatggaaacatgcagcctgaatatttgctctaagccaaatacactttattacttagggagaaagaaatttcttacctacataatgattaaagaaccgtttctctatctgact

SEQ ID NO: 2053 - DNA, 1000 bp, mus musculus
ctattgtgatgccttggtgaggtgcagggccagctctctggaatactgcaacaggggagggacaggaccaactctattgctctgttgtccttgaggccaactctcttgcctgccctaggtgggaaggaattggggaggtggggtctcttctccatctatgtcatctcactgcagacaagtggaggggcctatgttcatgccctctgggctggctatccagtgtgcttcacccccctccccccagggtcagctccactgcaatgtgtaggctactcacccaagtgctgcaggtggtgcatgggcagagccatttctcctgctctcatgaccactgtgtcaggtctccaggttgctgccggtggtaaggcggggtgggagtggggggagaatgaagatgatgactcatctgtgtccataccaccaaacaggagagaagtgatagaaccagttctctcatgttatcctcggggccagctcaccagcagttctttcaatgtgcagggcacactctcctcaagtattgcagctggctagggtgtcagtcagcactactgttttcatatctgtagggccagatctcccacgatgcccaggtgagtggtggtggcagctctgcacagctttcagatatcaacatgtccctgtgcagcagccaaaatctttggtggtaacagaactctgctccagagccatggtcccagacatggctctaaaggcagcacaggccagatccccatcatagtcccaggtggcaccacagtccctcactaccctcaagtctccagttctacctctcttcattctaccctcatccttctgtgtctctttctctctcatttctccaccacttacttgctccccttagtggcacctggatctctgatgggatggtttgaggtcctctcaggagtgttctcagaagtgctattccctgctcatgcatatggcatatggcacttggcagaggtcatcttggccatcatctgcccctcactactag

SEQ ID NO: 2054 - DNA, 1400 bp, mus musculus
caaaaacaaaaacaaaatttagattacaaaagtaggaacttttttttaaaatcccaatggtatattttataataaaaacatcaaacctgaaaatcagaaaatattgttgatatcagtgtctttgtggacagacctagaacaagtgatgtagaaaaaccagaaactgtcatgttgtctttacattgaattgcattatcatttacaaactctgagaagtttaaacaataaaagtttgtttcagccaagttttggaccattttgttaaattccttcacctgcttgattatatttttccttcatttctttaagggatttgtttcccttttaagggcttctacatttttacctgtatttctttaagggggatctttatagcctccttaaatacttctatcatcttcatgagatggtattttacatcattatcttggttttcaggcctgttgggttctctagggcctgctgtggtgtgagaactaggttctcaaggtgccagattgtattgtgttctattgcttatgatctttttgcttgcctctggccatctggttatctctggtgttaagtagcctgggtgtgtctgactagagcagatgtccttggaggcaggcagtgctgtctctggttagagtgggcctcttgtatctccagttacagcactcctcatttgtccttggttactgcatacctcctgggaggcaggcaggctgtgtccctggttaatgtgggcctccttggatatagacaggctgtgggatgtggtaggatatccatctagggtgatctggccagggtggagaaacatactttaggaaggtggagctcggcagggcatgtgggccctgtgtctgctgggctctgtgtctttggttattgtggacctcctaggaggcaagcaggctgttgaatgtaggtaggtatctggctactgatctgatctgggtaggaagcagatgggaaaaaagggtagagctcggggttgtgtggggaaggtcagtcctgagtcagctgtgtcccatgattattccaactggagggggtatttggataagattcttacatgtgtcttctcctgggagacacaaaggctgcaggtgtgggcaggtatggccagaaaaagttggagatcagggtggtggaggtaggaaaagtgggtcccacatcagctgagagattttttgctgttatttagtcaacttttaagcatcatctcaaggccctcttttaaggatgagggaaaaacatgcatgaggtaacaacagatgcaatcattcaaaacatatactctcaaatttatcttgtttcaggacacaaaaagcactgacatttaaaattgctgatatgtattatttgcatatattgaagtaatgttagtcagatctattttagacaacaaaacc

SEQ ID NO: 2055 - DNA, 1000 bp, mus musculus
catgaagatatcacaataaaaatcactttttaaagaagatttaacagacccagaaagacagcaccaaggttttgatcagttgcatactcttgctcataatgtccattcccatatatgtgcaacacaaatcttggaagttgaaaggatgctaagttagaactggtccagggaagcagtgaagggggaaggagggtcaagtgaaggaaatggggtaggtatgaacaaagcacacacatgtgaatctgtgataaagtcattcagtataaagcctattgttttaaaggacaaaagggttatttgacaaaacctagacagtacatccaacaaccttgtaagtacacatgcacagaaagtgattcagccatacacagacagcacatgaaccaaaagtggccaatttccaaacttcttaacttgagaaccttttttaaaagtaaaatcaattacatattacactttgaaagttacatatgagcttgaaacaccctttaatgttatgaagaaacgatgtttcaaatggtttgttgtggaaagcatcgtggcagcttaaacagaaaacatgtgtaaggtgtctgaagggaagttcatggttaggagaaggagcccatcggagccaacttctttctgcctttggctgtggactgagcatgactttgggcgctctggtctccaaaggaaggagcacagctcattctaatcgatccagcagttttctgggaagtggagctggcttgcactagagcacaaagaaaagggcccagaatcagtcattcgactcatataaatagctaagggagagtcttgtttaaatggaatgagtcactacagcttttttaaaaaatatatatagaaacatgctatttatgccttcaatgtatagaggtccctgtgattaacatttgggctctagacactaatttcacatgtgacatggcacagcagcaaatcattgtcaagggggtaatgccaggcttctgtttaaggccttcacttcagccag

SEQ ID NO: 2056 - DNA, 1000 bp, mus musculus
cactattgtggaaggccaagaatcgtttgctgacaggagcctgatatagctgtcacctgagaggctctgttggagcctgacaaatacagaggcagatgctcacagccaaccatagtactgagcatggagaccacaactgaggacttaagaaaaggactgaaggagctaaaggggtttgcaacctcataggaagaaaaacaacaacaagcttccaaatcccccccccccaatcttccagggactaaactgccagccaaagagtacaaatggaaagacccatggctccagctgcgtatgtagtagagcatggcattgtctggcatcaataggcgcagaggcccttggtcctgtgaagactcgatgtgtcagtttaggggaatgccaggacaggggagcaggagtgggtgtgttggtgagcagggggaggaggaatgagataagggattttcggaggggaaacaaggaaaggggataacatttgaaatctaaataaagaaaatgtctaataaaaataaaaataaatagtagttcaaattattatgtcaattaacacctgtagatctatccatctaatttatcactctatccatccatgacatatcacattacatgtaaggagggtattataataattagcaagagggattcagcattgttttgcagtttaggttaccatggaaaatgactgctgtcctgagacatatagagaacataaccaggcgaactggcttatttacagtgtcagctttggttatactatattatctacagtataatatagtatagtaagtttggcatttctagagattagttttctaagcaaggtaatgtacatcatatgccctctccatgaaagcataactaaaaagaaaaacctgacaaaatataaaaaaatgatggaaatgtagacttgagtttgggaaagtaaggctaaaagagaatgtataagagaaatacatgagaagatagagaagctatgtgagggaaagcacagacagaa

SEQ ID NO: 2057 - DNA, 1000 bp, mus musculus
agcccttagatttatttttctatgtgtattgttactgtggttcctaggtagcatgactatgggttgctcccctgactttgaaactttcttggtctttctagtccttatttggtggtggggatggtgctgtttgttttgttggttttcagtatctagtgattaaaataaagctagaaccgagataatgaattttagatgtcatgtagaccagacttgatgccccaaggaacagatgtgctggtgggagtgggttgagagtgggtcagcaggtggggttcacactctcagaggcaggggatgggggaagggatgaagaactcaaggagtgaggaccatgaaggagacaattttggaatgtaaataaataacataatctaataaaaaataaattttaatgatgtgttttattttttgggatatgtatacccttgtatgagcttgtttatatatgcatgtgtataaaggtatctagatagaccagagtagtgtggtagatcttctggagctggagagcattgacctgccttctgttgggatgataaaacattgtcttggtttgagtttttttgatgtgatgagacaggatgaccactgcaactcttaggaaagaaaagacttatttagaggtggcttacagttccgatgtttaatagtgtcacaccttggtgatcaaggattcaaacacatgagtctatgaagggcacttttattcaaatcaccatgaacaccatgagcaacttggggaggaaagaatttatttctacaagagcttacaatccaccatgaagggatgtctgcaaaggatctcaagacatgaacctagaagtgagaaatggagcagggtttacagaggaatgctgcttactggcttacttagttaagggcagttaaaatccttctaatgtggttggtggaatgaagttctggttctctggaggagaaccacatgcccttaactactgctgtgccatcactctggccaccaaatgataaatgattt

SEQ ID NO: 2058 - DNA, 1800 bp, mus musculus
cttaaatcttaaacatggtacaatacccagctgttattttcctgacactgacttctgtgtatgtctcttactcagtcttctaattccccaaaacaacagaatgggatgggtgtgggggggtgttatgtgtctgtctgtcagtctacctattcctgtaggtgtatatgcacagaaacatacaaattaacattttcatataaatgaccatttaaaatattcagggtcgtcagtccttgctgcattcccttcgcagtcgtctggaatcctgttacttggcggcctctgcgtgcatgcgcagacatggcttcaaccaactatacccaataagatactcaaagctacggggcctatcttacccagcctgggcagggctactcccaacaaagtagtcagaccaatggccagcagagttacagtggttatggccaatcagctgacacttcagggatatggccagaacagctatggccttcttatggacagacccaaaccacaggctatggaactcagctccccagggatatggttccactggaggctatggaagcagccaaagttcccaatcttcttatgggcagcagtcctcctaccttgactatggccaacagccaactcctagtagcacctcaggaagttatggtggcagctctcagaacagcagctatgggcagccccagagtggaggttatggttaacagtctggctatggttggacagcagcaaagctacggacagcaaccaagctcctgtaacccacctcaggattatggacaacagaaccactacaacagcagcagtggaggaagtggagggggtggtggaggcaactatggccaagatcagacctctatgagtggcggcggtggtggttatggcaatcacgaccaaagtggtggcagcggtagtggctacgggggaggccagcaggatcgtgggggctatggcagaggtggtggaggtggttacacccgaagcagtggtgaatatgaccccagaggctgtggaggtagccaaggaggcaaaggcggcatgggaggaagtgaccatggtggcttcaataaagttggtcctcgggatcaaggatctcgtcatgattctgagcaggataattcagacgaaaataccatctttgtgcaaggcctaggtgagaatcttacagttaaatctgtggctgactacttcaagcatattggaattaagacaaataagaaaactcgacagtctatgattaatttgtatacagacagggaaactggcaagttgaagggtgaggcaacagtttcatttgatgacccaccttctgctaaagcagctacagactggtttgatggtaaaaaattctctgtaaatcctattaaaatttcatttgctaccctcatagttgacttcaatcagggtggtggaaatggtcgtggaggttgagggcgaggagaaacatgggccgtggaggctatggtggtggccttccccagtgaaggtggtgggggtggaggacagcaacgagctggggactggaagtgtcctaatcctacatgtaagaacatgaagtttttctcttggagaaatgaatgcaaccagtgcaagacacctaagccagatggcggaggagggggaccaggaggctctcctatgggggaaactatagagacgatctacgtggcagaggaagatatgaccagggcagctaccagggccgaggcgggactgtgggggcttcagagggggccggggtgatgggaacagaggaggttctggaactcttactgtacccagttttacccttgttattttgtaaactta

SEQ ID NO: 2059 - DNA, 1400 bp, mus musculus
agagagagagagagagagagagagagagagaaagagagagagagagagagagggagggagggagggagggggagggagggagggagagagagagagagaaagagagagagcgagagagagagagagagagagagagagagagagagagagagagagagagagagagagagagaggcatttagggtctcaagctgaaaggctatgggatgcagaccttctcacaggccctgggagggaatcactcagcacagagagggtgctccactgtgccccctggtgttgagtttcctggaaagctttcaggctcaggcacctggctggaatcccccttggacagcacccaactctgtgtacaactagccttacgggtcaagagtccagggagggtggcactgcccaggccctgtgtgtagtgtgagcaatgtgaaagcgtgtgtgatgaatgtgggaccggcaggagcttttcagatccctgccttagacccccagggctggcttagggaatttctgagcaaccctgatgaaacgtcaaggttgccagggggattctgcgttgcctgagttgggtgaggtgagacccaggcctttttgagtcctgaacttagcaggccctgccgtaggactcctcaagtcttagcttctgatttcacattcagattcagtgaatagagaggccaggaagggatgaaccatccctgtgccccgggaacagtgcatccagagcccagggtgggctacactgctctggccacagcaactcatgctcatagggcaggagagtgctggtcttcccttcttaggcacagtgtgatggtcagccatcccttcagctgggacatctgagcctgattatagtggggagaactctccccttcacaacacctgccgccatcagcattagcctgctgtgcagcctcaggctatgcccttcacctctctgaaccttaagttcctgttcagtgaatagaccttccaacccttctctcaagatgatagagtctgtaggcgtccctgggacggtaacagcaggccactggagaacaaacaacttcctgggtgttagctttactgacattcttcattggatctccctggcaaccagtaaagtgagcaccacttactaccagggaggaaagcagcccagaaaggtttcctggggccacacagtaggtcagtggctggcagaacagctaaagacactggctttctgtcaggcagagggtccaggatagcaggactcctcgctccgtgattcccagtggtttccatggcaaatggatcgtatccactgtatgcattctggggactgtgcctgaccactgcagttcacaggggctggaagctggactcttctcaattctgcccctctcagaggccagcagcttcaaggctggctggat

SEQ ID NO: 2060 - DNA, 1400 bp, mus musculus
tcttaaccactgagccatctttccacccttgtagccactaaatcttgaagccagttgttacccagcccataaaagcccaaggttgagggctactgaagggattctgtggtttgtcctgtgcaataggatgggtagtgtgtacgtacagcattaagcaacaactcacaggctgttcttgtttccatttattagtctaggaatatacaaaagtgtgacatggcacaacaatctcatggagaaaacagaatacacaggagggtagctttctcccaacgcctcataaaggcacacacgtgaggcttggtttggggggggggcctcctgtcctggacccagtgtgctgcacaggaagccaggcacctctgtgaagagaagagaagcccttcctcacaccagacttggggtgtggctcaggaggatatgcgccagagcaacgctgagctgtgtccatggtgccaacctccagagtgaaaccagccaacagcagcgagataacccaagacggcacctgtgggacagccgtgtccctagccaggagacaggaggccagggtaggctcagattggagaagagggctagggtgaggagcagagacccaagccgggcagtccagatgttatctaccctccccaagtggggccagctgtgccctcagcctccccttggtacgaggaacccgacctgcagccacgggtgggacatggcctctgcctctcaagaatccctggagtcactaaggactgcccttgcccagctagccagggccaagtgtctgtcgtctggggaacgctagaaggggtgggtaagaaaccaccaaggcccataaatatcagcctccaccttgagcaggacacactagaagtgagcttaaaatactgactcttcccttcttaaaaaacatctaacattgcaatggtttaacaaattataatttcttttaaataacccacagacacccatgacgcttccaaatttacagaacaaaatgcactcaagaactcggtagaaaaggatctgcagtcgtccctcccaggagctggcacgcgagggctgggtcagttcacctccagcacctcagtctctggaaggccaaatttggtcttgtgattgtcaaagagcttcaccagggcctccatgtacatggcatggtacaggtcgatgtctttctgggtcgggtgctccagcttggggacagtgatgggctcccccactgcagaagagggacagaggatctgtcagtcagcgtcaccgagtggcccattcctgggtgcccagtgggaggtgaccctgtgctacgggcagcatgggaaagaccccacccgagagtgtggcctctgagcccgggtgaagcctagctccacactctgccatgagttcccgagtaaggtgtggaccacaag

SEQ ID NO: 2061 - DNA, 1000 bp, mus musculus
tgactctgaggcagtcctataccagtacagaaacattaagcctgtaagagagtttgctgtgggagtcaggtcacacccaactgtttattgtaatgtggggttgatgattccttaagacctactatttgtcacctggctcaaaaccagggctgctgctagctttgctcctataagacacacacatccccttcaaaccacatttactcttcagtgaccatattggtcccacaaccagagagaagcaatgctctttcataagccttgtccaggcccctgcctcccagccagccttctgcttctcagacctcctggccccacagaaatgagtagcccaaggaccctttgacccccaaagcccagtactcacagagacagggaaataatccttcatgtacttccatatggccaagcgtctgaagaactggatgggccggcctccctgccgcggcttgtcccagtccaggtaccaccaggtggcatacaggacagagaagagccagaaccttgtgaataggaggcctacgaagatgacgatgcagagctgggctgggagagaaacaggaaagttagagctgcaagcaaggcaggtaaaaaccccagcttagctcttccatgactgtgccccccaccccgcatctgcagtgacctccctcctggtgcctgcagcgccccctgtcgggcacacaccactgagtggaaaccaacttccgtgcttcagataccacactggcttggggcccagtctaaagtcatccctcccatcccccactacaccagatgtctcaaccttcactgctcccatccccaggaaggccatacacattcagcaggtgcttgaaaaatggagccatgggttgaatgggttgccttctgattgccatagggaatcccagaggaaaaagaggcactcctctttcctggccactttctatctatccttgggtctctccccatttgctggagcatcgttcccatggaacactacttcaccctcactggt

SEQ ID NO: 2062 - DNA, 1800 bp, mus musculus
acagtcttacccatatgatgtcacggcaactgtctagcctatggaaagccattcggaaaagatgacacattttcatgaaatcctctccctgtccagtcaactcccctgggccatctggacagggtacccaaggctcctggccatgctggtgcacatgagacaccttgcaatcttaggttgggggtgagggataaagaagggtacagaacttagagtcccactcagaatcgctagctgcatcccaccctcatcagaacctgattccaaaatcctctcctgcccaaggatgaccaggccacctccctgtcaccaaacaatgaatggcagtcctatctccatcctccaaggccttcagcctgcgctgcaccttggcttcccttccctaacttaggggttactgaaaaccctgccctgctaaagcccccaggagatccccttgactacagaggacacctcactgcccaccttacagagaaacaaaagagcctcttcaccttctggacactcctgtgcctcacttcttcctctctagtgccttctctgtccagatgaacctctatctcctgcaggcctctttgaaccctcagctccttcccaagtctaaaggtcttcaagccactcacttccttttacagtgtgtgtgtgtgtgtgtgtgtgtgtgtgtgtgtgtgtgtgtgtcacagtacagatgtgaaggtcagagggaaacttgtgagagtcaggtcttccagagcaggagcttgaggcaggaactgaagcagagaccaaggaggaacactccttgctggttcgcctccctgtggcttgctcacatgccttttatgaagcccaggaccacctggctagtatggcacctcccatcacagttgaatcctcttacatcaattagcaattaaaaaaaggaaacaaaaaacacaaaaacccagacatggccacaaaccagttacaaggcaatccttcagttgaggctccttcccaggtgactatgggtttgtgtcaggttaataactggacctatgacggggtcccagagactgaccttaagttatcagatttggcagcttgtgcctttccctgccaagccatctccctgcccccatgatgccctgtctccgctatactgagaagttcattcaggcagcttaccacttcctggagcggaggtcttggttacttttctattcttatgctaaaacatcacaacttggggaggaatgggtttattccattttacatctctcaggtcactgaggtaagtcagggcaggaagtcaaagcaggaaccagaaggcaggaactgaagcagagaccatggaggaacaaggcttactggctggttcctcatggcttgctcagtttgatttcttatacaacccaggaccgcctacccttcccccaacccgagggatgggacgtcccacatcaatcaccgacttagaaaatgagcctcaggcttgtccacaggccacttaggtggagatgttttctcggttaagtgtctctcttccccagtgacttttgcttgtgtcaagttgacataaaattagtcaacacactgggctggcgagatggctcagtggttaagagtgctgactgttcttctgaagggcctgagttcaaatcccagcaaccacatggtggctcacaaccatccgtaatgaagtctgatgccctcttctggagtgtctgaagacagctacagtgtacttacatataataaataaataagtcttaaaaaaaaaaagtcagcacaagctgcgtccactgacaacctcagctggacttgagaatgcacgctctg

SEQ ID NO: 2063 - DNA, 1200 bp, mus musculus
ccctgtgccaacccttgctttggagtccatgcttgaataggggagacagatgtaaaggtacagcacactgggtctggcacaggggccagagcaaggagtagggaggttgaggaagggctaagagatgccctggtgctctaggaaacctctggaaggagctgggacctctctcatcgcctcagttcatctcgtgctctgtgtgttcccttgtctgagtctctctcacctgctggacttgaagacgtgaaagaacttgagctccgtttttctgtggtgccaaccccagaggctccatcccgggttccatagaactttgtagatcaggggagaaggatgataaaccacaagtcttttctacaccagatttctagtcatgtcctggtctctgttctcttgtattacagtcctcctttaaacaagaggcccagggtcagtactataagaaaaaaagtcatagagttaaaagtagcctgggcagagcactaagatcattgccaagatagcccaaagcttttgcctccatttctcatacccacaaaggggccacgagatctgagcaaacccatgataggtctgtcctcctgtggctgagggtacagatgagttggctaaatgagatccgctgagtgggcagggtaaggataggactcacttgaggtattttttttttaaccctaccatacataggcttaagacaaagtaggattctgcagctggggtggaggctggggaaaggaccgcggcagatgggaagcagtggttcttgggaatgaggcctgaccccatgtctctttcagaatggacatgtgaattgttaccgcctccgctgcccaccccttcactgctcacagcctgtgatggagccacagcaatgctgtcccaggtgtgtgggtaagtagcttccttccctcgctggcactgagcccccggctgtccatcttacttatgttgtaagcctctggctgagagaaatctccagaagaggagcagccctgtctgttagatatgtgggaacagacagatgttcatggacacatctgggccctcaagtaggctaaggtagcagcaaacttctggcttcaaaaattgatatacatagcaggagaaaaagggcaggggaagtagagattgggtgggcaagatgcctcagcaggtaggggaacttaccttcaggatgacaatctctgggacccatacagt

SEQ ID NO: 2064 - DNA, 1200 bp, mus musculus
ataagtctgatgctcactttgagaaattacattcagatccaacactctctggtattcatgtctgcttgttactccccaactccttgcccacttgagtaccaggaccctgaattctcccgtgggttgaggaactccaactgagccagccctcggcacccatggtctctggggataatatgagtcatggacattgacagacctccctgaatcccgacatggccctcagtggctacattggcagggacttcaccatggcctcaaggtggctgggatgactacacacaacagactattcttctcctccctcgaatctccagttccatctcccttcacaatgctcaaactgtgctgcttctctttctttccataattgtacttttagtggctcctgctgcaggctggccaagtggttagtgggcctctggtggtggcaaatgtgtccctaggtatctccagtctgcccctgtggcatagagctgggcgggtctctgaacatttccccctcctgcactgtgtggtgagaaggcagactggcctctgtgtgtctatggcctgctggagcccttcagtagaacacaggtctctgggtctctctctctgccagtgacccacagcaatgacgatggactggtcttgggatgtcttactccaactagtctctgttgcatgaaggcaggcagggctctctgtgtgtcctgtgcctgccagctccttgcagttgagggcgggtctctatgagcatctttccccactaagtcaacttggcatggcagtgggcaacaccacagatgtcttcctcttcctccttttgttcagtgtggagacatgcagggctctatgtctatggtctgactgtgctgagcatggaaggctggtctgtgggtgtctttccatacctatgccaggtggcatggcggtgggcagaactctagatgtggctttacttttaaccttcattgcttctgcacagccctgggatgctgcaatggtctccttgtcactgacctcactgactcagcacaacagtcagaggtcccagcccaaggcaagtcagggcagtaacagttcaaaataggtgatttgtgataaatgttgcaatctaaggaaataaaccattcataacgacatcttgctttcttgtgactaggtatttctatagactgtagcctttgtttgagagactcctctaaggctagagtt

SEQ ID NO: 2065 - DNA, 1600 bp, mus musculus
tttatttttaaaaatattttagatgaaataaattattcctttttcaggtatgttctgtcaactattgattcacattttttattaatctctttcacagagatttattatgaatctttttggtctacagtgtggttatctcacatgcctttttcctggtactaagtgtgaaattatggaaacaaaagaaaacatttcatatacttatcagtgcttaatccatacaattgcatctttacacagtaaacaataaacagatttgtaacaggaattaggaagatggtcttttcacaactagaattttttttagtgcttgctgtagcatattttatatttcatacaatttattatatgtttaaacttcattagacttagcctttcctacttagcactctgaacatggctcccctgatgggtttggacttgacactgtagatgatggggttgagcacaggaggcaccacaaggtacacatacgcaaccagggcatgaacaatgtgaggcaggtgctttccaaaacgatggatcatggacacacctatgactggaatgtagaagaccaggacagccaagatatgggaaacacatgtgttgagggtccggacacgctccctgggagaggctagccccatgactgtgtgaagaatcaaggaataggacatgacaataagcaaggagtctatacccactgtggacagaaccacatagagtccatataggatgttgacagtaatgtcagcacaggccagcttcatgacatcagcatggaaacagaatgagtgagacaggaggatcttgccagggcagtagttcagcctcttcagcaagaagggcaatggtaagagggacaaagtagctcgggttgtaatggccaccccaatcctgatgatgacattgttagtgaggacagatgcatagcgcagagggttggagatagccacaaagcggtcaaatgacatggccaagaggactgaggactctaccacagagaagaaatgaagaaagaacatttggatcagacaggcattgaagtcgatgaaacgatagtcaaaccagagcacagccagggtggaaggcaatgtggacaagctgagacccacatcacttagggctagcatggacagaaagtagtacatgggctggtgtaggctatgggtcctcctcacagccaggaggatgaggcagtttccagtgagtgccacagtgtacatggaagagaatgggatggagatccagccatgagcaaactctagtcctggtatgccagtcatcaggaaagattgtggctggaagaaggtgatattgacaaaagcctttgaggagatcattcttggagaaagccaatcattcccaggagatgtgatgtcctcattctggacagatactgaacatatctagagaggagagagtgacatagcattgagtcaaaagtctttacaatcaagtttcattaattcactgtttttttttttaaatcgattctttattcaggtaacaagttggttctgctcactgcatgtgggaaacatcagaatagcatcctggaaagggactatcagtgcagttctcaccaggcgacaggttaacaatgacgcagtggcat

SEQ ID NO: 2066 - DNA, 1200 bp, mus musculus
acttcacaggctcccaagtctcataagcatgcaatgtcatcaggtctagtcttttcctctcagaactttgaacatggctcccctgatgggcttggacttgacactgtagatgatggggttgagcacaggaggcaccacaaggtacacatacgcaaccagggcatgaacaatgtgaggcaggtgctttccaaaacgatggatcatggagacacctatgactggaatgtagaagaccaggacagccaagatatgggaaacacatgtgttgagggtccggacacgctccctgggagaggctagccccatgactgtgtgaagaatcaaggaataggacatgacaataagcaaggagtctacacccactgtggacagaaccacatagagtccatataggatgttgacagtaatgtcagcacaggccagcttcatgacatcagcatggaaacagaatgagtgagacaggaggatcttgccagggcagtagttcagtctcttcagcaagaagggcactgggaatagggacagggtggctcgagctacaatggccaccccaatcctgatgatgacattgttagtgaggacagatgcatagcgcagtgggttggagatagccacaaagcggtcaaatgacatggccaagaggactgaggactctaccacagagaaggagtgtaagaagaacatctggacaagacaggcattgaagtcgatggaacgatagtcaaaccagagcacagccagggtggaaggcaatgtggataaactgagacccacatcacttagggctagcatggacagaaagtagtacatgggctggtgtaggctatgtgtcctcctcacagccaggaggatgaggcagtttccagtgagtgctacagtgtacatgaaggagaaggggatggagatccagccatgggcaaactctagtcctgggatgccaatcatgagaaaagactgtggctggaagaaggagatgttgatgaatggcccagaagggatcatccttggagacagctgaggactctaggaagatatgatgtcttcagtctctgaagaaacgtaagtaaaaagatgaagttatccaaagacatgggctataatatctgttgatatgggtccaaccatgatcatgacagatatgaaccagatttaaaaatttaatgtgtctaaaagaaaaaaaatgtctaaagaagaagcata

SEQ ID NO: 2067 - DNA, 1200 bp, mus musculus
gttaaattatacaactgttaagatttaaatatcatgttttcaagttaataatttatgggtgatagcattcttttaaaaaattcagtggttaaatatagaaaaaagcttctttgtttttcttatgatgacaagaacaggttaagtaaatatgtattatccacaaaaggtttcaaatctctcattctgttaaacttgaaatttattccacttctgtgaatatcttgaagggctgtgagatatcttgtaaatatgtgttggtttgtcaaagtttgttgaatatgtcctttggtcatttacctggagctactgtaatccctggctcaagggtcttttctcctgaatcctcggatgaccctgtccctgatctgtttggttctaactccatagataatagggttgagcatgggaggaacaagcagatagaaattagcaaacatgatatggacaactcgtggcacgtggtggccaaagcggtgggtgaggaaggtaaaaagggctgggatatagaaagccaaaataacacagacatgagaagcacatgtaccaaaagctttgaggcgagcttcacctgagggcaacctcagcacagctctcagaatcatcacataagatacactgatgacaattatgtcaaagccaaccacagagaaagccacaaagagtccatatccacgattgactctggtatcagcacataccaacttgagcacagccatgtgctcacagtaggactggggaatgaccttgttggggcagaagggcatcctggagaccatgaagcagaaggggctcacccacagcagccctctcaccatcacagctgcccctagtttaatgactacagatgtggtcaggatgctggaatgtcggagtgggaagcagatagccacatagcggtccaaggccatggtcatgagcaccccagactccacagaagaaaaggcatgtatgaagaacacctggatgaggcaggcgttgtattcaatctcatgactgtgaaaccatagtatggccagcattttaggttgtgtggaggaggacaggaccaggtcagtgatagccaacaaggccaggaagaggtacatgggctcatgcagggtgtggtcaattcggattatgtataggatggtgatatttccagtcagtgccacaatatacataacacagaaaggaaaggcaatccaaaattgataattctcc

SEQ ID NO: 2068 - DNA, 1200 bp, mus musculus
tctaatattttaaatgttacaaattctaataagtagcatagcatcatttgttttataaaatatttattataaagaatgattttactacaatttaatattgaataaatttgtaaaattacagacatgcaaataaccatccatgccttggctgttatgatcctcagagagcagagtaacttcaccacacaggaaatatgatgcattctctcatgttggcttcaaggaacaactcttcccattctacatttttcatcttgcttggaatcccaggactggagaattaccaattctgggttgcctttccattctgtgtcatgtatattgtggcagtgactggaaacatcaccatccttcacataatccgaattgaccacaccctacatgagcccatgtatctctttctggccatgctggctaccactgaccttgtcctgtcctcctccacacaacccaaaatgctggccatactctggtttcatgatcataagattgaatatcatgcctgcctcatccaggtgttcttcatacatgccttttcttctgtggagtctggggtgctcatggatatggccttggaccgctatgtggctatctgcttcccactcagacattccagcatcctgaccacatctgtagtcatcaaactaggggtagctgtgatggtgagagggctgctgtgggtgagccccttctgcttcatggtctccaggatgcccttctgccccaacaaggtcattccccagtcttactgtgagcacatggctgtgcttaagttggtatgtgctgataccagagtcaatcgtggatatggactctttgtggctttctctgtggctgtctttgacttagctgtcatcagtgtatcttatgcaatgattctgagagctgtgctgaggttgccctcaggtgaagctcgcctcaaggcttttggtacatgtgcttctcatattggtgtcatcttaaccttatatatcccagcccttttcaccttcctcacccaccgctttggtcaccatgtgccccgaattgttcacatcatgtttgccaatgtctatcttctagttcctcccatgctcaatcccatcatatatggagttagaaccaagcagatcagagacagagttacccaagcattttgtggaaaaggctcatgaatcaggaaccacagtatattgtgttttcatttacccacattgacat

SEQ ID NO: 2069 - DNA, 1200 bp, mus musculus
ctatggacctgaggacttagattccattcaaggaaaacagtctctgaattctcactcggatctgctgagtcttgatactgtatataatggggttcatcaagggtgggaaaaggatataaatgttgcccatgaggacctgaaccagaggagagagatgcttcccaaagcggtgaaccatagtcagaccaataatggggatgtagaaaaccaaaacagcagagatgtgagatacacatgtttgcaaagacttgattctctcctccctggatgcaatcgatagaactgtgtgcaggatcatcacgtaggaggcaagaatgagcactgcatccagtaacagggtgcaaatcaccagagacagagcatagaaactgttaaagcggatatctgaacaagccattcgaatcaagtcttggtgcaggcagaaagagtgggagaggaaatgaggcctgcagtaatttaagaacttcaggcggataataactggaggaatgagcatagaactcctacataagatggccactccgattttcaggattctgtcattggttaggatggaggaatagcgtagagggttgcaaatggcaatgtagcgatcaaaggacatggcgaggaggacagaggactccatgaaggacaaaccatggatgaagtaagactgtgcaatgcaggcatcaaggctgatctcttgaagaaatccccaaagaattcccagcaccgtgtgcacagtagacagccccatgcataggtctgtgagggctaacatggccaggaaatagaacatgggctggtgcagacttgactctgttcggattacatgaagtatcatgcagtttcccaggaacaccattgcatagatggttgagaaaggaatggcaaagaagtagtagacttccaggccaggaaatccagtaagaacaaatctagaggtacttaagtttgacattaagaaaactgacttgatagaaagtacaaaatatttctggagggctattctgcagtacacatgctatattctactttctaataataactatctgtttgaaaaaatatcagtttccataaacagtgaaactgagacatgttccttggttgtacatcattgcagaaacctatgcggacacaaacgtattcagacctagtgttataagaaacaggaaagcagggagttttatgtcaaaacaataatgtctatgggctcag

SEQ ID NO: 2070 - DNA, 1400 bp, mus musculus
ggctgattatgggatggatccctggatgtggcagtctctagatggtccatccttttgtctcagttccaaactttgtctctgtaactccttccaggggtgttttcttcccaattctaagaaggggcaaagtgtccacactttggtcttcgttcttcttgaatttcatgtgttttgcaaattgtatcttatatctcgggtacactaagtttctgggctaatatccacttatcagtgagtacatatcatttgagttattttgtgattgtgttactcactcaggatgatgccctccaggttcaaccatttgcctaggcatttcataaattcattctttttaatagctgagtagtactccattgtgtaaatgtaccacgttttttcgtatccattcctctgttgaggggcatctgggttctttccagcttctggctattataaataaggctgctatgaacatagtggagcatgtgtccttcttaccggttggaacatcttctggatatatgcccaggagaggtattgcaggatcctccagtagtactatgtccaattttctgaggaactgccagactgatttccagagtggttgtataagcttgcaatcccaccaacaatggaggagtgttcctctttctccacatcctcaccagcatctgctgtcacctgaattttttatcttagccattctgactggtgtgagatggaatctcagggttgttttgatttgcatttccctgatgattaaggatgctgaacattttttcaggtgtttctcagccattcggtattcctcaggtgagaattctttgtttagctctgagccccattttttaatgaggttatttgattttctggagtccaccttcttgagttctttatatatatttgatattagtcctctatctgatttaggataggtgaagatcctttgccaatctgttggtggcctttttgtcttattgacggtgtcttttgccttacagaagctttgcagtttcatgaggtcccatttgtcaattctcgatcttacagaacaagccattgctttcccctgtgcctatatcttcgaggcttttccccactttctcctctataagtttcagtgtctctggttttatgtggagttccttgatccacttagatttgaccttagtacaaggagataggaatggatcaattcgtattcttctacatgataaccaccagttgtgccagccccatttgttgaaaatactgctgctcaaaatttttaactactattaggcacttcatcaaactttcatagcacttatactatcaatacatgcaaaatgcaatgtcatgactgatattcacttaacagtaagaatggtgtgaacattcaaaaaagactttaaaagtagaacttccaaaaccaagag

SEQ ID NO: 2071 - DNA, 1000 bp, mus musculus
gagagtctataataaggattcaagtcctactgtgtttggacagtagacggagaacactcctctgaatttgcttggtcttgatgctgtaaatgatggggttcataaatggaggaaagagaaagtagacatagctcatggtaatgtgcaccacatggggtgcatgctttccaaacctgtgaatgaaggtcaggccaatcacagtgatgtaaaagaccaggacacagctaatgtgtgaaacacaggtgttgagagacttttttctctcctctccagaggcaatgcccataactgtcttcagaatgaggacataggaaaagataatgatgagcgcatcgaggaagaaagtcaaagcaaccaaaacaactggatatatgaggttaaaagtaatgtcagcacatgccagtttcatgacatcttggtggaggcagaaggcatgagaaagaacatgggaatggcagtatgggaaccaaaagagaggcatgattgggggcacgatggacacaaatcctctgagcagtgctcccagtgccatcttcatcaccctggaattggtaaggatagagttgtaatgcagtggtgtgcagatggcaacaaatcgatcataagacatggcaagcaagacccccgattctacaatggctagtgagtgaatgaagtaggactgaatgaaacaggccccttgtgcaatctccctctggtttagcaccaggacacccagcactgtgggcatcgtggttagtgtcatcccaaggtccatacttgccagcacagccaagaagtagtacatgggctcatgaagactgtggtcactccaaatgatgaagagaagggtaccattccctaaaatgatggagaagtagatgacaaagaaagggatagagatccagtggtgaatcatttccaagcccagaaagcccgtcagtaggaaaggagcatcactgctgttgggccacatggtgggatcgcagttgaagacggtttcagagagggactgtctaag

SEQ ID NO: 2072 - DNA, 1200 bp, mus musculus
aatctgtcatatatacttcttgactctaatgattgagtgaacaatgataccataatgatgctgtgtttaatgtggattgcagattctgtatgttgcatccatcaagtatgtcagaagtaacaaacaccactcatgatcctttctacttcatcctcaccggcatcccaggatttgaggatatccatctctggatctccattcccttattctgcctctacaccatctccatcatgggaaacaccaccatcctaaccgttatccgcacagagccatctctccaccagcccatgtacctcttcctctccatgctggccctcactgacctgggtctaactctcaccacactccctacagtcatgcagctcctttggttcaacatccgagaaatcagctttgaggcctgttttgcccagttcttcttcctccatgggttctctttcatggaatcatctgttctattggccatgtcctttgaccgttatgtggccatctgtcgcccactccactatgcctccatcctcaccagtgaggtcattgctagaatagggttggccatcatttgccgctgtgtcttggctgttcttccctcccttttcctgctcaagcgcctgcccttctgccattcccaccttctttctcactcctactgcctccaccaggatatgattcacctggtctgcgctgacatcagagtcaacagctggtacggatttgctcttgtcctgctcattattgtattggaccctctgctcattgtactctcctatgcacttatcctgaagagtgtcttgaacacagccacttggactgaacgactccgggctctcaacaactgtctgtcccacatgctggctgttctggttctctatgtccctatggttggtgtgtctatgactcaccgctttgccaagcatgcctctccactggtccatgttctcatggccaatatctacctgctagcacctcctgtgatgaaccccatcatttacagtgtaaagacaaagcagatccgtcaaggaattactcgcctcctcttgcagagaaaggtgcactgaagactgaagtttatataaaaagggtacttttataaatgtaacatggagtcaagcatgaatattacttccataaaattggcataccaaggatgtggaatggaacatttgcttaatagatactcttagctaataaaagaaacattgt

SEQ ID NO: 2073 - DNA, 1000 bp, mus musculus
ttagaaacatacaagatgccttttaaaacataatgcggtgtttgattaccaaaacctgtcatcttacaacctcctcctaagaaggttccgtattccctgcttgatctccctggttcttaccccataaacaatgggattcagagctggggggatgaggtgatgcaggatattgagcaggatggggacgtccggaggaatcctctccctggccaggttagtgatgactagcaccagcaagactgtgctgaagaagaggatgaggatgaagtgggaaccacatgtgctcagggctttggccacagctccctctgctttgatcctgagcacagccttcagaatgaatgaataagatagaacaatgaggatgaggtcagaacccagcagggtccaacctataacaaactggtagagtttattaaaagtgatgtcatcacaggagagtttggaaacagacatgttagtgcagatgcagttcctgataattcttgcacaatatctcagttgggaagaaagtatggggatgggcatagtaagaatcccatttctggctgctacaaagatggcagccctaaccacaaactgatcagtgatgatggatgggtactgtagaggcttacagatggccacatagcggtcataagccatgaccatgaaggtgcaggactccatcgtcaggaaactgttcatgacaaacatctggaggaagcaggaagagaagccaatagatttattgtcaaaccagaagatggccaggaccttaggtatgacagtgaggcagagcacaatgtccagcagggacagaaggctgagcaggtagtacatgggctcatgcagagaggcctccatcctgatggtgatgagaagggtggcattggctcccatggccaggaggaagaggaggctgaggggcagggacagccaatgctgccaggtctggtagttggggaagcagatgaggaggaagtcaggggccaggatagaggaagtgttgctttgtgct

SEQ ID NO: 2074 - DNA, 1400 bp, mus musculus
ttacattgacttcatgaaattcacaggcaaatggttagaatttgaaaatatcatcctgagtggggtaactcagtcacaaaaaaaacacacatggtatgtactcactggtaagtggatattaggcaaagagcatggaatacccatgatacaactcatggaccacttgaagttcaagaggaaggaagaccaaagagtggatgcttcagtcctacttggaagggggaacaatataatcaagggaagtagaaggtaggaggcaattggggagaagagaagatggggaggggaaaagagggcagaattaggtatgggaagagatgagggagatgtacagagggtcaggaaattgaacagaagtgtatagcagttgggtatgtggaactgtggcagtcaccagaaagtcccagatgccaggaaggtaagacactccaaggactcccatgggcataacaatagctgagataccccacaaagggaagggagaacctgtcaagaccatatccacaggttaggcatggcccccagttgagggatggggccattcacccatctccaaaattttaacccagaattgctcctgtataaaggaaatacagggacaaagaccagagcagagactgccccacctcgggatccatcccacatgcaggcaccaaacccagacactattgctgatgccaagaagtacttgctgaaaggagcctgatacagctgtctcctgagaggctctgccagatcctgaccaatccagatgctgaggctcaccaccaaacatcagattgagcacagggaccccaatggaggagttaggggaaggactgaaggagctgaaggggccttatctggcatcagtgggagggaaggcccttgttcctatgaaggatggatgcccaagtgtagaggaatactagggtggtgaggcaggagtgggtggatgggggagcaccctcatagaagcagggtaatgagggatgggataggggttttgcagagggaaaacagggaaaggagataatatttttctttttaactttacatagcaattttttctttttccaatttttattaggtattttcttcatttacatttcaaatgctaccccaaaagtcccctataccctccccgaccctgctcccctacccatccactcccacttcttggccctggtgttcccctgtacttgggcatacagaaaatgtggtacatttacacaatgagtactactcagctattaaaaataataaatttataaaattcctaggcaaatggatggatctggagggtatcatcctgagtgcggtaacccaatcacaaaataactcacatgatatacactcactgataagtggatattagcccagaaacttagaatacccaagatacaatttgcaaaacacat

SEQ ID NO: 2075 - DNA, 1200 bp, mus musculus
ggcccttgggccaactgagttaagtacagaagctgtcagaagacagttcagctcatacacacatccttgcctgaaactgggaagaactccttgtttgggagctttgctgagcccacagacatcctcaaagcacagcataaggcctgtcctccacacaagggactgcttacagaatgggtgctggtcttgaacaaaccttgatccctgggttggcattccgttgggacagcttctcttcctcctggggaactggttctgggctggaggcagatgggaacacttgacacagcacctctatttttagagttctcccaatacccgttctacatagacccagtctaaccgtagtctgctgcatctgactcacctgaggctctgagctgggaaggacaatgtcgcctcctcggggtccttcagtcccaactccattggggcctcctcactgggttcatcctttgaaaagggattgaagaatcaggccaaaatgaagccccttctcccacccccgcacccccagagtgaagctggttccttcatttaccttccaaaactctccttcctcaaagccttcttggtgagcaaagccagtccaggtgagctgaaggaggaacagatgtagggtgggagtttcgccctgttctagaagacagacccttccacccctggcatggaacaagccattgagtctcacctgggactcttcttgggggctgctcccctgtgagggggaggcccggcctgggggttcccactgggtggtccctgttgggatgtgccagtagtaggtccctgaggtgtcctgtaccctcatccatccagccggtagatcggaatccgtctcgaaagcgttggggttccagaaggaatctgccaggtaggaggttcagtgagggtcagcccacccaacaagcaatcagatggcccatccccgtcccaagaccccatgaatgagaaggagttggggaagcgacattatagttcctgcttgcttctagagctggcacttgagtcaccatattgggagccaccagtggggagcatggctcaggtctcctcctgggccctgctgctgcctactgtggccacatggagagaaaaagaaagcagagaggaaggaggaggagaggagatagaatgacccaggtcacctcatgtatcatgcatagcctatgtctagctataaaagatacacacactgcc

SEQ ID NO: 2076 - DNA, 1200 bp, mus musculus
gtacaatgtgttctttaaactttagtagagattctttaataaatgtgagtgccttctcatttgggacacagctgtttagaattgagacttcatcgtggttgatttttttgtttcaagagtatgagatgtccttcctcatcttttttgctagcatttttgtaagtccattttatggcatatttataggaccatggaagccagcctggttcctggttgagctaaggctataaattcctgtggcacaaaagggaaggtaagtcttccaccttgttcccaggcaccaggctcctgtcactgactgcatccctccatagattgtggcattcagtcactaaagggcaatgcccctatcctctccacaggtagaggacttgatctgtgttcacataggtaccattttaatgaggtacctaaagacctagaggcttagctaataaatgtcccttctcacacactcctcgatgcaaaagtagttaaccttagccccaccctgagaagttgggtatggttttactcagctattttttccatgacaataagtcccttaaaaccatggactgcctcttttcattgggatctactgtgcgaagctatagagaaggcctttacctaaagagcctccatctaatctctggtagaaggcctctttctgttcccagccaccaagcgaagcctaagccagctgctttcaagccaaggactctcctgtggaaatccagctggagtgcttgagaaccagacagccctgggatccttgcaggcctggggacctccaatccagcttaggtggtcctgtgcctcagactgtgagtcatgttctcagggctgctctctagcatgaaacctgctctacaacagtgtggagtaggtccttcctgtgtcctgcctccagaagcagctgaacctatggaggagcagatatgggactattaaccctacagatattagaatggtaactctcacttgtttcttgagagcatttgtttggaaattgttttccagccttttactttgaggtagtgtttgtctttgtcactgaggtatgcagcaaaatgctgggtcctgtttacatatcgtctcttagtttatgtcgtttttttttttttttttgaattgaatttattgatgttaagagtattaaggatcaatgattcttgcttcctattattttgttgtcagaggtgggattatatttgtgtg

SEQ ID NO: 2077 - DNA, 1000 bp, mus musculus
gaaaagatatcttcagagaaatcttggcagagggccctaaggtccccagtagactctccgcactgcaggcaccctagcacacccgggtccttgagatcactggtgagtggaacacaacatcagtcccaaaaaacctagagagttttgtgctagcaggaacagggacaaaggacagctgccaaaccagtggctggggttctttctagttggcgccacccctgcgccatcttcgttgtgatctcggtgaagagcccccagatccccagaggtctttccacgctgcaggcaccctagcacatccaggaccctgaaatcactggtgagtggaacgcaacatcagttccaaaaaaccagagagtcttgtgctagcagcaacaggatggcagaggcagatggatttctgagttcgatgccagcctggtctacatagtgagttccaggacagccagggatatacagaaaaaccctgtctcaaaaaacaaaaacaaacaaacaaaacaaaacaaaacaaaacaaaagcaacagggtcaaagaacaaaggcaggccctagcacacccagaatcttgggatcactgagaccattctatgcaggagagcacttgggcagcagaagcaacagagcttcttggacagggtcccttcgggccgtcattctcagccaagagacatagctaagacccagacccctggacaccttccctgccaaaggagagttggcctcaagggagagctctgacccaaggacttagaaggtggatcagagctccagacttctggacaccttccctgcaagagagcttgcctacagagagtgttctgaccactgggacacaggagagaggttatctcccaggagtgctgatagaggctaaagaagcacaggaggaacaagctccagccagagacagctagaacatctaacaccagagattaccaggtgacgaaagacaaatgtaagaatctcactatcagaaaccaggaccactgggcatcatcaga

SEQ ID NO: 2078 - DNA, 3400 bp, mus musculus
tcaaattcattctagtcatagttaaaattttttaaaaaactaaaacagtttttgatactgttatataacataataattaaacttactaaattaacaattgttttgagtcattgatcgtatttagattatattgcccaattgtttctaaggcttcatttaatgcatgaactataacttccttttaaaatgtccttatttgtaaatgttaaatatattccaatcatttcattataaataaaaatatgtatattcagattctttcgatattttaaagcttctgttacatacatatttaccaatttcttgccagcaagactgaaataatttgtacctctgcatgtcctagtgaattttgagaggtttagtttctgtatctactaaatccagctataggcttcatacatctatatatgacccaacactatattaatttatgtgtatttatagcaattatatggtagatattgttctactctgtgataacaaaatgtgactttgtctccataatatctataatataatatattatattatattatattatattatattatattatattatattatattataagatattataaaggctgcagtagattaagaaataaactatactcagccactagttcaatggcatcaataaatttggaaatgaagccagaaatcactgtgatccaagagataataagcaacacaataataataaatagaaaaattcatattttgggctggtgatatagatcagttggtagggtgcttgcatagcaaaacaaagctttggttcactccccagggcacatagctgcaatgccaacatttgagagatggagtcaggtgcctcagggcacatagctgcaatgccaacacttgagagatggagtcaggtgccccaggagttcagaagcttctttcattacatagcaaactcaatggcaacacagaatacatgaaaatatgtcttagtttcttgtctcctttctttaaaactcagtccagaatctttactttctgagcctctgttatttcacagaccgttattggcctgtgtcttcttccttcatataatccatgcttcatttaatgagaaatgatctgtgtatacacaatactggtccaagccttactccatatactggatccctatcctgcagaaatccagcctctaccttataatcttttcctcttcctttttctggactaagttgtagaaactagaagcgctgattcttaacttaatcccctaatttagacttcaaaagaaaaagagagaaagaaagaaagaaagaaagaaagaaagaaaggagggagggagggagggagggagggagggagggagggagggagggagggagggagggaggaaagaaagggagggagagagagagaaggaaagaaagagagaaagaaagaaagaaagaaagaaagaaagaaagaaagaaagaaagaaagaaagaaagaaggaagaaggggagggagggaggaagggagggagggaggaaagaaagggagggagagagagagaaggaaagaaagagagaaagaaagaaagaaagaaagaaagaaagaaagaaagaagaaggggagggagggaggaagggagggaaggaggaaagaaagggagggagagagagagaaggaaagaaagagagaaagaaagaaagaaagaaagaaagaaagaaagaaagaaagaaagaaagaaagaaaggaagaagggggagggagggaagaagggagggagggagggagggagggaagaaaggaaggaaagaaagaaagaaagaaagaaagaaagaaagaaagaaagaaagaaagaaagaaagaaagaaagaaggaaggaggggagggagggaggaagggagggagggagggaggaaggaaagaaagaaagaaagaaagaaagaaagaaagaaagaaagaaagaaagaaagaaagaaagaaagaaagaaagaaagaaagaaagagggggagggagggagggaggaaggaaggaaggaaggaaggaaggaaggagagagagagaaagaaagaaagagaaagaaagaaagaaagaaagaaagaaagaaagaaagaaagaaagaaagaaagaaagaaagagggggagggagggagggaggaaggaaggaaggaaggaaggaaggaaggaaaagaaaacaaacccaagttttatattatcaactgctccctacctaaccatctctgctggatttcttggtattggcgtcctggccttgggccaggtgcagagtgcgacgtagggcttttttgacttcttgattgcgcaagcagtagatgatgggattgagcaatggtacaatgacagcgtagagtacagagaccagcttgttggtgtcaaaagctgagagtgccttaggcctggcatagatgaaaatactggctgcatagaagataatcacaacagtgaggtgggaggcacaggttgaaaaggccttatggcggccagcagctgaggggatgcgcatcactgcacctgtgatggccatataggaagccccagtgacagagagtggccccagcagaataaaaatggccaggataaagtctgtaagctctgctgtggacatgtcagtgcatgacaagttgagcaatggagaaacatcacagaaaaagtggttgatggtgttggggccacagtaagacaggcgagaaatgaggaaaactttaaccatggagataccaaaacctccagcccaggatccagctgccatctgcacacatagccggctactgacaatgacaggatagtggagtgggtgacagatggccacatagcggtcataggccatgacagcaagaaggacacactctgtgcaacccaagcctaggaaaaagtagagctgtgtcatgcatgcctcaaaggagatcagctgtccatgattctcctcggaaccaatgaagccagcaagcatcttaggaatcgtaacagtgacataccaaatctccaggaatgacatattagccaagaaaaaatacatgggtttgtggagggtggggtggttcctaattgctgtaatgatgagtatgttttcagtcagcaccaacacgtaggccaacagagaaaggaaaaatagtagtgcccgcagtggggcaggagctgggaaacccagcaacacaaattcactcactctcccagtgtggttccttcgctccatgttttcagtcttgttcaagagatagaccaaggtatcttataaaagcagcagcaagaatctagcttggtgactattctctgcaatgcttgtggtaggtgtgattaatagcagctgttcgatgagctgaatggtgagccaagaaaacagagacgaaaataaatgactatgtttacagacactttaaaagttgcctttagcccttggagaatcatgcactgagaaataacg

SEQ ID NO: 2079 - DNA, 1000 bp, mus musculus
tatcctaaatcagataggggactaatatccaacatatataaagaactcaagaaggtggacttcagaaaatcaaataaccccattaaaaaatggggctcagagacagccggccaccttcctggtgagagcacgggggtctgcccggcctgagaggtttgtgtcacaggcaccggcgggagccttcttggctccgggactccgcggagggcaggctgcacgggtgactgtgtggaatacagaggccagccgtttctggtatgggcgagaatcgcagagcttctggggcggcgccatcttcggccccagacaaccggccaccttcctggcgagagccacagagcttctgaggcggtgacatcttcgactccagacaaccggccaccttcctggccaaagcaacacagcttctgggaaagatcctgttttggtccttcaccttcagccaggaggaggtccaaacaccagataactgtacaccttccccgaaagaggagagcttgcctgcagagactgctctgaccactgaaactcagaggagagagcttgtctcccacgcatgctgattgagggtaacaaaatcaacagaggaagaatctcttaacaaagacaactataacaactaactccagagattgccagatggcgaaaggtaaacgtaagaatcctacttacagaaaccaggaccactcaccatcatcagaacccagaacacccacttagcccagtccagaacaccctaacacacctgaaaaggtagacctggatttaaaagcatatctcatgatgatggtagaggacataaagaaggaattcaataagtcacttaaagagatacaggagaacactgctaaagagttacaagtccttaaagcaaaacaggaaaacactgctaaagagttacaagtccttaaagaaaaacaggaaaacacaaccaaacaggtagaagtccttatagaaaaacaggaaaacacatccaaacatgggatggaaatgaacaaaa

SEQ ID NO: 2080 - DNA, 1000 bp, mus musculus
ctacagggagagcacttagaagaaaggctacttgtgggagtgaaggggggttattaagggtggggagagggtgactaagagcagggtgggatgggttgagacctgaggggcaggacctgtgtggaggaggtgagtgcactggaaacagtgtgctagccttgagcaaatggcagaaagaagcccagagcaagtttgcagaaggggaggcacatactgcttcagacaggaaacacagcactgatggatttgctctagccttgagtctctagactcagaatggagcagagcagccagccccagccagatttccattgccaccgagcaggaccctggacagcactgttgcagtctccctcagttttaaagggcaacttgccacttaagagtgattctacgctttttttttttaacatattttggttaaacactaacctccaaataacaaaacaaccctatcaaataaatgggatatagaactaaaccgaattcacaacagagtgaattgaatggctgagaaacacttaaagaattgttcaaggtcctcagtgatcagggaaatgcaacaatggacagatgccgcacacccctatggctgaattagaaaaaggctggaaaaagctgaggaggagggtgaccccataggaagatcagcagtctcaactaacccagacccctaagatctctgagccaccaaacaggcaacatatactagctgatctgaggcccacaacacctatacggcagaggactgcctgatccagcctcagtgagagatgtgcctaaccttttagagacttgaggcccaggcagtagggagggattgtggggtggggtagggtttgggaggggtgggacatcctcttggagacagaggaagaatgggatgaggaaatttgggagggccggcccccgagtgggctaatgactggattgtaaaaaatttaagaaattttaaaaaacaacaagtctgaagccaccatcaataggccaaaacagtctc

SEQ ID NO: 2081 - DNA, 1200 bp, mus musculus
aatttggtgcctggtatctgtccagacatttatccatttcatccagattttcctgagaggcctgaagaggccgctgaagttcctttggattgggttattctgcattggaggtagcaatggtgagaggggaggggcgtcatcatgacctcctctagggctctgcaacatgactcctgtggtgccaatcaacaaattgttcactgatgaatccacaaggatctctgggcctacaaccaggtcctggtccacatgactgtcgtcttcggagaaggcaccactcgccccggcaggggtatggctgacacctccatgggagaagacgtatccaggcagcagctgcgcggcccttcaagagggcacatcccgtcatctaaaggcacggtgtactgaaggtagtcctgagacatgagtccgattactacaggcacgtgttcctccaggtggaggctcaggtccccgggtgagctggggctgcagcgggactcagggcacggctctggctgcaggtctcgcagctccctgggctgcagctcccgcagatccctgggctgcagctcccgtagatccttgcgcacatcgttgactggtcctgggctggcagcatgcaccagtgctttcactcgcatctccatcttgatgcacgtctcctccgagctggtgggacgcagcggccagggcgtggggctataatggtggcttctcagtgatgtggagcggatgggccgcggagcacgcacatccttgagcccaccaggagctgaagctgaggagaaggtgtcctcatctgtagacgcagtgccgcccttgcccttggtcttctgcttggcggacaaccgcctcttcaaagtgcccatcaggctctcgcttttggatctgttcttccctttctcatcctcactgccaatgtcacaactggccatgtctttgccataacagctcccgaataaagagtcatctttcacgaagtcaccagcaagggactggggctgaaccaccatgaactcagtttcgtctttgcttttactcaggttaaaagatttcctgaaggtcttcagactgattttcttcattttgacaaaagttaactaatccaaatgggtcaatttggttctggagcagttatgcccaaacatgggaggggctgcgatgcctcatgggtgtattctgcctggcttcatttaacctctgaagctattttac

SEQ ID NO: 2082 - DNA, 1000 bp, mus musculus
acataaatgaatgtgacagttccatagaacagagtgactgcagtgaggtaggaggtacaggtggagaaggccttgtgtcgaccctcagtggagcgcatcttcaggatggtgatgaggatgtaggtataggagatggctatgacaaacactgtaataatagtaactgaggcagaaaaaattgtggtaatgactacagaaacattgatatcagaacaagagagttccactaaaggagcaaaatcacagtaaaagtgattgattctatttggcccacagaagagaaaagaaaaaaaagaaattatggcaaaagaagcattaagaatcccccctgtataagatcctacaaccaactggatacaggtttgtgtggacatttttgtggaataaagcagtgggttacagattgctacaaagcgatcataagccatggtggccagaaggaagcactcagctgtcccaaagaaagcagctgagctgagctggatgccacatccaaggtaggcaatggtgtgtttctccaccagaaagttgacaagcatattgggtgtgacagaagatgagtagccaatgtcaacagagcccacgtggctaagaaaaaagtacatagggtgatggagctgggacgatactctgatgagaaggattgtgctgaggttcccagacacagtcaccaggtagatgcacaggatgatggtgaagaggatgactctgaggactgggtcatctgttaatcccaataaaatgaactctgtcactgcagtgtggttcccatcctccaggaaagccatggggcagtgtagctggtgccagatcaaggctgtgatggcgacagaacaggaaggtatttacaaatagttcacttgatttcatttagtacgttcataaagaacatcagaagctaatatatattattcaaaaaaattgtaccaaaatgattattttattcagtgtttccactgtttatatatttgtgtgaagtaagactttcaaaattgtttaa

SEQ ID NO: 2083 - DNA, 1000 bp, mus musculus
tggggtgggacttcctaccagcagttggaagtcacagcctgtggtggactgggcaaagtaaaggcccaaagtagtgtgcctccaagtctcaggcagagagagggaaagaagggaggaaggggctctatcacatgttcgggagagggaaaccaagcccttcactagctagcgtgaactcagtgcacaggtggtcaagtgtgtgggaaagcaagttctaacagagggaacctctggcaggacacaaggacacaaggggcggggaggtagctaagtagcagaaggagactagcagcaagtagggtccctggcaggggcagagccgaacttgctttacaggcaaaccagctgaacaagaccacaaatgagagagagggggaagggggaagtttaagctatagcagactgacccaagggcaagacatatggagggcttccaggctcagtctggaattctcagccttgagaaagagaagagggaaatctcattcaagggaaagcacaggggtagctctgagctcaagaaatcttctctgggaccatgaagatggtcactctgaccagtgggaatgggggcttaccagatctgggctagcgagcatggttgtggctgagatgcgatacaaacctgcagactatctgaatctgagtcatgatgcaccaatattgagatcataaaaagagaaagagctgtaagaatatgttcctgtgaagtttgggggaagggggctcctggggggggcatgccaaggtatcccttccccccgagagaccagccacatgacagtatagtatagaatagagctgaatagagcttatttagggcatggggaggtgaattaagaggatagcagaggcttttttcttggcttcatctctattagaattaagaaagtggcagcattattaaatttgaggtcatcagtgcaagtgtccacattatcttctaccaaaaagtaaacatcaattagcacttgattatgaaaaatacaagcaaatgttc

SEQ ID NO: 2084 - DNA, 1400 bp, mus musculus
ccacctgtgtcctaagtactcagtgaatctctaattgtccaaaagtcactctcctttgtgaaacaatgctttgttagtccttgcagtagacccccaaaagcaagagaaatatggtaccaactcttcataccagaatcagatatgctgtctggccctagacttaaactgaagactactgtaaacttgaaaatagagccagggaaactcatgcatgcctcctaaaagaaatcagctccaactgtttgggtctgtatgaaatgcttaatttttgtcatctgactctagaatggagacacaaggggcttgtgttttttaagcatctgatcatatttaagcatatttcttctcttcacatcaggtaaaagaacaaaatgggaagaggcaatcgcaccacagtaacagaatttgtcctcatgggattcacagatcgccctgagcttcagctccccctctttgtggtgttcctgattctcattaccctggtaggaaaccttggcatgatcttgctcatcaaggcagattccaggcttcacacgccaatgtactatttcctcagccacctggctttcattgatctctgttattcatcttccattgggccaaaaatgctgcaaaatttattggtgaagaaaaaaaccatctccttttcaggctgttttgctcagctgtacttctccagtgcttttgtcactactgaatgcttcctcttggccacaatggcctatgatcgttacatggccatctgtaatcccctaacctacacagccatcatgacacagcgggtctgcaaggaactggtgataggagtctacacctatggcttcctgaactctgtgatacagacagtactgactttccagctgtctttctgcaactccaatgtgatccaccacttctactgtgctgacccccctctccttgcactctcctgctctgacacccacaacaaagagaggcagcttctgatcttctcggcagtgaatctcactggatccctcatgactgtcctcatctcctatatctgcatcctagtgtccattataaaaattgagccttcccagggcaagtgtaaagcattctccacctgtgcctcccacctcactgtggtcaccatcttctatgggacgttatttttcatgtacatgcggcaaccaaaaactgggagttcgtggaagtatagcaaagtgatctctgtgttttatagtcttgtgattcccatgcttaaccctctcatctatagcctgagaaacacagaggtaaaggatactctgaaaaaaatgctggagggcaaaacttcatagtgagcaggatactaggatgcagcactgtagacagcagtatataccacgctaatagaacaaagcaggccaactgctacccagttaggaagtagttaattg

SEQ ID NO: 2085 - DNA, 1400 bp, mus musculus
atgacttacagtcggcagctcaattcccaacaatcgttcagtcacagctgtgaatggaagtccaaggatctagcagttactcagtctcacgcagcaagcaggcgaaggagcaggagcaagagctagactcccttcttccaatgtccttatattgtctccagcagaaggtggagcccagattaaaggtgtgttctaccacacctttaatcccagatgaaaggcgtagcccagattaaaggtgtgttccttaaactcggagattcaatcttctggaatctatagccactatggctcaagatcttcaaaccaagatccagataaggatctccaagcctccagataaggttcactggtgagccttccaattccggattgtagttcattccaaatattgtcaagttgacaaccaggaatagccactacaataactaactagccacacgagagtttgtcctcagatggcaatgagccgacagctagacatcctctggttagtaagcagaggcctcttgccaagcagctagggaacctttgaagcctgctttgcctttctgttggtgtgccatagtggagtgccttctggtggcttccctgggggtcacaactcacatcctcagacttgctagtgtcttaggctagggtggaggctcagagtggagggcagatgcctgtccagagtcaccttgccacactaagagaactgactgccccagtctctgcctccaggggagagtgtccagtcatggacttgagaagccaacagtcatattcagttcagagggctctggatcaggagctggctacctggagagagcatcagctgacccagtagccacccaagctcagctacctggagttctctgctttggctcagtccttggaattggtgtgacttaagctcccccacgtccctaaccatgttctcccatccttccacaggaatcttctcaccagacagggcatcctaggttccagcaagcacatctctgttcccccctggggacaccaggtcctgggaggcctaacatctacaattcacccacagaggttggggtgcggtgactcacaagtcactttcttgactgcaatgtgtggaaagtaatatgtcagtccctgtagtcagtggagctgtcaagaagactaaacaggagggggttctatgttactccatctggcataaccccacactgctggggtgaaccagtggctcagagtggcacaggcgtctccaagcaacggttaactcaggggcaaggaacgtaaggcttcgaacaacatatgttgtgaagtggcaggatatgtgtcacctttcatgggtagaacccaggagaggtccctggaaatttctggggtgcttaaagtattgcctttctgggaaatcctgttgagtgctatggtta

SEQ ID NO: 2086 - DNA, 1800 bp, mus musculus
acccgggagagaatcaacatcagctcttttgcttcttgggaaggtgtattaagggttgtcatgattcaaaactgaagtattccttgtatactcatggtttgggtggcagtttcccagatggcactatttggggaggctgtgaagcctttagttggtaggacctatatggtggaaataagtcattaggttggaagtttgaaggtgatgcctggcctctagttcttgactgtgtgaaccaccacattctcttagtaataccgcatctgctgctgtggtgcgctgaaaccatgggctgaagtgaatgcttcctccttctagttgtttctgccaggcattgtggtcatggtgacacaaaagtcatcaatgcagatgtggaccactggcatagttaatggggaatggggaatcatgtctggagaactctgaagggctagctcctgcggtggaaaataccaaagagacagctattaggctgctccttgcacgtacagcaagtggagacattgggtgtctgtggtcttgactggatgaaacaggatatggggcactgagaagtggagtgtgcttggaccaggcagaggggggagttgtggagatctggatgtcacccagatggggtcaggagcctgaggtgatgcatttggcagctcttaaatgggtgcttcttcctttacacagtttttctccttgcccagacactagcttgcaagcctcggaaggcaaattttggaaacatacaggactgagagagtccagaaaaggacgtaaggacatagactatagtacctcatgctttgaaacccctctgctgctggggatcagcaggggaaagcatcagtaaggcagagtctggttcccacttggcctaagtacacactgggaaggcattggtatctccaacagagcaggtaacatcactctccttccatgtgcccctccacatggggctcacttaggagctaagcattaatgtgcatttcctactagtgaggctggaaggaagacatgctgggacccttcataccacctgccccttggaaagcaaatgaaaggcttctaatatatgtcaggagatgagccttagggactgtgtcttccaggcctcaatagatacagaaaagccaggcagtggtggtgcacacctttaatcccagcatttgggaggcagagacagggagatctctgtaagtttgaggccagcctggtctacagagtgagatccagaatgatcaaggctatacagagaaaccctgactcaaaagggtgacacacacacacacacacaccaaaaacaacaaaacaaagcaaaacaaaacagaaaagcagagccaaatggagttcagagcctaagttagagaccctaaattcaaagaacagatactaggacataagcatatttaaactgaaactaagaatgagagctgaggatgttcctgagtttgtctagcatgcacgaggccctgggttggattcccagtactgcgcaaaccatgtacttggaaggtaaagacaggaggactacaagttcaaggtcatccttgcctacacagtgagtctgaggtcagcctgagctaccccaaactctggtgttttataactacttcctctgaattgaaacatctccttctgcagggagggccataaggttgaggaacctgacaacgctttcaaggcccaggaagctgagaaagtgtcaagcatcacagagttataaaaacaatgaacaactgctgggagggggagacctgttggtgcaggagcccgcccgttgagcagggagttgcaggaatgcagcttttg

SEQ ID NO: 2087 - DNA, 1000 bp, mus musculus
tgccaactcaccctggcatcataagtcactgcaggacggggcacatcttctctcactgaggccagacaagacagcccacttaggcgaacaggatccacaggcaggcaacagagccaggatcactcctactccagttgttgggggaaccaaatgaagaccaagctgcacatctcctatagatgtgctcatgaatgacctctggttggtggttcagtctctaggagccccctagggtccaggttagttggctctgttggtcttcctgtggagtgcctatcccctctgggtaaaactgctaaattttaaacaacccaaaagtctatcatcaaattgattcatccatacaatgaaatactatgcaggattaaatattacaaaatagttttaagcagtatttgtagatatactcaatcaaaatcagtaggaaaaaagtaggttacaaagtcttaagtataagatttatacatagatgataccataagaaaaaacaaatatgtatgtgaataagccacccaaaggacaatatgtaccaaatattaataaattgtttttactttctccctaatgcatttattaatatttcataaaacaatagaaaaagaggagagaaagaggaaaagagagagagagatatgagctggtcttgccagtagttaagtgtggttcagctggaatggcaacacacttaagcaaagaaagagggagacacagtggtgtaagaagaatttaacaaaatgagaatttgaagacagagctgggcttagaagttctaatgcaggttgagaattgcctttctggcaaccttaccacccactactgtttgaaacctggtctcgtgactagtacgtgttgaattcacttctacatcagttaccacagtcaaccactggactcaagtcttgtccctgggtagaccatatggatcagcaaatgtatcataaaggtcttttggagaatcctctttataatgctagtggttagaaatgtatgatgcctagga

SEQ ID NO: 2088 - DNA, 1200 bp, mus musculus
ggcaaatggatggaactagaaaatatcatcctgagggagctaattcagacctacaaggacatgcacgatctatactcactaataagcggatattagccaaaagagtacagaatacccaggacacaagaaggttaacacctgaagtgaggatgcctcaatcccacttgggagggaaaagaaagaagtcatggggggcagagcaaggggggaacttgggtgggagaggggacaggaaaggggaggggggaagatgatcaggcattggtgaggggaacaggactgaagccctgagagccagcagaaagaatgaaaagaggcaacctcaggaggcaggaggtaggggaaccctctagaatgtaccagagacctgggaggtgagacactctcaggactcaaagggagggaccttggataaagtgctctacaatggggagagggaacttacagagtccacctccagtggagggacagggcatcaagtcagaagctctgacccaaaattgttcctgtctaaaggaactgcagggacaaaaatggagaagagtatgagagaaaggaggtccagtgacaggcccaaattgggatccagctcaaggggagacccggagcgctgagactgttacagatgctttggtgtgcttgtagactggaacctagcatggctgcactgcctccagagaggcccaacaagcagctgaaaaattcaaatgcaaatactagcacccaaccaatagacagaagccagagacctctgtgttgaattggggcaaagctgaaagaagctaaggaagagggcagccctaagggaagaccagcagtctcaactgacttggaccccctttccctgagatctctcagacactgagacaccaactagatagctacaccagctaatatgaggcccctgacacatatacaacagaggactgcctggtctggcctcagtgagagaagaaacacctaaccctagagagacatgaggccccacggagtggggaggtctggtggggtagagggctggggagaggaggtatgggatggggggggggtcagactgggagggggatgaaatttggactgtaaaaaagttttaaagaattaaaaaaaaaaaaggcttccttggttactcaaacacccaatttctctgttcatatcacaacaggaattgtgagattaaaaggtccaaaccttaaaataggg

SEQ ID NO: 2089 - DNA, 1000 bp, mus musculus
cagtgcaagtttcaggacagccagggttgttatatagagaaaccctgtctcaaagagcaataacaacaacaacaacaatagtttaaaaagtgttgcttggatacctttgatacgctgacccaagactggctaacaaaatgtgataaggatacctgtggtctatctgtgacctctcagtgacccctaaagtcatgtgacagtagcatcacagaggcctaggatccagcaatgcacaaggagtgctgaccacagctctaaaaaaggaactgtgtcccttgctgtcctggtcacggagcttcacagcttgcctgaaagctgacttttaatccttaaaagaacataagcaattactctggctatatttatccatgttcctggagccacacagggatttggcctcactctaccaaaatcttcagctcatcactcagcccatcagcgaccgtcatgtgtcctcggcacaaaagcaaagggccaattgaggcagactggcccacagctcagggaggctcttcactggccatctgacctttgacctttgaagaagttttaaggcccaggaaaacaaaagctcatcctgggacagagggacgccaagggaggagacatggcttcctgccaagaatgcaaccagccctggggttgattgctggacagcttctctgggagcttgtcctgttaacttagggactcccagaaggctcagcacttagctggccctaagtgaagggacaatgagagaccaactcggtaggcatggcaaccaacaggtgtcattcagtttgggatcacaggccctatgccagacactttgcatacaaggtctaattctgccatcactgcccaaaacacatgttgtgtagcttcccacccctgcgtcctaaatgaaaactccactgtggagagctgagggaccttgccaccatcttgcagtgtgaaaactccatctctgtgactctagcgaacccaagtgaccaaccacagactgcaaatggaagac

SEQ ID NO: 2090 - DNA, 1400 bp, mus musculus
attcttcagagatttcacatcatcttccacccttgtgacctcccctttaatagaaaaaaaaaagcccagtttatgttatctatatgctcactggagaatggacaaactctcagtggccagctccttaaatagagctgagtcctttccctctctcactcctgctggaagccgtctatttggagagcaacacttcagcaccctatcacagtattttaaaaaaattattattattattaattattattatcattgtatattttctttatatacatttcaaatgttatcccctctccaggtctcccctctggaaaccccctataccattctcctcctttgcctctatgagggtgctcctccacccacctgcccactccctgctttcctgccctgacattcccctacactggggcatcaaacccccataagaacaaaggctgctcttctacctgatgtccaacaagatcatcctctgcaacacacttagccagagccgtgggtccctccatgtgtactctttggttggtggtccagtccccgggagctccagggggtctggctggttgacagggttgctccccaccatggagctgcaagctctctcagctcctttagtcctttctctgactccgccattggggatcctgtgctcagtccaatgattggctgagagcatctgcttctgaatttgccaggctctggcagagcctctcaggagacagccataccaggcttccaaaagcaagcacttcccaatagtggctgcgtttggcgactgtatatgggatggatccccaggtgggacagtctctgtatggcctttccttaggtctctgctccacaatttgtcttcatatttcctcctgtgagtattttgttcctcttctaagaagcactgaattattcacactttggtcttcctttttattgagcttcacatggtctgtgaattttatcttggatattctgagcttttaggctaatctccacttatcagtgagtacataccatgtgtgttcttttgtgactgagttaccccactcaggatggtattttcaagttccatccatttgcttgtgaattttatcaagtaattatttttaatagctgagtagtagtccattgtgtaaatgtaccacattttctgtatctattcctttcctatcagtttttaagagtacttttccatggcttcccatttaggctgtcactagtttggcaatggaggttggggtggaggtaagggttgtcaaaaagtcttccatgtctctctttatcaactgtgtatctgtagtcatcagtctcgactgccaagttgaaactggactcacggtcctcagcacagaacctggcagtctaggtgctggattagtgctgtggaggtttgaggtgtgagtcgtaat

SEQ ID NO: 2091 - DNA, 1200 bp, mus musculus
tcctcagcattttctctctttaaaaaatgggtgggattaatattatttggagatacactttgctgtggattagtgttgcttctttgattggtctgtaagcttaaggcccaaactaggagagacaaggtggttattgcccaggcgcttgcaggactagaacatggagcttcccctgatatatggttatctatgcttaggcaataggtcgctggccactcagctcttatatctcacgaggctagactcattgcacgggatagagtgagtgtgcttcagcagcccgagagagttgcacggctaagcactgcaatggaaaggctctgcggcatatatgagcctattctagggagacatgtcatctttcatgaaggttcagtgtcctagttcccttcccccaggcaaaacgacacgggagcaggtcagggttgctctgggtaaaagcctgtgagcctaagagctaatcctgtacatggctcctttacctacacactggggatttgacctctatctccactctcattaatatgggtggcctatttgctcttattaaaaggaaagggggagatgttgggagccgcccccacattcgccgttacaagatggcgccgacagctgtgttctaagtggtaaacaaataatctgcgcatgtgccaagggtatcttatgactacttgtgctctgccttccccgtgacgtcaactcggccgatgggctgcagccaatcaaggagtgacacgtccgaggcgaaggagaattctccttaaaaagggacggggtttcgttttctccctctcttgcttcttgctctcttgcttcttgctctcttgcttcttacactcctgctcctgaagatgtaagcaataaagttttgccgcagaagattctggtctgttgcgtctttcctggccggtcgtgagaacgcgtctaataacagctggagccatggatccttcatatatactctttggttggtagtttagtccctgggagcttttggggggagactttgccagtaagcacttcttggcatcagcaattgtgtcgggtttttaatactgttcctactgtatgttatcactttcaactatgattttcaaatattctctttgcaaggcctcttaaacatttcataatttcttctctccttctctccttctctcctgttttcccattcctcccactttcctccttcctttccct

SEQ ID NO: 2092 - DNA, 1200 bp, mus musculus; identical to SEQ ID NO: 2091

SEQ ID NO: 2093 - DNA, 1000 bp, mus musculus
gtcagtgctcttaaccactgagccatctctctagccccattgtgacgttttcatacataaatataattgcattttatccatgttcacattactcttttacatccccccacctcttactgatccccccttttccatggaagaaactttgtcatatttatatacacacatataaagtatatatttaaatctagattacatatataagcaaaatctttttttatctcctttacacttccattttttatctcccctacttttagactctatagctcccctcctgctttctcataacaggaaaatatgtctctgtacatattttaacatttacatttaacacacacacatatattatgtttatttagatctaggtactgcaatgagagacatgaaatatttgtctttcttacttatgttttattttgcttaaattgatatatagttatatccactttaaaatttaaaatttatttattattgctattttttatttatttaccttatattccactcattgtccccctcctgttcaccacccttcacagtccttccttcatccccctccccttctcctctgagcaggtaggggcctcctgggtaacaccccaccctagcacatcaagtctctgcgacactaggtgcatcctctcccactgaggctagaccaggcagcccaactagaagagcacatcctacgtacaggcaacagcttttgggacggcccctgctccagtttctcagaacccataggaagaccaaactgcacatctgttacacatgtgtgtggaggcctaggtcctgtctgtgtatgctctttggtcctgcctatgtgtgctctatcagagtctgatagctctaagggtccaggttagatgactctgttggtcttcctgtagtattcatgtttccttagggactgcagtccttcctcctattattctgtaagaatccccaagctccatccagtgtttggctatgggtgtctgcatctgtctgggtcaac

SEQ ID NO: 2094 - DNA, 1200 bp, mus musculus
tgtggccttgtgggaggaaggcttggaggactcctctgctcaagctctacccagcgtggaattccactctcctcctggctgcctttggatcacgatgtagaactctcagcaacatctccagtaccatgctggtctttatgttgcctgtttcctgccatgacgacgatggactaaacctttgaaactgtaagccacccccaattaaatgtcctttatatgagccgccttggtcatggggtctcttcacagcaataaaagcctaagacaccctccctctacccacacaatctccagctatcagccaatgcctggacccttctttgcagcaaaacttccaggaaggggctggtgagatggctcagtgggtaagagcacccgactgctcttcggaaggtcaggagttcaaatcccagcaaccacatggtggctcacaaccatccataacgagatctgactccctcttctggagtgtctgaggacagctacagtgtacttacatataataaataaataaatattaaaaaaaaaaaagagaagaattaaaaaaaaaaacttccaggaagatgtactgcccttcctggacaggtgtttcttacccatcttaccatgggtggcagtctcctgttctggaggtccctgtgactacacatcttctcaccttctcagtctgtcctcttaagtttgcctttcctgatctcagccactacccgcccccaggcttagagcattgttctgcttagtttctgtagcctgggaagagggagcctcaactgaagactgtcctgcagtggacatgtctgcggggaattgtcttgactgacgattgatgtgggagggcccagcccactgtggaccattgtatcctacacatgtaagcctaaggaaagtgggctggcaggctagagtgagccaataagcagccttcctccatgacttctgcttcagctcctgctcaacttcctgctctgacttccttcactgatgaactgggatgagaagtataagctgaaacaaacctttgttttccctagtttccctaactatgcatttgctcatggtgcttatgacaacagcaagcaaaccgggacagactttcttggcccacacttgtccttgatgacgtcacctactccctatgacatcacacacaggtatcctcagatgggtctctgcaagcctctctccctctcaaacccaagt

SEQ ID NO: 2095 - DNA, 1000 bp, mus musculus
ttgtttctgttaccatggtgaattcaagtcggcgctatttcttgcctgtacgcgttaaatctttttactaggtaaactttgtcagtcagaacctcctctgtgttctgtcccccacagtgcagagctgtaataaatgctcagtggctcagaagtccatttgttggattcagattttgtggctctcttatcaggttcaagtcgatgaaggagtccccctgaagatttgcttgtcccagttctgtaaatggatccataagctgcagcagcagcagacgatcagctttgctgctggggattcagagccttgtacttccgaagtgaaactgtgtgcttttgttacgtggtcaggtaaagcatgactgatgcctgtcaatcacactgggtggtactggggcctagggggttcctgaacaggcacagtgcttgttgcagaatcacgaggaccagagctggcatcctcagaacccgtgtaaaagccacatgggcatagtggtccctctgtactccaagtacattaggtggatgtgggaagccgttgcagagtggcagttgcagagtggcagttgcagagtggcagttgcagagtggcagttggctaccgctggccaccacacatacataggcagtaaggttcttttgccaagatgaggttttgagaattaaccaaagttaaccaatcagataagagacaagttaaccaatcagatgagagacaagttaaccagtcagatgagagacaagttaaccaatcagatgagagagaacgcctctcctaggcctatataagcagcaccagttctgggcttggggtcacttcgcctctgcaatcaagctctcccaataaacgtgtgcggaaggatactgttgcagcgtcgttcttcctggccagtcgggcgcgtgcaagaggtggagacacggagtcccaagagcaagctggctagccaaactagctaagtcagcaagtcctaggctcagtgaggaactactctcagtagataag

SEQ ID NO: 2096 - DNA, 1400 bp, mus musculus
ctgtatatctgggttaatattatcatactgttctatgttcctcccattttaatttgttctccagtcagtatgtattaacccttattttcccacctgtcctgaagatgaatatgcatatgtgattaactatatcatgtgagctattgccattcaatttctcttatagctccagggcctcagaagcttagcacaccagtgtgttgctctactatgatcaagcatcttaatttctcacttacttttcataagagattagcactggacattcagtcagttttcatttggatctgttggcagctcctctatcttatgaaccttgttttatgctgtgtctcctcgtgacattttgtttgtttgttttcaggttcgcatgtctgttcttcaggtattaaaaattctagttgttttttttgaaatgtaaattatttttgaaaccctttgtctgtcagcagatgctctctatcgttattattatctgtgtaaattggcacgccatagctgtgcctgctcaggggcagaacttgttattctggaaagtgaagagagtgtgcgatgtcaactaagtgcggtcagcacacctgtcactcctttatcagtcgtttgtgttgggtccattctaactcctctcatgtagccatttctgaactatctaacaaagtatcatccattatagtagccacgtgcactcctcccttttcttttttagccatatttattatctcagtagctatgtcaaatgcaagtgtggtgtgtgtgcaagtttgttgtggaaaaaaatttatctggatcactttgagtgggtatatgtttctatttttacatcgttcctcccacgtgctggccattcgatctgttggcattcctcctaactctctattgagccacacagtaaaatggaattatcacagagtagtcatgacgttttgtccttcagagtcttgagccattcctctggtagctgataacatgtagggcagtctccctcatctagtcagaaattttgcttacagagactgtgttacggcctctgtgatcctcagtctcccttttcttcattccccagaaagtacattgaaaaactacccctcagattctctattttcccaccaattcttcatcaagactattttataaagacatttttaaagatttagatctcagattattttttcaccctttagttgactaagaagtagttacctaaagttatttaaataacctaccatattcatagaaattaaaatgtttaaaaatctagcaaaaccccaaatgctaaagtagaaaatataaatagtcttactaattctgagatttgaggatttaaacaaacaagcaagcaaacagaaccttcattccttatactcttggagttttctagttttacatctttctcccaggtt

SEQ ID NO: 2097 - DNA, 1200 bp, mus musculus
ccttttgaagtggtatgacttcagaacatatctgtccatggcagcattaacaaataaacagccagtcatggctcttgacctctgctgagctaccaggattcatcagccaaccaggattctgatagtcataccaaagggacagggatggccttggaggtgaggtctctgagtcacctcaaagtaaggccaaaagcctagaaaggtgacataatctgggaagatcacacagctgatgtgtgggcagactcaggctggcactcaggccagagcttgcttagtcggagcttcctctggcacaaagtaattaccaacactcacatggaaagccaagaacccttttaatgcttttaattacttcaaggaaaagtctcagcttggagtgagaatggcttaatacccttgtaatatttaaaaaatctcccatgctttttttttttttttttttttttttaaaaaggctcagagttcagctgctgttggttgacacatcgaacagggattcaaatagtttccttaagcctctatttagtgcttgcttacagccacagtgcaagggtctgacaaagttgtgcagataaaggaggtttggaaaatctggagagggtatactgaggtcccctgccctccactttcctgcctgcaggagctgtccacggagcagatcgcttccctgggtcctcagaatgcagcctctgtaacccactcccagcgcctgcagctcagctcggcacagctgcagagcctccagagggcactagatggcgccaagactcactcctggcagaccgatcctctgagttccagccctacctggccagcctccactgggtccccaacaggtgaacagagcaacagctgcctcagccccactcccactccccttctctgaaccttggcttgccctgcaaggtggagaggttcccatgattccgggcttgatgtatgttgggtgtctgctctcaaaggtacatcttcagttcccaccaattttcctttaacgtcttttaaagatccctgaggtggttttaagatgcaaacgttgacagtgtttaaattccctgggtatgacccagaattcaccgagtcagaatctctcaggaccaagttcatttcagcgactccttcatccacctccttgctgcccagtattaatcagtcactgtatatctctttgatacctaatatgtagggaccaagaat

SEQ ID NO: 2098 - DNA, 1200 bp, mus musculus
agagaggcatagagagatttacagactataggggcacaagcattttacaactgattcatctccccagctcctcttctacatttgattttcactgctgtggtttaccactcactggaggaccacaacatcaatttagtaagtcaggtacactatgaaaaatcagaataggaaaaactatcagaatgcctcagccttgggaagggtaagtatggcttcatgaatcttttatttcgtgtgttcctatgcaagctcgggtgaactgggtcagacataaatggcgtttctaccgtgggtagacagcatggtttaaaagtcgctctgaagagcatcaagaagcagccttggaggctcatgacattggcccgtggactgtggaggcttaatttatttttagggatacaaatgcattgttttgaattcctcataattagaatttccctctcactctaacacactaccccaagattattttggtcatcttccttgaacattaacatatcacagacaagttccttttttccccaaattgaatgttaagtatagtgtatcacatctttacaattggaatgagtggttttggtagaccagcctggcctgaacttctgctggggttaagtgtcagattgctgtgacaagaggtgtccagagattgcaaagagaaggaactgcttatgggggtaacgtgggctatgaaagaagttttttataagcagaaccttcccggagggaggggaggtgtgtaggggtgcacagagcagtcgggaggggtggtgcacacagtgtgccagcatcaaggtgggtcaggtccctgaggtgggactctgcagaggactgcttccagctggagcttgaattcactgtgtgtttatattctctgtggtccctgggtaggtggcagccccaatgacagctggcctcattctctttcccttctggctttctctgatttggggcccaaggaccacagggggccagaatgctgcagatgggacaaaaagtcaagtccaagaaaaaaaatgaaatcggggttagggaggtggtgatgaaaaagagtggagggagggagagagcagaaagagagaatggaggggggagaggagagaagaagggagggacagagggaggggtagagagaggaagagagaaagagagagagaggatagggagagggagggaggagaaagagaaaatggagagggg

SEQ ID NO: 2099 - DNA, 1000 bp, mus musculus
cccaggcacccaccccatggtggaagaagagagccaattcctacaaattctctgacttccacatgagggttatacaccctaaatgctctgcctacaaaatcaattctttttaaagatttatttagtgtgtatgagtgttttgcctgcatgtttgtgtaccatgtgtgtgccttgtgcccttgagggccagaatagggcactggatcccctcgaattgtagttacagacagttgtgagctgccatgtgggagctgggacttgaacccaggtcctctggaagagcagcctgtgcttttaaccactgagccatctctctagccttgatggttttcttttttaaatcaatgaaatatcctgaggagttagtacacacttgaaatcccagcccttgggaggctgaggcaggaggattcaaggtcagcctgggtgtgtgttgtccctgtaaaatggggaaggggatatttgggcaggatgcctgtgctcagggctgatggtactgtgcgaattcagcgaaggatactgcatcgtactcttaggcggggcggggagggggagagacaggtctcatgtcttgcagatcttacagctccgcgaagctgcacaataaagagaggaaagtaggtgttcagagaagccaggcctgctttcctctcttctcacaggatatttgtgtttgccctggtgctggtctccatcctctggatccccattgtgcaggccagccagggagggcagcttttcatctacattcaatccatcagctcctacctgcagccacctgtggccatggtcttcatcatgggatgtttctggaagcgtaccaatgaaaaggtaactctggactggcaacacaacacccgggtgctgtccacaagcgctgggagaaatggagggggagcggtctggcagggacctgtgtgggctagccttgtcaccagggagtgcgaaccctggatgggaagccacaggccaggaaaagactagataggtattctcggaa

SEQ ID NO: 2100 - DNA, 1200 bp, mus musculus
tgaaccaccctgcatctctgggatagagttgacttgataatggtcaatcttttttaatgcattcttgaattcagttttcaagtattttactcagaatttttgtatgtatgtttatcaaatagagtggcctataatttttcttatgcttttgcctttttttgactgtagtatcagtgtaatgttagcttcataaaaagaatttgtaactaatttttcagcttctagtttgtgatagtctgacaaacattgctttaattccttttaaaataatctggtataaatcttcagtagatctccctgggcctaccttttttgtttgtttgttttgtttgagagttagttgttttattttgtttttagttgctttattcatcttattgcttatgaagagattgtttatggtattaatatcttctttttactttggtaagtatactccctagttttatgtcaacttgacataagacagagttgtctgaaaggagggaacctcaaatgagaaaatctctctataagatctaaatgtagggaattttcttagtgattgatagaggagagttcagcccattgtaggtagtgccatccctgggctggtggttccaggttctataagaaagcaggctgagcaaacaagtgggagcaagccagtaagcagtactcctccatggcctctgtattggcgtctgtctccaggttcttgtcctgtttgagttcctgccctgagttttttcagcgatgtactaaaacgtggaatgtgtaagcctatccttcccaacttgctttttggtcatggtgttttgttgcagttatggcaatccttagtaggacagtgggttatatatattaagaaaccaatcgatttcttacactttttccagctcagtatattaaatgttttagaaggatttctttcaaccctttggatttcattgataccttttacaatgtcttctgtcccatctctagttttattaattttgaccttttcacttttacttttggttcatttagctaaaagtttatcaatcttttcaaagaaccaactcctttcacttgttctttctgctttcttttcttttattattttttcatttctgttttgtctctgattttgatgctgtcttctggtctgattttgtgtatgacttgttcttgtttactgagaccttcatagaaatcacttaggtattaatttggaat

SEQ ID NO: 2101 - DNA, 1200 bp, mus musculus
tagagaaggatatgtagacccacaggatctcctgtgtagatatgcaagggctgcattgatcaggttaaaggttgacatctctccaacatgatacgtcatggccccaggtctatggtatcgggtccgtgagtgttgtctctttggaaccacttgaaaggggaggctcgtgggttcattccaaggaaaccctgaattgtactcaaggcccaggctggccccctgtagatctagtttggattgattgggctccatcgtctgactcctgtctctcctgccagaggacgaacagagagaaaaatccatctcccaccaaactgtacagcagctggtcctggagaaggagcaagccctggctgacctgaactctgtggaaaagtctctggctgacctcttcaggagatacgaaaagatgaaggaggtcctggaaggttttcgaaaggtgtgtctgtggagccggagtccaggtggggcttggagaggcagcagcggattttgagaggaagggagagggtgcatgccagttgtggggcaagagttcaggaagtccgtcttgagccattatgagcaggagctaaggagtcagttgtctgtgctggatgctcggttgagccccctcagtgcttctttttacggccctgtcgtgacagaatgaagaggtgttgaagaaatgtgcgcaggagtacctatcccgagtgaagaaagaggaacagaggtaccaggccctgaaggtgcacgccgaagagaaactggacaggtaactcaccgctcagctcggccaggagcaccagtggctctctgacatcgacttgcaaagcatggctgatctttatgacttgggctcagatggggctcagctaccacccactgagagaagtgaaggactatattgtaatattgggggtggagttcttggggttcctatgttcaggctctagttagtggggccgcatccaggcctgtgtcccaattcagagacgggaagagggaggtatccctgcagccaactaccatgcaccttgttccaacagagccaatgcagagattgcccaggttcgcggcaaggcccagcaagagcaagcagcctaccaggctagcctgcggaaggagcagcttcgagtggatgctctggaaagaacgctggagcagaaggtgagagggtgggggctgggcacccaaagtgaggcccctctctggagggta

SEQ ID NO: 2102 - DNA, 1200 bp, mus musculus; identical to SEQ ID NO: 2101

SEQ ID NO: 2103 - DNA, 1200 bp, mus musculus; identical to SEQ ID NO: 2101

SEQ ID NO: 2104 - DNA, 1800 bp, mus musculus
ataagatagaaattcaaaatcatccatggctacagagtgagtttgaggccagcctgggctacataagaccctgtctaaaaagaaggggaaaaaaaaaagagggaagaagggtcaggggacttgacagatgtcaagtcctgtggcagatcatggtgataatggccccagtgagtcacacaacctgggagctacaccctggttccacccatcaatgggtcttgagtctgggctacaactgggcttgacttagccaacagactgcagcagaattataagcacaagtcaaagaacttggggtctaggagccatgcagctcccatctgtgtcctctgggaacctcgtgttcatgaagtgcctgttggatactcgaaagccatgtaaaggagagccccacagaagggacacatgcttcaacccaactcccagcaccaaagggcctgccagagccttccagccagcaccctccagtgaaatgcagtctgctgatgataccaggggaaaccctgcaaaggacctctcaggctaaccaaccactcaggctcataagcaaatcagccttgccctgaagcttcccacggcaatacctttagaatttaataattggatagcttttaaattgtgtaaagtggttcccttaatatgaatatctcaaacatttgaatatgaaacgataggtccactactctcatcgttttttcactgacccagtgatgcgggggtgcgggggggggggggaggcgggggcggcgagccccgaggggctctcgcttctggcgccaagcttccgtcctgcgcatgcgggcgggacagtgctaggtggggagtttgactggggcggtacacctgtcaaacggtaacacaggtgtcctaaggcgagctcagggaggacagaaacctcccgtggagcagaagagcaaaagctcgcttgatcttgattttcagtacgaatacagaccgtgaaagttcacttcactgtgttatgtgaactgtctctaaaactagtatgatcatttctgttcctacccgtcgtgaggagccttgctgaccctgagttgtttcttcgagagccccactcccctgggatgacccttcactgatgcatttagaagaagccagggtccacctactatcagaactgaccctgaagcaaatgtcacttccagctttatttcaccgccctgagttcctaattttccatccagacctacacttttctattttttcacccaaccaagagtgtctgattgactccaggggacacttgggcaggaggcaggtgacagtactgtctgacagcagagaggagaagccagagtgagggggctgcatgggttggcagctggaacactggctgtcaagagggagcttcctgcccggtgattaacttttctttaatcctcgaattcctgaacagctcagcctgcctgctggcccagcaagctttgtctgagtcactagatgtctccgtgtggcctgaccgtgctttattcctggcaggttcgactgcttgtccacacgtccttgagaaaatgcataatgcccgtcaacccggcccagtgccatttaaatattgaattgacagtgccttactttagacaagtcaatattgacttaatagcctggaggttgggggtggtggggtggggagcacaggagaggtctggcacagtgccaaagagacaaaatggtttttcttgctgttggatcaagattgagggtccccctggacacagagcatccccctgtctaccgaggtagagaaggttattcactgtgcaaaactcattggccacatgtggg

SEQ ID NO: 2105 - DNA, 1000 bp, mus musculus
tttggcccagaacgtagaggtgataaagctggctgtgaggagagccctttcggctgcttggcctttgagactgtgtcttgcagtgttgcccggcctggcagggacctcctgggctctagcactcttcccgcctctgcttcaagcagctgggactacagatgtgcggcagtacactgggcttcttcctcttttgggaagttttcactgtctatttggaagtattgcttttaattgaatcaaactttaaaaacagcaaggtttcccaacaataacctgtttctttctggcagctgataagcacaacagtcaagttatgtatttggaaagtgttgccctaaaactaatctagtaaatgatttaagcaacagaccaaaatcactagaaagtgtcttcggggctgcgctttaacagtgcagttgggaggagccaagactggctgtgtacgcacaggcaccctcggaatggctttccagcacagggagggagagcaggtccattaccagggcacttggggcttcacgggtagacactctcatagttccctcttatttactgtaagaggctattttttggttaataaatgcttgacagggtatttctttaagaagccaattgagaatattttcaagctattaaccaaataaaaatgaaaaatttgcaaggtacacagaaaccaatagtaagtgacaatgttttattgttttgccaggctctcttcagagtaagctacttattacacaatacaaaaataatggcttcctatataaaatgaaccactctaattctaagtaagttaaatgacacatttaaatgtgcttcataataactctatttatcctttcccactgtggtgacgatcccaccgtctctgtccataaagactcacagggaggactttccatggcctgctctgctctggagaggcaaggaggctctgtctgggcatgctctgggtttgtagctgtttcctcacttattacgtctctgggtttctagacca

SEQ ID NO: 2106 - DNA, 1200 bp, mus musculus
ctcaaacccataccctcctgcttcagtgaggccatggtctctgttctatgcattttgtcccagtgtatttgtgccttttgcgttcactgtgtaggtgtttcagcctgtgaagactgcccagcggttctcaggcatcaccaactcgtttctatgttcttagccatgcatcttcagtgagagtcattccgccaccaaatgtttcaaaagaagcagtctcagtaagtgaattatgtgttaataaaaaaaattgatggaaaataatatctgaattaagaggtctgaggaagctcgtgaagagaagaatacaattctaatggttgctatagctcctgccccaccctttccaggtcctgcactgggcagcagaacatgagggtcctttgattagagtgttctgagtcacagacatgactccactctgtttgtaggtggctggaaaatgcattctattaacgcatgttcgacgttattaaaattgatgccgcttccccttaataagagcagaaaatggccacaaatttgaatctgttctcccaaagaagacagtatcaagggctggaaatgaaacaaacgcaatttttctgctcttattacatcgttcgcattttgatctcgaggacttcttagggcctattctctcgtcttccccgcttccagccactgcttctactgtgcagcgcaataatacaatttttctctcttccaaaggagtcattgccctaacatctcttgttgtctagggggctcaggggcatcctccaagtccctaaataggttgagttgaacaactctgcagtgggtgagaaaatactctgccgttcacaggatgcaattttgcattaaaaggctgctgaataatctcacatagaagcaggaggcgagaaacaagaagctgctggcagccatgtcggcacagtgcagcaccaaggtcgcttggactttcgggtgttgctgggcctgcatccggtgcctttaagtaaaagaaggagagggaaggaaaacccacccaaatccctaaaacctttctgacatccctaatgtcccatttgtgccaaccagaactgacgcttgtgatctgcccaacagccggacatgatatgctttttgggtgcgatgtatacactaggccattagtccgcaagcagcagttgtcagctttgttcccatttagagtaattttctcactaatatggcatattc

SEQ ID NO: 2107 - DNA, 1200 bp, mus musculus
ctttatggccaaggtatttgtaaatatattttgagtctgagtcttatttctgagaacccatagaggctgggaggaagaactggacttagctttacgtaactttacattgtcaagttcaagtcaaagggccaagaagaggctgagtactcagctctaaacaggacgtctatattaagcctcactgccaaggcacggggagcatcatggaagaggaggcagaaagaacacaagagcagagggtgtgaatgaggactgtgaaatgctatcttttggacctgactcagctctgcactcacggctcatagcagcaatggttgcctgcacaaaatcaaatccaagtcttggcgcagagagggtagatagtctccaggtaccatgccttcctcctgtagagctattggagtcaatggctgctgggagggggcacatcattcacttttgagagtgtggccactggtgggtttctcatgatgcagtggatgacttcccacccactcgagtatgagcaacacttactggacttagtgggttatcaggggttggggagacctgaaataggaaggaggggatgttagaaaggatatgggccaagttgaaaggaggagatgagggatatacagggttgtatttcattgtatacaattataaaattcccccaaaataaagagaaatgaaaatagttcctttttttctttcaggtgaagtgtgttgataaatcactcgacccaggaacaaagatagagtgcttagaacagggccttgcctctccctttcctcctccatgcctcagcttcagtgtcatttcctcagggtcactgcactgtcttcccagctctgacttcacatgtgccctaggaactggggtaggcactccgtacggctggcacagggctttcccataatctgatcttgacaggtttctgaactcacccaatttttttttaaactcgagaatccctcctttggccaggctgagaatttccctttctgtcacttggttctcctcccttcccatgattcttaggtgtgttcccaggctctgtgacctccctgccccacccatccatctggaggcccagagccctaagtcacacctgcatacagtgagggataaacgtcctgtacattgtgaagccccaggccccgagggctcattggagacatagactgggccaggcagatgccaaatggcaggttgaa

SEQ ID NO: 2108 - DNA, 1200 bp, mus musculus
gagttaagagcagtggctgctcttctagaggtcgtgagttcaattccatatggtggctcacaaccatctgtaattgggtccagtgccctcttctggtgtgttagtgacagtgtgctcatatacataaataaataaatctttaaaaaaaaagaaagaaagaaattacaggccataaagttgtaaaaatgcaaggccagcaatctgaaagttcatttaatttatgtatgtccgtggcttgtttgcatgtatgtgtgcaccacatggctggtgtctgtgggggtcaaaaggggatgtcgggtccctagagctggagtttataggtggttacagactaccacatggccacatgggtgctgggattggaactctaatcttctgtaaagcaacaggtgctcctagccactgagtcttctctctagcctcgtcaacattgtttgtttgtttgtttgtttttgtttctcgagacagggtttctctgtgtagccctggctgtcctggaactcactctgtagaccaagctgggcttgaactcagaaatctgcctgcctctgtctctgcctcccaagtgctgggattaaagatgtgtcactacacccagccatcagttagttttctgctactgtagaaaacaccttgagacaacttataaagaagaaaagttcattatggccagttttagaggtgtgagtcccatggtcagttgaggcctttggtaaggtatatcattaaatgaccacttcccggcccttgtcattttcttttaaacattttttttaataggcagacccaaacttgaacttttgatccttctgcctccacctcccaagtgcagggattgcaatgtgtatgctactatgtctgatttatgtgtgcaggggatcgaaagccacagactctgtccactgagtacattcccagcctctgacaattcatttcaaatttcatatgaatggcttgttgatgggaggagagacatcataaactaaacatagcatttgggcagaaggatattgaatgaggccacagaagctgagctcgtgctaaatatcagtatcaggtctgtgagcagagacatcagagaggttggggcaggaaagttggagctctgtgctcacacagaactgagggattgggaaaacgtttacagaatgatcgaatgttgtgagctgggagtggtggtccatacctttaatcccagca

SEQ ID NO: 2109 - DNA, 1000 bp, mus musculus
cgcagaacttgtggaagaggccaaatgggtgtggctgccctgctgataggagagaaggttcaagaggagactactctggtggatgatcccttccaaatggcgacaggggtcatggtggacatgaagaaactgaaggagcagggcaaagacaaggtcagtgaagaggaggatctgcacctggggacatcgtttgctgcagagaccaaccggagggacgaagatgcagacatgatgaagtacattgagacggggctgaagaagaggaaggggattgtggagcaagaggaacagaaggccaagcccaagaatgctgaggactgcccctatgagctgccagagaatatccgagtctcttctgccaagaagactgaggagatgctgtccaaccagatgctgagtggcatccctgaggtggacctgggcatagacgctaaaataaaaaacatcatttccacagaggatgccaaggcccagctgctggcagagcagcagaacaagaagaaggatagcgagacatcttttgtgcccaccaacatggctgtgaactatgtgcagcacaaccgattttatcacgaggagctcgatgcacccatccgaagaaacaaagaagagcccagagcccggcccttgcgagtgggtgacacagaaaagccagagcctgaacggtcccctcccaaccgcaagcgtcctgctaatgaaaaggccacagatgactaccactatgagaagttcaagaagatgaacaggcgctactgaggcagcggtaggggctggataacgatgtgatgcacaggggtgcgcttgtgtgcgtgtgcaagcgtgggggcacacacacatgccctcttgcataaaacctgcttattagctcttgagttccccatcagatagtgcttctgctcagcggctggatttctgttctggttttggttggagactgtagctctctgtgtatcctaggccatgaactcactcctcctccctactactgggattttagacc

SEQ ID NO: 2110 - DNA, 1000 bp, mus musculus
agccagatggatggagcttggttatggaagaggtgagggaaggattgagggacccgaacaggacagggattccattggaagagagtcaactaacctgtacccttgggggctcccagagagtgaaccaccaaccaaagaactgagcacgggccggatcttgcacctcccccacgcatgtagcagatgtgttgcttggtcttcatggggtcccccaacaaccagagcaggggctgtccctgaatctgttgcctccctgcctgtggatcctgttccaccactaactggccgtgtgtggggaggggttggggtggttgtgatactcagaggggggctccccttctcagaggagaagtggagggaggaatgggggaaggatctccatgcggaggtactgtgaggagagggggcttatactgcaacgccaagtgagtaaataaataaatataaccaaaaaccaaaccaaaccgaaagcaaagaaagcagggtgagtaggttaggatgaacaagccaggacacagcatccctctgtggtctcgggaactcagtgtctgccctgagatcccagctttccacgatggagggctgtaacccgtaagatgtcataagccctttcctccccaagttactttggctcaaagtgtttatcacagcaacagaaagatgcgtacactccatgtaccagccgaggggactatgggaacttttgaccccatcccctgacgctgggaattaaacccacagtgttatacattctagacaagcactcgaccgtgagttacgttcctacctgcctaggaatttttcgaaatggttgttggtccccagagaatggaaagaaacggtgattttcagtcagttttccccaagaggagcatcttgcaaaactgaaggtatagctcagtggtcgggcatttgctcagtcaggaatgcaaaggccctggatttgattcccagccctgcaaatcaaatcgaaacccgtacggcagcgctacagccctga

SEQ ID NO: 2111 - DNA, 1000 bp, mus musculus
cctggagaggaaggtgctctgcagtcaatgcactacactcctgcctgagaatgtgggaagaaagaaaataggacccaatgcaagatgaagaaaagaagcaatcagttagaacagaaatcaataaagtcaggaaatcaatggagaaaaatcaagcgccggctgtttgaaaacatcaaagaagttctaaacacttacccatcactaaccaagataaaacaagagaagacatgaactggaaacctcaggcacaaaggagatgtcactacagagtccaggatgttagaaggattaagaagaaatgtgataaacaattctcagtctcacctatgataatatagatgaaatcaacaaatccctcaacagacactacagaaattaagaaaaagaacttgataaaactaatagatggaactcagttaaagaaactgaattgactaacatctttccaaatataaagcactgggtctgaaagaaaataaaacttgagacctgtgattcatgtaatttatgtcaaatagcccaaagagttgtttgtgagctttgaaacctgggactgagaacatagtagaacaggccaggacatgcccgggcaggccctttgttaagacattcctgaggctgcttggccataaagataaagaggatgacatgtctggactggactggcgcctccctatctcccgcccttctgacctaagttaaatgttatctgcgtgtacagtctgctgatgtttaaatgggccaatcatgtgaaaccacaccaattcctcccccagctccagccccttttctataaaatcccctagcttccaagcctcctggtcgaatccactgtctcctgcatgagatatgtttcgacccgaagctccgccattaaactacctcatgtttttgcatcaagatggtctgtttgtttgtgattcttgggtgcacgccgaatcgggagttgagtgggggtttccccctaggttctttcaggtccagatagatatatgggcca

SEQ ID NO: 2112 - DNA, 1000 bp, mus musculus
gcagacagtatttaatctctgagccacctctccagctctgatcagagtattttaccaaatgctttggtaaaggtaactaagaggccagctgttgtgttaaaatgggaatttagccgcacagagcagtggcacatgcctagcactcaggaagcacaggcaggcagatttctgtgaattcaacgccagcctggactacagagcaatttccaagacggtcaggtatacacaccgagatagatacctcatccgtaaacatcaaagaaagggggaggtatgagtggcccccatagactcatatatttgaacgcttagccaccaaggagttgaactctttgaaaggattagaaggtgtgtctttgttgcaaaaaaaatgtatcactgtgcgtggactttgaggtttcaagcacccatcccagacccaggcttgctatttctctgcccatagatcaggatactccagcaccatgcttggcatgcctgccaccgtgctccccgccatggtaataatggaccaggcttctgaaactgtagcctaaatcccaatcaaatgccttcctttgtaagagttgccctagacagcgctcacaacaatagaacactgactaaggaacaggtgaatgtcctgaagtgtaacgaggaaacaccctgggtgtcctccacctagcagttcatcttcttgctcccagtctgccgactagggctttgcctggataggaatcctgggtaggcaaggacaaactcttccaatgctgatcagcagggaatagtggtcccaggcttgcaggagaagcagcaagtgctgccctctggtgttacagatctggtgcagaccttgagtaactatatccttaattctccgggtcctcctagaagtccaggttgctcagcccttgacagtgacccctgctacagctgtagtctgggcgcagccactgctgccttaaagtgagcgtggtctctgccactgtgaccatcaccttcgatgccactcatcggcttc

SEQ ID NO: 2113 - DNA, 1000 bp, mus musculus
tttttttttttttttttttttgttattccaaaggaatatgagaattgctcttcctaactccatgaagaattgagttggaattttgaaagttatcctgttctcttttctcctttccaaaagcactcaccacactccctggtcctctgcctccatcctgcctggagtcttcctcataccgaggccaagagctcgcttgcctcatttggattttacaactgtatccagcatagttctgtgccctggtggggccctaatcatagatgtaagtctgtatgtgcatttacatgccccaggcctctcttgatgagccttgcaggtgggttagcctcaagttctccactcctggccataaagctggtgatcctgcttcctctgagtgccaccattctcctccttatgagcttcagacatcggtatgccagcctcagagaatcgcacactcagcaccccaaagggcacagtttagaaccctggcagtggcctgcatccaccttgcccaagcctcatttttatttttcctctcattccctttctctggtccttagatcacctgactctatgttccaccattccatggccactgtgccaatcaatattcacccagatcagacaacaactatgcctcgcagccagcaatgggatttttaaattgctcttttcaaatagagtttacatagatagaggatctctccagtgtggaggacaatgctgaagagaatagcatctgcctgggatccatcaggacagtgtgaggacactttgagtgtcactcagagtgacagggccccatcttgtacagaagtatgctgtaactttacagtgactcccttcctgcccccatctgatctgaatctttggggtataaagcaaaggatgagctgccactgggtctgatcacagggaaactgtggagttgaggtgagagcccagggtgtaggtagaggggggacagctggggcggtgaagtggctctgatacccccttccagggtcatgctgat

SEQ ID NO: 2114 - DNA, 1000 bp, mus musculus
ggaggaacatgatggaacaaagacactctttattgagagctacagggagcctggatggcaaggctgagtctagacatagcctgtgccctttgaccagctgccagcttgagtggcctttctcctggtcacctctaatttgctgagaattcaagaactatgttttaatggctttcctgggactgggagctagctgggtttctggccataaactgagcttataagatagtgatgaggaatgacagagaagtagaaagaggagcccctgagcagccagcactcccaatgggtctcatgtattgctggctctcttctgtctccccactctacccaggacccttaccccagaagtgaggcaggctgctatccttacctccttgtctgtagaatggaccaaaagagccatcaggaaatccccatggctcctcaaccctgttctcttaggcgatcaaggttctggccacccacccacctgggtcaatgggccatgatcctgtgaccacagccactcagtgcccaaggacagggcatggaggcacagaagggtcagcaatgacctcttcctttacaatgtgccaccgttcgttctctgaagtggaactttgtcctccttggtgaggaactacgtgcggcatccagcctggctcctggactttgatccatcctgtttgacgctgccccactgctgcaggaacctctccttcctgctcgagggcagaggcagatgtttctgtcaggtttctctattgctccctgatgaaaagactgaggcccagagaaagaggctgagaagcattcagagctgtgcttgctttttctgactttttcctgactttttatacaataaatggatggtacagttctgttactatcagactgggacatacaagagtcccatctcccctaggtgactttgagagccccttgtgtccaaagccacccccatcctaatccctagcaatgctgatctgtcttgcatccccaacacttgtctttttgagaa

SEQ ID NO: 2115 - DNA, 1400 bp, mus musculus
agttggcactaactgcagttggtgtagattgatgggcagtgactgcagaagtttctgagaggtgtggggctgaggtggaggtggatgtcctgtctgtggagaatgaggttttggtttgagtgatggcactggttgtataaatgacaggtacggatgtatgaggagacccagtttttcctatggtggttggaagaatgtttcccgtggttgtggaggtagaggctgatgaaagtgtgtgttggggtgttggggtgataattacctcagaagttggtgtcacagaggaggttgaagaaaagggaaggtgtgtggccaacgaggtctgaggagctgatggtgtaggggaggcaatggtggtctgcacagatgtttccaaggagacacctgtggtatgtgttgtgttggagacagcaacagtggagaaagggtgtgtggtgcgtggagtctgaggactgctagttgtgcctgaggtggtgtggaccggaggagtaccagttagacccccagtggtcataagtgagttggtagtagctggaattggtgttgattgtgtgggagtcactgtggaaggttgcgagagatggggtgcagaggtcctgtctgtggagaacgagcttttggtttgtgtggcagcagtggttgtatacgtgacaggtactgatgtatgaggtggtcttgtgccttccagggtggttggaaggacagtcatcagtggcatggaggtagaggccactgatagggagtgtgggctggttggggtgttaagtccctcagtggttggtgtcacagataaggttgaaaataatgggagatgggtggacagtgagctctgaggacctgaatgggttgggaagttggtggtggtgtgcacggatgttcctgaggggagacctgtggtgtgtactgtcccagacacagccacagtggttgaagggtgtgtggtgcgtggagtctgaggactgctagttgttcctgaggtggtgtggaccacaggtgtgccagttgaactcatggttggcttaattgagttggcactaactgcagttggtgtagattgatgggcagtcactgcagaagtttctgagaggtgtggggctgaggtgggggtggatgtcctgtctgtggagaatgaggttttggtttgagtgatggcactggttgtataaatgacaggtacggatgtatgaggagacccagtttgtcctatggtggttggaagaatgtttcccgtggttgtggaggtagaggctgatgaaagtgtgtgttggggtgttggggtgataattacctcagaagttggtgtcacagaggaggttgaagaaaagggaaggtgtgtggccaacgaggtctgaggagctgatggtgtaggggaggcaatggtggtctgcacagatgtttcc

SEQ ID NO: 2116 - DNA, 1200 bp, mus musculus
gcacatacgtgctggtgcagcagatcgtgcccgtgtttggatacttccgtgtgctcattgacaactactactgtgacgtgggagacagcgtctcctgcccacagtccatcattgtggagtaccaccaggaccgtgtggtgctgacccgcaggccagttagcggggtcatgaccaaccaggtagacatgctcttgtgggtggaggggttgtggcaggcttggtctgggatagggacccgaatcctaaacttcctcctgctgtgtgtatccagatcatcttcaacaacaaagtagtcagtcctggcttccagcagaatggcattgtcacctcccgtgtgggtatcaagatgtatgttaccatccaagagattggtgtccgggtcatgttttcaggtctcatcttctccgtcgaggtgcctttcaacttgtttgccaacaacacagagggccagtgcggtaagctccactctggatattgttcgggtgttgaaggcaacctccccgtgggcctagagagatttcagactgtgcacaattgtggttcacatctgatgttccctggcggcttccctgtacaccgggaaccaaactgacttctgggaaagccagatgcacaggaaaggaagcaagacaagatgtcagttctgctcttcaacaggagtccactgggcacaggtctgctgcccagctggctgacctttgtctcatctgcaggcacttgcaccaatgacaaaaaggatgagtgccgcctgcctgggggttccatagcctcctcttgttctgagatgtccctccactggaaggtgcccaaccagccttcctgccaagggcctccaccaactccaacttcagtggtacccaggccttcacctactccgtgcccaccatcgccactctgtgagctcatcctaagcaagtaagactccaggaagtggggtagccttcctggccccatctaccaaaagctagtgggtcattaaaaggctcctaagaaaaatgagacctgccttgttccaggctctgggcactgtctctatggattgcgtcagacagttgttgctggaatgctattgtagggctgactgtggctgggttggataatctctgaagtcctccaccggcccctctcagtggtatgggcatcagttactgcctgcacatgggcaaaacccagggttcagaatgagggagcctgagggga

SEQ ID NO: 2117 - DNA, 1000 bp, mus musculus
tgctgtctaccttgctcccactcagctgtagtcataggcttcttctgacctagaccttagctctgcctcttccaaactctccccttccctgggcctgcctgtaccatcaccctgtctccaggctcagctcctctttcccagccagtcaatattcttgggccctgcctactcctaacccctctcctctatgaactctaacccctttggactctggccactcctggatcagccctctcaggaccctgctccttcccagcccggctggctacaggttgccagctagccccaggtagcaggtgggcagcctgttcactctctccctccctctttccattctgtgctccagacaccactaactgtatggaagtgatgacggggcggctttccaaatgtggtaagaactcctcatgctcacttggcccctagcctgccacctccactgtgtgcccacagcctaccctgaccagtgctatcccactgtccctgggctgtcctgggtcccctgtgtatgcacaggcattggaccatccaccacccctgggccccatcttctgccaagagtagtcttaactactcacttcctggtccccatttctacaatcaggctaggtagaggaaggacttaaactctcagaacaggaaaaggcccttgtgctggaaggcagtaaagggtctacatgtagcactgccctggagggcaaggtggacacttgtccacagaccatgccagtcagaagagaggtatgcagcactgggcttagactgaggtcaggtgagggaatggaaatgaagcatccaattggcccagctgggtaataaacataggcccaggagggtggagggtcacccattacttctgccctccaggaccagaaatccagctgtggctgcctgtccccagctccctgcctgcctacccaccattaatcctgtctgtctgctgctgaaactgtctgtgctagccagggcagggggtctccctgtatgctgctggtcactg

SEQ ID NO: 2118 - DNA, 1000 bp, mus musculus; identical to SEQ ID NO: 2117

SEQ ID NO: 2119 - DNA, 1000 bp, mus musculus
ttttttttttgttttgttttggatcaggtttcttgtagcccatgctggtcttgaaattgctatgtgaccaaggatggctttaaactcctgatcctccttgcctctgtttccctaatactggtaatccatgtgtacaggccaccatgattggcaaccacatgccttctttactatgattgtctgtggagacatgtttgattttttttctttttttgaagtcatttttttttttttggtagtctgttctcttgcatgttcactggctctctgttgcacccttcccatccctacctcagggtccctgaaccttctctggatctcccttcagaactggggtgcttttattgttcagtttggattttgattccatggactctatataaaaagaacaggagacacgggggtgaggatgggtgggggtgggagtgggcagcagagctagtcccgggctgatgtgtgtttgctgctcttgcagaggaccgaagtttggctcacagcattcacatgggccgttcacaaccacctgtaattccagctctaggggatctaacagtctcttctggattcttcaggtacctgcaatcacacgtgcacacaccatgccccacaccaacacacacacaaaattaaaaactaaaaacacatcttttttttaaaactagtttaagactagaagggaatcctatgttaaagttctgagccccagaaatgaccgaagctctctcctgaacagctggatgagagggccagcccctgtctgctcaggaagctacacctggagctaaggaggttctgacagtcacaggctgctatggtaccttatactgacaaatccacccagtcctcagcaaaaaaagtcacagggacttcgtgttccctgcccaaaccctgggctcatgtgcctccacagtggtatcaaagacaaatgggaacatcaagaagactggaccagcatcctccatgaacagcctggtaccagagtcagacccagtaacataca

SEQ ID NO: 2120 - DNA, 1400 bp, mus musculus
tattaactattgtatgtaatgcaccaattgattgtgatactgtatataatgctttggctgtgcctcgattaattttttgttttcctgtaattctttttttttttaagatttatttatttatttatttatttatttatttattatatgtaagtacactgtagctgtcttcagacgcaccagaagagggcatcagatctcattacgggtggttgtgagccaccatgtggttgctgggatttgaacttcggacctttggaagagcagtcgggtgctcttacccactgagccatctcaccagcccccttcctgtaattctttaaggggtttttgtgtttcttctttaaggacttctacttgtttagcagtgttctcctgtatttctttaagtgagttactaatgcccttcttaaaatcttctaccaccattatgagatatgatttgaaatcccagtcttgcttttcagttgtgttggggtatccaggactcactgtggtgggcgtactgggttctaatgatgcccagtggtcttggtttctgttagtaagattcttatgtttgcctttcgccatctggtaatctctggtgttagatgctgtagctgtctctggctggagcttgatcctcctgtgatcctgttaacctctgtcagcactcctgggagtccaactctcacctgagtcccagtggtcagagcactctctgcaggcaatctctcctcttgcagtgcaggtgtgcaggagtctggagctctgatccatctcctgagtcctggggtcagagccctccctgtaggctgactctcctctggcaaggaaggtgcccaggggtctgggtctcagctccaccttctggctgaggatgaaggcccaaagggaccctgaacaagaagctctgttgcttctgttgcccacctgctctccagtgaccacgaggtgctaggtgtgctagggctcctgcggcgtggagaatcctctggggcccttggcaccctctgctgggttcggacggaagatctccattaattttttgtatatgatagagttctgtttttataggttgaacaatggctgctgttagtcttctgcccataatacctctgataattgctccaatcaaaataactcctactgctaatgtttgtagggattttcttccatatttatttgtgaggaatattgtagctcataagaaaatacactgggcaatgtgttttgggtggttgtatccattaaataatttttacttgatgtgtccaattcttggcaagagaatgagttgtactggtgatgttgtgtctggttcaataaatggagctgttactcatttggtttacctggtggtattatccatcctctaggatagtgggctctttaaatttaatctgcatagtatcattata

SEQ ID NO: 2121 - DNA, 1200 bp, mus musculus
cttcttatagaagccagacaggtaccaccggagcacaagcttcatgcggcagtaggggtcatcctctgctgctgccctgtgatggggtggagagctctaattcaggctagggtccctggctaccctcctcagcacgcacctctttccccaaccatcccaacctccatctacttggctaaaagaggcagtctcaccccagatgacctgggcaccctgctccatcctcccaggtagggcagaagtaggcaagtgggctcaccacatatcgagaatagtgctgaggccaactccacaccagtgcagaagggctctgcacactccacactgtttggtgcccccacctctaggaagaaccctggatgctcacacccttatttccctcttcctggctccaccccatcccctgcctctgcagtccatagggttgtggaaccccctcctgctggaaggtgcacctggagagcaggtctccgtggtagtagtaatcagagagcttgccgaggaaggaccgaggctccaacacgaaggtcggcagcaccacacgggacaggtccatgcctggccgcagctgtcgcagcagcacccacatcaggctcttgttttcctctgacactgtctccacctgggaagtctcgtccagctgcggcagagggacatgaccagaccccatgagctgggctgtaaagcccctgctctgggctgcctaagggagctgagggacagggatccagaacagcacatctgacccttgcccactggatgccattggatgcatgtccactctgaacaggtgtcaccagcccccatcctgagcttgggagtgagagagtttctcggtggaatgggtgtcaccacccacccacactgggtttaggagtgagcagcttcctcatcaggtctgggacaagaccagcttttctactctggcatcctggttctccctctaacatgcacaactgccatggtactattcaccacatggcacatccacaagaccctcaccagaggccagatccacagggctgcctgatcctgtatgtctggcctccaaaaccctgagttaaataaccctcttgtctagaagttctagctgcaggaatccggtttccccagtcctctgtgtttatgggtgtgctaggcagttttctgctactataagaaatacctgaggcagtcaagttaaaaataagaaaggtttta

SEQ ID NO: 2122 - DNA, 1000 bp, mus musculus
gcccacactggcctgtgagtatggccactccaaggtgcttgttagacactcaggcccattccttccatctggatgctgtcctgccaggggaccattatgactaacccaactatccatctcagaagtgacctacattctcctagctaaatatccatccgtctgtccgtctgccccccactttgagggcagttgtggttatgttcaaacacctttatataaagacacctgctgtgttggccaccttgggctggaaactacaagctctgacctgaggtgggtgggctgccacctgcccagtacattgtttggagctgagcccccagggttgctgcctccatggtgaagttgaacgctgtggaagggagacccagagcatagctgatttgggagaggaaggactagagcgaagtgggtatttaagtgatccaggatctgaaggcactggacagcacagacccatcttccatttctgcaagtatgccctgtgcatggatggaagttgccatgatgccagggaaggcctgcccagcctgtcctgcctcaggcaccctgaggtgtagtcattgcttgacagtcaacagtcattgctctgtttctgcagccagctctgcgcctacttaagtcccctcctatgaaccatcaagtgttcctcccatcaacaccatagcccacagagggcaccagctctgaatgcaggcccctgcctccggctgtagctagacctgcgctatccctcctgaaagcagcctcaggatgtcttttcaagagatgaagaaatgtacaggcaggatctgtgatctcaccacaccctttaggtattttctggcccctcgctaagaaaaaagccaaagacaatgacagaggaggtctcacacagcagaagactctcagccttcagagaggccagaatctaaagtccaattgtcaggaggacctggcttgtatctctgtcgccttcattcctgccaccatcttcacagaatactcagcctgtgtctcc

SEQ ID NO: 2123 - DNA, 1000 bp, mus musculus; identical to SEQ ID NO: 2122

SEQ ID NO: 2124 - DNA, 1000 bp, mus musculus
tacacattcatacatacacatacacatacacatacatacatacatacatacatacatacacacacaatattctctctctctctctctctctctctctctctctctcttcctttctctctcaaggattctaagacacacctccaattttgacagtaaaatcatgggcaaccatgcagtttcgagctgccaggtcccggtgcacaaacttcttggcgttcaagtatgccatgccatcagcaatttctgctgtcatctgaatcatttcttgcaaggtagggggagggcggcctgggttattctaaagtcaaaacaggggttgcaattagcactctgattccatctaaatcatctcttatagggtgtgtgggtcaggggtgtagccagggtatttctgaagttaaaacatgggtttgcatttagtgaggttggtatacgtaagatcaggtaccctgttatgggtcttacctagaggcagcttacctcagcatctggcctcagagaacggaggtgacttttcaggtctccatgagccatcaattccatcactaccagcgttggctgtcctttggataccaccccaagaaggcggacctgcagaacaagcatgagaacaagcagggaggttattagaagagggtccaggttttacttcaattcacaatgctctctctggtaacagtaaaacacgggccaccctgtgtttggatggagcataggcagccctagaatgagggagcaaacagacccactcatatatagaacatcccaagcaaatctcacttgcctactgttcctcggtatataaaccatatttccacctccagaccttcgcacttcctgctctccttagtctggtccctcactcccatggacacatggttcatccctttaagactttgctcaggtagagtacaatcctcttcctctctctttttcaatttcttcaagcatttgtctcgtaacatgccactactagtttgggaactgtcttccctgcagt

SEQ ID NO: 2125 - DNA, 1000 bp, mus musculus
ttcctgcccccacctcccgggtacagggctgaaaggaatgcaccaccacacccagtgtatgcagtgctggggatggaacctaagcttcacgagtgcttagtgagcaccctagcacttgtcataactgaactgacagagtctagtccttctccttctagtaatagcaacctgtcaccatgctcacacggcctggatatctctgtatccagtgaatgagaggccaggcacttctaacttggacctttattgcgggccactcagctaaacagcttgaggccagccttgttagagcatgttataatgccctatctttgttttctgggctcctgctttacactcccgccatgcttagctctgagtggcccatggcctccagtgcctgacagtcatctggaaatagccacctccatgccacatgagaggctggagcgagagttcagtggctaacggtgcttactgcttttgcacaggacccaggttaagttccaggtacccacatagggtggcacacaactgcctgtcattctaattcaggggatctcatacctttttctggtacccacaggtacctgcacgtacatatgcacatacatataaattaaatacaataataaatagttactaagaaaggtatacaagaagctgagcttggtggtgcatgcctatactcctcatatcagcaacctgaggcagagggatcacaagtcatccctttgagaactgtcatgtgttgttggtgcccttgtcttcccttctcttcctccagtcgaagtcccccacaaaagcacaggcctggggctatgactgattattgatagagtgtttacccaatgtgcacaaagccctcactgcaaaccccagcaccatatagctcagtttgatggtgcgtgcctatattacagcacctgagtagtagaggcaggaggaccagacattcaacatcatccttgaccacagtagatcaatgctaccctgggatgacacatggtgcctgttgtct

SEQ ID NO: 2126 - DNA, 1000 bp, mus musculus
gtgccccagcggtcactcacaacataggtctgttgagtcttttttaaatgcactaggagccgactctgtccatctgtgatgggattagaaagcctggtgtttttctgtgatattagatgtcctccgagcacagcccacttggatttgtttggttggttttgccttgagactgggtctcactatacagagcagcctgcctccccgctgctgggattaagctgagaagcaccaagtctgaccacccatgtgttgatgacttgcagtcaattaactatgtgtgctgcttcgtgcaacaggagaaagccagaagagcagcctcgggaaagacagacggaagtccagcaacccagctgtaggcgcttacactgaaatctaagtctgtattgtaaacgccagcggcagccaacttctatcccaagcactgctcaaaagcagaggaacggaaagggaaagggccatgtcatcctcagccacatagtgagtccaaggtcggcctggactgcacgagagtctgtctaggaatgcagtcagtaagagcctggcgtctactgcagagtatgtatacttggtggtagagggcttgcttgaagacccaagttccatccctagcaccacagagcagggaggggacacagattcaggagagatttgtctttttctcctttggctgtgtgttgtccagggatatatatttcctaaaatctttttaaagtgaatttatatgtgcacatatgtgtgtgtagagggaggataagaactgaattatttgaaacaggttattatttgaaactgtatttttctactcagtattttggccaggtcccagtcccgggttgcaggtgttgactgccaccaggtttgatatgggatccaaatccaggcccccatctcatccatcgagcactttgtgagcttgaacccacgcccccatcccctagaatctttttctgatttttaactccaggagagatagcattttccttacattataaaataaaag

SEQ ID NO: 2127 - DNA, 1000 bp, mus musculus
caaagtgtggatactttgttcctccttagaatggggaacaaaatacccatagaagcagttacacaaacaaagtttggagatgagatggaaggaagggccatccagagactgccccacccagggatccatcccataaacaaccaccaaacccagacattattgcatatgccagcaagattttgctgacaggaccctgatatagctgtctcttgtgaggcttcgccagtgcctggcaaatacagaagtggatgttcacagtcatctattggatggaatacagagcccccaatggaggagctagagaaagtacccacgaagctgaaggggtctgcaaccctataggagaaacaaaaatatgaactaatcagtactcccagaactcatggtgtttctagttgcatatgtagcagaagatggcctagtcggctatcactgggaggagaggcccttggtcttgcaaagattatattccccagtacaggggaatgccagggccaggaagtaggagtgtgtgggttggtgagcaaggcaggggtagactataggggacttttgagatagcatttgaaacgaaaatgaagaaaatatcaaataaaaaattgtttttgaaaaaaaatctcatttccaccttttacccacccatcttctttgcttgtggagtcctctggagcaagccaagtttctctgagcaggcttctatcccagggggacacccatttccctgccacctcccctccaaccttcatcagacctgctgatcctgagcaatacaggtaggcttcctttctcccacccatattcctggttttatgagtcttctggagcaagctgagctgccctgagcagtcttctagtcaaggcagacatccattcttctaccatctctttgcccaccttcatctaatctgtggctcctgaaccatacagactcacagattctggaccatgtagacctacagatccagaaccatacaacccaaggataccaagcagaggcatg

SEQ ID NO: 2128 - DNA, 1800 bp, mus musculus
ctctaaaaggcaagtctcatttttcagggctgaattgtgcatgcttttaaggcatttttataatttctaatttttaaacacatcaggttttttgttaggtaattggttattggatttctagttgtattaggaaaatggctgaatttaatcatcatcaaaaacactggaagataaaaacattttatatatatatatatatatatatatatatatatatacatatatatgtatatatacatatatacatatatatgtatatatacatatatatgtgtgtgtatgtatgtatatatatatgtatgcatgtatatatatatatatatatataattttaatttcattatcatattactcccattcagttaggaagtggcactgcccaccaaaatttcacttgaaagagacagaataacttcatcgacaaacagagtgaatctttccaaaagtccttcttaagtcaacagtaacaaacttgatatgaaaatcctaggctccttctccactgtctctatattctggagattgatgatatttattaataattactttctgttatcctagtgttccagtatttacataggattaagtgataaatgatagtgaacaagaaaactgcctgtttttaaggagatttatgcaaagggagaagggttatagtaagtctctatctcagttttcattgtctatgcataaacaggtagtgtagaatcattgttgaggtaatggaaaggtgtcacagggttgcaaaatagaagtgacctttaaatgagctggataagatcctcaaatggagagggcttgggatgccaggggaggaaaatgactggagtggaaataaatcaccacaagttcagcggactgcgtgtagctgagccctggtctgcaggcttaggggatgagatcacagatgaggctgtagaattttgctgggcacagcatgtgcaatctgatcaccaccctgtgtcctctgaaattttttctttagataacccataatggttacctggcaagacttgcttgtcccaaagctgaatagatgcaacagaattaatgtcttagagtggtttaggatgatatgctccactgtggcaacctggatgaggggtgacaggcacttactgagtgatggtggcttattgggaaaagaatagattgatacaagaatatcaaagactgttaggagtcttgcgcgcgctcgactggccaggaagaacgacgctgcaacaggatccttctgcacacgtttattgggagagcttgcttgtagaggcgaaaagaccccgagcccagaactggtgctgcttttataggcctaggagaggcatgtctcacacctggattggttatgcactaagcctcatttgcatgttcctcatctgattggctactctctctctctgtacctcacagagcctcattatcatacctcatttgcatgtctcacatctgattggttactctcagtaccttacagaacctcattatcatacctcatttgcatgtctcacatctgattggttagactctcagtaccttacagaacctcattatcatgcccgggccaggcagtgtctttgcaaaaaactttactgcatatgtacacattggttgtttgtccaaacttatgcgtggtggccagcagtagtcagtgccactctgcaatggcacatgtggcttcccacatctcccccgtttgttttaataaaatgaggctggactaggcctgtgcaattatgcccatccgcgtggctcctgttttaggtcgttcctctaatgtcacagccttacccgtcatagggt

SEQ ID NO: 2129 - DNA, 1000 bp, mus musculus
attctaatttaggtcttcatgctgcatagtaagtgtgtatatctgctgaacttgatgatacacagagttatagagtatttactttgaatcagactaaaattaataaaagacacgttccagtgtttaatatgtgaccagcttcactgttaagtttgacatggaagagacatagataaaccgctgcctacctaccttcagtaagaagctgcatttgatgaaagagcaacaagaagggcagttacctgcagatgacatttttagcattaatcccttgaattccaacttactatttggttgtacaacaacattcttaaaactggcaaggtttttttgttttacaaagcatctagttgttattattattaatcctcccatgtaactcctttggtcacgtttatattcatggattctatagttcttactttcctaaatacataaaacaaatgctaggctcatatattgttactgtttgtgaaagttttcaaggatggatcaacaaccatttggttttggataaccagttggtgtgttctttcttgggaatcactatttctcctgctctcagttctttgtaaaatctttggttatttattcctcatatatgatcagcttagagtaatagttaactgggccaatactgagccatttgttactgacaagataagcaggatgtattgtctccttctaagcaagtcttgtttcttgtttcaaattcaatgttcattcttacaatataaacaaaaggcactagttagctttcctcactcattatctacattaatgacctttatatgacagtgactaaaatacttcaggataagttaaagaacaaatatttatttcagcttatggtctcagaggacttagtgtctggttgcttgacctcctgtgcttgggcagaacatcatggctgcaggagtcagtggtaagaaagatcatctcttaagggatagaaagtaaagactaaagataggactaggcaggccccactttctaatgc

SEQ ID NO: 2130 - DNA, 1400 bp, mus musculus
tcctatcaggcccccataaaactggacttcaacaacaacagaaagcctatttacttgtggaaaattaacaactccctactcaaagatccctgggttagagaagaaataaagaaattaaatacttactataattcactaaaaacaaggacacaacatatccaaacttgtgggacatagtgaaagtaatgctagaagaaaatccatagcagcattaactggagacatctcatgggataaggtgttgggagaacaggggagagactatggcaatcagcagtgggcagataggtcatgtctaggaaatgataaagatctagactatggtgaagccccaggaagtctgtgggggtgactttacctgagagttttaacagtgggaaatgttgagcctgaagtggtcaccttttatagccagataggactgccaatggagggatagggtatcaatccactcacaaaatccttgcatgtcttgtctacaagatgtgcaagggcaaagatgaaacagaggtaaagagaatgactaatcattgtctgtcccaaactgagtctcaccccacagacaataccaattcctgaatcctttcatatctgttatgcttgcagacaggagccaagcatagctatcctcttagagattacattcagcatccaatgtaaacagacccagagttccactgtcagtcatcctatggagcaaggagattcttgtcgaagaggtgcagaaagaactgaagtacccaaaggggatatggattcaacagaaagaccaatagagtcaactaacctgacccatagaggctccctgaaaccaaaccaccaaccaaagagtgagcatgggctccacctaggcgccccacctctgccccaacatatatgtatgtagcagatgtagcttagtcttaatgcaggtccccctccccgaccccacccccagagttggggctcttcctgaatcttttttctgtctgtgggtcctgttatcctaattgggctctctagtctggcctcagttggagaggatgtggttagtcctgcagactcttgatgtgcagggtggtgtactggaggagggtgatgtggaaattgtttatttctttgaagattcagttgtgtcatgtaatatttttctagaatctgtcttgtgagatgatgttttgctaagaacaaacatgtggtgtttttttctggaagctgcctagataaagagcatgtggtattttagtagagtagatactcttgagaaaacagaggatacctgtgtggcattggttctccttgccttctctgctgacttttataaagaaacacaccaaagaacttctttctcattctcatttctcattcagaaattaatgactctaaaacaactaagtagattagaattttatttaaaaata

SEQ ID NO: 2131 - DNA, 1000 bp, mus musculus
aatatttggcccagagactgaaggaatgaccacccagagactgcgtcacctggggattcatcccataaacaactaccaaaaccagacactattgtggatcccaacaagagcttgctggcaggagcctgatatagctgtctcttgagaggctctgccactgcctgacaaatacagaagtgaatgcacgcagccatctattgaacgaagcacagagtccccaatgaaggagctagagaaagttcccaagacgctgaaggggtttgcagccccctaggaggaacaacaatatgaactaaccagtacccccagagctctctgggactaaaccaccaatcaaagaaaacacatggtgggactcatggctctaggtgcatcctgtgaaggttctatgccccagtataggggaatgcaagggctaggaagtgggagtgggtgggttggggagcaggaggagggtgaggggaaagggatagaggatttgcagaagggaaactatgaaaggagataatatttgaaatttaaataaagaacatatgtaataaaatattaaaggagttttggtgctttaggaagtaatatggttgtatgttcatgttacatgtatgtgcttatggtgtatgtgcttatatgtacatatgtgagcaagtgtgccaatctgtgactgtatatgtagagtccaaagattaatttcagttactttgatagttatttttgaattccaatttgctacactctagaattacttaggaaatagtttcaattgagaggttattcagatctggttgtctgcaggaatgtccaaatgcctgattgttaaattgatatggagtgacagacctctctgggtaccataattcaaagatagcagttaggccctgaattatacaagacagaagaaagctagcagaatccaagcaagtagtatgactatattcacattttattttctgctctttactttgtatatgatgtgacaaactgcttgtgttcctgtattgac

SEQ ID NO: 2132 - DNA, 1000 bp, mus musculus
gggtctgagagacctgagagaagggaaattggagagggtgcaactctgggacaagccatggggatgggaaggctcctggaagaatgtggcagtgatcctagctgtgatgtctagcacctggggatttggagtctgaagtagcctcctgtaatcatacagaaattcccagtgattggggataagaatacacccaccaaatctactacccccaattttccatgcttaaagatagacaaggataaagatggaacaaagtttgtgggaatggccaaccactgactggtctaacttgatacccactccacaagagagaatctgacactgttaccactctattttttcttgaagacagaagcctaacacaactgtcacctgagaggcttcatctagaggctgatgaaaaattgatgtagagaccaacagccaaacattaggcagagctcaggaagttttgtgttagagttgaggaaggattgagagagccggacaggccgaggacaccacaggtagaccttcagaatcagctaatctgggcccatgggggctcacagagactgatccaccaaccaaagaatggctctagatccactacacacatgcaccacttggtcttcatatggatcttccatcaattgtagcagggactgtctctgacttgaactctgttgcctacctttggacccccttcccctctaggctgacttgtctgaccccggtgggagagaatatgttttgtcctgatgagaattgaggtgccaggacaaggtgatcgccaggaagtgggggttacccttctctgaggagaagggattagaatagagggggaattagagaaaaggggtgggagtgtgggactgggaggagaggacagaagggctgtaatctggatgtaaagtgaataaataaattaacaacatagtatgttttcaggttaaaaaagtaaagaaatctaggagtggtcacatattgaagaaattccctcacaatgttgagacaaatc

SEQ ID NO: 2133 - DNA, 1000 bp, mus musculus
aagactaacagagtcaactaacctggacccttggggctctcagtgtctgaaccaccaaccaaaaaaccacatacgggctgggtctaggcctccccacacatatgaaggaggtgtgaagcttggccttcatgtgggttctaaaaaactggagcagggctatcccaaaagctattgcctgttcatggaatatgttcttctagctgggctgccttttctgacctcagtaggagagggagcacctagccttgcagaaacttgaagtgccagggtcagggacaggggaatactcaggagggcccacacctgctcagaggagaaggggagggggtatggaggaaggtttgagggagggatgactggaaaaagggcagtgaaagggatgtaaaatgaatgaatggataaataaataaataaataaataaaatgtgtattctacttgttgaaagacatgggtttatgaggcatgttctgaattcaaaggtattataatgtgaaaatatgcatttatttttgagatgggtgggtggccatctcaaaaatattaacccagaacccggtggtggtggcacacgcctttaatcccagcacttgagaggcagaggcaggtggatttctgattatgaggccagcctggtctacagagtgagttaagtaagttacaaagtaagttccagaacagtaaaccctgtctcaaaaaaaaaaaaaaaaaaaaaaaaaaaaaaaaaaaaaaaaaaagacagagagtggagtaggactgaaggaaaggccatcatgagacagccccacctggggatctatcccatatgcagacaccaaaccgagacactattgctgttgccaagaagtgcttgctggcagcagcctgatatgactgtcccctgagaggttcttctggagcctgacaaatacagaggtgtatgcttgcagctaaacattagactgaccccagggaccccagtggagggaggagttaggggaaggagctgaatgggtttgcaac

SEQ ID NO: 2134 - DNA, 1200 bp, mus musculus
aaggagattctatatccagcacaagtttctattacagtaagaagaaaattctgaactattgtaactctctagactagttagtgattctgtgttctttctcagaggatgctaccatgtcacccaagttattccaaatgatttgtcctccatttcctaacagtgtttcttccagccaaattgttagctcctgctcgtacacgggtgtagctttgcagtttaccagacaatctgctttatgacctcccataagtaggatgcgcacgctgaccttgcctcttctgcgcaaggccaggacactatggctaaacatgagttatttcttcacactctttgaactacataatagatagattgtccgtacactggagatatacaagccttctgggctttctcaactcatgttgttcacacagcaataggactttgtgatgaaacattgacacattttttcttttcttttaaaattttattagatattttctttatttacatttcaaatgttatcctgaatgttcctgatacctgccctgctcccctacccacccattcccacttcttggtcctggcattccccggtactgaggcatataaagtttgcaagacctatgggcctctcttcccaatggtggctgactagaccatcttctgatacatatgcagctagagacaggagctctgggggtagtggttagttcatattgttgttccacctatagggttgcagatccctttagctccttgggtacaacattgacacatttaattttatgacacagtatgtggttacatcacagtattttactcttcagtgatgtcatcaggaaagtgaatggaagtgagagctggaaacagagcacaagccttgcatattggaggtcctgggttccacctccaacactatgaagaaagaagctagaaaaatgttttcagacatattatcaggaaccttcatggtgaacatttctacctgcactcctaagtatgggtttttctattgtttcattacagttgaatcatttaaagaattcttcaatttttttttgtctaaatttagttaagccagagagatatatgctcatgcccaagatgttatggtcttcattacatggcttatataacttcttttcatggtctctgtctaaaccaagtggaagaatggtttcaataataataattattatttctttgtaatatgtaggt

SEQ ID NO: 2135 - DNA, 1000 bp, mus musculus
tgtgatctttttatcatagtacatgtatactataaagcactggtagatgtttcaatacttatgtctgaggacaatgtaaatgactgaagtatcattaatgacaattcactaatttaactgaaatttcagtgagtatagtaaatagaacgtttctatatgtcataatcagctgtccataataagaaatgtacatttagggactgtggagggtgagcgagcagagtgcaggagctacacagcttctgagacagaccccattttgggatccagacatctgagcaccttccctgccagaggagaggtgtccatctgggagggctctaacttccagagcaggtgagggagacatcttgtgtcccgggaccctcagagaccagtctgtgcaggtaagagtgcagactacagaagtgacacagattctggtacaagcaaaagctacacagcttctgggacaggcctccttctaggctccagacatccaggcaacttcccctccagaggagaggtgtctgtctgggagggctctgagtgccagagcaggtgagggagccatcttgtctactggatccctcagagaccagtctgcacaggtgagagtgcagactgcagagacaatacatcttctgggacaggccctgtctcaggccttcatcttatgccaggaggcaggtctgaaagccagacctctgtacaccttccctgcaagaggagagcttgcttgcagagagtactctgagcactgagacacaggagagaactggactcccagaactggtgacagaggctaacagaatcacagaaggaacaagctccagccagagacaactacaacagctaataccagagattaccagatggcgaaaggcaaacttaagaatcttactaacagaatccaagaccactcaccatcatcagaaccaagcactcccacctcagccagtcctagataccccaacacacctgaaaaacaagactcggaatcaaaatcatatctcatgat

SEQ ID NO: 2136 - DNA, 1000 bp, mus musculus
attaacgatcactgacatccttgctgaaaccaggaagctgtcacatagcactgcttgatctacatctgtgtctaatttcaaacgaggaagagaacagatctctccttatgcaaatcacccggactagtgacttctctaggtattcagtgaagatactgagaaagagagagaaaacactaattatcgctttgcagaggataatgagtagcctatctgtaagtctagcagcccctggaatccagaggaaaggagatgagggtgcgggaagagctccagcgagtgactctgcttaatcttaccacatgtcagggctttttgcacagagtactacttgatggacatgcactaatgttcttttcaatctcagcttcaaggtgtgaagaatagatactgtactagtttcccttaatggctgactgtcaaatcctgtacaattggatatatttatctttcagcaagaaagattgaaaataagaattttcatgaagtaggacattatatgtcaagtgtcttcaacattagcattatatatgaccacactgaattttcagattaaaaatagggcggtacataaatactgacaggaagaaagaggacaaaagtgacccctgagcatgagtctgctgtgggaaaatcaaggatcagaagcacagagatttagggtttttctctagtcactcattctctatgagactcatgcccaagtcacttccaaagcaattcctactccaaaatgtccatttattctttttgaccttattatgatattaaaactagatttcagcactgtctctgttcagaggaagatgagggaaaagagcccccctccagacatcaaactactgaaatgcgtgcccttttaaagacgattgttcatgaaccataaccaaatagaacctctccattctggaagtgatcagatagattcaaaaagaatatttgaagcggtgccaagccagcacatcgttgcaattataaaagcaaaacccacaccccaaac

SEQ ID NO: 2137 - DNA, 1600 bp, mus musculus
agcgaaagaggaacacacctccactgctggtgggaatgcaagctggtacaaccactctggaaatcagtctgctggctcctcagaaaatagttctacctgaggacccagtcataccactcctgggcatacacccaaaagatgctccaacatataataaggacacgtgttccactatgttcatagcagatttatttataatatccagaagctggaaacaactcagatgttcttcaacagaggaatggatagagaaaatgtgacacatttaaacaatggagtaatagtcagctattaaaaacaatgatttcatgaaatagcagtcaaatagatggaccttgaaaatatcatcctgagtgagttaatcaagccacaaaagaacacacatggcatgtattcattgagaagtggatgttagctaaatagaagctcaaaatacccacattacaactcacagaacatattaaacccaagaagaaaaaagatcacaccaaagagtggatgctacagtattactcagtagggggaagagaatctctagaaagtagtgggagagagggatctgggagggagagaggaggggggagggaaaagagtggctagttcatatatgggaggagatggtggagaaatacagaggatcgggaatttaaaaggagatgtgttgcagtgagggaggggcaattggggtagccactagagagttccaggtgctaggaacccaagaggttcctaggatccaacacggaagattttagctgaaatactgaacaaagcagaaatagaacctatagggaccatatcaagggataggcatggcccccatttgagggatgggaacacacacccacctcaaaaatattagctcagaattcctcctgtttaaaggaaatgagggggcaaagattggactagaaagagatggaaaggctatccagcgattgcctcacttatggatccatcacatcttctgacaccaaacccagacactattgctgatgccaaggagtgcttcctgacagaagcctggtatagctgtcctctgagagtctctgccagagccatacgaacacaaatgcgcatgtgcacagccaaatattggactgagcatgggaaccccaacggggaagttaggtcaatgattataggagctgaaggagtttgcaacctcataggaagaacaacaatatcaatcaaccaggcccccctctcccaaagctcccagggaataaaccaccaaccaaagaatacacagggggtaccctcagctccagctgcacatgtagcagaggattgccttatcaggcatgactggaagtggagccccttggtcatgtggaggcctgatgacccaggattggaggaatgctaggctactgaggtatgagtaggtggatggggcaggttggggagcaccttcatagaggcggggggagggaaaaggggatagggggcttgtggaggggaaactgagaaggggaatagcatttgaatgtaaataaataaaaaaaccaattaaaataccttagataaatgcaaagctagagttcataattaagattaccagaataaaataaaaaattaagttaaaaaatttaaaaaa

SEQ ID NO: 2138 - DNA, 1000 bp, mus musculus
gtgtcctttgatgatgccggtcactcaaagcgagtcaggtactcatagcctgtgtcatgaatgacaagagctgcagggtggatggggaggagcctgtggcttgagaatggtgcttctatagttgctaaggccagactggggttacccacatcagcaggtcccgcacacctggttgtcctccaggctccctatatctatttcactcttggttgttatccatagatagagttctgccatggacatgcctcccttgttagagagtaacactttaaaagcaaagtttaattaagcatcgtgacttttcagttttctttattccaaggagtggtggtttgaataggtatggccccaataccctcatgtgtttaaaggcttggttgaagggagtgacactattagatatggccttgttggcataggtgtagccatgttggaggaagtatgtcattgtcggggcaagctttgaggtcaaatatgctcaatctacatacagtgtggtacacagtctccccctgctgtgtgtggatcaagatgtagaactcccaggtccttctccagcatcgtgtctgcctggacactaccatgcttcccaccatgatgataatgtactaaatctctgaaactgtaagccagcccaatttaatattttcctttataagatttcccttggtcatggtgtctctgtgtttctgtgtctctgtgttgctgtgtccttggatgatgccagtcactcaaagtgagtcagttactcatggcctgtatcatgaatgacaagagctgcagggtggatgggtcatggtcatggtgtctcatggtttcagaaatgaaaccctaagtcataaaagaaatatttcatgttaaaatgtatgcatgattacctggggtggggttgaggggacaaaactactttgtcttggtctatctgtgatttgtttctggtgtactgtgaacaagggagttcacaggataatcctgtggctggtcagacactctctggtct

SEQ ID NO: 2139 - DNA, 1000 bp, mus musculus
acagcatgggcacatatgtgtcctcaaaatggcttttcagaggtgccacttacatgctctcaggcctgagctacctctcagggaccatgaggtacctgttgctgtatggcaggcaggcatcgcttctgctagccagagactatactaaacaggaaggctgggcacaccctgggctaggctgggcattcctcctcatggccccagtagcaccctctagcctcctgattgctctttcccccagcaaggcaacctcgtcgtcgtcgtcacacctggcttgacattcactgggtttacctggccatggtagagcactcgatgtgccatccaggccgtccgtctccccacggcgaagcccagaacacctcctgaggtttggctgccttccacagggcgaagtcgctgctgtgccgcttgtcagagtcacctgctggtgacagggggttgctgagtgaggagccacagtgcagctctctccatgacaatggcacatccgctctgtgtatcttccttctcagaaatctccggttcctcctacagtgctccactcctaaccagtgggtgagcaggactgacgcctccacgccagcaggcagagcagagctggagtatccacagagcctgcaaataccagggcacttactgccaagggaccagagcccagtgcctggccagatctgttcagccacttttgagagaccgagttccttcgtgaccttttccacaatgacaatctccacagggcaaaggtgacatcaggatagaggacaaaagccaagagagcaaggagcaagcagagatgtgtcagaccccccagggacagacccaaaagggttcagcaagtcccctagacaaactctgacctctcctaaatgccatgctcttactcaactcacactttcgtggctgtcatggatttgttgaccctacttacacacatcaacaaatgaggtcactgggtcagtctggacctctgcgtagacagagcacagtacaaggtgag

SEQ ID NO: 2140 - DNA, 1000 bp, mus musculus
ttttgcctttaaagccctcagtagcctgcagcaggaggctttacctcctccacggtgcctttcctgccccagccaaggctctgctgcccttcagtgggtgtctgtgagcacagtggtagtctctccagggaaagggttgctcctttaaccctctgcatcctgctctggtcttcacttccggagaactgagcacgccagctagcaagtcttcaggagtttgaaggaggctgccctggcttccatgaccttcccatgctgtcttagctagggccatcatcacagattcttaaagctgagacttcctggacagagagacacatacccagacctcacaacagaaacaggcagaggttgtgactgtctgtgccctaacaagccacctggggctttctacttccagggtgatgatagctctgcccaccatccaggacccaggctggcactcagctgttcccagatcacttgtacccaagggcagcagtggcttggaagaaaaccggccaggatgtcctggcctggcattaacgggatttcctctgttatccggactgaagggcagaggcacacagctctgcctcctgcctctctcaggtcaggagaagtggaggtggggccagtgtggctaccctttcctccgccatcagttggttcttgtgacagtactagctttggtggtcggctgtggctgaatgaggcgctggacaccgtgcccttgggcctttccaggaagccatggaagagcaggaaggtgggtggaggaagaagagagggaagcgggcagcagcccctagctgtgcaagcccttgctgcgcacactcatcctggaagcctgccaagagtggcagttagcgctttgtgactggggtacaggaaatgggagggatgcgaaatggcaggtgataccccctggggcaccatgctgtcctccttgcagagggccatttttgctattaatcttggaaagaatgctctacaaggctccctcccagctacaaagggc

SEQ ID NO: 2141 - DNA, 1000 bp, mus musculus
tagggaagaaaggctttatttcatcttatagttccacatcactggccatcattgaaggaagtcaggacaggaactcaagcaggggagggactggaaggcaggagctgctgcagagctgatggaggagtgctgcttactggcttgctccctcatggcttgctcagcttgcttgatggtgcacccaagactaccagtccaagggtagcactacccacagtgtgctaggccctcccacaacaatcaatctaaaaaaatgcaccacaggcttgtccagagggcaatctgatggggccattttctcaattaaggttctctcttccaaaatactctagtttgcatcaaattgacataaaactgaccaacacacatgacagaatgtacaagaaaccatgttccaacatgtaagaaaactctttttaccagttcctggctaattggctgcattatggtcatccacttgcttggctaattagatgtctgattgtctgggtggttggctggcactatggttatcaagttgtccagctggttgcttggctgtacaaacatagggctggtttactggttggttaggtcctatgctgctagtgctggttgtttagctagttggctgactgcttggctggctggctgacttgttgatgggctaattggttagctgactgactggctagctggtgatctggttagctgtctaatttgctgactttggctgactttttaaaagacagtatgataggatttggaattccaaggatcgattcccagcgtaatcagaagaaatcttttaagtctgttttattttctacctcaaattcaaatgaatcagaaatgtctctcaccctggttctctttctctgcttgtggagtttctttttaattcaaaagtatgaagcccgaaggcctgggccaccacctccaaagggcaggagccgaataattctcattaagtggtattcaaagtgattcctgaatatagcttctctcctatctatgagaa

SEQ ID NO: 2142 - DNA, 1200 bp, mus musculus
acactgggacaagggagaggaggaagcctgtgtttagctagaggaggaatttgtctctcagaagacatttcaaacaattctcagagcaccttgcaggcacatctagagcctacacattgatgcaaatgaggggtggaccacaccctcaccaggatttaaacctccctttatttaaacctgaacttcactacagattgctcaagatggacttgggaaggggctttggggtctgcgggacactgaattcttcatttattcctcttcccaacgtggccacattaaacaattctcttttctctgcatctcaccattacttgtctgtctaatcggtggaccgaggatgtgaggctgagtttagcttgttgggcttccagggtctggtctctgaggcaatcaatgctcataagaatcttggtgagccagccgggagaggggtcacattttgggtatcagtcacttgtagcaagttgaccctgagtagacaggaaagactgaaaagttcccacagtggtgagatcatttgttctaccacccagccaacgcctggtgatgcagagacgggatcggggctgggtctcagacccaagagaatctggccctggtgagtctctgtggtgggtggggcactctgagcacttcatccttttagtgcagggctctgtggagctgctgttcactttgaatcaattcgacgactgtcatttggtgactgtctttgtcttctgttttattctgagccactggggttctgttgaagaatttgggcattgcagtgtttatgtgactggctttatcaatttgcaagatttttgaactaattcggtgacctggcgtgacagggaaggttaaccggtgttggttttttgggaccctgctgagtcacaggggttttgttgagcctttgacaggaaaccaagctgagggaatctctgtggtgacctgtgcagccatggataacatgaagtcggggtgctttggtgctccctagggagacagctagttgacaaggctgttacgagcgtgtgatggtttaatgttcttttgtgtcattttgtttctaaaggaacatggggaaaaaaaccctcaatctatccctcattttcctgaaagtaactaaatagcggacctctgataacacatcattttaaatttctttgaacttagtacaaggcaagagcaccattactggtgaatataatt

SEQ ID NO: 2143 - DNA, 1200 bp, mus musculus
ttctcctgtatttccttaaggtagttattgatgtccttcttaaagtcctctatcatcatcatgagaagtgattttagatctgaatcttgcttttctggtgtgatggtgtatccaggacttgctatggtgggagaattgggtcctgatgatgccaagtaactttggtttctgttgcttatgttcttatgcttgcctcccgccatctggttatctctagtgctacctgcctggctatgtctgactggagctcatccttcctgagatcctggttgtgtcaaagctcctgagagtcaagctgcctctgtgatgctgtgattctgtggtcctgtgatcctgagatcctggttgtgtcagagctcctcagagtcagctgcctctgggaccctgagatcctggtgtggccaagctcctgggatcctgggtgtgttagagagcctgggagtggagcttcctctggttgttgtggaactggctgtggagtctgtgcccaaggtctgctcaaggcactggcccagacagactgaaaggaacttgtgccactgatctggcagagtttttgcgtgcctgggtactactggcccagttactccggtgttgggacagatgttttcaccatatacttttctataaagtagtctctcttaccttttgtcaaaggaataatcctaaaaagttacaaattttccacattatattatccatcaatatccctatgacaaaaaaatcaatgggaccacattgtaggaaaaacaaaaaacaaaagcaaaaaacctttattagctaaaacagacaccatggacctgtgagatgttctatcagttaaaggcctttgccgtgcaagcctgagtttcatctttggaacacccatgctgtgaggagagaatggagctacaaagttgcccgccacacacagcacacacacacacacagcacacacacagcacacacacacacacacacacacacacacgacatgtattctctctccagtgaaaggggatgccttcaggacacctggctctgttttctaatagacttatcctctgcagtcatgtgactagggtatggagtccagatcacttgaggtgttgaacacaaactactctgtactaacttgacccggtgtattagtcagggttctctagagtcacagaacttatggatagtctctagataataaaggaatttattgatgactta

SEQ ID NO: 2144 - DNA, 1000 bp, mus musculus
tgaaggtttgtgcagtctatagaacgtgtgttttataagcagatctggagtgtgctgtttggctcatgctttctaagaataggaaagcagccaggctttctcatcccctagctttcccctaaaatattgtcagtgcagtgcactgtgacatcaacacggtccctagtggctgagaggaggaggccatcaaatacttttatttctgggaggaaaagccttcatgtttgtgccttacttggggggaacaggtgtggaggggacagtgaaaaccattgccacagcacccaggtagcaagagaggtaacactggtgcttcagggcaaggaacgactttcagcccactgtgagtacaagtcccctcagtaataaggtgctcacaagcactaattggtgagttcatataatattttgctaaatcaaagagtttgtattcagttctgcactcgctcccaaccctttgagaaagccgttatcaaaagtgaagcttgcaggtcagtgcggggtggaggaagggagtcctgggtgcactgttggtgggatgcacaacaatcaacatagacgcatcacggagcttcctacaaaacaagacagaaatggaaatagacatacgattcagcgactccactctcaggactacacaaaggagacagaggccgtgcctgcgggaggcccccacacttccatggttattcatgccaacccgggtgtgggactgacttgtgttcccagttacagatgaatggataaagagcgtagcacacgggggagaactgttcggctgcaacagacagaaatctgtcacgtgcctcgtccacgggctagaggacattgtcaggtaactaatctaggcacaaagtccagtggttgcatttggtgagctctaacaaggttggtctcaaagaagcacacagagagacatcacttaccaagttggagaaggcacccaaagaggaaagattggtcaaaggacacaaagttttagcagtgagatgagtgagtt

SEQ ID NO: 2145 - DNA, 1400 bp, mus musculus
tctcctgctctggctccaggtctcagttcttactcttaagctcaagtagacttgaactgtcgtgccacatcactaaaacccagcatcggtcaggtggagcacacaccatcagcactgctctctgtgcctccctctctgcctcagtcacagctgaccctgtccatcactgtgcagtatctgcccggtcatcacccatacgcctggtctggctaccgtgtgggtgacttgggatgcttccttggcccatatcttaactcagcagtgagcttttcctcatctttgcaacccgcttccttgcttcacctgctccccccttccccattctccctcctaatcttccttttcattcctgagatcccatctctgtggctagctctgctctatgatcctgcccttagggtcaccagtggcctcccatgtaaaaccagagtagttctggaatgtaatactgtccagttgtttgatacagctacagctactccttgaccttcaggcccttctgtgcgccacacttctatggtcatttcttgctacctaacctcccttgaggtcatttcacctagctgtcactggtgagatgagccccaggccaaggctttaaataactgttcatctctgcccatccctcgctccaaactcctctccatagggtcctccctaattcctctggatgcatgggaggcagaccatactcagctggcccaagctggagtctgctttgggtcccctgctgctctcccccaggcttagtaactgagcacagtttgctgggtaccacatagcccacgccttgtcttcccacaaatcctgcagggccttctttaaacacatcataagctaagtaagtactgctgtcggctgtgacaggatccagcttcaggctgaactgtgcgtctcactaggatctcctagtctctgtctgctgtgggtcatactctcctatttagcccttcctatcttttcccaaccagcaacagctccaagtaccctgtgaggacatgacgtatctcatgtcactcctaagaaccaaacatagaggcaccttcttttccaaaccatcttactgttttgaaactaggactcacagtggtacctgctgaatcttcttcggctaactgcctttcttggtcctgtgctcagtgacggagactgtctgctcctggctgtgtcagtggagctcagtccagggcttcttcagaacttggcacctgcctgggttcacctgctctataagaaccctgtcctgattcaacataagaccagagacactgaaacttatggaggaaaaagtggggaagagcctcaaacacaggggcacagggaaaaaatgtcctgaacagaacaccaatggcttatgctctaagatcaagaatcaacaaatgggacctcataaaattgca

SEQ ID NO: 2146 - DNA, 1000 bp, mus musculus
gctggtagaagccaatgatctgccaagcaatacactctaacctgctgtagacacgtttcctcctaactgaagcatttcatcctagagagagggcatagggctccagcaggtaaggaaacttgccaggaggagggaggtcagagagttagaagattcacggagccactccccaatgctataaaggcagcaaacaattgctctgcagagaggaatgccttttgtggaactgcctgcaacttgtgcacggggctccaaggatgcttttgtgagttatcgcctgcgctcaagtggaggttcagccgcacagctgcaaaggcttcaccgtgctcctgtaagtaaccccaggggacagtgcttcgcccaggtaggtggattcagtaagattgtctgcctgtggtggatcctgtctcaagtcagacagaggctggtagtgagcggcggctgttagggttaagaggactaaagatagcgtgagataattttggctgtcggcctatggcattttaattctccacaatcatgaagttctagcctctcaatctgtctgctggatctggaacacagatgccactcagaagggcgtcctctatcagcagaaggtgcgtgtgtgatagagcgggagctggctgcctcactatgggctgtgcagaactcatggcaatggggcaggaaaatatctcacatctgtgagtgcctctaaccatggctgcctgggctgcttgttatctctgccagctctgttggtaccagggcacacaggactccgctggttctggcggggatgctatggagtgtcttgcttgctttcatttccatgactctcccttccagctgcccagtccttgttctgtgttgccagaggctggctgaatagacagagggtgctggtgggagggggggtggcaccctgagggccaagaggatggaggtttattgtgacgcaccacaccctcagagccccagccactcactggaccacacagccaggaagggggaagca

SEQ ID NO: 2147 - DNA, 1000 bp, mus musculus
tgtgtatgtgcatgtgtgtgtgtgtccatggatattcctgttcctgcttgtgattatatattggtgtatgtgtgtgcctttgtaagaggtatgtgtgcgtatatacaggaatgcaggcatgcccaggtgcatctgtatgggcatagatgtccatgtgtgtgtacttgtgtgcctaggctctgggtacaaatgtgtgtacctcagggagggcttgggtgtatagaaaggaagcattgtgtattagcataagtgttattttctggcacatctaattattttcacggtttattcaggcaagcaaccacccagtcatcctcccagaggtctcttacagagaggtcctcttcgaagagagcttccagtcagagctctgctggggcgatgacctgcaggctctgtgcaaagcgggtgagcgcatcagaagaggaggaagttgaaaatgaaaacaggtaacttctttgtgtcccctgtcagccactgtccatagaacctgtgtgtgtgtgtgtgtgtgtgtgtgtgtgtgtgtgtgtgtgtgtgcgcgtgagcgcgtgctgctatctggggaggttcagccaagagaagcagggcttgctgataaccagagttgaatgctcctgctctcccatctttaccatttgatgtcagtcccaacacacaaagaatttagactgaatctccattgttctactgaccagggctacgatgttgctttttgcttaccctctgcacttagatccctgcctttctctgagctccagcatcaggtgcctcagactccacagttgagtttccatcatggccggttgtcccttggaacaaggtcatctcccgaggaggcagccagtgtttaaacagctgtctctgtggacaccaagggctgcgaagggttccataaatcatcgtatcttagatttcaatggggtttgactcacgaaggtgcactgtcataggaaagagaagggccagccaaaatgtcagtcttaaagttacaaaatccagg

SEQ ID NO: 2148 - DNA, 1000 bp, mus musculus
ttgcattttcctacattggggcatggacccttcacaggaccaaagccctcttctctcattgatgcccgacaaggccatcctctggtacatatgcggctggagccacgtgtactccttggttggtggtttagaccctgggagctcaggtttgttgatgttgttgtttttcctggtgttgttcttacacacacacacacacacacacacacacacacacacacacacacacgagactggatcatggaggtaggtggctgtatgaaccactatgaatacccggaatagccttcaggcacagagtctccagcttaaagttatcaccaacattaatccctgttcgattctagacttatagtgagatagaagttttaaagacagcttctgaaatttttctttttttaaaaaaaggtatcattcacttttaaaaatctccttcaaggcatgaaaaatatttaaataaaaataatgtatatttcaatcactaagatgcttttccatatttatggcctttcaatacctggtgggataacagaatgagagctagatggagacagagttagagctacagggttttctaactcagagttcttttaaacctgtttccttggagatcagtggcctcttgggctctgaagaccttgtggagcagaagtgcgcatgcccagtacaggggctgcttggagtgagtgtccctcattggcactgaaaacgtgctgatttcgattcctccctttgcattcatctgcttccatcaaaggcggcaccatccgcaggtgctttccacgccaaagatgcaaagcaaatcactgtttttgacaaaattttgatgcacaatttctcagggcccagagaaaacctagactaaccctaggtggcatttatttctgaagtcatttcttaaagagtagggtaatttttgtgaagtaagtgaaacatttatcactaagtcataatgataaaatataaaatatgtgcataaaatgaagcaggtttaatcctg

SEQ ID NO: 2149 - DNA, 1000 bp, mus musculus
tattagagattacttgtattgtagacagtgagacatgattttaggattatccacccacatggctatgatgagcaagacaactagaactctcagaatgcacctgggtttgttcagcaaggagctcccattgctggactgcctcgtgttgatagatggtggagcttctctcactaaatctctctgctacatcccagttctggaagatttcgctgctgttagtttgtcttttcactgaactttattttaacatcctttagatgagttctgtacatgttttcttttcctatgttttgaaattggatgctcaaataagtgtaccatgcatatcatttttgttggtagtatgattgacacatatttcctcctactttgaagtttgtatattctttctctcactggctcactcatggaatttttttttaattcgaaaagatctactttttcttattttccttccatttattgactttggacacttatagttctcctgggcttaggtcttgatttttctgtggatttattgttgtaattttattcccaaataaataaataaaattattgttgtaattttaacccaaaatgtttatcattttggactagtttgtctgtaagtttgtcgatagtgattttttagctaggcgacaggttactacaccttcctaggctttttgtactgattagccaactgtcattgttctatgtccttcctgagtaattatataggatcccaatcccctatttttttctagacacaacctttccttaaattttggtctagctaattgcactgtgacttttgtccctagtgaacctgggctgagtcatgaacttgaagtcaatcaatctgttatactaatgaatgatgctcctccaggcccttcatctgctggggtgtatgttggaagctgtactatttcttcttttgtgaaaaatagagaatattccaacaaagagctcattttcagcagtaaaataggtgaagaaaaaaggaatagtcacc

SEQ ID NO: 2150 - DNA, 1000 bp, mus musculus
tgatctgctcaatccccttgtccgcaggacttggcattggctcatatttggagatggtgttgtgagatgttaagtgaaacttaaacagaagagatgctctgatcatgtgtgaatgtgccttatcaaggaaatgaacagaaaaacagacacataaaaaaacagcaggtgggtgtaaagccacaagctaactaatggtctgcaagccaagggatagctcagagcatcagtaaccacaggagccagggctgggaggcaccaggaaatactccttctcacaacttccagaaggacccacccccaccaaagccttggtcttagacatccaagttacagtcttggaagaaagaattctcacatatgagccagttttctgggttaagggaccctgggaaggtaacggagtctgtttgctgtctttctggaggactgggtcacaggctcaccttcacagcgagggacagtagagctccagaccacatttccatcttgcaagatgcacgtgatggactcagaaccctgagtcttcacaaagccatcatcacagtggaaggacactgaacttcccagcagaaacctgtctccaaaacgccgtccattcacaggaatcccagggtcgtggcactcgttctgaccaaatgctatatcatgaaaaagaaatgtcagtaaagtaaagatgcttgaatactaatttcatgtcctgaacaggcaggaaacatcatatttataaaacaatatttacccaatatccatggataaattcaacaaatcaattagatattagtaaaagagagtaggagggggaagatgtcatagcacaatgacaaacgaggcttttgtctatcttctccacagcatgttgctgggggaactcactttcactgtgttccacgaagaggggaagagcacaacaaggtggtaagcagagagatcagaaaggctctgacctgcgtgagccctgcttgtagcctaaccttgtgatctggggaagaaatcttatgat

SEQ ID NO: 2151 - DNA, 1000 bp, mus musculus
aagcaactttaaaatactgaaatcatttaaataattaaaacaatagtaagtccaactaactatcaacaagtagcccagagatgtgaaggtggaatcaagccatcttatatctgttcttttaattttccattttagaactatacctgtggatacagtgaaggcagctctgccacaagcatgactgtgcttcaaacttctctctgtcatacactcaattcctgccccctaattgctcagacctgtcacccatcatgctagagttcccactaactctgtttaagatatgtctcataggtggttctggagttgtgtgcacctcttcacaaggggcaagaacgaatcatggtcctgctgtcaaaatagagcaggaccattttgtaaaaagagagaaacagcctaaaagcatccgctcaaactgcatcatttctagatgagacccaaggcccagggttcctcctatgctcttcctgggaagattcgagtgtaatatgagaaaaggaaaacaattcaagcgttcataccttctctaacttcaaatgccaatacagaaacatctcagacactggaacaggttacaacaaagggtcaagagaaaaagaaaataccatactcaagctgtccactaactgtccactgacaccacttggcagattctctttctcctgaaaagatcatgcaaagactacgaagagctcacatgattacccaaactcaccatatggatggtgcttctgtcccgctgatctctaagaagtcgtatccttcctccagctggaagtcagtaaaaacaagagcaatggtgtccccaggctcagccaagatggtccacgtgcagtcggcattattgtcatactcagaggggaagtgagggctggatatggaaccgctggttccccttagggttcccccgcaggctccctcagctgcaggggcagaaatgaaaaggcaactcaatcctcagaagcctgtcatacataaacatggtcacgcccctattgac

SEQ ID NO: 2152 - DNA, 1000 bp, mus musculus
ccaaagtccattttctatacattgaaagtcctaaatttcaaatttctcctgacttagaatctaagattgcaaaagctgaaatgtaattaagaaataaagtactgcagactgtgtggtctgcatggtcactgctgatgaatgatgtgagcttgcaacatggagtgaggatcaaaccccaggacatgggctccactgcagtcattaatcaatacattggctctgtctgctgccctgcctgtaataatagatggtacagagcacagtccagcctccaggtggaagattgaatgcaacagaaatttactcctggaccaaaaatagggacatctaaacataataccaagttacaataagaaagcccaggctctgcacccctgcacacacccccccccccacacacacacgtacctagctaggataagagaggaaggaagatgactgagggacacctgtggaaagatgaggggaagggaagcatccatttattgaccaacactttggttcctacagtgttctgcttcacccaagtatagtagagggttctatatggatcaacttaattttctctgctttgtccagaaaaaaaagagagaataaggggttggtggaggggaaagaaaaaacaaaaaaaaattggtaagataagagcagacatgactctaagaggtggagagtaaagctgacagaggggtaagagtatacacacagaaggaggttacctggagaaggaagggcagcctttgtctttttttttttttaattcatgttcagcaaaagaacaatgtgaagtataacactgcaaaccagtctcctttccctacatggaagatccatggacgatgcagatgtgtgttcagatgctttgcaaaccctgcaacagaggcaggtggcaatcttcaggatctagtgaaaatttcaagccacctctccagcctctgctgtggtactttgagcagggctgtggggctatttgtgactctctagggcttgaggaaagcac

SEQ ID NO: 2153 - DNA, 1600 bp, mus musculus
ttggtataattagatatttgaagaaatggatagtgtccaggatcatagcttcttttcaaactcacttcccgtggctgccctgacagtaagcagcaaaggacctcatgccattaggatctccttgcagaaggaaactgggacagagaaaaggggtttttcggccttggatatgacaaccaattagtcacattctcattagaatacagagtctaggtcactagactctgaatggggtaatcgacatctctgaaatgttcccaatggtggtggcagataaaatacaggatactaagtaaacttaagacttagatactaagagatagataccattttaaaatttgatttttatgtgtgttaaaaagagagaagatatggagacggagggagagctttgtgctaagggacaactatgtgcagtcagttacctacttagatctttacaagtattctggaagtcaaatctttgggtttgcttggcaagcatctttaatctacggagccatactgtcgatacaatacgcaggctttcaggtacgtaatcgttaaattcagttatcagttataaacttgatgatatctagaatcacaggaagaaaacactatgagcatgtctgtaagaaaatatcttgattaggtagaaggccccactcactgggggtggaggggcaccactcactggactgagacccagggctgcataaaaaaaagagagagaattagctgaggatctgcaaattagccaaggataggtatttgttgttgctttctttctggctgtgggtgtgatgccagctgctgctccaatctcctgccactttgacttccacaccaggatggacaggaccttcaaaccttgagctaaaacaaactctttcattttcagttgcttttgtcagaatatttgaacacactgtggtggttagaataggaatggcctccataggctcatacttgttaatggagtggaattgtttgaaaaggttagatggattaggaggtggagccttgttaaagtgtcactagtggtggggtttgaggtttcaaaagtccaagttaggctcaatggctatctcttcctgctgtctgagggtccagatgttgacgtctcagctctactatgactgcctgtgtgctgccatgcttcttagtatgacaataacagactaaaactttgaaagctgtaagccagctccaattaaatgctttcctttataagaattgctgtggtcatggtgtctcctcacagcaatagaacactaagacacacacttagacacgtaactaaaacaatgtgtacccaaaaagcaactcagccttggtatatttgaaagtcttgggtcaatggatcaggaaacaaaaaatgatagatgcaccataacctagcaattgttaatgcagaggctacatgaagtaaaatagaaaacaaaaaattatcagttgatcaattatatcctaatattcctttattttcaatccgtaattgatgacaagaaatctacagatctttaggtgaagcctatcatccatggctttctagatttatattctatctctagtttatggatggttatctttgaacacattatatagctttcttaaa

SEQ ID NO: 2154 - DNA, 1000 bp, mus musculus
atcatggcaaggattcaaaaagcacctgaaggcaggatcactcgctgctccacccagcatcacctttgaccaaggaacttacctcacaccaagaagtctggcagaaaccatggtgcatgctgcttcctcaatgacttgaaggcatatgctcagctagctttctcccacagttcagagtgacctgcctcgagaatggtaccacccacagtaagccgtacccttctacaaaaattaccaaccaagacaatgcttcacagagatgcccacagaacaaaatgatctgaacaatcccgcaagtgagactctcttcccagataattctaggttgtgtgagagttaaaagctaaccaggacaggctgtagtcataaaatcgtgatttataagatttcataccattggaatctaattttatatatacgaggaccctataaaatggtgccattatgtcagcccctgctccacctctaaggtgaacccagggtgtcttggggactttgtactgccagttatccaatgggcttgccagactagactgcaacacaattcttgcttctcagattcctcgtgccttctcctccatccatttcctaccgccaccctttgagcatactttctaatcttaattttcctttaatcctacatgcacacatacaatgattgaagtagagaaagattccctcctttataaacagaaccaaagtttgcagtttgtcccacaaccttatttttttttctttttccaatttttattaggtattttcttcatttacatttcaaatgctatcccaaaagttccctataccctccctcccccccccgctcccctacccacccactcccacttcttggccctggtgttcccctgtaatggggcatataaagtttacaagaccaaggggcctctcttcccaatgatggccaactagaccatcttctgctacatatgcagctagagacacaagctctggagggtcctggttagttcatattgttgttcca

SEQ ID NO: 2155 - DNA, 1000 bp, mus musculus
tagtctgggctgatatcctaatcaggccttggacacaaactccatagccagtcccaaaacacccagatgaagctctactcccaggtgctctaacatgtccagaatcacagcatcatttgatgccaggagcttggtcaaaccaggatctcagggtcccagaggcaccttgactcccagcaactctgacacacccaggatctcagaatcacaggatcccagaatcacagcatcacagagacagcttgattctgaggagtttggacacaaccaggatcacagggaggacaggctccagtcagctatagcgaaggcaggtagcactagagataaccagatggctggaggcaagtgtaagaatataagcctcagaaaccatggttacttggcatcatcagaacccaattctcctaccagagcaagttgaggagacaccatctcactggaaaagcaagattcagatttaaaatcactcctcatgatgatgatatagggctctaagaaggacataaatgggccatcatgggcacgaactctgtcaccagttcccagaggactctccatgctgcacgtaccctagcacacccaggatcttaggatcactgaggagagttggcctccagagagtgctctgaccctgggactcaggtgagagtgccatcttgtatcctgggtctctcagagaccagtctccgtaggagagcacacgggccacagaagcaacagagcttttgggacagggtcccttcgggccttcatcttcagccaggaggtggatcagaactccagacctctgtgcaccttttctacaagaggagagcttgcctgcagagagtgctctgaccactggcactcaggagagttgaatttctaggactgctgacagaggctaacagaatcacaggaggaacaagctccagccagagatagctagaacatctaacatcagagattaccagatggcaaaaaggcaaacataagaatcttactaacagaaaccaag

SEQ ID NO: 2156 - DNA, 1000 bp, mus musculus
ctggtgtcctcagttaagccagacttctctctgttgtttcctgtggcctcactttaagatcttctcctgctgcagacttcactgtgctttttccacatagtgctctggacttgccgcaagcagcactttgtgcatcattaaactgatgcttttctgggcagtagagattactcggtggtcaagaacatttgctgatcttgcagaggacctgagctgggttcccttcactcatgtccagccgctcataaccatatagagctccatcttcagtggatctgatggcttctggccttgtgaacatctgaactcatgtacacaacaacagcaacaatgataagaacaacaacctcccctcataagtcacacacagacacacacacacccttacatacacagacacacgcatacaccactacacacttacagagagagagagacagagagagagagagagagatgtcagtgtgaatctataaatatatttcatgtgaggaatgaggttggtgtatgacagcaaggcatcttttgcctttattccttcatactgcattttacacattccaatacatctgtaaacaacaaatactaaggtcttcaactccctatttcttgagaagagacaggagtaatcctatggagaagttgtatttgcatgatagcagacacctttatatctgcagcatgtccaaatattatcttggtgtaagaccaaagacttgaaaaagctaagtcagactaccaagagaaaagggatttgctatgtgaataagaagtctaccagagccaggcggtggtgtgcacacctttaatcctagcactcgggaggcagaggcaggcggatttctgagttcgaggacagccagggctacacagagaaaccctgtctcgaaaaaaaaaaaaaagtctaccagccctcttgtgcccaagactactaaagccaaatggctaagtaactctacttcctttttctctgagtgcttccctgcccgttttttgtttt

SEQ ID NO: 2157 - DNA, 1200 bp, mus musculus
cgattttaaaccctttgagaaatttgctgggattcaatgaaatctgaagtcttacagctcccaaataaaaagtaaaataaaagtagatgtctttttctttcaggcgtgtaccagatgtctgtttcagaagcagctgtccctgggggaggaagtaggaagggtgaaggctgaagacccagacattggagaaaatggcttagtcacatacaatatcattgatggagccggcatagaactgtttgaaatcaaaacagactatgaaacactatgttgctgctgctgctgctgctgccgccgcctagagctcctcatttagccccctgagacaagcctgtggttagttgttgttagccttgctacacagacaggaaaccatagctaggaattagacactgcctgagttttgagagcttgctgttagcacaataccaattccgaaacaggccttcctcactctcagggaagcttcttacccgccaggctttcctgcccttaggccttgtgtcagtggaactcttccgggtcacagtaattctctgttaataaaagtttcccaccgtgtgggcactcaatgttagggcaggaaggggatgcctttggtttcatcagtgttggtgtgaaagacccacaacgtgaggactcccccacgttctgactcaagagaggcgacaccccaaaatcaaccacaagaaacggtcttgctgcaaattgcaagaggatttttttattcaagagcgctctcgggcccatggtcatacaccaagcaggggtagaggaccatggcgccccaagtagctggattagggggtatttaaaggaagaaaccacgacttaaggatgtgggaagggcattgttggaaaataccaaaaataccagttaagagtcacaaggtagtacaaagtcacaggcgtcactaggaatacctggtaattgttaactctcaagacagtttctaagagcccctaacgatagtacatttgcattgcaggttccagcaatgatcagggtgggtcagggtgactttctttgaatgtacactccttgaacccaggaagcttgtgggtggaggaatgtctctatctgttttatgattagcataccttggagcactgagtttactactctttcaggtgctgggcataaaggcatgggagctccaccttctggggtctgcccatgcttttccagttcctgcattc

SEQ ID NO: 2158 - DNA, 1000 bp, mus musculus
gaaagcctgggttgactagcaacattggcaaatcctgaaggcctaccaggctttggcgccagggtcccaggaagtgagtgactcttgccttgggctgcagtagaattgttgggggtggggtggggttggctcttccccccagcactaggaagggggtgcatatctagaaattctgatctacttagcatgggatggctggacctcactggctttaaaggtccctgcttgtgtgcgtgcttgtgtgcttgagtgagtgcgtcctagtgtgcaccctgaactagatccctgctggggaggactggcctccaaggtcattcccctggtggagaacatctctgaatgaagaatggcaccgaggaggaaggagggggcaatagtcctaaatgctgacattccttcccccatattactattccttaatttaatacaaaaccccgtgagattccacaggagttcatttgggagaagaaaaagaattttgatgtcgccatctagcggccagtggtgagacagacgtttctgagaactgagtctaatttacaaaaggcttcctttgtgaaggagtttaaagactggtgattgggatgataatcccagatgcttgcttagcatgcagaaagccgtaggtttgatccccagcacttcttaaaacctggccatggtggtgctcgctggaaactgcatcactggggagataagaggcagggggatctgacgttcacggctgtctttggtcacacagttcaacacgtgagccacctgcctcagaacaactaaacggaactggagataagggtcccaggctgcacagaaaatgatggacactcaccaggaaggacagctcttcctaccctcagggctaactgacattcctttgacaaacagctggaggaaggggctggctttcaggtgtctggggaggtgtatggattattccaggtgtttagtgcctcaaggagctggggccagacaagagttcagaaaggatttcaggactggg

SEQ ID NO: 2159 - DNA, 1000 bp, mus musculus
ttgacctcaggaaggaggtgacttgtgatgtgagctcctgctgagacctatgttgcatcactgtcacatgagaagggggctccagaaggacttgccaccaaaagcatgctgaagcctgccatcaaatattgataaaggcagaggggagaggactatgtaactgaattatcaatgaccagacctggctctcaggccctgcagtcagggatgggcctacatggtgggcttgctgttattgttgttttttttttcatgagactccttatttgatttactgacttgagttaatttttttattgcttaattgttttatttacatttcacatgttatcccccttcctggttccttccctgcacaccccccccccctcactccctgcaaccctgatgctcacagccaactattgaactgaacccaggtcctaagtgaggagttagagaaaggaccgaaggctgttgtttttaaacagggacactcgggttcattttactttgaaacaatttgtggagcatgtttgttagattgggctcatgaggcaaacaccacacaggcattcaaggtcagagccactagcttgccacatgggtgacctgccttcccaggaggcaagggtgagacctgaaccacatgctcctaaggcagcccaggctgggcctatagactgcaagccctagaggcaatgaggaatggggatgggaagcaggtatgtgagacaagaaacttcgggaggttttttaccttttcagcttactgagacctttgagaatgttctgagctttcagcagcattgtgttgtgttacttagggctcttacatgtatccttttatcctacatgcagcctgtggccaccctgttaggagacagtttcctgagtccagtcatctcagaaactccttggaataccttgctgacaggctcaaaactgagtttatgttcctaggctccagaagctaactccgtcctgttctgctacttcaagtgttccaggtttgtctgat

SEQ ID NO: 2160 - DNA, 1000 bp, mus musculus
taacagttctctattgcatgctaagagaatacccaatagaagtctttatgaagaggtacagccagacaggggtgacaatgacacaggcatgtttcaaagaggctaactagcttggggcaaaggaaatgttctcatgtcaatgagaaattcatacttttctccatttcatttgcattgtaaacgggtaacaaccaaacactctctctctctctctctctctctctctctccctttattttaaaactagaatataaatgcataatatatatacatatatacacattcatatacacatatatatgtataaaaatatacacatatacatggactcatacatgcatatatacataaaatatagcaaccaggtgactcagtgggttagtgcacttgccttggaaccctaataagctgaatttcatcctgaaaaaaggaaaaagcctgtaatctctgcacccctaaatccagattggaggctaagagagtagaacagccctgaaagacaagctagacagattagaccatagagagcagcagaaatggtcagagcctctttctaactctgtggaagaagatatccagctcctgaaatttctctccagtctacacacacacacacacacacacacacacacacacacatacagaaacacaaaagagagagagagagacagagagacagagagagggaggggagaaatacacacacaagcataacataagcagagtaatgtaaccacatgtgcacaaacccctaagataaagattattttgaatcatgaatttaagtatactggtaaataaatgctgttaatatacacctgttgagtgactaacaattcagggaaacctcttcagggtcctctcctttatcttcagtgttatcttcatggaagtggcagatgtcctgcaaatttaattttgcatcatatggtcctttattcttctttaataactgtcccaagcatatttacacaatgaggaagggaataatgagtccggt

SEQ ID NO: 2161 - DNA, 1000 bp, mus musculus
taaagtggaacgttcatttctctggtagctgaatgtagaggcagcagcatttacggacatgaagatgtgtgtctgcctctcgtgtctttagtttccctgcagctctctctgcttcccaccttttatcaggcagcaatgcaaatccacccagtttcctctctccaatcacttgcaattactactttctccatggctgtgagacgcctgatctccagcaagaaagacgccacaacaggatctttctgcacacgtttattgggagagcttgattgcgaaggcgaaagaccctaagcccaaaactggtgctgcttatataggcctaggagaggtgtgtctacacctgattggttatgctttcagtacctcatttacatgcctcaggccaggccatgactcagcacaaactcttatgcacatgcgcacattggttgtttacccatattcatgggcgtcagcttgttgaaaccagcgccatcttgtattggcgcttattggcttcccacacatggctaatggaagtacaaacttatacagctactttgataatcaattttggtttctcaaaaaattgtgagtagtcctgccccaaggcccagctataccacccctgcgtatataccccaaagatgccccattataccacaaggacacatgctcaactatgttcatagcaactttatttgtaatagctggaaactggaaacaaactaaatgtccttcaactgaagaatggatcaaggtaatgtggtaaatctatacagtggaatattatttagctatttaaaaacaaggacattgccaggcgtggtggcacacacctttaatcccagcacttgggaggcagaggcaggcgaatttctgagtttgaggccagcttggtctacagagtgagttccaggacagccagggctatacagagaaaccctatctcgaaccctccccaaaaaatccccccccccaaaaggggacatcatgaaatttgcagacaaatggatggaaa

SEQ ID NO: 2162 - DNA, 1000 bp, mus musculus
tttggtttttccatgtcctgatggagtgagaccctggagcatcccagtcctgaaatcctttctgaactcttgtctggccccagctccttgaggcactaaacacctggaataatccatacacctccccagacatctgaaagccaaccccttcctccagctgtttgtcaaaggaatgtcagttagccctgagggtaggaagagctgtccctcctggtgagtgtccatcattttctgtgcagcctgggacccttatctccagttccgtttagttgttctgaggcaggtggctcacgtgttgaactgtgtgaccaaagacagccgtgaacttcagatccccctgcttcttatctccccagtgatgcagtttccagcgagcaccaccatggccaggttttaagaagtgctggggatcaaacctacggctttctgcatgctaagcaagcatctgggattatcatcccaatcaccagtctttaaactccttcacaaaggaagccttttgtaaattagactcagttctcagaaacgtctgtctcaccactggccgctagatggcgacgtcaaaattctttttcttctcccaaatgaactcctgtggaatctcacggggttttgtattaaataaaggaatagtaagatgggggaaggaatgtcaacatttaggactattgccccctccttcctcctcagtgccattcttcattcagagatgtttctccaccaggggactgaccttggaggccagtcctccccagcagggatctagttcagggtgcacactaggacgcactcactcaagcacacaagcacgcacacaagcagggacctttaaagccagtgaggtccagccatcccatgctaagtagatcagaatttctagatatgcacccccttccctagtgctgggggaaagagccaaccccaccccacccccaacaattctactgcagcccaaggcaagagtcactcacttcctgggaccctggcgccaaagcctggt

SEQ ID NO: 2163 - DNA, 1200 bp, mus musculus
tcagtgctccaaggtatgctaatcataaaacagatagagacattcctccacccacaagcttcctgggttcaaggagtgtacattcaaagaaagtcaccctgacccaccctgaccattgctggaacctgcaatgcaaatatactatccttaggggctcttagaaactgtcttgagagttaacaattaccaggtattcctagtgacgcctgtgactttgtactaccttgtgactcttaactggtatttttggtattttccaacaacgcccttcccacatccttaagtcgtggtttcttcctttaaataccccctaatccagctactcggggcgccatggtcctctacccctgcttggtgtatgaccatgggcccgagagcgctcttgaataaaaatcctcttgcaatttgcagcaagaccgtttcttgtgggtgattttggggtgtcgcctctcctgagtcagaacgtgggggagtcctcacgttgtgggtctttcacaccaccactgatgaaaccaaaggcatccccttcctgccctaacgttgaatgcccacacggtgggaaacttttattaacagagaattactgtgacccggaagagttccactgacacaaggcctaagggcaggaaagcctggcaggtaagaagcttccctgagagtgaggaaggcctgtttcggaattggtattgtgctaacagcaagctctcaaacctcaggcagtgtctaattcctagctatggtttcctgtctgtgtagcaaggctaacaacaactaaccacaggcttgtctcagggggctaaatgaggagctctaggaggcggcggcagcagcagcagcagcagcagcagcagcagcagcagcagcaacatagtgtttcatagtctgttgtgatttcaaacagttctatgccggctccatcaatgatattgtatgtgactaagccattttctccaatgtctgggtcttcagccttcacccttcctacctcctcccccagggacagctgcttctgaaacagacatctggtacacgcctgaaagaaaaagacatctacttttattttactttttatttggcagctgtaagacttcagatttcattgaatcccagcaaatttctcaaagggtttaaaattgaactttttattggtagacgcagaagtgaagtggatggatgggaagaggatcccagatggccagc

SEQ ID NO: 2164 - DNA, 1200 bp, mus musculus
tttggtctatgaatgaggaggagaagactggatgcgtatacacataatatgattctctttttaatgacagtagatcattcttgttctctttttctgtttcattgttttagttttacttatcttgctttcgcctattcattagtttgcctactgttgttctgtcttgtttttttttgtttgtttgttcatttgtttgtttgttttgttttgacctggtcatgtccttctgcactgataatgagcacatatagacacatcaacatcaaatataagcagccttaccctgcccaccagcacagggttgggcccagtgtactcgtctatcacaaagaactgattccagacccaacctctcttggagcgttgcagcatctgcccctccttgcccttctcatggtgtccatggaaagagggatgcaggtggcttcattgctccagggcaaacataccaggcataccagggcagcttgtaaacagtagttctccttcatttttggttatgcagtaggcacaggagaatgcagctgtcacttcctacaccaacagagtggctttcttttggatggcggcctcccagatgtgacctcctctggaatggagtatcttcactcactgaggacatcacaccagggttgttcacctctgcagtcagcttctgcaagcagagaaagagatgagattagctgcagcctccatccacctattgtttcgttttcatttagcaaacatgtggtttgagtatcagtttaccacttgtcagctttgggaaagctgacagctttctctgaacccagcttgctcatttcagaaatgtagataagaataatattcgttgaaaggttgctgcaatgatcaagagaaatgggaatataaagccactaatacaatgtctagaacccagaaactctattattcattgatcatatgtgtgcatccacagcaaggatgccagaggccagcacagcaaagagaggatgcttaaaggatatggtgactgaattgaatactaaagcaaaagcttctattttaagaatggagaagataggataccatggaaaaaaaaaaacaccagaattccataaccattacagttggccaaccacagcataaaccaagacttaagcacaaatggaaaataagaggaatcttatgtcatagtctgtgagatggaaggaaagacaaggcagacctcaggaaatg

SEQ ID NO: 2165 - DNA, 1000 bp, mus musculus
gaatgttaaaccctctccctaagtgtggcccagtattaaaacccaggagaagtcatctctctctgtctgaacctcccatgcactgggtaacaggtgtgtcatgttataaacacacacacacatacacacacacactttttatatactctgtgtgtgtctctgtgtgtgtgtgtgtgtgtgcgcgtgtatgtgtgttcatactaaagcattttcagacaatgtgtaaatcagggtcagcgagatggctaagtagataaaggtacttgtcaccatgacaaacatcttgaacttgatacctgagactgaaatagtggaaggagaagactgactcctattagttatcatttgatacccacaattcaccttccttgaattgccttcctctacttcccatatcaattatgaacagggtgtccttgaactgacaaagacaatcctgcctgatttgtgggttcatgaattaaaggtgtgcccagcataccgagtctctattgtgcacaccctgcctattagtcctttggacttcaataggtaaaatgtgaaggctaaggcctgggtcccggaagttaacaattatcctaagactgactacttacttccccttatgattcttttaatcgttttcatatcaaacatattcactgtaggagctagaaaagggggttgaggagtttttaacatgttttgttcttgcatagcacctgggtttgatttgtaatacataaccgtttgctcacaaaattctggaacaccaagtccatgagatgaaataacctcttctgatgtctgtgggacacacacacacatgggacacagaaagaatacacatgcaaagcattcacacacttaaagtcagtcgatctaagaagagaaacacaagtattggttgcttccatgttgactgtacctaattccaggagcctgtattatttactttttgtcattttatgaattcttctcactgtgttacaaacatgcccatttttttggtttctttctt

SEQ ID NO: 2166 - DNA, 1400 bp, mus musculus
ttgtgacctgatatgctttgacaccatttatgaaaagcttttaagatgaatattgatttgtaagcaacaaatatactagaactcttcctttcttcattcttgtatttttaaaataaaaaaagaaaattttatctaaagttactatttataattaattgtgcaaaatacccacaatcctgagccctatcagacacaaaaagtgtcatcttagcctgaagtgttattccacagtgaattgtgttgccattgctgctttctgtctctgccctagggatgctgacacaactctaagtgagcgaactcatcttggacagaagtgaagggacttctccaagtattgacttgaacttccttcactgaggggaaatatccattcctacaacagggaagctcagtctatggctatgcaacatagccaaatacaggagacccaaagccctttgcaaaggatttccagctgcaagtgtgataaagctctagagagatcagtgtgttactctactctagatcttctgaggaagatcctaaaggccctcagttctagcactggtccctagctcatgtgcaatgcaaagaagctcagcatcaacttccattgcttcccatggcatgagctgctggaaagaccccttagtagctatgcaaactgaagtattactccagagagaagcatggaagacacaatgaagcagtaattccaagggactaatgcctcgcatgaaacgtttttttatttatttctgcatataaaccattgagtgactcaggtttcactatatggaaaaagcctgctcagcaaacaagctaacaaataaacaattcttgtttacttcctttgcaatatgtaaaactccacagtaccctgctggacattgcccatggccagagcacagcctttgtcccaaacaagaaatgggctgagaaagtgaacctctggaggaccttatgctacacatgtatggggcctctgtcaatccttatcaccagaagaaaactctaatgctaaaataacttaaaagaaactcacccacattacactaatagtatttcatcctatgcttatgtgaagagagccatttagattcctctacactattctctggctggtgttttccaaaggcaaagtaggtgcgagagatgctgtggtgacagttgctgaaagcataaactgtgtggtatttctcccactgtgagaatcatattcagactgaaccaatgggcccttccatgctatgcactacaggatgataggattttctcaaccttcctcctactgtggcagttttttctgcaaattatgtcttgtagcatgtaaaccaagtatcactatatatttggtaactaatagaactacagggaaaatgtgctgtcagagtagcccatatggaggctgttgcata

SEQ ID NO: 2167 - DNA, 1400 bp, mus musculus
tcagggaaccttggagatggaaaacctaagaaggacaacagagacagaagcacagccaacagagcaaaaataatggaagagatgatctcaggcatagatgatataacaaaagaaaatgttaaacctaaaacaatttctgactcaaagtattcaggtaatctgtgacactctaaaaaaatctttttatgaataatgggaataaacaacaagtcaagagactaccagctcgaaggacaaggaaatattttcaacaaaatcataaaagaaaattcacccaaactaaagaaagaatgcctaataacgtagaaaaagcttacaaaacaccaacttcattggtgttctcaacacataatcatcttccctccacatacatcaaaataacaggaattaacaatcattggttattggtagctctcaacaccagtaaagtcattttccacaataaaaagatataagctgacagactggatatgaagtcagcatctatcattctgcttcatgcaagaaacataccttggcaaacatacagagatattacctaagaatgaaggactgtaaaaagttttcctaagaaaaggtactcaggatgaaagctaaggagcaattgtaatatctaaataaaagagactttcaaccaaaatgaatcaaaagagatagggaaggatatttcacactcatcaaagaaaaacacaccaagatgacttctcaattctgaatccccacatttacaacttaaatcctacttttaaaggtgctaatggggtttgagggccacaaagctagcagtgcacaagcagtagaacagatgagacagtgttctttctgcctccatctgcacccaggagctggggctgttccacagccctctgtgcatgggccctgccagggtgagctggtctcccagaagtgctgacacagacttacaggcccacaggagggacaagctcaacccagagacagcaagaccaactaacaccccagataaccagatggcaaaaggcaagcccaagtacctaaccaacagaaaaaaagctacatggcatcatcaggatccagttctcacacaagagcaagtcctggataccccaacataccggaaaagcaagatttggattgaaaatcacatctcaggatgctgttagaggactttcaggaggaaataaataagtcccttaaagaaatacaagagaacatcggaaaacaggtaaaagaacttaaagaaaaaacacaaaattcccttaaatcattacatggaaacaaacaaacaggcaaaggaattgaacaaaaccacccaggatccaaaaatagaagtagaaacaaaaaaagataccacaaagggagacagctctggagatagaaaacctaggaaagaggtcaggagttatagatgcaagcatcac

SEQ ID NO: 2168 - DNA, 1000 bp, mus musculus
gagttagcttctggagcctaggaacataaactcagttttgagcctgtcagcaaggtattccaaggagtttctgagatgactggactcaggaaactgtctcctaacagggtggccacaggctgcatgtaggataaaaggatacatgtaagagccctaagtaacacaacacaatgctgctgaaagctcagaacattctcaaaggtctcagtaagctgaaaaggtaagaaacctcccgaagtttcttgtctcacatacctgcttcccatccccattcctcattgcctctagggcttgcagtctataggcccagcctgggctgccttaggagcatgtggttcaggtctcaccctcgcctcctgggaaggcaggtcacccatgtggcaagctagtggctctgaccttgaatgcctgtgtggtgtttgcctcatgagcccaatctaacaaacatgcttgacaaattgtttcaaagtaaaatgaacccgagtgtccctgtttaaaaacagccttcggtcctttctctaactcctcacttaggacctgggttcagttcaatagttggctgtgagcatcagggttgcagggagtgagggggggggggtgtgcagggaaggaaccaggaagggggataacatgtgaaatgtaaataaaacaattaagcaataaaaaaattaactcaagtcagtaaatcaaataaggagtctcatgaaaaaaaaacaacaataacagcaagcccaccatgtaggcccatccctgactgcagggcctgagagccaggtctggtcattgataattcagttacatagtcctctcccctctgcctttatcaatatttgatggcaggcttcagcatgcttttggtggcaagtccttctggagcccccttctcatgtgacagtgatgcaacataggtctcagcaggagctcacatcacaagtcacctccttcctgaggtcaaggtggcccatgattggctgggcagctgtggctggagccaaggcat

SEQ ID NO: 2169 - DNA, 1400 bp, mus musculus
tgcaggaactggaaaagcatgggcagaccccagaaggtggagctcccatgcctttatgcccagcacctgaaagagtagtaaactcagtgctccaaggtatgctaatcataaaacagatagagacattcctccacccacaagcttcctgggttcaaggagtgtacattcaaagaaagtcaccctgacccaccctgaccattgctggaacctgcaatgcaaatgtactatccttaggggctcttagaaactgtcttgagagttaacaattaccaggtattcctagtgacacctgtgactttgtacttccttgtgactcttaactggtatttttggtattttccaacaacgcccttcccacatccttaagtcgtggtttcttcctttaaataccccctaatccagctactcggggcgccatggtcctctacccctgcttggtgtatgaccatgggcccgagagcgctcttgaataaaaatcctcttgcaattttcagcaagaccgtttcttgtgggtgattttggggtgtcgcctctcttgagtcagaacgtgggggagtcctcacgttgtgggtctttcacaccaccactgatgaaaccaaaggcatccccttcctgccctaacgttgaatgcccacacggtgggaaacttttattaacagagaattactgtgacccggaagagttccactgacacaaggcctaagggcaggaaagcctggcgggtaagaagcttccctgagagtgaggaaggcctgtttcggaattggtattgtgctaacagcaagctctcaaacctcaggcagtgtctaattcctagctatggtttcgtgtctgtgtagcaaggctaacaacaactaaccacaggcttgtctcagggggctaaatgaggagctctaggcagcggcggcagcagcagcagcagcagcagcagcagcagcagcagcagcagcagcagcaacatagtgtttcatagtctgttgtgatttcaaacagttctatgccggctccatcaatgatattgtatgtgactaagccattttctccaatgtctgggtcttcagccttcacccttcctacttcctcccccagggacagctgcttctgaaacagacatctggtacacgcctgaaagaaaaagacatctacttttattttactttttatttggcagctgtaagacttcagatttcattgaatcccagcaaatttctcaaagggtttaaaatcgaactttttattggtagacgcagaagtgaagtggatggatgggaagaggatcccagatggccagcatgcaggagcaatgtgttccttccaggatgacaaaacaacattggggtcctggtaagatgatgaggtcacccacaacacgagagaaaggaaaacagtgacaaggtcct

SEQ ID NO: 2170 - DNA, 1400 bp, mus musculus; identical to SEQ ID NO: 2169

SEQ ID NO: 2171 - DNA, 1400 bp, mus musculus
aaaatggagtccttatcctataataagtgaacattagaagcattctcagtgtggtttggtctatgaatgaggaggagaagactggatgcgtatacacataatatgattctctttttaatgacagtagatcattcttgttctctttttctgtttcattgttttagttttacttatcttgctttcgcctattcattagtttgcctactgttgttctgtcttgtttttttgtttgtttgttcatttgtttgtttgttttgttttgacctggtcatgtccttctgcactgataatgagcacatatagacacatcaacatcaaatataagcagccttaccctgcccaccagcacagggttgggcccagtgtactcgtctatcacaaagaactgattccagacccaacctctcttggagcgttgcagcatctgcccctccttgcccttctcatggtgtccatggaaagagggatgcaggtggcttcattgctccagggcaaacataccaggcataccagggcagcttgtaaacagtagttctccttcatttttggttatgcagtaggcacaggagaatgtagctgtcacttcctacaccaacagagtggctttcttttggatggcggcctcccagatgtgacctcctctggaatggagtatcttcactcactgaggacatcacaccagggttgttcacctctgcagtcagcttctgcaagcagagaaagagatgagattagctgcagcctccatccacctattgtttcgttttcatttagcaaacatgtggtttgagtatcagtttaccacttgtcagctttgggaaagctgacagctttctctgaacccagcttgctcatttcagaaatgtagataagaataatattcgttgaaaggttgctgcaatgatcaagagaaatgggaatataaagccactaatacaatgtctagaacccagaaactctattattcattgatcatatgtgtgcatccacagcaaggatgccagaggccagcacagcaaagagaggatgcttaaaggatatggtgactgaattgaatactaaagcaaaagcttctattttaagaatggagaagataggataccatggaaaaaaaaaacaccagaattccataaccattacagttggccaaccacagcataaaccaagacttaagcacaaatggaaaataagaggaatcttatgtcatagtctgtgagatggaaggaaagacaaggcagacctcaggaaatgatgatggtaatgaaaataatcaatgaagaaatgaatgactaaggtatgtgtgtgggaggggtacaggtatggaatccagagctctgtagacaggcacagaaggatcacagaaattttaagaagtcagaggctagtttgatctaatctga

SEQ ID NO: 2172 - DNA, 1400 bp, mus musculus; identical to SEQ ID NO: 2171

SEQ ID NO: 2173 - DNA, 1400 bp, mus musculus
gacagagtgtgtccatttacaaagtaatggtcatatatgaaaattatgacttacaatgccagataactagcttcttttcaactccttataaataaaaatataagacttcgcagtcattctcaaaggcagtgatgtatcaagtatagtctcacattactcatcagtcacctgttaggttcttgacacagagcacaaatattacccaaagtgagaagagacagttccattacttgcagaagagttaatagagaatgcaggctagtactggagcccatggaactatgcagcagccattgaataacctcaattgcatgactttgaatatcatgaaaactctccaagtttcttttgaaactcagtttctagggaaaactgcttaacaaaagcctttccctgacaggatcatatgagacctctgctgttacctcctttcagcctagctaggctggcctcagaccatccaccacttaggcagagccacctgctgtgcagcttctcatcactctcctttgatgtgcaactacctgcctgaggcccaacctgcctgagattttccagagttagcaccaaactgtgatcttcactagttcctactaaaaggctgatctgacttctacaaaggaactttgcctgactgggaatgggcctcccctcttctttataaagtgtgtttgctgacattaaagttgaaccttgatcagagtagttgtcttgtttccattctttctctctcttccccaaattcccttctttcttccagattccaagatgccttcctgggtagaacctggacatgtgagccactggcctgcctcaacactctgcatccagttagccttcactctgcatacacttagctcatgttccctcatcctgcaggagaagttcaccctcttctctaggattttcaaggtggttctcatggctccaggatgcagctggctgagaaaaacctgaggtacctctagaccaggaatatctctagagaaccataacatgatcaaggaacaggtgaatggtcacacaccattgaggttagatatctagaaattagggactagatacttaaaacattctggaaatacacacacacacacacacacacacatttttttatataaatatatatgtgtttaatttcaaaccaagggtcaaatgacttgttgcatattttacataccgaagtggtactggccttcagattctcccagcattcttcagtacctccctagcttaacctgccttcaaggtttagctttcctaccctgggggtgagctgcatttctcccagaagctcttccctaaataattcagatattttgtgttgactctatctctctatctcactctctgtctcttcctcaccccattctctctttatctttacctaccaaactccc

SEQ ID NO: 2174 - DNA, 1400 bp, mus musculus
taggtaaagataaagagagaatggggtgaggaagagacagagactgagatagagtcaacacaaaatatctggattatttagggaagagcctctgggagaaatgaagctcacccccagggaatgaaagctaaattttgggggcaggttatgctagagagagactgaagaatgctgggagaatctgaaggccagtaccacttcgttatgtaaattatgcaacaattcatttgacccatggtttgaaattaaacacatatatttatataaaaaatgattgtgtgattgtgtatttccagaacgttttaagtattttgtccctaatctctagatatctaacctcaatggtgtgtgaccattcacctgcttttttatcatgttatggttctctagagatattcctggtctagaggtgcctcaggtttttctcagccagctgcatcctggagccatgagaactaactggaaaatcctagagaagagggtgaacttctcctgcaggatgagggagcatgagctaggtgtgtgcagagtgaaggctaactggatgcagagtgttgaggcaggccagctgctcacatgtccgtgttcgagcctggaaggaatcttggaatctggaagaaaagagggaatctaggcgatgagagaaagaatggaaccaagacaaatagtctgatcaaggttcaactttaatgtcagcaaacacactttataaagaagaggggaggcccattcccagtcaggcaaagttcctttgaagcagtcagatcagacttttagtaggaactagtgaagatcacagtttggtgctaactctagaaaatctcaggtaggtttggcctcaggcaggtagtggcacatcaaaggagagtgatgagaagctgcacagcaggtggctctgcctaagtggtggatggtctgaggccagcctagctaggctggaaggaagtaacagcagaggtctcatatgatcctgtcagggaaaggcttttgttaagcagttttccctagaaactgagtttcaatcaaaacttggagagttttcatcatatacgaagtcatgcaattgaggttattcaatggctgctgcatagttccatgggctccagtactagcctgcattctctattaactgttctgcatttaacagaactgtctcttctcaatttgggtaatatttgtgctctgtgtcaagagcctaacaggtgactgatgacttaatatgagactatacttgatacatagctgcctttgagaatgactgagaagtcttatatttttatttataaagagttgaagtgaagctagttatatggcattgtaagtcataattttcatatatgactattactttgtaaatgaacacactctgtccaggaaatggtagctggggttctcttgac

SEQ ID NO: 2175 - DNA, 1000 bp, mus musculus
agaccctggttctttgagaagttccctcaataaagctgtgcttgagagtcagctgagaacaatgatacacatggtatacccagaacacttgtacccacctctttcatgacagatgctctttgtaagcaatgatcacacatcacatgcatgttaattagagtgttgaattcaggttcaggaaacaccctgcctcagtattttcacacaaattcttgagaaccataaagagcaattctgattagcaaaactgattggttcagaaaataaaagtgttgcccttgcttttgtttctccttctttttctcatagctctcatataatggcagatagaatgaagcacacttctagaaaggatttgtagttggaaatcctagaaaataacaaacacttgctagttttttcatgttctagcaatcacccagcccatacagcctaccccactaaatccctccccatggacggacacctgaaaccaatttgggttgcacacgaatcctgcatacccattgtagaaaactcgataaacaaagaataagaattttttcatcaaagaaccccaaatagtacataaccttatgccacttatcaaggacattgtcttagacagggtttctattcctgcacaaacatcatgaacaaaaagcaagttggggaggaaagggtttattcagcttacacttccatactgctgttcattaccaaaggaagtcaggactggaactcaagcaggtcaggaagcaggagctgatgcagaggccatagagggatgttctctattgggttgcttcccctggattgctcagcctgctctcttacagaaccaagactaccagcccagatatagtcctacccacagggggccttttcccgttgatcactaattgagaaaatgctttacaactggatcttgtggaggcatttccccaactgaagctcctttctctgtgataactccagcttgtgtcaagttgacacacaaaaccagccagtacagacatgt

SEQ ID NO: 2176 - DNA, 1000 bp, mus musculus
gataagtggaagcatacagtctttgtccttctgtgacccttttcccaagtgatatgtcttacaggtttatccgcgtgatcacaaaaatgggatttcaaactctcatgttttaaaaaacatgcctgtttaattgagacagggtcccattctgtaggctggcttagaacgccgtgtagcccagattatccttgaattcgaaggcaccatcctgcctcagccctccccacccctcagtgttgggattacaggctcaggtcacctggcagggttgtcttcattcgaaaatggaataataatgccatcatgtatgtgactgttgtacttggatgttgtcggtccaggccacacgatgatttaaggtttctccatactgatttctgcacttctttctatgagtggcacagcaggcttatatctccccagctgcctctccaatatgtttggagtgcttttgataatggccatcctaacaagctggaggtgataacctgggactgcaggttaccactttggggacatcagggctgttactgagtttactgtgctgactgcttgtctctgtgcctgagttatgtgtcaagttctaagcctgttgtggtgtccctggaatagaggtcttgggaagttcttctagttggcttcagctgtcagcttgatggagcccagagttatctgagagagtcttaactgggggctttcattaatcagattggccttgggcatatctgtgggggtttgtcttgattcttggctggtgtggaagggccctgcccattctgcacagctccatcttctaggcaagtggtcctgggctatataagaaaactaaacaagcacaagcaagccagcaggcagggctcctccatggtttctgcctttacttcctgcttgagtccctgccctgactactctcagtgatgcgctgtgactcggatgtgtaagccaaataaatcctgacttccccactgtgattttagccatggggtttatcacatggtca

SEQ ID NO: 2177 - DNA, 1200 bp, mus musculus
ataactacattcaaaaaacacaggaaataagtaattccctaccagcaaaaacaaggaaagcatacccaaagatatacacacacaaacaccaccaacagcaaaataacagggaataacaatcactagttattaatatctctcaacatcaatggactcaattctccaataaaaagacataggataaccaattgataggacatccaggcaaaaactaaacagagaaataatgaaactaacagacactatgaatcaaatggacctaaccgacatctatagaatatttcacccaaacacaaagaatgtaccttcctctcagcacctcatgaatcatgccttgtgtcttatcatggattgtagcctcccccagcctgaagtggggttgtacaaaccttgtcgccactgaggtggggccacttgcggtgcagctttccgacttggctggctcctttttgaagtgacaactgccctgtgattctgccacctgctgaacctgtcttcctgagatgttcctgagatagctgactacctgtaaaattactgctaacagctctggcagactagtgctaacaacttggcaacaatacatcaagaagcctggtgacccgagtgctgatggaatggctccaggcaccaagagtggactggagttggggatgggccttccctcttataagcatggtctcttacttgagagccttgaacagggaatcgtcttagctccattatctttctcacagtctaagtctttttcagccctagcctgcctcccaggtgtacccggttcaagtaggcctcgggcctgcatacaacaatggattaaagctgaacttcaacaacagaaacactggaacgcctacacactcatggaaattggacaactctctatcaattacctctggggcagagaataaataaagaaattgaaggctttctagaattcaatggaaatgagggcccaacatacccaaatttatgagacacaatgaaagctaaaagttcatagcactaagtgtctccataaagaaattagtaagttctcatatcagcaatttaagaatatacttgaaagatttggagaagggggggagaaaaggaggagaaggaagagggggaggaagaggaggaagaagaggaggaagaggaggaggaggagggggaggagggggaggaagcacaccaaagagaagtagaaggcagaaa

SEQ ID NO: 2178 - DNA, 1000 bp, mus musculus
tactacaatagaagcttctttaaatatatatacatatatatatatttaaatttttaaatggaatcaccaaataatggaggagacaaagctccaactaaacatctcttgttaccaaatggaacttccagtcccaggaatgggttacatctcatcaaattattggtccagggagccccatgaaagcccccaacaaactccagctgttgccacagctattggttgttctccacaaacttgatggcaagaccctattgctgaagagaacacttaagaagttgacctggtacctaccaagagccttcatccctcctgattggtgttcatggtactggaatgtactgcgcacactaaccacatgggtacaatagtggcacagatgttgctggagtaaccacccatcaattggatttaagacccactacatgagatggaacccatgcctgaggctgatcacatagccaagaatttgagactagatagaccctggatctggtgacaaactgtctactgcctgaggaacctagcaataaaataactctgaagttttctcctaaagtagatgagaacaaacacagagacctacaaccagacaaggtgcagagagcatgagactgtggaacactcggtcctcaatggaatgtctccatccctctcctcagttctcagggagagatgccaaagaaagagccagaggcaataataccaaagaaaccacgtcttccaacactacaggactgacccacgcatgaactcacaatggactatgacagcatgcacagggccaaaccaagcagggtctctgaactgaaaggggtaatcgacccaagctcccatccccaaccatgaagctatcggcaatttaacaaccacttgcaaaagaaaaatgactttcctccagggagactcactgtgtatgcaaactactctagaaggcaggatccacgactaaatggtgagcagcaaatgaactcaggggtgtttctgaagatgttattgcctc

SEQ ID NO: 2179 - DNA, 1000 bp, mus musculus
gcctaaactgctagctttagagttatttccacatggtgtgaaagaactgacttgagagctatcagagaagctgaaaatcgagaatggggatcacagagaaaggagatctacagatcgatgattctccagtttttatctaaactctcggcaactatttacttgaccaaagataagattatatgtgtgtggctctcaggagctccacagctagaaaggtgtgatatttctgctgaagtcttgtcaacttgcagagttttgataaagatcttctagttttacaccctcctattagaggtatggcttaaaagatatggcttaacatttcaaagggatcagaaaatacattagatgaaatgaatacctgattgctacccccagttccacattccccattgctacacacctcaattcaattccacatatctccaaatttttaacaaagaattgttcctgtctaaaggaaatacagagacaaagagtggagcagagtctgaaggaaaggccatctggagactgccccacctgggaatccatcccacatgcagataccaaaaccagacactattgcagataccaagaagtgcttgctgacaggagcctggtacagctgtctcctgagaggccctgccagatcctgaccaatacagatgtggttgcttgcagccaaccatccaactgagcacaggaaccccactggaggagttaggcaatggactgaaggaggagaggcccttgatcctgtgaaggattgatgccccagggtagagaattgctggggtggtgaggctggggtgggtagatacatgagggagcaccctcatagaagcagggtaagggggctaggataggaggtttgaagagggggaaccaggaaaggggataacattttaaatgtaaataaataaaatatccaattaaaagaaagaaatgcaaacctgaagtagatctcctatccaacatagaaaccaggctgtcagatgcaggtgacctgcttgccagc

SEQ ID NO: 2180 - DNA, 1400 bp, mus musculus
ttagtagaaggagcactgtggaatgttagagaaaattcagttaaaaatgacgtgattccgaaatgtgaaaattttaaggtaggcaaaataaaccagagaactccagccaaaaagatactttacttgataactcattgccggaagcactgaaacatgtaaacagagcttgagaggcccagatatatgagtttgtggcaaacctaatcctcttatcaaattttcattcacatagggttagacttttttttttattgggtattttatgcatttacatttcaaatgttatcccctttcccagttggatactccctctcccacgcacccacttggtcctcaccaccctggcattcccctacactggggaatcaagccttcacaggaccaagggcttctcctccagacaatgtcattctctgctaaatactacatatgcagctggagccatgggtccttccatgtgtatactttggttggtggtttagcccctgggagccatgggtccttccatgtgtatactttggttggtggtttagcccctgggagccatggggaggggggtctggttggttgatattgttgttcttcctatgggtttgcaaaccacttcagctcctttctctaacacctccattgaggaccctgtgctaagtccagtggttggctgcaagaatctgcctctgtatttgtcaggcactagcaaagcctcttaggagacagctataacaggcttctgtcagcatacacttcttggcatccacaatagtgactgactgggtttagtgtctgtatattgatcctctgggtggtcttttcttaaggaccccaactttgtacccatatttcctttagacaggagcactactgagttaagaatttggagatgagtgggtgccccatcccccaacctggggccttgcctggcccctggatatggtctctacaggttctccctcccttttttttttttgggcattttagctaatctcattcctgttgggtcctgggagcctcttgcttttccggcatctgggatttgctggtggctaccctcagttccccacccctcattgctacatatctctgttcaaactcctgatactttgtctatcatccccatctcctctcatacataaccagcataactttaaaagttgtgaaatcagtgaaagaaatgctaaagagcatccttcctgataagagtgttgcaggtatgaatacctgcacatcaactatcaaagcacagtctggcatgaaacacaaaaatgggacatgcaaaaagaaattggtgtcatattaatattatgagtccttcgtgtagaaaacctgtttgaaatattctaagtgagcaaaaatgactcaatatatgccaataacttccccctcaatagggcatgcagctt

SEQ ID NO: 2181 - DNA, 1000 bp, mus musculus
aggctttcttctcctctaatgatttcaggtaatatagaggtagaagagaatatgattaatgacagagaatcatttcagcacttcagagtttattaatcaagtgtgtgatacactgggactctaactgcaatgcgaaattgcaggtgctcatgtgacatttctaaatgagtcttaacacatgcaaatccactgcatgggaagacatagatctaaattatggcagactgactcaggggccatttgaggactgctcatagattgttagagtttattcctaagtcatttacactttaatccctacgggggcaggagaaaagagattccccatgttcaagatcctgtaaagcttcttgttttgtttagcatctttaaacacaagtcaagagggaaaccatgcactcagataaatccaaggcaaaacaagcaaggaggaatgcaattggaaataaataaggagggcatgtgtcattgaatggcttgcattcttcctgcaaaatgctgatatgaccatgcttgtcccagtaagaaaaagttgtaagttgctgataattctatccattgtgcccaaaaacctctcatagaaatttgtttcctcaagggggctcctcgtcctcttcttcagcaagctatttttagtttattcaattttgtagtgatcagggtagatgagttcaaatcccttattaattcatgtctcagaaaagcaatttgaatatctactggttttccaagtgtcctttagaaaaggggaagtcctaagtgtcctgtctcattcagctgagggtcagtgccgtgttttctttagagaaatgtaaggtacagaatactcagcataaagccaaagccaagatatgccctaacatcatcgaaaacagatagtttgctgtatttctaaacatggaatttacctccttttctttagttgaggacagaaaaaagtcctcagaagaaaattttgttaaacaccttttaaaacacaaactggatttgaaagtgaatc

SEQ ID NO: 2182 - DNA, 1800 bp, mus musculus
caacttagcccaagggaacatttacagcaacagcagttcattaagatcattatcctctgtgacacagggcattcctaatcacctctatgattgctgtaaattctaatgacaacgaatcatttgtattcttatatcccaatatgtttactacttactataagtctattaaaacacaaatctacagttattgactaaatacttctcatttttcatttttaaagctccagccatccatattttaaattatgatctacaaagtattcaaagaccagtttcacctctgaaagggatctacaaaaaaatcatttttaaatcctgtctactgctttttattttgacttccccttcttttgatttctcagattctataaacagcccccgtggtgaagaggaatctttataatatcccttcataataactagttacataatagaatcagctttctgagacgtaacaattgagcatcctcagctcctttagtcgtgttttataattgatatcataattaactttgatcccatagaatatgcttcacgatctctatttgctagaaatgtcagcaaataagatatgggcattggagaagtagaaaagagaacctctgcccaggtcttcagtgttagtcattgttaagaaaacactaccgcaacgtattgattgcttaaatacaaatgttatccaataacaaagttaggtgactctaaggtgaagtcccaattagcctgagatgattgatgttttacttccttcactgaaggctcatggaaagaatcaggcttccaaagggacttggaagagtctcagatatttaggtaacctcataggaaacaagtgcatgggacatagaaacagaaatagaatgtgctgatagcaactgcacaaactcccatggagaacagaaaggcctgtcatggcaggccggagcggaacagtagcactaatgacagtgggtgtctctgctggatatctcggccatcatgctggctttcaggattcccatcagacagtctagttttcttgggagtcagcagctccttatcgctgctcccatccttgttcaaatctttcttctctgatgtgactacaaccactttcagcatgccttcttgtttctgtatgtttctgtcacttgcatgaaaaattttgtaataaggaatatctggaaaaaaagaatatctgatgaattaagtcatcactaaatatgaagcaatatagttggctaaaattctcaggccatatcatgtcacagataactgatcaaaccttccaacatgagctagacccatcagttctgcttgctcacaaaaataaatgctatggtcagagtaacagttacttggtaactgaacgtaaaacaataagcataaagaaatgacagtgaggatttgtatctattgaggctatagatgtgaaacatactttgtgcaattaaatagtgatgaaaattttgttttaaatctccttatcaatacaaagaaaatgtaaaaatactgactctaaattattttatatattgtatatgatatacttataatgaccgtaagaaattggtattgtatattacatttagtttcttgtttgcctatttaaaaataaattggttttcatacaatgtattattttcacatttccctcccttatctcgtgccagatcttcctcacttccaaagccttccctctctttctctctctctctttctctctctctttctgtctgtctctctctcttaaacaataggcaaatcaaacacaaaccaatcagaataaataaaaaacaaagaaaatcaaaagacctgaaa

SEQ ID NO: 2183 - DNA, 1200 bp, mus musculus
tcgagtccagaatcacctggaagacaaactggtaggcttttctctctcccttggtgatgctgatacaggccagattagaccagattgaaaggaaatgaaggcaggcgtattaggaggcagctcttggatgggtgcactagtctcactgatagagacactgaagtcacaagcccaggctaaagcaaggaggttttacagatcttaggcgaggagtgatggcgtgtcagctagcagctgggattgtgtgcatacgcggtcaaaactgaccctgggcgagcactcttgggtgggtttccagaaacttggagacgaggagttatgacattgttagcctggagttttctccatgcatgcagggttgggggaaggagggtagatggggttttccagctatgcaggggttggggtgccaaccaaacacaacctctagttgtacctgtgaggagtctccaggctgcgttaactgggctgggatgactgtggggagcaccattccatgggtggagtccaaagcagaataggaaggaaagatagagctgggcacccatcttcacctctctgccccaactgtggatgcactgtgagcggctgtctccggttcctgccactgtgatgtcaccactgtgctaactgtagccttagactgtgagccaagtaaccttccttccttaagtcgcttctggcagatttcctgttctagtgttggagaaggcacctaactcaccttccattctcttgggctgccacagttgaagagccatcttctcccccccccctgcccagagggttccagaagcacctcagctcctctaaataaacatccattcattgctttcctgttggctctcatgcttgggattcctgtatcccgccctccaacgtggctaattaccatgtttggcagatcaatagtcactctacattatcatcaccatcatgcagattatattcatagaccaaccagagattgcttttcttgtttgtcttgagctcgtaattgagcctaattttttgattactaggctttctgtgtagtcgtcagtagttcagcaccaatctcttagactagtcagaaataattactcctttctttcttctgcagtggctgtgtgtatgtatcatgctctaatttgaatttcagctaatgatttaacatttacatcatcatcagaagtgccccgaggctcagtttgttccaga

SEQ ID NO: 2184 - DNA, 1200 bp, mus musculus; identical to SEQ ID NO: 2183

SEQ ID NO: 2185 - DNA, 1000 bp, mus musculus
ccggaggggaggggagaagagggttctctagggtagctaggagtcctttttatatgctgctgctgctgctgctgctgtgcctggctcacatctggctggcaatctaggcagatggtgatgaaagctattactaggtccctgttgctaggtgcctctgaggcacctagcagaactgtcttttaaccaacagaaattgtctcaacgtctcctttccccttctttgttacttcttgatgctacttgcccatgagcttctgtggctgccattccatccttactgtgctgcctcccataagggaccctatgtgcacatatatgtgccttcttaagggatctgcagaagcgttcattagctatctcttcttttctcctagagaaaaacatgccatccaaacccgtgatttctgttgctaatatttataccacagctgtagtgatatttaatctgatactatattaagaagtacttgatcttttaggaaaaacaatataaagtgtgccccctttgtattgtttttaagatgatctttctctcatttcaattttctttatttcaaaagaccctttcacaaagcccctcacaaaacagaagaaatttctgggtaattctcagccttctatttgcaaacattttgcctgttttcctagaacaaatgtcatttccagcctgaagcttgcaaatatgcataagcacgaatccaaaatttttatgatgtgcagtcactagaccagaacttatttgtgatgcttaatgtgccagagtaccgaatcccacccgcctggcacgcgcggaggtattctgaagcattctccagaaaggatgctgccaccggggagcctcagaacaatccggcaaagctgaagaggcctgtggaagtggatctgagttctgctgccagctatggtgacacagagtctgctcccgaggactttacgaagcactcacctctgtgcccattggagtggctcgaaaatgccggaaagttcaatgaataaaata

SEQ ID NO: 2186 - DNA, 1400 bp, mus musculus
tgatcaaaagcaactttggcttacacttccacatcttagtcatcattagaggaagtaaggactggaactcaaactggccgataacctggagacaggagctgatgcagaggccatggatgggtactgcctcctgccttgctctccatggcttgttcagcctgttttcctgtagaacccaggactaccaacccaggattgtcctcacccacaatgggctggacccttctgtatcagtcactaatttaagaaaatgccttccaggcttgcttaacacccaatctgacggaggcattttctcagttgaagctccatcctctttaatgactctaccttgtgtcaagttgacataaaaactagccaatacaagtggtgccatcaacttgatctcttgaccttccacaatgtggctaggatgatttccactctagtagatagtatccaaacactggttgtgttcgctattgatgcctgtgaccagagtcaccttgaaagaggaagggtttatttcactcacgctttcacaggttttcctcttcgataaggaggcatggcacagccacataatggtgactaggaaacagagaaagaacagagaggatgccacacaagcgggaacttcctccatcttccctttcattctgtcaacctcctcccatggaattgtgctcagatgcagagggaatctttccccagtgagtcactcatctctggaaacaccctcacagacacagccagagatgcgcttctgtagtctcctaggtgcttcttcatcccctgaagctgagagttcatcttcacaggtgtcagtgaactgaatctaagtattcgtatttatatgttgttccacccatgtgagctctgggctaggcttgcacctcatctaatagggctgacgtgacagtatgctggatgtgggattcaggatgcctggacgcctctcttagcacttttaggcttgagctgtcaggtaagacactagaaggccaggcccctgagctatgagaatagggagagcaaagcagacatcccagcacaccaggcgagtcttcagatgattctagctccagcggcctcctgcctgacagaccacaagaaggagtcaaacgggacagtcacccacccacttgtccatggtatcataaaatagtgtcgtttgtttgggagccttaaggaccgaggctgttgtcacaacgtggtagtcattgacacagcttcccacagaaacacagttagaaatgagaaaacactactccctcagatgccagctttaccagtggggctgtgggagccatcacagtcccttctgtttgcccagtgagcttcctggctccaaacacaaagacaagctaacagatgacctaggaagaaaaacactaaaaaacaaaacaaaacaatatggt

SEQ ID NO: 2187 - DNA, 1000 bp, mus musculus
gaaagacttttttgtttgtaactcagtttatttggtgttctgcttcctgcttccctcgatccctggtgcgcctggctcttcctcattctcttcaactgatatctaacgcatggatgggcgccctcagggatgtttggggaggtctaggcaaggatctagaataatagcgcttgtcctgtggctgggaggaagtaccaggttttgccgtagcacaggaagaggtgtgtgggaagggccagtactggagtggatgtttctggtagttttccctgatttggctcttaattctcgtctccccatagggaacaccttgatgaaagactcggcagccatcattagtgggcttctgtttgagttgttgaaaaccgtggcaagtgctggccaagtctttaccctctcttgtcacctgcagctccgtgccagtctctatggaagcgcacgggaagatctattgagggcaggctcagccagccaggccttaggtttctcaggctcagactttctgacatgaaaccaattgctgggagtttggggtattatttcatctttctctgggggttggtggcctttccctcacaggaagtgaaagcacactggtacacattctttagtgctgctcaggccttagtgaaaactgccttcttctcttcagaagggctgataggcatctcagacactcacagaacgcacgtgaccacctcatgagacttgagagacttccccccaccacacccctcctctgaggaacagcactgtgtctcagggactcttcttttgccttctgacgtttcatggcagccggctgggcagcaccggaagtggctgagcgggtgggagggactccacggccatcatttctgagggatcaaggtactgtgttatctctaatttcttgcaagtgggttttgggttgtttctggtgtcctctatctgcaagtgtataggtagaggtttaccatgcgacttttgtttcttgtttgtgttcttcccctttgcagac

SEQ ID NO: 2188 - DNA, 1000 bp, mus musculus
gcaagtatgaattcccttctactgaatgggtcttaagtcccattagacagccattggttggcaccaacatgtgagtgccacttattacatatttaagacattctgccgtgcctgtttttattttcagtcagtgttcaagcaatgattggctacttccctgccattgcaacttgtctagtttacaggtgacatggaactagacaacaggaaaaaggcttttgggctagatccactgagaatcaagtgattctttatccttcatgcatggagtcttccacaaaaactacttgatcaatcgtttaaaagtaaaaattacaaatactgaatcttgtgattattccaaaatacacattcttttttattgcaattatacctacaaattgtttcagcttctccccagcccttagtatctgttcgttttacttaaagcacatcagtgtgcaatttctgtgtctaggttttaaaaacggatatagtaaccgcaacgttatgctgatctatatgcattaaatgtattgatgacataaaagcaaatagaaataatgcataggctttagactcaggacctccacaatacagtgatagtaaatacaacataaatagatagatttagcatgctggggaaagtggaacaagagtgggacatttcgagctctaaggagtaccaagcagaggcactatagggacatgatgaagtcaggcttcttctgagctgaaggtaggcagacaggaagtaccttcaaactaaggaagtggtcctcaactaatcccttaagatcacaaaagataaagaagggacaccagtgcacatctcaagagagaagaagacccatcagtaggtggtcctcaggaggaagctactgtatcctctcctcactgaagctctatcagagggtctcctggagactggacttcccacttcccactgcacagtcatgtgtgtcaaagctttaaatcttctttcactcttgctctctatttataactcattggctttttg

SEQ ID NO: 2189 - DNA, 1600 bp, mus musculus
caactcagacatttgaatgcttattaaaatcactgatagtaattttaaacaaaaatgcagaaatacaaaatagtaattcattattccctaacttaggcctgtgtgaatggcagtaccatttttctgttattaattaccaaaactggtgattttaatatttgcctttcccaacctatgcatacagtaatttatcctactcattatttcatggttgttttttatgactgtgttgatacaaattaatagttgcagttaatatcacttctatttatttttttctgtggctttccaaatgtttcccacatctctagccttgatatcttaagaatcattctacagaacacccgtgaaagtaagatacagatgttatatcatcccatcaggtcagaactttcatctcttggctgtaatgtccccaatgcactgtttttattgttatcagatgagccaaattctgcaatagtgcacataatacaagcaaccacatacacccaaccagatagagcctccctgaatactcacattatttctctgcttgtgactagcttactgttgtattctactttagttttaactttctaataaacacatgaaattcatcactaatttttggatttcttttcaaggcaaactttaagcttccattatatgcaaggattttctttctctgatatatcagggtaagttaaaaagctcaactcttaggtcctctaacatgcccaggatcagagatgaggccacaacatcttcctcaacacccagagtaactggatcccccaggatcctgggacacaggaaccctgcccagccagtggtacaggttcctttcggtttgagccagtaccctgagcagacctcaggcactagctctgcacctattcccacaacacccagagtacactggaccccaaaatgctctaagactaccaggatcacaggatctcaggatcacaggatcacaggatcacaggatcacagaatcacaagatcgcagaggaagctagactcccaggagattggcacacccaggagcagtggagctttgatacactcaagatcacagctgaggctacaacatcttttccaacacccagcataactgggaccccagagaaatcagggaaacacaaacttgcacctagtcagaggcacagattccttctggcctgcacctgtgcctggagcagacccagggctcccgctccctattcactcctgcaacactcagagaaagcttgattcccaggagctctgacatacccagaatcacaggatcacagcatcccagaattacaggatcacagagatagctggactctgaggaattctgacacaaccaggatcatagaaaggacaaactccagtcagagacagtaagaccagctagctccagagataattagatggtgagaggcaagcacaagaacatactcaacagaaataaaggctacttggcatcaccagaaccccgttctcccactacagcaagtcctgcatactccaacagactggaaaagcaagatctggatctaaaatcacttctcatgatggtgatagaggactttaagaaggacataaataacttccttaaagaaataca

SEQ ID NO: 2190 - DNA, 1000 bp, mus musculus
tgatgatggtgagtgtttttggtttctgttagtaaaattcttatgtttgccttttgccatctggtaatctctggagttagttgttgtagttgtctctggttagagcttgttcctcaggtgattatgttagcctctatctgcagacctgggagactagctctctcctgagtttcagtgttcagagtactctctgcaggcaagctctcctcttgcagggaaggtgcccatatatctggtgtaccttgcaggtggctgcagactctgtgcccaaggtaccccagtgctggcttggactggaagggacttgtgaccctgatcaggccgggttttctgcttccctaattaatgcagtcttatgtcccgcaagatcggattggagcagaagctgtgttccactcaccagaggtcttaagatcccatggagggtcctgtggttaccttgaggctttccgcagactcagcgcccaaggtacccctgatttggcgtggaccagaagggctcatgatttcttattgtgtgaaatgttccctaaacactttaccaaagacattggagagatgcgtgaagaggtcagattagcattgattttcacagttactctttgttaatgactctcatggagtcattagagtgctggatttgagtaaccctcatctatagtaacagagatttttcactgaccttagaattaacatatatttcctatattctttccttattataatccacttagaaatatgtgttaaaacaaaacaggggcacaatgacaattaacatacagaattcatggtctacttcaacttttaaagagcgagttagttattaaaatgtgtctaagagtctcacctgaccgtaattactgacaatttcattctgtttgctccttcacctgctgcaggtggcttctcactttgattactttgggtatcattcacttacaacacattacacttgggtgctacgtatttctcttgatgcatacacagcttcttgatgcta

SEQ ID NO: 2191 - DNA, 1000 bp, mus musculus
ctgaattctgggggcgtgaacagagagagaatcaaagggggccagaatattaaagatgtgtagaccctcaagaacatacaacgtactttaagtaccctgggctagagggccggccagtagtctcaggacctatttatagaaaaagaaaaaaaaaacctacattaaagtggcattttgccaaaagtagttatgtaacagattacatcattgtttacttttgggttccccaggcatctggtgttagccaatttgtgctgactcacacccctcctacctagatgtccagaaccagccaccttagccaatactggatatcgttatcagtgccatgttaggtaagcacgaactggaacgacagccctacgctccccacaacagtaactatgtggggagagggattcttgttgaaataaagaaatacagtgatttctggataccagaaatatacaaagtaaacactcaagtttgggggaggggcagaaaatgtttaaaccaatcagaggctaatgctctgtgaacttttctaggaggaggtgaaaaaaatgtctcttcaccgaggcagggcaccaactacgtactaaagtctgacgacacccaagtctagcttgatgcatcaatagatttattgagtccatttacagagcagacatgaagagctccttacagaggctttgatatctcccaagtacctacctcatcagaaagcctctctctattgtgaacgtggcttctgaacagcagcatgaatggagactccttttcagctaaccttccaccctttatatattctgtcaactcccaagagcctgagaactgcatgcggctgggagatcagtatcgcaggtcgtgcctaggatctaattgccctcctcacaacccttccttgaggaggcgacgtcaacgtcacgaagggagcctgcaagtagtcacaggtgctctcatgaagatggtaatgattgttatactcagagaacttgtgttctaccacagccacagacta

SEQ ID NO: 2192 - DNA, 1400 bp, mus musculus
tgaatatgcttataattgttctttttaatttctatgtttcacagttcatggggattattctggtagaggaacattattataggattaatgctctgggtgcaggtggaggtgggacatgtattgtttttttcatactgttcctggttttgcactgggacctggatatcttgagttaggttggtgattgcacgcttgatataaacctctagcttacctacattgtgtggaattttgattgattgattgttgttgttctgtaattctggctgcttacagatcagcagaaaagtgtttaaaactcagttttgcagatacttagtgttgctgtatcagtagggatgctgggataattctaattctgtggcagctagcatgctaagacataccctcattgaaattcaaaatttaaaagccatttataaaataaaacccattttcaactaagtgtcctgtgtcatggctgccacctgtggatatgatgaagtcctgtttctgctacctctaagggagagctctggttccatgctcgtgctgcagttgggggtctgtgttgatgcctgttgcccatgttaccaccaaaggccaagctgatgtctgtagtctatgctgcagctctaggctatgctgatgtccacaggcagtgctaatgcctagagccatgttggtgtctgtgatccaggctgcttccaaaggccttgtcaaggtccctggtcctattgcaaccagggctttatttgtggtctgtgctgtcaacagaaaccatgtagaagtccaagatccatgctctccttggactgtaaagagcaaggaagctactttggcagcgatatcaatggctacagaagcacagttgagaaagagggacatggtaggcttctggatcaaccctacccctaatcttagcctctccccctaaaaattaacagtctaaacaagaaaccttcatagagatctcttactgtgataaggatgctgaagtgtacctctccacttcatgctgggggagcaggaagggaaggacttagttctatttaaagggcaggccactgggagtttgcccaatctccagtgagtatatagataacaaattggacttgttttgtttgttgttgttgtagtacagggggagtcacaaggacagggagagcatggaaggacttggaagtgaatgtgtatgatgtgaaattcccaaagcatcaatacaaataagttttaaaaagactcagacactcacatttattggaagggaaaacactttattgactgattcatctttccagccccaaataacaaaacatttttatgatatgtatgtatatcattggactttatttgtatatagactattattctctcttgtcctcatttctcattctggcccaacactatgcaatagctcc

SEQ ID NO: 2193 - DNA, 1000 bp, mus musculus
tagcgttaagtgtaagttttactctgaggtaggtatggttaggcaaagagctgattgcagtgtggctgctgggtcctgccagatgagctctctaagtctctgcagttccattctatttagtcatacaacagctggggcaggatggggcgtggggatggggatggggagatggaggggggtcagtggaggctgagttcccacaaggatgagcctttgctctccagctctcacttgctaattctctccagtgcttaagcttgcaggtggtctttacccactagccagagctaagaatgtttctcctggagatgtagatattcacagggccacaacaaattctactgctggaacttcccttcaaggaacagtagagtcagctgggagaagtgggggaaggggcaagtgagggaggcaggagaaatggaagcatctagcatcctttcttctttggataactattggcttgggatgagaactatgcagttgttttgaaagtcttcacagtgctgaagtcaaagaaaaggacagatgtttacaatagactcaataaacgcttgtcacagatgggctacacaaagtgagtattttcacatatatccaagtgtgggtttgtctcttttgtacttgatctgagacagctgcagggtccctgtagtatttactgtaccaggcaattaaaccagtggttgaagcattggaaactgtcaattttctgaactggttttactgcattacaaacaacaaccaggattcatctccaggtgaataaagcaatggctgatgtgaggtacaaatataatagaaaatgtcagtactgggagaaaacaaaaccttaaaaaaatgagaagagttagaaaaaaaccctaaattttatggatcttggttggatataaataaggcaaacatcttgttgaattcattattttcatggcaccaaggaatggtatagaaatgttatgatgtgggaaaaccccacagccgacttccaatcctagtttag

SEQ ID NO: 2194 - DNA, 1200 bp, mus musculus
ctttcttcctatcttaatagagcaatgcaggcccaatgcaggcacataataaatacattgttaattgattcatattcctcacaggccctcattctcttggccttatcccccacacatcagggttcaatagtactaacaatggaaaggataataagtgaatctaaatttaatccctttttgtttaaactaatctctccctaattaatggctgctcataccattattgctaacgaatcaggagaccttcatcacatctgtgcaggaagctctctgttaaactgtcaattcattttcaaaggaaacaagccgagtccaactctccattgttcccctggtgaccttttggctaatgaaaagggaaagggtgctcaaaatacaaaaaagggaatagacccttccctgtcctatgtagttcttaattctgggctgcacccaggcttttgctacatgttttacataacatttgtgagggctatgtactttagaacagacaaaggacagcattgagatatgacagcgacgagcacagaataaagacctgggaggagagagtaaagccacaaagatggtttaccttcatctgagtctcccttccaaccctatgtcatacagagtactcaaagctcgggctggctctgagcatgcgcactttgagacgtcccctttgggtggtttctccacgactgatctcactccaacatacacacaggataagacaaccgctgcaatacaagagagcttacctgagaagatattgctgtgaaaacaggcaactttttatacttttggaaacaatttcagtctctctcttaagaatcacattaaataaacttagtgttagctcacggacagttctgctacacttctcccagagacctggccacagcttagttgtcacctgctgccactacctgcagggacaggtactgttggcctggtgtactcgccagccctgttgattctctccctgttcccacatgttctcgggaggtctctctttcttccccctttctgtccttctttgtgtctttctctttccccacttcccatttgtctgcgtctaccccttctccagaccatacctcccttcccctcccccaaataacccctcccaagtcatacaagatttgttacatggagtgatttctcatggagatacctcggcatgggccctccaggcaccccacctggctctgcatt

SEQ ID NO: 2195 - DNA, 1400 bp, mus musculus
gcttcggtgaagtagctggatataaaattaactcaagtcaatggcctttctctacacaaagaataaacaggctgagaaagaaattagggaaacaacacccttctcaatagtcacaaataatataaaatatctcggagtgactctaactaaggaagtgaaagatctgtatgataaaaacttcaagtctcgagtcggatcccagcagcagctgcggcggctcaggtcttcagttgctctttctgtctccctttcgtttctggaaacatggcctctggtgtggctgtctctgatggtgtcatcaaggtgttcaatgacatgaaggttcgcaagtcttcaacaccagaagaagtgaagaaacgcaagaaggcagtgctcttttgcctgagtgaggacaagaagaacatcatcctggaggagggcaaggagatcctggtaggagatgtggggcatactgtggacgacccctacaccacttttgtcaagatgctgccagacaaggactgctgctatgcactctatgatgcaacctatgagaccaaggagagcaagaaggaggacctggtgttcatcttctgggcccccgagaatgcaccccttaagagcaaaatgatctatgccagctccaaggatgccatcaagaagaagctgacaggaatcaagcatgaattacaagctaactgctacgaggaggtcaaggaccactgcaccctggcagagaaactaggtggcagcgcggtcatttccctggagggcaagcctttgtgagccacctccagccccctgcctggagcatcttaacagccccagacctgctcttgggtgttgcaggctgcccctttcctgccagacctgaggggctggggggatcccagcagggggagggctatcccttcaccccagttgccaaacatccctcccaccccctggaccgtccttccccctccatccctgactgttctggccttcccaaactgcttttgatcttctgattcctcttgggttgaagcagaccaagtcccatcctaggcacccagtttggggggagcctgtattttttttaatgacacccctactccgtatccctccccatcccatgctgccaacttctaaccacaatagtgactctgtgcttatctgtttagttctgtgtgtaaatgaaatgtggaaatgaccctccctgccccagctggctgtcctcccctttcccttgatcttgaccactcatggaagcaggaccagtaagggaccttcaatttaaaacaaaacaaaacaaaaaaacaataaaaaggctaattaacaccatgaaaaaaaaaacttcaagtctctgaagaaagaaattaaagaagatctcagaagatggaaagatctcccatgctcatggattggcaggatcaacattg

SEQ ID NO: 2196 - DNA, 1200 bp, mus musculus
cggagtaatgtatgcctgaaggtctctgtatttcttcccatctgctgtagtttctctgatgatgtctgaataaggtacttatctatgagtgtagagaatgtcattaatactcattttattgctcctttttttgagcattagtatctggttttaacatcttttaggtcatctagtctctggttcttggtcgccacatcagtgttgggttctatctcatggagtgggacttaggtcaaatcagacataggttggttgcttccataaactttgttccaccactgcattaacgtatttttcaggcattgtagatcaaaggttttgtagctaggttggtacttaaacgtttctctttttggtatggtacaagaataccttcatctaccaaagacaatagaatgtagaattctatggaggaaccagaaatatctccccgtgttcaatgaactgtgtgtgtgttgtcttcagctatagggccctgctgtcagtttgtggaaaggaatctatagtctctgcaacagcctgggttgtttgaaatttccatgtgacccctttggccaacaactcagttggatataacatactactagtgcaggaagcattggtttgtgacaagagatagccatgagggataatgagggactctctttccctcattatttggatacttcagtaagatcaccttcatatattttaggaagattctttgagctgttcttgttaccaaaattttttgagaattcagattcaccacagattaaattgaaaattgggtcatatcttgctgtcctttgtctctttaattaaataatttcaaaatatgaactcaaaaagggaattttcagagccaggtatagcggtatacacctttagttcaagtactgggtggcagaagcaagcagatcattatgagttcaaggatttcaaggccaaactggtctccatagtgagttccaggcaagggctacataattagtctgtctcaaaaaaagttctagatagaccagaatacataagttataaaactcagaggaaaatggaaatgggaaaagtggaagagagaggagagggagattagatagatagatagatagatagatagatagatagatagatagatagatagatagatagatagatagataatgtgtgagagagtcagagagagagacaaagagagggagagagacaaagggagagaca

SEQ ID NO: 2197 - DNA, 1000 bp, mus musculus
tattccatgggtcgtggaggacagaggcctacaagagaaacgggcggagaaaggggagcgagacaaagcagagttgtcaaggtctgtttaatggaggctgggagcctgattaaaagcacacagtgagagaaaatagggaggggtcgaggggccataataaaatacagagaaagggatggacatctggggcagatgctgattacaggcttcttgcagcttatcttggaatgttggccctgaaatagtcctgggcaccaaacggagacatggaggaggaggtgaagctgccttaatctaagcagttctaggcaccaagtgaaggagggagtgaagctggcagtctcaggtgccaggtagaggaaatgaaggagggggtgacataattcccttcaaagggtcagcggatcttcagggtgagagtaactgcgggacctagtttcccacggtttggtctctcacatctccctcttttttctttattaaagttggggggtggccacggaaagagggtcagtgaagcacctgtcttaggccttttctgtggtccatgtccaattaccgcaatttctaggccttttcaggtcctaggtgggcaaggctcctgtcataggctatgtgagttgcccccactcccggcaccacgtcttattccaatgacttgatcaggccactggtagttgtgatgggcacccaggcagtggacccacaataatcctatcattgggtaaccttgcagccaataggcggtgtgcatctggctcgtggcaccacaagatccagtcattggtaactctacagcttatgaccctcagccactataagatctggaggtcaccccatccatcattgtcgtttccatagcttatggaaccaagaagtctctgtttctgcagcaagggtggagaattgaaggccagcggctgctctctctgcattgctggaagagagatcttcatctgaattctagtcaatggtagtagactgcaactattttgtttaa

SEQ ID NO: 2198 - DNA, 1000 bp, mus musculus
tcagggatatttttattagcaaagacccttggaaggcatggtgaggtaggctcgcagagaaaaggacaagtgtgtttttattcttcagtggtggatgccctaatattttacagccataagagttgatgtcccccaaagctgcatttttgtcttgatgaagccatgccaatgaggatcccatcagccgtctttccggttgggcatggtggacattgacactagtgcccacattgtaattgctctgagtgtccacctgtcctctgtctctagctcaggaagctcctgttaactagaatcatctaccaaattggagaaggctgttagctatgaagcagggctgcacaattcttgataatcatcatgttttatagaaagtatatggaatggacttagtccaaatcacaattctaaaagtatatgggactgatcaaaatatgattgttcttttagattttatacaaaaaaaaagccataaggttctactggaagatatggtaagaacttagcaattgacaatatctagtagagctagagaagaaggttctgcactgtaaagatgacagttttatgcaaattaatcttttgcttaattgaatgctgatgaaaaatccaataggcttatttcatgtagttactttaggggagttctgagactgtgtagagtatgagaactgggatggaagtcgacttgtaattttatcatctccatccaacatcataggcaaatgtgttcctgagtttcactcattgtttcatttaactttaaaaataaataaaatgcttaacctgtattcccttttagagaaggctttgactctgatatagtaagcataaataagaagcatggtctatttttatcactgaaaatgaagttggaatcttggatggattattttcaagtttgcttaaatcttaaaatgccagtgagcataatttactgttattttttcatgacttcgtactaggctaaaaatggctcagtgggtaattgctcttccag

SEQ ID NO: 2199 - DNA, 1000 bp, mus musculus
ctgctttttcttattttaaggaatgggtgggggtaggtttatttggtgttgccatctgctgtggacttgtgtttatgctctggttggtttgtaagctcagaacccaacaaaaccgtgacaaggtcgttattgctcaagcacttgcagccattgaacaaggggcctcccctgaaatttggctgtccatgcttaagacctaaatggcatctgagttctctgctattgcgtcccacggatttgtggatacattgcactgggatgtaagagactcaacgctcattgatcagcacttacacctcgctgaggtttactaattcgttttttggctggcctcttttatagagttcaccctaggtcatttagtagttactgtcacatagcactgcagtatccatggacgggcaactttcctcatgtgcagaccaacctaagacacgggacctggtggcaatagggttaccctatgacaggaaaggctgtgacattggaggaatgacctaagacaggagccacagcagatggacatgactgcagaggcctagaccagcctcaaattttaataaaataaaaagggggagatgtggagagccgtgctacgagcaatcgcgtgcatgctgtgagcaattgccattataagatggcactggcttccactgcacttaactagtaaacaagccttatgctcaagtgcaagagtgaactcacacctagtcactgcccatctcacggcatagtaatggggtgatgggcaagcaacaaatcaggagctgtcacaccacatcaggtgctgaaacgtcatgctgcaggctatataagcagtgccattttcctggttcgggggtcttccctcctgataagtaagcaataaaagctttgctgcagaagattccggttgtcctgagtgtgttcttgctggcggggacaaaagctccggcaataggtagggaagggggcatcctctttgaggcagaggtgggggaaggaggtatggactgtggaa

SEQ ID NO: 2200 - DNA, 1000 bp, mus musculus
tctaatcatattcatatacatacatacatacatatagtagataatttcacaaatttattaatagagacaagaaattactgttagatttttgaagagaaaacatttctaattagttgatgacttgaaaattccattacaaatctgttccgatcagggccacccctgccatcttccttctgagcccaacagaggctgctaagggctccagagtgctctccacaccacactgcaatacctagggatcacctcgggaccacaggtaagtggaatgcaacatcagcaccaaagaattgcagagtgtttgtgccagcaggaacagggacaaagaaaccccgctggaccagaggctgggatccattcaggtcagggtcagccctgccatcttctgcatgaacccagccaagggcatctagggcaccaatagactctccatgccacaggacccctagcacacccaggacttcctgataacctgagagcatgtgggcgatagaaacaacagagcttcttggtcagggtcccttccggccttcatcctcagccaggaggcagagctgagacccaaacccctgggaacattccttgccagaggagagtcagcctacaggaagagtactgaccccagaactaaggaggtggatcagaactccagactgctagagacctgccctgaaagaggagggcttgcctgtagagagtgctctgaccactaaaactcaggagagagttggactcccaggagtgctgacagaggctaaaagaaccacaggaggatcaatcaaactccaaccaaagacagcttgacagcttgaacattaacatgagagatttccagacggcgaaaggcaaacgtaagaatcgtactaacagaaaccaagaacactgggcatcatcagaacccagtacgccaaccacaacgaatcctggataccccaacacccccgaaaaacaagacacagatttaaaatcatatctcatgatggtagtagaagattttaag

SEQ ID NO: 2201 - DNA, 1200 bp, mus musculus
ccacctctttgtactatgtagtatttcccactgacaaagaatccatccaacatgtaagggcaagcagtcaatcaaatatttaaaagcaaaactataaacatttttttctattttctaccacattttatttagtagcatctcaacacatctactagatgccatctttcctcctcaagggttgcctcgcccagtcatggcaggaggctttgtgcttggtcttcatgtatcttgttattaagtgctcaggtgatattcctgggaggcctgcccttttctgaagggaaatggaagaggaggagtggatctgggagagaggagaggtgggagaggggctggaggagtagaggaagggcaatgtgttgggatgtattatgtaagaagaatacaaataaagaatgttaaaaagaactaaaaggagaataaaatatttcattttctttctttctgtagataaggaagatttactaaattaacataagtaataataagaaatagttgggtcaaagtatgtggaagatagctagattgccgtttgtttaaattagctattttcaacttacaactttactttgtgacttaaaggaggcattttgttgttatcattgtggcacatatgatgtgttttggtcaagtgcatccatttattttccctgttctcctcactgttctttcctatcaacttcatggcttttggtgtgtttttctggctgttttcttttaaaacaacacagttcacttagaacccctagcatgtgcttgggtgcaggggcatcctggggaccatggctagctttatgggaaggggattaaagtcttgaagaaatggtctttgtctgccccagcagccatcatttgcagtagctctttaggtagagcaggcaatacatgaccactttccctcctcaactctgggattttatctcacctcatcttgtgcaggctttgtgcatgctatcacaattgttgtgagctcattagtaccactgcactgctgtgtctagcaaagtttcactgcagttaaaccaacccctctgtatcttccaatctttgtttccacattctgcagtgatccctgagttgggatgcacatatctgaacttatttcttatttaaaaagaaagatacaacaagcaagaaataggacacaattcttaccacacacacacacacacacacacacacacacacaaaatcagtcaa

SEQ ID NO: 2202 - DNA, 1200 bp, mus musculus
ctgatattctctttcatctcttgtattctgttgctgatccttgcatctatggttccagatttctttcctaggatttctatctccagtcttgcctcactttgggttttctttattgtgtctacttccctttttaggactagtatggttttgtttatttccatcacctgtttggatgtgttttcttgtttttctttgaggacttgtaactctttagcagttttctcctgtatttctttaagtgagttattaaagtccttcttgatgtcctctaccatcatcatgagatatgtttttaaatccctgtctagcttttcgggtgtgttggggtgcccaggactggctgaggtgggagtgctgggttttgatgatggtgagtgttcttggtttttgttagtaagattcttatgtctgcctttcgccatctggtaatctctggagtcagttgttatagttgtctctggttagagcttgttccttttcgtgattctattagcctctaccagcagacctgggagactagtctctcctgagtttcaatggtcagagcactctctgcaggcaagctctcctcttgcagagaaggtgcacagatatctggtgttcggacttgcctcctggttgaagatgaaggcccgaacagggcctgtcccagaagctgttagcttctgtagtccactctttcacctgtggtgactagtcttggtggggtccaggaaccaagatgtcacccgcagatgctccggcaaggccctcccaggcaggcagacacctctcctctggcagggatgatgcccggatgtctggagcccgaaatgggcctgcctcacaagctctgtggctcctgcctgtcccagaagctgttagcttctgtagtccacactctcacttgtgcagactagtctaggaggggtccgggaaccaagacgtctcccacagatactccctcattttctttattgtttgttttctctctctctctctctctctctctctctctctctctctctctctctctctctctctttctcctctcttccccctccccctctcttagtatgtttactattgcttgtatgtataatattttgggactaattggtattgaattatcaactagtggacttatcctagaaagttaattcccaatcccatctctacctttcagcagtcattagttgcatgtagtgtttgtttgtttgt

SEQ ID NO: 2203 - DNA, 1800 bp, mus musculus
agcaactaaaagtgatacagaagaaacgagcagatagaccagtcagctggaatataaattaagaaatatattctcaaaagtgaaaatttttactttataaagataaccctttggggctagagagatggctcagtggttaagaacactggctgcttttgcagaggacctgggttctgttcccagcacctatactgggtgactcacaactctctggaactctatgtccagggaccccataccctgcatgtacacaatgctcatgcatacgtattcccagatgcaacagactagaaaaggtacaaaggtacaaaggacaaaaatacatgcatccttgtagagtctatagcaagatgagaaggatctgccagaaacagaaaggtcaaggttcaactatgttcataaatagtcaaagcactttggtttttatgctcaccacttacaggcttcagaaagaagcagcaggagacgattattttcattgtttcaaaacttacaggatggctttcaaaacttcattggaaattcaagcacatctgaagcaaacagcaattgcttcactacaacacctttctcattccagtcatgctttgtggctccgcagaggtgggtatgcatgtatgcactcatgtgtacagctgtgcttgtcagtgcatgggcatgtgggggtcagacattgatactagatgcctttctcttccacgtgccaccttccgtgtttgagacagggagctctctaaatctggagctcactcttggctaccctggctggccagcaaggccctccggatcagcctgtctcctccctctgccctacacctattaccaaagctacatgcgcaggctgccaggctgagctttgcctgggtgctaggggtccaactggaggtcatcatagccatctccccagactgctttgtggccttataggatcttgtaaatcgtcacacaaagaaaggcttacatgggcacttcaatgatttgacagcaaaacacaggttctccctgcccccagcatcctctctttcctcattccctctggccttgctacatagcctaggctagacttgaacccccaaatcctcgtgcttcaaatacggaaggatggggattacagacatgcccccccccaccacacacacacacactctctgcttgagattgtgtttctttataacgctcagttacttctcatcccaaaagtttttacctttttaccaggagaggagggcttaaagggcttgaaagacacttccttcttttcttctctcctaaggggaggtaaatggtgctctaaaaagtaagggttagtatcaaaatagtccttcgggtgaagatgcagcttgaaaggtgaccctttgattagtcgatggtgctcttcactttctttctgtgaattgaagagtttcaaagttaagacacaattcaagaccaaaatcaccttttaaatcagttgtccatgtgcagactctaaaacacatgccactgggtgtgctgtcgaaaacattcccttatgttcaacttctatggttaaaaaatggaggatgaggataaaggaaggaaggagggaacaagggagggagggaagaagggagagaaaggaaaaagggaagggaagggaagggaagggaagggaagggaagggaagggaagggaagggaagggaagggaagggaagggaagggaggtaggcagggagggagggaacgaacatacttgctgatgagtaagcacaaccttccctttggacagaatctacttgagacttaacagtccgtcacctgaacaagttcttgctgcttc

SEQ ID NO: 2204 - DNA, 1200 bp, mus musculus
ccaggagtactagatcctcgatctcgctgcctcggtacttcctcttacagatcttcaccaccaccttcttcttgagaaataacttcagtgcttctctcgatgcgacggcttttgcgttttctttgctttttccacagccagtgcccaaatataccgacttacacctcaattcacagacaatactttcttgagagctcttattttgaggcagatctgccagttctttcagtgggacaaaaaacacatccagtgttgctttcagagcctcaatagccgcgttcagcagctctccgtgattcacagtggggctgaagccaccaactgctactaacttccacgccaccgtcttatacagtctattgaagaaaggttgcttctgttttatgtcttcattggttaacttccgacaagcaaacttgacagaactctcactggcctgggaggtacttttcgaaggcaactgtgaagtgctactctgagaaccactcttggcagctagctgagacacgcttcctaaggaagcgccacttttggtcgctagcagtgaagcagctacctgagccgtgcttttggatgtcagcagcgatggatttgtggaactgctctggggggttagtaaagagctgcctgacgatgaactgttttttgaaactgatgatgaaatgtttgcctctgaactagatttagatgttaacccactggaagctgtctctgaactagacttacaagacagtaatggcaactctacttctgcacttccagaggagcccaacaagggcacctcaatctctgagctgctctgagaggctgagcctgaagaaccttccagagcaccctttttaggtgacccactctgttgtctgttatcagtggactgggtcatatgactattcatactggacttcaacagggaagaaacaaatgacgctgaaccacgtttatgtggagcttctgactccaaagcctttccagaccctgcggttacctgagaggaattgctgctgctctggctgcacacagatctgtctccttcacttgtggcgctatcctgatgggagccactggagctgctccgagctgaggtcccaccactctcggatttggtggacgaccccctggacggcgaactgttttcttgctgagctgctgaacgatccgttttggcagattttttcccatgatctcgctcaactgaagaat

SEQ ID NO: 2205 - DNA, 1200 bp, mus musculus
atatatatatatatttacttattactccagattttattccctcctcccctgtccactctctgactgttccacattccatacctccttcccaatcccctgtctccaaaaggatgtccccagccccacccccaccccacctgacctctaaactccctgggggtccagtctcttgagggttaggtgcatcatctctgaatgaacacagacccggcagtcttctactatatgtgcgttggggtcctcatatcagcctggtgtatgctgcctgtttggtggtccagtgtttgagagatctcaggggtctagattaagactgctggtgctcctacagggttgccctcctcctcagcttctttaagcctttcaatcttgcatttcttatgtgaatcagcattggcatgtatacttttacagtaaccaacaactctttaattgaacctaacatcccctcaaatcctgccctgcactatggagtgtagatatcggaggagaacctactacaaagcctactttactaaatcatcataatccaaggttacattctaagtattcatccttatgaatacagataatcacagtcttcaccttcagcaaggaaacgtctccattccaagacgcaagggacaaatatcatagaaaaccacagccaatcaaaatgcagagttctggaggccagagaaaatagatccatttacaatgtattccctacgtctaagactcaaaaaacacttcagaagaggggacagaaagactgtaagacaatatcagggagtttgctgtgagactgtgctccctagggatatcagaaggtaacgcccagaaagtctgtgtactgtgactgcctatacgtgggctgaacaaaaacaatgcattcgtcaagctaaagtgggtgggaagaccctttgaatccccaatcctagacaaagacctgtaggcaactaaggaatgctgtcagcaggagaaagtcttccctagatgagcacaccaactggctatccaatacccaatgctcagctctgataacacatatacaagtaacattatacagtctgcgcttgttgtacttgtgtatttaggagcatatgtgtatgtacatatgcatcattatatgcaataacaagtaatgaaaaaagagaccgtgatttggaaagaacacaaagggatggatgctgtatgggagggtttggagagagaaagtgg

SEQ ID NO: 2206 - DNA, 1000 bp, mus musculus
atttaaattaatccacaagaatatcgtgggactaagaatttagaggtggattcccatggatggaagcttctcttgtaagatgaatggaagatgtgtttgaaatcacaaaaataacagtttgctgtggttatgtaagtctatttttcttcatggaacctgcaagtggttaagaagtggctgaaaggattccccacagaatcctaagacctctggtgagtggaacacagcgcctgccccaatccaatcgcgcggaacctgagactgcggtacatagggaagcagactacccgggactgacctggggcacaagccccttccgctccactcgagccccgggctaccttgccagcagagtcgcctgacacccgcaacggcccacacaggattccacaagggatcataagacctctagtgagtggaacacaacttctgccaggagtccggttcgaacaccagatatctgggtaccttccctgcaagaagagagctttcctgcagagaatactctacccactgaaactaaggagagtgctaccctcccaggtctgcttatagaggctaacagagtcacctgaagaacaagctcttaacagagacaactataacagctagcttcagagattaccagatggcgaaaggcaaacgtaagaatcctactaacagaaatcaagaccactcaccatcatcagaacgcaggactcccaccccacctagtcctgggcaccccaacacaaccgaaaatctagacccagatttaaaaacatttctcatgatgatgatagaggacatcaagaaggactttcataagtcacttaaagaattacaggagagcactgctaaagagttacaggcccttaaagaaaagcaggaaaacacagccaaacaggtagaagtccttaaagaaaaacaggaaaacacatccaaacaggtaatggaaatgaacaaaaccatactagaactaaaaaggaaagtagacacagtaaagaaaacccaaagcgag

SEQ ID NO: 2207 - DNA, 1200 bp, mus musculus
ttattacaacttcagtacttacagacaggggttattatggtagagtgagagaaaacactggaaaagctagaagaagaggaagtatactctgatattttgtctcctagaaatgttaaagaaattacccctaaccacagctattttttaatgtatagtagtgttttacccacatgtgtatataaaccatatgtatgcagttccctcagtctcagaagtgggcagtgaaactcttggaacgggagttaaggagagttgtgaactgctgtgtgggtgaagggacccagcctaggtcttatacaggagaaacagagttctcacactctcagccatctctccaggactcatcattagtatcttttcagaatcacatttccagttttcccttccaaattttgatgtcaagtgggatcaagaatctaatgatggaatggaaacaggcatcctcgggaagtaggaggttgggggaaccaccagaatgcaccagagacctgggaggtgagcgactcttaggactcaaagggagggaacttagatgaaatgcctgacaatagtgggagggaacttatagagcccaccttaagcagaaagacagagcattaagtgagggatggggttgccatcccacagtcacaactctgacccataattgttcctgtttgaaagaacttcaaagatggaaatggagaggagcatgaggaaaaggaggtccagcgacaggcccaaagtgggatccagcacaaggggaggtcccaaagcctggtactattactgaggttattgagcgatcaaaaaaaggaatctatggtgaccatcctcttgaaagacccaacaagcagctgagagtcagatacagatatttgcatccaaccaatggacagaagctgctaataatccctgtggttggattagggaaaagctggaagaagctgaggaggagggcgaccctgtaggaggaccagcagtctcaattcacctagacccccgagatctcttagacactggaccgccaacactagttgatatgaggcctccaacacatacagcagaagactgctggatctaggttcagagaagatgcatctaaccgtcaagagactggaggccccagggagtttagaggtctggtggggaggggggtagggatattctgttggagatggggatggggggggtgggcggtggggaggagttatggggggt

SEQ ID NO: 2208 - DNA, 1400 bp, mus musculus
tataaaagatgtagatagggtggtttatgctcataatcctaggattataggaacggaggcaagcagattaccacaagttcaaagtcacattgagtgactattgtgagaccttgaatccctctataatataaatgggagagaatagtattaaaatgaaaaagaaaacttatattatagtggcagaaaacagaaagttatgtcatcatgaaaggaactagcagtaaacgtgaaaattaatagaaagaagatttaaattacatagaatgaaagggagcataacccaagaatggttgaaaacagtagttccaagagataaacagattgaaacagattgataaaagaagcttttattaagagtaagaaagagagatcagtgccctggcaaatactctcccaaacactggagccttcctgtttcccaggaggtccgaagtgaccaaggacacagagttctaccttccattctgcccacttccccaattaggccagaccagttgccagatacctgcccaaacactacagcctgtgagcctcccaggaagtctgcagtaaccaagggcacaggaagccctccctaaatggtgaaaacactgcctgcctctaaggagaccagccctaactcaggtcacagagctctacctgtctccaaggagaatggttccagtcagagacacccaggccagttaacaccagagagaaccagatggccaaagccaagctcaatatcataagtgtcagaatccaatgcaatttgtcaccatcagaaccagttctcacaccacagccagtcctggctaccctaacatgcaggaaaagcaagataatgacttaagatcccatcttataaggatgataaaggcctttaaggaggatagaaataactcctttgaagaaatacagggaaacacaggcaaacaggtagaagtccttaaggaggaatcaaataaattccataaagaaatataggaaaatacaataaagctggtgaattaaacaaaattatccaagaactaaaaatggaaatagaaacaataaagaaaacacaaaaggaggcaaccctagagatgaacaacttagggaagagatcaggagctatggatgcaatcataactaacagaatacaagagattgaagaaagaatgtcagacatagaagatactacaaaaaaacgttgacacatccatcaaagaaaatacaaagtggataacactcctaactcaagatatccaggaaattcaggacacaatgagaagatcaatcctaaaactaataggagtggaagatggagaagaccccaagctcaaaggtccagaaaacatcttcaacaaaatcagagaagaaatctccctaacctaaagaaagagatggccataagtgtacaagaagcctacaggacacca

SEQ ID NO: 2209 - DNA, 1000 bp, mus musculus
tcatcagattggcatgtgagaacgaatgtgatacatttttttgatgggcatagatactagggtccagttcatctgcgggttagttccgtctctgacttggtggtcctgggtactataggacagctgcctgaactagccatgagaaggtagacgggaattagtgttcctactctctgtgtcagctcttgtctcctagaccttgcatgtgtgaatacctgtactgacttctctcagcgatggattatgctgtagaactatgagctgaaacaaaccctttgctctcctaactgctctggctatgatattttatcacatcatcagaaaccttatgataatttatatttgtcaggcactggcagagtctctcaggagacagctatatcaggctcttgtcagcaagtgcttgttggcatccaaaataatgtctgggtttggtgactgtatatgggatggattcccaggttgggcagtctctgggtggtcattctttcattctctgttccacactttgtctctgtaactccttccatgggtattttgttccctcttctaagaaggattgaattatccacactttggtcctgagaggctctgccagtgcctgacaaacgcagacatgaatgctcacagccatccatgggactgagcacagagtccccagtgaaggagctagaaaaaggacccaaagagctgaaggggtttgcagatccataggaggaaaaacaatataaactaaccagtagccccagagctcccagggactaaaccaccaaccaaggagtacacatggagggactcacggctccagctgcatatgtagcaaaggatggcctagtaggtcatcaatcggagcagaggcccttggtcctgtgaaggctcgatgccccaatgtaggagaatgccagaatcaggaagcaggagtaggtgggttggtaagcggagggagggggcatgggatgggggctttcagagggaataccaggaaaggggataacatttg

SEQ ID NO: 2210 - DNA, 3000 bp, mus musculus
cttgctgattagtggatataagcccaaaatgcccatggttcaatccacagaccttatagaatttacgaggaaggaaggtcagagggtggatgcttcagtcctaccttgagaagaagagaacaggatcataacaggaggaggaaggaggagagggggacctgggacagagagaggagagggagttaataagggggaagtatcagatactggcaggaatgggagagatgtacagagggtcaggaaccgaataaaaatatgcagcaggagtgggggggggtggataagaaactggtgctagccactggagggttacagacaccagggaaaagagactcctaggacccaacaggttgactctaaatgcagaaatgcacagagaaggggagatagaacccatagagaccatctccaacagataggcacagcctctggtggagggattggggaatccacccatctcaaagattttaacccagaaaagttcctgtccagaaaaacgaaaagggacaaaaaatggagcatagactgaaggaaggggcatccgggaacagccacatctggggatccatcctgtctgcagacaccaaatcttacactgttgctgtgggcaggaggggtttgctgacaggaacctgatatggctgctccttgggaggtcctgccaacaactgaccaatgcagatggctagagccaacaatcagactgagctcaaagaccccattggggagctggcagaaggactggaagagctgagggggatagcaaccccattggaagaacaacatcagctggcctgaccacccagtgctccaagagactagatcaccaagcaaggagcgtacagggagggatccatggctccagatacatatgtagcagaagatggccttgactgacatcaatgggaggcaaagcccttggtccttggaggtttgatgtcccagtgaaggggggtgctgaagcagtgggacaggagagggtgggtgggtggaggagcactctcatagaggcaaagtggagggaggagagggctgatttgagaagggggtggtttgtggaggggtgactgggaattgggatatcatttgagatgtaaatgaatggaatgattaatttttttaaaagcaggttatgttgtatataactttcatgctgtatatatacaaatacactgagaaacaggtgatatgaagaaaataataaagaataggtttaataagataagattacattcataaaagcctaaagagctatctcctacatcatagggataacatccaggaggaaatgatttgaattagaacaataccatgaagattagtatgtgtgtcttttaaaaagtacagtaaaggaattgcggaagaaggaattcaacatgagtacaggagaggatgtatacttgtcaggcatgggggaaggaattttgacattttataaaggtaaaaggcatttgaaaattgttaaaaatgcataaaaaggaaagaatagacattaaatagtgaaggttttaagaaacaaacataaaagatagaagaagctaagaaaatattttttcttaacttttgcaaagaagggatagctaagatgactcactttggaaaattgtttgctgccaaacctaaaacttaaatttgacacatagtggatgttaagaactcactcctccaaggtgtcctccaactgcatatgcacatacccatcacatatctacagaacgcagacacacataatcaacttaaaaatgtaaaaaaaagaatgtattcttatcttgtacactgaaagtaccaatttctccccaatgtctaattttaattatcttcataattttatttaatcctatgaatattaccaaaaatatcaaaactttgaacttgatacaaaataacagcatttcctttttccaacaaataatgcatgaatatcataaccgaataagaaatgacaatttaccttcgcccttctggtctgcaactttgtacccatggcagattggaatgtctgctttctgaacccacaaccatgcctgcctgtctctcaggaggcagggacacagacaatatttacagtcaaccactgatctgaggtcaaggatctctatggaagagttaagaggttgaaggaactgaaggggatggcaaccccacaggaagaccaacactatcaactaacctggaccgagtagctcccagagagtaagccaccaacctaagagcctacaggggctgcttggattacctgccaccaccaggttgagcacatatgtagcagagaactgccttgcctaatccctcccagtgagaagatacacctcatcctatagagatttgatatctccaagaagggggatgggcagtagtggtaccttcttagaggcaaaggagtcggggatctggtgaagaactctgggagtggggatggtgagtagagcaacatttggaatgtaaataaacagaataattaattttaaaaagaactgataagttaatagtaaacaagtcactggctttcttttcttttaattaaaacacaaaaaagaaaatgtctttaaagattttataatcactagagtgtaagaaaagttttgatcaagtgaaaacattatacaatatttgatcataacattatacagttttgatcatattaaatattgttcaacactcattgagcttctagtacacactaagctgtctgcagatcttgcatatctccttttgtgtaattctcaatgaaggaagtcctataaaatataattttacaaataaacataacaagatctcatagaaattaaatcaattctttgatgacagggttgaatttaaattttgggtgaatcaggaatggacccagaatttaagttcaaccatttcattaccagcaaagaagataatgtagagttattttgctaaattaatgaagctacgacaaagtctaaaagtcaaaacaggatggaaaagaagtgaattgttccctaattataacaattctcttacaacctctaa

SEQ ID NO: 2211 - DNA, 1000 bp, mus musculus
aagtttgtttctgcctgagctcagggaaaatttgactacttctatcagattagtttccatttgaaaataaattatttctgtaatcatcaacagaacccaaaatccttttagtccttcctgaggggatattattgcactgagaagaacagagagtgtttgtgtgggggaagactggaaagacacggatagagatgatgtagggaagaaccttgagacgccttgcctccatttcttcccaggaagatgcatagtgggcatctttctttgagatcctggactaaattgccacaattgtgacaacatggtcttgaagctatagtttggctttgaggaatgaacaatacagatgtagatagcttttcagatgcttgtgaatggaaggggatagaaagtaggtcagttcacgctgctttatatatatatatatatatatatatatatatatatatatatatatatatatatatcaaggaaggtcagttcctacggttaacacttcagcaaacctatattttttctctgattgttagtgtgcacaactgtgggctacagtttcatggcaagagctgtattctatccttgttttcaaacccatatatactcagaaacacagtcattcatatatatatatatatatatatgtgtgtgtgtgtgtgtgtgccaaaatttaaagtattaaaaattatctataattttagttttaacagacattttctctctatatatatgcttaacttgacaattttccttggcacaactgctcagactaggttctctgtcttttaaaattcaaacttttttttgttttgttttgttttgtttgttttttcgtgacagggtttctctgtgtagccctggctctcctggaactcactctgtagatcaggttggccttgaactcagaaatccacttgcctctgcttcccaagggctgggattaaaggcgtgcgccaccactgccggcaaaattcaaacgttttacttcttcacagctaagggc

SEQ ID NO: 2212 - DNA, 1400 bp, mus musculus
atccaataaagcatagttaatcttcaactaaaggtggagaactgcattactaattcaattgttaccaacttaatctgtctcttaaaacatcagttgaccttgtgactggatgagtccattttttattgaacaagtaaaatgaaacttagaaaatctaatctaatttttatcaatataatttgccaaatacattcctaccttgctcaaaatgaaagccaaagtcttttgctcacaacactctccacacagtatttggatcagtgttctctttgtgattttaattgtttacaaaataaaactatttctaaactttagtaagagtaactttgtagatggaaaatgaacaataattcaagatgatagtttgcaaatatttttattttccttcataacaatgtattaatgatagaggataggtgtccctaggccagggagggctttgcctgagcatctgtgggagacatgttggttccaggactccacctagactagtctgcacagttgagagtatggactacagaagttaacagcttctgggaaaggcgggagccacagagcttctgaggcagcccccttttcgggctccagacatccgggcacattccgtgccagaggagaggtgaggtgtccgccctgctcaggagggctttgcaggagcacctgggggagccatctttgttcccagatccttctgagactagtccctgcaggtgagagtgtggactacagaatctaacagcttctgtgacagaccgaagcaacacagcttctgggaaagatcctcttttgggccttcatctttggccaggagggaggtcagaacgccagatgtctgtgtaccttccctgtaaaagaagagcttgcctgcagagagtgctctgaccactgaaacttagatgagagtgctagtctcccaggtctgctgatagaggctaacataatcaccagaggaacaatctctaaccagagacaactataacaactaactacagagattaccagatggcaaaaggcaaacataagaatcttaataacagaaaccaagactactcaccatgatcaggacccagcactcccacctcgcccagtccagggcaccccaacacacccgaaaagctagacgcagatttaaaagcatatctcatgatgctagtagaggacatcaagaaggaatttaataattcacttaaagaaatacaggagaacactgccaaacaggtagaggatcttaaagaggaagcacaaaaatcccttaaagaattgcaggaaaacactaccaaacatgtgatggaattgaataaaaccatccaaacttaaaagggaagtggacacaataaagacaacccaaagtgaggcaacactggagatagaaaccctaggaaagaaagctggaaccatag

SEQ ID NO: 2213 - DNA, 1200 bp, mus musculus
aggtaacacaatcacaaaagaaaagacatggtatgtactcactgatcagtggatattagcccaaaggcttggaatacccaagataaaactcacagactacatgaagctcaagaagaagggagaccaaagtatagatgcttcagttcttctaagaagaggaaacaaaaatactcatgggaggaaatacagagacaaagtttgaagcagcgactgaaggaagggcaatcatgaaactgtcccacctgagtatctatccaatacgcagtcaccaaaccctgacactattgtggatggcaagaagtgcttgacagaagtctgatataactgtcttctcagaggcttggtcagagtctgaacaatacagatgcttgcagcccaccattggactgagcacaaagtccctaatggaggacttcgataaaggactgaaggagctgaaggtgtttgcaaccccataggaagaaaaacaatatcaaccaacaagatccccaacccacctatagctgtcagggactaagccaccaaccaaagagtacaaatggagggacccatgggtacagcctcatatatagcagaggatggacttgttgggcatcagtgggaggagtggcccttggtcctgaggaagctagatatcctagtgtaggggaatgtgagggtggggagaccagagtgggtgggtgggtggagaatatcctcagagaaccattgggtgtggggatgggatagggggtttcaggtgtagggacgagaaaggagatagcatttgaaatgtaaataaagaacatatccaataaaaaaagaaacatacactttaagtgtaatgaccaaaggagagttgaggaataaggaaagactaggttgaagcataatactttaggctatgttcaaactttcaaactttatgctttcctcatacctctcccaagccatcatgttttatgttttttcttcagctaaatactctttcttgtttcctatgtatttgtatttgtatgtttttcaatatctacagtgtttgaaaatggagtgatttaagaaggccctcattattctacattgaataaaataaaatttgaaacttctgacagaaaaaaagagagagagagagatgacagagagagagagagagagagagagagagagagagagagagagaagaagaagaagaagaagaagaagaagaagaagaagaagaag

SEQ ID NO: 2214 - DNA, 1000 bp, mus musculus
aaaacaaaataaaaataaatatatttcatgggcctattctttctgctgttacccgatattaggaatgaggttggcacactgttatttacttccaagtatttgctcactagcagttagggattctttgatctccaaggctgctgttgcataattgatcaaagctctgaacctgacgatagagcattaagagattggattgtgaaacgtcagtccacccccttattctttgaccgtgcacgtttctagacagattgttaaacttattttaaaaagaaggaaagaaaacaattgcttgttccagtataattacaacacaacgaaaagatgttttaatagtcatctcagaggacaatttagacttacatttctgggcactctaaaatatgttaattagtatacattttttgcaataatcatgtaattagttttgtgtctttgattatgtagagaaataaagtgtccaaaccgtcattctgacaatcatctactagtgtgaaattaaatcaaacttctccaggttttaggagtttgaacattatgaataatgtatatgtcatgtcagaagaactttttcagaggtcattccaaatccttggaatttcaatgcttgctcctgctctgtgctggctgacagtggctctgaaagagagagaaatgctgtgaagcaagtgtcattctgaccccaaatactgacttctaaagtgtgtttgaggatccagcagggaaagtgagcagtggtgctagtgacacactcctcatgacattgccaagacaacattgattcaattgcctcaaccaagcttaattaagctgtggtaaaaggtgttcctggaaccactgcaatggacatatctgatctccctcatcaagcaactgggaatagtgacccacttgggaaggacagaaatgcagtggcattttgtttccctctgtttatctctctttctccttactctgtatatcaagaaagttcaatgccactgagttctcgggaagtact

SEQ ID NO: 2215 - DNA, 1400 bp, mus musculus
tatcactaaagtttaaatcacatattaaacagtaaactctcattgtggaagacttcaaaacacactctcaccaatggacatgccatcaggcattaagtgactagagaaatcctggaattaacagatgttataaaccaaacatacctagatagtgtagcaaatgttaagaaacataagtacttagcttgtataatattagacaaaagaaaatctaaactttgattatgtctttttattctttgcaatactggaaaaattcaataactcttatgactctgtataataaatatcaattttactagttggtacaaccaattaaaaaacaattaatattacatttgaaatcacataaattcattttacatgtacattggctacaaaagcatcgtatctatcttggggacattattttaaaatttgagaggtttttcttatcaatatgctttcttatgatgtcaacatattttctcattatttttttttaatttatgagggtgctcccccacttacccactcccattctcctgccctgactttcccctacactggggcattgaaccgagggcctctcttcccacaaggctatcttctgccacatatgtggacagcgccatgggtccctccatgtatattcattggttggttgtctagtccctgagagctccaggagtctggcatgttgacactcttgctccttccatggagctgcaaactctctcagctccttcagtcccttgtccaactccttccctgtggacccccgaactcagttcacgggttgactgagagcttccttctctgtatttgccaggctcttgtagagtctcgcaggagacagtagtgtcaggcttctatcagcaaacacttaccagcatccacacaacatccagatttggtggctgtatatgggatgcatcccctggtgcggcagtgtctggatggtccttttagaatatgtgtcttgccctttccagctggaaaatttgggggaattttcctgatgaagatccatccccttgtttcctatttaatatttaatagacgattactttaaatatagaaaagtgctttcttattatttttttgaatttatttaagttaactcatgatttttttagtgtatttctaagtgatagacacaatgaaggaaaatacaagtaaaaatgacactgcattgtgaaaaccaagctgatggtaaatgcattctgtgtgcccttgtatttaagatagctcaaaccaacttcatggattatacagaaaaaaactatttgaaccaaagtttagaaagcaaatacgcattaaagaaatccgagagtttgcatttttaagtaaacgaaacaagatacatttaacaatcacatagaacattctgttacatatttactgagcttacattatat

SEQ ID NO: 2216 - DNA, 1000 bp, mus musculus
tctggcaccaatgggaggggaagcctttggtcctgtgtaagggcatggaatcaacacaggaccaccctagggtgttgagccaagatgtaagggcatggagtctacacaggaccaccatagggtggtgaggcaggagtgggtggatgggtgggttggtgggagagtaaataccctcatagaaacagggtgtaggaggcaagggataggaagttttcagaggggaaatcaggaagtgtgggatcctgaacggcagcctgttttctggttgagctgagtttaaagctgggagacccagaagttgtttctgcaaaggaaggaaggtgttttccacacccccagacacaaggttcctgacaggagattctccataattctgtggccatcagtaacatagtacaacaccccaatccccggtactctgtctggactccaccctcacagtttcttggcaagagttagatatgctcctctccacagttacctgaaaacagccaggtaggccccctcctccctcctttactcttgcctctctctcttgccctcttgctcccctgaactccacattcccttcccccatccctccacttggccatgggagccctctacttttcttctctctccctctttctgcctttctctgcttctacttccctcttagctccccttcctagatgctcattgctgcaaatggtatttaaccacaggactgccctgagaaaggggtatggtttcactcatcacaactctcagccttgaccataaatgccttaaaccatggactgcctcttcccttcaggatccgaagtgctggagcaatggaccaggatttcctctaaagagctgagcatctaatattctgcaggaggtctctctgtgctctcagccatgctctcagccatggtctccaccaagccaagctaccagcctgagcatagctaagaaactctcctctcagaaggaaccagtcagagcactctcctctaacccctttcccttcagc

SEQ ID NO: 2217 - DNA, 1000 bp, mus musculus
tctcatgaacatctggaaacttttgtctcaaatgaagtgctcaaagttaagatcgagtatccaaaatggtatttacataattcacaatctggtacccaattcatacttcttcaagtaaggcctcacctgctaattctgcacaaagcaaatgaatagacaccaagttttcaaattcaagcaaaatgtagcaagcatctcactcacaatatttttatatagttattgaacccattggatgcccaatgtagatagttaagactgatctcagaccatctgcaagaacagctagcactttaacccttggatatagttcttaaaccttaatttaagaaaggtaaaaacaagaagaaaggcccaagaaagaatgcttgaatttcgtttagaagaggaaataaattactcataggaggcagttggagggatggaacttgatgatgagaaagggaggagaatgaggggaggtgaagggattaggtgtggtgagatacaggagaaagaaccacagtgccaaaagagagaatgcagtgaagggctgggaacatctcagagacttgccaaaagtttggggtaggagaggttcctaggagtcaaaaagggtggcaatagctcacattagatctaatctcatattagattcacatagtagtagtgatgtgaaaactgaagaggctacctgatggagccaggcagaacccccagtggaaagaaaaggataccaactcacacatacatctgtctacccaaaatttgttctttctacaagaaattgctagagccagcttgttagacagtgtgggaaccctggctgggcaaatgaggttgattatacaaaaggtaaaaagaagatgcaagaaacagctatgggaatgttgctggttaataccatgctagtgagcaagtatattttcttagtatattttaaagacaaccatcacaaagcaggatcaattccagaaagataaacagtgacaataaatgaaatgctacatggcaagcttat

SEQ ID NO: 2218 - DNA, 1000 bp, mus musculus
gcttttattctttgagacacatgttcagccccttaatattccaatcctagtaaaagactacactttcgcaaaacaaaagcaaaagcaaaagcaaaaacaaaaacaaacaaacaaacaaaaattaaggcttatctcaaagtacctattttttgagattaatattaactgcaatgaatataataaattttgttttttaatttctttagggaacataaattcacgttagattaagataccattctacctcagagtgagtcccgttaaaagaacaggtagtaagaagaataaggaagggtgtagaataacaggaatttcagatactgttgttgatcaagcagagtgacatttatttatgatgtataatctaggataaattgtgttactacatttatttatatatttaactaaacaacattatggattggctaagccatcaagatactgaaaggtctatagtttccaagggttatccagtagaaatgataaatgaagaaatggattctgtagagcactgagaacacgctgtataatgttttgatggcaggttcaggtcgtggtctgcttgaataaatgtcctgaataaacagtaagaatgaaatctgataccaactcttggtgctgagtgatgatgatataccatggcagactgactcatcaattgggacacatgtccctatccaatgagggttttgataatgaaaaaggttatgcaaagaaggatgagagtacacagggactgactaattacaaagaatattacaaagtgaacataaatgccaggcagtggtggaacacgcctttaatcccagcacttggggggcagaggcaggtagatctttgtgagtttgagaacagcctggtctacatagtaagtctctggacagctgaaagtacacagagaaaccctgtccaacaagaacaaaagcatacaaacaaataaaacaataaagtaaaacaaataccaaaattgaagtataaagattacatattggaaaataaa

SEQ ID NO: 2219 - DNA, 1400 bp, mus musculus
ataaatctgcacaatcttctttataggagaagaaaaagaggataaattgatgaatgaacagatatatgagcacataactaataaatacttatttgaagaaatgaattgtatattccacatttacttattcttttttattgttttgcaaatctgatgatagaaatgaatagatacatgaatgttataaattccaaaatctattgtatttgttgatatctggagcaacagaaatagatgaatgcttcagaaaaaaaatcagtctgaaatacaaacagaatctgcattagaaaatgtaagtattaaatttaataactttaaaccgtggataagaagagaacatttcaaaccaagagtatgtgagattaacattgattggtgatttatttattcattcattcattcatttatttacatcccaaattttgccccttccccatctcccccttgaggagttcttctcttatcacctgttctctttgtctctaagatagcaacatctctgtatccccaaaccctgaggaatcaaatctctgcaggtgcatatcttccactgagtccagacaaaggagccttcttctacttatgtgccagggacctctgaccagcccttgtatgctctttggttgctggctcagtctctgttggtcttcctgtgtaattagcatccccttgaggaccttcaattcttcccctaactcttccataaaggtcaacaaactccatctaatgtttgtgtgtgggtatctgcatatatcttagtcatatgccaggtagagcttctcagagggtatgcaattcctcttaattcttctaacactgtcaaaatcctggtttctaagcattcaagtattttcacttttggggagtattcttagttaaactaccacacccaccccacaacactatgccactattgcacaagtgcctatgaaagctcaaaccagaccaaatactaccaaagacaacatagatgcaattgaagccctttccctggctgaagagtttgtggcaattgaactcttgggagagggaggaccagtttttagtaaaatttagaccatggcaagtttagtgaaatcatactctagtgaaaggccacacaacccaaaatatatgagaagtacaagttacatttattaaatttttgaaaagctataaagttgggtatgtaaggaaggtgaaatgaatctttgaggagttagaggtaaatatcaaactatattgtataaaattgtcaaagatagatatagatatgtagaaagtaaattattttagaatgctatgtagataacaccactaataaaagtatttacattaagaaattttaaaatattttactgaaagcaaagttccaagagataatacatccatttatattttcttttagttctcattcacca

SEQ ID NO: 2220 - DNA, 1400 bp, mus musculus
atttactactaggatgctatatccattttttattcatttttatcatttgttatccatatccatttatttattaacatttaatatattgtaaatatgaactatttgtttatcatatctattttaaataattttgtagagatttttgtttgaggtataattaatgatagctcagtggattaaaattttttatttaaaaaaattcgtattatcaccatttccctaatgatacagtgttttgcaatgtgtatatgttgtttaatttgggaagtaatatgactgtgttttcttccatatcttttattaattttcataaaatttaacatcatttattaaactcaattttttcctattttctgaggtaacctcaggaaatagggggttggggggaccctccagaatgcaccagagtcctgggaggtagaagactctcaagaatgaaagggagggaccttagataaaatgcatgagaataggcagaaggaacttacagaccccacatccagcaggaagacagggcatcaagtgagcgatggggttgccatcccacagtcacatatctgacccataattgttccattcttaaagaattacaagggttgaaggggagaggagcttgaggaaaagaaggtccagcgacaggcccaaagatggaaccagctcaaatggaggtcccaagacctgacactattattgaggctatggggcactcacaaaaagggacctagcatgaccacattatggaagacccaacaagtagctgaaagagtcagattcagatatttgcacccaactaatggacagggaagcttcagaccactgtggttgagttagggaaggctgaaagaagctgaagagaaggacaatcctgtaggaagaccagcaggctcaattaatctgaacccctgagatctttcaaacactggggcaccaaacagccagcatacccacctgatatgatgtccccaacacacatacagtagaggactgctgggtctgtgttcattcagagatgaagtgcctaaccctcaagagactggaggccctagggagtttagaagtaagttagagtagggggtggggacatccacgtggagtacagggatggggaggaggtgtgggatgtggagcagttgaaggttggatgggggcatggagaataaaatatggagtgtaaaaaagtaaattaaaaaaaaaaacctccctatttcagagaaattttttttaaatgatgctggagaatttgaaagttgtttacaggggcctgttgctctctggcttctgggtcaaaataagtacaggtcctataggcttcaagtagacattttagatagtccttggagcactcattcttttcctgcatcatctggctcacctaaaataaatttgtgagctctctgacg

SEQ ID NO: 2221 - DNA, 1400 bp, mus musculus
aatacataaccttaaatttagaaatagggaaaataggtacttgaaaagatgatagttattctgaatagaagagaatttatagttctaaggtcaaggaaaggctgaagaatttagagcataatacagagagaatgttgtagaataattagttttacagatggctaatattatataaaatataagaatattcagaatgttttaagagtgagattaaaaaaaatcctcaaaggtcggcaacagagttcataatgtaatggaatttctcatagagcttaatgacttgagtttaaaccctgaaaacctataaagcaggagaggaaaatcatctctttcaaggtatcctctgaccaacaaaggaactacatggcatagatgtttctatatatacacaaaagcacacacatacactaacacagacaaaataaaacactatcaatatctatctatatctatatctatctgtctatctctatctctatatctataatctctatctctatctacttatctatctatctatctatctatctatctatctatctatctatctatctatctatctatctattgtacactccagatttttattcccctcctggtccaccctccaactattccacatcccaaacctcctccctgtccccctgcctccatgaggatgtccccatcctactagacctctaaactccctggagccaccagtctcttgagggttaggtgaatcttctttgactaaacccagacccagcagtcctctactatatttgtgttggggacctcatctcagctggtgtatgctgcctgtttggtgatgcagtgtttgagagacctcagggatttagattaactgagactgctagtcctcctacagggtcaccctcctcctcagcttcttccagcttttccctaatttaaccacaggggccagcattatttccttttgaaaaataattaaagttggaatataactaaattttattttctgcaacttcacaatgtggaataaatttagtaataattaaaaattctatcaaagtcaagaaaaaaatcttattttatgtctgaaaattgacatttagaaatttatgtatagtgctgggtttacttgagtatagagtatagattgaaacttggactaagcagatcaatgttttacttgcttagacacaaatactaatgttgttttgaacttaaaatggcttattttccccctgatgctctaaaaatatacggtcagctacccagttagaaatgtaagagtaaaaaaaaaaaaaaaaaaaaaaaaaaaattagtagaaatttgagagagggtgtgtgaaatcatgacatttagaaaaattgtaggaagtctattaacaggatatagaaaatggcataaatcccaaatgataatctagtat

SEQ ID NO: 2222 - DNA, 1000 bp, mus musculus
tccacagaggactctccatgcgatcttaggacctttgatgattgcatcaaacttctgttccaatccaattgcgcaggacctgagacagcattaaatagggaagcagaaaacccagcctgaccagggtcacaagtcccttcagttcggtgccaggaccgggtcattgggcacagagtccgcggacatccccaaggtccccagaggactctccatgggatcttaggacctgtggtgagtggaacacaacttctgccaggaggcaggttctaaggccagatatctgggcaccttccctgcaagaggagagcttacctgcagagagttatctgaccactgaaactaaggatagatctagtctcccaggtctgctgatagagggtaacataatcactagaagtgcaagctctaacaagagacaactataacaactaattccagagattaccagatggtgaaaggcagaagtaagaatcttactaacagaaaccaagaccactcagaacgcagcactcccacctgacccagtcctgggcaccccaacacaccggaaaagatagacccagatttaaaagcatatctcattttgatggtagaggacatcaagaaggactttaataactcacttaaagaaatacagaagatataagatacaatttgcaaaacacatgaaactgaagaagaacgaagaccaagtgtggacactttgccccttcttagaattgggaacaaaacacccattgaaggaattacagagacaaagtttggagctgagacaaaaggatgtaccatctagagactgccatatccagggatccatcccataatcaccattgcatacactagcaagattttgctaaaaggaccctgatatcgatgtctcttgtgagactatgaaggggcctagcaaacacagaagtagatgctcacagtcaactattggatggatcacagggcccccaatggaggagctagagaaagtacccaaggagctaaaggtacc

SEQ ID NO: 2223 - DNA, 1400 bp, mus musculus
ccttgatttggttacaatttatttcagaagatgaaggtggggctgtgagtggcattgacatccactgaaccctcccaaaggtttttcttatacttgagaatataactacagagcaataaggggattctgaataatatatcccataaaaaaaaactattactccacttcacaagattttagtgcttgctctaaaaagtacagatatgctcagtaccttacttttaattttcaaatagcttccagggaatttaggtagagtagataataaaaaggtaagatagtgtggggctgtgataggcagcctattttggtagaatggggcttgctccggagacccagtagagaactgtacaacggacagaaaagcgagccactctcccagagccaggtgcctgataccacagagcccccacctccataattctgtgactttaaatcaagcagacaatgtcccaagcttcaggcattctggctagactccacccccacagttacctgactatagccaggtatgctcctccccacagttacctggaaacagcaagatagctcagcccactataagaggagctgcttggcccctcctcactcactttaagccttcatctttcttactctcttctgtagccctttctctctctccctcctttcccccctctctccatgtgaccatggccagcctctctttttctaccttctctccttctccctgtctttcaacaataacgctctaaaaccatagactgtcactgctcatcaaggctcaccgtgcttgaaagatgggataggctttctcctaatgagctgggtttaacctcccaccagaaggacttcctgcactccaaccacagatgggaccaaggactctcccccatgtgggaaccatcaagcaccttctccccttgacctctcctcgcttcagcccctgggctcaatgccgccccgggggagggggggcccattctgttctcagctcttccactgtatccagtgtgggatgctggaagctgggaacctggtgcctaggactgcaccttgtccaccaccctctgagctgggatcagtggcttcccacagccagacacccacctggggctgcatggaaagcttgcagaactccccctgtgtccacctgcccagagcaccagaattctggcaggatgcgggttttctcccaatccctctttctcctatacctacagccctacaagataacacatgaaagaggatgaaatagacatgttaaaggatactttttaaatccttctaatgaatattgccagtttccaggttatttcatctaatttctgactcagaaagaggatgacagagattcagactaaataaaatatttcaattatagtaattggcatgtagccatttaagaagaacttttggta

SEQ ID NO: 2224 - DNA, 1000 bp, mus musculus
caattctttctatgaagccacaattactctgatacctaaaccatacaaagaggacttcagaccaaatttccttatgaataccgatgcaaaaatactcaataaaattctcacaaaccaaatccaagaacacatcaaaacggtcatccgtcatgataaagtaggcttcattcctgggatgcagggatggttcaacatatggatattcatcaacataatccacaatataaacaaactcaaagacaaaaacctcattagatgctgagaaagcatcgggcaaaatccaacacccattcatgataaaagttgttgaaagattaggaattcaaggcacatacctaaatataataaaagcagcatccaacaaatcagtagccaacaaagaagggcaaacaaaatacccatggctggagttacagggacaaagtgtgaagcagagactgaagaactgaccatacatagactgaccctcttggagatccaacccatagacaaccaccaaactcagacactattgtggatgccaacaagagcttgctggcaggagcctgatatagctgtctcctgagaggctctgcaagtgcctgacaaatacagaagtggatgctcacagccatccattgaatggagtacagggtccccaatgaaggagctagagaaagtatccaaggagctgaaagggtttgcagttcagtaggaggaataacaatatgaatttaacagtatctccagagttccctgggactaaaccaccaaccaaagaaaacacatggtgggactcatggctctagctgtgtatgtagcagaagatggtctagttattcatcaatgggaggagaggcccttggtcctgtgaatgctgtatgcctcagtataggagactgccagggccaggaagtggtagtgtgtaggtttgtgagcagggggaggggggaggggataggtggtttttggagttgaaataggtaagaggataacatttgaaatgtaaataaaaaaaata

SEQ ID NO: 2225 - DNA, 1200 bp, mus musculus
tcaagcttaaaattgaatttatttatttatttatttattcattcattcatttattcattcattcattcattcattcaatttacattccagccattgccctcttctggttcccccccccccaaagttcctcatcccattcctcctcctccttgtctctgagagagtgctcccctcaccagacctccctcttacctgtggcttcaagtctcctaagaaataagttcatcttctcccactaagtccaggcaaggcagagctctgctatctatgtgcctatgccattgaagtagcccctgtatgctgcctggtggtggctcagtctcagggagctcacagggttctgagttatttgaggctgctgttcttcatatggggttgctattgccttcagctttttcaatccttcccctaattcaaccacagaagtccctgatttcagtccaatgcttgggtgtatgtatctgcatctatctatcacggtcacctgctgggtaggcctcttggaggacaggcatgtcagacttctgtctgtaaatacatcatagcatcagtaatagtgtcaggccttggtgccctcccccagcacccatgagatggatcccaatttggactggtcactggctttccttttaggcaggatcaattctcagtcagaaattctgactgtgggttagtaaccctgtcactccacttgaggtggactctacaagttttttggagcctaagttcttgagttctttatatattttagatattagccctctttcagatgtaggttagtgaagttttttcccctatctgtaggttgctgatttgttctattgacaatgtttttttttttttgttttttttttttgtttgtttttttttttgccatacagaagcttttcagttttatgaggtcccatttgtaaattgttggtctaaaagtgtgggtcattggtgttctggtcaggaacccaccctgccccccagcccccaccccatgccaatgagttcgaaaatctttcccactttcttttctattaggttcagtgtttctggttttatgttgaagtccttgatgcacttggacatgtactttgtgcaaggtgagaaatatgggtctattttcattcttctacatacagaccaccagatagactagtataatttattgaatatgctttttttcctccacaccatctgtttttagcttct

SEQ ID NO: 2226 - DNA, 1600 bp, mus musculus
gagaggctgcaaaccgtcataggccgcctccaaagcacaggagccaagaggcctcaacccagacagacgatgatggtctccttcatcaccgagctcaagagccccagccaacaaggacagccaggacccactggggctgcctctgcccaaaatgcccacagtcttcctgaggctcctgcccatcctccagcccagagggcttcctgccttctccttggagaaagaggcaccaagaagggccctgctaaaagatctgctcctctcatggccaaggccctgaaggactacagaaagtgcttctataaaaggtgaaccccagatgatttccatcaccagaaaacctgcaactcctgagacttggactgactggacacacaggtgcttccctccagggactgccacatggtacaccctgggtttagggctccgggcagacttcccagcagctaatcttggcattctcactggacttctttacacagttttccacaccttaacttttgtcccatgtcaattctcaaaacatcttcaaaaataaatcaatatctctcccacaatcaactttgtgggtttgtctctacattacttgtgaaggattgatacccatggacatagatacagtttagcagttggacaaagagactaacagtctgcctgctgacagttttgcaaagacgcatgtaggatcgtagatggtagaagagatacctagagtcacaaagagaagtaggcacatcaatatgtttgtggaagtctggcagtagacttgatatcagtgcccacaaaccagtaggaatcaaggcagtttgtgtgtgtgtgtgcctgtgtgtgtgggggggaatgtgcatgtatatgtgtgtgcatgcatgccctcatgtgtgtgtattttttatgggtatgtgtctgtgagtgtgttcatgtgtgtgtgtggtacaactatttgtatgtgtgtgatgaagaaaaggaaagttacacgagtacagagaggcagagagagagagagagagagagagagagagagagagagagagagagagagagaaataacttgcctataggattgagaacaaaactgatccaaagttcccagacattgtctctcattagggtaagagctcagatggattggcacttaaaattaaagtatgctttagagggtcctagggatgcaagcaaggtcacatgttggtgtcagcaaaagccaaggagaaaaccagcagtatacccactaattgtaaagtgagtattgggtaatcacacatagtgtgtaaaggagagacagaaaagagagataaaacattgatagtgagaaaaagttagacaggcatgagccagagaagcaggcaaaggtccaatgagaatgaattcaaggcagggtacagataaccctagacacagagacacagaatcccatctacaaccctgaaatgccaaggtgtggctgtgcacctggttctatgcacctgtgtggacttccattggctacaaggttgtgggaagaagcagcaagaggctttcagcaaacaggtgcctccaataagttttcctacaaaggaaaggactttgccctaaggaggttcagtgggtggaggtcacatgg

SEQ ID NO: 2227 - DNA, 1600 bp, mus musculus
tggccggtcgtgagaacgcgtccaataacaggcctcctttaacataggtctctgtcttgcccatgagattttcccctacctcctcacccccatcaattgcagatttccatttattttcatggccaccagctatctctcttgtccttccccacacctgagaaccccctttctcctcccatgcccctcccgtttccttactttcatctgcctcttatgagtattttcttccctcttctaagtgagatccaatcttccttgctttggccttccttcctgtttaccttctttgggcctgtagagtgtagcagggtaactgtatataccattcctttgatttgggatatggatttcttcactcaggattatattctcaaattctttccatttgcctgcaaaattccttgtgtgtttctttttaataacggaacagtatttcattgtgtagatgtatctcattttctttattcattcttcagttgagggacatctaggttgtttacagtttctgggtattatgaataaagctgatatgaacatagttgaacaagtgtctttgtgtgatattggtgtatcttttgagtatatgtctagaagtgatacagctgtgtcttctataaaaagaattgttaaccctttggctgcttggaaaattcatctttgcattgtccctcggcagtgttccttgttcactgcagccacattcaccacccacaacctcttcaaatgtagactcctgcagctttctctccagagtccttgaacccaactaattcttcacttgctgcatcaggccactgacatgccccaccatgccagatagggcagtagacaccggctcagagatcactatcgaggacttaaaggaggagaaagaagttgtggaggaggcagagaatggaagagaagaacctgccaatgggaatggtgattaggaaaatggggagcaggatgctgacaatgaggtagatgtagaagaggaagaaggtggtgaggaagttgagaagaaaaatgaggaaactgaggcttgacgggaagcaggtagctaaggatgatgaggatgaggatgttgacaggaagaggtagaagactgatgagggatcactacacagtaagaggaagagctaaccttattatgcactgtgacctactcactctttgctttctgtctcagaatttaaatctgtacaccttcaagcagagaagcaagtcctgcttgtttctactttctatttgtttttcctcaaatttcaattgatcaaagttcttcaaattctataaaataaatatactaccttgtagaaattataaattcttgaagatttaaatggttttaatttttaataaataaataatttttaaaatttatttatttcttaatattcagatactgcaaactttacatcagtaaatacaatcacctgggtatagtttttataggaaaaaatattttgatactaattataaaaaggggaaaaggaaaatgttctttagatctgcataccataataagttttagaggagatatattttaatttttaaaaacttgcccattttgctaacatacagcttaaatattaatatcaaaaacagaccctgcaca

SEQ ID NO: 2228 - DNA, 1000 bp, mus musculus
atataaatttcccaggagtcatttatagagcacatttattgtacagttcctaatacacaaataattctgaggcactgtggtggagaaagagtagagtccaaaagggaagatgcaagttagtccttacaaaattacatctagagacttggattgtggctaggctatgtgagtgcttctctaccatactcaaagccttgagttcagtccatagcaacacataaactaggggtggtggttcacattagcacctgggatgtgtaagcatcagaacttcaaggtcatactgagatacattaagagcttggctcaacctaatcttcatgagagagtgtttcaaagacagtaacaacaacaacaacaacaaaatggaaatcacatctgattttaaaattattcaataatgagcatcactttaccccaatgccttaatgcatcctagcattaactaccaccttctgcagtcaaaagcttctctgacagtgacctagttccttcataccttcaccttcagcctttccttttagcccatatccattcgtttgtgacacctactactcagagtgctactttctgccaaggacccagtagccacattaggcattaacccagagtaggcaacagcaaccaaagaacacaacacatatttaacaaagatgagaccagaaatgtatgccaagaagccccgtcatatgtcataagtgtagatacctagatctcagggcaaaaccaaagcatgaccaaccaacacagtatgccttctccaaatgccagcaaccctattgcaatcatccctgagtaaagcagttttgctgaagcacaaaacaaggacttcaaatggcagtcacaactatgttcaaggacattaaggaagttataaataaatgtgttagtggaaactataaatattcagttgaatggaataatgaaaacatgaaagtagaatataaaaaatacttagaatcactaaagaaaatccaaaatttaataactggaaatggat

SEQ ID NO: 2229 - DNA, 1000 bp, mus musculus
acacacacacacacacacacacatatgaaaaaatatatggattcaacctgacaagtccattttgtgttgcttgtatgtatatgatggtaaagctgatcactcagtgccggggaccatggcctcagccatggccttgtggatattttctagcttacataaataatcctgagagaacattcatgatcataagagtaagaatgtttgaggacactgggaccgttggttccaggagctgaagattgccacctgaccttcggggagcctaccccctcaaactctcccccctcccttgaaacctcctcttgcttacgcttatattgccactgctgaataaagtttttaagagcttgatcaggaaattgacttgctctcattcttcatgtttcttgtccctcccacacactctctctctctcctgccctgggtccccactgattatccctgaggtcgggacaactcagtgttagggaaataattttagggctcattcttagaaaagactaactctccctctcttagcactcattaattgcctgtagttgttcacctaggggtggagatacacttgcgctggggtgccagctgttggcactagtagtttgggtattatttatgcagccctactcttaagatatgaaggatagaattctgtcatttctaggaaacaaaatctcacagcagagttccgggtcctctgtcccctacaggctttctgacccctcttccatgatgttccccaagccttagttgtagaggttgtgttgtaggtatgtaggttagtttcactgagagccccattttaaccaacaaagttacggctttttgccatggtttccatctgcttcaaaaacaagtttctctaatgaggggtgatagctacatttaaagacaagtattaaaatgaagttagggattacttcaggacagtggcagtagtagggtctcattacgctgagatttctttgaactcttaagaattttacctctgcatataatttac

SEQ ID NO: 2230 - DNA, 1000 bp, mus musculus
caaacaaacaaaaacagtctccagaaaaacatcacatgacacaactgggtctccaaccagatcagaaatttccacttcatgggtctcctaacagtgggagcaggagctgtctctgactctgttgcctgttttggggatcctcttcccctactgggttgtcttgtctagcctcaaaaggagatgtgcctagtctcactgcaagttgatatgccaaggttggttgatatccacgggaggcctctcctgttctggaggcaggagtggatgagggaggaaggagagagggaaggactgggaggagaggatggaggggaaactgtggtcaggatgtaaagttaattaattaattaattggcaagaatacttgttaattagttaatagactgtaactaattttatattcaaaatactcaaaactagttatactatcccaaattaagtcccaccctagtgactatgatgtgtacaaataccactccaagttcaacctcatccctgaacatctcagagatggttgaaaggctttggagtagcacgtcaacttgtgagatgttttattgctcttgatttctttacaaaggtgctgtcatcgaacacacttacagtcacaaagctaaagaaaccaaactggcatcctggaggctgaggcaaggggatagggagcttgaggccagcctgggctacagagagagacccggtttcaaaataacaggtcctgttatctacagaactcgctatctagaatacattctgttcttagtcgaaatgagacgcggaatctttcagcatgggcttaccacagtccttggcactctctagacacacctcgactgataatttctgcctttgacccgacacctgactttctcctcaatgtcttcctcagtgtacagatcagcctgacatctctaggtacctagcattagaaatttgtcaaacagacccaggctcagcttaagaccaccccagtgagccttagcctctccatcaggcacctgcc

SEQ ID NO: 2231 - DNA, 1200 bp, mus musculus
tatgttgctaattattttctttctgaaatccattttacagcctccatggttaaagtttattaccctctttcatatatagacatgtaaagatcagaaaaagataaagagaatgtgaaatttttaaaccttccttaatctggaaataatattgaaaaattccatactgaccctcactttgacactaattgaatttcagtttctacctgtaaatgcaaatagtaattggggtttgtgagttttgtttttttaaatcatgggcaagttgtttaaaaaaaaaaaaacaaaaagaaaaacaaccactggagcaaatactgaaatttgataataaatgcattaaatactaattaaaataaaaaacaaaaatgacatgcatgctctcttatcctattccaattggcattccaattttaactgtaaaatcaaagtgctttgtagtagtcacatcaaaaacatacagatgtactctggtatatttgccaagcattcttttaatgatcataaaatattttataagcgtaatgcctcggccatcagcatctattcgtcaattaaaagttgatattaactttgtttacaaaacaaggcgagcaacttgggagcatcaccatgacacctgtagaaggggtagagcattagggtgtcacagcgacccaggaagagcatgaactgatgcttgtaaagtttagagggagggacttcagcacagcagttcctggggctgctgggatagagtaccgaatgtgtacatttgcttcagcaaatgtcacggaaatttttcccgaataaaattactatgcttattaaattaatggttagtttgagaacaatattaaagcctgattagaatgaaagcctgagaggaaaaaaaatcttcaaataatagctcatattgagaagaatatatttccacccatggggtttaattttcataaacgaatttaaatgctaagcagccgagtttcatattaacttcttaaaaccaggggcagtttgaatcctccatttgcatgtctattaaataaaacaaactaagataaaggaatataaacacaacaaagatacaggaacaagaaacaaagcaaagtcatagctgctaggttcagaaaagatatttgtaacagctctctaatattattctgtttaatattatcctgaatttcaagtgaaagaagatacacatgtgatttccccattgcctga

SEQ ID NO: 2232 - DNA, 1000 bp, mus musculus
agttctctggtgattctggacctgcagtgaggcagaataatatgaccttggatcctttagagcggctactcatcttacagtaaaaaggaaacagagataggaaggggccactaaccaagaataacaataaaaggcctaaccagggttacctacttcctccaactaagactcacctctccgtttctaccgactctagcacagctccaccactgaggatgcagtgttcagtgcaggagccagtggagggtaacagctggcgggcagcaaactccagcaatcctcctgcctcagcctcccagtgctctgggtttacaggtatatacaaaatcacattggacttcttgtagggatgctagagatcatatttaatgcctcaataacaccccaagcacgtttactagctaagtcatttcctcacccccacctgttttgtattttatctaaacaccgttgcccaaatttacttgtaaaacatctgctttaagcatattgtttattttgaacttacccttgatagcactgtttattttaatgtcatctcgattttatagatgagttttatttgtttactgtacatgttatcattttctagtgatgatttatcacaaatcatcaagttaaaatgttaatgaaatagtactccatcttaaggtccattattgctagctttttaaattttaattaattaattaactaactttttgtttgtgagacagagtttccttttgaggccatggctgtcctgaaactcattttgtatatcaggctggcctcaaactaatggatccatctgcctctgcttcctgagttctgggatttttacttaagtatacttatctgttttagtctatgccaagtgtgtatgggggcttgcagaggccagaaaaaggcaatggttcctttagagctttgggggatgggacgctgtgtattgcttgccatctatgctgagaactccactcaggtgctctggaagagcaacaagcacttttactcagtg

SEQ ID NO: 2233 - DNA, 1400 bp, mus musculus
actggacatagtactaccagaggatccagcaacacctctcctgggcatatatccagaagatgttccaaccggtaagaaggacacatgctccactatgttcataacagccttatttataatagccagagctggaaagaacccagatgtccctcaacagagggatggatacagacaatgtggtacatttacacaatggagtactactcagctattaaaaagaatgaatttatgaaattcctaggcaaatggatggacctggagggcatcatcctgagtgaggtaacccaatcacaaaagaactcacacgatatgtactcactgataagtggatattagcccagaaacgtagactatccaagatacaagatataatttgcaaaacacatgaaattcaagaagaatgaagaccaaagtgtggacactttgccccttcttagaattgggaacaaaacacccatggaagaagttacagagacaaagtttggagctgagatgaaagaaaggaccatctagagactgccatatcagggggatccatcccataatcagcctccaaacgctgacaccattgcatacactagcaagattttgctgaaagcacccagatatagctgtctcttgtgagactatgctggggcctagcaaacacagaagtggatgctcacagtcagctattggatggatcacagggcccccaatggaggagctagagaaagtacccaaggagctaaaggggtctgcaaccctataggtggaacaacaatatgaactaaccagtacccctggagctcgtgtctctagctgcatatgtatcagaagatggccttgtctgccatcagtggaaagagaggcccgttggttgtggaaactttatatgcctcagtacaggggaatgccagggccaggaattgggagtgggtgggtaggggagtagggcgggtgggtatggcagacttttgggatagcattggaaatgtaaatgaaaaaatacctaattaaaaaaattaacattaaaaaaagaaagaaaatagacctttatgactgaaactgataccttttttaaaggatagtgcattttatgcttttatccaacacacaaatagtatattcttattttctcaatcttttatgtttttaaatattgttattaaacaaagcacttgtgaaatttcacgcaacagatatatcattatattatgacataaagatttttttaaataacatacatttatacatagcacaaaggaagtatagacactttgccaacacgaaagccattgtcatttccactacaaaattcttggagtaagaacattattatttagcaaaaagcttataaggaacacaatttaaaaggaagtaaagtatccatggctcaagaaagtttttgttacaataca

SEQ ID NO: 2234 - DNA, 1400 bp, mus musculus
tttggtgttcatgaggtcccccaacaactggaactgggctatccctgtgcctgttctgtatatctcactcccctaaatagaccactttatctggcctcagagggagagggtgagcagcgagttaatgtgtggggacaaagtgggtgttatgaggatgcctctgcttttcaagaaagaaggggaaggaggaatgtggaagagaacttgtgtgagggagtattgggaggagaagggctactaatattaggttcagaattaattcttcatagagttagaaagagcaatttccacattcaactggaataacaaaaaaacccatgatactgaaaactattctcaacaataaaaataacttctgggggaatcaccatccctgaacttaagctatactacagagcagtactaataaaaatttgcatggtattggtacagcgacagacaagtaaatcaatggaatacaattgaagacccaaaaatgaacccacacacctatggccacttgatctttgaaaaaggagctaaaaacatctagtgggaaaaaaagacagcattttcaacaaatggtgctggctcaactggcagttagcatgtagaagaatgcaaattgattcattcttatttccttgaacaaagctcaagtccaagttgatcaaggacctccagataaaaccagatacattaaaaataatagaaaggtaagtgggaaagaggggcaagaacttggtgcaaccagttccacagaccacggagcaagctccactcccacatccaggatcgtaggatcagggataaggaaaacagaacatctgttccaacactacctggtgtaactgggaccagtagcatccagggacacaggaatcccaatggcttgggttccttcaggtctgagcaggtctaccttgcaaaacctcgatggccaatccacagccccagaggaggctgcactcccaggtgctatagaaataccaaaaccccaggatcccatgagcttggtcacaccaatatctcagggtctcagatgcagtttgactcctaggaactcttacacacccagaatctcaggatcacaggatcctaggatcacaggttcagagaaacagctgcactctgaggagttctgactcaagcaggattataggaaggacagggtccagtcagatatagtgagggcagggagcactacagatatcatatggtaagaggcaagcttaagaacataagcaacaaaaacaaaggttacttggcatcatcagaacccaattcttccaccatagcaagtcccagatacaccatcacacccgaaaagcaagatatgtatctaaagtcacatctcatgatgatgatggaggactttaagaaggacataaataactccctcaagaaatacaggaaaacat

SEQ ID NO: 2235 - DNA, 1000 bp, mus musculus
aagatggggtagaaagattgtaggagccagaggatcagtgatttgctgtgggaatgtttctcctagtaatgacagaagttccacccataaagtctaaccttcctgaaaagtaagtgaaaaatacaaaaaaaaaatgtatataataaaatgaaagcatagtcaaatttatcacattacctaaattggcagaaatggagttattcaaaaccattccacagtaatatgcagaggaagactgtgtggctaggggagagggaggataatggggaggcaggatcaggtgtagggagagataggagagaggcccatagggccaggagaatgaatggaaatatgcagctgccaggatttgaagggaaggtggaaaggagaatatgagaaagtcccagatacatgggataggggaagctcccaggagtaatgcaggtgaccttggccaaggtgcctaacagttgggacatggaacctaaagagaccgcctcctgtagtcaggcaggacccccaatagagcaataaggacaacagcctacccacaaaactttcgaccccaaatttgtcctgtctaaaagaaatgcagggatggagcagagtctgaaagaaatgcccaccattaatcagttcaactcaaaacccatcccatgggcaagcaccagtctctgacattttaatgatactctgttatgcttgcaataggagcctatcataatggtcccctgagaagctctacctagcagcagactgatacagatgcagatacccacagcccaacattggacagaggttgggaaaaccaaaggaagagttgggtgaagtaaaaggccctgaaggagaagggaacaccaaatgaaggacaacagagtcaactaacttggacccctgggggctctcaaattggagctacctaccaagaacatacatgggttggaacgaggccttggcacatatgtagcagacatgtagctcagtctctaatgacatgtcatttatgtgaatgaatgaa

SEQ ID NO: 2236 - DNA, 1000 bp, mus musculus
tttattatcactatgctctttatgtctgtatctggaatacagtttttttccttagtatttgtgtttgttttgttttgttttgttttgttttctatcacagcatctagcctcccaagcatcagcatttaactgaggcttgtgagatattgaagaatgtgagtcattgggctatgcatagacagcctggtttccagttgaggctagatgttgaaccccagtaccgggtggtgataattcacctacatgggatggaaggagttttctcatgtctcctgtaaccctagcccctgtcgaagttaccatcccctaagcccctaaaagataagcatggttaatagtcacatctgcaatgtcccaagcttctgaccttcaggctaaactcctccccagttacctagcaacagtaaagataacacaataccataagaaggactgcttggccccacctagctttcttgctcttactcctcttaatctccttactctcctctcctctcctctcctctcctctcctctcctctcctctcactctcttcctctctccccccttattctctagcctttcttttctctttctcctttccccctttctctcctcttggccatggctggcctctctctctaccttctctctttccccctgcctttctacaataaagctctaaacccatagactatctcctagactcaaggcccactgcacttactctcacctgcatgggaacctcttttcctaagccctttctcccataaccccggggctacagggtgtagcccgggggtcccctggtgtctggggccgccccttgtccatgtcccatcaagtggcttagatgccccccccaacccagggctgagtggaaagcttctggcagccatcccacatcttcctgcccagagcataggaggaactctggcctgacatgggctatcctcactccccactctttcccctgcaccttttagttcccacagaagactagttaggaaacaagagctc

SEQ ID NO: 2237 - DNA, 1200 bp, mus musculus
gcagtgtatttcccttctcaaagtccatgaaacctagttttcttaaattttagtagagatgtgacatagctgtttactaattagtaatcacaaatctaggcatattaatgtcaattacactaaatttttttttcctgaagttgtggcttttaatacataaccaagaaaagtacttaactgtagattcacacatacccaattcacatattaagaattgacagaaaattttcaacacaagagatggtgaaattctggtctgtatacagggtgctatctgctgctatccgaggggtacaggctcagcctgagcagccagagttgcagctctctgaggggaatcttgagcaaggtagactgctgggcctcttccttggctagtgctgccccagagttggcggcaggtggcaatacacagtgagtagctaggggccaagatcggggccaacaagcaggaagtggctgtggtcaagcgcatgaacccagctggttgggcctggtagaggtccagcaatgaaagcttccagagagaaaattcttcactgcagtgttacagctcaataagacaggcactctcagatgatctttagtgaaataactccctttcagggtgggttgggacgtagaggcagatgccttctgttgcttggtgtgaggtgttacggatacctcatctacatgtggaagcacttctggtgtttgatctaatcagtggaggcatacatagccctggatgctctgccaccttattcaatactcaactattctcaactgtgtttttcccccactttttcacacagagcatcatgtctatagtgccagggctcttccaaactctacacctatacttgtaaactcctgctgcataacatcttcatttccattaaaaatgtagctcatgagctcaaaccaagaaatataaggttaatagaagttgccaagatttcttttctctctctctctctctctctctctctctctctctctctctctctctctctctctctctctctctcttcctttctctctctccctccctccctacttctttctttctttctttctctttctttcttccttccttccttccttccttccttccttccttccttccttcctttctttctctttctttctttctttctctctttctttgtaaggactaaagatgacagaggatgatgttcactgaaatgaggcctc

(The sequence listing continues in the following parts.)
